United States Patent Application Publication US 2007/0054278 A1 - sequence listing, part 120

SEQ ID NO: 202015 - DNA, 201 bp, Homo sapiens
ttgggaggctgaggcaagtggatcacttaagtccaggagttcaagaccagcctgggcaacatgggaaaaccccacctctacaataaattaaatgtatatayacacacacacacacacacacacacacacacacacacagacacacacacacatatacatacaaaaaattagctggatgtggttgcacacgcctgtagtcct

SEQ ID NO: 202016 - DNA, 201 bp, Homo sapiens
ctttgggaggctgaggcaagtggatcacttaagtccaggagttcaagaccagcctgggcaacatgggaaaaccccacctctacaataaattaaatgtatayatacacacacacacacacacacacacacacacacacacagacacacacacacatatacatacaaaaaattagctggatgtggttgcacacgcctgtagtc

SEQ ID NO: 202017 - DNA, 201 bp, Homo sapiens
caaaaccactcttttcttatctatatgcaggaagaaatgagtagtctcctacagtaataaccactcattgtaaatgctgtcattgtaaatgctgtcaactacctccatagctgcagtcctcaccagagactttcagctattgcacactcaaaggtcatgttctctcatagtacaaaataatccctggtatccccaaaagcc

SEQ ID NO: 202018 - DNA, 201 bp, Homo sapiens
cacagatcaggtggacttatgtgtgtatatacacataaatacatacatgcatatacaaatgcattgagacaatgaattattatatatgtgtgaaattccaytattaatagtatagctcccagctgaaaagcttaattataaattgcttctcaataagaatgtagtatctatttcttttcactgagtctagttttatttaaa

SEQ ID NO: 202019 - DNA, 201 bp, Homo sapiens
tcaaaaccactcttttcttatctatatgcaggaagaaatgagtagtctcctacagtaataaccactcattgtaaatgctgtcattgtaaatgctgtcaactacctccatagctgcagtcctcaccagagactttcagctattgcacactcaaaggtcatgttctctcatagtacaaaataatccctggtatccccaaaagc

SEQ ID NO: 202020 - DNA, 201 bp, Homo sapiens
agggtcaaaaccactcttttcttatctatatgcaggaagaaatgagtagtctcctacagtaataaccactcattgtaaatgctgtcattgtaaatgctgtcaactacctccatagctgcagtcctcaccagagactttcagctattgcacactcaaaggtcatgttctctcatagtacaaaataatccctggtatccccaa

SEQ ID NO: 202021 - DNA, 201 bp, Homo sapiens
aagggtcaaaaccactcttttcttatctatatgcaggaagaaatgagtagtctcctacagtaataaccactcattgtaaatgctgtcattgtaaatgctgtcaactacctccatagctgcagtcctcaccagagactttcagctattgcacactcaaaggtcatgttctctcatagtacaaaataatccctggtatcccca

SEQ ID NO: 202022 - DNA, 201 bp, Homo sapiens
taagggtcaaaaccactcttttcttatctatatgcaggaagaaatgagtagtctcctacagtaataaccactcattgtaaatgctgtcattgtaaatgctgtcaactacctccatagctgcagtcctcaccagagactttcagctattgcacactcaaaggtcatgttctctcatagtacaaaataatccctggtatcccc

SEQ ID NO: 202023 - DNA, 201 bp, Homo sapiens
tgattttggtacccacgacatagtttttgtcagactgtcattgcatcattcttgaaatatagctaataattgaaaagaaagagtatgcgttcttttagagwtacctagaaagagtggggaggatgtgaactttcttttgctcttacttattatagctctgttaatgctgttcctttcaaagaatattttctaaggtgtttt

SEQ ID NO: 202024 - DNA, 201 bp, Homo sapiens
ccctaagggtcaaaaccactcttttcttatctatatgcaggaagaaatgagtagtctcctacagtaataaccactcattgtaaatgctgtcattgtaaatgctgtcaactacctccatagctgcagtcctcaccagagactttcagctattgcacactcaaaggtcatgttctctcatagtacaaaataatccctggtatc

SEQ ID NO: 202025 - DNA, 201 bp, Homo sapiens
accctaagggtcaaaaccactcttttcttatctatatgcaggaagaaatgagtagtctcctacagtaataaccactcattgtaaatgctgtcattgtaaatgctgtcaactacctccatagctgcagtcctcaccagagactttcagctattgcacactcaaaggtcatgttctctcatagtacaaaataatccctggtat

SEQ ID NO: 202026 - DNA, 201 bp, Homo sapiens
agagccagatagaaaatattttaggctttgctggccataaaccataagaaagctgtcacaccaactcaaccttgctgttatagcacaaaaacagccatagrcaatatgtaaacaaatgggtatagctgtattctaataaaacttcatttataaaaatagattctgggccagatttggcccacagtttgaagtttgctgact

SEQ ID NO: 202027 - DNA, 201 bp, Homo sapiens
gttcaagcgattctcctgcctcagcctcccgagtagctgggattacaggcatgccaccacactcagctaacttatgtatttttagtagagacggggtttcrtcatgttggccaggctggtctcgaactcctgacctcaggtgatcgtcccgccttggcctcccaaagtgttgggattacaggcgtgagccaccttgcccag

SEQ ID NO: 202028 - DNA, 201 bp, Homo sapiens
tcaatatttaactgctgtcatcctagcaagggcatactgagtagatagcatcatcataatatgtgggctgagatgaggctgctccagacgagtctctctcmaagttaattgatggaaacttcccaccttcaagaatttttattaccttagcaatgctatgccaagactgttgaaacacagctgtgggtgctgtgcagacgc

SEQ ID NO: 202029 - DNA, 201 bp, Homo sapiens
ttcgccatgttggccaggctggtcttgaactcctgacctcaggtgatccgcccaccttggcctttcaaggtgctgtgattacaggcatgagccaccgtgcygagccactttttatacttcttttagtggttgctctggagtttgccatatacagttataagtaattaaagcccactttcaaataacactacaccatttcac

SEQ ID NO: 202030 - DNA, 201 bp, Homo sapiens
tgctataaatagccctttagtaatgtggtgataaggtatgtagttaggggaaactagtcctgtaattagacttcattcttttagtgaggctgtacttatgractgtgagcttcacatattgttctcagggttggttttgttttttcctccaccttaggtgggacaagaaggctagagtgagctggagatgggtattgccct

SEQ ID NO: 202031 - DNA, 201 bp, Homo sapiens
tgagaaagagcatatctatggagatagaaagcaagttagtagttgcctgaggctgggatgcctagtggtggggagactgtgcatgtgtaggggcaaagagyatatgggaactctctgtacttcttcagttttgctgtgaacctaaaactgctcttaaaaagtctattaaaaatatattttaaaatgtcctcaaataggaat

SEQ ID NO: 202032 - DNA, 201 bp, Homo sapiens
actgtgatgacctggtagagctcctggaggtgaaactcacaaaagtgtggggagcccctctgactgggtcttcctggagtttttgactatcagacttctamacctagtctccagcagtttgtcaattacagttcaggttttcttaccctggaattggttcctatggaggtgtctgatgggtatgttttataattctctgta

SEQ ID NO: 202033 - DNA, 201 bp, Homo sapiens
actcctgacctcgtgatccgccctccttggcctcccaaagtgctgagattataggcatgagctgctgtgcctggccaatttttgtatttttaatagaaacrgggtttccctgtgttgggtaggctggtctcaaactcctgaccttaagtgatccacccaccttggcctcccaaagtactgggactacaggcatgggagcca

SEQ ID NO: 202034 - DNA, 201 bp, Homo sapiens
agtggtgcaatcttgactcactgcagcctccacctcccaggttcaagcaattctcctgcctcagcctcccgagtagctgggattacaggtgcacaccaccrtgaccagctaatttttgtgggtttttttgtttgtttttcatttcgagacagagtcttactctgttgcccaggctggagtgcagtggcatgacctcggctc

SEQ ID NO: 202035 - DNA, 201 bp, Homo sapiens
gaggaggaaaattatggtggcagtaaaaagatcagtggttgtcgggttgtggacagtagtgagggagggatgaataggtgaagcagagtggtattttagggtggtgaaactattctgtacgcactgtaatggtgggtacatgacattatgcatttgttaaagtctgtagaactttacagcacaaaaagttaacctcagtgt

SEQ ID NO: 202036 - DNA, 201 bp, Homo sapiens
gaccctaagggtcaaaaccactcttttcttatctatatgcaggaagaaatgagtagtctcctacagtaataaccactcattgtaaatgctgtcattgtaaatgctgtcaactacctccatagctgcagtcctcaccagagactttcagctattgcacactcaaaggtcatgttctctcatagtacaaaataatccctggta

SEQ ID NO: 202037 - DNA, 201 bp, Homo sapiens
agaccctaagggtcaaaaccactcttttcttatctatatgcaggaagaaatgagtagtctcctacagtaataaccactcattgtaaatgctgtcattgtaaatgctgtcaactacctccatagctgcagtcctcaccagagactttcagctattgcacactcaaaggtcatgttctctcatagtacaaaataatccctggt

SEQ ID NO: 202038 - DNA, 201 bp, Homo sapiens
atagaccctaagggtcaaaaccactcttttcttatctatatgcaggaagaaatgagtagtctcctacagtaataaccactcattgtaaatgctgtcattgtaaatgctgtcaactacctccatagctgcagtcctcaccagagactttcagctattgcacactcaaaggtcatgttctctcatagtacaaaataatccctg

SEQ ID NO: 202039 - DNA, 201 bp, Homo sapiens
catagaccctaagggtcaaaaccactcttttcttatctatatgcaggaagaaatgagtagtctcctacagtaataaccactcattgtaaatgctgtcattgtaaatgctgtcaactacctccatagctgcagtcctcaccagagactttcagctattgcacactcaaaggtcatgttctctcatagtacaaaataatccct

SEQ ID NO: 202040 - DNA, 201 bp, Homo sapiens
ccatagaccctaagggtcaaaaccactcttttcttatctatatgcaggaagaaatgagtagtctcctacagtaataaccactcattgtaaatgctgtcattgtaaatgctgtcaactacctccatagctgcagtcctcaccagagactttcagctattgcacactcaaaggtcatgttctctcatagtacaaaataatccc

SEQ ID NO: 202041 - DNA, 201 bp, Homo sapiens; identical to SEQ ID NO: 35657

SEQ ID NO: 202042 - DNA, 201 bp, Homo sapiens
tccatagaccctaagggtcaaaaccactcttttcttatctatatgcaggaagaaatgagtagtctcctacagtaataaccactcattgtaaatgctgtcattgtaaatgctgtcaactacctccatagctgcagtcctcaccagagactttcagctattgcacactcaaaggtcatgttctctcatagtacaaaataatcc

SEQ ID NO: 202043 - DNA, 201 bp, Homo sapiens
atataatacaactatttgcatagccaacataggtagccttggtacctcattaggtaaagtggagttttttcctcattgttaatgaaaaggataaggttccstaaaagagagcaaaaaggaaaataagatattgcttttaaaattctcttctttaattcctgtttttcagaggatagctggctcacatattatgtttctaaa

SEQ ID NO: 202044 - DNA, 201 bp, Homo sapiens
aggcagaagactatagccttaattttatcagtaggttaggaagcattttcctatatttaatctctatattgctttcagtttttggctttcttgaagataamcaaaatgtcaattactagggaattctacaatctgagagtgataatttgaaatctgttataatgacataaagatttattttttgatatttttataggaaat

SEQ ID NO: 202045 - DNA, 201 bp, Homo sapiens
tttggccatcttggaacccttattttacattttcaacagtgcacagggttctgatttctccacatccttatcaatgattgttgttttctgtttttctgatrgtagccatcctaattagtatgtacctcattataattttgatttgtgttttcctaatgattagtgatactgaacttttttttttaaatgtgctttatgacc

SEQ ID NO: 202046 - DNA, 201 bp, Homo sapiens
tgtggtggcgcacgcctgtggtcccagatactcgggaggctgaggcaggaggattgcttaagcccaggaggtagaggttgcagtgaactatgtttgtgccrctgcactgtagcttgggagacagagtgagacgctgtttgaaaacaaaaaacaaaaacagctattctgactggtgtgagatggtatctcattggggttttg

SEQ ID NO: 202047 - DNA, 201 bp, Homo sapiens
tccaagccaggcatgggatataatctcctggtgtgctgtttgctaaggccattggaaaagtgcagtattagggtgggagtgacctgattttccaggtaccrtctgtcacggcttccctttgctaggaaagggaattcctcgaccccttgcgcttcccgggtgaagcactgccccaccctgctccgtgggctgcacccactg

SEQ ID NO: 202048 - DNA, 201 bp, Homo sapiens
tgagccaagattgcaccactgctctccagcctggaccacagagcaagactctctcagaaaaaataaaaaataaaaataaagaagacaaaaccacaagacasgatttaccaccctgtgctatgttaatgaggaaaaaaaggacaaaaccttgaggtcagcttttttaatatagccatttaaaaaataattttgaatacgaaa

SEQ ID NO: 202049 - DNA, 201 bp, Homo sapiens
gtggcgccgtcagggctcactgcaacctccacctccagagctcaagctatactctcacctcggtcccccctgagcagctgggaccacaggcgtgtgccacyacactcagttacttttttttttttgaaatggagtcttgctctgtcacccaggctggagtgcagtggcacgatcttggctcactgcaacttctgcctcctg

SEQ ID NO: 202050 - DNA, 201 bp, Homo sapiens
ccaacatcgctttcgttgggcagactcaaaaacgagtaggcaagttttatagtgaaaaaaatacgttaaggtatgatctaattggaggttgttggcatggrgaagttgaaggccagctatctaaaagcagagcatcttagggaattaattcaggaaacatagttggctttctgtggttggccttgagttgaaatcatgcag

SEQ ID NO: 202051 - DNA, 201 bp, Homo sapiens
acatgtcatattttgttacatagaatgtgtaatgatcaagtcagggtatttggggtacccatcttgagtatttatcatttttatatgttgggaacatttcraattctctgttttagctgctttgaaatacataatacattgttgctaactatagttacctactctgctatgccttctatctaacagtatttttgtacccat

SEQ ID NO: 202052 - DNA, 201 bp, Homo sapiens
tgaagcaagttggttcagatggtgtagctggcaaacaggacaagagctacgtagaggtagcaagactgaaacttgatcttggttggaatggaacaaaatgytcatagtattattattattattattattattattattattattattattattattttcgagtcagggtctcactttgtcacccaggctggagtgcagtgg

SEQ ID NO: 202053 - DNA, 201 bp, Homo sapiens
agccacttgggaggctgaggtaggagaatcacttgagcccaggagttcaaggttacagtgagctgtgtactacaacccggtcaacagagcgagaccctgtctcaaacaatgacaacaacaacccaaaaaaccaatttgaaatatcacagtgtaaaaattattatttttatttttatttttatttatttttttttttagaga

SEQ ID NO: 202054 - DNA, 201 bp, Homo sapiens
aacaacaaaagtttaagttataggaagtatcattttggtggttagtataactttattctgataggcctgaatattttttaatgttttttccccaaatctttcatagtgtgacatcaaaggcttgatatagtttggatatttgtcctgtccgaatttcatgttgaaatttgatccccagcgttggagggacctagtgggaga

SEQ ID NO: 202055 - DNA, 201 bp, Homo sapiens
  misc_feature (1)...(201): n = A,T,C or G
ttcggagagtcagtgagattttaaagacaaaacaaacaccttcatggtcctgttagaaaaggaaaacttctgttatatttctaattgtatctctggtagantagagtagggctaagtgcaaagtggcacaaatttgcaacagaaaaggaactattttacgttcttttgaataggtaatgcattcacatggttcaaaattgg

SEQ ID NO: 202056 - DNA, 201 bp, Homo sapiens
ctaggtaaggacttatgcccagtaactagcaattatttaactgggagtaaggagtaagcagatctgattaccagagaatttaagtattttgtcaaaaactrttttataaattctttccagtcaagtcagttcacaatccagtaagctgtgatcagagtcatggcattggtcataaacgttcttagcatgcaaggtaaaaca

SEQ ID NO: 202057 - DNA, 201 bp, Homo sapiens
atctttacctatgcctactattcagcatgcattcttagagtttttccatttaaattgtgttgtggtttttcttatttgtttgagacagggtttctcgttaygttgcccagtctagactcaaactcctgctctcaagtgatcctctcacctcagcctcccaagtagctgggactacagacacattccactgcatttaaatag

SEQ ID NO: 202058 - DNA, 201 bp, Homo sapiens
aatggaatgggcaggaaaggaactatgaaagtaatggaaaagaatcatgtgggtatttgcatgaaagacagacttacttgaaattctaggcacaggaatgrtttctcaggattgtgataacgctgttctctgaaagatttaggtgaaaaggcaaagaccttatttatgattagatatgttttatatcaaaatatgacagta

SEQ ID NO: 202059 - DNA, 201 bp, Homo sapiens
gcatgcaccaccacgctgggctaattttgtatttttagtagagatggggtttctccatgtcggtcagactggtctcgaactcccgacctcaggtgatccgyccacctcggcctcccaaagtgctgggattacaggtgtgagccaccacgcccagcctaaaatttatacttatttatttatttagagacagagtctcactct

SEQ ID NO: 202060 - DNA, 201 bp, Homo sapiens
tccagtttctcctcaggaaaatgcagctgataatagtgctatctcacaggattgctgccaggattaaagaagataataataatacatgtgatgtgctaagycatgttcaggacccattaatgtacaatgaatttttggttttttggtttcaaattagttgagattcaactgtaaaagacgtggttgaagtcctaaaggagt

SEQ ID NO: 202061 - DNA, 201 bp, Homo sapiens
ccaaaatatacaaaaaacacttacaattcaacaataagaaagtgaacaacccaattaaaaagggagcaaaagatctgaacagacacctcaataaagaaaaygtagagacagcaaataaacactaaaaagacgctcatcatttgtctttagggaattgcaggttaaaacaatgagataccattaaagtctgttagaatggct

SEQ ID NO: 202062 - DNA, 201 bp, Homo sapiens
cacttggacattttcacctttttgactattgtgaataatgccgctgtagaaattggtatacaaagtatctgttgagtccctgcttacagttcttttgggtrtatgcctaggagtggaattgccggatcatatggtaattctatgtctaatcgtttgaggaactgccaaacgttttcacagtggcatgcattgtgctttaac

SEQ ID NO: 202063 - DNA, 201 bp, Homo sapiens
aaactgacattggtacaatactatttattaactaaactactgaccttatttggatttcaccaggtttttgtttgtttgtttgttttttgagatggagcctsgctctgttaccaggctggagtgcagtggtgtggtcttagctcactgcaccctcgcctcctgggaacaagcgattctccttcctcagccatctgagcagct

SEQ ID NO: 202064 - DNA, 201 bp, Homo sapiens
gcttactgcagccttgaatttctgggctcaagcctgcttcagcttcctgagtagctagaactacaggtgcgaactaccatatctagctaattaaaaaaaawttttttaatggagaagggtcttactatattgcccaggctggtcttgaactcctggcctcaagcgatcctcccaccttagcctcccaaagtgttgggatta

SEQ ID NO: 202065 - DNA, 201 bp, Homo sapiens
aaatacattcttgtaaagttccacttagtttattctaatttcttaaaaatccagtatccctatttcgtatagaagaaaaatcaaactttgtttcttaaacrtttaacatctgacatttgcttctttgttcttttcaggttcgacatggtgcaggcactggacttagggaaattcttaaagctcatgggaaaagtggtggta

SEQ ID NO: 202066 - DNA, 201 bp, Homo sapiens
agaaaaacggcaaacttcaaatatctcatgtctcttgtaatttttaccagcttaactttatcttcctaggcaagacagccttgtaaactaattcagtcctrtagcagtgactgtagagaaggtgctcaataatagtgaaagctaacttttctctgtcctttcaatgcacaaatgtcatataattgcaacccacctgacttt

SEQ ID NO: 202067 - DNA, 201 bp, Homo sapiens
atgttaaaattttacaataatttggatgtaatacctttttttctgtgcaattaactgttgtttggagaagtaacagaatatagattcagtacaagtaagartttagaacttggtagtctacaaatgacgatttctgtatctataaagttaatgttcatacagttaccctatttgttttctgttgtattttaggagtgtaaa

SEQ ID NO: 202068 - DNA, 201 bp, Homo sapiens
actcatgggtgagagttcttggccctgcctcctgttaactggttaccttaggcagattatctctctgagcttctatacctattttactacatggttgtgakgtaagattatatatgtaagcagtcagaaaggatatctagtgtagattctcaataaatagtagccattgttattgcagatgatggaactaatacatcagat

SEQ ID NO: 202069 - DNA, 201 bp, Homo sapiens
acaaattgagaactaagttgtattagcttccagagttgtttttaagtaaagaaatgggattaatttttggagtactccaacaatatgatccagaaaaacgrcaaacttcaaatatctcatgtctcttgtaatttttaccagcttaactttatcttcctaggcaagacagccttgtaaactaattcagtcctatagcagtga

SEQ ID NO: 202070 - DNA, 201 bp, Homo sapiens
gtttattagcagattgttttgtatgagccacaaaactattgaataaaggggcttagcctttggctttatcagatgcagataaagcctaaatgatgtggatrtaagtttgagtgtatgcattttgaatatagcattaaaacaaaattcagtatcatagttgctttttaagtttttttttttaagagacagggtcttactctg

SEQ ID NO: 202071 - DNA, 201 bp, Homo sapiens
aatgccactggaattttggggattagggatcctctgcaatttagggattgcatcacatctatagatagttttgggtagtatggacattttaacaatattarttcttccagtccaagaacatttattttccatatttatgtccatttatttgtgtccccagcagtttctttcattaatgttctatagctttcagtgtataga

SEQ ID NO: 202072 - DNA, 201 bp, Homo sapiens
  misc_feature (1)...(201): n = A,T,C or G
tatttactagtagactaattgtagcacctttaatgcttgtcaatttctttaacctgatttgtcttcaagtctttgtacaattttcagaattcttttttctntgtgtttgttttgtgtttatttgatctaagaatgaaaactgtgagtacgtagtttttaataactttaaaaaaatcattttaggcaggcattccagaccct

SEQ ID NO: 202073 - DNA, 201 bp, Homo sapiens
agctagtttttttttttttttttggtagaggcagcgttctcattttgttgcccatgctggtcttgaactcctggcttcaagtgatcctcccaccttggccycccaaagtgctgggattagagatgtgagccaccatacctggccttaaagcattttgtaaaatcgatttagtaaaatcttgtgtttagtgtcttataccca

SEQ ID NO: 202074 - DNA, 201 bp, Homo sapiens
tcttaaaaacactgtatttagtgctttaaaaaagtcatgtggagggcaggggctgataggtactttgagctagttagtagaatttctctgatggacatttytatccaatgaaatgtcctgtgttatcagaaaagtagagttaagacagtgaagtagtgagaatgctcctccaatggatgatttatggcttgtttttttttt

SEQ ID NO: 202075 - DNA, 201 bp, Homo sapiens; identical to SEQ ID NO: 35662

SEQ ID NO: 202076 - DNA, 201 bp, Homo sapiens
ttcccagcttccctttctctttctctttgtctagaacttaaacatttattatccctagaacttgtggatttctgcaatttcagttaaaatttccaaatttytcttaaaaacactgtatttagtgctttaaaaaagtcatgtggagggcaggggctgataggtactttgagctagttagtagaatttctctgatggacattt

SEQ ID NO: 202077 - DNA, 201 bp, Homo sapiens
ccattgtctttgtatgtaatttgtggcatgtcagccacctcttaagcatgggccctcaatgtttgttaagtaaattagtgtgagattctgtgctgggtttyctgggaaataaaaaaaagaaatcctgtgtattagccttttttcacactcctgataaagacatacctgagactgggcaatttacaaaagaaagaggtttaa

SEQ ID NO: 202078 - DNA, 201 bp, Homo sapiens
tattcaggtgctactggtattgtattggagatattatataatatacactgtatacaattcattattctaaaatttgaaaaatttctgagtttcaaaacacwtctggctccagggaatttggatgaaagatcattgacctattgtgataataaaaatccactctcacttttaatttgtgttcctttttctgagctgcttcct

SEQ ID NO: 202079 - DNA, 201 bp, Homo sapiens
ctcagtctttcttacgttcttcttttaggcatttttacttaaatatctcactgtcacttcacactgaacacaacaaaaactggctttttttttttttttttgacaaagatactctttttattccagtcacaaatcttgtcagcattttctttcagaaagtctcatgtgtttaggccgggcgcagtggctcacgcctgtaat

SEQ ID NO: 202080 - DNA, 201 bp, Homo sapiens
attataattagcatttaattatatttttgcaagttagtccttacctgatgttactaaattcaatgcagtttgccttattttgtatttatgaaattcctgamtagctttggaatgccctcttttactaaaaacgttatacatattgagaggatatttttctcagatgatcatgtaagtatccctattgtggatttttaaagc

SEQ ID NO: 202081 - DNA, 201 bp, Homo sapiens
gagtttgaaaccaccctggacaacatggtgaaaccctgtctcaaaaaaaaaaaaaaaaaaaaccatatatatatatatatacacacacacacacacacacwccatatattcaaggtagaggaggaaagcatgagtgtgatgacgagcacaatgaaaaatataagaatgacccaaattgaacttctagagatgaaaaatgca

SEQ ID NO: 202082 - DNA, 201 bp, Homo sapiens
gtcgcccaggctggaatgcagtggcgcgatcttggctcactgcaagctctgcctcctgggttcacgccattctcctgcctcagcctcccaagtagctgggrctgtagatgcccaccaccacgcccggctaatttttttttgtatttttagtagagacagggtttcaccgtgttagccaggatggtctcgctctcctgacct

SEQ ID NO: 202083 - DNA, 201 bp, Homo sapiens
ttctttttgagacagagtcttgctctgtcgcccaggctggaatgcagtggcgcgatcttggctcactgcaagctctgcctcctgggttcacgccattctcytgcctcagcctcccaagtagctgggactgtagatgcccaccaccacgcccggctaatttttttttgtatttttagtagagacagggtttcaccgtgttag

SEQ ID NO: 202084 - DNA, 201 bp, Homo sapiens
taagggaaacaatttcaagcaccaaaatgttagcactatgccatttagttctaactacccttataaacgaagattttattgtaaaatctagactttagtarttgttttagcttgtggtcagtagttattctggcctaaagctcattgagaacaactaatgaatgaagattttagattccacataggttagtgtggaaaatg

SEQ ID NO: 202085 - DNA, 201 bp, Homo sapiens
tagcatactgtgggaatattgagatacatgagtcactgtttgcagtaattgaactgttctttttcggtttgctgttgcctaatttttatctcctctctgcygtcaattgtgatttctcacttttgttagtcttgtaatacctcctcccttgttctaaaatttttgctataaataagatcccaagattgttataaatccccg

SEQ ID NO: 202086 - DNA, 201 bp, Homo sapiens
acatataagtgagatcacatatttgtctttctgtgcctggctggtttcctttagcataatgtcatccaggtttattcatgttgtcacaaatgacaaaattwccttcttagaggctgaatagtatccagttatatatagatacactacagtttctttatccattcatcacatagacgaacacttgggttgattccaaatctc

SEQ ID NO: 202087 - DNA, 201 bp, Homo sapiens
aggcggattccttgagcttaggagtttgaaaccaccctggacaacatggtgaaaccctgtctcaaaaaaaaaaaaaaaaaaaaccatatatatatatatayacacacacacacacacacacaccatatattcaaggtagaggaggaaagcatgagtgtgatgacgagcacaatgaaaaatataagaatgacccaaattgaa

SEQ ID NO: 202088 - DNA, 201 bp, Homo sapiens
gataaagcttaaaagcaagccttaacgggttctaattaatttcagctaaactaaatagttcccagaaaaaaaagcctcaacatatttaaaggaataatttwaaaaaaatacagcacccaacaacataaaacttcagatgtttgacattcaccaaaaaattaccacgcccaaaaatatgtccagtaactgggggaaaataca

SEQ ID NO: 202089 - DNA, 201 bp, Homo sapiens
taccttttctctcatgagacaaatcaaatctctagtgcgacaaagcatttccaacttctgtaacttgttttatctaaatcattgtttaaagtcgtcattaygcaatgaaaactcatttaatttttattgttaatcttgtgatcccattatttgctttctgaaaagctgtacgaataaaccatctctgatgcttttatctgt

SEQ ID NO: 202090 - DNA, 201 bp, Homo sapiens
tgggaaaatgaagttgtagattatggtctttcagatattccatatgtatttactagtagactaattgtagcacctttaatgcttgtcaatttctttaaccwgatttgtcttcaagtctttgtacaattttcagaattcttttttctatgtgtttgttttgtgtttatttgatctaagaatgaaaactgtgagtacgtagtt

SEQ ID NO: 202091 - DNA, 201 bp, Homo sapiens
tgggttctcttcttttataaagttattttcccgagtgttgttattctgtaagttttcctttttgcctcctctccctacttttttgcctgtctggaattaartctcaaattttctttatagtctaggttccctgcctactatttctgggaactttccttttttaagctcatcaaatggccccttctttaagatttgcttatt

SEQ ID NO: 202092 - DNA, 201 bp, Homo sapiens
agccagatcatcagaagagtagcccttcagggtcatgtatgtagagtaagcagaagggaatgctgggcttagtgggcagattgaaagcactttatacaaayggtagctattaagaacttttcagggtctctgttttctaattttattcatttctaaataaaggttacagcaccaagtaaaaaggcacaatctaatagtggc

SEQ ID NO: 202093 - DNA, 201 bp, Homo sapiens
cagttctgattttgtacataaagaccattattaaaggaatttattgtgagcctttccttgtacttttctaagaattaaatggaaactgttccttgtcttartaagacatggcctctgggtcagaattttctctttgaaaatttttttatgttctaggtttgtatgtgtcagtctatcttactattaggatttgattcacta

SEQ ID NO: 202094 - DNA, 201 bp, Homo sapiens
tgattttggacctaaggtgtcccccaagtccccagtacaaagtatgatctttgtttttaaaaaaattatgttaaaaaaatgtgtgtgtgtgtgtgtgtgtrtatatatatatatatatatatatattatattttaacagatgattcagcagcatcaagagtggttggaagacttggttattagactcctttgtgtttttgc

SEQ ID NO: 202095 - DNA, 201 bp, Homo sapiens
tttgaagtattatttcattacctaaaaatgttcaaaataaattttgccttgtgcacagttctgattttgtacataaagaccattattaaaggaatttattktgagcctttccttgtacttttctaagaattaaatggaaactgttccttgtcttagtaagacatggcctctgggtcagaattttctctttgaaaatttttt

SEQ ID NO: 202096 - DNA, 201 bp, Homo sapiens
caccctgccgagaaattctttataattctggatattaaacccttatcagacatatgatttgcagatattttctcccattctataggttatctttttactttcttgataatgtcttccatggtttctgatgagaaatcaggtgttaatcttattgaagatcccttttacatgaccatttgcttttttcttgctgctttcaag

SEQ ID NO: 202097 - DNA, 201 bp, Homo sapiens
gtatttgtgttccttttcctagtaacttttgtagatttttaaaatttttcataattgctgttctgttggtcattcatatctcatggagatttgaaaagtcyggagatctgcataatgagacagagaactaggcttcttacatgtagcatgtaatagttaagttttgattggccatgcttcttcctcttattatgtgactta

SEQ ID NO: 202098 - DNA, 201 bp, Homo sapiens
tactagccttcatttctttatcatttaatatgactctttatcatttcctataccagaatgccattgtctttgtatgtaatttgtggcatgtcagccacctyttaagcatgggccctcaatgtttgttaagtaaattagtgtgagattctgtgctgggttttctgggaaataaaaaaaagaaatcctgtgtattagcctttt

SEQ ID NO: 202099 - DNA, 201 bp, Homo sapiens
attttggacctaaggtgtcccccaagtccccagtacaaagtatgatctttgtttttaaaaaaattatgttaaaaaaatgtgtgtgtgtgtgtgtgtgtgtrtatatatatatatatatatatattatattttaacagatgattcagcagcatcaagagtggttggaagacttggttattagactcctttgtgtttttgcat

SEQ ID NO: 202100 - DNA, 201 bp, Homo sapiens
aaaattagagtaagcaaatacttctaattattttaaagctttaaaataggatttatatcttcttatgaagacaagatagtcattataccttctgtgggaaragttatggcttcaaaaagccaaattttgcttcaagtaattataggaaattgaaaaaatttcccgaagtatggggaaactttacttcaagtaatttcttat

SEQ ID NO: 202101 - DNA, 201 bp, Homo sapiens
attaacatattccctaccttttagactggcccttgaatattgttagagataagtgtccttagagatagagaatagtgtccttagagacagagaagaaaaarttattatgcaactttaaaaaattcacagatgagaaaattactcttcttgtcctagtgagggcgttcagtgaatgttcatataaatgcttatatgtggttt

SEQ ID NO: 202102 - DNA, 201 bp, Homo sapiens
attatagtataattcattacttggattattggtgagcatatagaacttaaactctgatcatctagcacaacagcagtaacctgattattttatagattttyttgacaaagcagtgatgtatggtataaccagagagatgttgctggttagaggatggttccatatggaggatgatttcaactttgaggaaaaattgttgtt

SEQ ID NO: 202103 - DNA, 201 bp, Homo sapiens
ccagaagccttacctggtacaacggagaggagctgaatttgctttgacaactatagtaaagcattttggtggtgaaatggcagtgaagttgccacatctcygggatgctatggttggcccattgaggaatacaatcgacataaataattttggtatacacatatttttatgagtccagtttttaacaaattttaatgtcta

SEQ ID NO: 202104 - DNA, 201 bp, Homo sapiens
tggcagtgaagttgccacatctctgggatgctatggttggcccattgaggaatacaatcgacataaataattttggtatacacatatttttatgagtccartttttaacaaattttaatgtctattaattgaatatatccttataaaataaaaatgcctctatgcctctacctgtttattccagaccagctggtaagtttt

SEQ ID NO: 202105 - DNA, 201 bp, Homo sapiens
cttgaggtcaggagttcgaaattagcctgaccaactgaaaatacaaaatggtgaaacctcgtctctactaaaaatacaaaaatttgtggggcgtggtggcrcacacctgtaatcccagctactcaggaggctgatgcaggagaatcgcttgaacctgggagacagaggttgcagtgaaccaagatggtgccactgcactcc

SEQ ID NO: 202106 - DNA, 201 bp, Homo sapiens
agaagatgttttgcaggatcttccacctaaaattattcaagactattattgtactcttagtcctctccaggttaggaatctcgtgtttatcattgttagtkgtatgtttattagcagattgttttgtatgagccacaaaactattgaataaaggggcttagcctttggctttatcagatgcagataaagcctaaatgatgt

SEQ ID NO: 202107 - DNA, 201 bp, Homo sapiens
cttccttcatttgcaaaaattaatatttcttgaaaggaatacatttttgaagtaatgaaatgaagacttcttaaagtaggtacaataaggaaaagatgtcrtgtgaaaaaaatctgtggtgatttactggttgtggtgctgtaacataggcataaaatgcatttaagtaatcaatctagagaaagcgagctccaaagagaa

SEQ ID NO: 202108 - DNA, 201 bp, Homo sapiens
tgtttttaagtaaagaaatgggattaatttttggagtactccaacaatatgatccagaaaaacggcaaacttcaaatatctcatgtctcttgtaatttttrccagcttaactttatcttcctaggcaagacagccttgtaaactaattcagtcctatagcagtgactgtagagaaggtgctcaataatagtgaaagctaac

SEQ ID NO: 202109 - DNA, 201 bp, Homo sapiens
aggctttggtactagccttcatttctttatcatttaatatgactctttatcatttcctataccagaatgccattgtctttgtatgtaatttgtggcatgtyagccacctcttaagcatgggccctcaatgtttgttaagtaaattagtgtgagattctgtgctgggttttctgggaaataaaaaaaagaaatcctgtgtat

SEQ ID NO: 202110 - DNA, 201 bp, Homo sapiens
aagctgttaagtctatccagtggtttaaaatttttttttcagatactatatttttcagttttagaactatttatttatttatttatttatttatttatttwgagacaggatctcactctgttgcccaggctggagttcagtgatatgatcgtagctcagtgcacccttgaactcctgggctcaagcaatcctcccatcttg

SEQ ID NO: 202111 - DNA, 201 bp, Homo sapiens
tcccagtaatctctgcctctccctgccaccgagtaaccattattctaattcccccccgaagatacattacttttgcctgttctagaatttcatgtaaatgraatcatacactgtgctctttggtgtaaggatttttcttagaatggtatttttgaaactaatctgtgttatatatatatatatatcaataacttatttttt

SEQ ID NO: 202112 - DNA, 201 bp, Homo sapiens
gcctacagtatttagtaacatgctatacaggtttgtagcctaggagcaacaggctataccatacagtgtagctgtgttgtaggctttatgatctaggtttstgtaagcacactgtgatgttgacaacaaccacaaaatcactgaatgacacatttctcggaatgtactcatcattaaatggcatgtggctggtaaattgaa

SEQ ID NO: 202113 - DNA, 201 bp, Homo sapiens
aagtccaagatgaaaaatcaggtctgtagtggttctgagaagaaagtctaaaatttgttttttcagactaatttgtcactgtggtatgctgttcattagtyacacgtaaactaacatgtcatgaaatgtaaattaactaaagtttgcaggtggcgggggatgctatgaatgggaggtaacccagcagtatttggtttaaag

SEQ ID NO: 202114 - DNA, 201 bp, Homo sapiens
tactaaatttttttttcaagattgctttggtaattctgagtcccttgcatttgcatatacattttaggatcagcttttccatttctgcaaaaaaaaaaaarggggggggattttgataggaattgtgttgaatctcttgattaatttatagtatattactgttgtaacaatctgaagtctttgaatccatgaacacaaggt

SEQ ID NO: 202115 - DNA, 201 bp, Homo sapiens
atttacccctaagttctcctctaagagttttatagttttagctcttacttttgggttctgtggtcagttttttagttaatttttgtgtatgttaatgagctgggtgttcaacatcattcttttacatgtggctttccagttatcccaccaccgtttgttgaaaagactattatttctccattgaattgtctcaacaccttt

SEQ ID NO: 202116 - DNA, 201 bp, Homo sapiens
atacatgagaagctggagtcttgttacattctaagttatcagctgtttgaaaatggaggctttctgctttggtgtatcagtgttttcataatcctagtccrttttcttcccttaagcaactgctgtatttttactaaactctgtatgcgtattgaagtgtacctgtatggtaataagtggcaaattctacacatttaattt

SEQ ID NO: 202117 - DNA, 201 bp, Homo sapiens
tttcaaggccctgaactcgatcagtctctcagagcagacttgggttatagattagtgagaataccagagtatcaattctgctaccagacagagatacttaygtcaaatgatatgtccacatattcagtaggatagctgcaccagggaaagattacattaggaagaatgtctggtaagtatggtcttggagaagtcctagtt

SEQ ID NO: 202118 - DNA, 201 bp, Homo sapiens
ttaagagtagagattaggcatctcttgtagtcctagcataggtcacttttatttttatttttgcaattttagaaaaagtattattttaattgacagttaawtgtacattattatgggagtagtgtgatattttcatacacatatacaatgtaatgatcatattagcatattattcaccttaaacatttatcatttctttgt

SEQ ID NO: 202119 - DNA, 201 bp, Homo sapiens
agtaggaatgagaggtaaataagaggaagagatatgaaaaggtaaatatcatacaatggattgaaaagtagagtaagatgaataagagtctagttgagaggtcagtgagcaacataattggtattgcctggagacactggtaatagtataaataatagatatatgaccggtgtgcttgatatgagaacaaccttaagtaat

SEQ ID NO: 202120 - DNA, 201 bp, Homo sapiens
ttccttaagagtagagattaggcatctcttgtagtcctagcataggtcacttttatttttatttttgcaattttagaaaaagtattattttaattgacagwtaattgtacattattatgggagtagtgtgatattttcatacacatatacaatgtaatgatcatattagcatattattcaccttaaacatttatcatttct

SEQ ID NO: 202121 - DNA, 201 bp, Homo sapiens
gtcaaggattgaatatgagtattctcccgatattcatattaagagtattaagaataggagaactaaggaaagaagagtttggagaacagggtaatataatrtgcaacttaggaaggaaagtattgtaagaatggggtgcttgctggtcgcagctgtcaaagaagagtcaagaaaaattgaccttgtaaaaaactattggat

SEQ ID NO: 202122 - DNA, 201 bp, Homo sapiens
cccagcttccctttctctttctctttgtctagaacttaaacatttattatccctagaacttgtggatttctgcaatttcagttaaaatttccaaatttctyttaaaaacactgtatttagtgctttaaaaaagtcatgtggagggcaggggctgataggtactttgagctagttagtagaatttctctgatggacatttct

SEQ ID NO: 202123 - DNA, 201 bp, Homo sapiens
tataggtaaaattgtggaaaccaaaaatacccacatttgggagatactttttgttttggattactttctggtaggtaagtgtgagccattgaaagttttaragtaaggtagtgatttattcgggggcgttttaggaagttaatctggcaacaggatgacaaggcagttgggagtgtgaaactggcactctcagatggcctg

SEQ ID NO: 202124 - DNA, 201 bp, Homo sapiens
gaagagtaacaccaaattatttgcttattgctgttatagctttcctaattctgttaagattgtccctaattccctccagtgagaaaataagaacttttttyttcccagcttccctttctctttctctttgtctagaacttaaacatttattatccctagaacttgtggatttctgcaatttcagttaaaatttccaaattt

SEQ ID NO: 202125 - DNA, 201 bp, Homo sapiens
ccccagtacaaagtatgatctttgtttttaaaaaaattatgttaaaaaaatgtgtgtgtgtgtgtgtgtgtgtatatatatatatatatatatatattatyttttaacagatgattcagcagcatcaagagtggttggaagacttggttattagactcctttgtgtttttgcattagacagatttggagactttgtttctg

SEQ ID NO: 202126 - DNA, 201 bp, Homo sapiens
attttatatatatttactaattaacagttggggaatgcgggaatctcagtgaaaactcccagaatgttttgttaactagaccagtattttccaatgtgatwaggtaacagagtttatgagatgatcatgaatgaatatggttggttttattggcagaagggatgctttgtgtatttttttattttgatagagtttgatgtg

SEQ ID NO: 202127 - DNA, 201 bp, Homo sapiens
cagggaaggcatggtctcctcttagagcccccactcctagagaagagcggttctcattgtcactgggctctggagctttcttcagtagacttcggagttckccccgtggtcggcgggggtttgggctcgggttactcctgggtaaatcggttcaataatgcctttttcttgttaatagaccccttggcacgttagagctgt

SEQ ID NO: 202128 - DNA, 201 bp, Homo sapiens
ttgaaactaatctgtgttatatatatatatatatcaataacttattttttttattgcttgagttttatttcattgtattattataccacaactagtttaasccattctcccgtttatggacactttggctgttaccactttttgtctgttgtgaaaaaagtcactataaacgttcttctgcaagtctttgtggacatctgc

SEQ ID NO: 202129 - DNA, 201 bp, Homo sapiens
cagcctgggcaacagagaaagaccctgtctcagaaaaaaaaaattatatatatatgtgtgtgtgtgtgtatatatatatatatatatatatatacacacayatatatacacacacaaacacattaactgaagtcacaataattttttcatgtgctgtttctcattgttcagatggctctgcaacctggattgtattaggta

SEQ ID NO: 202130 - DNA, 201 bp, Homo sapiens
ttactttagtatccatgagatcaccactggagggaatttttggtgcctagataaattctgcagcatactaggggatgtgtgaagttttgatttttttttttcattgatgtcttcagtgtcttgccacaaggtttctttccttagtccttttctgctaaagcacagcttatcactggagtcagtaagactcatgggtgagag

SEQ ID NO: 202131 - DNA, 201 bp, Homo sapiens
tttggacctaaggtgtcccccaagtccccagtacaaagtatgatctttgtttttaaaaaaattatgttaaaaaaatgtgtgtgtgtgtgtgtgtgtgtatrtatatatatatatatatatattatattttaacagatgattcagcagcatcaagagtggttggaagacttggttattagactcctttgtgtttttgcatta

SEQ ID NO: 202132 - DNA, 201 bp, Homo sapiens
ggttgctttttttttaaaaaaaaaaatgcagattcctaggttctgcttagtcccaaagctgctgacttcaagagtagccatttttaacaagcatcccagcygagcgcggtgactcatgcctgtaatcccagcactttgggaggccaaggtgggtggattacttgaggtcaggagttcaagaccagcctggccaacatggtg

SEQ ID NO: 202133 - DNA, 201 bp, Homo sapiens
agccatcacccccagcctgatttacacatattttctactgctctataggttatcttttcatttcctctgtggtaagaagcataaaagttttaaatttttakgaagtccaatttttttgtattgttttgtttgtttctcaagtttttggtattatatgtaagaaacttgccaaattcaagctcatttacctctgttttcttc

SEQ ID NO: 202134 - DNA, 201 bp, Homo sapiens
ggaatctggcccagctaggaagcagaactggtgagtgcagtgttcacatgtggtctgcagcctctacttttaaaatctcagtggttgctttttttttaaawaaaaaaatgcagattcctaggttctgcttagtcccaaagctgctgacttcaagagtagccatttttaacaagcatcccagccgagcgcggtgactcatgc

SEQ ID NO: 202135 - DNA, 201 bp, Homo sapiens
tggaatctggcccagctaggaagcagaactggtgagtgcagtgttcacatgtggtctgcagcctctacttttaaaatctcagtggttgctttttttttaawaaaaaaaatgcagattcctaggttctgcttagtcccaaagctgctgacttcaagagtagccatttttaacaagcatcccagccgagcgcggtgactcatg

SEQ ID NO: 202136 - DNA, 201 bp, Homo sapiens
agaaaaaactaccttaattaccaataaaggacaacacaggttttccaggcctattcctccctgttaatttatttttaataatttttttttaatagagatgrggtctctctgtgttggccagggtggtcttaaactcctgcctcaagcattcctcccgcattggcctcccaaatgctgggattacaagcatgagccacctca

SEQ ID NO: 202137 - DNA, 201 bp, Homo sapiens
aaaacactatacgatactttctttcctctctcttgctgtggatagtgctgaatgaaggtagaggataagggagtgaaagcaatgtggatttatatctcaaraggattttagaatagctgttttcttgcttgatttttaaaaaattccatataaccaaaagcagtctgaaatgtatatgtgtaattcttcttagatagttga

SEQ ID NO: 202138 - DNA, 201 bp, Homo sapiens
tagctttttaatattggccattttctaattttaacaatcatcggaatatttttttctttttaaagctatctcctataggaaggcaattagaataattttttgaagtttataatatagtaaattctgtgatagcatggccatttataatgcaaaattgatatgatgtattttatgtggtcaaattttttagaccctgcttaa

SEQ ID NO: 202139 - DNA, 201 bp, Homo sapiens
gttggaatctggcccagctaggaagcagaactggtgagtgcagtgttcacatgtggtctgcagcctctacttttaaaatctcagtggttgctttttttttwaaaaaaaaaatgcagattcctaggttctgcttagtcccaaagctgctgacttcaagagtagccatttttaacaagcatcccagccgagcgcggtgactca

SEQ ID NO: 202140 - DNA, 201 bp, Homo sapiens
acttcatctgagctatttgcaccaatacatattcctatcagtcataatatttatattttgtaattggttaattgttctcttacttgctggattaacataawctctgagagaaggaaatgtgtctttgatttttccatgctcagaatgcctggctcctagtgggtgttcagtacatttaaaaaaaaaatgaatgaatgattt

SEQ ID NO: 202141 - DNA, 201 bp, Homo sapiens
tgcagtgagctgagacggtggtactgcactccagcctgggcaacagagaaagaccctgtctcagaaaaaaaaaattatatatatatgtgtgtgtgtgtgtrtatatatatatatatatatatatacacacatatatatacacacacaaacacattaactgaagtcacaataattttttcatgtgctgtttctcattgttca

SEQ ID NO: 202142 - DNA, 201 bp, Homo sapiens
accactgcaccccagcctaggtggcagagtgagactccatctcaaaaataacaacaaaaaattaataggctgggcatggtggctcatgcctataatcccarcattttgggaggccgaggcgggcagatggaatgagctcaggagtttgagaccagcctgggcaacatggtgaaaccctatctcttcaaaaaatataaaatt

SEQ ID NO: 202143 - DNA, 201 bp, Homo sapiens
aacccaggaggcggagcttgcagtgaaccaagatcacgccactgcgctccagcctgggtgacagagtgagacttggtctcaaaaaaaaaaagaaagtctcrtgtttaatctcttctctatttccattatcagagcccagtcagatcttagtactttatatctaggtcctgactcatctctagggctccaggcagcctctgg

SEQ ID NO: 202144 - DNA, 201 bp, Homo sapiens
cctccaatggatgatttatggcttgtttttttttttttttttttcactttcattttaggttcatgggtacatgtacaggtttgctatgtaggtaaacttawgtcacgggggtttgttgtaagattattttgccacctaggtactaaagcttaataaccagtagttattttttctgatcctttccctccttcccaccctcaa

SEQ ID NO: 202145 - DNA, 201 bp, Homo sapiens
ttagccctctaatcacatagttagttcctctggcaaccagcccccttctgaagctatcttggggcctcccaagagtcacttcgttagcacaaactagattrtggttatgaataatccctatcactcaggaagttctttgggttttaggagctctgtgccaggagctggggatgaagatcaaatacgtttctttttaagacc

SEQ ID NO: 202146 - DNA, 201 bp, Homo sapiens
tatggaaattttcttttcctttggctgtggatcacaatagggtttcagagcaaattagtaaaattagtgaaagaacccagtgtgattcatcaccaacttasaggttctctcctgatcttcttccctgcagtctgagagcatttgatatgctggtagaaatgatgaattggcctgcaggcaagaatcaggtgtttgtggtaa

SEQ ID NO: 202147 - DNA, 201 bp, Homo sapiens
gttaacatgtgaaagaattggcaagcttggcatcttgaggagcatgaagtaggtactcttaagaaaaaccatggccaggcacagtggctcactcctgtaaycccaggactttgggaggccagtgcaggcagatcacttgaggtcaggagtttgagaccagcctggctgacacagtgaaaccctgtctttactaaaaataca

SEQ ID NO: 202148 - DNA, 201 bp, Homo sapiens
ttccggcgcgctgacgctcagttgtgcgtgccgacgcccgcgtcagcaaagagcggagctgagggtacccggtttgaagtcgtgcgggtcggaggactgcygcctccgctaccgtcttggacccctgcttaccggccgccgcggggacgagctcgggtaggcggcagggcagatgcccgagggcctgcgctggaacgcccc

SEQ ID NO: 202149 - DNA, 201 bp, Homo sapiens
accgtgcccagcccaaagccaaacctttcaggaagcttttcttaatactaccacctatttcctttttttaaattttgggattttttttttaatggagaaargagcagggaattgtatgaaacagcattcatttatgtttacaccatccataattgacatttcttataattttgtcttgtttcaagtttttgtcataaaaaa

SEQ ID NO: 202150 - DNA, 201 bp, Homo sapiens
attgtacctactgcactccagcgtgggtatcagagtgagagaccttgtcctttgtgggggggggggaagaagactaggtttttaattcagattttagctgycacgcatttcatgtactggctctatcttcaggctaaaagctacaaaaaggggaaacttttgttttttgtagcttttcgcttttgtagcttttagctttta

SEQ ID NO: 202151 - DNA, 201 bp, Homo sapiens
tttcaggagtcttaattctattccattgatgtctattcttacgcgagtaccacattgtctaaattattgttgcattgtagtaagttctgaaatcaagatgyatgagcctccaactttgttcctgtttttcaagattgttttggttattctgagtctcttgcatttccatatgaattttaggaccagtctgtcaatgtttgc

SEQ ID NO: 202152 - DNA, 201 bp, Homo sapiens
attacagtatcacacagaatagtttaactgccctaaaaatcctgtgttctacccatgtatcctttccttctctggctgtttttaataattataaagtagawtttagtagagtaacgatgtttgtagcctgagaagacaactacagtttatattacatgtattggtcataaatatagggggaaaatcttcctctatagatgt

SEQ ID NO: 202153 - DNA, 201 bp, Homo sapiens
tgtgtaagtacactctataatgttcacagaatgacagaattgcctgatgtatttctcagaatgtatccattgttaagcagtgcatgactataaatattggratttagctgtcatgtggcaaatttaaattttaaaatgtttaagcacagtaactgtagaatagaaaattaatttattttcatgtactgttttacaggatgt

SEQ ID NO: 202154 - DNA, 201 bp, Homo sapiens
ccatgctcactgtataacagattggaacctccctttctgtctcaaaaagcaagctcaaaggccttttgaagttttctaagattgtcttttttttttttccyttctttaactgccaataacaaagcattcgtgattctgctgagagacctgaactctctgtccaactcttttctccctctgctcccttccttgcttttcctg

SEQ ID NO: 202155 - DNA, 201 bp, Homo sapiens
aaaaatttagtgtcaccaattttcctgtcctgatatatgaatctcagctcagcgaattaacatattccctaccttttagactggcccttgaatattgttasagataagtgtccttagagatagagaatagtgtccttagagacagagaagaaaaaattattatgcaactttaaaaaattcacagatgagaaaattactctt

SEQ ID NO: 202156 - DNA, 201 bp, Homo sapiens
taaatcaaagaaactttctactggctttgtttattccattgactggaattctggaaatttaactgtctgcacttgctgtgagagttacttgttactgcctsttagcagtttgtcaaagctgtatctaaaagtaattgagccatgctccattgcagctgacacccctgcttggcctctggaaagaagcaaagctcatctgtt

SEQ ID NO: 202157 - DNA, 201 bp, Homo sapiens
  misc_feature (1)...(201): n = A,T,C or G
cttacatagaagtttgccccatgaaatattttcattggctaaatatctgcaaatgcatttttttaattgtgtaattcaccccaaataaacccctttttaantatagaactacataaatataatcgaatagattatttgcttagcatatgaaaagggtgtgactgtaatagaaaagcactctgaagagcatgaaagaaattt

SEQ ID NO: 202158 - DNA, 201 bp, Homo sapiens
ttggaatctggcccagctaggaagcagaactggtgagtgcagtgttcacatgtggtctgcagcctctacttttaaaatctcagtggttgctttttttttawaaaaaaaaatgcagattcctaggttctgcttagtcccaaagctgctgacttcaagagtagccatttttaacaagcatcccagccgagcgcggtgactcat

SEQ ID NO: 202159 - DNA, 201 bp, Homo sapiens
tgcagcctgggtgacagagtgagactctgtctcaaaaaaaaaaaaaaaaaagcttaaaaatataattaaaagggaaaaaagcctctttaggctgaattatyaagatttattgtgcttcaatttgaagttatatggaaacatcatagtaatttaaagtatgttattgcttttacttggttcagacatcggaagaagtttttt

SEQ ID NO: 202160 - DNA, 201 bp, Homo sapiens
cccaggaggtggaggttgcagtgagctgagacggtggtactgcactccagcctgggcaacagagaaagaccctgtctcagaaaaaaaaaattatatatatrtgtgtgtgtgtgtgtatatatatatatatatatatatatacacacatatatatacacacacaaacacattaactgaagtcacaataattttttcatgtgc

SEQ ID NO: 202161 - DNA, 201 bp, Homo sapiens
taccgtttcttttgagaagaatgaaagaagatgttttgcaggatcttccacctaaaattattcaagactattattgtactcttagtcctctccaggttagraatctcgtgtttatcattgttagtggtatgtttattagcagattgttttgtatgagccacaaaactattgaataaaggggcttagcctttggctttatca

SEQ ID NO: 202162 - DNA, 201 bp, Homo sapiens
tccttacagactccctagatgactgatgaaatagtgtgtgggagaagcccatgggagttgggtgaagggggttgctaggtaccgtagtatggggcatctgmtttttattttataatctattcaatgtgaggaaatttttttttaaataaaactgccttgagagaatacaagtgacattttacatttttgcaaatatagaaa

SEQ ID NO: 202163 - DNA, 201 bp, Homo sapiens
tgcactccagcctgggcaacagagaaagaccctgtctcagaaaaaaaaaattatatatatatgtgtgtgtgtgtgtatatatatatatatatatatatatwcacacatatatatacacacacaaacacattaactgaagtcacaataattttttcatgtgctgtttctcattgttcagatggctctgcaacctggattgta

SEQ ID NO: 202164 - DNA, 201 bp, Homo sapiens
ttcctatagtgaattagagatatcacaatttgttttcattaatgagggctgatttaaattactgctgttattggcctttgctggttatgtgttttgaacarttgaaaataaatatacttaaagcttctcccacgggggccattttacaggttcagctctatgaagattttgctaagtctcgtgccaagtgtgatgttgatg

SEQ ID NO: 202165 - DNA, 201 bp, Homo sapiens
actgagaccccatctctaaaaaataaaaataaaaaaagtgtgagtctactaaatttttttttcaagattgctttggtaattctgagtcccttgcatttgcrtatacattttaggatcagcttttccatttctgcaaaaaaaaaaaaaggggggggattttgataggaattgtgttgaatctcttgattaatttatagtata

SEQ ID NO: 202166 - DNA, 201 bp, Homo sapiens
aagagcagcattggaaactctgtttacgttattatcaacacaggaccaggtaagaactgataactatagcagtcttgaaacttatataaattaattttatmaaataaacctggtctttagcttacccttgctgtatatccaaagatcaggacaatgttgggcctagtggtatggtaaccatgtagatgaatataatcactg

SEQ ID NO: 202167 - DNA, 201 bp, Homo sapiens
agtgagaaaaggaaactcacctgaattactagtagctgtgtcctggtttcagtttctaacttctcaagctatacctcaataattctaaagtaatttttcarggtcagacttggctatagctcagtgtgtcactgcgttgtaaagattgatgcttctgtttccttgaaattatcctggttatctttagtaattttttggttt

SEQ ID NO: 202168 - DNA, 201 bp, Homo sapiens
gaagaaagtctaaaatttgttttttcagactaatttgtcactgtggtatgctgttcattagttacacgtaaactaacatgtcatgaaatgtaaattaactraagtttgcaggtggcgggggatgctatgaatgggaggtaacccagcagtatttggtttaaagctacaatatgagtattttttctcctttaagtgaatatg

SEQ ID NO: 202169 - DNA, 201 bp, Homo sapiens
tgcccagctaactttatttattttgtgtggagatgggatctccctctgtttaccccgggctggtcttaaactcctgggctcaagcagtcctcctgcctcartctcccaaagtgctgggattacaggggtgaaccaccatgactggcctgtattttgattttgtttcctgtgcttttggagtcatatccaaaaaatttgtcc

SEQ ID NO: 202170 - DNA, 201 bp, Homo sapiens
tgtcacttatttgagattagatggcagcatacctcctggtcagaggcattccattgtttcccggtaagtggcttctaagactcttattcataaataaatayattattacttacatagaagtttgccccatgaaatattttcattggctaaatatctgcaaatgcatttttttaattgtgtaattcaccccaaataaacccc

SEQ ID NO: 202171 - DNA, 201 bp, Homo sapiens
gaattttgacagatttgatatatgtagattgttacaacatggtgcatcactcctgggatctgctggtgccgaatttgaagtccaagatgaaaaatcaggtstgtagtggttctgagaagaaagtctaaaatttgttttttcagactaatttgtcactgtggtatgctgttcattagttacacgtaaactaacatgtcatga

SEQ ID NO: 202172 - DNA, 201 bp, Homo sapiens
aattatgggagctacaagatgagatttggatggggacacagagccaaaccatatcatcctacatgtttcttaccttggaaaagtttacagtatggttgctwtaagactattatattacatggtaagtttaataacctctacaaagagttaaataacagaagaccagtatgtgagagatgtcagacagcagcattaaaagat

SEQ ID NO: 202173 - DNA, 201 bp, Homo sapiens
ttaagactattatattacatggtaagtttaataacctctacaaagagttaaataacagaagaccagtatgtgagagatgtcagacagcagcattaaaagayaaactaagctgaaagatcaggaagattaggtgatgtggttaaaaaaactagtattccctcacttctttttgattcatatttagtatctttgatatgtact

SEQ ID NO: 202174 - DNA, 201 bp, Homo sapiens
gctaccctcagggcatttggctggtgggagagcagaggtgacctgacatagcattgggataaaaggatctgcaaaaaggagagtcaagaggaactgtgtgkctgtgggacagtatcagcaattaggttagagaggagtctaaggtctttgggcaggagttctaagtgaagctgggtagcagaggaccaaaggaaaagttta

SEQ ID NO: 202175 - DNA, 201 bp, Homo sapiens
caggttttccaggcctattcctccctgttaatttatttttaataatttttttttaatagagatggggtctctctgtgttggccagggtggtcttaaactcytgcctcaagcattcctcccgcattggcctcccaaatgctgggattacaagcatgagccacctcacctggcccttattgttaatttcaatccattataaga

SEQ ID NO: 202176 - DNA, 201 bp, Homo sapiens
cttgataatgtcttccatggtttctgatgagaaatcaggtgttaatcttattgaagatcccttttacatgaccatttgcttttttcttgctgctttcaagrttctttgtctttaaacagtttataattcatgtcgatgtggatttctttattttacttggaactgcatactctatcattttgctgatgtcaccctcttggt

SEQ ID NO: 202177 - DNA, 201 bp, Homo sapiens
ttttcatattttggcagccgaacttaatgtgttcatacttgttttctaaatgtaattttaaaggaatttaccaagatggagtggataacctgtaattcctrtagtgaattagagatatcacaatttgttttcattaatgagggctgatttaaattactgctgttattggcctttgctggttatgtgttttgaacaattgaa

SEQ ID NO: 202178 - DNA, 201 bp, Homo sapiens
acattatcagagatcaaaattatatatattttggttttgccatattcttatttcatagatctatgaagaagtctaggtaattgtatttcaaagaaaagccyggctcagcgtggtgggtcacacctgtaatcccagcactttgggaggacgagacgggcagttcacctgagatcgggaggtcgagaccagcctggccaacat

SEQ ID NO: 202179 - DNA, 201 bp, Homo sapiens
tctaatagtggcttcatatgatgttgtgaggaatgacatagatttctttaggtaagaattaattttttttttagaaaaattaatatcaaatttgaagactsttaatattttcccactttaaagattcttcatatagttcctgacatacagcaaaagttgtaaaattttctatttattctcccttagaaatattaaatttaa

SEQ ID NO: 202180 - DNA, 201 bp, Homo sapiens
ttgtatggaaaatgagaactgccctctgtaggcaggtcttaaagaccagtgttttattcatatgactcagtcctatgtgctttttgtatgtgtgattgttacaagattttgggaaaacaaattatttgaaatgtagtagacttacagctttggtgcagcatagatcttgaaaaatatgtttatgaactagaagaagaaagg

SEQ ID NO: 202181 - DNA, 201 bp, Homo sapiens
gaatttcatgtaaatggaatcatacactgtgctctttggtgtaaggatttttcttagaatggtatttttgaaactaatctgtgttatatatatatatatatcaataacttattttttttattgcttgagttttatttcattgtattattataccacaactagtttaagccattctcccgtttatggacactttggctgtta

SEQ ID NO: 202182 - DNA, 201 bp, Homo sapiens
agaatttcatgtaaatggaatcatacactgtgctctttggtgtaaggatttttcttagaatggtatttttgaaactaatctgtgttatatatatatatatatcaataacttattttttttattgcttgagttttatttcattgtattattataccacaactagtttaagccattctcccgtttatggacactttggctgtt

SEQ ID NO: 202183 - DNA, 201 bp, Homo sapiens
tccccagtacaaagtatgatctttgtttttaaaaaaattatgttaaaaaaatgtgtgtgtgtgtgtgtgtgtgtatatatatatatatatatatatattatattttaacagatgattcagcagcatcaagagtggttggaagacttggttattagactcctttgtgtttttgcattagacagatttggagactttgtttct

SEQ ID NO: 202184 - DNA, 201 bp, Homo sapiens
gtccccagtacaaagtatgatctttgtttttaaaaaaattatgttaaaaaaatgtgtgtgtgtgtgtgtgtgtgtatatatatatatatatatatatattatattttaacagatgattcagcagcatcaagagtggttggaagacttggttattagactcctttgtgtttttgcattagacagatttggagactttgtttc

SEQ ID NO: 202185 - DNA, 201 bp, Homo sapiens
agtccccagtacaaagtatgatctttgtttttaaaaaaattatgttaaaaaaatgtgtgtgtgtgtgtgtgtgtgtatatatatatatatatatatatattatattttaacagatgattcagcagcatcaagagtggttggaagacttggttattagactcctttgtgtttttgcattagacagatttggagactttgttt

SEQ ID NO: 202186 - DNA, 201 bp, Homo sapiens
aagtccccagtacaaagtatgatctttgtttttaaaaaaattatgttaaaaaaatgtgtgtgtgtgtgtgtgtgtgtatatatatatatatatatatatawtatattttaacagatgattcagcagcatcaagagtggttggaagacttggttattagactcctttgtgtttttgcattagacagatttggagactttgtt

SEQ ID NO: 202187 - DNA, 201 bp, Homo sapiens
cccaagtccccagtacaaagtatgatctttgtttttaaaaaaattatgttaaaaaaatgtgtgtgtgtgtgtgtgtgtgtatatatatatatatatatatatattatattttaacagatgattcagcagcatcaagagtggttggaagacttggttattagactcctttgtgtttttgcattagacagatttggagacttt

SEQ ID NO: 202188 - DNA, 201 bp, Homo sapiens
catttactttggtggaactcaaaatttcaaactcattcttctttgctctggacaatagctcaaatctcaattttagctttttagattttagctttagctgbattgtctggagtctgctctgggcatgcatagttcataggtcaaccagagatttgggctgagtttacagagaattttggccctcttctctctggctctctt

SEQ ID NO: 202189 - DNA, 201 bp, Homo sapiens
gacatttactttggtggaactcaaaatttcaaactcattcttctttgctctggacaatagctcaaatctcaattttagctttttagattttagctttagcwgcattgtctggagtctgctctgggcatgcatagttcataggtcaaccagagatttgggctgagtttacagagaattttggccctcttctctctggctctc

SEQ ID NO: 202190 - DNA, 201 bp, Homo sapiens
ctaactccttgtgtcacatgtccagtaccaacacaaagtggccaggaaaattctaaaggtatatacctaaacttttatttggggtagagaaataacctttkaaatttgtttttgtttacttatgggtataatttaagcacaaatccagttcatgttagtgttttttcccattctgagagaaaaggcttgattataacaaaa

SEQ ID NO: 202191 - DNA, 201 bp, Homo sapiens
ctgaaagatatttcacagagctcaaaagatggatgaagatcaaatcagtagaaactctggttcaaaaatactgaagattacaggagaactgcgcttactargctcactatatcctgctggtgattgtcaagatcctggtgggaaatttggaattaatctttgagtgacactcagttatattcctttacttacaatgtgact

SEQ ID NO: 202192 - DNA, 201 bp, Homo sapiens
gatcatgtaagtatccctattgtggatttttaaagcagcattttcatttgtgctctttaatttttattaacagtttctgttataggacttaagaatggacyaattttatttttgttatctacttttaggtttaataatgatccatctatagacgttctgttacttaccactcacgttggtggcctgggacttaatttgaca

SEQ ID NO: 202193 - DNA, 201 bp, Homo sapiens
aagttaagaagcatatgtgtatctgttgggagttggaataacagagaaaagggaggaaaagactgaaattatggtacagtcatacaacaaaagagtgtgarcctgtcaaaaaagaatgtgatcgatgtatatatactgaaatgtatagacttggtcttcttctgaggctgagactataggtacttattttaatttcaaaag

SEQ ID NO: 202194 - DNA, 201 bp, Homo sapiens
agcagacatttactttggtggaactcaaaatttcaaactcattcttctttgctctggacaatagctcaaatctcaattttagctttttagattttagctttagctgcattgtctggagtctgctctgggcatgcatagttcataggtcaaccagagatttgggctgagtttacagagaattttggccctcttctctctggc

SEQ ID NO: 202195 - DNA, 201 bp, Homo sapiens
aaacattctgctgacatatttagctggggagtactgtttggattctcttacgcaattgtcagagagtattcattgtactaggaactgagaccacttccccrgaaaaatccacatgtacagacttttttcctactaattatcagttttgaatgagggctgaggatctccaaaggggagagcattccaggcagaagaaacaag

SEQ ID NO: 202196 - DNA, 201 bp, Homo sapiens
atattagtgttttaacaatatttactcttatgatgcatgaacattttcatttagtttttaatttttttcattttatacttgacagaatacaagttgctatygtaaatagaattgttttcttaatttcatatttgggcttttgtttctttatatcttttttctctttgttctttagattgggtactttgtattgctttatct

SEQ ID NO: 202197 - DNA, 201 bp, Homo sapiens
taaaacaagagggctctgtggctttaatctgtgtctgcttgatttatagaaacattctgctgacatatttagctggggagtactgtttggattctcttackcaattgtcagagagtattcattgtactaggaactgagaccacttccccggaaaaatccacatgtacagacttttttcctactaattatcagttttgaatg

SEQ ID NO: 202198 - DNA, 201 bp, Homo sapiens
tatgatgttgtgaggaatgacatagatttctttaggtaagaattaattttttttttagaaaaattaatatcaaatttgaagactcttaatattttcccackttaaagattcttcatatagttcctgacatacagcaaaagttgtaaaattttctatttattctcccttagaaatattaaatttaactactgcattcttgat

SEQ ID NO: 202199 - DNA, 201 bp, Homo sapiens
cccctcatatatattaatgacaccatatatgattagtatacatactggtctgggtttcctttgcagctggttgtgtagattatttcccccaatagggcttygcctggaatgagaggaccaattttaggctctgtgtaagtgtattggggttgtgatcaagcagtcttttggatgcctagtgtttttccctcctgggtagac

SEQ ID NO: 202200 - DNA, 201 bp, Homo sapiens
agagaaaagggaggaaaagactgaaattatggtacagtcatacaacaaaagagtgtgagcctgtcaaaaaagaatgtgatcgatgtatatatactgaaatktatagacttggtcttcttctgaggctgagactataggtacttattttaatttcaaaagttccaactcagcattcttttattcttttagactcttcaggca

SEQ ID NO: 202201 - DNA, 201 bp, Homo sapiens
gaatcctatgcgagatctacaagccatggaccgggcccatcgcattgggcaggtaaaagtcaattttacctcacagatgttaacctgtgcatgaaaatatmctcccccagaaagataggaaaccttggtttagttcttgctctggtgttaacatacatgtgttatgaccttggacagatcacttaactcttctgtggtatc

SEQ ID NO: 202202 - DNA, 201 bp, Homo sapiens
atattttgaaatcaggtagcgtgatccctccagctttgttccttttgctcaagattgctttggctatctggggtttttgtggttccacatgagtttttttktttgtttgtttttatagaaagcttattcagagggataatagagaaccatatgagttttaggattgctttttctatttctgtaaaaaatgccactggaatt

SEQ ID NO: 202203 - DNA, 201 bp, Homo sapiens
agtgagtattgacgaaaaagaagagacgtggaagtaaaggagagattatgaatgaggagctagagagagaccaggaccttttcttaccagtttaatttccmgtaatactttccagttgggatcagcattgtcagggtgttaggcattggcctatataggcatttcactatccattatggctacttaatgctttgtgccagc

SEQ ID NO: 202204 - DNA, 201 bp, Homo sapiens
ggcattaatcaaagcttttccatttcaatcccaatggtaaattcctccttatttctttggcgtatttctcaaggtactagtttgaattattattttaaaawttttttaattgtgacacacataaaaatagactgttctaaccatttaaaaatacactttaaaatgtattatgaattttacatattaatacataatatgtat

SEQ ID NO: 202205 - DNA, 201 bp, Homo sapiens
aagaagagacgtggaagtaaaggagagattatgaatgaggagctagagagagaccaggaccttttcttaccagtttaatttcccgtaatactttccagttrggatcagcattgtcagggtgttaggcattggcctatataggcatttcactatccattatggctacttaatgctttgtgccagcttttcttctcttcccat

SEQ ID NO: 202206 - DNA, 201 bp, Homo sapiens
tttgtgctctttaatttttattaacagtttctgttataggacttaagaatggactaattttatttttgttatctacttttaggtttaataatgatccatcyatagacgttctgttacttaccactcacgttggtggcctgggacttaatttgacaggcgctgacacagtagtatttgtggagcatgactggaatcctatgc

SEQ ID NO: 202207 - DNA, 201 bp, Homo sapiens
tctcggctcactgcaagctccgcatcccgggttcaggccatcctcctgcctcagcctcccaagtagctgggaccacaggcacccgccaccacacctggctrgttttttgtatttttagtagagacgggtttcaccgtgttagccaggatggtctcgatctccttacctcgtgatccgccggccttggcctcccaaagtgct

SEQ ID NO: 202208 - DNA, 201 bp, Homo sapiens
cgttggggttagccatggggaagaagtaaggattagcaatcctgatcatgtaggctgactaccagctaggatacatgtcccattttcctaagaacaattayattggaaagtcctaacttgataaaggtgactcatagcattagtgccatagaagaacctgatgttagtatttctacccttctttttgactgcatttgctct

SEQ ID NO: 202209 - DNA, 201 bp, Homo sapiens
aatttgagttttcctaacttagtaatgctacaccaggataataaatgtcaaagttgctaccataccaccacttgctcatttgatatgtgacagagatggcmccaaagggagatggaaattatgtgtatctacccgttggggttagccatggggaagaagtaaggattagcaatcctgatcatgtaggctgactaccagcta

SEQ ID NO: 202210 - DNA, 201 bp, Homo sapiens
aacactatttgtagaatatactgttctctttctcattgaattgctctggaactcttgtcaaaaatcaattgaccatcagacacataggtttatttcaggastcttaattctattccattgatgtctattcttacgcgagtaccacattgtctaaattattgttgcattgtagtaagttctgaaatcaagatgcatgagcct

SEQ ID NO: 202211 - DNA, 201 bp, Homo sapiens
ggcctggagggtcagtcttttccctcataatacagatgagaaaatggtgagccttttaaaaagttaaaatcttggtatcagtttgtttgtgaaaacatctrtcttggaaccatttcaaaatttccttaatcacttactcaggtgtaatggaacaactagatgttggtattgttccatatattgtccttttagttgttcctg

SEQ ID NO: 202212 - DNA, 201 bp, Homo sapiens
tgggattacagacgtgagccaccacacctggcgaagaatataacatcatttatagtagtctgaaactgaaaatcacccacataatcatggatagtagataygtaaatcatgtactgttatactgcaagaagacaaaccacagacacatacagtaatattcataaatctttaacataggattccttttttattaaattcaaa

SEQ ID NO: 202213 - DNA, 201 bp, Homo sapiens
tttgaggaaaaattgttgttaatgataatcagactttttccagcttcccagtgattatatgttgttatttcttcagaccattggtataataaatatggtgktgttgcctcaaaatcttgtcaaagtttatcacctgtttagcctttttaatgaaaccatgcagtcttttcatggtagtacttttgttatttgacatataat

SEQ ID NO: 202214 - DNA, 201 bp, Homo sapiens
cttattgtctggaggcatagcacagagaagggaaacccaaagagagcccagtagtcttgctgagctgaagagttaagacagaattagcaaaacagagtacytgaaggtaggtactgcacagacaggaggtagctgcacagagagaaagctccagaggtccacaggggggttctcccaagcctttggctgagtattcatctg

SEQ ID NO: 202215 - DNA, 201 bp, Homo sapiens
tgtgactagaagtatttaagatttcagatttttgaatgtttgcattatacttaccagttgagcatccctaatctgaaaatctgaaatctgaaatgcaccawtgagcatttccttcatttgtaatgctggaaataacaatgttttagatatttggatttgggatgctcaacctatgttttgattgttttgggtttttgtttt

SEQ ID NO: 202216 - DNA, 201 bp, Homo sapiens
tcagtcttagaacatgaaaatgtcagacaatgaatttaatcgggcccttggtggaaacatttatatatttaatgcagatgcatagtgtttttcaaatcttyaacatcattttttcaacttttaagatataatatcaactattctaaatacaggtaatggtatatttaaggctaccataacatcctatttagagggtggttt

SEQ ID NO: 202217 - DNA, 201 bp, Homo sapiens
aagtggtcttattaaaaagtcttaaggtttgaaaggtacagctttgatgtcatccttattaattgcatttttctttgctgtggtataactagattcctcckttactaacagtgcaactcctgtgggctttgatgtagaccaggctgcttgaatttaatagaaaacccaacctggaagcttagaatgtgggggcattgagga

SEQ ID NO: 202218 - DNA, 201 bp, Homo sapiens
tagtaatttgatcgcagatttaaggcaagatgtaggggtaattacatcgatcagacttgtttatttggaggaatgtctccctagtataccatattctactrtataataaaaatctcaaactttaagggctgttaggtagaagaatgagaacatgtgttcttcctcaagcattgaattgtgacaatagatgtgaaatgttgt

SEQ ID NO: 202219 - DNA, 201 bp, Homo sapiens
gattataggcatgagtcactatgcccagccaatatacattatttatactgcgtaccacatagtcacgtctctcctgagacaccttagataggactttttaraagaaacagctgaatagtaatttgatcgcagatttaaggcaagatgtaggggtaattacatcgatcagacttgtttatttggaggaatgtctccctagta

SEQ ID NO: 202220 - DNA, 201 bp, Homo sapiens
acttttgtatccaaaatgatccctggttccagaagcatctgtctgcattaccaggtactttgagtgggaaagggttttaaagaaaacaactaagacgctcmatttgccatgggaagctcattgtctggtgggggagacagatataaacagtacaatttatacgcgttgtaaatgtccgcatagaaactgcacaagaatctc

SEQ ID NO: 202221 - DNA, 201 bp, Homo sapiens
aatggaaaaacaaagttgtcaaaagcagtaaaacaactgactgctaattataggattattctttctggaacaccaatccaggtaattatttattattattwtttttaattatttttatttttatttttcatgtttgccaggtggagggtaggcttggtatttggcggtgaattaaagaagattttttattgttgttatagt

SEQ ID NO: 202222 - DNA, 201 bp, Homo sapiens
tggacagagtgaggctttgaatacagtcagctcaaaaacttgcactcttgagcagtttactatagtgcctctttgatagaattcattcatttgtaagtgawagaaattcaactcaattctcagtttcaatattcagttctcaatattcaattctgttagcttaagcaaacagaaaattcattaattcactaacttgagaat

SEQ ID NO: 202223 - DNA, 201 bp, Homo sapiens
gccaaggccagcagatcacctgaggtcaggagtttgagaatggcctggccaacatgacgaaaccccgtctctactgaaaatacaaaaaattagctgggcayggtgctgcaaacctgtagtccccagccacttgagaggctgagacaggagaatcgcttgaacctggaaggcggaggctgcagtgagccaagatcacgccac

SEQ ID NO: 202224 - DNA, 201 bp, Homo sapiens
tgaatagtaatgtttatccattaaaattttgtgaaaagaactgtattttactgggattattttaaaaatatcatatttttgttgttgcctattcagttttratggttaatctttattgtttttttttcccctccctctgtaggaaaaaacaggtggtaaggtgcgccaaggccaaagccagaataaagaagtacttcagga

SEQ ID NO: 202225 - DNA, 201 bp, Homo sapiens
tttctccatgttggtcaggctggtctcgaacccccgacctcgtggtctgcccgcctcggcctcccaaagtgctgggattacaggtgtgagccaccgtgccyggtcgacgctttctaatagtcaattaagtaagttaataactgcctgggcagaaaatgcagtattcagctaatcccaaacttggaattttctaccttttca

SEQ ID NO: 202226 - DNA, 201 bp, Homo sapiens
acaaggtcttgctatgttgcccaggctagtctccaatgcctgagctcaggcgatcctaccacctcagcctcccaaagtgctgggattacaggcgtgagccrctgcgtgcagcctaaatttatttttatgttgtgaacttggaatatccaaccaacagtaaagattacctagtacttcctaacatgggattctcctatttgt

SEQ ID NO: 202227 - DNA, 201 bp, Homo sapiens
ttttttttgagatggagtttcgctattgttgcccaggctggagtgcaatggtgtgacctctgctcaccgcaacctccacctcctgggttcaagcaattctyctgcctcagcctcctgagtagctgggattacaggcatgcgccactatgccctgctaattttgtattttttagtagagacagagtttctccatgttggtca

SEQ ID NO: 202228 - DNA, 201 bp, Homo sapiens
tgccatttgttagtagccactccaggacgtctagtggatatgatggaaagaggaaagattggattagacttttgcaagtatgttttattttgtttttgttkttttgttttgttttgttttgttcttttgtttttggcagagttgcgctcttgttgcccaggctggagtgccatggcgcgatctcggctcaccacaacctct

SEQ ID NO: 202229 - DNA, 201 bp, Homo sapiens
agctcaagccatcctcccacctcagcctcctgagtaattgggaccacgggtgtgtaccaccatgctcggctaattttctttttctttttttttttttttttgagatgtggtctcactatgttgcccaggccagtcttgaatttctgggctcaagtgatcctcccatctagcccagcactctcaaagtgctaggattacagg

SEQ ID NO: 202230 - DNA, 201 bp, Homo sapiens
ggaggcaaaggttgcagtgagccgagatcgcaccattgcactccagcctgggcaacaagagcgaaactccgtctcaaaacaaaagaaacaaacaaacaaacaaaaaaccaaaaccctgccgcaatccttccactactctcccatgggaggaagctcagagccaccctgaccgctcttcatttcaccacctctctccatttg

SEQ ID NO: 202231 - DNA, 201 bp, Homo sapiens
gctgggattacaggtgtgagccatcgcacccggccaagtatgttaatttttaaatgtatgggatgcagtattaaagttactgcccattagttttgtggtgrtgttaacattgtctaaatgttaaggctgagaagtgatgtatttcagacatctaactttcacaaaaagcttgttcatggtaattttaatgttgaaaaatca

SEQ ID NO: 202232 - DNA, 201 bp, Homo sapiens
ggaggctgaggcaggagaatggcgtgaacccgggaggtggagcttgcagtgagccgagatcgcgccactgcactccagcctgggcgacagagcgagactcygtctcaaaaaataataataataataaataaatacataaataaataaaaccccaagagaggaagtagtgtcactccagccatatgtgtgccttttcttccc

SEQ ID NO: 202233 - DNA, 201 bp, Homo sapiens
gaacccaggaggcagaggttgcagtgagccaagatggtgccactgcacttcagcctgggcaacagagtaagattccatctcaaaaaaaaaaaaaaaaaaaagttgcctccaaattttggagtgagataaggtataagtatatcaaatgaaacgttaaagctatttttaaaaaagtgggccaggtgtggtggctcatgcctg

SEQ ID NO: 202234 - DNA, 201 bp, Homo sapiens
tcacaaaaaataaaagagttgatgattccatggttcctatggacatataatagttgactgtcacaaaaaatataactctggccgggcgcagtggctcacayctgtaatcccagcactttgggaggccaaggagggcagatcacctgaggtcgggagttcaagaccagcctgatcaacatggagaaaccccgtctctactaa

SEQ ID NO: 202235 - DNA, 201 bp, Homo sapiens
tgagacagggtccagtcttgctctgtcactgggctcaagcaatcctcctgcattagcctcctgaatagctgggactacaggcacacaccaccacacctggstaatttttgtatttttatttttagtagagacaaggtcttgctatgttgcccaggctagtctccaatgcctgagctcaggcgatcctaccacctcagcctc

SEQ ID NO: 202236 - DNA, 201 bp, Homo sapiens
ttgaaagttataagactatctttgggttttgctttcttgtgttccattctatttttaatacaattctgagtatatttaaacctgctttgcttcatgtcctyatttcagtttatgatctatttttcagcatgtttagtgtcattgtttctaatgtggctgtcctctataatgactactcttcaatttcttcatttttttttt

SEQ ID NO: 202237 - DNA, 201 bp, Homo sapiens; identical to SEQ ID NO: 35671

SEQ ID NO: 202238 - DNA, 201 bp, Homo sapiens
agaggcccttcaccagttccgctcaggaaaaagcccaattttagtggctacagcagtatgtataaacatctttcttttattcaaattgagcatgttcaagyatttgttttcttttaagtgggccatatctcataaaagttattttccaggtagcagcaagaggactggacatttcaaatgtgaaacatgttatcaattttg

SEQ ID NO: 202239 - DNA, 201 bp, Homo sapiens; identical to SEQ ID NO: 35672

SEQ ID NO: 202240 - DNA, 201 bp, Homo sapiens
agcatgggagtatttgacctgctctgtttctgacctgggcctgttcacccctccttaggcaacctggtgctcccttgcttccgggaggttaccatgttgaygccaaacttagtgtggacacctgataggcatagtacactacagcccagaactcctagacttagacaatcctcctgcctcagtctccagagtagctgggac

SEQ ID NO: 202241 - DNA, 201 bp, Homo sapiens
ctccaggtagacacgttcttcctggctcccatattatgagctcatcagacagcctcccctgctgtcttcctgccttgaaaggatctaacatgaaagcactyttactttctaaaagtaaaatgctctctattcatgggcaagagattaccacctcactgactgggaccttcagctaatgcctttctttctgggcatttcttt

SEQ ID NO: 202242 - DNA, 201 bp, Homo sapiens
ccccttctttttgtcatttgtttcagacttagcattgccatgatcatgcttctggttcttcattgtggaagcatctctgtattccaaattaaaacagataytgcaaacaaagtaatggcattctattacgtggcccctatggcgtggttctaatctaccattgcagctttaacttgcctcccagaccttatcctgtagctg

SEQ ID NO: 202243 - DNA, 201 bp, Homo sapiens
cagaaagtacctgggaaatgattctagggcaactctcctaacaggatcctccacctctgaggttctctcagaaatctgtggttttggttttggtttttgcytgtgtttttattcctaaagctccccaggcaattctgatacagcaggcttaggtgtggagtccactgttcactccccttctttttgtcatttgtttcagac

SEQ ID NO: 202244 - DNA, 201 bp, Homo sapiens
ttcacagcatggttttagtttggaagaggtgggtgccctactgtgtaaaccaagctgtataatgataacaacctggttatttctgtcttggcaaagttgcyagaaatgaagatgggcttattgtagaacagttaacaagttacagcgttggaagtgattctctggtttcatctccttgccttgctgcttttgaaaggtttt

SEQ ID NO: 202245 - DNA, 201 bp, Homo sapiens
gacccttatttttagctcagatctcttcctacttattaaaacaaaagtgagtatgggctatgatgtgtcctcatttttaggcaagaacagcttcactgggmacaaaacttggtgtttgctttaactttcaccttatttgtcatgctaagaatcttttaggaactgattgtcctagtagagatttttaaaaatatttaattc

SEQ ID NO: 202246 - DNA, 201 bp, Homo sapiens
caattttttactgcttaaagaattatgtagtctttgtgttatagaattatgtagtacttagtgatcaatctaaagcatcgttgccttttttttttttttttggttgagatggagctttgctcttgttgcccaggttggagtgcaatggtgtgatctcggctcaccgcagtctctgcctccgggttcaagcgattctcctgc

SEQ ID NO: 202247 - DNA, 201 bp, Homo sapiens; identical to SEQ ID NO: 35665

SEQ ID NO: 202248 - DNA, 201 bp, Homo sapiens; identical to SEQ ID NO: 35668

SEQ ID NO: 202249 - DNA, 201 bp, Homo sapiens
ttcgtaggtctattttttgcctcctttagaagttagtaaagcctaaggaaaaccaggcatttgggggaggtctaaacatggtgttgtttttctatgcttcygtcagccttggttcaaatactagagcttaataattttggaagaactcatctaatgttacgcagtgggaaattcggcattcctatgtcaaactgttctgac

SEQ ID NO: 202250 - DNA, 201 bp, Homo sapiens; identical to SEQ ID NO: 35669

SEQ ID NO: 202251 - DNA, 201 bp, Homo sapiens; identical to SEQ ID NO: 35670

SEQ ID NO: 202252 - DNA, 201 bp, Homo sapiens
aactcataagagtaaaacatcatatttcttctgtaaaggactagacaataaaatattttattttttatgggtcatgcagttttgcagctgctctgcgctgstattggactgtgaaagaagccatagatgatacataaattattggttacggctgtattccgtaagagctttatttataaaaataacaggctttatttacaa

SEQ ID NO: 202253 - DNA, 201 bp, Homo sapiens
caactcataagagtaaaacatcatatttcttctgtaaaggactagacaataaaatattttattttttatgggtcatgcagttttgcagctgctctgcgctsctattggactgtgaaagaagccatagatgatacataaattattggttacggctgtattccgtaagagctttatttataaaaataacaggctttatttaca

SEQ ID NO: 202254 - DNA, 201 bp, Homo sapiens
gaaattgtagaactttgtaggtggccattgagagggctttctaaatgatgctaagacttaagtagaatgaaaaccagttttcaagtgtaatctgtaatctrtaaattacaaaagggaattatgttgtgatgaacttttcaaacagggtaggtagagttaacttaaaaattaacttatttcttaggaaaatggaaggtatgg

SEQ ID NO: 202255 - DNA, 201 bp, Homo sapiens
cccatcttgagtcagatttattcagatggtccaggcgaggctttgagggccatgaaggtagatgtttctttataaaatgggaaattgtagaactttgtagrtggccattgagagggctttctaaatgatgctaagacttaagtagaatgaaaaccagttttcaagtgtaatctgtaatctataaattacaaaagggaatta

SEQ ID NO: 202256 - DNA, 201 bp, Homo sapiens
ctccaatgtgcagtaagcctgggggttggtttttctcaaagtataatgtgataattttacttaaactataaactgagttaccaatcagctgttggttggtkgtttccattattagtataaaacagaaatagctctagatagcattcctaaccccattgaatttcttaacagttcagtgatgttgagatgggagaaattatc

SEQ ID NO: 202257 - DNA, 201 bp, Homo sapiens
tgtaagctttagtttggtgattagggagcctgtgctatggaacatgttagtgaaaatttattttgaatgcatgaattaaatttggacagtttctactgaayagcacaagcatcttggtgtgccgccttctgtagtatatacaatagtaatattgcatttgcttagagcattgcagacttgaaaacattcttagtcacattc

SEQ ID NO: 202258 - DNA, 201 bp, Homo sapiens
ctttgtccgggtgtaaaccagctttaaatcttggttctcttacagtgccatggtagggatagtcagtggaggctttcaaattcagaaagattgataatacyttaacatggttcctatttctaattaataataaaatgtatttgtgcttttttaatcaaaggtttctacgataaagacagttcagggtggagttctagcaaa

SEQ ID NO: 202259 - DNA, 201 bp, Homo sapiens
cctatcatggctcactgcagccttgagctcccaagctcaagccatcctcccacctcagcctcctgagtaattgggaccacgggtgtgtaccaccatgctcrgctaattttctttttctttttttttttttttttgagatgtggtctcactatgttgcccaggccagtcttgaatttctgggctcaagtgatcctcccatct

SEQ ID NO: 202260 - DNA, 201 bp, Homo sapiens
taagattccatctcaaaaaaaaaaaaaaaaaaaagttgcctccaaattttggagtgagataaggtataagtatatcaaatgaaacgttaaagctatttttwaaaaagtgggccaggtgtggtggctcatgcctgtaatcccagcactttgggaggccgaggcaggtggatcacgaggtcaggagatagagaccatggtgaa

SEQ ID NO: 202261 - DNA, 201 bp, Homo sapiens
agcagtaacccatttaaaattagattcttatttttcccccctctcagtgtccaggtaagtaatcagattggaaggctggagattttaatttcccagaaccrttttttagtaacagaaatttaaatgggaaggttttttggcatttaattaattttatatatatatatatttttttagaagggcgctatattcctcctcatt

SEQ ID NO: 202262 - DNA, 201 bp, Homo sapiens; identical to SEQ ID NO: 35666

SEQ ID NO: 202263 - DNA, 201 bp, Homo sapiens; identical to SEQ ID NO: 35667

SEQ ID NO: 202264 - DNA, 201 bp, Homo sapiens
gcccaggctggagtgcaggggttattcacaggtgtgatctcattactgatcagcatgggagtatttgacctgctctgtttctgacctgggcctgttcaccyctccttaggcaacctggtgctcccttgcttccgggaggttaccatgttgatgccaaacttagtgtggacacctgataggcatagtacactacagcccaga

SEQ ID NO: 202265 - DNA, 201 bp, Homo sapiens
tcattatttttaaattttggctgctctaattggtgtaaagtagtatcttattgtcttaatttgcatttctctaatggctggtgatgttgaacatcttttcrtgttcttatttgccatccctgtatcctctttggtaaaatatatgtctgtgtcttttgctcatttttaaattgatagttttttactgttgagttttgagag

SEQ ID NO: 202266 - DNA, 201 bp, Homo sapiens
gtagctgggattacaggcatgtgccaccacgctgggctaatttttgtatttttagtagaggcggggtttctccatgttggtcaggctggtctcgaactccygacctcaggtgatccgcctgccttggcctcccaaagtgctgggattacaggtgtgagccatcgcacccggccaagtatgttaatttttaaatgtatggga

SEQ ID NO: 202267 - DNA, 201 bp, Homo sapiens
cctcccgggttcaagcgattctcctgcctcagcctcccaggtagctgggattacaggcatgtgccaccacgctgggctaatttttgtatttttagtagagrcggggtttctccatgttggtcaggctggtctcgaactcctgacctcaggtgatccgcctgccttggcctcccaaagtgctgggattacaggtgtgagcca

SEQ ID NO: 202268 - DNA, 201 bp, Homo sapiens
ggcaaaggttgcagtgagccgagatcgcaccattgcactccagcctgggcaacaagagcgaaactccgtctcaaaacaaaagaaacaaacaaacaaacaaaaaaccaaaaccctgccgcaatccttccactactctcccatgggaggaagctcagagccaccctgaccgctcttcatttcaccacctctctccatttgtca

SEQ ID NO: 202269 - DNA, 201 bp, Homo sapiens
aggcaaaggttgcagtgagccgagatcgcaccattgcactccagcctgggcaacaagagcgaaactccgtctcaaaacaaaagaaacaaacaaacaaacaaaaaaccaaaaccctgccgcaatccttccactactctcccatgggaggaagctcagagccaccctgaccgctcttcatttcaccacctctctccatttgtc

SEQ ID NO: 202270 - DNA, 201 bp, Homo sapiens
gaggcaaaggttgcagtgagccgagatcgcaccattgcactccagcctgggcaacaagagcgaaactccgtctcaaaacaaaagaaacaaacaaacaaacaaaaaaccaaaaccctgccgcaatccttccactactctcccatgggaggaagctcagagccaccctgaccgctcttcatttcaccacctctctccatttgt

SEQ ID NO: 202271 - DNA, 201 bp, Homo sapiens
tcactcttgggcactgttgatgtgtttcctggattcttggctgaatttcaagatttttaaaatggctttataggagctgtgtctaaccttcatgcttaaartgtttcctttgctcctatgctctacgtgacctgcttgagtggccacaggcttgctctttagagcacagtgactttgttgatagggcctcactactcccac

SEQ ID NO: 202272 - DNA, 201 bp, Homo sapiens
tctgtttaataaggtgttgctgaagctagttaaaccctctacctgtctttaaaccctctacctgtctttgggttaatttacatgtttgtcatccccttacytggatatttatagctgtacccaggaaccttgtctatactgagaatatatagtgatgagggtttttctttttcccaggtattcctgattgtcatcaagctt

SEQ ID NO: 202273 - DNA, 201 bp, Homo sapiens
ataatgaaatgagttattctatttctcgagttttatatgttctacttaaaagagtaagttcatctagtgaatggcctaatttggttgggatttttgtggastctataacaatttctaaacaccttgtatttttgattacacaagtgtggtgaactgaccccacgtgcctaatagctgtggttagtcctgtgtcctgatttt

SEQ ID NO: 202274 - DNA, 201 bp, Homo sapiens; identical to SEQ ID NO: 35680

SEQ ID NO: 202275 - DNA, 201 bp, Homo sapiens
tataaacattgtttatctggatagttgaacagagctttttattaggaggatgtagggattatcacacagaagaagaaccgtaagtggaacacctaatttcmtttctttcgagtaaattttgaatcctacttctctaatgcacacctacaagagaagagagtacagcaacctcaaagcctcttcctcaaaaacttgaaatta

SEQ ID NO: 202276 - DNA, 201 bp, Homo sapiens
ccaggtgagctcccttggccttctctcctttcggttcttcatgccccctcttcctgtcctattgccaaatatctgtttgttttgtcccagttatctttgtraagtagaagattatctagagagcaaagcttctgtcaagaaaggcgtgaagatttcttgtttgtaccctgcttggaaaagtattagggaaaaattggaatg

SEQ ID NO: 202277 - DNA, 201 bp, Homo sapiens
gtataaaagtcaatgcttgtgcctgaactacctctcagccacagtgatcaccagatactacctttggttgctcctccaggttccgagaagtaaagctttgkaggtcacaaaattagcaatagaagctgggttccgccatatagattctgctcatttatacaataatgaggagcaggttggactggccatccgaagcaagat

SEQ ID NO: 202278 - DNA, 201 bp, Homo sapiens
ttcattcaaaatcacctccattctttaacctctgcagctttggtccacttttcatcgaccagagttggtccgaccagccttggaaaactcactgaaaaaarctcaattggactatgttgacctctatcttattcattctccaatgtctctaaaggtatgcagtttgtatgagcataaaattgcgcttctgctgtcattata

SEQ ID NO: 202279 - DNA, 201 bp, Homo sapiens
tcggatttcaaaagaataaacctagtagaagtgaaacccgtattgggttgtaaggttcgtgttcctaccttactctggatgactcactggtctaggtttcytaggctaggagaaaaaagtaggcaatccttgttctgcattgaggtccattcctatggtcacgtactgcttatttttcgtttgtgcactgtttctttcttc

SEQ ID NO: 202280 - DNA, 201 bp, Homo sapiens
  misc_feature (1)...(201): n = A,T,C or G
actctggatgactcactggtctaggtttcctaggctaggagaaaaaagtaggcaatccttgttctgcattgaggtccattcctatggtcacgtactgcttntttttcgtttgtgcactgtttctttcttctgttcatgtctagttcccagcttggcagaatatgtaaaactcagtattgaagaacactgttggtcatctcc

SEQ ID NO: 202281 - DNA, 201 bp, Homo sapiens
  misc_feature (1)...(201): n = A,T,C or G
caagagtagctttggtgagatgaagggaaaaacacaaaaggaatgtttagagagtggggcacaagacttgggggcaaggaggacaggaatctctttccttncttgtgcattaatctatgcagtttcctaaggaagagatagaaattcttactcttgctgcctctatcttcttcccctatttgctgtttgaatttttctttt

SEQ ID NO: 202282 - DNA, 201 bp, Homo sapiens
aaagttgttgctctcacagttctgtcttgcatttaccgtgatttgcagccaactgcacaaataattcctcacaacccctttctccacaggccatggagaartgtaaggatgcaggattggccaagtccattggggtgtcaaacttcaaccgcaggcagctggagatgatcctcaacaagccaggactcaagtacaagcctg

SEQ ID NO: 202283 - DNA, 201 bp, Homo sapiens
ctctggcagggtgagtgggcagggatcagcatgggtcaacctgtgcctctgctctcctgactccatggaactttccagagcagccaacatcattgccaagkctgcacgttccatataggcctggtgtttctaccactggacatgctgtggatactgcccatgtgacttcattagatgtttccaaatctgtgcttatatcac

SEQ ID NO: 202284 - DNA, 201 bp, Homo sapiens
gaccagagttggtccgaccagccttggaaaactcactgaaaaaagctcaattggactatgttgacctctatcttattcattctccaatgtctctaaaggtrtgcagtttgtatgagcataaaattgcgcttctgctgtcattataaacattgtttatctggatagttgaacagagctttttattaggaggatgtagggatt

SEQ ID NO: 202285 - DNA, 201 bp, Homo sapiens
attatttcaaatgtttttcctccttctccttgcatgtttgttcatgccccaaactctgcttttgcctccagaaagccttccttagtggagtgaataggagygcttgtccttgatttcctgcaatatggagctctcaaggcagagaatttaaaaaaatttaaaatcaaggagtgtgagtgtggaggcagaagctccattgtt

SEQ ID NO: 202286 - DNA, 201 bp, Homo sapiens; identical to SEQ ID NO: 35700

SEQ ID NO: 202287 - DNA, 201 bp, Homo sapiens
gaaaaatgtaatgaacaccttttacctagactaattgttaacttgttcatgttttttattctctctctctcattctctgtatcactattagagtgatttaktcaatttatagatttattcaattccatgtgttagcaattagtggcatcctcttgatattttaaagtctctcaaatttagagagtaagatacacttcaagc

SEQ ID NO: 202288 - DNA, 201 bp, Homo sapiens
ccctagtaatggagtcattgcatttatattatacattattctcttttcagttttgctagccaccctaattatccatattcagatgaatattaacatggagrgctttgcctgatgtctaccagaagccctgtgtgtggatggtgacgcagaggacgtctctatgccggtgactggacatatcacctctacttaaatccgtcc

SEQ ID NO: 202289 - DNA, 201 bp, Homo sapiens; identical to SEQ ID NO: 35681

SEQ ID NO: 202290 - DNA, 201 bp, Homo sapiens
ttcttacagatttcagtgaatttttaatgtacaaatcgatatcctcagagtatacatctttacccctagtgttcagttctgttgtgtagccagaatgactrtgcagaaaagacttaatagactactattcacagatgctttatttcccaagtgaaccctagttgggtcgatgtaactagcatccagtcaaaatctcaagaa

SEQ ID NO: 202291 - DNA, 201 bp, Homo sapiens
tcttattcattctccaatgtctctaaaggtatgcagtttgtatgagcataaaattgcgcttctgctgtcattataaacattgtttatctggatagttgaamagagctttttattaggaggatgtagggattatcacacagaagaagaaccgtaagtggaacacctaatttcctttctttcgagtaaattttgaatcctact

SEQ ID NO: 202292 - DNA, 201 bp, Homo sapiens
tccttccagggtggacccgaactccccggtgctcttggaggacccagtcctttgtgccttggcaaaaaagcacaagcgaaccccagccctgattgccctgygctaccagctgcagcgtggggttgtggtcctggccaagagctacaatgagcagcgcatcagacagaacgtgcaggtgaggagcggggctgtgggcctcag

SEQ ID NO: 202293 - DNA, 201 bp, Homo sapiens; identical to SEQ ID NO: 35693

SEQ ID NO: 202294 - DNA, 201 bp, Homo sapiens
acaataatgaggagcaggttggactggccatccgaagcaagattgcagatggcagtgtgaagagagaagacatattctacacttcaaaggtactgtgtctrtgatgagcttgtgtgcacatgtatttattgtgattgtgtggagatgacaattctatgactggatgagtagttgtgggtgaattttgcttctgggttcaaa

SEQ ID NO: 202295 - DNA, 201 bp, Homo sapiens
ggggggaggggtttcctgcccattgtttttgtaatctctgaggagaagcagcagcaaacatttgctagtcagacaagtgacagggaatggattccaaacascagtgtgtaaagctaaatgatggccacttcatgcctgtattgggatttggcacctatgcacctccagaggtaagaataattccttttagttttcggattt

SEQ ID NO: 202296 - DNA, 201 bp, Homo sapiens
aatgcttgtgcctgaactacctctcagccacagtgatcaccagatactacctttggttgctcctccaggttccgagaagtaaagctttggaggtcacaaarttagcaatagaagctgggttccgccatatagattctgctcatttatacaataatgaggagcaggttggactggccatccgaagcaagattgcagatggca

SEQ ID NO: 202297 - DNA, 201 bp, Homo sapiens
agcattcattcaaaatcacctccattctttaacctctgcagctttggtccacttttcatcgaccagagttggtccgaccagccttggaaaactcactgaaraaagctcaattggactatgttgacctctatcttattcattctccaatgtctctaaaggtatgcagtttgtatgagcataaaattgcgcttctgctgtcat

SEQ ID NO: 202298 - DNA, 201 bp, Homo sapiens
tatgtacatatgcacacatgtgtatatgtgtgtacatatgtgtgtgtgcatgtatatacatatgcacacatgtgtacacatatttgtatataatatacaartattatttttgttttatacataaaataaggtacactatcaaatatgaaacacaaaatatcccaaagtcattacatagtactgccaaattaatattaaaat

SEQ ID NO: 202299 - DNA, 201 bp, Homo sapiens
ttcagttttgctagccaccctaattatccatattcagatgaatattaacatggagagctttgcctgatgtctaccagaagccctgtgtgtggatggtgackcagaggacgtctctatgccggtgactggacatatcacctctacttaaatccgtcctgtttagcgacttcagtcaactacagctgagtccataggccagaa

SEQ ID NO: 202300 - DNA, 201 bp, Homo sapiens
ggcgcagtggctcacgcctataatcccagcactttgggaggctgaggtgggcagatcgactgaggtcaggagttcgagaccagcctggccaacatggtgamaccctgtctctactaaaaatataaaaattagccaggcatggtgacacttacctgtaatcccagctacttggaaggctgaggcaggagaatcgcttgaacc

SEQ ID NO: 202301 - DNA, 201 bp, Homo sapiens
ggattcatagacggtcattcatgtaaatgcaggaaaagcaggaagttatggccgggcgcagtggctcacgcctataatcccagcactttgggaggctgagrtgggcagatcgactgaggtcaggagttcgagaccagcctggccaacatggtgaaaccctgtctctactaaaaatataaaaattagccaggcatggtgaca

SEQ ID NO: 202302 - DNA, 201 bp, Homo sapiens
tatttgacatagtggatctctgtaccacctgggaggtgagtgcttggcggagaggacacagagaaggatgacaaaaagagaaaatctgtttcccaggttcrataggaaagaatggaatatgcaccattagatctagaaattcagaaactttacaagagtagctttggtgagatgaagggaaaaacacaaaaggaatgttta

SEQ ID NO: 202303 - DNA, 201 bp, Homo sapiens
aaagctttggaggtcacaaaattagcaatagaagctgggttccgccatatagattctgctcatttatacaataatgaggagcaggttggactggccatccraagcaagattgcagatggcagtgtgaagagagaagacatattctacacttcaaaggtactgtgtctatgatgagcttgtgtgcacatgtatttattgtga

SEQ ID NO: 202304 - DNA, 201 bp, Homo sapiens
ttccgagaagtaaagctttggaggtcacaaaattagcaatagaagctgggttccgccatatagattctgctcatttatacaataatgaggagcaggttggrctggccatccgaagcaagattgcagatggcagtgtgaagagagaagacatattctacacttcaaaggtactgtgtctatgatgagcttgtgtgcacatgt

SEQ ID NO: 202305 - DNA, 201 bp, Homo sapiens
tctatttcagccaggtgaggaactttcaccaacagatgaaaatggaaaagtaatatttgacatagtggatctctgtaccacctgggaggtgagtgcttggyggagaggacacagagaaggatgacaaaaagagaaaatctgtttcccaggttcaataggaaagaatggaatatgcaccattagatctagaaattcagaaac

SEQ ID NO: 202306 - DNA, 201 bp, Homo sapiens
agcattgtaccacctgtctcatggaggattagtgtccttaaaggtacctggggttacagctatgagtggagaaattaatttgtgacatcattaaaatgacygcttctatttcagccaggtgaggaactttcaccaacagatgaaaatggaaaagtaatatttgacatagtggatctctgtaccacctgggaggtgagtgct

SEQ ID NO: 202307 - DNA, 201 bp, Homo sapiens
gccatggagaagtgtaaggatgcaggattggccaagtccattggggtgtcaaacttcaaccgcaggcagctggagatgatcctcaacaagccaggactcawgtacaagcctgtctgcaaccaggtgagctcccttggccttctctcctttcggttcttcatgccccctcttcctgtcctattgccaaatatctgtttgttt

SEQ ID NO: 202308 - DNA, 201 bp, Homo sapiens
taacactccaataaaaactacaccagaatttctttttatttgcaccctcatcaggattacagctttatcaggactgcatcttcttcagaaatgaatatttmtcttacaacgcaaagaaagaaaaatcaaaataaattttctgattgaaaatgtaaaaaggcaaatatttttacagttttaactttaattttttattgagga

SEQ ID NO: 202309 - DNA, 201 bp, Homo sapiens
ttctccacaggccatggagaagtgtaaggatgcaggattggccaagtccattggggtgtcaaacttcaaccgcaggcagctggagatgatcctcaacaagycaggactcaagtacaagcctgtctgcaaccaggtgagctcccttggccttctctcctttcggttcttcatgccccctcttcctgtcctattgccaaatat

SEQ ID NO: 202310 - DNA, 201 bp, Homo sapiens; identical to SEQ ID NO: 35691

SEQ ID NO: 202311 - DNA, 201 bp, Homo sapiens; identical to SEQ ID NO: 35692

SEQ ID NO: 202312 - DNA, 201 bp, Homo sapiens
atttgctgtttgaatttttctttttttgacaatcactgctagctattttcattgtcatactttgaaagttgttgctctcacagttctgtcttgcatttacygtgatttgcagccaactgcacaaataattcctcacaacccctttctccacaggccatggagaagtgtaaggatgcaggattggccaagtccattggggtg

SEQ ID NO: 202313 - DNA, 201 bp, Homo sapiens; identical to SEQ ID NO: 35694

SEQ ID NO: 202314 - DNA, 201 bp, Homo sapiens
aatttatttctatgaaaaaggttattacttgacaataatatcctcagctcaaatataatgctatactgattattattcagcttccttactttcatcttttsaatattaacataactatttcatataaattgatgcttctctcttttggtcaactgcaggtagaatgtcatccgtatttcaaccggagtaaattgctagatt

SEQ ID NO: 202315 - DNA, 201 bp, Homo sapiens
gacaaacgatggtaataaaaacaatgggacctttacataaaccttcattttgcagaaaattttttagtcagagcatcctcagtttcctgtagttaagtttyaagtggctcatggagaggaaagagaattgcatttctgacgagatcttggatgatgctgatggtgatgctcgggggcctcgcttgagaagctccggtgcag

SEQ ID NO: 202316 - DNA, 201 bp, Homo sapiens
tggtcctggccaagagctacaatgagcagcgcatcagacagaacgtgcaggtgaggagcggggctgtgggcctcaggtctcctgcacagtgtccttcacamgtgtgcttcttgtaaggctctcaggacagccttgggccagctccatttccctgtatttcccatatgaatgctttgcgtgcatcctgagggtttcttctac

SEQ ID NO: 202317 - DNA, 201 bp, Homo sapiens
ctgataaaagatctttactattccttcatggtctaaggttctaggattcatagacggtcattcatgtaaatgcaggaaaagcaggaagttatggccgggcrcagtggctcacgcctataatcccagcactttgggaggctgaggtgggcagatcgactgaggtcaggagttcgagaccagcctggccaacatggtgaaacc

SEQ ID NO: 202318 - DNA, 201 bp, Homo sapiens
ctgtctaatatacttggggattcacaactggcaatctaaaaataataaaagttttttatttctgataggtttttgagttccagttgactgcagaggacatkaaagccatagatggcctagacagaaatctccactattttaacagtgataggtaagtttcctttgtaaatgggtgatctaatttatttctagagaaggaat

SEQ ID NO: 202319 - DNA, 201 bp, Homo sapiens
ttaattaattttattaatttttgttagtgctcattcttacccaatgggtagatttttttcttgatgctgaaatctatccaaacatcaccagtgacatttcyttgaaagtagtgcttttgtctttcagacttgcactcacgagtccttgaccaaattcttgctttctggcacaatctgaagcccaaaggctctaagaatctt

SEQ ID NO: 202320 - DNA, 201 bp, Homo sapiens
tcctcagtttcctgtagttaagtttcaagtggctcatggagaggaaagagaattgcatttctgacgagatcttggatgatgctgatggtgatgctcgggggcctcgcttgagaagctccggtgcagagtggacgccttagtctgtttagggagccgcctaacaaactatcgccagcctcagggcctcagcctttctgcctt

SEQ ID NO: 202321 - DNA, 201 bp, Homo sapiens
ttcttacccaatgggtagatttttttcttgatgctgaaatctatccaaacatcaccagtgacatttctttgaaagtagtgcttttgtctttcagacttgcmctcacgagtccttgaccaaattcttgctttctggcacaatctgaagcccaaaggctctaagaatcttactgtatcccagatatggaacttgttacatctc

SEQ ID NO: 202322 - DNA, 201 bp, Homo sapiens
cctcacaacccctttctccacaggccatggagaagtgtaaggatgcaggattggccaagtccattggggtgtcaaacttcaaccgcaggcagctggagatsatcctcaacaagccaggactcaagtacaagcctgtctgcaaccaggtgagctcccttggccttctctcctttcggttcttcatgccccctcttcctgtcc

SEQ ID NO: 202323 - DNA, 201 bp, Homo sapiens
tttctggcacaatctgaagcccaaaggctctaagaatcttactgtatcccagatatggaacttgttacatctccttctagttgtcaaaggtctttggaagscaggatctgattcatagatgagcttctgttcagaaatggcatttccatttatacttttagaagatatataaaatttatttctatgaaaaaggttattact

SEQ ID NO: 202324 - DNA, 201 bp, Homo sapiens
cgtgatttgcagccaactgcacaaataattcctcacaacccctttctccacaggccatggagaagtgtaaggatgcaggattggccaagtccattggggtrtcaaacttcaaccgcaggcagctggagatgatcctcaacaagccaggactcaagtacaagcctgtctgcaaccaggtgagctcccttggccttctctcct

SEQ ID NO: 202325 - DNA, 201 bp, Homo sapiens
aatctgaagcccaaaggctctaagaatcttactgtatcccagatatggaacttgttacatctccttctagttgtcaaaggtctttggaagccaggatctgwttcatagatgagcttctgttcagaaatggcatttccatttatacttttagaagatatataaaatttatttctatgaaaaaggttattacttgacaataat

SEQ ID NO: 202326 - DNA, 201 bp, Homo sapiens
  misc_feature (1)...(201): n = A,T,C or G
tttacataaaccttcattttgcagaaaattttttagtcagagcatcctcagtttcctgtagttaagtttcaagtggctcatggagaggaaagagaattgcntttctgacgagatcttggatgatgctgatggtgatgctcgggggcctcgcttgagaagctccggtgcagagtggacgccttagtctgtttagggagccgc

SEQ ID NO: 202327 - DNA, 201 bp, Homo sapiens
gcatttctgacgagatcttggatgatgctgatggtgatgctcgggggcctcgcttgagaagctccggtgcagagtggacgccttagtctgtttagggagcygcctaacaaactatcgccagcctcagggcctcagcctttctgcctttccttccagggtggacccgaactccccggtgctcttggaggacccagtcctttg

SEQ ID NO: 202328 - DNA, 201 bp, Homo sapiens
actaaaactgaaatcaaaatcaaggaatgatgatcacttttcattttggctgtgttccaatttatgacctgaaagtccctttacttttttgagcttcagcygagatcagtgtgatttgacatgtgctatagaatcacagagaacaataatcatgttatggtttttcttatcgcctgggtgattttctaagatttcttatta

SEQ ID NO: 202329 - DNA, 201 bp, Homo sapiens
atcttggatgatgctgatggtgatgctcgggggcctcgcttgagaagctccggtgcagagtggacgccttagtctgtttagggagccgcctaacaaactaycgccagcctcagggcctcagcctttctgcctttccttccagggtggacccgaactccccggtgctcttggaggacccagtcctttgtgccttggcaaaaa

SEQ ID NO: 202330 - DNA, 201 bp, Homo sapiens
ctcatggagaggaaagagaattgcatttctgacgagatcttggatgatgctgatggtgatgctcgggggcctcgcttgagaagctccggtgcagagtggaygccttagtctgtttagggagccgcctaacaaactatcgccagcctcagggcctcagcctttctgcctttccttccagggtggacccgaactccccggtgc

SEQ ID NO: 202331 - DNA, 201 bp, Homo sapiens
ggcggcagtgagtgccacccagtattaccggacctggactagagtttccactgtactatttcacttttaaaaagaacttcctgaaagaaaaaaataccacctcattttaagtaaaatctagaacctaacaaaggaaagtctaaattcttagtccttttttgtatgcatcatatttgtatcaaagtggtaggagtggtcttc

SEQ ID NO: 202332 - DNA, 201 bp, Homo sapiens
tcaacctttattactaaccaggaaagactcaggcaaactgagatggacttttcaccccacatacagacaggaggaaaagctgattcttgtataaaagtcartgcttgtgcctgaactacctctcagccacagtgatcaccagatactacctttggttgctcctccaggttccgagaagtaaagctttggaggtcacaaaat

SEQ ID NO: 202333 - DNA, 201 bp, Homo sapiens
ttggatgatgctgatggtgatgctcgggggcctcgcttgagaagctccggtgcagagtggacgccttagtctgtttagggagccgcctaacaaactatcgscagcctcagggcctcagcctttctgcctttccttccagggtggacccgaactccccggtgctcttggaggacccagtcctttgtgccttggcaaaaaagc

SEQ ID NO: 202334 - DNA, 201 bp, Homo sapiens
gggcggcagtgagtgccacccagtattaccggacctggactagagtttccactgtactatttcacttttaaaaagaacttcctgaaagaaaaaaataccacctcattttaagtaaaatctagaacctaacaaaggaaagtctaaattcttagtccttttttgtatgcatcatatttgtatcaaagtggtaggagtggtctt

SEQ ID NO: 202335 - DNA, 201 bp, Homo sapiens
atgctcgggggcctcgcttgagaagctccggtgcagagtggacgccttagtctgtttagggagccgcctaacaaactatcgccagcctcagggcctcagcstttctgcctttccttccagggtggacccgaactccccggtgctcttggaggacccagtcctttgtgccttggcaaaaaagcacaagcgaaccccagccct

SEQ ID NO: 202336 - DNA, 201 bp, Homo sapiens
tctgacagctttgaagagagcagtagttctcccagcatgtagctggagatctgagaatgggcagactgcctcctcaagtgggtccctgacccctgaccccygagcagcctaactgggaggcaccccccagtaggggcagactgacaccacacatggccgggtactcttctgagacaaagaggagttagactcttaaagtaa

SEQ ID NO: 202337 - DNA, 201 bp, Homo sapiens
cgataagttgtgatgatctacaaggatacattttctagaccagtgacaaaagtggtttaatttttaatataaattggcatgggcaggaaatgaaaataacracacaactgaagctccagccttggtaaacctttgagtgttggcacacttaaagactgctctcaaaaaagatttaaaaaaaaaaaaaaagactgttctcag

SEQ ID NO: 202338 - DNA, 201 bp, Homo sapiens
gaaattttctctttgtctgcagagttgcacagtttcaatacataatatctaggaatggatttctgcttatttttcgtgagctattcattgacccacctgartgtttagagctgacttctataactgtttaaaacttaccaatattttaagtattgtctctgcaccctactgtctaatatacttggggattcacaactggca

SEQ ID NO: 202339 - DNA, 201 bp, Homo sapiens
agaccgttatctagttccttgtaatttcaacgaaacaagaaagcttctttaaatacatgtaaaaatgaaaacagtttatttatatttttgtcattaaaaawtacctttcaaatctttatccaaatttggtcaataagtcagtaattttaaatttcactggaattctgtctttcctgaaagagatagccttattttttatgg

SEQ ID NO: 202340 - DNA, 201 bp, Homo sapiens
atggatttctgcttatttttcgtgagctattcattgacccacctgagtgtttagagctgacttctataactgtttaaaacttaccaatattttaagtattstctctgcaccctactgtctaatatacttggggattcacaactggcaatctaaaaataataaaagttttttatttctgataggtttttgagttccagttga

SEQ ID NO: 202341 - DNA, 201 bp, Homo sapiens
tgtgatttttaccatgtataatatcactatattaaaaataattaggactatttcagtcatgttaacttttccaacaaatcactgaatctgagggtgttatktggtacctccataacagtgatcaaccagagattgcctgagactgaaggtgtttctgggatgctcaacctttattactaaccaggaaagactcaggcaaac

SEQ ID NO: 202342 - DNA, 201 bp, Homo sapiens
aaagccatagatggcctagacagaaatctccactattttaacagtgataggtaagtttcctttgtaaatgggtgatctaatttatttctagagaaggaatrtaggatgggtgttgagagtgacctccataccagagggacagaggccaatgtgagtcagaggtgagactggaactctcctgctggattcactccagagctc

SEQ ID NO: 202343 - DNA, 201 bp, Homo sapiens
ggaaaagctgattcttgtataaaagtcaatgcttgtgcctgaactacctctcagccacagtgatcaccagatactacctttggttgctcctccaggttccragaagtaaagctttggaggtcacaaaattagcaatagaagctgggttccgccatatagattctgctcatttatacaataatgaggagcaggttggactgg

SEQ ID NO: 202344 - DNA, 201 bp, Homo sapiens
gatgaagggaaaaacacaaaaggaatgtttagagagtggggcacaagacttgggggcaaggaggacaggaatctctttccttgcttgtgcattaatctatscagtttcctaaggaagagatagaaattcttactcttgctgcctctatcttcttcccctatttgctgtttgaatttttctttttttgacaatcactgctag

SEQ ID NO: 202345 - DNA, 201 bp, Homo sapiens
taatcatgaggatgcaaatttttatttcagatgactctttttgaaaacttgggacaatgtcatggcctattgattaaggcattttgagaagaacagtgttytttaacctgggcacactttctaacacattcattctcaactgttcttatgctgttggccaccttaaccccatcaaagccatgtctctcagctgataagcat

SEQ ID NO: 202346 - DNA, 201 bp, Homo sapiens
cgctgtttcttctccattttctgttgaaattttctctttgtctgcagagttgcacagtttcaatacataatatctaggaatggatttctgcttatttttcrtgagctattcattgacccacctgagtgtttagagctgacttctataactgtttaaaacttaccaatattttaagtattgtctctgcaccctactgtctaa

SEQ ID NO: 202347 - DNA, 201 bp, Homo sapiens
aaagaagactgatgagtggtgatgaaattacaagacaaagtgagactgttctgtcctagaagtcagatgaagaaattgttttaagaaaagagtcaaatgcwattaataggacaagtaagatggagtctcaacattgaccattgggattgactattgacctttacaaagtcaagaatgttttgatagcatgatggaggcaag

SEQ ID NO: 202348 - DNA, 201 bp, Homo sapiens
tgggcggcagtgagtgccacccagtattaccggacctggactagagtttccactgtactatttcacttttaaaaagaacttcctgaaagaaaaaaataccacctcattttaagtaaaatctagaacctaacaaaggaaagtctaaattcttagtccttttttgtatgcatcatatttgtatcaaagtggtaggagtggtct

SEQ ID NO: 202349 - DNA, 201 bp, Homo sapiens
gtaattagacaattccctgccttgaattatgttgaaaacaaaatgttgtttgcattatacctgtttattaaagagatatagaaattcaacaatatctatcraacttaatatataatcttgttatttaaaaatttgcctctagattcttgtgggccttctaggtacatgaccctatcatgtgggcacaatgtcagcgctgtt

SEQ ID NO: 202350 - DNA, 201 bp, Homo sapiens
tcctttatatttcatgttatttctatataagaatttttaatgcactgtagctccttggatattagaccctatatcatatataacaatttacatttctgaaycttacaaaatatattgcatacagtagacagtagcaggtaataagtaaagtaacaaaagaaagtataatcagagtatctctgctctgctgacagatgtaca

SEQ ID NO: 202351 - DNA, 201 bp, Homo sapiens
tgtgggccttctaggtacatgaccctatcatgtgggcacaatgtcagcgctgtttcttctccattttctgttgaaattttctctttgtctgcagagttgcrcagtttcaatacataatatctaggaatggatttctgcttatttttcgtgagctattcattgacccacctgagtgtttagagctgacttctataactgttt

SEQ ID NO: 202352 - DNA, 201 bp, Homo sapiens
tatattgcatacagtagacagtagcaggtaataagtaaagtaacaaaagaaagtataatcagagtatctctgctctgctgacagatgtacaggaatatacytgaatatttgactttgtgtgttttacgtgttaacttccagataagggaatatgattgaataatttattattttgaaaatactgtattatgaagccatgtt

SEQ ID NO: 202353 - DNA, 201 bp, Homo sapiens
tgctggtttagtctactctcaaagatttaaactgtattttaaaattccttcagtgaatttttttgttttcaaatttttggttttttcccaaaataagtatmtctttttttctttccttgattgcttttgtagtttctttgtgtttgtttttgaccttctctggatcttattgagctttcttataatccatactttgaattc

SEQ ID NO: 202354 - DNA, 201 bp, Homo sapiens
cagaggacatgaaagccatagatggcctagacagaaatctccactattttaacagtgataggtaagtttcctttgtaaatgggtgatctaatttatttctrgagaaggaatgtaggatgggtgttgagagtgacctccataccagagggacagaggccaatgtgagtcagaggtgagactggaactctcctgctggattca

SEQ ID NO: 202355 - DNA, 201 bp, Homo sapiens; identical to SEQ ID NO: 35704

SEQ ID NO: 202356 - DNA, 201 bp, Homo sapiens
tagacagtagcaggtaataagtaaagtaacaaaagaaagtataatcagagtatctctgctctgctgacagatgtacaggaatatacttgaatatttgactytgtgtgttttacgtgttaacttccagataagggaatatgattgaataatttattattttgaaaatactgtattatgaagccatgttcataaaggtaagaa

SEQ ID NO: 202357 - DNA, 201 bp, Homo sapiens
caggtgccaattcccacctccttcatatggaattgcttgctagatcctgtcaattcagcatcttttattatttcaaatgtttttcctccttctccttgcaygtttgttcatgccccaaactctgcttttgcctccagaaagccttccttagtggagtgaataggagcgcttgtccttgatttcctgcaatatggagctctc

SEQ ID NO: 202358 - DNA, 201 bp, Homo sapiens
ctcacccacctctgcccacagctccctacaccatcatcaccttccccttcctgtttgctgtgatgttcggggatgtgggccacgggctgctcatgttcctsttcgccctggccatggtccttgcggagaaccgaccggctgtgaaggccgcgcagaacgaggtgaggggcggggctggggtcctgatgagggtagcagggc

SEQ ID NO: 202359 - DNA, 201 bp, Homo sapiens
caggcatgagccactgtgcctggctgctaagtgatgggttcttgactgcaggccagcagggcctccgtggcgtcttgggccgggaggcagatgctggtgtkttcgggggttcccagctcacccacctctgcccacagctccctacaccatcatcaccttccccttcctgtttgctgtgatgttcggggatgtgggccacgg

SEQ ID NO: 202360 - DNA, 201 bp, Homo sapiens
aagtggtctggtgttacctgcattttacagatggggaaatggaggctcagagaggtgaagtggctgggccaaggtcacacagctcctaagtggtgggttcttttttttttttttttttttcggagacagaatcttcgctctgtcgcgcaggctggagtgcagtggcgcgagctcggctcactgcaacctccgcctcccggg

SEQ ID NO: 202361 - DNA, 201 bp, Homo sapiens
aggcagatgctggtgtgttcgggggttcccagctcacccacctctgcccacagctccctacaccatcatcaccttccccttcctgtttgctgtgatgttcrgggatgtgggccacgggctgctcatgttcctcttcgccctggccatggtccttgcggagaaccgaccggctgtgaaggccgcgcagaacgaggtgagggg

SEQ ID NO: 202362 - DNA, 201 bp, Homo sapiens
ggcccaggagctgcgggatgtgcggggcaaccagcaggccctgcgggcccagctgcaccagctgcagctccacgccgccgtgctacgccagggccatgaayctcaggtcagctcccacccaggcaggagactggggggctggggaggggctgtccagcctagggctcatggtgcttctgggttcctagctggcagccgccc

SEQ ID NO: 202363 - DNA, 201 bp, Homo sapiens
tccagcctagggctcatggtgcttctgggttcctagctggcagccgcccacacagatggggcctcagagaggacgcccctgctccaggcccccggggggcygcaccaggacctgagggtcaagtgagtgagggatgacctcatgccctttctggccagcccagaacccctggccagtcgctgggctgggccaggctgagct

SEQ ID NO: 202364 - DNA, 201 bp, Homo sapiens
acttcatttgcagtgagaaaaccagctccgagaggtgaaagggcttgctcagggccatgcagggcacatcccataataaaactcagttcagagaccttgaccccccccatctaccatcatttccaaaagtgctttttacaaagcactactttgtaaaaagctacttcttcgaaagaacaagtttcctggcccagtgagtgt

SEQ ID NO: 202365 - DNA, 201 bp, Homo sapiens
tggaggtgaggcccgggccccagcccggctgggggccccgcagcacccgcagccctgaccgccctcccctgcgttgccgcagtgatgcattcctggcccarcacacgatgcttaccctggatcccaacgtcaccggtgtcttcctgggaccctacccctttggcatcgatcctgtgagtcctgggatggagtgtccgtggg

SEQ ID NO: 202366 - DNA, 201 bp, Homo sapiens
cacttgaggtcaggagtttgagaccagactggtcaacacggcgaaaccccctctactaaaaataaaaaattagctgggtgcggtggcgggcgcctgtaatcccagctactcaagaggctgaggcaggagaattgcttgaacccgggaggcggaggttgcagtgagccaagatcgggccactgtactcctcctgcctgggca

SEQ ID NO: 202367 - DNA, 201 bp, Homo sapiens
gggtgctacactgaacaaagcggtgaacagccccctcgtgagagggggttcttggcagatgacgccagcagctgacaaacaggcaaggcaggccgggcacrgtggctcacgcttgtaatcccagcactttgggagtccaaggtaagcggatcacaaggtcaagagatcgagaccatcctggtctacatggtgaaaccccat

SEQ ID NO: 202368 - DNA, 201 bp, Homo sapiens
tcaggccggggcatccttgctgggggtaggaggaagcctgcttggggtgacagtcacacgagggtgacacaggccctgctggccctgagctggcctgcgtmcagccacatcctctttcctgtgttccctacgccagggtgctggcccggccactgctcaccacttcctgctttgctggcccagcgacacggtggggtttcc

SEQ ID NO: 202369 - DNA, 201 bp, Homo sapiens
catcttggccactgatgaaaacaggtgttctttccaaaaacaaggcaggcgcaggactcctgaagcaccgccggtttagcttttcccagacgtaaccgccrtcagagcgtggcatggagcctgtagctgtgcactgaatacttctattccaagcgggtcagtctttccagctcaccgctgggttctttcccttaccgtggt

SEQ ID NO: 202370 - DNA, 201 bp, Homo sapiens
ttctttcccttaccgtggtctcccaggcacttactgctgagaccccactcaggctgtctggttgtatcaggccccgaccctgtcagaacaggcctatggcrcccaaccacaagtcccccaattttctgaggaaccacagctgagcttggctgtgactcagtttccaggcccggctctggggctccacttgtccacccctgc

SEQ ID NO: 202371 - DNA, 201 bp, Homo sapiens
gggtctgcggagccccagaatttcctgcccaccctcttccccctgccccggggaggagatcctggcgccccacccagttggctccgtgaatgcagctcagmccgccaccccgcagggtgtcaggccttgcggggggccacggaggatccccaagggaggaggagaaggatggggtgtttaccaacacagcccagcgttccc

SEQ ID NO: 202372 - DNA, 201 bp, Homo sapiens
cacagggctctacatctccagctgggcctggctggagatcccagggtccctgaaggcccccgccaccgttctggtctgtctctgccctggcacccagatgkaggagggagtgagtgccgtggctcaccgcatcccctgccgggacatgccccccacactcatccgcaccaaccgcttcacggccagcttccagggcatcgt

SEQ ID NO: 202373 - DNA, 201 bp, Homo sapiens
gtttgctgtgatgttcggggatgtgggccacgggctgctcatgttcctcttcgccctggccatggtccttgcggagaaccgaccggctgtgaaggccgcgyagaacgaggtgaggggcggggctggggtcctgatgagggtagcagggccaggcagcccctcaccacaccactgcccccccagatctggcagactttcttc

SEQ ID NO: 202374 - DNA, 201 bp, Homo sapiens
tgaggtgttgtcagcaggagtggctccttctgaggctgtccaggaagatctgttcccggcctctctcctgggcttggagcggccgtcctcatcttcacacrctgttctccttctatgtgggtccaaatgttccttttcataaggacatcgggcacactggattggggcccactgtaatggccttatcttaacccagtgacc

SEQ ID NO: 202375 - DNA, 201 bp, Homo sapiens
tgcagggccccaactttgagttctccacggagacccatgaggagctgctgtacaacaaggagaagttgctcaacaacggggacaagtgggaggccgagatmgccgccaacatccaggctgactacttgtatcggtgacgccccaccggcccgcagcccctgctgcccaataaaaccactccgaccccacggcctcttgtct

SEQ ID NO: 202376 - DNA, 201 bp, Homo sapiens
agctccctgacccccttcccgggacactcacccctccgtgtggcacccacagctcaacgcctcggtgagcgccttccagagacgctttgtggttgatgttyggcgctgtgaggagctggagaagaccttcagtgagttggtcccaggcctacattccaggcaggcttcctggaggaggcatgggccaagtttgatctgaaa

SEQ ID NO: 202377 - DNA, 201 bp, Homo sapiens
ctcgtggagttcagagacgtgagttgggtgggcaggcgtgggaagggggctactgccaaggttagcccggaggccggtccaggatggggactgcccccccyccgccatagggccctggccccatttgaaccccagcggcccctgccatgggcactgctcatgggaagcccgcagctgaggcccctgagctggctcctcccc

SEQ ID NO: 202378 - DNA, 201 bp, Homo sapiens
ggccccgcagcacccgcagccctgaccgccctcccctgcgttgccgcagtgatgcattcctggcccagcacacgatgcttaccctggatcccaacgtcacyggtgtcttcctgggaccctacccctttggcatcgatcctgtgagtcctgggatggagtgtccgtgggtggtgaaggcagctgggagtgggggctggggct

SEQ ID NO: 202379 - DNA, 201 bp, Homo sapiens
cacccagatggaggagggagtgagtgccgtggctcaccgcatcccctgccgggacatgccccccacactcatccgcaccaaccgcttcacggccagcttcyagggcatcgtggatgcctacggcgtgggccgctaccaggaggtcaaccccggtgagagccacggcatccttacccgtgtcctgggaggctcagctgcccc

SEQ ID NO: 202380 - DNA, 201 bp, Homo sapiens
ggcatgaccctgagctacctgttccgggaaccggccaccatcaactacccgttcgagaagggcccgctgagccctcgcttccgtggggagcatgcgctgcrccggtacccatccggggaggagcgttgcattgcctgcaagctctgcgaggccatctgccccgcccaggtgagcccctgccccaaccggccaccacgccag

SEQ ID NO: 202381 - DNA, 201 bp, Homo sapiens
tgtggccgccatggccaaccagtctggctggaggtgaggcccgggccccagcccggctgggggccccgcagcacccgcagccctgaccgccctcccctgcrttgccgcagtgatgcattcctggcccagcacacgatgcttaccctggatcccaacgtcaccggtgtcttcctgggaccctacccctttggcatcgatcct

SEQ ID NO: 202382 - DNA, 201 bp, Homo sapiens
cctttgcttgcagagctgtccgaggttctgtgggccatggtgatgcgcataggcctgggcctgggccgggaggtgggcgtggcggctgtggtgctggtccscatctttgccgcctttgccgtgatgaccgtggctatcctgctggtgatggagggactctcagccttcctgcacgccctgcggctgcactggtgagcgacc

SEQ ID NO: 202383 - DNA, 201 bp, Homo sapiens
caaccacttgagcttcctcaactccttcaagatgaagatgtccgtcatcctgggcgtcgtgcacatggcctttggggtggtcctcggagtcttcaaccacstgtgagggccaaggctgcccgggggacgggaggctggcaggccagagtgggccccagtgagcacacctccctcttgcccgccaggcactttggccagagg

SEQ ID NO: 202384 - DNA, 201 bp, Homo sapiens
cactgcccccccagatctggcagactttcttcaggggccgctacctgctcctgcttatgggcctgttctccatctacaccggcttcatctacaacgagtgmttcagtcgcgccaccagcatcttcccctcgggctggagtgtggccgccatggccaaccagtctggctggaggtgaggcccgggccccagcccggctgggg

SEQ ID NO: 202385 - DNA, 201 bp, Homo sapiens
ctccttcaagatgaagatgtccgtcatcctgggcgtcgtgcacatggcctttggggtggtcctcggagtcttcaaccacgtgtgagggccaaggctgcccsggggacgggaggctggcaggccagagtgggccccagtgagcacacctccctcttgcccgccaggcactttggccagaggcaccggctgctgctggagacg

SEQ ID NO: 202386 - DNA, 201 bp, Homo sapiens
ctgaccgccctcccctgcgttgccgcagtgatgcattcctggcccagcacacgatgcttaccctggatcccaacgtcaccggtgtcttcctgggaccctamccctttggcatcgatcctgtgagtcctgggatggagtgtccgtgggtggtgaaggcagctgggagtgggggctggggctcccctcggttcagccgtcctg

SEQ ID NO: 202387 - DNA, 201 bp, Homo sapiens
cgggggacgggaggctggcaggccagagtgggccccagtgagcacacctccctcttgcccgccaggcactttggccagaggcaccggctgctgctggagaygctgccggagctcaccttcctgctgggactcttcggttacctcgtgttcctagtcatctacaagtggctgtgtgtctgggctgccagggccgcctcggcc

SEQ ID NO: 202388 - DNA, 201 bp, Homo sapiens
gtgcttgcgggtgaggctgggctccttctcctgggccgtccctaggaggcagcatgcttgcctttcccaagcaattgccaatccatgtggtgtctttgggsccccaccagggcagagcagggctgatcatctcacgtcagagagaggggaaggggctgcccagtgagcccccacagggctctacatctccagctgggcctg

SEQ ID NO: 202389 - DNA, 201 bp, Homo sapiens
tatcttaacccagtgacctctgtaaggaccctgtctccaaagaaggtcacatctggagttcctgggggttgcgactccagtgtatcttttttggggtcacaacacagcccctgacagtgtgtatgttggggtcctcctgcctcccatgaggacttgttcccattttactgatgggaagtcgagacttcagagctgaagtga

SEQ ID NO: 202390 - DNA, 201 bp, Homo sapiens
tcttaacccagtgacctctgtaaggaccctgtctccaaagaaggtcacatctggagttcctgggggttgcgactccagtgtatcttttttggggtcacaacacagcccctgacagtgtgtatgttggggtcctcctgcctcccatgaggacttgttcccattttactgatgggaagtcgagacttcagagctgaagtgacc

SEQ ID NO: 202391 - DNA, 201 bp, Homo sapiens
ctgctggctgggcgggttgcttctctctgggcctcagtttcccctctgtaaagtgggactgtccaaggaggtccctcgctggccccccgtgcagggagggyttcaggctgcggcaggtaggtagggggctggcaggcacccacttgccgttggcccccactgtctcctttgcttgcagagctgtccgaggttctgtgggcc

SEQ ID NO: 202392 - DNA, 201 bp, Homo sapiens
gatgtgcggggcaaccagcaggccctgcgggcccagctgcaccagctgcagctccacgccgccgtgctacgccagggccatgaacctcaggtcagctcccrcccaggcaggagactggggggctggggaggggctgtccagcctagggctcatggtgcttctgggttcctagctggcagccgcccacacagatggggcctc

SEQ ID NO: 202393 - DNA, 201 bp, Homo sapiens
tgcgcatccaggaggagacggagcgcctggcccaggagctgcgggatgtgcggggcaaccagcaggccctgcgggcccagctgcaccagctgcagctccaygccgccgtgctacgccagggccatgaacctcaggtcagctcccacccaggcaggagactggggggctggggaggggctgtccagcctagggctcatggtg

SEQ ID NO: 202394 - DNA, 201 bp, Homo sapiens; identical to SEQ ID NO: 35722

SEQ ID NO: 202395 - DNA, 201 bp, Homo sapiens
ctggccatggtccttgcggagaaccgaccggctgtgaaggccgcgcagaacgaggtgaggggcggggctggggtcctgatgagggtagcagggccaggcarcccctcaccacaccactgcccccccagatctggcagactttcttcaggggccgctacctgctcctgcttatgggcctgttctccatctacaccggcttca

SEQ ID NO: 202396 - DNA, 201 bp, Homo sapiens
ggtggtcctggccttggccatggtgcccatcctgctgcttggcacacccctgcacctgctgcaccgccaccgccgccgcctgcggaggaggcccgctgacygacaggtgggaccggggcctaaggtgtggggggctgcttgcggggagaggccactgtccggtgtgtccctgactcctcgcttcctgacagactcctgagt

SEQ ID NO: 202397 - DNA, 201 bp, Homo sapiens; identical to SEQ ID NO: 35707

SEQ ID NO: 202398 - DNA, 201 bp, Homo sapiens
cctgcacgccctgcggctgcactggtgagcgaccacccactggcctgggctgctcaaggcgtgagttcccctcaccaacccctctgcttctcacccccagrgtggaattccagaacaagttctactcaggcacgggctacaagctgagtcccttcaccttcgctgccacagatgactagggcccactgcaggtcctgccag

SEQ ID NO: 202399 - DNA, 201 bp, Homo sapiens
tacatggatgatagatgtagatgatagatggatacaaagaagatagatatagatgatagattagacagatgatatataaatagatgatagataaattgatggatgatagatagatagatagatagatagatagatagatagatagatagatgagacatagatagtctcaagtacccattacttaccacccttgaggggatt

SEQ ID NO: 202400 - DNA, 201 bp, Homo sapiens
acatggatgatagatgtagatgatagatggatacaaagaagatagatatagatgatagattagacagatgatatataaatagatgatagataaattgatgratgatagatagatagatagatagatagatagatagatagatagatagatgagacatagatagtctcaagtacccattacttaccacccttgaggggattt

SEQ ID NO: 202401 - DNA, 201 bp, Homo sapiens
catggatgatagatgtagatgatagatggatacaaagaagatagatatagatgatagattagacagatgatatataaatagatgatagataaattgatggatgatagatagatagatagatagatagatagatagatagatagatagatgagacatagatagtctcaagtacccattacttaccacccttgaggggattta

SEQ ID NO: 202402 - DNA, 201 bp, Homo sapiens
ttgaacctgggaggcagaggttgcagtgagccgagattgcgccactgcgctccagcctgggtgacagagtgagactctgtctcaaaaaaaaaaaaaacccraaaaacaaaaaaaaaaccctcaggagagtgaaatgttgaattaaaaagatggaaagggttatgtcaggcaaattctaaagagcagaaagctggggtaacc

SEQ ID NO: 202403 - DNA, 201 bp, Homo sapiens
atggatgatagatgtagatgatagatggatacaaagaagatagatatagatgatagattagacagatgatatataaatagatgatagataaattgatggatgatagatagatagatagatagatagatagatagatagatagatagatgagacatagatagtctcaagtacccattacttaccacccttgaggggatttaa

SEQ ID NO: 202404 - DNA, 201 bp, Homo sapiens
aagtaataaaatcctcatgctaaatcctccttagttgtggtcattgtgttgccaccggccaagtgacaaaacccacttgttgtgtaggtcacagaactatragaaaaagcaaaaaagtgcttaccgttgacaaagattctctccttggccaaactctagccaggttccttggagtgcttttgagtagaccttgactttggc

SEQ ID NO: 202405 - DNA, 201 bp, Homo sapiens
ccatcatagacaaaaatactaacctcgttatagctttggggatagatggggaaaacatgagaaaaattttttgatggctacaattgtctcttgaacgatgsaggggttagaggtgcttacctccttggcagttgaaagtccacaaataacttcaggctcctagaaacttcactactaatagtctactttttttttcttttt

SEQ ID NO: 202406 - DNA, 201 bp, Homo sapiens
atgatagatgtagatgatagatggatacaaagaagatagatatagatgatagattagacagatgatatataaatagatgatagataaattgatggatgatagatagatagatagatagatagatagatagatagatagatagatgagacatagatagtctcaagtacccattacttaccacccttgaggggatttaaaaga

SEQ ID NO: 202407 - DNA, 201 bp, Homo sapiens
tagatgtagatgatagatggatacaaagaagatagatatagatgatagattagacagatgatatataaatagatgatagataaattgatggatgatagatagatagatagatagatagatagatagatagatagatagatgagacatagatagtctcaagtacccattacttaccacccttgaggggatttaaaagaagta

SEQ ID NO: 202408 - DNA, 201 bp, Homo sapiens
tgcaggtcctggcattctaggtctcattgtttcactccctaacagacctcagaaaggagaacctctaactcccagtggcatttagcttccctctttaaacrtctgggtcacagatatgctcagttaattaatgttcttagtgctgctcatctgcctgctggataatagattgattcataatttcagtaagcagctgtgtat

SEQ ID NO: 202409 - DNA, 201 bp, Homo sapiens
tggccggctcttggatttaaatacaacctctacactgacaacttccgaatgtacgtccctcctcttatagctggctggctgctggctccacacctgtaccyggaagaaagactgaggggtgcatcaaagtggtatctctaaaagagcttcggattccttcccctcatcccaacttcagacttctctgttgcttaagtgaaa

SEQ ID NO: 202410 - DNA, 201 bp, Homo sapiens
cttatagctggctggctgctggctccacacctgtacccggaagaaagactgaggggtgcatcaaagtggtatctctaaaagagcttcggattccttccccycatcccaacttcagacttctctgttgcttaagtgaaatttttgaagtcatcctcattcctctgatttccttgccttctgaacttgctctgtaagcaagtc

SEQ ID NO: 202411 - DNA, 201 bp, Homo sapiens
tgatctcagctcactgcaacctcttcttcctgggtttaatcaattctcctgcctcagcctccagtgtagctgggattacaggcatgtgccaccacacccarctaattttgtatttttactagagacgaggtttctccatgttggtcaggctggtctcaaactcccgacctcaggtgatccacccacctcggcctcccaaag

SEQ ID NO: 202412 - DNA, 201 bp, Homo sapiens
ttggtcaactcccacttatgagtgagaacatgcagtgtttggttttctgttcctgtgtttgctgagaagcatggtttccagctacatccatgtccctgcaraggacatgaactcattctttttaatggctgcatagtattccatggtgtgtatgtgccacattttctttatccagtttatcattgatgggcatttgggttg

SEQ ID NO: 202413 - DNA, 201 bp, Homo sapiens
atggtgcaatgatggcttactgcagcctcgactgcctgagctcaagcgattcccccacctcagcctcccaagtaactgcaccacagtcatgtgccaccggrtccagttaattttttaaattattatttgtagcaactagatggtgttactatgttccctaggctgatatcttcacattttaacatctgtgaaattgaggtg

SEQ ID NO: 202414 - DNA, 201 bp, Homo sapiens
ggtggtggtgtgctcttgtaatctcagctacccaggaagctgaggaaggagggttgctggagcccaggaggtcgaggctgtagtgggctgtgatcactccwctgcactccagcctgggcaatagaaggagaccctgtcacaaataataataaaaaaagagtaagcttttgaaaagttcgttatttttctgctgacaccaaa

SEQ ID NO: 202415 - DNA, 201 bp, Homo sapiens
ggggaggaggtgcgaggctctttttaacagtctgatttcatgggaactaagatggagaactcactgaattccataagaatggcaccaagcctttcgcgtcyatgacccaaacacctaccaccaggccccaccttcaatattagggatcacatttcaacatgagatttggaggggacaaaccatatcactcggccccctccc

SEQ ID NO: 202416 - DNA, 201 bp, Homo sapiens
gaggtcacatgatgagtggagagagagaggggaggaggtgcgaggctctttttaacagtctgatttcatgggaactaagatggagaactcactgaattccrtaagaatggcaccaagcctttcgcgtccatgacccaaacacctaccaccaggccccaccttcaatattagggatcacatttcaacatgagatttggaggg

SEQ ID NO: 202417 - DNA, 201 bp, Homo sapiens
ctaggatatattccattatagatgtacaaccaatgtctttaaaattatttgacataattttctctgtgtgattataccacctccttgatatagactattasagctatatggcattgaacaattaagttcacttttgttttttcttttctaccgaggctacaagtcagttaactaaactcagttgacctaaaattttagcat

SEQ ID NO: 202418 - DNA, 201 bp, Homo sapiens
tgctagcactttaggaagccgggacctgagaatcgctagaggttaggaaatcaagaccagcctggacgacaaggcaagaccctgtccatacaaaaaataawaataataacagtttaactgggcatggtgtcacatgtctgtagtcatagctactaaggaggttgaggtggaaggatcacttgaagccaggaatttgaggct

SEQ ID NO: 202419 - DNA, 201 bp, Homo sapiens
agactttcacgcagtggcacagcctgatctgatttcctgttgagacctagttcatttgcctaggacttcatccctttagcaatggattcctgcaaggcttytccagccccatgtggcccttgtccagccattaaactccagtcctaggacatgggccctgtcactagcacccctgctagcctaagtatcactttatgcaaa

SEQ ID NO: 202420 - DNA, 201 bp, Homo sapiens
taaaaaaaaaataagaaagattgatttagaccaagagagagccagtttttcctggaggataggaaactggatattgaactggggaaccagagggtacattggggaggatcaggcaggggattagcaaggcacggaaaaccagagactcatggtcataatgacacctaactgtaatcactccccacgtgcccggtaccgtgc

SEQ ID NO: 202421 - DNA, 201 bp, Homo sapiens
attccagtcctgttgctgcagaggcagctcccagctcccagcacacaccccaaaacagattgaccctccttaactctcctttggtaacctaggaagccaakaaaagctgtatctttgatgtctcggctttgaaaaagaattgctgtaatgtggcgtaattggagcatttcaaattaggaatggaattatgataattgactc

SEQ ID NO: 202422 - DNA, 201 bp, Homo sapiens
atcataacatgtaatataatacattataatatataatatattgtgattgatgtagtatataatatataattacaatttgtttacattatatattatatttwtgttatatattatgtgttaatatgtaactaatatattagtgtatacattagttaattatataatcatattatatattataattatgtattgcatattata

SEQ ID NO: 202423 - DNA, 201 bp, Homo sapiens
ccacgcccagccaaaaagtaggacatcttgaagcagggcccaaaggtctaaggtggagtcaaagattttctgatttgcgattgctccaggacgcaaagctytgtgtaaaaatctgaggtcagcagaaaagaacattagtgctccctcatggacatgacctcctccagaccccttgggaagaaatttagaaacaagcactgt

SEQ ID NO: 202424 - DNA, 201 bp, Homo sapiens
tattaagaataaataattattatatcatatggttaataattaactaatttatatatgaatatattagttctatattaatatataaatatattaattacacwttaaatactattaactatatgaatatataaatatattaattatgccacatataattttattatatatgtgattatgtatcagttatatacttaattatat

SEQ ID NO: 202425 - DNA, 201 bp, Homo sapiens
ctgacctcaggcgatccacccaccttgacctcctaaagtgctgggattagaggtatgagccactgcgcccagccgatagatcgtttttttaacccaccccytgcaaaccctctagtagtccacaatatctgttgttcctgtgtttatctccatgtgggctgagtgtttagttcccatttataagtgagaacatgcaggatt

SEQ ID NO: 202426 - DNA, 201 bp, Homo sapiens
cacttaggataatggcctccagctcaattcatgttgctgcaaaggacataatttcatttgttttatggctgcctagtgttctgtggtgtatatgtaacacrtttcctttattctaccattaatgggctcttgggttgaccatgtctttgctattgtgaatagtgctgtgatgaacatacgagtgcaggtgtctttttggta

SEQ ID NO: 202427 - DNA, 201 bp, Homo sapiens
aatatgttctcaggctgctacaaagaattgccagagactgggcaacttatgaaggaaagaggtttgactcacacagttctgcagggctggggaggcctcaraaaacctacaatcatggaggaaggggaagcaaacacatccttcttcacgtggtggcaggaaggagaagtgctgagcagaagggggaaaagccccttataa

SEQ ID NO: 202428 - DNA, 201 bp, Homo sapiens
tgggtgtacaaagccggggcactctggagaagcagacgagatgagactgcagattttcctttgtcagggaattttgtttttattttaagtcatttgtttcmctcagtttgaatattgacattggcctgtgttaagcccaggtaagatgcaattctttgtactctgtacatccagctgaaatcattcaggcaacatttgcca

SEQ ID NO: 202429 - DNA, 201 bp, Homo sapiens
tcatccatatggttcacgatgtctccaggatgaaatgaatcagaagcagaatgactctgccaggggctgagacgctaaagaaatttcccttactttgtcayaaaggattccctaaatcatatcactatgtgttcaatggcatcgtctttgtaaatgtaacttcacattccgtgtgcctatttgcatctgtttgcaaataga

SEQ ID NO: 202430 - DNA, 201 bp, Homo sapiens
ataattggaaaaaaataaatactgaagagactaaccagaggcaactgctcattcgcccatgcccttaccctctttaatgcacattttgcatagttaagatsaatagtataaacaagttgatgttctgctttttcccccgaagtgtaaagcataatcagtgccccccttttttttttattaaaaaatctctgcaaacatcat

SEQ ID NO: 202431 - DNA, 201 bp, Homo sapiens
agagactgaggggcatcactgcacttgggagctagagttgaggcaagcagccaggaaggcctgcagatcggccacacagtttcgcccatgtgagccaagcsataccgagaaacccaggtagaccctcgaaaggggagcgctcgccttagacagacccaagagacaagggctggaggctgagctcaggcccagtggtcacct

SEQ ID NO: 202432 - DNA, 201 bp, Homo sapiens
tgcccggtatgacacttaaccttaaagaaatatttgtaggaaggatggctgaataggcgggtggatggatggatgaatggatgaatggatggattgatggwtagatggatggatggatggatggatggatggatggatggatggatggattgatggatagatggatggatggatggatggatggatggatggatggatgga

SEQ ID NO: 202433 - DNA, 201 bp, Homo sapiens
ggtgagagtgagaggagataagggaaggaaggaggaggatgaaccatttgccatcatgtagatcttggtgtgtactctgagtagaatgggagccatgggarggttttgagctgaggtgcaatattgggatggttaatttcataggtaaatttcactggtcgcagggtgcccggattaaatattaattctgcacgtgtctgt

SEQ ID NO: 202434 - DNA, 201 bp, Homo sapiens
cagatgttaccatcctgactgcctagtgtcatttgcagtgacatgaagcctgcagaaaaagagcagggaaaaattgtgaaatatagggggctcttcctctstctccacctggcccctcaagcaccttcatcctctgccggtgcttgttttgggtaatgcgtgtcccatctgttgatgccctccgcctgctgcagtgggagg

SEQ ID NO: 202435 - DNA, 201 bp, Homo sapiens
gttcacccaaaatgctgggatgacaggtgtgagccactgcatccagccctttaaagaaggctttaaaggacctgaagatgtttagtctaaaaaaaaaaagaaaaagaaaaaagactggggctgagagagccctttcttcagatacctgaaaagatgctcttacaaggaccattaaggctcaagataaggaacagccttgtg

SEQ ID NO: 202436 - DNA, 201 bp, Homo sapiens
ttcacccaaaatgctgggatgacaggtgtgagccactgcatccagccctttaaagaaggctttaaaggacctgaagatgtttagtctaaaaaaaaaaagaaaaagaaaaaagactggggctgagagagccctttcttcagatacctgaaaagatgctcttacaaggaccattaaggctcaagataaggaacagccttgtgt

SEQ ID NO: 202437 - DNA, 201 bp, Homo sapiens
gtggtccgctgcctctacctcccaaagtgctgggattccaggcgtgagccaccacgcctggcttggtcctagggatttttatttctaacaagcccccagaygatgctgttgcggatgctacagacctgtggaccacatgtggaaattagggctgatggtattgatttctctgtggagtaggaggcactatcccttgcggac

SEQ ID NO: 202438 - DNA, 201 bp, Homo sapiens
tcacccaaaatgctgggatgacaggtgtgagccactgcatccagccctttaaagaaggctttaaaggacctgaagatgtttagtctaaaaaaaaaaagaaaaagaaaaaagactggggctgagagagccctttcttcagatacctgaaaagatgctcttacaaggaccattaaggctcaagataaggaacagccttgtgtc

SEQ ID NO: 202439 - DNA, 201 bp, Homo sapiens
gctgcagtgagctatgattgtgccgctgcactccagcctgggcgacagagcaaaaccctatctctaaaaaagaaaaaaagaagatgctgtagctcctgaaygcctgcactcttggagtggggatgaccagagtgaagagtgccatgatggcagcccacagagggacagaaagtaacaaaggagaagtgcctgataccaggc

SEQ ID NO: 202440 - DNA, 201 bp, Homo sapiens
ttgtatgaatcccaagctgtcagtctttccattttcatttcttccctgctttaaagtgtaaaaagatattatccctcagaatacttataaatattctattytgttttgtgttgcttttctatgactcttttatatttcacccttccttctagagtttattttggaatatggttcaagtttgcatcttttgttccaaagatc

SEQ ID NO: 202441 - DNA, 201 bp, Homo sapiens
cccaaaatgctgggatgacaggtgtgagccactgcatccagccctttaaagaaggctttaaaggacctgaagatgtttagtctaaaaaaaaaaagaaaaagaaaaaagactggggctgagagagccctttcttcagatacctgaaaagatgctcttacaaggaccattaaggctcaagataaggaacagccttgtgtccgg

SEQ ID NO: 202442 - DNA, 201 bp, Homo sapiens
ctaggtaagggtttttaaaggcagagaggcagaggttacaggcaaagtcagaaattgacacatggaagctgtacattgtttcgacctataaaagtaggactttttttttttttaagactttctctcttgttgcccaggctgcagtgcaatggtgtaatctcagcttattgcaacctctgcctcccaggttcaagcaattct

SEQ ID NO: 202443 - DNA, 201 bp, Homo sapiens
acacaatggacttcggtgactcaggggaaagggtgggaagggggtgagggaaaaaagactacaaatagggtgcagggtatagtgcttgggtgatgggtgcrtcaaaatctcacaaatcgccactaaagaacttactcatgtaaccaaacacccccgttccccaataacctatggaaataaaaaataaaacaaattgggaaa

SEQ ID NO: 202444 - DNA, 201 bp, Homo sapiens
ccaggactgctgtactggatggcttcaactcatctcagatttctagagcctagaagtctgaaacaaagatgttggcagaccacgctccttctgaagaatcyttccttgccacttttagcttccaggttctggtgtttggagtgatacagctacaagctagacattccttggcaggtacatttggcttgtagctgcattact

SEQ ID NO: 202445 - DNA, 201 bp, Homo sapiens
tgagcatagcttgtgtttggagcctaagataattgagcttctttctcctgctaacttttttatttatgatacttaagaggaggtcaagctaggcagttcakcttagcttttgatgtgtgcccaggagagggtgggatgggggatgcagcaaaaagtaataataatgatactaagaaaagaggtcactgtgtgtcagttact

SEQ ID NO: 202446 - DNA, 201 bp, Homo sapiens
aacagcagccggcatgtgatgggtgcccctgtaaatgtctgtggaatggctgactggctagctgggtgggtagcagggcaggtggctgcaggggtgggggkggtccataagagtgagtgttctgagctgaacatacaactgccattcgatccagtaatcccactactggatattcactcaaaggaaaagaaatcattctat

SEQ ID NO: 202447 - DNA, 201 bp, Homo sapiens
ctgagaacagcagccggcatgtgatgggtgcccctgtaaatgtctgtggaatggctgactggctagctgggtgggtagcagggcaggtggctgcaggggtrggggtggtccataagagtgagtgttctgagctgaacatacaactgccattcgatccagtaatcccactactggatattcactcaaaggaaaagaaatcat

SEQ ID NO: 202448 - DNA, 201 bp, Homo sapiens
cattatctgttttgttggctgcggcctctccggcacctgagaacagcagccggcatgtgatgggtgcccctgtaaatgtctgtggaatggctgactggctrgctgggtgggtagcagggcaggtggctgcaggggtgggggtggtccataagagtgagtgttctgagctgaacatacaactgccattcgatccagtaatcc

SEQ ID NO: 202449 - DNA, 201 bp, Homo sapiens
tgaaacaatgtttttggagcctaattctcatttgtactttagagccaacagatgtttcttttaagaacataggaaaagagagtgagataaagagactttgrctaagcattcttttgatcagccatgaaaagtttgacttttaactgttggtcaaatacaatcatggcatttccaaaaatttttctctaatgagataatgtg

SEQ ID NO: 202450 - DNA, 201 bp, Homo sapiens
tttacacttatataattgtttcatacgggatagtgttaataataccaaatttcattcctaaagcaagctgacaaaagcatttaaagacttgctcattccamatgtgttagagcagctgagaatcacgatctggtgccagttcatttgctttcaatacttcctgcttttgggtgctgcatattttctttacaatagcccata

SEQ ID NO: 202451 - DNA, 201 bp, Homo sapiens
aatcatttgaacccgggaggcaaaggttgcagtgagccgagattgcaccattttgccccagcctgggcgacagtgcgagactacgtaccctccccaccccmccaaaaaaaaaaaaaaaaaaaaaaagaaacgaattttctaaacatatataaggtaaagagaataatataatggacttaatgtatgcatcacttggcttca

SEQ ID NO: 202452 - DNA, 201 bp, Homo sapiens
gcagatcacgaggtcaggagattgagaccagcctggccaacatgatgaaaccccgtctctactaaaaaaataacaaaaattagctgggcgtggtggtgggygcttgtaatcctagctactctggaggctgaggcaggagaatcatttgaacccgggaggcaaaggttgcagtgagccgagattgcaccattttgccccagc

SEQ ID NO: 202453 - DNA, 201 bp, Homo sapiens
cagtttcccgttgctgggcctctcacctattgttgctccttgaatgtcacctttcacctgcccacctgggctgtttccatcacctcctattggttttgccyccatccccagtgcctgctgtcctgccctcctacctcccacagtgccctgtggacaccatcccctgaacgacacccagccacacctacacctagcagccca

SEQ ID NO: 202454 - DNA, 201 bp, Homo sapiens
caggcatgaaccaccacgcccagccaaaatatagctttcaaaacaaaccagcgagaaaggcatcagcccactctggttcagaactcaaactcagacttccyggttcaaagcctggttcttcagcaagcaactaaacgtctccatgcctcaattccctaatttgttaaatgggcatgataataatggtacctaccttataga

SEQ ID NO: 202455 - DNA, 201 bp, Homo sapiens
cagggcagctctgtcataagaagaaaggcaatcgattcaacttagttaccaaatttagatttcagaaggatagtgaatagaagtggagttgcttaaagaarttgaaaatctttgtagaaatggagagaagtcaaaattacctcttccagtcctgcccccaagccactcaggcacttgaagttggagtctgagtgataggaa

SEQ ID NO: 202456 - DNA, 201 bp, Homo sapiens
tctttgctcatagtatccattactgctattaccttttagtagctgttttacaagaatcagaaagtactgtagagactgtctgccatttatggaagaaggcygggtactctagaaccaatggatttagagtggaaacagagcatttctgttatcgaggaaagagctaaacgggtcccaggtcactctgatccaaccttggga

SEQ ID NO: 202457 - DNA, 201 bp, Homo sapiens
gagagaagagagactgtggaagaactgatgacaggaacagcaaaactgagagaaggaaaatggggccaggagaggagcagatgctagaatggggtttgggytttcttggcactccaaagctcctgtatatttattgctatcctgattatgattgctcggttttaagaaggtagaagtcttttctggctgtaagcctacctg

SEQ ID NO: 202458 - DNA, 201 bp, Homo sapiens
taggtaagggtttttaaaggcagagaggcagaggttacaggcaaagtcagaaattgacacatggaagctgtacattgtttcgacctataaaagtaggactttttttttttttaagactttctctcttgttgcccaggctgcagtgcaatggtgtaatctcagcttattgcaacctctgcctcccaggttcaagcaattctc

SEQ ID NO: 202459 - DNA, 201 bp, Homo sapiens
ctgcctcccaggttcaagcaattctcctgcctcactttcctgagtagctgggactataggcatgtgccaccacacctggctaattttttgtatttttagtagagacagggtttcgccatgttggccaggctggtctcgaactcctgacctcaggtgatccacctgccttggcctcccaaagtgctgggattacagacatga

SEQ ID NO: 202460 - DNA, 201 bp, Homo sapiens
tgcctcccaggttcaagcaattctcctgcctcactttcctgagtagctgggactataggcatgtgccaccacacctggctaattttttgtatttttagtagagacagggtttcgccatgttggccaggctggtctcgaactcctgacctcaggtgatccacctgccttggcctcccaaagtgctgggattacagacatgag

SEQ ID NO: 202461 - DNA, 201 bp, Homo sapiens
taacttgcatgcaacaatgagtaaattccccttaaacaaaaatggactagttatgttaatttcttgttgtttcactgttacgttaagagacagtggtgatbtgccaggtatctatgtgcctatgctttcaggaagaaagcttctgaaaatagatcacaggctttcaccgggagggttttattttatattttattttattgc

SEQ ID NO: 202462 - DNA, 201 bp, Homo sapiens
acttgcatgcaacaatgagtaaattccccttaaacaaaaatggactagttatgttaatttcttgttgtttcactgttacgttaagagacagtggtgatgtkccaggtatctatgtgcctatgctttcaggaagaaagcttctgaaaatagatcacaggctttcaccgggagggttttattttatattttattttattgcat

SEQ ID NO: 202463 - DNA, 201 bp, Homo sapiens
aggccccctctccagacaatttcgctgcttactccctccagcccctctccattcattaatgtatgtacacattcactcattgattaagaactcagaactcwttgggtacttacttatgttccaggcacagtgctgggcagtagggacacaggatgacacagtctgtcctcattgaggtaacagcctagtaaagaagggaga

SEQ ID NO: 202464 - DNA, 201 bp, Homo sapiens
aagagttctgctttgcttccatccatcctcctgagcctccccaaactgagattcacgcccgaatctactttcccccatctctctgtttatctatctatctrtctgtctgtctgtctgtctgtctatctatcatctatctatttttataatggctttgtagatatattcacataccattataattcgtccatttaaaatgtg

SEQ ID NO: 202465 - DNA, 201 bp, Homo sapiens
agagttctgctttgcttccatccatcctcctgagcctccccaaactgagattcacgcccgaatctactttcccccatctctctgtttatctatctatctatctgtctgtctgtctgtctgtctatctatcatctatctatttttataatggctttgtagatatattcacataccattataattcgtccatttaaaatgtgc

SEQ ID NO: 202466 - DNA, 201 bp, Homo sapiens
gagttctgctttgcttccatccatcctcctgagcctccccaaactgagattcacgcccgaatctactttcccccatctctctgtttatctatctatctatctgtctgtctgtctgtctgtctatctatcatctatctatttttataatggctttgtagatatattcacataccattataattcgtccatttaaaatgtgcc

SEQ ID NO: 202467 - DNA, 201 bp, Homo sapiens
cacatagtattcatttataaacctacctccctgctgccctacacatttaataaatgtgctttaaactcatttactcacccccagcaaccttatgagtagtyactatttttagccccgttttacagagaagcaactaaagcacagagagattgagaaacgtgttgaagggtgcacagcacatgtggaggaactgtgatctgc

SEQ ID NO: 202468 - DNA, 201 bp, Homo sapiens
ggggttgtgcctgtctcctgtctcctgcttggggaattctgagggcaggagtttggtaggcaggaagggtgggcagcaatagagtggcctacatggcttcytctagcatgaccagcagatgtgagacttgaggcctcatggaggcaggaacagggaggaattaggctggctgcagaggggatctggcactgaggctgccaa

SEQ ID NO: 202469 - DNA, 201 bp, Homo sapiens
aattgtcctaatacttagggaacattttactccattctcttccaccaagcagcagctgatacaattgaactcttaaaatttcattcaagatattaataacytttggacatcatgtcagggaagcactgaaaatgcaggagggaaaatgtcaaaatcatcatcataattcagttgtcaacaaatatcaagatcatcgtactg

SEQ ID NO: 202470 - DNA, 201 bp, Homo sapiens
aaagaattcaagagtgagccagtagtagaagaaaccagctttatggaggcattagtgttacagctctgtgactgctcctgcagagcagggctgccccatargcagtgtgtggagtgcagccgctcagggtccgtgctgcagttctatttatacccacttttaattacacgcaaattaaggggtgggttatgcagaaatttc

SEQ ID NO: 202471 - DNA, 201 bp, Homo sapiens
tgtgtgtactggctcttttattcccctttatcctgcttattccttacagccatggagaacagcaggtttcttattttattttattaagttctggggtacakgtgcaggaggtacaggtttgttgtacaggtaaacgagtgccatgctggttttctgcacctgtgaacccatcacctaggtattcagcccagcatgcattag

SEQ ID NO: 202472 - DNA, 201 bp, Homo sapiens
cagcccttcttaagttttttgacacaagataaccagcaaacttctgggtatttccaggggatttaggtcactgcctattttactaaaggagttttttgacrgtatggctatattttaaatatctgtgtttttacgattgatatcctggaggctttcgtgccctttgctgtagtaacttgctaggaatatagagtgaatgaa

SEQ ID NO: 202473 - DNA, 201 bp, Homo sapiens
cccagcactttgagaggccaaggcgggcggatcactaggtcaggagatcgagaccatcctggctaacacggtgaaaccccgtctctactaaaaaaatacawaaagttagccggcgtggtggcaggcgcctgtagtcctagctacttgggaggctgaggcaggagaatggcgtgaacccgggaggcggagcttgcagtgagc

SEQ ID NO: 202474 - DNA, 201 bp, Homo sapiens
ttatgcttccagcctccagaacgatgagacagtgaatgtctgttgtttcagccacccagtctgtgcaattttgttatggcaatgctagcaaacaaatacasggaagagaactgtttgccacttgcaggaatttacctttagagcctccttgggttttccttgcctctgaaagagtgggtcacaaactttagtgggcttgca

SEQ ID NO: 202475 - DNA, 201 bp, Homo sapiens
ccctcttcttacaaagacagcagccattggattcatcctaatctagtagacctcatcttaacttaattacatcaacaaggactacatttccaaataagatsacattctgaggttctaggtggacatgtgctttgaagggacaccatgcaaccactgcaaactctgttctgtctgacttcagagtcatgttctcttcactgc

SEQ ID NO: 202476 - DNA, 201 bp, Homo sapiens
ctctttagcccctccgattaggaataaaaatgctagaaggagtgcttggagcatagtggaggagagagaattttctccaaaagttgttgagactgagaggkgctgagcaaatgcagcatgtgacctggtgtacagtgtcaagcacacatttgatgctgacaaatttcttaggtcttggcagggagagtgcttattcaattc

SEQ ID NO: 202477 - DNA, 201 bp, Homo sapiens
agttctgctttgcttccatccatcctcctgagcctccccaaactgagattcacgcccgaatctactttcccccatctctctgtttatctatctatctatctgtctgtctgtctgtctgtctatctatcatctatctatttttataatggctttgtagatatattcacataccattataattcgtccatttaaaatgtgcca

SEQ ID NO: 202478 - DNA, 201 bp, Homo sapiens
gttctgctttgcttccatccatcctcctgagcctccccaaactgagattcacgcccgaatctactttcccccatctctctgtttatctatctatctatctgtctgtctgtctgtctgtctatctatcatctatctatttttataatggctttgtagatatattcacataccattataattcgtccatttaaaatgtgccac

SEQ ID NO: 202479 - DNA, 201 bp, Homo sapiens
gcatacagtgtcttcacagcagaacagcctcacaggctcctgaaacttttctgtcattttcctttttttccactggtactaggaacctcatttccataaattaatttttttttttacaataaggttttttttttttttcccacctggaccaagagaagttggatagtccagctttccttttggagcaggtccttacggcct

SEQ ID NO: 202480 - DNA, 201 bp, Homo sapiens
catacagtgtcttcacagcagaacagcctcacaggctcctgaaacttttctgtcattttcctttttttccactggtactaggaacctcatttccataaattaatttttttttttacaataaggttttttttttttttcccacctggaccaagagaagttggatagtccagctttccttttggagcaggtccttacggccta

SEQ ID NO: 202481 - DNA, 201 bp, Homo sapiens
atacagtgtcttcacagcagaacagcctcacaggctcctgaaacttttctgtcattttcctttttttccactggtactaggaacctcatttccataaattaatttttttttttacaataaggttttttttttttttcccacctggaccaagagaagttggatagtccagctttccttttggagcaggtccttacggcctag

SEQ ID NO: 202482 - DNA, 201 bp, Homo sapiens
tacagtgtcttcacagcagaacagcctcacaggctcctgaaacttttctgtcattttcctttttttccactggtactaggaacctcatttccataaattawtttttttttttacaataaggttttttttttttttcccacctggaccaagagaagttggatagtccagctttccttttggagcaggtccttacggcctagg

SEQ ID NO: 202483 - DNA, 201 bp, Homo sapiens
acagtgtcttcacagcagaacagcctcacaggctcctgaaacttttctgtcattttcctttttttccactggtactaggaacctcatttccataaattaatttttttttttacaataaggttttttttttttttcccacctggaccaagagaagttggatagtccagctttccttttggagcaggtccttacggcctaggt

SEQ ID NO: 202484 - DNA, 201 bp, Homo sapiens
atttatttatttgtttagaaacaaagttttgccctgtcacccaggctggcgtgaagtggcactatctcagctcactgcaacctccacctcccgggttcaastgattcttgtgcctcagcctcctgagtagctggattataggcgtgcgccatcatgcctggctaacttttctatctttagtagagacgaggtttcaccatg

SEQ ID NO: 202485 - DNA, 201 bp, Homo sapiens
tacaggtggtatttggttacatgagtaagttctttagtggtgatttgtaagatcctggtgcaaccgtcacccgatcagtatacactgcaccatatttgttktctgttatccctcgcccccctcccactcttcccctgaagtccccaaagtccattgtatcgttcttatacctttgcatcctcatagcttagctcccacata

SEQ ID NO: 202486 - DNA, 201 bp, Homo sapiens
aaaagaagggaacaatgaattctcgcaggcctggtgccaagaagccaccccattctcttcctgctttctctctttgctgctgcttctccccctttgacttkgtgactactctgcctacaagttcagtttcattcctcaaagattgcggctgcctctgacgactgagcaaggggcacttgcagaaaagaaggtttcttgggt

SEQ ID NO: 202487 - DNA, 201 bp, Homo sapiens
ttgcagaaaagaaggtttcttgggtacacgaaatcatcccaacttgctccaacggcaacctttcctggctaagttaagaccaacttgagttcggctggtgkacttgaactcttatttatctttgccaacagtttctggggcctgcaaaataagcacgttaaaataccagtgatttttttttttttttttgctgctttgttg

SEQ ID NO: 202488 - DNA, 201 bp, Homo sapiens
taagcacgttaaaataccagtgatttttttttttttttttgctgctttgttgaacctttgtggcagattaagtgggggtgaaaatggaagcacatggaccraaaaatatgtaattcacaggtgtcacatcgcactgtgaggaatgatctttttggaggctgttaagtgaatgcctttcataatggaagcaataatgccaca

SEQ ID NO: 202489 - DNA, 201 bp, Homo sapiens
tggtctcaaagtcccggcctcaagcagtcctcctgcctcagcctcccaaagtgctgagattacaggtgtaagccactgtgcccaacctgtttcttatgtayatgtcacttgtcattggcaggcaaattggagttgttcacttggcacaatttcaattcttgggaactattatgggttgaattgcattttccccaaattcct

SEQ ID NO: 202490 - DNA, 201 bp, Homo sapiens
aaataagacagctgccagaggtgacgagcttgggccctcttcccgggagccgtgagcactgagggggtctacatcttgggcaccccgattacctgagcgtrcacctaggaggctgtgtttctgacgcgtgatgatggtgatggtgaacaagaatgtcaggatgaattgccctgttggtttcttcttttaaatcttaattga

SEQ ID NO: 202491 - DNA, 201 bp, Homo sapiens
attatagaagtgtcaagagatgcatagcatctccaaactggaagagacactgcaaatcatttggtggggtcaccaaccaagaggaggaagctccttcctcygtgaaatggagaccctggaaggttggcttcgtgtgccttgaatccctgaggtagtgcctggcagggggcttgccctggtgcccttggctgtgacagtggt

SEQ ID NO: 202492 - DNA, 201 bp, Homo sapiens
cagcctctttttcatccttaaactggtttgattccaaaagaattataaacccaggtgttaaatttcaacatatagagatgacatcctattgatcgtcacascggctcatcctcctgagtgggcagctgacttcgcagtgcagggattcccctatgtgtgcactttggaagcccttggacagttggagaagtccccatgctc

SEQ ID NO: 202493 - DNA, 201 bp, Homo sapiens
ctccgacccacagaggccttgcaggccttctggataaactttgttgctgtctaccttggtagttatttattctgagaaaaatttttaagaagaaggtaggmgtctttctggttatttctgtaaagaagctagggaaaaaattcataagtggttgttgcagcatgcagattttttttttttttttgagatggcgtctcactc

SEQ ID NO: 202494 - DNA, 201 bp, Homo sapiens
atctttttttttttgagacagtcttgctctgtcaccaagcctggagtgcagtggtatgatcccagctctctgtactcctgggctcaagtgaccctcctgcstcagcctcccaagtagctgggaccacaggtacatgccaacacatcctgataatttttatttttatttttattttgtagagatggaagtctcactatgttg

SEQ ID NO: 202495 - DNA, 201 bp, Homo sapiens
tttagtagagacagggtttcacggtgttagccaggatggtctcgatctcctgacctcgtgatccacccgcctcggcctcccaaagtgctgagattacaggygtgagccaccgcacccagcctcttggtcctgttttatggaaaaacatctattaagggagcagagaggatgacaaggtcttgggtaggggatggggagagg

SEQ ID NO: 202496 - DNA, 201 bp, Homo sapiens
gtgagccgagatggtatcgttgcactccagcctgggcaacaagagtgaaacgccatctcaaaaaataaagaaaaagaaagaaatatgactgttgcaactgmggaacagaatttttacttttctttagtttatattaatttacatttaaatttttaaaaatgatgcttttcagttttggaaactgaatatgtttggaataac

SEQ ID NO: 202497 - DNA, 201 bp, Homo sapiens
tccacggttttgtattatcctgagaaagctcagctcaagtgcagtttctttcgtgaagccttgataatgcaggttacaagtcagttctatgcaacaaatayggcaccttttgtgtcctaagccccacactggactctgaggatctaagagtaaatgagacatgtgtccatccccaagaagttttcagtctgctgatagaca

SEQ ID NO: 202498 - DNA, 201 bp, Homo sapiens
acactatctaggctggcagaggtcctgccatcccagattctgtgctgagaggtatagatttccaatgcagaggtagagaacatttttgagcaggagagggragagtttttctaaaaggactctctctctcgcactcctaccccctgcagaaatgccttctgcaacattcctgctgggtggctgagcggcctctgtgtgacc

SEQ ID NO: 202499 - DNA, 201 bp, Homo sapiens
tttttcaatgacaataatttggcacccaatatggggccgctctttttgccaacactgcgtatctcagtagctcggtactattgaccgttcaagtgagaatragagaggtaggagatgacactatctaggctggcagaggtcctgccatcccagattctgtgctgagaggtatagatttccaatgcagaggtagagaacatt

SEQ ID NO: 202500 - DNA, 201 bp, Homo sapiens
gttggtgtgctgcacccattaactcatcattcacattaggtatatctcctaatgctatccctccccactccctccaccccacagcaggccctggtgtgtgrtgttccccaccctgtgtccaagtgttctcattgttcaattcccacctatgagtgagaacatgtggtgtttggttttttgtccttgcaatagtttgctgag

SEQ ID NO: 202501 - DNA, 201 bp, Homo sapiens
tactgttaatttatttctttttatggctgaatcatctctagattacttatagataatacaatgtaaatgctgtgtaaataattcttatgctttatttgtattttttattgttgtattgttcttactgggcttttaaaaaatattttcagtctgcagttggttgaaccgatggatgcagaaaccatggatataaagggttgg

SEQ ID NO: 202502 - DNA, 201 bp, Homo sapiens
tcctgagtagctgagattacaggtgcccaccaccatgcccagctaattttttgtatttttagtagagacggggtttcgccgtgttggccaggctggtctcraactcctgacctcgtgattcactcacctctgcctcctaaagtgctgggattacaggcatgagccaccgtgcccagcccaggcttaagatcttctatgtga

SEQ ID NO: 202503 - DNA, 201 bp, Homo sapiens
caaagccaaggttggacttggggatctggataccagagataacgtgtacactttgatgtgtgggcctccggactgtgtgtgtgtgtgtgtgtgtgtgcgcrtgtgtgtgtgtgcatgtgtgtgtatatgtgtgcatgtgtatatacccatgtattttttttactaaaaccattccattcacaatgcctaataatttgaaat

SEQ ID NO: 202504 - DNA, 201 bp, Homo sapiens
gcaggagaattgcttgaacccgataggcagaagttgcagtgagctgagatcgcgccactgcactccagcctgggtgatagagtgagactctgtctcaaaaaaaaaaaaaaaaaaaaaatggtacctggcacacaacagtaattattaatagatctgaactgccttgccttttcttctccaaaataaaagcatgaatttttt

SEQ ID NO: 202505 - DNA, 201 bp, Homo sapiens
ctcagcctcccgagtagctgggattacaggcacacgccaccacgcccagctaatttttgtgtttttgtagcaacgaggttttgccatgttggccaggctgstcttgaactcctgacctcaagtgatccactcgcctcagcctcccaaagtactggggttacaggcgtgattttaaaaatttgatttaaacaacaaaataaa

SEQ ID NO: 202506 - DNA, 201 bp, Homo sapiens
acacaagaaaaaatacacatggatgaaaaacacatgacaattttaaatttatttcatagtcaaagaaaataaaaaattaaatacacagaggtgtttttttyccccctatctgcaaatgaacaaagattcattttttgtgttgatactttacaggcaaggccttagtaatatgaaaaaaatcatatcttctgtgagtgcaaa

SEQ ID NO: 202507 - DNA, 201 bp, Homo sapiens
ggcgcgtgcctgtaatcccagctactcagaaggctgaggcacgagaatcacttgaacccaggaggtggaggttgcagtgagccgagattgcgccactgcaytccagcctggtgacagagcaagactccgtctcaaaaataaaaaataaaaaagaagctctccttgttggccctagcatatttcaaacattgcagtagaccg

SEQ ID NO: 202508 - DNA, 201 bp, Homo sapiens
acacaatttgggtacataaagaacaaaatgccagccaggcgcagtggttcacacctataatcccagcactttgggaggccaaggcaggtggatcacctgargtcaggagttcgagatcagcctggccaacgtggtgaaacgccatctctgctaaaaatacaaaaaattaactgggcgtggtagcgggcgactgtaatccca

SEQ ID NO: 202509 - DNA, 201 bp, Homo sapiens
cttgaacccaggaggtggaggttgcagtgagtcgagatcgcgccattgcatttcagcctgggcaacaagagcgaaactctgtcccaaaaaaagaaaagaaragaaaaagaacaaaatgccttttcctctctttgtttccatggagaatataacctggaggggaatgaatatagatggaaaggaccagcaacatgacctttt

SEQ ID NO: 202510 - DNA, 201 bp, Homo sapiens
tcacttcaacctcgacctcttgggctcaagcaatcctcctccctcagcctcccaagtaggtgggactacaggtgcatgttgctgtgcccagctaattttgaaaaaaaaaaaaaaattttttttttagagatggagtcttgctatgttgcccaggctggtcttgaactcctaggctcaggcagtcctcctgccttgacctcc

SEQ ID NO: 202511 - DNA, 201 bp, Homo sapiens
catctataaaatgtaaagaataataaaacatatcttgcagagttgttgggaaaattgcattatttattctctttacaatggttagaaatgatgcagagtatttttttttaatttattaggcaacagctgtgtagatgtggctgccttttcaaatgatgccattcaccacagttatgtgctcaaccccaaacacgttttgag

SEQ ID NO: 202512 - DNA, 201 bp, Homo sapiens
ttcaagagattctcctgcctcagcctcccgagtagctgggattacaggcacctgcccccacgccagtctaatttttgtatttttagtagagactgggtttyaccatattggccaggctggtctcaaacacctaacctcaggtgatctgcccacctcggcctcccaaagtgctgggattacaggcgtgagctaccctacctg

SEQ ID NO: 202513 - DNA, 201 bp, Homo sapiens
tcctttgttcaatgcccgaggaggatattttctgcattattagacaagtcaatgaagataaaacaaaatattaagtattttaagctgcgccagtccacccygaagaaattaagccccctcattctaattgtgcctagtttccttgccgtaatgagatggaggctgagctgctggaatgaggggcttcctgcaggcctgcat

SEQ ID NO: 202514 - DNA, 201 bp, Homo sapiens
agctgctggaatgaggggcttcctgcaggcctgcatgccccccagtcattggagtgaacctctcctttcctctgcttagtttctttccctgggggaatttktagagccagagacctggtctccaggcgaggcaagaaataaacgcaacctccaccgtaagcgtgtgacattgatcagcatatttttaaaaaggtttccatg

SEQ ID NO: 202515 - DNA, 201 bp, Homo sapiens
ttccatcatgcaaagatttgtggtcttgtgtttgtatctgtgacactgtataatttccaattggcttttaagagacagaaacctggatgccattggctaarcagtgagagcatttgcctgcctttctgcctccttggaagctagagcagtcattaaaaactagagaagtgagcacacgcagcaccccccggcccatgggtg

SEQ ID NO: 202516 - DNA, 201 bp, Homo sapiens
ctgcacccattaactcatcattcacattaggtatatctcctaatgctatccctccccactccctccaccccacagcaggccctggtgtgtgatgttccccwccctgtgtccaagtgttctcattgttcaattcccacctatgagtgagaacatgtggtgtttggttttttgtccttgcaatagtttgctgagaattgcatg

SEQ ID NO: 202517 - DNA, 201 bp, Homo sapiens
tgcacccattaactcatcattcacattaggtatatctcctaatgctatccctccccactccctccaccccacagcaggccctggtgtgtgatgttccccaycctgtgtccaagtgttctcattgttcaattcccacctatgagtgagaacatgtggtgtttggttttttgtccttgcaatagtttgctgagaattgcatga

SEQ ID NO: 202518 - DNA, 201 bp, Homo sapiens
cttgctctattgcccaggctggtctcaaactcctggcctcaagtgatcctcccactttggcctcccaaagtgttgggattacaggcatgagccactgcacstggcccctgaaatgtaaaatgtaatggcttttagaatattcacagaattgtgtgtccatcaacacaatccattttagaccattttcattacctcagaaag

SEQ ID NO: 202519 - DNA, 201 bp, Homo sapiens
tttgctgagaattgcatgacatttttctagtcctcaaaaaattgacagaatttacctataataccctctgggtctaatgtctttctggatagtcattctcracagcctttccaggattttcagtgattagtctatgccagttttctactctgtcgcagaaagttttcttgaccattcttctactcatcatttaaaaattta

SEQ ID NO: 202520 - DNA, 201 bp, Homo sapiens
tccatcagttgggtcatgcctgggtgctaatttcctgccacttccaacttgcctcagagtgcagactcataggccaaggtcataatcgctgggagaacacrgaatccacccagatcaaaaggccctggaagccaagggcttcagcaggtgtagggagacctcagggatgcaggccaggtcctgacagtgtctccttaccag

SEQ ID NO: 202521 - DNA, 201 bp, Homo sapiens
tgagcctggacaatatagcaagaccccaactctacaaaaaatgaaatgataaataagtgatacatgataaataaatgacaagaaaaatgataaatagggcrcacacctgtagtcccagcttcttgggagtctgagatgggaggatcacttgagcccaagactttgaggctgcagtgaggtatgatttcaccactgcacttc

SEQ ID NO: 202522 - DNA, 201 bp, Homo sapiens
atttaaaaaaatcatttgtatttgcttccttggtttgttcctgagaagcagtatgaactgagcagagcagggggtgactctgtctactttctagtgcagtrtctgataaaaaggggcctctctggtggatacaggcccagaggctctggagcaagaattaagcatcttgtttttttgttgttgttgttttctggccagtta

SEQ ID NO: 202523 - DNA, 201 bp, Homo sapiens
aggtagattcaaacattttccaactgacaattggttgaaagagttaagttattatctggagacctagaatcaatagaaaggagcatttgggttatgatagrttcttgtggaggtcaaggtttttatcatgcagatgaagcctccaggcagcaggcttcagagctcttattggacataaaagggtgccagactcttacttaa

SEQ ID NO: 202524 - DNA, 201 bp, Homo sapiens
actattcttctgccctctgctttcccatgtaaaatgcagattcagtgaccactgatcaaagcctcaaatgaatgcaaccacgtacctcttttatctacttyattagtttgttttcatgctgttgataaagacatacccaagactgggtaacttacaaagaaaaagaggtttaatggactcacagttccccgtggctgggga

SEQ ID NO: 202525 - DNA, 201 bp, Homo sapiens
cgggcatggtggcatggtggcggacgcctgtaatcccagctactcaggaggctatggcaggagaatcgcttgaactcttggcggaggctgcagactccataaaaaaaaaaaacaaagcctctctgtagaaaggatctaatggcattcttgaacccaaaatatctgagacagatttcaaccattttagaaagtttattttgc

SEQ ID NO: 202526 - DNA, 201 bp, Homo sapiens
tgttttctacacacacacatgcatgcgcgtgcacatacacacaaccacacacacaaacacacatggttatcaacatgctgctaggaaaaattaaaaattgygcatcatatttctaaaagaggaagcagagaaaagggatttccagaattctaaacacgcctcccatcactgcgtctcctctcagctaggactttctgtttg

SEQ ID NO: 202527 - DNA, 201 bp, Homo sapiens
gtgacctattttgggaaagggaattcagtgccagcagaaaaaacaagcggtggcagtcagtgccctggggggaaactgacgacactgtataaaactgtcakgcaatgtgaatcatggagtccaccgtcagtatgagaagtgagacttggcactttcttgggaaggagaccccatgttctgaactcctcttgctccaggctt

SEQ ID NO: 202528 - DNA, 201 bp, Homo sapiens
agcattgcaggccacctggtaataggcaggacatccccagggaggagggagcaaattattgggaatcgtcatacattgtctagtagacagtaagatcaaamttctcagccgcagaaatatcagtgggaccaggcgtggtggcttacacctctcagcactttgggaggctgaggcgggcggatcacctgaggtcaggagttc

SEQ ID NO: 202529 - DNA, 201 bp, Homo sapiens
atgtatgtatttatatgtattttatatatatatactgtatatgtgtacatgtgtatatatacatatatatacacacatacatatatatgcacataacacamacacacacacacacacacacacacacacacacacatttaaatatatctatattttaaaagattccagttttggaaatggcatgccaaaccctcaccatgt

SEQ ID NO: 202530 - DNA, 201 bp, Homo sapiens
tccattgtacagataaggaaaccgaggctgatgcagaattggggtttgttacaccatgatttttcccaggctccacgcattccacagatttacagtctcarttttcagttttcattctggaggtatcggacaggtgtctgctgtgtgcacgtcctgagaacacagtcctggccctcgtgggatgtatagacattgccactg

SEQ ID NO: 202531 - DNA, 201 bp, Homo sapiens
ctttgatgacacccttgggagttgggactccttttagtaatttaggttgaaggaatgtgtgctttcatgaaagagaggaaatgtatctggactctgggctygaagctcttctttctaagaggaggcttgttggatttcaaaaccaagacgacaccacctcttggtgtgctggcagacacagagagaggactgtctgtcttc

SEQ ID NO: 202532 - DNA, 201 bp, Homo sapiens
tccttggtcacataatacaattttgctttttagtcctgggagctcttatcttttattaaagacatttttatatgagttgttttaagtaagtagtcctctgmcatttttgtttttagccttttcctcatagttggggctattcctcttgttatctgtctttgaagttatgggcaatgttttgtttgtctttatcatcaccat

SEQ ID NO: 202533 - DNA, 201 bp, Homo sapiens
gagtgccgtggcccgatctcagctgaccgcaacctccatcttctgggttcaagtgattctcctgcctcagcctcctgagtagctgggattgcaggcacgcrccaccatgcctggctaatttttgtatttttagtagagccagggtttcaccatgttggccaggctggtcttgaactcctgacctcaagtgatccacccacc

SEQ ID NO: 202534 - DNA, 201 bp, Homo sapiens
ctggcctcaagcaatcttcctgcctcagcctctcaagtagctggaattacaggtgcaagccactgtgccaagcaggagtctgcctttctttcttgggtttkttttttttttcccagcctgtcatctgattcacatattttccttggtcacataatacaattttgctttttagtcctgggagctcttatcttttattaaaga

SEQ ID NO: 202535 - DNA, 201 bp, Homo sapiens
ggtgcctggagtgtgggtaataggggttgaggggcagaatgaggttaggggagagcgtgagagcagcagatcctgcaagcaaccctcgtggccctaggcarttttattgcaacagcaatgggaagccttttgaagactttcacgcagtggcacagcctgatctgatttcctgttgagacctagttcatttgcctaggactt

SEQ ID NO: 202536 - DNA, 201 bp, Homo sapiens
tttctttctttctttctttctttttttttttgaggcagagtctcacattgtcacccaggctggagtgccgtggcccgatctcagctgaccgcaacctccaycttctgggttcaagtgattctcctgcctcagcctcctgagtagctgggattgcaggcacgcaccaccatgcctggctaatttttgtatttttagtagagc

SEQ ID NO: 202537 - DNA, 201 bp, Homo sapiens
tctaaaatatctaatttatggcatttaaaaagcactggataatgctgagaaaattagtaaacagctcagaaagtcttagacttgaattcctacatgcacartaagaagatagattccaaatggatttgagagttcaatataaagaaggaagaaaaccattacaagaaactgtaagatcatgcttctctcctcttacattga

SEQ ID NO: 202538 - DNA, 201 bp, Homo sapiens
cgtgagtcgtgaaggaaacatggctgatttgctactgttcaaagggcgactcaggtcttgactgaaagaccgtacacgggttgtttgatgctgtgtaaatmtcagccacgctgaacactcctttccccaactctaaatacaggacccctgaacatgttgccctccacaccttcttccatttctttctttctttctttcttt

SEQ ID NO: 202539 - DNA, 201 bp, Homo sapiens
cttccccgtgagtcgtgaaggaaacatggctgatttgctactgttcaaagggcgactcaggtcttgactgaaagaccgtacacgggttgtttgatgctgtrtaaatctcagccacgctgaacactcctttccccaactctaaatacaggacccctgaacatgttgccctccacaccttcttccatttctttctttctttct

SEQ ID NO: 202540 - DNA, 201 bp, Homo sapiens
tgcatgatgctgaggtttgggcttcaggtgaactcatcacctaggtagcacagtatccagtaggtagtttttcaacactcacttcccttcttgtctccctstatttggagtccccagtgtctgttgttctcacctgttaagtccataggtacccattgtttagatcccacttataagtgagaacatgcagtatttggtttt

SEQ ID NO: 202541 - DNA, 201 bp, Homo sapiens
ctctactaaaaatggcacgggcctgtaatctcagctactcaggaggctgaggcacgagaatcacttgaatctgggaggcagagtgcagtaagccaagatcrcgccaatacactctggcctgggcgacagagagagactctgtttcataaattatatatatatataaatatatataaaatgtactctttccagagccatccc

SEQ ID NO: 202542 - DNA, 201 bp, Homo sapiens
tgaggcctgtcagcaaccgtgtgagtgaatctggaggagaattcccccttgtccccagtcaagcctagagatgagcctgcagccccagccgacagtcccaytgcaatctaatgagacaccttgagtcagaggcaccaagctatgctatgcccaaatttcccacccatagaaactctgggatagtaaatattgtttgggctg

SEQ ID NO: 202543 - DNA, 201 bp, Homo sapiens
gttttgttctgaaatgctttgatcctggagtgatggatactgtttcccacttgccactcatgcagttgctggctccatccatctaccaggggttgggggagggggaagggacaggacttgggttgggatggaggtgtcacgtggacagtcagtgagcagtaaatgtcaggatcacaataaccttagtaaaaaccaaaataa

SEQ ID NO: 202544 - DNA, 201 bp, Homo sapiens
ataactacaatgcagcagagaccatgtgtgccacttctgaaattaggttataataagactgtggcttctatcttagggtgtgccctctctccgtctctcaygtcactcacctgggagaactcagctgccacaccgtgaggtccccttgtagataagccacatggcaagggcttgaggcctgtcagcaaccgtgtgagtgaa

SEQ ID NO: 202545 - DNA, 201 bp, Homo sapiens
gagctgacaaactcacttacactgaggtgtaaggggcggctgagggcttcattgctaccctatctcagggtattttaattttcaatggtgtaaaactgagytccaaagaccaaactgaaacttgctgcaccagaaagcaaactgctttgtcaaggccactggctgtaggtttcagcaataccattgtcctcacagcctcac

SEQ ID NO: 202546 - DNA, 201 bp, Homo sapiens
caatccctaccttgtggcttttgtcccatgttcacaggactagggtgaggtgttggagggagagaggatggcgagggagctgggcagtccctggatgagckcatcctccatcagcatcgtgtcttctgttctgaaggctcccaagacagtacctctgtgagggactcatatcagctgaaagttaccttcaacagaagtaga

SEQ ID NO: 202547 - DNA, 201 bp, Homo sapiens
tgtgtggagtgcagccgctcagggtccgtgctgcagttctatttatacccacttttaattacacgcaaattaaggggtgggttatgcagaaatttctagaygaggggtggtaacttctgggtgtggccatggcagtggtgggctgtcatggtgctgatgggtgtatgttatggagaggtgcttttggtgcctcttccgtaa

SEQ ID NO: 202548 - DNA, 201 bp, Homo sapiens
agtccagagcttgctatggaagagagggtggatggaaagatgggtgttttagtcggcttgggctgctgtaatgaaataccatagactgagtggcttaaacracagacatctttttcccccatgattctgaaggctgaaaagacaaagatcagggtgccagcatggtcagatactggtgagggctctcttcctggtttgcag

SEQ ID NO: 202549 - DNA, 201 bp, Homo sapiens
aggcaaaaattgtaccagtgttaatggcggcatctcatttcctgtgtggacaaagtggcagctggatttaggaaccctcttttgataaatcccttttctcygaaactagctcaatttggttctggagaccataagtaaaatcactgcctgatacagcaggagaaatgttactgtggaaatatctcagagaccaaatcactt

SEQ ID NO: 202550 - DNA, 201 bp, Homo sapiens
agacccacaggaagggtggcttcacagacaaaggtctgtgaagataggggtaggaggaggatgaaaatgtatcatgcaaaacccatcctgatgacaagaasgagagacatttaactttgaaaggcaaaaattgtaccagtgttaatggcggcatctcatttcctgtgtggacaaagtggcagctggatttaggaaccctct

SEQ ID NO: 202551 - DNA, 201 bp, Homo sapiens
attcagttgttcaatgagcacttactgggtaccaggccctattctggccctgggaatgcaggaaggaacagaacagatacaattcctgcctgttgcagtgkacaatgagcaaataaatacataatttggagaaaggagagagagattggaagggagaggggagattgttttgcattctgtagccagggaacattgtggtgt

SEQ ID NO: 202552 - DNA, 201 bp, Homo sapiens
gttgaggaagagcaaggaggccactgtggccggagtggcatcagcaaaggtgagagtgagaggagataagggaaggaaggaggaggatgaaccatttgccrtcatgtagatcttggtgtgtactctgagtagaatgggagccatgggagggttttgagctgaggtgcaatattgggatggttaatttcataggtaaatttc

SEQ ID NO: 202553 - DNA, 201 bp, Homo sapiens
ggtcgaggctgtagtgagccgtgattgcaccacttcactccagcctgggcaacaaggccagaccctgtctctgtctctgtctctgtatatgtgtgtgtgtrtgtatgtatgtatgtatgtatgtatttatatgtattttatatatatatactgtatatgtgtacatgtgtatatatacatatatatacacacatacatata

SEQ ID NO: 202554 - DNA, 201 bp, Homo sapiens
tacatagtaggtgtatatatttatggggtacatgagatgctttgatacgggcatgcaatgcataaaaatcacattatggagaataggatatccaccccctygagcatttatcctttgaattacagacaatccaattacattcttcaagttattttaatgtatactatatgtatatagtgtgactatatactatgtacataa

SEQ ID NO: 202555 - DNA, 201 bp, Homo sapiens
ctgaccttgtgtaagttggggtaatagtagctttcattcagggttttcattgtgaggtttagaggtaatacttgcaaggcacatagtgcaagtcctaacartatcataaagggtactgttgagtgtgctcatgacattatttgatttgctaactccagttcattcatcggtattcaacttgcatatcatccacactgggaa

SEQ ID NO: 202556 - DNA, 201 bp, Homo sapiens
cccctgcagaaggtctggagcacacaaatccaagataaatgtttccttgatgacaaagaactcttgtcacggtctagagcagtcatacatccaaaaaaaayacgcacttgcatggtggcatgcacacattaaactcctaggaaaatggagaaattatgtattatctagtgccatgaaaatgctaaaggaatttggacaaag

SEQ ID NO: 202557 - DNA, 201 bp, Homo sapiens
catggtagaacagtgactcggcatccacacctccactagctgagctctcatgggtcgtgttttgtctattcttgcagcttcgcaacaacaaggcaaaagaygtctgcttggaccaggggccgctggagaaccacacagcaatattgtatccgtgccatggctggggaccacaggtaggagctcgtctctgaccaggaagga

SEQ ID NO: 202558 - DNA, 201 bp, Homo sapiens
aaaagaaaactaatctttttgtttcaaggtaactcagtttcttcccattgaaaactccatctctttcaggacaattgctccattaaatcaagattttgacmggctgttatttgttaagggtcgctcttcccccttgaaagttctccctctcccagctttcctcttaaatagtgcctggaagcaaggggagctggtgctgcc

SEQ ID NO: 202559 - DNA, 201 bp, Homo sapiens
gccttccccgtgagtcgtgaaggaaacatggctgatttgctactgttcaaagggcgactcaggtcttgactgaaagaccgtacacgggttgtttgatgctstgtaaatctcagccacgctgaacactcctttccccaactctaaatacaggacccctgaacatgttgccctccacaccttcttccatttctttctttcttt

SEQ ID NO: 202560 - DNA, 201 bp, Homo sapiens
ccctgccccgctgaaagccttccccgtgagtcgtgaaggaaacatggctgatttgctactgttcaaagggcgactcaggtcttgactgaaagaccgtacaygggttgtttgatgctgtgtaaatctcagccacgctgaacactcctttccccaactctaaatacaggacccctgaacatgttgccctccacaccttcttcc

SEQ ID NO: 202561 - DNA, 201 bp, Homo sapiens
acctaaccctgccccgctgaaagccttccccgtgagtcgtgaaggaaacatggctgatttgctactgttcaaagggcgactcaggtcttgactgaaagacygtacacgggttgtttgatgctgtgtaaatctcagccacgctgaacactcctttccccaactctaaatacaggacccctgaacatgttgccctccacacct

SEQ ID NO: 202562 - DNA, 201 bp, Homo sapiens
gtagagacagggtttcaccttgttacgcaggctggtctcaaactcctgacctcaagtgatccgcccgcctcactcctcccaaagtgctgggattataagtrtgagccactgtgcccggccctgggttgcagccttctgacatcatggaagttccccttctttgctctctgtgtcgtgacacgtgacagtgagaggtagccc

SEQ ID NO: 202563 - DNA, 201 bp, Homo sapiens
aggctcgtctctaactcctggcctcaagtgattcgcccacttcggcctcccaaagtgctgagtctacaggtgtgagccactgctcccggccccttggctatttttttttttaatcctttaaggtactagttaacttttcctaggagaaaaagtatgtaggaaaatttagtaagagaaattgacatggaagaaaggctttct

SEQ ID NO: 202564 - DNA, 201 bp, Homo sapiens
aatacagcattcccatattttaattggatccttaggtaaagagagttttagccactcagctattaatccagcctgaacaactctgctataaacgcactttyttctgagcgccttttttttttctcccttgccttacatcatgctctgtggcctcctgaacttttccttttcttctcagtatacatgaaatacttatagcta

SEQ ID NO: 202565 - DNA, 201 bp, Homo sapiens
taactggttaaaattaaagtggagtactagtatatcatttcagaatactttcagcctcaagaaacagaaagccaactaatagcagattgaataggggtttrttttatatacaaccaagaatttgggaaggagctgccattgcatggagtgagaagctaaaggtcaaggcccccctcatgggtgcaaagaggctaccatagc

SEQ ID NO: 202566 - DNA, 201 bp, Homo sapiens
ataatgggcaattgattaagtaaatgatgatacattcatggcctgccatgctatgcagccattaaacaatgatgttgatgtatatttttgacatgaaattwtgcttatggtacactattaggttaaaaaaagagacaagttatatcacagtaagtaaagtataattgcattttgtaaaaaattgtgtgtatacatatgcat

SEQ ID NO: 202567 - DNA, 201 bp, Homo sapiens
acagagtctccctctgccacccaggctggaggggcttgatctctgctcactgcaacctccacctcctgggttcaagtgattctcttgcctcagcctcccgygtagctgtgactacaggtgcatgccaccacactcagctaatttttgtatttttagtagagatggggtttcgccatgttggccaggctggtcttgaactcc

SEQ ID NO: 202568 - DNA, 201 bp, Homo sapiens
ggttttcttggcaacttcagtcctaaccagcataaactcattattttattttttttctttttgagacagagtctccctctgccacccaggctggaggggcktgatctctgctcactgcaacctccacctcctgggttcaagtgattctcttgcctcagcctcccgcgtagctgtgactacaggtgcatgccaccacactca

SEQ ID NO: 202569 - DNA, 201 bp, Homo sapiens
  misc_feature (1)...(201): n = A,T,C or G
agtgggggtggtgcagccttgcagaacatgctctactgccactgaccattccagggttacttgtattttagccaaagcagtggggagtaggggggagtcanagatatagggcataggaaagcaggagttagggactaggggggatttaataagtgattggaagtgatgcagggcaggtgagccctaaaattggggcttaac

SEQ ID NO: 202570 - DNA, 201 bp, Homo sapiens
cctggtacccaatagttaccttgtctgctcctctccttcctcccaccctccaccctccatgctcaagtagccccagtgtgtgttgttccctctttgtgttsatgtgttctcatcatttaacctcccacttattagtgagaacatgtggtatttggatttctcttcctgcattagtttactaaaggataatggccttcagtt

SEQ ID NO: 202571 - DNA, 201 bp, Homo sapiens
cgtggctcccaacattccttggcttgtggcggcatcactctataatagggccagcatcttccaatctttctatgctttgtcttcacctcaactcttttctyctgcatgtgtctattgaacttcccctgcctccttataaaaacttgtggttgcattttgggcccctttggataatccaggctaatgtccccatctcaggag

SEQ ID NO: 202572 - DNA, 201 bp, Homo sapiens
ttccatctttatttaaacacatggagctttttgcgtggttatagtcattatggatattcagtttttttctgcttttctcacattacattatttagtaaatrttctttcctgctcctacatagctatgataactctataatagtgcacagtttaatgtacctttattgcttttccattttctatcacttagttattaggtcg

SEQ ID NO: 202573 - DNA, 201 bp, Homo sapiens
ctatgtttatttctcttcttgctcaaattgttctagctttgaccactgggaactctttcaggttggcttctgtgcccttttgacatgaccccataatcccracttttttttttcgagcacttaactttttcttttttaaaaaaacttttattttaggttcaggggtacatgtgaaggtttgttacacaggtgaactcatgt

SEQ ID NO: 202574 - DNA, 201 bp, Homo sapiens
ggctaatttttgtatttttagtagagacaaggtttctccatgttgtccaggctggtcttgaactcctgatctcaagcaattaacccgcctctgcctcccaragtgctgggattataggagttagccatcgtgcccagcacctgaccttcttacttttgaagaggactagtcaggtgttttgtggaatgtttcttcatttga

SEQ ID NO: 202575 - DNA, 201 bp, Homo sapiens
aaaggaatttggacaaagcggaagaccatggtgtagaataacctcggatgccctgatgttgcaaaatggaaagcattgtgtcagtaaagggatggatggargaaaatgacctcaagcagagagagaaagtgagtattgggagtgtgtggtacagcttaggggccgccttatctggagaggaaaatctccaatgagaagcac

SEQ ID NO: 202576 - DNA, 201 bp, Homo sapiens
ggtctcaaactcctgacctcaagtgatccacctgcctcagcctcccaaggtgctgggattaccggcgtgagccaccgtgcgtggcctcagtggtagttttrtttctcctggcatgaaggtgcttaggaagcatcagccatggtgtgcatgcatgtgtacacatgtgagcacacagtcttcccccgtcctgtcatctgcatt

SEQ ID NO: 202577 - DNA, 201 bp, Homo sapiens
ctcggcttctgctggctttaatcttgaatgcatcaactgtcttggactcctaccttgcccatgacaacatgaagtttctctttatgtcactttaggatctracacttccaggacacaacagctctcatgagttgacctgactctttctggattgatctctgtcactcctgtttgtaggctgagagactgctcttctggtct

SEQ ID NO: 202578 - DNA, 201 bp, Homo sapiens
tctcaattcacattggcttgcaaattcagatgacactgaagaccaaattactgcctgtgggacaatggactttgtttagttgctaataggggatttagtaratagcccaagagacaggatatgggtctgagattacacttagttgcattttttaaaaactatgttaattataggcttaagtcatgtattcaaatgcagata

SEQ ID NO: 202579 - DNA, 201 bp, Homo sapiens
gatgtgatcatttaatgtattcgtgtaattttcaaagatcaagtcagtgtacgtgggatatctgtcaccttaaatatttgccttttctttatgcaccaaayctttttgacagaaaaggaataattgtcagaagcataaagccttgtcagtgtcaagtttctgctgacctcttcagctattctggttgtcatttttttttct

SEQ ID NO: 202580 - DNA, 201 bp, Homo sapiens
tcactgaaagtcttggttcttattgacatcatttcttatttgacttatcctacaatatataaataatagtttcaaaataagaatactaacaagttgattgratgaggtttaatatttctttatggtttgttttgtccctaggatatattccattatagatgtacaaccaatgtctttaaaattatttgacataattttctc

SEQ ID NO: 202581 - DNA, 201 bp, Homo sapiens
cctcaaggtctggaaagaaatgggtttgttgagttccaggacctggggaaggcctgtagctgagcagaacagtgcaggctgagagtggtgaggttggaaargcaggaagaagctcaatcttacagagcctcatgggacaccatgagtcttgggaactttatctcaactttaatgagaaatcattgaagggagaaccacatg

SEQ ID NO: 202582 - DNA, 201 bp, Homo sapiens
cctctaagggtctctggaggatgactgcttgggcaaagacagccagaattgaggtctgagcagggcctgtgagcctcacttgctgtgaaagtgtggtcttrgctagtgtctccagcagccccaagtttgagtcttgttccaccccgcatcattctgtgtcctcttaaaaaatatccttccctctactggagcagctctgaa

SEQ ID NO: 202583 - DNA, 201 bp, Homo sapiens
gtgtttcctccctgagtcttctcccttctctaaagaccccaccctggtccactttcttccagcataacgtggaaattggagcccttgcttgcaatcttcckctctccagtttcccattgcactcctaacttgctcattctctttttcctggggtggggagtggtgcatcttgcttctcacctccaagcttctttgagactg

SEQ ID NO: 202584 - DNA, 201 bp, Homo sapiens
ggcatgagccactgtgcccggccttgtacctacactttgcaagccactcgtgctggctgatgacatcttggtcagagaaagtgacctggggtacagggggyatggcctaagtctcaaagacaagtggattctgatgcttgttttcaccaactactggcctttctcatttgcagtacttttttttttcttttttagagtgag

SEQ ID NO: 202585 - DNA, 201 bp, Homo sapiens
ggttaaccctctgattctgcgttctagcttcctcaatttcatggctgttgtcttgtcttgcatttcctctggctttggaaggttatggtttttgttgttgytgtttgtctattttagaaatccttttactgtagtttttttgtgaattttgactagtggtctctgattcatgagttaaattcatcatcttattctgaaagt

SEQ ID NO: 202586 - DNA, 201 bp, Homo sapiens
ggccttgtacctacactttgcaagccactcgtgctggctgatgacatcttggtcagagaaagtgacctggggtacagggggtatggcctaagtctcaaagrcaagtggattctgatgcttgttttcaccaactactggcctttctcatttgcagtacttttttttttcttttttagagtgagtgtctcactctgttgccca

SEQ ID NO: 202587 - DNA, 201 bp, Homo sapiens
tctgtcacacatctgtcacttggttaaccctctgattctgcgttctagcttcctcaatttcatggctgttgtcttgtcttgcatttcctctggctttggarggttatggtttttgttgttgttgtttgtctattttagaaatccttttactgtagtttttttgtgaattttgactagtggtctctgattcatgagttaaat

SEQ ID NO: 202588 - DNA, 201 bp, Homo sapiens
ggggatcaagggaatccccaggtggcagaaggggccagcagctgggagccaggccccagagtttgtgctggctcaaagcatcagtgggccagttggagacygggctgtcttactctggtgggggtggggagacatctttagcatttgaggggagcatctttctagagaaacagcagggcataggacctgtttggtggacct

SEQ ID NO: 202589 - DNA, 201 bp, Homo sapiens
agtgagctgagattgcgccacggcactccagcctgggcaacagaatgagattccatcccccctgccctcctccaaaaaaaatgtgggagtaggaatttacygatcagtttcttttcaaatagccttcgtgctagtcttccttattctggtctgtccattttacccccagttccaaaggcacctgctgctgccggttccatt

SEQ ID NO: 202590 - DNA, 201 bp, Homo sapiens
gaattgcagggtagggaagagaggactccaggagtatctgattttggtctagagactgataaaaatgggaagtccagggatcagcaggtgccaccagggcrgatgtaaatgatgtccttgagaagcaaagaatattgagagtccagcctgccaaggttcgtgatgtccgctgctgcccacccctgctgttgctgatattga

SEQ ID NO: 202591 - DNA, 201 bp, Homo sapiens
ttacagacgcccaccaccacatcaggctacttttttggagttttagtagagatggggtttcgccatgttggccaggctggtctcaaactcctgtcctcaartgatcctcttgccttggcctcccaaagtgctgagatttgcttacattcattaattttgttgatttgcaatgattcacaagatttgtagttcaaagggacc

SEQ ID NO: 202592 - DNA, 201 bp, Homo sapiens
gcctaccaagtagctgggactacaggcgcctgccaccacacctggctaatttttgtattttagtgtagacgaggtgtcaccacgttggccaggctagtcgygaactcctgacctcaactgatccaccctcctcagcctcccaaagtgctgggattacaggcatgagccaccgcacccagccctgatttttatcaccataga

SEQ ID NO: 202593 - DNA, 201 bp, Homo sapiens
cacctggttctgctctaactcaccctaaatagccatggggtgtagttcattttatctgtcagcagaggcatacttttatggtcctaacctcaagtatctcrgaatgtgtctgtacttggagatagggctttgaaagagaaaatgggagttaaacgaggtcactggggtggcccttaatccaatatgcctggtgtcctcgta

SEQ ID NO: 202594 - DNA, 201 bp, Homo sapiens
attgttgaccttcatttcctcatctgtaactcgggaattatagaaggacctacctaatgggctttgtcttagtctgtttgagctgctataacaaaataccrtacactaggtagctgataaacaacagaaattgatttctcacagttctagagattgggaagtccaagatcaaggcagattctgtgtctggtaagggcccac

SEQ ID NO: 202595 - DNA, 201 bp, Homo sapiens
atacattatataattaagaatatataattcttataagaatcatattaagaatatataattcttataagaatcatattaagaataaataattattatatcayatggttaataattaactaatttatatatgaatatattagttctatattaatatataaatatattaattacactttaaatactattaactatatgaatata

SEQ ID NO: 202596 - DNA, 201 bp, Homo sapiens
tgctcaacaattattaataatttcaatatgataaacgaggttcattaaactaaaggcaggactcttctgaatatagggctccatgtgactgcatgaagtcmcccgtgaagtcagccttgcatccatccatccattcatccatggatacccatcctgtggatgcttactgaacacccagtatgtgttgtgtgctttgaggga

SEQ ID NO: 202597 - DNA, 201 bp, Homo sapiens
acacagtgtatgcgactgaaccttcacccagccatgaccacctggttctgctctaactcaccctaaatagccatggggtgtagttcattttatctgtcagyagaggcatacttttatggtcctaacctcaagtatctcggaatgtgtctgtacttggagatagggctttgaaagagaaaatgggagttaaacgaggtcact

SEQ ID NO: 202598 - DNA, 201 bp, Homo sapiens
aatttgggtggggacacagacccgtactatatcagatggtgtctgcatggtagtcaattatgtttcctaatacctccaggacaatgttgaattagtggagrtagtgggaacccttgcctttcctgtctttgacagaagtgcctctagtgtttctcattaagtaagatgctatctctatggctatggtatagtttattgtgt

SEQ ID NO: 202599 - DNA, 201 bp, Homo sapiens
taacatctttctgagaacacagtgtatgcgactgaaccttcacccagccatgaccacctggttctgctctaactcaccctaaatagccatggggtgtagtycattttatctgtcagcagaggcatacttttatggtcctaacctcaagtatctcggaatgtgtctgtacttggagatagggctttgaaagagaaaatggga

SEQ ID NO: 202600 - DNA, 201 bp, Homo sapiens
cagtgcagtctggagatatggtgcccatgtggcccctgggaagaagtccagggagagggagtgctcactgccttccctcccttctccctccctccctcgcygccatcctcccttccacagcacttagaataaatgcaggactcacaggggctgaaagatcttcctctcccctagtgattgctgctcaccggtctttagact

SEQ ID NO: 202601 - DNA, 201 bp, Homo sapiens
tatcttggcaccaacaacagaaactggtttggcttgattgtagaaagggaggtcctgtgatattttcataacatctttctgagaacacattgtacgtgacyttcataacatctttctgagaacacagtgtatgcgactgaaccttcacccagccatgaccacctggttctgctctaactcaccctaaatagccatggggtg

SEQ ID NO: 202602 - DNA, 201 bp, Homo sapiens
aaccctgactggatggagcgggtgagctctgattggttggtttccaagccccaaaccagaagtctctgttagacctttcaaaaggccagttgggaggtggrggaattcttgcttcagtttatcttggcaccaacaacagaaactggtttggcttgattgtagaaagggaggtcctgtgatattttcataacatctttctga

SEQ ID NO: 202603 - DNA, 201 bp, Homo sapiens
ccaacacctgaccataggcccctgaccgtacttacagtatttactaaaaagttcttacaattgtgaatccttcctctgtccctttgggatgtatatgtatmtcctacaactaggagtggttttcacaaggatagaaaagccattcctttaaaaatgtaatcatcaggaaggagatggccactgcctcccagtctgtatggg

SEQ ID NO: 202604 - DNA, 201 bp, Homo sapiens
aaaattcatttgttgagtcctgtgaacctaagttctctgaaaagtaatttggaggaaagagacttcattccagtgaatagtttgcaaacaagggagccacrtctttggtgtaaaacaaaggtgagttccagagaacaaatacgttcagggtttatagcaaaactccctgctgaggttcccaattaagtccatttatgcaaa

SEQ ID NO: 202605 - DNA, 201 bp, Homo sapiens
tggagtcagattcacacccaaacaatctctcctgtctactgcattgtcattaagagtgatgaagagcccaagaaccagcctcattctagcctttaccaatrtgtgtatctctttcttatttttggtttactttctcagaatctttggttctagtagatttttaaaattaaacctttgtttcctctgccatctctgttatct

SEQ ID NO: 202606 - DNA, 201 bp, Homo sapiens
tgagggtaattcttccaagggggtggagtcagattcacacccaaacaatctctcctgtctactgcattgtcattaagagtgatgaagagcccaagaaccarcctcattctagcctttaccaatatgtgtatctctttcttatttttggtttactttctcagaatctttggttctagtagatttttaaaattaaacctttgt

SEQ ID NO: 202607 - DNA, 201 bp, Homo sapiens
aaaaaaaaaattcaataatagggaaatagagtaaagcaatagcccatctccaggctttccagctccatgctaatttgcactgtgggtaatgtatcgtgcamctttcaaaacattttctacacatattggcacacgcagaaataaaataaatgtataagttttatggcttttaaaaatggtaggccgggcgtggtagctcac

SEQ ID NO: 202608 - DNA, 201 bp, Homo sapiens
actggggaaccagagggtacattggggaggatcaggcaggggattagcaaggcacggaaaaccagagactcatggtcataatgacacctaactgtaatcaytccccacgtgcccggtaccgtgcccagtggtctgagtgctcacagcaacaccatgatgcagctgctcttatttatctccaactttatagataggaaacag

SEQ ID NO: 202609 - DNA, 201 bp, Homo sapiens
tctagtttggggcctcctaaattgaacctctaattttcttatttttctctgctatcttatctttcgctatctgatatttttgctctgttttctttattctygcttcagtttttttattcttcccttctatccattttttctatttctgctatcatagttttacttccaagtgatcatttttattctctgaaagctcctttt

SEQ ID NO: 202610 - DNA, 201 bp, Homo sapiens
aagatggctttagcctcatcttctaggtgaatgatggtgtcgttgagttagatgttgccttctttcagaattttgatggttttgctccattattgtctttrttgttgttgttgttgttgttgttttagaagaaccaaaggcattctgatttcctggttttttgcatgttcttttttcctttctggaagcctgtagagtctt

SEQ ID NO: 202611 - DNA, 201 bp, Homo sapiens
attgatccgtatgtctgtccttatgccagtaccacaccatcttgactatagtagctttgtattaaattttgaaattggggagtgaagtcctcccagtttgytcaaggttgttttagctacttgaggtcccttgtttttccttacgaactttaggatctgcttgttaatttctgcaaggaattcagctgggatttttatagg

SEQ ID NO: 202612 - DNA, 201 bp, Homo sapiens
tccatttaagcagggccacttccccacttccctagcaaagggtcaccaagaaccctgcggtgggttctttgcctccaggactggtcccagagcttggagcrtgccctcctcctggcccattccaacccatctggaagtcctcctccctccactgtgtgaggagccacagcctggggcgctttccatttgggcacttccctc

SEQ ID NO: 202613 - DNA, 201 bp, Homo sapiens
gaggtggaggataactggggcatggaaggtgtgtgttcacatccatctcccttgagtgaaatatcccaactgtttgtcttgttcacctgcacacacctgcrgcctccggcttgagctgggcaagtctgttaaccatgatgagagacagggccgtatgtttctttatggaatatttacccccaacgtgcctgctgtttcttt

SEQ ID NO: 202614 - DNA, 201 bp, Homo sapiens
ggatgagcgtctgtttctggagtcaccacacctcctggaggcccatatccatttaagcagggccacttccccacttccctagcaaagggtcaccaagaacyctgcggtgggttctttgcctccaggactggtcccagagcttggagcgtgccctcctcctggcccattccaacccatctggaagtcctcctccctccactg

SEQ ID NO: 202615 - DNA, 201 bp, Homo sapiens
gtcacaggtagataagagacagaaggttgaattcttttgagtccttgattaaccttccactgaatacacaatttagtctggctcagtgtgtctgcattttyacaaaaacaatagaggcagaggaaacaatcagatatgaatttgtctcaggtgagcagagggatgactttctgtcctgcacctgtgaagataagctatccg

SEQ ID NO: 202616 - DNA, 201 bp, Homo sapiens
gatgtccgctgctgcccacccctgctgttgctgatattgaatggcaaggccagaaggcatgggaacaccatctgtgggggctccagcaggaagagaaagcmctgggaacccatgtgctcttttcgtcctacagatggtcgagacttagagagacaagaacagccccaatgtactattattttagttgccctgtcttagttg

SEQ ID NO: 202617 - DNA, 201 bp, Homo sapiens
attctgaggcccctcccaaagcctgctatatcagaacctcaaggaatgggatatagacatggatgtttatcagaagctcccccagggagctgggatgcaascagcccagaccagaggtctgtcattgggaacctgtggcttaggttatctgtatcccaataaccatgatctcaggacataggggttggtagacttggtcat

SEQ ID NO: 202618 - DNA, 201 bp, Homo sapiens
tatttttattactatagtagttatataactactttatgtctgggagtacaactttaataccttagtcatttattttctcctttattgttatataatttccrtgtgtgtatttgtgtgttaattttccacttaaaaatttttaaaatttgtttttagttttattttgtttgagacagggtcttgccctgttgtttagcctgc

SEQ ID NO: 202619 - DNA, 201 bp, Homo sapiens
tttttttgcaccttgttgttgtttgttttctgtttattgatattcttagtggaggagcctgttttgtcatcttaagtttttaggcagtgttgtcattatcsttgtgttttgaaacggtcttgtattttatgttttttcctgatgtaactgttactctaaaaaatgaagataatttactgaatttctttttatctttattgt

SEQ ID NO: 202620 - DNA, 201 bp, Homo sapiens
gactcataaaagacctccaagttgtccaccagccttctgggaagatgttctttgaaaaaccgcttcagtcagcttcggccatgagcagaaatgttcaagasggcaacgttgcttctcagctctttctgtttctctgctctgaggccccttcagagatgaacgtgagagaccattgaggctggagctatttttcagggctct

SEQ ID NO: 202621 - DNA, 201 bp, Homo sapiens
ggcactgtgctaagtgcatacaccaggtactgtgctaagtgcatacagtggatactatgctaagtgcatttaccaggcactatgctaagtgcatacagtgrataccatgctaagtgcatataccaggtcctatgctaagtgcatacagtggatactatgctaagtgcacataccaggtcctatgctaagtgcctacagtgg

SEQ ID NO: 202622 - DNA, 201 bp, Homo sapiens
tatgctaagtgcatttaccaggcactatgctaagtgcatacagtgaataccatgctaagtgcatataccaggtcctatgctaagtgcatacagtggatacyatgctaagtgcacataccaggtcctatgctaagtgcctacagtggatactatgctaagtgcatataccaggtcctatgctaagtgcatacagtggatacc

SEQ ID NO: 202623 - DNA, 201 bp, Homo sapiens
caaatgttctaggcattcttctggggctttcctcacatagaaaatgaaatcatactcttccaagtgttaagtgcatcaattcaaacactggacacagaagmctttaagacttactcgatgaaagcagctggaatcctgagtcttcaaagatatcttcttgtctctaggatgagtggcctgacctgcaagccctctgggtgt

SEQ ID NO: 202624 - DNA, 201 bp, Homo sapiens
gctgagtcacttatgtccctggccctccatctgccagcgagacctccgagtcactgatactgagatcatgggccccagatgtggcttttccagcctgtgcrgtaaattaaagcaccttggtgccctttttctatctgcactttaggagcaaagcactttttttttttttttttttttttttgagacagagtcttactctgt

SEQ ID NO: 202625 - DNA, 201 bp, Homo sapiens
gggtgcacttgtccctttcacgccccagaagcttttctttttcttttctttctttctttcttttttttttttttttttttgagatggaaactcactctgtygcccaggctggagtgcagtagggcgatcttggcccaccgcaacctctgtctcctgggttcaagtaattcttttgcttcagcttccctagtagctgggagg

SEQ ID NO: 202626 - DNA, 201 bp, Homo sapiens
tccggattcattccccttgctggctcctagggcttagagctcctgccacataatgaattttcactgatccttttttttgcaccttgttgttgtttgttttstgtttattgatattcttagtggaggagcctgttttgtcatcttaagtttttaggcagtgttgtcattatcgttgtgttttgaaacggtcttgtattttat

SEQ ID NO: 202627 - DNA, 201 bp, Homo sapiens
ggctgaggcaggagaatcggttgaacccaggaggtggaggttgcagtgaacccagatcgtgccactgcactccagcctgggcaacggcaagacttctctcaaaaaaaaaaaaaaaagaaagaaagaaagaaaactacctattggttctattggttactatgctcattagtacctgggtgacagaatccgtaccccaaacct

SEQ ID NO: 202628 - DNA, 201 bp, Homo sapiens
tctgagaaaaggcttgtttgttacgtttctttaaaggtgacctagtatctctttttccttgcattaagaaggcatttcccaagagagggattgatatcttyctctttgacagttctggaagaatgtcatgagcccctttcatctccaaactggattttaaaacaatgtggaaaaactgcttcctcccagggcacatttttc

SEQ ID NO: 202629 - DNA, 201 bp, Homo sapiens
tggacgcacttaggtccttctgttgcaggtgctgttaaataacagcttttctggacgaagagtaccttgaagtctctctgcttttatttctggggtttgtktatgtcactaaagtctcagatgagagttctgagaaaaggcttgtttgttacgtttctttaaaggtgacctagtatctctttttccttgcattaagaaggc

SEQ ID NO: 202630 - DNA, 201 bp, Homo sapiens
tggaattggcatttaaactcagttgctgttggaagtaattccagaagtgaaatttgtcagtgagaggtgtgcactatgaatagttccttcaggtgctggaygcacttaggtccttctgttgcaggtgctgttaaataacagcttttctggacgaagagtaccttgaagtctctctgcttttatttctggggtttgtttatg

SEQ ID NO: 202631 - DNA, 201 bp, Homo sapiens
taacagatttcacttaactaatccagtcaggaactcctttttctccctcatgggatgataattaaattcttttatattgggtgttatatttggatcatctyctgtcatcctaatttttattttcattttaatcattcttttgacatctctttccaattataactgcaaaatcctggccattcctcaatgccttatgctttc

SEQ ID NO: 202632 - DNA, 201 bp, Homo sapiens
ctggaaaccatgttatttagaaaattagggtaagtgcaaaacaaagcaagagtggggaaaaaaacaacgttcatcttagaatatcaggatgccgacaaaaygataaatcatgcaccattttttccaataagatttgcatgagtgtgatttctcatggttactattccactccagtattgatggtaaatttttaaatccatc

SEQ ID NO: 202633 - DNA, 201 bp, Homo sapiens
ttattccagtggggtgtgtgtgtgtgtgtgtgtatgtatgtgtgtgaatgtgtacacaggctagtgccttctttgggatatttacccaaattcattttggrtgtgaggagatctatttcagagtttggtagcccaattcaaccctaagatataaaatatgattttaaaaagtcatagctgcccgggacattgggccagaaa

SEQ ID NO: 202634 - DNA, 201 bp, Homo sapiens
tgccccaaagaaatcagcagtttacaaatggataactcattttaaaaagggacaagataggccgggcgttgtggctcatgcctgtaatcccagcactttgrgaggccgaggcaggcagatcatgaggtcaggagatcgagaccatcctggctaaaatacaaaaaattagccaggcttggtggcgggtgcctgtagtcccag

SEQ ID NO: 202635 - DNA, 201 bp, Homo sapiens
actacatccacagtatccacagttctttttttgtttgttcaaatcattgtcataccctaactctaacggacaagggaaataaaagaaaggtaatttacaayaacatgtatattgcaacgctccgactcagctatcaactgccaagaacaatgcccccccgccccatagacttgtacatccctcctgggccagagccagctc

SEQ ID NO: 202636 - DNA, 201 bp, Homo sapiens
acggctgccaacagggcaataattggttcttgaaggggggtgcaaaagagtattacacttttatgtgtaaatcacagatacacatacagcatgcaagcagrtatacagcgcatctgtggtattaaaatttcatagtgggagcaggtaggggatctcagggggaaaaaaagtctaaaaatgcctcatagagaggtgataatg

SEQ ID NO: 202637 - DNA, 201 bp, Homo sapiens
gaacctcaagttgctttaattcttactgttttattgctatattacacttgagaaaattgtttttcttataaatatgaatgaatgtttaggtagcagtgagrttaaccatttgtttgtcacatttcaggcaaatgaattccaaaatgctgttttccattttgttttaattccgtgactattttttttcttccactggacaga

SEQ ID NO: 202638 - DNA, 201 bp, Homo sapiens
catcgtgtaccggcagctgaatggtaaggacgcacgccggcgcctccggggctcggcgcgggcgggccgggcacagggtgagccccagggtccttgcgcgytgcgccctgtgcctgggagccggcacatcctggctcccgcgcgctccttcttacccttcctgccccgtttcgggcagatggccggggctgctggaaagaa

SEQ ID NO: 202639 - DNA, 201 bp, Homo sapiens
cgagtgcagtggctcacgcctgtaatcccagcactttgggaggccgaggtgggtggatcctttgaggtcaggagttcaagaccagcctggccaacacagcraaaccctgtctctactaaaagtacaaaaattagccgggtgtggtggcgggcacccgtcatcccagttacttgggaggctgaggcaggagaatcacttgaa

SEQ ID NO: 202640 - DNA, 201 bp, Homo sapiens
caggaccctcactcaattctttagggatggagtaagttgctatcatcacttacagaagtgtcttgaagctgatgaaacttacgatgaaatgtagtttgtatttttttgcgtttattactattttattttattttatcttattttgagtcaagagtcttctctgtcacctggaatggagtgcagtggcaagaacatagctca

SEQ ID NO: 202641 - DNA, 201 bp, Homo sapiens
atagggccatgtgattgagttcagggcaatgagaggtagacggaagtgatgtttgctatgaccaggcttggcccaccaaaactcctacggggtccttcatrccttctctctcttttttttcgttttctttttcttttttttttttttgagatggagtcttgctgtgtcccaggctggagtgcagtggtgcgacctcggctc

SEQ ID NO: 202642 - DNA, 201 bp, Homo sapiens
ttctcatggttactattccactccagtattgatggtaaatttttaaatccatcatttaatatggtccctttgcaagaaagaaaagatcaagatatccacgsagacttcttattgctaatgaaaatcaagcacctctttggttcgattttccctcttgtaaaacttgtatttgcaggaagatttttttgtaagtctcttgaa

SEQ ID NO: 202643 - DNA, 201 bp, Homo sapiens
tattacattctagttgttgtggctatcttgaaatacttaaatatcctcttgactactctcaaatttatagtagttagtaaaccaaacagtagatcttgttrtttaaggtgctaaagaagcacataggttatatcatattttaaaaaaaccaataactatatttcaacatagttagtctttagtaatcctgtgcattttgtt

SEQ ID NO: 202644 - DNA, 201 bp, Homo sapiens
ttaaatatcctcttgactactctcaaatttatagtagttagtaaaccaaacagtagatcttgttatttaaggtgctaaagaagcacataggttatatcatrttttaaaaaaaccaataactatatttcaacatagttagtctttagtaatcctgtgcattttgtttaatttgatgcacttaaatacattattttctgtaat

SEQ ID NO: 202645 - DNA, 201 bp, Homo sapiens
gcaaacgcctgtaatcccagctactcaggaggctgaggcacgagaatcgcttgaacccaggaggcagaggttgcagtgagcccagatcgtgccactgcacyccagcctggatgacagcgagactctgtctcaaaaagtaaaaattaaaatttaaaaaaaagcttaccatttgcatctgaaccactgttcagactgtttttg

SEQ ID NO: 202646 - DNA, 201 bp, Homo sapiens
acagaggttaagcagacccacgttttgaatgaatttggtcacataacttaataggtgtgtgtcttgggcattgttgaccttcatttcctcatctgtaactygggaattatagaaggacctacctaatgggctttgtcttagtctgtttgagctgctataacaaaataccatacactaggtagctgataaacaacagaaatt

SEQ ID NO: 202647 - DNA, 201 bp, Homo sapiens
caaacgcctgtaatcccagctactcaggaggctgaggcacgagaatcgcttgaacccaggaggcagaggttgcagtgagcccagatcgtgccactgcactycagcctggatgacagcgagactctgtctcaaaaagtaaaaattaaaatttaaaaaaaagcttaccatttgcatctgaaccactgttcagactgtttttgg

SEQ ID NO: 202648 - DNA, 201 bp, Homo sapiens
aacaaaataccatacactaggtagctgataaacaacagaaattgatttctcacagttctagagattgggaagtccaagatcaaggcagattctgtgtctgrtaagggcccactttctggctcctagacagtgccgtcttgcaatgtcctcacgtagtggaaggagtgaggggtggcttgttcctctttcataagggcacca

SEQ ID NO: 202649 - DNA, 201 bp, Homo sapiens
tagaaactttggaaaataggatttgtttattttttagagttggggggcggggtcttgctatgttgccctggctggactcaaactcttggcctcaagtgatygtcccacttcagcctcctaagtaggaaagtatgatttttaactggacactacaagactgaaaacaaaaagaactatacacaaatactgtactcaagctag

SEQ ID NO: 202650 - DNA, 201 bp, Homo sapiens
caaagacacgtactgtatttcacatattcgagaaacctatagcagtcaaattcatacaaacagaaagtagaatggcatttaccaggggcttggaagagggrgaaagggaaaaagggtgatgtttaatgggtatagagtttcagattccatgaataaataaataaaaatttgagaagaaacaggatatttgcatagttccaa

SEQ ID NO: 202651 - DNA, 201 bp, Homo sapiens
acacttgaaatatagccagcacaactcactgaatctttattttaattactttatatcaaaatgtatttttattaaaatatttttaaaccattttattgtgrtataattgacatataaaaagtagtacacgtatgcaaattaatgggtttgaagataagtatatactcacaaaactaacaccacaatcaatgctataaacct

SEQ ID NO: 202652 - DNA, 201 bp, Homo sapiens
ttggaagaatcatatctgggtgggggctatatggagccagtggagacagggtggggctagggagagaatatcctgcacatacagggaaggcaggctggacrgtcagctgttgttgagaaacctcatatcatctatcagactaagccagaaaagcaagagttacacctgaaaaggtaagtgggaccatagagtaaaaagtca

SEQ ID NO: 202653 - DNA, 201 bp, Homo sapiens
aagctggagattagagttcttgtcttccttcacctcttgagagatgtagacttgagctgaagatgggaaacaagccctgtttccttctcctgactttgagyctcctgcttgtgcctcccattggcagaatctaattttatggcacacaacacccgcatagctcaatctaatcagaagctaatcacaaatctaatcagaata

SEQ ID NO: 202654 - DNA, 201 bp, Homo sapiens
gctgaacatacaactgccattcgatccagtaatcccactactggatattcactcaaaggaaaagaaatcattctatttaaaagatacctgcacttgtattktgccattcacaatagcaaagtcaaggaatgatatggtttggctctttgtcccccacaaatctcaccttgaattgtaataatccccacatgtcgtgggagg

SEQ ID NO: 202655 - DNA, 201 bp, Homo sapiens
aaatgcaagatgtgtgggatgaaagtacagtagaagaatgagttggagaactagcttgaatgatatgatcacatttagattattctggccactatgtgttrggtaaatttgaaggtgaattttgagataaatttgagagcccataggccataggcagtaaccagagagactgttgtaaattctgagctccacagcaaaagt

SEQ ID NO: 202656 - DNA, 201 bp, Homo sapiens
ctactcatgggggctgaggcagaaggatcacctgagccagggaggtcaaggctgcagtgagctgtgatcctaccactgcactccagcctgggtgacagagygagacactgtctccaaaaaacaaacaaacaaaaaacaaaactacaaatagacttcatgtaacggtgtctgggaaaattgcattttatagagctgctcagg

SEQ ID NO: 202657 - DNA, 201 bp, Homo sapiens
ctggccctgccagcaaccttcctagtcagctgatctccaggggtttcagacaatggacgaagcaagggctttggagttagacagaaggaatctcaaacttccctttggctactttacaaagccaagccaaagctggggctttggaaaaaatcacctaacatcaatgagcctcagtttactcatctggaaaacagtagctac

SEQ ID NO: 202658 - DNA, 201 bp, Homo sapiens
gaatctgtatactatagtaactatcttactaagtggtgctgtccctgagacatatatagatatgtgtgtgtatgtgtatatatgctactttgtgcatttayatataaaaataaatattatatatgtatctgtaaaatacatacatatgccctgcattttttctaattacaggcagcaagccttaccatccaaatttccaga

SEQ ID NO: 202659 - DNA, 201 bp, Homo sapiens
ttgtgcttgataagctgtttttgatgatgatagtcatgctaaccgtaataaatgtaacaatagccaacatttatttatttatttatgtatttttggagacrgagtctcactctgtcgcccaggctggagtgcggtggcacgatctcggctcactgcaagctccgcctccctggttcacgccattctcctgcctcagcctcc

SEQ ID NO: 202660 - DNA, 201 bp, Homo sapiens
gataagctgtttttgatgatgatagtcatgctaaccgtaataaatgtaacaatagccaacatttatttatttatttatgtatttttggagacggagtctcrctctgtcgcccaggctggagtgcggtggcacgatctcggctcactgcaagctccgcctccctggttcacgccattctcctgcctcagcctcctgagtagc

SEQ ID NO: 202661 - DNA, 201 bp, Homo sapiens
ggattacaggtgtgaaccatcatgcctggcctcaattttcttatctgctgactgtggataaagctattcggaggatcaaattaaataacctttgtagagcrattccaggaagtataaagttcataatacatgtaagacatgtcattttgaataaaaccgcagtttgaaaatttatggaacgtttgctccaaaggcacttca

SEQ ID NO: 202662 - DNA, 201 bp, Homo sapiens
taaccgtaataaatgtaacaatagccaacatttatttatttatttatgtatttttggagacggagtctcactctgtcgcccaggctggagtgcggtggcaygatctcggctcactgcaagctccgcctccctggttcacgccattctcctgcctcagcctcctgagtagctgggactacaggcgcccgccaccatgcccgg

SEQ ID NO: 202663 - DNA, 201 bp, Homo sapiens
aggacaagaccagaccttgaatattagaattctatgacaaggtgagaacagctgcctcactgttagggcagtagattccaaagtggggtacacaagatgaygtggaccattagagggacaagaggaatatattagcactcatattctaatgtcatttttggatttctatatatctaaatttttcatgtgtaaaatatatta

SEQ ID NO: 202664 - DNA, 201 bp, Homo sapiens
ctctttcctcatttgctatgaggcgctcccatacagttggcttgaagcattagaggctacactacgggatctgcttcttgccctttctctgagttcactcscatctgcagacctccaaatccttctactctcatgtggggaggaacaaaggaattaaaaaagtagatgctagaggagttatctcttgctgctcctgtttac

SEQ ID NO: 202665 - DNA, 201 bp, Homo sapiens
ctcaggtgatctgcccacctcagcctcccagagtgctgggattacaggcgtgagccaccaccacgcctggctctaggcctgttgaatatcaaatcacaagraacagctgtaagggtcccgaattgctccctgcagccctggatccagcagttgggtagatgtctgtgaaagagccatagggactgtgatgtgctcagcctt

SEQ ID NO: 202666 - DNA, 201 bp, Homo sapiens
ggctacactacgggatctgcttcttgccctttctctgagttcactcccatctgcagacctccaaatccttctactctcatgtggggaggaacaaaggaatyaaaaaagtagatgctagaggagttatctcttgctgctcctgtttacaatttctgagcttctcccagtaaaagccccattgccttcctaggaccaccattt

SEQ ID NO: 202667 - DNA, 201 bp, Homo sapiens
caattaggagcattaaatattatatagctgtaccctaacttccctcataggaataataaaattctataataataactgatggaattcttgctgtgtgccaratgtgtgcagagacattacaagtgcattatctcactgtatgttcacatctgtccagagaggctccacccatccccagttgagaaatgagaaaactaggtg

SEQ ID NO: 202668 - DNA, 201 bp, Homo sapiens
tatatccgtcctggtcaaagccagcaaaccatgagaacaccttttctagggcttttggaaaggggaggtttctcttccttgcaaggaagctgccagaggarctgttctttctttggatggtgatgtgttctgaaacaacatctggagctgctgtagccactggatcactatgagctgaggctggaactgctatgagagccc

SEQ ID NO: 202669 - DNA, 201 bp, Homo sapiens
tcttgttgatgatgcgctggcctccgtgacttgcttctagtgatcgaattcagtggaaataatgttccatgacttcagaggctggatcaaaaagggtgagrgagcctctgcctgagggtgctcttcagggacatggatctttgaagccgtgtgccaccataccggcttcgctgaagcccccatactggagggaccatgtgg

SEQ ID NO: 202670 - DNA, 201 bp, Homo sapiens
agttcagatgagtcactgaagcaagaaacccagaaggaagaaccaacttgtgatgaaaaagtcattttccaagttcctgggactatggataccgaacttcrgttatcactttaattactgcagatatacaagccacgacaaactggcctgatctatatataattacagacacaagaaatgctttggttttactaaatttca

SEQ ID NO: 202671 - DNA, 201 bp, Homo sapiens
ttatctgttttcctgttgatggacacccagaccatttcagtttttggctattatgaaaagagcaactgtgtctgcttttatataggacttttgtgtgcctrcattttcatttcttttatataagtacctacgagtggaattactatgtcataggatatgtattactcagggttctctagagggacagaactaataggatag

SEQ ID NO: 202672 - DNA, 201 bp, Homo sapiens
acagatatagggcataggaaagcaggagttagggactaggggggatttaataagtgattggaagtgatgcagggcaggtgagccctaaaattggggcttamcctgggaaggtttttggctttgctcaggaaagaattcaagagtgagccagtagtagaagaaaccagctttatggaggcattagtgttacagctctgtgac

SEQ ID NO: 202673 - DNA, 201 bp, Homo sapiens
caacaacaacaaaaaactagccaggcacagtgatgcacacctgtagtcccagatactcaggaggctaaggcccaagaatcacttgagcccaggtggcggargttgcagtgagccgagatcacgccactgcactacagtttgggtgacatagtgagactttctcaaaaaaaaaaaaaaagaagaattcttaactacttaact

SEQ ID NO: 202674 - DNA, 201 bp, Homo sapiens
aaagaaaatgtggtgtatgtatatatatatatatgtgtatatatatgtatatatatgtgtatatatatgtgtgtgtgtatatatatgtgtgtgtgtgtatrtatatatatatacacatatatatatatacatatatatatgtatatatatacatgtcatggaacactatgcaaccataaaaaagaataaaatcatatcctt

SEQ ID NO: 202675 - DNA, 201 bp, Homo sapiens
atatatatgtatatatatgtgtatatatatgtgtgtgtgtatatatatgtgtgtgtgtgtatatatatatatatacacatatatatatatacatatatatrtgtatatatatacatgtcatggaacactatgcaaccataaaaaagaataaaatcatatcctttgcagcaacatagatgtagctggaggccattatcctaa

SEQ ID NO: 202676 - DNA, 201 bp, Homo sapiens
tttgttagaaaatgatttggggccgggtgcagtggttcacgcctgtaatcccagcactttgggaggctgaggcgggtggatcacctgaggtcgggagttcragaccagcctgaccaatatgaagacaccccgcctctactaaaaatacaaaaattagccaggtgtggtggcacatgccggtaatcccagctacttgggagg

SEQ ID NO: 202677 - DNA, 201 bp, Homo sapiens
gagtgcagtggtgcaatcatagctcactgcagactccaatccctgggctcaagtgatcctcctgcctcagcctcccaaagcgctgggattacaggtgtaarccactgttcccagactccttttcattttcttaatgatatattttcattttaattttcttaatatattttatttatgtatttattttgtttatttatttat

SEQ ID NO: 202678 - DNA, 201 bp, Homo sapiens
tgtttgccattttttcagagggatgctggatgcctctgtggaggacctaccaagggattcacaagattcgtcctgcagcctggatggcacttctctctaargaaaagatgagttaatggaggagaaagttggagggaagaatgggtgtttctttttccctcccaacaggagggactcctccccaggtcaaatggggaaatt

SEQ ID NO: 202679 - DNA, 201 bp, Homo sapiens
atgagaatgtgagctccttgctcaacaattattaataatttcaatatgataaacgaggttcattaaactaaaggcaggactcttctgaatatagggctccwtgtgactgcatgaagtcacccgtgaagtcagccttgcatccatccatccattcatccatggatacccatcctgtggatgcttactgaacacccagtatgt

SEQ ID NO: 202680 - DNA, 201 bp, Homo sapiens
ttttttgagatctttgaactccctgaagatctgtgggcattgcagtgggttagatgcaaatttgaaatgacatgtttatagaccttcttgcatttttgtcrtttgcagaggagctgaaggtccccctagaggagtatgtccacaaacgctaccccgggctggtgaaggtggtaagaaatcagaagagggaaggcctgatcc

SEQ ID NO: 202681 - DNA, 201 bp, Homo sapiens
gaatttacttcccatccttacccatgtgtgcttgggggctgatactacatgtaggtgtaaaccacgtggtatatccgtcctggtcaaagccagcaaaccaygagaacaccttttctagggcttttggaaaggggaggtttctcttccttgcaaggaagctgccagaggagctgttctttctttggatggtgatgtgttctg

SEQ ID NO: 202682 - DNA, 201 bp, Homo sapiens
ggctaactttgtatttttagtaaacggagttttgccatgtcggccaggctggtctcaaacctctgacctcaagggatccttcgccttgtcctcccaaagtktcgggattacaggcatgaaccgagcctggcctcaatacattcttcctaaacttttttgatcatcaagattttctttgtttcttatgatgttttccattat

SEQ ID NO: 202683 - DNA, 201 bp, Homo sapiens
cttgtactttgcaatctatggtacagaattatcgaatgcctttggttttgttgttgctgtttttgatatcatcttgttttgttactatctaaaaagcagayaaaatgggctgggaattccctagttttcacaactgttttcttagctagaaggcttttagaccaacatagcacacctgcatctctgactttatcttccact

SEQ ID NO: 202684 - DNA, 201 bp, Homo sapiens
ttctcatcctgggacccaggccaaagagtagtacctatggggtccatgctgttcttagggaaggggcaggagtaatcagagccaagccacaaaagtgtgcytgaagatcttgtttgaatgtggtctacatcacattcatcatatccagttggcccatgaaagttacatgaccaaaacgggtgcaccaaagtctcagaaatc

SEQ ID NO: 202685 - DNA, 201 bp, Homo sapiens
gtcaccatgattaagtgatatatgactgtaaataattgaatgaattaatttataggagcaaagagatagctctttacagaataattccagttaataaatgyaaaaagatgaaagaaatagaaaaccgccattaggcaaacaccacagtaataattgctgtaggcaagttccatcaatagatgctaaaattagtagtcaaaa

SEQ ID NO: 202686 - DNA, 201 bp, Homo sapiens
aggctggtctcaaacccctgacctcaagtgatctgcccaccttggcctcccaaagtgctgggattacaggcgtgggccacagtgcctggtccagaatgtgstttctgacttttaagtctctcacagcccactgggtaacacaataaacaaataattacaatgcaatatgacaatctaggtgagcatccataatgttttgag

SEQ ID NO: 202687 - DNA, 201 bp, Homo sapiens
cggtggtcagccttgtgacccatctagtccagagaccggtcttttatttcttcagttcatgaattcattggcttattcagccaacattcatagtgaagctrctatgtgctcagtgttgaagacacagaatgtggcttctttctttttttttttccttgagacacagtttcactttgtcccccaagctggagtgcagtggtg

SEQ ID NO: 202688 - DNA, 201 bp, Homo sapiens
tgtaagtggcagatgataatggaagattaggggtttctggactcagaaaatgccagtgaatatgctttcataagtctatactgagacaggaatgttctaakattggtgatgatattatacatgtgaaggcacagggcagatattttgctgttggcttcatggatccccataaagaaaatcttgctgtgaattctctgctgt

SEQ ID NO: 202689 - DNA, 201 bp, Homo sapiens
tagctggggcaacatagtgagaccccatctctacaaaaaatgaaccaggcatggtatgtgcacctgcggacccagctactcaggagactgagacaggaggwttgcttgagcccagaagttcaaggctgcagtgagttatgatctcaccaccactgtattgcagcccgggtgacagacactctgtcttaaaaaaaaaaagaa

SEQ ID NO: 202690 - DNA, 201 bp, Homo sapiens
gtcttttgtcagtttctggaatcctaaagaatagagtagcatcatgttcaagaatctctcaaaacaactggatctcagctaaaatcagtgggaatctgtgrtattttagcctagggatgctcccattcatcttgctccccttcccagctctgttggggcaagtcatgggattaaaattggggctgttgtgatttgctgttg

SEQ ID NO: 202691 - DNA, 201 bp, Homo sapiens
catgaaaaataatgaaattggacccttatcttaacaatacacaaaaattaaaaatggattaaagacctaaatgtaagatctaaaactataaaactagaagraaacaaaggggaaaaacttcacgacattggacttggcaatgaattattggatatgtcactagaagtgcaggcaactatagcaaaaataatcataggaggc

SEQ ID NO: 202692 - DNA, 201 bp, Homo sapiens
ttaacttcggtttgtatttaccttgtcactcaagacaggtttagtaggtttttgaaatttgcagatggataactttttaaaaacattattaataattttamattttattgcatagtgatcagagagtgtctttttttttttaagatggagtctcactctgtcacctaggctggagttcagtggcatgatctcggcccactg

SEQ ID NO: 202693 - DNA, 201 bp, Homo sapiens
accatctgggcctgatgttttttatggggtagtttcttgatggtttttgcaatttttttcctgaggaaatagctctgtttaaggtttctgtctctaatgaygtcaaccttggcaaattgcctttccctaggaaattatccattacatctaggcttttaaatttatttgtatagggatctgcaaatgagtctttatttttat

SEQ ID NO: 202694 - DNA, 201 bp, Homo sapiens
catggtttcttcaggaagaatttctttctttttttctctttttctccagaggaatttcccatctatagtggtttacagacagctgtgtttctccaaccacrtttgtggtctggctggtgaagactgaaggacagatcgtggttacatggttctatgtaaaatgacattgatcacgttgagaataaaactaagtttcttgta

SEQ ID NO: 202695 - DNA, 201 bp, Homo sapiens
atacagcaagcactttattattattgtgctacttttatacaattgttttcctgtaacaaactaaggactaagcagggataaggtggaagagctggattcargaaaatcctagagagaattagtaaaatgaggcaactaattggaaatcgatgaagtgggtgcactagcttgggagatggagtggaagtgatcttgttaacc

SEQ ID NO: 202696 - DNA, 201 bp, Homo sapiens
ggtgactcacacctgtaatcccagaactttggtaagtcaaggtaggaggaccgcttgaggtcaggagtttgagaccaacctgggcaacgtagcaagactcyatctctttaaaaaataactgggcatggttgtgcacatctgtagtctcaggactagctactcaggaggctgaggtggcaggatcacttgaacccaaggctg

SEQ ID NO: 202697 - DNA, 201 bp, Homo sapiens
ttgaggcaggagaatagcttgaacccaggaggcataggttacagtgagccgagatcacaccactacactccagcctgggcgacagagcaagactcgtcttaaaaaaaaaaaaaaagtaatggcttaaaaccgcaattatttgtgcaccaacctaatattaatagacaggaaaacagatactggagccctttcaaaagagga

SEQ ID NO: 202698 - DNA, 201 bp, Homo sapiens
gacatagggagcccatattctgttttccccaggaaagttctgaattattcctgttgagctgacataatgatcactaatacctctttttactctcagaaacktgcatgtgagtacataaatcatatagtcatctgagagtttcaccccctgaatctggctttcaggtcactgcagcaggaaagaaagaatggagactcatgg

SEQ ID NO: 202699 - DNA, 201 bp, Homo sapiens
tgaggtcaggagttagagaccaacctggccaacatggcaaaaccttgtctctactaaaatacaaaaaatgaaactggcatggtggtgggtgcctgtaatcycagctacctgggagtctgagataggagaattgcttgaacctgggaggcggaggttgtagtgagccaagattgcaccactgcacttcagcctgggcaacac

SEQ ID NO: 202700 - DNA, 201 bp, Homo sapiens
tcttgacttcagtaaattgatgatgaaagaatatgaataaacttaaaaaatctaaagcctgtgagaacattttgtaacacaaaacaataaagtcgtaagartttaaaggtggatctaattatttcttacttgaaacacatagaaaagttggaagacaatttttacaaattctcaataagatagaggagggctttataccta

SEQ ID NO: 202701 - DNA, 201 bp, Homo sapiens
tgtgtaccaccacactcagctaatttttgtattttttttttttttttgtacagacagggtttcattatgctgcccaggctggtctcaaactcctgggctcwagcagtctgcctgccttagtctcctgaagtgttgggattacaggcgtgagccactgcgcccaaccacttacccatttaaatgcttatggactgtgactat

SEQ ID NO: 202702 - DNA, 201 bp, Homo sapiens
caatgacgagtaggtctaatttgtggtatctctaactgatagtttgcattttaaggttaagatattttattgcttccagatggtcagctaacttccagtcmgaagagcattactgcagagtttaagaatagctatgatgcagagagagattttaattatcatgtaaaggatctaattaaaaagacacacagtggtcggctt

SEQ ID NO: 202703 - DNA, 201 bp, Homo sapiens
tcattttccctctcttacttccaaggccagtcttagtccccagccccaaacaaggaataaactttggaagaagtttccaaaaacaggcttggaatttccawctgggatatagtatgtcttagggagattccatgggaggtctattcgtgatgggttctgcaaagaggaagaaagaagacctatttgactttgaaaagcctt

SEQ ID NO: 202704 - DNA, 201 bp, Homo sapiens
aaatatctgttcaagtccctgttttcatttctgttttgttttgttttgttttttgagacagagtctcgctctgttgcccaggctggagtgcagtggcacartctcagctcactgcagcctctgcctcctgggttcatgccattctcctgcctcagcctcccgagtacctgggattacaggtgcccaccaccacacctggct

SEQ ID NO: 202705 - DNA, 201 bp, Homo sapiens
tagtggatacacctggtactatgccaagtgcatatactgggtactgtgccgagtccacacactaaatgttatgctaagtgcatataccaggtaccatgctwagtgcatacactggatactatgctaagtgtatataccaggtcctatgctaagtgcatacactggatactgtgctaagtgcatataccagttactatgcta

SEQ ID NO: 202706 - DNA, 201 bp, Homo sapiens
aagttctttagtggtgatttgtgagatcatggtgcacccatcacccaagcagtatacactgcaccatatttgttgtctttatccctctccccactcccackcttccccccaagtccccaaagtccattgtatcattctatgcctttgcatcctcagagcttagctcccacgtatcagtgagaacatacaatgtttggtttt

SEQ ID NO: 202707 - DNA, 201 bp, Homo sapiens
gcccaggctggtctcaaactcttggggtcaagtgatcctcctccctgggccttccaaagctctgggattacaggcatgagccactgcccccagcctttggsttttagtttctataaagaaacctactgggccagacgtggtggctcatgcctgtaatcccagccaaaaatctgtggggctcagctttccttggccagatat

SEQ ID NO: 202708 - DNA, 201 bp, Homo sapiens; identical to SEQ ID NO: 35796

SEQ ID NO: 202709 - DNA, 201 bp, Homo sapiens
gggctgagccggttctatcccgcatccaggaaaaccggaagcgtgtgatcctcccctccattgacaacatcaaacaggacaactttgaggtgcagcggtaygagaactcggcccacgggtacagctgggagctgtggtgcatgtacatcagccccccaaaagactggtgggacgccggagacccttctctccccatcaggt

SEQ ID NO: 202710 - DNA, 201 bp, Homo sapiens
gacgagttaatgggtgcagcacaccaacatggcgcatgtatacatatgtaacaaacctgcacgttgtgcacatgtactctaggacttaaagtatataaaawaaaaagaaataaacccttcatgtgtggtcaaatgatctatgacaaggccattaagaccattcaatggggaaaggttactcttctcaacaaatgatgtgag

SEQ ID NO: 202711 - DNA, 201 bp, Homo sapiens
ttataggcgtgagccaccgagcccagctggtctccagcctttataaaaccacactccaagtatttgccttgcccttagagatgtatgttttctcctcctcyctttttaaattgcttataattttttggtgttttttgttgggggtggggtgatcatgtaatggaagcctgggaaggttctgattgactggccctcgggaac

SEQ ID NO: 202712 - DNA, 201 bp, Homo sapiens; identical to SEQ ID NO: 35797

SEQ ID NO: 202713 - DNA, 201 bp, Homo sapiens
agacacagtcatgtcattccacattcttgcttatagcctcatctgtcaccagaaagaagagcagctgaggcattcttcctacgaccattccctgaagctcttttttttttgtgtgtgtgtggggggtgggatatagtcttgctttgtcaccaggctggagtgcagtggtgcaatctcggctcactgccaccactgcctcct

SEQ ID NO: 202714 - DNA, 201 bp, Homo sapiens
aagaatgaagaacctcctaattaacgacgctatagcttgggaagataggtacttaagattgacaagccattttagtcttggtttctgcaggtggtgtggcygaacattcagaatcaaagcaattttcacttcatttcatccagaaggtctctatgttttcttataaagagactgtattttgctcctctctctccccacaaa

SEQ ID NO: 202715 - DNA, 201 bp, Homo sapiens
acttcattctgcttgtggatatccagttttctcaacaccatttattagagactgtcccttattcattgtgtgttcttggcacctctgttgtaaatgcattractgttaatgtgtgtgtttattactgagctctctgttctgttccactggttgatgtctgtttttatgccagtaccatgctgttttgattactatatcttt

SEQ ID NO: 202716 - DNA, 201 bp, Homo sapiens
ctttctgggctggccgaggtggaagccggctccctcagcttgcggggaggtgtggagggagaggcgcaggcgggaatcagggctgcgcggcggcactcgcragccagtgcagttccgggtgggcatgggcttggccgccccacactgggagcagcaggccggcgtcaccagccccgggcagtgaggggcttagcacccggg

SEQ ID NO: 202717 - DNA, 201 bp, Homo sapiens
cttttccaggcatggtggcatgtgcctgtggtctcctaatcgggagactgaagtgggggaattgcttgaacccaggagttcaaggctgtaaacagctatgwtaatgtcactgcactccagcctggatgacagagcagactctgtctctaaaaaaacaaacttaaaatccaaaccaaaaacacaaccacagttttttttttt

SEQ ID NO: 202718 - DNA, 201 bp, Homo sapiens
aatatacccattagggaaggctaagctgctgtaacaaacagattgctcaaattcagtagcttaatgtacaagaagtttattattttcttaacggtataggrtaagtatttctggttagcaagtggttttcctccatgcggtatctcagggccccaggatacctttgtcttgtcatcatcatctgcatgctcaaggctgggt

SEQ ID NO: 202719 - DNA, 201 bp, Homo sapiens
cggcctcagaagacctttcctaggccaaggcattgccaggcaggtgggccttgggaggagtgtctgggatgctgaattaagacagagatggggactgggarcagaaaggagggaaagggtgttccccaaggcagctggttggattagatcccctgaagttcgatgacaggacaacaggacaggcacagaagagcccatcct

SEQ ID NO: 202720 - DNA, 201 bp, Homo sapiens
gaaagggtgttccccaaggcagctggttggattagatcccctgaagttcgatgacaggacaacaggacaggcacagaagagcccatccttcaggggtaggyctcattgtttctcctagctacaatttatttatcatttatttatttatttattatttattttgagatggagtcttgctctgtcacccaggctggagtgcag

SEQ ID NO: 202721 - DNA, 201 bp, Homo sapiens
acttgtcgtttgactaagaaattgcatcttaggaaattatctcaaggaaataagcagacaagtatttatacacaaggaaggtataagccagaggattactrccatgctgtcattccccgggaaaattgggtatagcatttaaatgagcaataatgggcaattgattaagtaaatgatgatacattcatggcctgccatgct

SEQ ID NO: 202722 - DNA, 201 bp, Homo sapiens
ttttccactgtcaaattaaccctcttttaaaagtgggtttctgcagcttctgctccactctctctgagctcaggagctgagcccttggaactcttatgtcstctgttgctggtctcatcttctattgaagggaggaagggaaggaggaaggagggaaggacggacagttggacggagggagagagaaaggaaggagggagg

SEQ ID NO: 202723 - DNA, 201 bp, Homo sapiens
acctcccaggttcaattgattctcctgcctcccgagtagctgggattccaggcgtgagccaccgtgctcaactaatttttgtattttttggcagagacaargtttcaccatgttggccaggctagtctcaaactcctgacctcaagtgatctgcacctcttggcctcccaaagtgctggcattacaggcatgagccacacc

SEQ ID NO: 202724 - DNA, 201 bp, Homo sapiens
gtcattccacattcttgcttatagcctcatctgtcaccagaaagaagagcagctgaggcattcttcctacgaccattccctgaagctcttttttttttgtktgtgtgtggggggtgggatatagtcttgctttgtcaccaggctggagtgcagtggtgcaatctcggctcactgccaccactgcctcctgggttcaagcga

SEQ ID NO: 202725 - DNA, 201 bp, Homo sapiens
cattccacattcttgcttatagcctcatctgtcaccagaaagaagagcagctgaggcattcttcctacgaccattccctgaagctcttttttttttgtgtktgtgtggggggtgggatatagtcttgctttgtcaccaggctggagtgcagtggtgcaatctcggctcactgccaccactgcctcctgggttcaagcgact

SEQ ID NO: 202726 - DNA, 201 bp, Homo sapiens
ttccacattcttgcttatagcctcatctgtcaccagaaagaagagcagctgaggcattcttcctacgaccattccctgaagctcttttttttttgtgtgtktgtggggggtgggatatagtcttgctttgtcaccaggctggagtgcagtggtgcaatctcggctcactgccaccactgcctcctgggttcaagcgactct

SEQ ID NO: 202727 - DNA, 201 bp, Homo sapiens; identical to SEQ ID NO: 35782

SEQ ID NO: 202728 - DNA, 201 bp, Homo sapiens
cctcccagttgtgggtgtgtgatgtctacccacttcaagccatacccaggctcaaccccattccctggtctgagagtcagcttggcctcagtcagcaggasgcttagactcagggagataggatatacagtgtttacaggctcagcatctgctgggcccggctgctgatccagctctgaccacatggcccaagctcaaggc

SEQ ID NO: 202729 - DNA, 201 bp, Homo sapiens
ttcctggacactattaagtatatgttgtggagactctggatcctgctatattcctttcaatggatttttatctaacagagagttaacttggctgggctcaracttcaaacttgatcctttgggctagctaatgtgaaaggaaaataccctgggtccccaaaatccctaagggaaagggaaacgtcaagctgggaactgctt

SEQ ID NO: 202730 - DNA, 201 bp, Homo sapiens
gaatgtcatgagcccctttcatctccaaactggattttaaaacaatgtggaaaaactgcttcctcccagggcacatttttctgttacttcttgatttggctttttttttttttttgacatggtgtctcactcttgttgcccaggctggagtgcagtggtgtgatcttggctcactgcaacctccgcctcctgggttcaagc

SEQ ID NO: 202731 - DNA, 201 bp, Homo sapiens
ctgactcttaaaaggaaaaaaaaaaggctggcgcggtggctcatgcctgtagtcccagcactttgggaggccaaggcgggcggatcaccggaggttgggcrttcaagaccagcctgaccaatatggagaaactccgtctctactaaaaatacaaaattagctgggcgtggtggcgcatgcctgtagtctcagctactcggg

SEQ ID NO: 202732 - DNA, 201 bp, Homo sapiens
actacaggtgtgcaccaccatgcccacctgtattttgtattttttgtagagacagggttcaccgtgttgcccaggctggtctcaaactcctgggctcaaaygatctgcctgccccagcctcccaaagtgctgggattttacaggcatgagccactgtgcctggcttgaacctgaattttaaatgctaagaatgcacagatt

SEQ ID NO: 202733 - DNA, 201 bp, Homo sapiens
cctcctgggctcaaacgatcctcccacctcagcctcctgagtagctgggactacaggtacacaccatcatgcaccaccatatcaagcagatatgatgtccrtgtcataaatgaggaatttgacactcacagaggtttaggaacttgccccaggccactgagcttagactgtggtcctcatcgaatagttatttgaaattct

SEQ ID NO: 202734 - DNA, 201 bp, Homo sapiens; identical to SEQ ID NO: 35786

SEQ ID NO: 202735 - DNA, 201 bp, Homo sapiens; identical to SEQ ID NO: 35787

SEQ ID NO: 202736 - DNA, 201 bp, Homo sapiens
aagaaatcagcagtttacaaatggataactcattttaaaaagggacaagataggccgggcgttgtggctcatgcctgtaatcccagcactttgggaggccsaggcaggcagatcatgaggtcaggagatcgagaccatcctggctaaaatacaaaaaattagccaggcttggtggcgggtgcctgtagtcccagctactcg

SEQ ID NO: 202737 - DNA, 201 bp, Homo sapiens
tttctcctctcttccctctttttctctctctcctctttctgtcttctctttgcctctttctctgtctctctctttctcttctctttttctttttctctttrtcattttctctctcctgtctctctttctcctctctctatatctctcgctgtctctctctcctctctctcttctcctctcttctcgattttgccccctccc

SEQ ID NO: 202738 - DNA, 201 bp, Homo sapiens
ttgtagtttcctaacttattttcctcttataactgaaagtgagtggagggctaagggattgtcatctggctgagaagggagagctgtgatagcatggctgrgggaggtgatggaagacggatggagcccttgcctttgtcccccacagataaatttgttgtaaaacctaacaagagcacaaagcaggggatagactcagga

SEQ ID NO: 202739 - DNA, 201 bp, Homo sapiens
ccctggatccagcagttgggtagatgtctgtgaaagagccatagggactgtgatgtgctcagccttccaggacctccactgcaatttcttacattttcagmgcttccacaggaaattagtcgcatgtctgggaaactcctcaggtatttgcaaccaagttatctatctatggtttcccatcttttggctcattggaaatgg

SEQ ID NO: 202740 - DNA, 201 bp, Homo sapiens
gtgatctcggctcactgcagcctctgcctcccagattccagcgattctcctgcctcagcctcctgggtagctgggattacaggcgcatgccaccacgcccrgctaatttttgtatttttagtaaagacggggtttcaccatgttgcccaggctggtctcgaagtcctgacctcaggtgatccgcctgcctcggcctctcaa

SEQ ID NO: 202741 - DNA, 201 bp, Homo sapiens
tgcccaggctggtctcaaactcttggggtcaagtgatcctcctccctgggccttccaaagctctgggattacaggcatgagccactgcccccagcctttgscttttagtttctataaagaaacctactgggccagacgtggtggctcatgcctgtaatcccagccaaaaatctgtggggctcagctttccttggccagata

SEQ ID NO: 202742 - DNA, 201 bp, Homo sapiens
agaaacagaagtgtttcagggtcaatgtcagtaaaaacacaagcttgcagggccaatttgggcagaacagtaaaaggaaaatcggctcatttggtaatacrtttctcatttctctgctgacgttgcagggtaacaacttttaggaccagtttggagctctgtaaagggccaaagaggttggagggtgagacattgagtgag

SEQ ID NO: 202743 - DNA, 201 bp, Homo sapiens
gctgaggtgggtggatcacgaggtcaggagatcaagaccattctggctaacatggtgaaacctcgtctctactaaaaataaaacttaaaaaaaattagccrggtgtggtggtgggcgcctgtagtcccagctactcaggaggctgaagaaggagaatggtgtgaacctgggaggcagagcttgcagtgagccgagatagag

SEQ ID NO: 202744 - DNA, 201 bp, Homo sapiens
ccccggccataattatattagctttatattggattgaatatcatatacagatgtgtagcatacaatgatgctttggtcatctgtggcctacacacgatggkgaaaagctgaaaaatagttcccaggtagcatacaagaaagggatccccatgctagctcccagaagggcttagctcttgttattttaaggaaactgaggcc

SEQ ID NO: 202745 - DNA, 201 bp, Homo sapiens
aagtgctgggattacaggcgtgagccaccgcacctggccttttgattaagcttcacagacacccttcaatatgaagattaggttccttgttgcatacatcrtttgctcccctgcattcattgaattctacttgattctctgtaacaagtttcattgatttgatgttttgcagaaccaattctgttttggactgcatttctg

SEQ ID NO: 202746 - DNA, 201 bp, Homo sapiens
tttagtaaagacggggtttcaccatgttgcccaggctggtctcgaagtcctgacctcaggtgatccgcctgcctcggcctctcaaagtgctgagattacargcatgagccacagcaccctgccgaaatgtcattgttttatttcctcttctcttgcaaagatgccaagggcgcagatggagctgtccgtctgtcagttgcc

SEQ ID NO: 202747 - DNA, 201 bp, Homo sapiens
aattagccgggcgcggtggcgggcgcctgtagtcccagctactcgggaggctgaggcaggagaatggcgtgaacccgggaagcggagcttgcagtgagccragattgcgccactgcagtccgcagtccggcctgggcgacagagcgagactccgtctcaaaaaaaaaaaaaaaaaaaaaagaatttggaggctagggtttt

SEQ ID NO: 202748 - DNA, 201 bp, Homo sapiens
gccaccgcacctggccttttgattaagcttcacagacacccttcaatatgaagattaggttccttgttgcatacatcatttgctcccctgcattcattgarttctacttgattctctgtaacaagtttcattgatttgatgttttgcagaaccaattctgttttggactgcatttctgggatgttcttaattgtcttatca

SEQ ID NO: 202749 - DNA, 201 bp, Homo sapiens
attcattgaattctacttgattctctgtaacaagtttcattgatttgatgttttgcagaaccaattctgttttggactgcatttctgggatgttcttaatygtcttatcattttatcctaagcttcttttaaaccccagtgtaaccttgattgattttgaaatgccacctttcatcttttcgggaatgaatgccaagtgtt

SEQ ID NO: 202750 - DNA, 201 bp, Homo sapiens
cttgattctctgtaacaagtttcattgatttgatgttttgcagaaccaattctgttttggactgcatttctgggatgttcttaattgtcttatcattttawcctaagcttcttttaaaccccagtgtaaccttgattgattttgaaatgccacctttcatcttttcgggaatgaatgccaagtgttctctgcataacactg

SEQ ID NO: 202751 - DNA, 201 bp, Homo sapiens
cccagataggtgagagacaaatggttgctttcttttgagtttctgttgagcctttccaaaggaggcaatcagatatgcatctatctcagtgagcagagagrtaactttgaatagaatgggaggcaggtttgccgcaagcagtttccaccttgagttttccctttagcttagtgattttgggtacccaagatatattttcct

SEQ ID NO: 202752 - DNA, 201 bp, Homo sapiens
tcaagcaattctcctgcctcagcctcctgaatagcttggattatagttgctcaccaccacacccagctgatttttgtagttttagaagagacggagtttgkccatgttggtcaggctggtctcgaactcctggcttcaagtgatctgcctgcctcagcctcccaaagtgctgggatcacgggcatgagccactgagcctgg

SEQ ID NO: 202753 - DNA, 201 bp, Homo sapiens; identical to SEQ ID NO: 35783

SEQ ID NO: 202754 - DNA, 201 bp, Homo sapiens
gggtagatacccagtaataggattgcaggtcaaacagtagttctacttttagttctttgataagtctccaaacttctttccacagtggatgaactaatttrccttcccaccaacagtgtataagcatgccttcttctctgcagcctcatcaacctctgttattttttgactttttaatgatagccattcttgctggtgtga

SEQ ID NO: 202755 - DNA, 201 bp, Homo sapiens
agtttcaccattttgcccaagctgatctcaaccctctggtctcaagtgatcctcttgcctctgcttctccaagtgctgaaattatagatgtgagccactgsccccggccataattatattagctttatattggattgaatatcatatacagatgtgtagcatacaatgatgctttggtcatctgtggcctacacacgatgg

SEQ ID NO: 202756 - DNA, 201 bp, Homo sapiens
tacacatgctattcatttttttcctagagagtttttcccgtcttcctgtctccccctttgcaggccctcacctggaaattacttactcatgcttcatgacycagttcaaattttgtcacctctgtgaaaccttccctgggccccgttgatctccttgaaggcagaaataagctcccagagcaggatgaacaaacgtctctt

SEQ ID NO: 202757 - DNA, 201 bp, Homo sapiens
caggatcacccactgtcacccaggctggagtgcagtgctgtgatctcagttcactgcaacctctgcctccttggctcaagggatcctcccaccttagcctyacaattagctgggactactggtgtgtaccaccacactcagctaatttttgtattttttttttttttttgtacagacagggtttcattatgctgcccaggc

SEQ ID NO: 202758 - DNA, 201 bp, Homo sapiens
taaggaagaggggacttgtgatggagccacacagagaactagcaggtcaccagccagagcactggaccctaggagaggacttgggctctctgagccagttytgactgcccacggaagatgtctccacacattccccattgcttggggccaaaaggcagtggcagaatctctggggccgtgggaggagccgaagaacagacg

SEQ ID NO: 202759 - DNA, 201 bp, Homo sapiens
atttaattgtctcaagcaatacctttgatcaataaaaaacattcctctttgaccctggattccttcatgtctcttgtaaaaccactgccgtaatcttatcsatctacttctcttgcctctcctcatcaatacttcttccttataggcttctgagtatctttgtaaaacatcagtaggttctagctgggtgttagcctgagg

SEQ ID NO: 202760 - DNA, 201 bp, Homo sapiens
gttaagtaactttcgtatagctgatattaaaaagaaaaccctagacaaattaaatgaaacagagtttaattgagcaaagaaggattcgcagatcggacagycgcgtggtggataaagatttaaggacagcaaaaggagagtggtggacggaaaacagaagcaaggtagagaagcagcttcttgattacagctcagtgtttg

SEQ ID NO: 202761 - DNA, 201 bp, Homo sapiens
agttaagtaactttcgtatagctgatattaaaaagaaaaccctagacaaattaaatgaaacagagtttaattgagcaaagaaggattcgcagatcggacakccgcgtggtggataaagatttaaggacagcaaaaggagagtggtggacggaaaacagaagcaaggtagagaagcagcttcttgattacagctcagtgttt

SEQ ID NO: 202762 - DNA, 201 bp, Homo sapiens
tgttgctttttttcatggccaagatgctgatttagtggcatttttcttggcaaaagtgccccaagaaaacaaatccatttgtgtatatttttacgggaaaygctccacctaaccctgccccgctgaaagccttccccgtgagtcgtgaaggaaacatggctgatttgctactgttcaaagggcgactcaggtcttgactga

SEQ ID NO: 202763 - DNA, 201 bp, Homo sapiens
gcagtggcagaatctctggggccgtgggaggagccgaagaacagacgtggggagggggaggattgtgatctggggaagagagcgtgcacacacgcatcttkgttggacctgaagggatgctatgttgttctttgattaacacacatgctctgtgtaatgtcacttctctggtctaaaacccttgacactgggacttcccat

SEQ ID NO: 202764 - DNA, 201 bp, Homo sapiens
ttaaggagcttaaaaagacaactcaaaagaaaaatagacgaatagtatgaacaggcagtttacagaagaggaaagctatctgaaaggaaaataaatcttgraaccccaaactcattaagtggaagggaaatgtcaagctgggaactgagtcacacaaacctgccaccttttttgcttcctaaataagatggctacaaggtg

SEQ ID NO: 202765 - DNA, 201 bp, Homo sapiens
gatagaaatctcaggaacatagccttgggtatatggaaactccacataggaaataacatgataaattaatggaaaaagaatgactgtagagaaatatggamagtatgttcttactacatattgtaaataaaatgaattttaaatgaactaaaatgcacatttcaaaggcaaaacttcaaaatgtttagaagaaaattttga

SEQ ID NO: 202766 - DNA, 201 bp, Homo sapiens
gcggtggctcacgcctgtaatcccagcactttgggaggctgaggtgggaggatcacgaggtcaggagttcgagacagcctggccaatatggtaaaaccccrtctctactaaaaatacaaaaattagcccagtgtggtagcacgcacctgtagtccagctactctggaggctgaggctggagaattgcttgaacctgggagg

SEQ ID NO: 202767 - DNA, 201 bp, Homo sapiens
ataggtaccacattttcttcatcaaattcaccatttatgggcacgtgggttgattgcatacctttgctattgtgaatagtgctgcaatgaacgtgtaagtrcatgtgtctttttggtagaatgatgtcttttcctttgggtagatacccagtaataggattgcaggtcaaacagtagttctacttttagttctttgataag

SEQ ID NO: 202768 - DNA, 201 bp, Homo sapiens
gagaattgcttgaacctgggaggtggaggttgcagtgagctgagatggcactactgcactccagcctgggcaacagagcaacactcttgtctcggaaaatwaataaataaataaataaataaataaaggagtagagtttatagtttagttaatagtgttctaccacttcctaaattttggtaattgtcctatgattatata

SEQ ID NO: 202769 - DNA, 201 bp, Homo sapiens
aaaacctcccttcatgaatcaattacctcccaccgggtccctcccacaacacatgaggattatgggagctacaattcaagatgagatttgggtggggacasagccaaaccatatcatggagttctacaaatggattctttttaatttctattttgattcagaggagtacatatataggtttttaacaagggtgtattgcat

SEQ ID NO: 202770 - DNA, 201 bp, Homo sapiens
agacattattaacattagaagaagctagatgaaaggtttgtaggaaatctgtactatttttgtaacttttctgtaaacctaaaattattttaaattacaatttttttttttttttttggagacggaattttgcttgcaacctccacctccccggttcaagtgattctcctgcttcagcttccccagtagctgggactacag

SEQ ID NO: 202771 - DNA, 201 bp, Homo sapiens
tgaatgaatgcattttttttattttggaatatgattcttaaacaatataattttccttccccaggaaagtaaaggcagcagaggcgaggctactagcctartacaggccctgttgtgggaaggttgccgggcaacaccttccctgtatcagtcaggaattgctgcataacaactaccccaaaacgtagtggcttaaaacaa

SEQ ID NO: 202772 - DNA, 201 bp, Homo sapiens
tgctcaagctttctggaggaggtggggttctcctggcaatctgggagggggctcttctgctgctcagctgctgggccatggcagccaaccatcaggtattyggtgaccaaaagaaagcggccagcacccagccaggtgaccagatgtcttcatgcctcagtttcctcatctataaaatgtaaagaataataaaacatatct

SEQ ID NO: 202773 - DNA, 201 bp, Homo sapiens
cactgcagccttcacctcccaggtttaagcaattctcctgccttggtctcccaagtagctgggactacaggcatgcatcaccacatccagctatttttttgtgtgtgtgtgtgtgtgtgtgtgtgtgtgtgtgtgtgtgtgtgtgtgtttgtatttttagtagaaacagggtttcgccatgttgaccaggctggtctggaa

SEQ ID NO: 202774 - DNA, 201 bp, Homo sapiens
cctcagagaattgaaaacatatgttcatatgaaaattgtacatgaatatccacagcagcatcattcataatagccaaagaatggaaacaaccccaatgtcmatcagcttgaaaatgaataaacaaaatggtcaaaatgaggagaccacaccttgaagagacacattaaagcagcacatacatccagttgctccaaagacct

SEQ ID NO: 202775 - DNA, 201 bp, Homo sapiens
ctgcagccttcacctcccaggtttaagcaattctcctgccttggtctcccaagtagctgggactacaggcatgcatcaccacatccagctatttttttgtgtgtgtgtgtgtgtgtgtgtgtgtgtgtgtgtgtgtgtgtgtgtgtttgtatttttagtagaaacagggtttcgccatgttgaccaggctggtctggaact

SEQ ID NO: 202776 - DNA, 201 bp, Homo sapiens
ataaccaaagaaaaaaatagctactttgtattttaccaaaaagaaaaactttgatgcttcaaaggacattatcaagcaagtgaaaaacaacccacagaatrggagaaaatatttgtacatcatatgtcagaaaaatgtcttagtatccagaatatgtaaagaactcttaaaactcaaaaataagaagacaaataacccttt

SEQ ID NO: 202777 - DNA, 201 bp, Homo sapiens
gcagccttcacctcccaggtttaagcaattctcctgccttggtctcccaagtagctgggactacaggcatgcatcaccacatccagctatttttttgtgtgtgtgtgtgtgtgtgtgtgtgtgtgtgtgtgtgtgtgtgtgtgtttgtatttttagtagaaacagggtttcgccatgttgaccaggctggtctggaactcc

SEQ ID NO: 202778 - DNA, 201 bp, Homo sapiens
agtatagtgtggcacaaagatagacgtggagatcaaaggaatcacatttagagtctagaaacaaaccctcacatttatagtccattgatttttgacaagastgacaagacaattcaataaggaaagaatagtcttttcagcaatggtgccgggacacagatatccacatgaaaaagagtgaatttggacctcaaccttata

SEQ ID NO: 202779 - DNA, 201 bp, Homo sapiens
aatcctaaaatacatatgaaattcaagggacacaaaatagccagaacagtattgaaaaagaacaaagttgcaagactcacacttcccagttctaagacttrctacaaagctataataatcaaagcagtatagtgtggcacaaagatagacgtggagatcaaaggaatcacatttagagtctagaaacaaaccctcacattt

SEQ ID NO: 202780 - DNA, 201 bp, Homo sapiens
gggatatggccccatgatacagttacctcccatcagaccccatctccaacaccgtcaatcacatttcaacatgatatttggaggagacaaacactcaaacygcatcacctgataacctttaaaagagcaatttcaataaagtaacaatggcagaagttaggtttcaaggcattaaaggtataagagagaggaaattcaaat

SEQ ID NO: 202781 - DNA, 201 bp, Homo sapiens
aagaggatcagttcagttgggtcatctaaatttaaaatgcttattagacatccaagtggtatgtcaagtagggagctggatatacaaagttggaattgagrgaaatttttggtttggagatagaagtttcaaacagccaaattagcatgtaaatgctattgaaagcgctgaggatggaaaactctccaagaaagtgactac

SEQ ID NO: 202782 - DNA, 201 bp, Homo sapiens
cttggtttgtgagtacagtaaacattctccaagtggcagcaggagagaaccacggtgctttcgtaacaagctgagatttacaggcttgtaagagctggggktataaatcaggcttctggtggaatgggtgaaatggactaaattcaagtattaatgggagagccacgtgtgcgctgtgcagggagaaaggctcatcagtat

SEQ ID NO: 202783 - DNA, 201 bp, Homo sapiens
tagctcactgcagccatgagctcctaggctcaagtgttcctcccacctcagcctcccaagtagctggggactataggtgcttaccaccactcccagctaatttttttttttttttgtagcgatggggtcctgttttgttgcccagactcatctcaaactcctgggctcaagtgatcctcccattacagcctcccaaagtac

SEQ ID NO: 202784 - DNA, 201 bp, Homo sapiens
gtggaagccggctccctcagcttgcggggaggtgtggagggagaggcgcaggcgggaatcagggctgcgcggcggcactcgcgagccagtgcagttccggrtgggcatgggcttggccgccccacactgggagcagcaggccggcgtcaccagccccgggcagtgaggggcttagcacccggggcagcagctgtggagggt

SEQ ID NO: 202785 - DNA, 201 bp, Homo sapiens
gtagaaatccaggaaaaagaagtgacgtggaagccagaaaaggagtgttccaggaggaagcagtggttactggtgatgagcgatagtgagatgccagaatygttcagcagatttggcaacatgaagttcattgatgacctcaacaaggatattcaaccctgattggggttgattaaggagtgaatgggagggaagaaatga

SEQ ID NO: 202786 - DNA, 201 bp, Homo sapiens
attgtgataaatgttttgaagtaaatgaacaggtgctaacatacatctgacccttaaaatccctgggttttacatctgcaaattcaaccaactaaggatgraaaatactagaaaaaaaataaaaataaaaaatagcaatacgacaataaaaaatacaaataaaaaaacactacagtataatgactatttgcatagcatttg

SEQ ID NO: 202787 - DNA, 201 bp, Homo sapiens
cttttgttccaaagatctgtccctctttttagagaagagctttttcaaaataatcttataaataacccttctctttctcttatttggaggtgctaaatatrttacattttatgctttttgtatataagtaggcttattttctctgtggtgttcttttggtctgtatttctttttttttcttcttcttgtcctttcttggtt

SEQ ID NO: 202788 - DNA, 201 bp, Homo sapiens
ctcccctaaggccacctccctccccaggttccatcagtccatgactagacttggcattttgcctccaagttcctaggctctgatacaccatcgtggaacaragaacagcatttctgcccctaaccttactgacgttttaacacccatttcagaaaccccggatttcctgacttccatagcttctaacccagcagctagtcc

SEQ ID NO: 202789 - DNA, 201 bp, Homo sapiens
aggaatgaaatcgtgtcctttgcagccacatgggtagagctggagactgttgtcctaagtgaactaactgagaaacagaaaaccaaatcctgcatgttctyacttacaagtgggagctgaacaatgggtacactcgcatagacataaagatggaaatgatagacactggggactataaaaggagggagcgaggggcatgag

SEQ ID NO: 202790 - DNA, 201 bp, Homo sapiens
gctgaggcaggagaatcgcttgaacccaggaggcagaggttgcagtgagctgagaatgcaccactgcactccagcctggcaacagagcgagactctgtctaaaaaaaaaaaaaaaaaaagaaaaaagaaaaaaaagaaaaagaaaaaaaagaaaaggagggaaataactttcttcaggtacagatcattgatacggtttgg

SEQ ID NO: 202791 - DNA, 201 bp, Homo sapiens
atcgcttgaacccaggaggcagaggttgcagtgagctgagaatgcaccactgcactccagcctggcaacagagcgagactctgtctaaaaaaaaaaaaaaraaaagaaaaaagaaaaaaaagaaaaagaaaaaaaagaaaaggagggaaataactttcttcaggtacagatcattgatacggtttggttctgtgtccccac

SEQ ID NO: 202792 - DNA, 201 bp, Homo sapiens
agatggcctgaagctggttctccagatctaatctctattcatccatctacctaacagtttttaagaactctttgtgtgtcaggcactggaggtgaccacaygtatgccattaaggagagcacctaaacatgggaccacaggagaagtcttccagttgtgattggtagtacatcagtcccttttcacgctgctgataaagac

SEQ ID NO: 202793 - DNA, 201 bp, Homo sapiens
aggaggccattgcactaaccttatcaagaaaggaagttggcttagaacagggaggtagctgtggaggtggaatctggatatgatttgctaatggattgaawatggtggatcagagaaaggggtaagtaaggtgtttggcctaagcaactgtaaggatggagttatcattaccaagaaggaatagatgctggatgagtgtat

SEQ ID NO: 202794 - DNA, 201 bp, Homo sapiens
ctggatggtgtgttgataaaaagctgagggaggcaaggagggggaactggggaaccagtcaggaggccattgcactaaccttatcaagaaaggaagttggyttagaacagggaggtagctgtggaggtggaatctggatatgatttgctaatggattgaaaatggtggatcagagaaaggggtaagtaaggtgtttggcct

SEQ ID NO: 202795 - DNA, 201 bp, Homo sapiens
aacttttaaaaatagaaaaacagaaagatacctaaaggaagagtattcaagagagaaggaacagccagtgcaaaggctctgagcaggagcaggcatggacrgttcacagatcagcagggaggcgcatgtggctggattaaataagatgatcaaggaaaagtctcagcaaacaatatgacatgtggctggaagttctggaag

SEQ ID NO: 202796 - DNA, 201 bp, Homo sapiens
caaaagacgtctgcttggaccaggggccgctggagaaccacacagcaatattgtatccgtgccatggctggggaccacaggtaggagctcgtctctgaccrggaaggaagtaatatcaccatctccgacccacagaggccttgcaggccttctggataaactttgttgctgtctaccttggtagttatttattctgagaaa

SEQ ID NO: 202797 - DNA, 201 bp, Homo sapiens
agagagggaggagggtaagggttgaaaagtgcctactgggtactatgtttactatttgggtgatgggttcagtagaagcccaaacctcagcattatgcaatatatccatgtaacaaatgtgtacactaccccctgaatctaaaacttttaaaaatagaaaaacagaaagatacctaaaggaagagtattcaagagagaagg

SEQ ID NO: 202798 - DNA, 201 bp, Homo sapiens
taaattacccagtctcgggaatagctgtgtgaaaacggactcatacaatatcttgcattcaatttctaggagttttgctggggctccatagaccacaaaayatctcatgctttaaagcaggctaaatcttgatgtgtgaacattgccccaatatgactaataggcaggacacacttggactcaaatgctagagtagacagt

SEQ ID NO: 202799 - DNA, 201 bp, Homo sapiens
ttcctagcaatatttcacattttatcattgcctttttacttgcctgactccagtgagtaagctgtgaacacctcgaaagcaagcactgtgtcattcattcrtgatgtcaacaaatatttatcaagcacctactatatgccaggcattcttctaagagctagagatagagcagtgaacaaaaaagttaagcaaacacacccc

SEQ ID NO: 202800 - DNA, 201 bp, Homo sapiens
ctttgaccttcctcttttggatggggactcatcctattctgcttttatgaaccaccgtgtatttcctagcaatatttcacattttatcattgcctttttayttgcctgactccagtgagtaagctgtgaacacctcgaaagcaagcactgtgtcattcattcatgatgtcaacaaatatttatcaagcacctactatatgc

SEQ ID NO: 202801 - DNA, 201 bp, Homo sapiens
agctggagcaacattagcaacgtaaactttctctgcgatgacaagcagagaggcctgcctccatcaaccgacatgcactgtgacagctcccagcggcaggyagattaatctgaataatgtcagaatgacttttctcctcccttgtaaagaggttcagtgttgcgggctgccaaggagcagacacattttattttaaattta

SEQ ID NO: 202802 - DNA, 201 bp, Homo sapiens
accacatttcctctggtctccaggcctttaaacagctgctccatattcctggtctgatctgtttttctcttacttgcctagttggctgactccatcagggmttgacttcaatgccttctcctctgggaatccttctttgaccttcctcttttggatggggactcatcctattctgcttttatgaaccaccgtgtatttcct

SEQ ID NO: 202803 - DNA, 201 bp, Homo sapiens
tgtacgtggcctcctgccatgtggccacactaaaccatcaggttcatgagggtgggcttaggaggatatagacacctgcaggcagcttcatgacacacccrccgtggaaaacaggggtgtcttccgtagcaaactcactatccaacacatctctccctctctgggccaaaatgttaactgagggccgggtgcagtggctca

SEQ ID NO: 202804 - DNA, 201 bp, Homo sapiens
gacaggttctctgtctctcattcaacctggagtacagtggtgcaatcatagctcactgcagccttgaactcctgggctcaagcaatcctcctgccttggtmtcccgagtagctggggctacaggtgtgcaccactgcgcctggctaatgttttttaatattttgtagagatggggccttgctctattgcccaggctggtct

SEQ ID NO: 202805 - DNA, 201 bp, Homo sapiens
ctctgatacaccatcgtggaacagagaacagcatttctgcccctaaccttactgacgttttaacacccatttcagaaaccccggatttcctgacttccatrgcttctaacccagcagctagtcccacacttttaaaaatttaattgattttatttgcagtttatgcaaaaagaaaaggatgggatggagctccaagaaggg

SEQ ID NO: 202806 - DNA, 201 bp, Homo sapiens
atggttgtaggtgtgcatttaatttccatgttttctgttctgctcattggcctatagtaccaagctggtttgactactgtggctttgtagtatagtttgargtccagtagtgtgatacctccagttttgttcttttagctcaagattgctctggctatttgagctcctttttggatccatatgaattttagaatagtttat

SEQ ID NO: 202807 - DNA, 201 bp, Homo sapiens
tttcctgaagcctctccagccatgcggagctgtgagtcaattaaacctctttcctttgtaaattacccagtctcaggcagtcctttatagcagtgtaagartggactaatacactcgtccatcccaattgattgcttttgcctataaatttcctagagcaattattgacaattaattgcaccgccttgccctgtctccctt

SEQ ID NO: 202808 - DNA, 201 bp, Homo sapiens
gacctcccaaagtgttgggattacagacatgagccactgcacccaaccaggtttgtctcataatcaaattctcaagtagtgcagatactgtggctctaggrgccacactctaagaaccttcagatgggtcagccggacacctacacctgactatcgtcttaaaatgcttcattcacacccagctcttataggggaggacag

SEQ ID NO: 202809 - DNA, 201 bp, Homo sapiens
aacagagtgagactctgtctcaaaaaaataaataaaagcaacaacgaaagagagaaagggctatgtaatattggaaagaaacaggaggtgaatgtttagcrtcatagttggagtcagtgaatggaatttggatttctgagccaggatttaaaatgtcagattcatgggtttgggagtactgaagagaatcaagtgtacaag

SEQ ID NO: 202810 - DNA, 201 bp, Homo sapiens
gactttgctatggcagccctagcagactatacacactatttattatgttctctaatcctgagtccaggcatcttttccaggctgttgctttgaactcaggyttacctctttgttttcaagataattgctctagaagctgaatgaccactatttggagatgtaagctaaagattcttctggaagaatacaccatctggacag

SEQ ID NO: 202811 - DNA, 201 bp, Homo sapiens
tcatctctaagttgctggggtctgtcaggagctggttccagacaactaggtaaccacattttgcacagggcttgggaagaaacaggctgcaaggtaggagrctgtaaaataggctgattgctgaaatcgattaaattcttataattcctggagactggagactgtccctttctgcttccagaaacatgtcatctcttacct

SEQ ID NO: 202812 - DNA, 201 bp, Homo sapiens
ttgctccagaacatagaaagtagagctttttcattgcattaacaactacatcgaaacaggagacttctctcaccccccttgcaggatgtgctgcaggggcrtggcttgtctgttcgccacccttaataggacggggagcaagtaaacagtcaggtgcaggagcgggggcgagtgcttttgggctgcagccccacggtagca

SEQ ID NO: 202813 - DNA, 201 bp, Homo sapiens
tccagtaagatagaataattattggccaggcacagtggctcacacctgtaatcacagcagtttgggaggccaaggcgggcagatcacttgaggctaggagytcaagaccagcctggccaacatagcgaaagcccatgtctactaaaaatacaacaacaacaacaacaaaaaactagccaggcacagtgatgcacacctgta

SEQ ID NO: 202814 - DNA, 201 bp, Homo sapiens
actctcttgagcaagacgttgccaaatgtaattttctacatgcgtgtttctatagactttgatctctccaggataactgcatgggaagccacagaagaatrtggcggaagcttccctcccagcccgatctcctcctactgtgtccaaacctttggcccctctgaaagttgattgaaaaatcaactcacaagaggcagattc

SEQ ID NO: 202815 - DNA, 201 bp, Homo sapiens
gagaagccagaaccatatgacatcctggtccaggtactggcctagttgtgaaattgccccacatataggtggccagccatcaagatcccagttttggagcygggcatggtagctcacacctataattccagtgattcaggaggctggggcaggaggatcacttgaggccaggagtttgagaccagcctagacaacatagca

SEQ ID NO: 202816 - DNA, 201 bp, Homo sapiens
catccaatacccatctcatcatccatctcttttggtaaaaatctcctaacgggccccaggacctccatgcctgtctagcctgtcactggaaatctagtttrtctttctgaaatgtgttctaatcttaattccttgctcagcctgactctgtctctaatggcttcatttctctaaggtatacattcaaacttcttggtttgc

SEQ ID NO: 202817 - DNA, 201 bp, Homo sapiens
ggtctttgcagatctgaaggtcttgagataatgagcatctgagattgtttatgtgggccctaagtcagacggcaagtctccttataagatagaagagaggmcaggcactgtgacatgcctgtaatcccagcactttgggaggccgaggcaggcagatcacttgatgtcaggagttcaagaccagcctgaccaacatggcga

SEQ ID NO: 202818 - DNA, 201 bp, Homo sapiens
gaaagaggaaataacctcttattccatcagcccataaaccagcggcacgtggacgcaacatcaccccctgcacttcttgtcttcagcaagaatgagggcayggagaactccacttcaagcttttcagtcaacccgacgggacgcgacagattacagagcaaagtgcaccaaagataccatcagttaacctaataaaattga

SEQ ID NO: 202819 - DNA, 201 bp, Homo sapiens
aattatttgaatgtagggcatttagtaattctcactactgttggcaacagggagaaattggcaagtttctagtggctggctggctagggtttgcatatcaraatccaactttcatattttatatcgttttcatattttccatctctttaatgcactaaagggtaatctcattgaacttatctcttgtcccctctgtttttc

SEQ ID NO: 202820 - DNA, 201 bp, Homo sapiens
tgatcttgacataagccttggttttctgccagttcttaaagtgggattgagtgctgctggttgcagaaaggcaaaggtctgggtttggagtctacacagawttctctggttctcatgtttccagtcagaagcattcacctcacctgggaacttgttagaagtgaaaattcttgggccccatcccagacctactgaatcaga

SEQ ID NO: 202821 - DNA, 201 bp, Homo sapiens
tacactggatactatgctaagtgcatacaccaggcactgtgctaagtgcatacaccaggtactgtgctaagtgcatacagtggatactatgctaagtgcayttaccaggcactatgctaagtgcatacagtgaataccatgctaagtgcatataccaggtcctatgctaagtgcatacagtggatactatgctaagtgcac

SEQ ID NO: 202822 - DNA, 201 bp, Homo sapiens
atgacctacaggcacatgagaaggtgctttccataattcatcatcagggaaaatgcaaactagaaccacaatgagaaaacatttcctactcactaaaatgrctaaaatgaaaaagactgattttactaagtactggtgaagaggtagaagagctgaatttctgatgtgttgctgatgggaacacagcaactctggaaacca

SEQ ID NO: 202823 - DNA, 201 bp, Homo sapiens
gagccatcggggaggtctggtcttaaacatgagctgccctgattctccctgcttgatgctgtgcaaataaatgacttcccttccaccgctggaaaaacctscgttggaagtctggaccttactgcattgagttagcagactcccatttaggttttgtaacagaaggtgtatctagaacactcacaagcagagttctagacc

SEQ ID NO: 202824 - DNA, 201 bp, Homo sapiens
aataccattggtctctttcctttcagtttgctcaaccaaccaaccaaagaaactcttttgataaagcttttgtagttaaactgagttttatgactgggaayggttttgggtgccatccaagataaatttcttcttttaaagtcaagaacagatttattctttggtgaccgaaatgggactggaacccagaccttatggcga

SEQ ID NO: 202825 - DNA, 201 bp, Homo sapiens
attctgaaggcctcttagatagaggccagatagtaaattacctctttcagtgacagaactaaagagttgatgcagatcgaaaagggatgtagtgattgccrtctgtgggtccggaatcaatgtaatatttatgggattcagcacattttagaatctcatctttgctcatagtatccattactgctattaccttttagtagc

SEQ ID NO: 202826 - DNA, 201 bp, Homo sapiens
ggtgcggtggcctgtaatcccagcactttgggaggccgaggcgggcggatcacgagatcaggagatcgagaccattctggctaagatggtaaaaccccgtmtctactaaaaatacaaaaaattagccgggcgtggtggcgggcgcctgtagtcccagctactcaggaggctgaggcaggagaatggcgtgaacccgggagg

SEQ ID NO: 202827 - DNA, 201 bp, Homo sapiens
gaggttacagtgagccaagatagtgccactgcactcctgcctgggcgaaagagcgagactccgtctcaaaaaaaaaataaataaataaaaaataaataaawatatatatatataaattagccaggtgtggtggtggtgcatgcctatatagtcccagctactcctgaggctgagggtcacctgagtctgggaggtcaagtc

SEQ ID NO: 202828 - DNA, 201 bp, Homo sapiens
tgagccaggagaattgcttgaacctgggaggcggaggttgcagtgagccgagatggtactactgcactccagcctgggcgacggagcgagactccatctcaaaaaaaaaaaaaaagaaaaaagaaaaagaaaaaaagaaatacattggtttggtccagaaaggctggacaactcgaagcagggggtttccagcttataggt

SEQ ID NO: 202829 - DNA, 201 bp, Homo sapiens
gacctgtagtcctagctattcagaaggctgtgacagtaggaacacttgaacctaggagttagagtccagcttgggcaacatagcaagaccctatctcttawaaaacaaaaattaaacggagataagtaatttaataaagagttggaagacagcattgagaaaagttctaaaaagtagaaaaaaagaaatgaaaattaggag

SEQ ID NO: 202830 - DNA, 201 bp, Homo sapiens
ctgggcgacggagcgagactccatctcaaaaaaaaaaaaaaagaaaaaagaaaaagaaaaaaagaaatacattggtttggtccagaaaggctggacaactygaagcagggggtttccagcttataggtcgattaaaaattttgctgattgacaattggctgagtttatctgaagacctgggatccataaaaaggaatgcca

SEQ ID NO: 202831 - DNA, 201 bp, Homo sapiens
tttggagaagagcaaggcatcttggccccagaggacttcaaagagagtgggagaggctggtggctatttatagtccttttggtcacttttagagggccttagaaagtaagacaagggcgtgagccattctgtgggaggcagaaggtgaccttgatcttattggcaagcaggagttttccctctaaaggggaggcagggcat

SEQ ID NO: 202832 - DNA, 201 bp, Homo sapiens
ttggagaagagcaaggcatcttggccccagaggacttcaaagagagtgggagaggctggtggctatttatagtccttttggtcacttttagagggccttagaaagtaagacaagggcgtgagccattctgtgggaggcagaaggtgaccttgatcttattggcaagcaggagttttccctctaaaggggaggcagggcatt

SEQ ID NO: 202833 - DNA, 201 bp, Homo sapiens
tggagaagagcaaggcatcttggccccagaggacttcaaagagagtgggagaggctggtggctatttatagtccttttggtcacttttagagggccttagaaagtaagacaagggcgtgagccattctgtgggaggcagaaggtgaccttgatcttattggcaagcaggagttttccctctaaaggggaggcagggcattt

SEQ ID NO: 202834 - DNA, 201 bp, Homo sapiens
ggagaagagcaaggcatcttggccccagaggacttcaaagagagtgggagaggctggtggctatttatagtccttttggtcacttttagagggccttagaaagtaagacaagggcgtgagccattctgtgggaggcagaaggtgaccttgatcttattggcaagcaggagttttccctctaaaggggaggcagggcatttg

SEQ ID NO: 202835 - DNA, 201 bp, Homo sapiens
ctgaatccagaccccaagagagggttcttgaatcttacgcaagaaagaattcggggtgagtccatagagtgaaaataagtttattagagaagtaaagaaayaaaagaatagctactccgcaggcagagcagtggtatgagctgcttggttgagtatacttacagttatttcttgattatgtgctaaacaaggggtggatta

SEQ ID NO: 202836 - DNA, 201 bp, Homo sapiens
gatttggctctgtgtttgtaagaagataacctttggtgacaccagaagctgggcaaggctttctaagcccccactgttttttttttgttgttgttttttgttttttttttttgtttttttttgctgagacataccattctatatcacactgtggcatagtaattatctgcttttccgattatctcgtactgtgagggaggg

SEQ ID NO: 202837 - DNA, 201 bp, Homo sapiens
aatcccaacactttgagaggctgaggcaggaagatctcttgaggtcaggagtttgagaccagcctggttaacacagtgagacctgtctctactaaaaattaaaaaaaaaaaaaaaaaaagctggatatggtggcttgtgcctgttgtcccagctactggggaggctgaagtggggggattgcttgagtccagagtccaagg

SEQ ID NO: 202838 - DNA, 201 bp, Homo sapiens
atcccaacactttgagaggctgaggcaggaagatctcttgaggtcaggagtttgagaccagcctggttaacacagtgagacctgtctctactaaaaattaaaaaaaaaaaaaaaaaaagctggatatggtggcttgtgcctgttgtcccagctactggggaggctgaagtggggggattgcttgagtccagagtccaaggc

SEQ ID NO: 202839 - DNA, 201 bp, Homo sapiens
cctatcatggtgtgaagtagttcttcaagctaactttggaatgcccttggccgagaggaggggtcgattcagatggttgggagacttggaattttattttyggtttacagtgctgatgttctgtttctcaacctgagtgttggttactcaagtggctgctttgtgctaagcctttgatctgtccatttcttgatttgtcaa

SEQ ID NO: 202840 - DNA, 201 bp, Homo sapiens
acactggatactatgctaagtgcatacaccaggcactgtgctaagtgcatacaccaggtactgtgctaagtgcatacagtggatactatgctaagtgcatwtaccaggcactatgctaagtgcatacagtgaataccatgctaagtgcatataccaggtcctatgctaagtgcatacagtggatactatgctaagtgcaca

SEQ ID NO: 202841 - DNA, 201 bp, Homo sapiens
ctgctgcagcctctgccacccagattcaagcaattctcctgcctcagcctcccaagtagctgtgattacagatgtgcaccaccacgttcagttaatgttcrtatttttagtagagacggggtttcaccatgttggccaggctggtctcaaacttctgacctcaagtgattcgcccgcctcggcctcctaaagtgctgggat

SEQ ID NO: 202842 - DNA, 201 bp, Homo sapiens
aaaagaaaaggagggaaataactttcttcaggtacagatcattgatacggtttggttctgtgtccccacccaaatctcaccttggattgtaataattcccmcatgtcatgggggtaactggtgggaggtacttgaatcatgggggcgagtttttcctatactgctcttgtgataatgaataaatgtcacaagatctgatgg

SEQ ID NO: 202843 - DNA, 201 bp, Homo sapiens
tgtgctaagtgcatacaccaggtactgtgctaagtgcatacagtggatactatgctaagtgcatttaccaggcactatgctaagtgcatacagtgaatacyatgctaagtgcatataccaggtcctatgctaagtgcatacagtggatactatgctaagtgcacataccaggtcctatgctaagtgcctacagtggatact

SEQ ID NO: 202844 - DNA, 201 bp, Homo sapiens
tttaccaggcactatgctaagtgcatacagtgaataccatgctaagtgcatataccaggtcctatgctaagtgcatacagtggatactatgctaagtgcayataccaggtcctatgctaagtgcctacagtggatactatgctaagtgcatataccaggtcctatgctaagtgcatacagtggataccatgctaagtgcat

SEQ ID NO: 202845 - DNA, 201 bp, Homo sapiens
gcctcacaatcacggtggaaggtgaaagtgatgtcttccctggtggcagacaagagaagagaacttgtgcagggaaactcccctttataaaaccatcagaycttgtgagacttattcactatctcaagaatagcacaggaaagacccacctccatgtttcaattacctcccacttggtctctcccacaaaacattagaatt

SEQ ID NO: 202846 - DNA, 201 bp, Homo sapiens
actatgctaagtgcatacagtgaataccatgctaagtgcatataccaggtcctatgctaagtgcatacagtggatactatgctaagtgcacataccaggtmctatgctaagtgcctacagtggatactatgctaagtgcatataccaggtcctatgctaagtgcatacagtggataccatgctaagtgcatataccaggta

SEQ ID NO: 202847 - DNA, 201 bp, Homo sapiens
ggaaaggaaaggacattttggtctgtcatgttgatggaaaacactagaaatttcctttgtgattattttgttccctttcatccaagctcctagtttattckcacacatgcagacataaactgggcagggtgaaaattccctgcatgaaccattcggttttcggtttgccagtccccatcaatgacaagtatttctttatct

SEQ ID NO: 202848 - DNA, 201 bp, Homo sapiens
gagaggaccctagcagaggcaccaagcaggaagtgcatggcacctgtggagtggccagtggcaagttagggttctagcagagagtgagggggctgaggaakaggggaggccaggcaggaggacagatcaagctgctccagccaggagccagcccacaatcctgcgggctgcattcacaccgtgttctgttaataaccaagt

SEQ ID NO: 202849 - DNA, 201 bp, Homo sapiens
attcctccctctcccaaatcttgcatctcatgaaccaggcatctcattttcccaaagaatgcttcccttacagcaggccagaaagctattgtcctagcctrtggaaacacctaaaacacactggggagatgtggacactcagcccattgcaggcttgtaaaaatgaaataaaataatgcataaatgaatatagagcacttt

SEQ ID NO: 202850 - DNA, 201 bp, Homo sapiens
tagaccaatcaacactctgtaaaatggaccaatcagcactctgtataatggaccaatcagcaggacatgggcggggacaaataagggaataaaagctggcsgcagggaagcccgcagctgcaaccggctctggttcttttcggtgctgtggaagctttgttttttcgctcttcacagtaaatcttgctgctgtatattctt

SEQ ID NO: 202851 - DNA, 201 bp, Homo sapiens
tccttcctttcttccttccttcctttctctctttctctctttctttttttctttttttgaaagagtctgtttctgtcacccaggctggagtgcagtgccayaatcagagctcactgtagccgcgacctcctggattcaagcaatcctcccacctctgcctcccaagtagctggaccacagccacacaccaccatgcttggc

SEQ ID NO: 202852 - DNA, 201 bp, Homo sapiens
aagccaccatgcccagcccaaatctgctatttttaaacaacgacagggatggggagacaagttggaggcctgagagcctgcccagttcctcctgctcctamaggaactggagaggagtgtgagtgacagcttctcctgtcctctgttgataccctccattttcaagccccagtgcccctaactactggcactgagcaggca

SEQ ID NO: 202853 - DNA, 201 bp, Homo sapiens
atctttacttaaaaatactaaaattaggcgggtgtggtggtgcgtggctgtaatcccagctacttgggaggctgaggcaggagaatcacttgaacctaggyggcagaaatagcagtgagccaagatcgcatcattgcactccagcatgggtgacagagtgagatttgtctcaaaataaaataaaataaattctaattttgg

SEQ ID NO: 202854 - DNA, 201 bp, Homo sapiens
catgagccaccacgcccagccaaaaagtaggacatcttgaagcagggcccaaaggtctaaggtggagtcaaagattttctgatttgcgattgctccaggaygcaaagctctgtgtaaaaatctgaggtcagcagaaaagaacattagtgctccctcatggacatgacctcctccagaccccttgggaagaaatttagaaac

SEQ ID NO: 202855 - DNA, 201 bp, Homo sapiens
agagaatatttagaatattccataaacttaggtggtgtatcagcagcaggatttgagaggattggctccaattttgaaagaaattctactgtgggtaaaaygctactaaccagcattggatgctacagcgaaatatttcatggaagggagagagtcaattaatgcagcaaactttgttattctcttattttaagaaattgc

SEQ ID NO: 202856 - DNA, 201 bp, Homo sapiens
agtggtctcttgagatggaatctactcctgatggggatgttgtgaatattgttgaaatgacacaagagaatatttagaatattccataaacttaggtggtrtatcagcagcaggatttgagaggattggctccaattttgaaagaaattctactgtgggtaaaatgctactaaccagcattggatgctacagcgaaatatt

SEQ ID NO: 202857 - DNA, 201 bp, Homo sapiens
ctggagtgcagtggcatgatctcagctcaccacaacctccacctcccaggttccatcgattctcctgcctcagcctcccgggtagctgggactacaagagkgcaccaccacacccggctaattttttgtatttttagtagagatgaggtttcactatgttggccaggctggtctcaaactcctgacttcatgatccactgc

SEQ ID NO: 202858 - DNA, 201 bp, Homo sapiens
tggggtcttgctatgctgtcaaggctggtctcaaactcctgggatcaagtgatcctttcacctcatcctccacatagctgggactacagatgccagccacygtgtctggatctattgtttgtctctgtcatttgactgtcttgtccttgaggattgtggctgagtcttatttacatcttgccttgatagtgaatgttgtgt

SEQ ID NO: 202859 - DNA, 201 bp, Homo sapiens
ttgataacactttatcttaccttcatcatttttttttttttagatggggtcttgctatgctgtcaaggctggtctcaaactcctgggatcaagtgatcctytcacctcatcctccacatagctgggactacagatgccagccactgtgtctggatctattgtttgtctctgtcatttgactgtcttgtccttgaggattgt

SEQ ID NO: 202860 - DNA, 201 bp, Homo sapiens
cccagcgacttgggaggccaagataaggggatcacttgagctcaggaggcaaaggttgcagtgaacgaagattgcgccagggcactccagcctgagtgacwgagtgcgaccccatctaaaaaacaaaacaaagcaaacaaccaaccaaataacccaattttaaaatgggcaaaggacttgcataggcatttctccaaagat

SEQ ID NO: 202861 - DNA, 201 bp, Homo sapiens
tcccaacactttgagaggctgaggcaggaagatctcttgaggtcaggagtttgagaccagcctggttaacacagtgagacctgtctctactaaaaattaaaaaaaaaaaaaaaaaaagctggatatggtggcttgtgcctgttgtcccagctactggggaggctgaagtggggggattgcttgagtccagagtccaaggct

SEQ ID NO: 202862 - DNA, 201 bp, Homo sapiens
tgaggcaggagaatcgcttgaacctgggagaaggaggtggcagtgagccaagatcacaccattgcactccagcctggaccactgagtgagactctgtctcaaaaaaaaaaaaagaaatggatgctcttgagacttaactgtgtaagaaagaattcccacttcttttagaggcactgccagccccaaaggttatgaattggc

SEQ ID NO: 202863 - DNA, 201 bp, Homo sapiens
gatcatcttctgtcatcctaatttttattttcattttaatcattcttttgacatctctttccaattataactgcaaaatcctggccattcctcaatgcctwatgctttcttttttgtcccccttattgattacattcttctggtaaccagcctgttcctaccatagtattactgaaccaaattgctcagcaaactctcatc

SEQ ID NO: 202864 - DNA, 201 bp, Homo sapiens
cagctcaaaactctggcagcggctgggcgcagtgagtcatgcctgtaatcccagcactttgggaggccaaggctggtggatcacttaaggccaggagtttragatcagcatggccaacatggcaaaatctcatctctactaaaaatacaaaaattagctgggcatagtgttacacacctgtagttccagctactcaggaag

SEQ ID NO: 202865 - DNA, 201 bp, Homo sapiens
ggcacaagaattgtttgaacctgggaggcagagggtgcagtgagccaagattgagccagtgcactcaagcctgggtgacaagagagaaactgcatctcaaacaaacaaacaaacaaacaaagaacataagtaaataaagcctctgtcagaaaacctctctggacagaaagaatagtgcctagaaaaccctaagtttggaat

SEQ ID NO: 202866 - DNA, 201 bp, Homo sapiens
tcacgaggtcaagagatcaagaccatcctggccaacatgatgaaaccctatctctactgaaaaaaaaaaaagtacaaaaattagctgggcatggtggtgcrtgcctgtagtcccagctactcaggaggctgaggcaggagaatggtatgaacctgggaggcagagcttgcggtgagccaagatcgcgccactgcactccag

SEQ ID NO: 202867 - DNA, 201 bp, Homo sapiens
aaaaaaagaagagaaagaaagaaaagaaaaaagaaaagaaaaatcagccaggcatggtggtgcacacctgtagccctagctacttgggaggctgagacagraggattgcttaagcccaggagttcaaggctgcagtgagctaggattgtgccactgctctccagcctgggtgacagagcagagaccctgtgtctctaaata

SEQ ID NO: 202868 - DNA, 201 bp, Homo sapiens
gtggcacaatcttggctcactgcaacctctgtgtcctgggttcaagtgattctcctgcctcagactcctgagtagctggaattacaggcgcccaccaccayatccggctacttttttggagttttagtagagatggggtttcgccatgctggccaggctggtctcaaactcctgacctcaagtgatcctcctgccttggcc

SEQ ID NO: 202869 - DNA, 201 bp, Homo sapiens
gtacaaaaattagctgggcatggtggtgcatgcctgtagtcccagctactcaggaggctgaggcaggagaatggtatgaacctgggaggcagagcttgcgktgagccaagatcgcgccactgcactccagcctgggcaacagagtaagactccgtctcaaaacaaacaaacaaacaaacaaaaaacaacaactctgatccc

SEQ ID NO: 202870 - DNA, 201 bp, Homo sapiens
agtgagctaggattgtgccactgctctccagcctgggtgacagagcagagaccctgtgtctctaaataataataataataaagtaagtaaaattctacacrttacaagtcaaaatagcagatgaagagtgctgggggcaagtcactctggctcctggaacaagcaaacctccaaatctcagtggcttagtatggtaaaaat

SEQ ID NO: 202871 - DNA, 201 bp, Homo sapiens
aaattccgcttctttaatctacttcccttctcctatctttcccctgcattcccagatttctaaaaggaatcattttaatacttttttttattatttttatwttgagatggagtctcactctgtcccccaggctggagtgcagtggcatggtcttggctcactgcaacctctgcctcctgggttcaagcggttctcctgcct

SEQ ID NO: 202872 - DNA, 201 bp, Homo sapiens
gggagactgatttgagtaataataaaactccggtctcccacacagctggctctgcgtgaattactcttttgccattgcaattcccctgtcttgataaatcrgctctgtctaggcagctggtaaggtgaacccagtgggcagttacagaacgcaagggatgctggccaacttctttggtatagcaagctctgaataaattgc

SEQ ID NO: 202873 - DNA, 201 bp, Homo sapiens
cgagcttgaatagaaaatgtttttcccacttccctccctcctttccctccctctctccttccctcttttcttccttcctttcttctttccctccctccctcccctctttttcctttcttctttccttccttccttcttgccttcctgcctacctgccttcctgccttcctgccttcctgcctttctgccatgttcagaagt

SEQ ID NO: 202874 - DNA, 201 bp, Homo sapiens
aggttacagtggggcccccaatgcctgaggccaccgggaaattgagaaatcagatctagtgagttaccaatttctttgactggtctcactagccactgacgagtccaccagctcctttcaaatttaatttcaggggtcaaatgcccccttctatttggggctcttcctatcagaccaaatgccttgtttgtagttctgatg

SEQ ID NO: 202875 - DNA, 201 bp, Homo sapiens
cttgaatagaaaatgtttttcccacttccctccctcctttccctccctctctccttccctcttttcttccttcctttcttctttccctccctccctcccctctttttcctttcttctttccttccttccttcttgccttcctgcctacctgccttcctgccttcctgccttcctgcctttctgccatgttcagaagtcaga

SEQ ID NO: 202876 - DNA, 201 bp, Homo sapiens
tcctgccttcctgcctttctgccatgttcagaagtcagacttaaaagaataagaaaaaggtttctaggccatacctcttttttccaagaaaaaaaaaaaargcacagaacactaactaaatgcagcagatgtcagccacatccagaagtccaggccagttcacctaactcttgtggacactgaggttctgataattagtat

SEQ ID NO: 202877 - DNA, 201 bp, Homo sapiens
ccagcctggccaacatgatggaatccctgtctctactaaaaacacaaaacttagctgggtgtggtggcatgtgcctgtaatcccagctactcgggaggctragtcaggagattcacttgaacccgggaggcagaaattgcagtgacccaagatggagccacttcaccccagcctgggcaacagagcgagactctgtctcta

SEQ ID NO: 202878 - DNA, 201 bp, Homo sapiens
cttggatgatcctgacagtctgggtttctgtgtatttggtcatttcttatttattcagggagttatttttggtctgttgaatttatcaattctccaagacrttggattttaccacttgtacatctggcggatacaccctaagctagtgtctttatattactatatctgggtctgtttagataaagaagaatttggcttctt

SEQ ID NO: 202879 - DNA, 201 bp, Homo sapiens
ctactcgggaggctaagtcaggagattcacttgaacccgggaggcagaaattgcagtgacccaagatggagccacttcaccccagcctgggcaacagagcdagactctgtctctaaaaaaaaaaaaaaaacaatgtgtgaactattgatagatgttacaatatgaatgaatctcaaaatattttttattctgaaagaaaga

SEQ ID NO: 202880 - DNA, 201 bp, Homo sapiens
aaacagctatgataatgtcactgcactccagcctggatgacagagcagactctgtctctaaaaaaacaaacttaaaatccaaaccaaaaacacaaccacagttttttttttttttgagacggagtctcgctcttcgcccaggccggactgcagtggcactatcttggctcactgcaagctccgcctcctgggttcatgcca

SEQ ID NO: 202881 - DNA, 201 bp, Homo sapiens
aacagctatgataatgtcactgcactccagcctggatgacagagcagactctgtctctaaaaaaacaaacttaaaatccaaaccaaaaacacaaccacagttttttttttttttgagacggagtctcgctcttcgcccaggccggactgcagtggcactatcttggctcactgcaagctccgcctcctgggttcatgccat

SEQ ID NO: 202882 - DNA, 201 bp, Homo sapiens
gaaattcgacaccacagaggttctgaaccacttattttcattttccattttcaatctcttatgccatattttttaaaacctctccttttgcattccaatgyaacacttataaattcgtcttacctcgttgcatgcagatagtgagaatattaacagccttttttgttgttgctgttgctcttctgactcgtcttctctcaa

SEQ ID NO: 202883 - DNA, 201 bp, Homo sapiens
ctgctcattgataatggtcacctaggagctctgatggatacgtaccaaaagatgaatgttgttctcatgcctgataacacatcatccattctgcagcccayggatcaaggagtaattttgaccttcaagtcttatttaagaaattcattttgtaagactgtagctgccatagatagtgattcttctcatgggtctggccaa

SEQ ID NO: 202884 - DNA, 201 bp, Homo sapiens
agccacaacgcctggccggtttgctgattatattaagcccactgtccagtcccacttctcagaaaaaaaaaaaaaagattcctttcacaatatcactgctyattgataatggtcacctaggagctctgatggatacgtaccaaaagatgaatgttgttctcatgcctgataacacatcatccattctgcagcccacggatc

SEQ ID NO: 202885 - DNA, 201 bp, Homo sapiens
aaattaaacatgctactccagtgaacacacgaatgctaagaaagcaaaacagcctcattgttcatagggagtcagttttagtggtatggttagaagaccartccagccacaacattcccttaagccaaaagcctaatccagaacaagggcctagttctcttcaattctatgaaggctgaaagaagtgaggaagctacagaa

SEQ ID NO: 202886 - DNA, 201 bp, Homo sapiens
atttcaaactttttcattagtattgtatctgttatggtggtttgtgatcagtatctttgatgttactattgtaattattcggggcactatgagctgcaccyagacaggaccgcgaacgtaaatcataaatgttgtgtgtgtttgacggctccactgttgggccattctcctatctctctcccaattctcgggcctttctat

SEQ ID NO: 202887 - DNA, 201 bp, Homo sapiens
aaaatattcaaaatgtttctgattttattactttgggttgttcgttcctgcctcctgggccctgcgtccatcagcctgtgtgtacactccttgcagccacyctctttgcagacctccatgcaatgcagttttacatgctttctgcttgctgagattttccccgaggctttgggggacccaggcctctttctctgccatctg

SEQ ID NO: 202888 - DNA, 201 bp, Homo sapiens
tgagaatattaacagccttttttgttgttgctgttgctcttctgactcgtcttctctcaaaatattcaaaatgtttctgattttattactttgggttgttmgttcctgcctcctgggccctgcgtccatcagcctgtgtgtacactccttgcagccactctctttgcagacctccatgcaatgcagttttacatgctttct

SEQ ID NO: 202889 - DNA, 201 bp, Homo sapiens
tattttcattttccattttcaatctcttatgccatattttttaaaacctctccttttgcattccaatgcaacacttataaattcgtcttacctcgttgcaygcagatagtgagaatattaacagccttttttgttgttgctgttgctcttctgactcgtcttctctcaaaatattcaaaatgtttctgattttattacttt

SEQ ID NO: 202890 - DNA, 201 bp, Homo sapiens
tctggaaaacagagttgggggactgaaggcagatactttttaaaaatttttttattaattaactatatatttcatgacaaggtcttgctctgtcacccagsctggagtgcggtggtgcagtcagctcactgcaacctcaatctcccagactacaggtgcacaccaccatgcctagctaatttttttgtgttatttgtacag

SEQ ID NO: 202891 - DNA, 201 bp, Homo sapiens
atggctttggtccagaaaacaggcctgaggttctgggaatatgcctctcccatttgataagaagcaaacttgatcatccctttccatccacgaaaacccarttcctagaaatcaccatgggggtcaaatcaggggatctgtagaccttctggaaaacagagttgggggactgaaggcagatactttttaaaaattttttta

SEQ ID NO: 202892 - DNA, 201 bp, Homo sapiens
cttcacaggataatgcttcggaactggtgtcataggagcattatcctgtaaagtgctggactctgtttcaacacctgcagatgatgctcttgggctctcargtttgagaacttcatttcctccttggagtcccgtctgtaccgccttgagtatggcttctccagcccttcttccttctacattctctatccagccctgtac

SEQ ID NO: 202893 - DNA, 201 bp, Homo sapiens
atgcagatgaagctttgcttactctgctgacttcctgctttgtgccgggttcctcacacctaaaggctgagagcagtactggcctgggggctagggacccytgctgtaaaggaacgtacaaacagtgatgggggatgaagagttattatcctcatcgtgcaggagcctatgaaaatagataagaaactctctaagtatgca

SEQ ID NO: 202894 - DNA, 201 bp, Homo sapiens
ctcctgggttcaagtgatccttccaccttggcctcccaaaatgctgagattataggcccaagccactgcgcccagctgacaactttcttttatgcccagcrctcaagaagagacagacaggtttccttgtgatttatgattagagtagattttctgaatgcaagcagcctgtgtgatcaccatctgaacgtcaaagggatt

SEQ ID NO: 202895 - DNA, 201 bp, Homo sapiens
ggtacattgtacattttctctcctctgtttttacacatgctattcatttttttcctagagagtttttcccgtcttcctgtctccccctttgcaggccctcrcctggaaattacttactcatgcttcatgacccagttcaaattttgtcacctctgtgaaaccttccctgggccccgttgatctccttgaaggcagaaataa

SEQ ID NO: 202896 - DNA, 201 bp, Homo sapiens
gggatgctcagttagagagttcggcttcttaataaaacacccagccccggctcccatcctgtatggcattgtcatcattgtaaacagcagttctataaccktaagaaattggcatacagctggagctaactctgtttccaaacaagattttagtcattgtatgtttaagtctctcatgcttcttcagagccacctgttcac

SEQ ID NO: 202897 - DNA, 201 bp, Homo sapiens
tcagagtcgggaggacagaaatagagtgagagctagtagatgtgaagtagtgggtggtagggaagagggaatgcaggagaggagaggaagggatgggagcmcaaaaaaaaaaaaaaaaaaaaaaggaagggaggtggggagaataggacaaagccaatctagacatgcctgatccaggctactttttaggctttttttttt

SEQ ID NO: 202898 - DNA, 201 bp, Homo sapiens
aaaacacccagccccggctcccatcctgtatggcattgtcatcattgtaaacagcagttctataaccttaagaaattggcatacagctggagctaactctrtttccaaacaagattttagtcattgtatgtttaagtctctcatgcttcttcagagccacctgttcaccaacagaggaaagtctccaagtggagtgactga

SEQ ID NO: 202899 - DNA, 201 bp, Homo sapiens
cctgtatggcattgtcatcattgtaaacagcagttctataaccttaagaaattggcatacagctggagctaactctgtttccaaacaagattttagtcatygtatgtttaagtctctcatgcttcttcagagccacctgttcaccaacagaggaaagtctccaagtggagtgactgattttatgtttattttattttagtt

SEQ ID NO: 202900 - DNA, 201 bp, Homo sapiens
ctctgagaatcaccgtgacactgagctcttaggaaatcagctttgttggcatgttcacaggcagaattaggaccaatatctagaaggtataagatgttgcrgacgttgattctacttaaagagcaatgcctgattagaaactcaaaggctgggcgtggtggctcttgcctgtaatcccagcactttgggaggccaaggtgg

SEQ ID NO: 202901 - DNA, 201 bp, Homo sapiens
cttaagaaattggcatacagctggagctaactctgtttccaaacaagattttagtcattgtatgtttaagtctctcatgcttcttcagagccacctgttcrccaacagaggaaagtctccaagtggagtgactgattttatgtttattttattttagtttgttactttttgaggcgggggctgaagtgcagtggcagcatc

SEQ ID NO: 202902 - DNA, 201 bp, Homo sapiens
actctgagagtttaacatatatgggaagagagaaaaaacatgcaatcactgaggttaaggctatatgatcaagtgtgagactggaaccctgaggttcttcygcaagagttggtggggaaaatgttgagtgcggcctcaagggcaggtgcagagtgctgtgaaacatagagtctgtgttcttcatagactgtttccacagac

SEQ ID NO: 202903 - DNA, 201 bp, Homo sapiens
tcattgtatgtttaagtctctcatgcttcttcagagccacctgttcaccaacagaggaaagtctccaagtggagtgactgattttatgtttattttatttkagtttgttactttttgaggcgggggctgaagtgcagtggcagcatcatggctcactgcagccttgaactcctgggctcaagcgatcctcctgcctcagcc

SEQ ID NO: 202904 - DNA, 201 bp, Homo sapiens
cccctgactttggcaatcactaatctattatttgtctctggagttacctattctggacacttcatatatatggaagcatacatctatttgtttttttgtcrgcctttattcacttagcaaaacgacttcacagtttatccatgttgtagcatctatcggtacttcctttctttttatagtcaaatcatattccattgtatg

SEQ ID NO: 202905 - DNA, 201 bp, Homo sapiens
acagctatgataatgtcactgcactccagcctggatgacagagcagactctgtctctaaaaaaacaaacttaaaatccaaaccaaaaacacaaccacagttttttttttttttgagacggagtctcgctcttcgcccaggccggactgcagtggcactatcttggctcactgcaagctccgcctcctgggttcatgccatt

SEQ ID NO: 202906 - DNA, 201 bp, Homo sapiens
catgttggacaggctggtctcgaactcctgacctcaagtgatccacctgcctcagtctcccaaagtgctgggatcataggcatgagccaccatgcccagcrtgttttacttcatttttaagatagaatcttgctctgttacccagtggtaacatcacagctctctgcaacctcttcctcccgggctcaagtggtcctcccg

SEQ ID NO: 202907 - DNA, 201 bp, Homo sapiens
acccctgactttggcaatcactaatctattatttgtctctggagttacctattctggacacttcatatatatggaagcatacatctatttgtttttttgtyggcctttattcacttagcaaaacgacttcacagtttatccatgttgtagcatctatcggtacttcctttctttttatagtcaaatcatattccattgtat

SEQ ID NO: 202908 - DNA, 201 bp, Homo sapiens
cagcctggatgacagagcagactctgtctctaaaaaaacaaacttaaaatccaaaccaaaaacacaaccacagttttttttttttttgagacggagtctcrctcttcgcccaggccggactgcagtggcactatcttggctcactgcaagctccgcctcctgggttcatgccattctcctgcctcagcctcctgagtaact

SEQ ID NO: 202909 - DNA, 201 bp, Homo sapiens
acttgaggccagaaggtggaggtggcagtgagccaagattgtgccactgcactccagcccgggcaacagagcgatattccatctcaaaaaaaaaaaaaaawaaaaataaaaaaaatatatatatatatatatatatatataaaatctccttctgatgataaagggttagtttgtttgcccatgacaggccctcctactgta

SEQ ID NO: 202910 - DNA, 201 bp, Homo sapiens
taaaaggaaattaaatgtgaagggttgagttgctgcagttgttagccttgggaagggattaaaggggacgtttttgtcatgtgagatgtcaggaaaattcrtgaggagctcactaggttgtctacttggaaaaaaacgaacttcttcctaatggattttgaaaaagattatttaatttgggttcaccattagccattctgg

SEQ ID NO: 202911 - DNA, 201 bp, Homo sapiens
gaggctgtagtgagctatgattctgccactgcactccagtctggggcaacagagcgagaccccgtatctttaaaaatatatatcccatcccagagtccacyctatagagaaacccaagtatttttccacttgttgaactaggaacatctgtggatattatgaacataaatattttattctaagcctctattgacctttcaa

SEQ ID NO: 202912 - DNA, 201 bp, Homo sapiens
ggccagaaggtggaggtggcagtgagccaagattgtgccactgcactccagcccgggcaacagagcgatattccatctcaaaaaaaaaaaaaaataaaaawaaaaaaaatatatatatatatatatatatatataaaatctccttctgatgataaagggttagtttgtttgcccatgacaggccctcctactgtaccttga

SEQ ID NO: 202913 - DNA, 201 bp, Homo sapiens
gcccaccactgcacctggctaattttttgtatttttagtagagacggggtttcacagtgttagccaggatggtctcgatctcctgaccccctgatccgccygccttggcctcccaaagtgctgggattacaggtgtgagccaccacgcccggccaatcacagttatgttaaagacttctgaatgggctgaagaattactat

SEQ ID NO: 202914 - DNA, 201 bp, Homo sapiens
ccaggagttcaaggccagcctgggcagcatagcaagaccccatcactaaaatagtaagaatattagctgggcattgtggtgtgtacctgtagttccagctrcttggaaggctgaggcaggaggatcacttgagcccaggagtttgaggctgtagtgagctatgattctgccactgcactccagtctggggcaacagagcga

SEQ ID NO: 202915 - DNA, 201 bp, Homo sapiens
gtggaggtggcagtgagccaagattgtgccactgcactccagcccgggcaacagagcgatattccatctcaaaaaaaaaaaaaaataaaaataaaaaaaawatatatatatatatatatatatataaaatctccttctgatgataaagggttagtttgtttgcccatgacaggccctcctactgtaccttgaaactggcat

SEQ ID NO: 202916 - DNA, 201 bp, Homo sapiens
ttccccacagttcagccagagtgatcttttcaaacccaaattcttcagtggcttctcatttacaacaaagatcaatttctttttaacatgacctccaggtmattgcctggtgtggaccctgcctacctctccaatattttccactattctcctctcttccagccctactttctgaatccattttctacgttccagccacat

SEQ ID NO: 202917 - DNA, 201 bp, Homo sapiens
gtgttagccaggatggtctcgatctcctgaccccctgatccgcccgccttggcctcccaaagtgctgggattacaggtgtgagccaccacgcccggccaaycacagttatgttaaagacttctgaatgggctgaagaattactatggacctgtaaccaaaactcataggaggaaggaaactcaactgagccaaatgagaaa

SEQ ID NO: 202918 - DNA, 201 bp, Homo sapiens
tgttttctttatcaatacatctgcaaaaagatagtgagattatttttgtatcttggccattgtgaataatactgcagccgctcagtgtagatatttctcarcatactgatttcagttcctttggatatatatctaaaatgggattgctggatcatgtgatagttctatttttaatttttggggggaaccactatactgttt

SEQ ID NO: 202919 - DNA, 201 bp, Homo sapiens
agaaaatagcatgttggtataatttttttattcttctacttttcttttttttttcagtcggagtctcactctgttgcccaggctggagtgcagtggctcarccttggctcatggcaacctctgcctcccaggttcaagtgattcttctgcctcagcctcctgagtagctgggattataggcacccatcaccacgcccggct

SEQ ID NO: 202920 - DNA, 201 bp, Homo sapiens
ccgggagagagtagtcaacagctgaattaacaagtctagaaagcattcctagaaaaggtaccaggctgagaaacgaactggcttagagtaatgggttgcaycacaggtaggcaagtgacagaaaaacaagaatacataggttttgctggacagacatcaggcacaccttggttgggtgttctaagtgctgggctgcaaaag

SEQ ID NO: 202921 - DNA, 201 bp, Homo sapiens
attcttctacttttcttttttttttcagtcggagtctcactctgttgcccaggctggagtgcagtggctcaaccttggctcatggcaacctctgcctcccrggttcaagtgattcttctgcctcagcctcctgagtagctgggattataggcacccatcaccacgcccggctgatttttgtatttttagtagagacggggt

SEQ ID NO: 202922 - DNA, 201 bp, Homo sapiens
tcctttctctttttctctctttctctctctctttctatttttggacagagtcttgctctgtcaccaggctggagtgtagtggcatgatcttggctcactgmaacctccgcctcccaggttcaagcaattctcctacctcagcctcccgagtagctgggatcacaggcatgtgccgccactgtcagctaatttttgtatttt

SEQ ID NO: 202923 - DNA, 201 bp, Homo sapiens
aagccctcacttcaagatattccactcttttataccaaaaccaatgtgtaagctccacaattttgtctgtagcttctgctttcctgaaatttaccccgccwttattttattttattttattttattttaggagacggagtttcactcttgttgcccaggctggagtgcaatggtgcgatcttggctcactgcaacctccac

SEQ ID NO: 202924 - DNA, 201 bp, Homo sapiens
atgtgtaagctccacaattttgtctgtagcttctgctttcctgaaatttaccccgcctttattttattttattttattttattttaggagacggagtttcrctcttgttgcccaggctggagtgcaatggtgcgatcttggctcactgcaacctccacctcctgagtttaagtgattctcctgcctcagcctccagagtag

SEQ ID NO: 202925 - DNA, 201 bp, Homo sapiens
tgccaccagagctcactgtggccttgaactcctgggctcaagcaatcctgctgccttagcctcctgagtagctgggattacagtcacacaccaccataccrggcttttttatttttttttttaaatttttgtagagatagggatctcactatgttgcccaggctggtcccaaactcctgggctcaagtgatccgcccaccg

SEQ ID NO: 202926 - DNA, 201 bp, Homo sapiens
tcctgaaatttaccccgcctttattttattttattttattttattttaggagacggagtttcactcttgttgcccaggctggagtgcaatggtgcgatctyggctcactgcaacctccacctcctgagtttaagtgattctcctgcctcagcctccagagtagctgggactacaggcacccaccaccatgcccgactagtt

SEQ ID NO: 202927 - DNA, 201 bp, Homo sapiens
gcaattactatttttttttttttttttttttgagacagagtctcactctgtcacccaggctggagtgcagtggtgcgatcttggctcactgcaacctccgyctcctgcgttcaagcgatcctcctgcctcagcctcccgagtagctgggattacaggcacctgccaccacacctggttaatttttatatttttagtagaga

SEQ ID NO: 202928 - DNA, 201 bp, Homo sapiens
taaagaacaaaaatgctgacaataagacccatatctgtttttggtgacatgtttaatccttccaactactctgtctggtaaatagtaacctcctcccatcyccccgactttattttttatttgagatagggtcttgttctgtcatctaggctggagtacagtggtgcaatcatagctcgctgcagcctcaaactcctgggt

SEQ ID NO: 202929 - DNA, 201 bp, Homo sapiens
tggatcacttccagtcaggagtttgagaccagcctggccaacatgatgaaacctcgtctctactaaaaatacaaaaattagccaggtgtggtggtgggcgyctgtaatcccagctactccgggaggctgaggcaggagaatcacttgaactcaggaggcggaggttgcagtgagctgagaccatgccactgcactccagcc

SEQ ID NO: 202930 - DNA, 201 bp, Homo sapiens
ggtggatcacttccagtcaggagtttgagaccagcctggccaacatgatgaaacctcgtctctactaaaaatacaaaaattagccaggtgtggtggtgggygcctgtaatcccagctactccgggaggctgaggcaggagaatcacttgaactcaggaggcggaggttgcagtgagctgagaccatgccactgcactccag

SEQ ID NO: 202931 - DNA, 201 bp, Homo sapiens
gggtttcatctttcccagttccacctgcgtgcggaacttttccaagtgaaagctcctgccatggagctgattagattgagttgatttagaacggcaaaccrgattaggctgctcatggctcccccggctctgggatggacgcttgttaagtgggccccggctgctttccgtcagctgctttttaaaaagtcaatctcatgt

SEQ ID NO: 202932 - DNA, 201 bp, Homo sapiens
tttgttgggaaatactgcatcaggatgggttcatgaactacaaacccacagaggtagcttcttcttggaacagacaaccatgtttcctagtttttggacarctttgagccgaatagggtttgctagcctccctgggtccctataggaggctgttgtgtactctgaacctgagtggaggtggcaggtgtttgatgtgtcccc

SEQ ID NO: 202933 - DNA, 201 bp, Homo sapiens
aagaaagtgagaccattgtctgggataaagctagggagcagggagaaatttgtctgccgtctgttcagttcaccatcattggcatcatcgtcatcatcatygtcatcaaaatccccagtgaaaatgttttatcaggctgggcatggtggcttgcgcctgtaatccctacactttaggagcccaaggtgggtggatcatttg

SEQ ID NO: 202934 - DNA, 201 bp, Homo sapiens
acctgtagtggcactgggagactagagagagactcgtcaaagaagaaagtgagaccattgtctgggataaagctagggagcagggagaaatttgtctgccrtctgttcagttcaccatcattggcatcatcgtcatcatcatcgtcatcaaaatccccagtgaaaatgttttatcaggctgggcatggtggcttgcgcctg

SEQ ID NO: 202935 - DNA, 201 bp, Homo sapiens
cacaaatttttggctaaaggcaattacctcatccctggaaaagcaactctttatgactcaaagaaaaatacatatttcccaggtagccgtggagccagtakatcagtccaagaataaaaaaatgtctttggagaatattccaaaataaatattaataggagccaggctgtcaaagaagacatagagctttgttgagcctaa

SEQ ID NO: 202936 - DNA, 201 bp, Homo sapiens
cacacctgtaatcccagcactttgggaggctgaggtgggcggatcatgaggtcaagagatcaagaccatcctggccaaagtggtgaaaccccatctctacyaaaaatacaaaaattagctaggcatggtggcacgcgcctgtagtcccagctactcaggaggctgaggcaggagaatcacttgaacccaggaagcagaggt

SEQ ID NO: 202937 - DNA, 201 bp, Homo sapiens
acaaatttttggctaaaggcaattacctcatccctggaaaagcaactctttatgactcaaagaaaaatacatatttcccaggtagccgtggagccagtagatcagtccaagaataaaaaaatgtctttggagaatattccaaaataaatattaataggagccaggctgtcaaagaagacatagagctttgttgagcctaaa

SEQ ID NO: 202938 - DNA, 201 bp, Homo sapiens
caaatttttggctaaaggcaattacctcatccctggaaaagcaactctttatgactcaaagaaaaatacatatttcccaggtagccgtggagccagtagatcagtccaagaataaaaaaatgtctttggagaatattccaaaataaatattaataggagccaggctgtcaaagaagacatagagctttgttgagcctaaag

SEQ ID NO: 202939 - DNA, 201 bp, Homo sapiens
gtacgattctgtggattttagtatatgcatgatagcatgcaaccatcactgccatctaattccagaacattatcatcaccccaaaaagaaaccgtgtaccyattagcagtcaaatatattggttttgaagatttgctaaatcatggtgccaagagtgttttatacatgtgtgtgaatgtgtgtgtcctcttgtaatgggaa

SEQ ID NO: 202940 - DNA, 201 bp, Homo sapiens
aaatttttggctaaaggcaattacctcatccctggaaaagcaactctttatgactcaaagaaaaatacatatttcccaggtagccgtggagccagtagatcagtccaagaataaaaaaatgtctttggagaatattccaaaataaatattaataggagccaggctgtcaaagaagacatagagctttgttgagcctaaagt

SEQ ID NO: 202941 - DNA, 201 bp, Homo sapiens
aatttttggctaaaggcaattacctcatccctggaaaagcaactctttatgactcaaagaaaaatacatatttcccaggtagccgtggagccagtagatcagtccaagaataaaaaaatgtctttggagaatattccaaaataaatattaataggagccaggctgtcaaagaagacatagagctttgttgagcctaaagtg

SEQ ID NO: 202942 - DNA, 201 bp, Homo sapiens
ttaatttgggttcaccattagccattctgggcaagggatggaggcgaatgttacccttcattcttgtagagaacagtgaattgttctgtctttacaaaacmaaacgcaattgaaatatttttttatgtgtaatttattgctctgcagacaatggagtggaaaagttatagtggttaattactccccaaaaccagaatattg

SEQ ID NO: 202943 - DNA, 201 bp, Homo sapiens
ttttggctaaaggcaattacctcatccctggaaaagcaactctttatgactcaaagaaaaatacatatttcccaggtagccgtggagccagtagatcagtccaagaataaaaaaatgtctttggagaatattccaaaataaatattaataggagccaggctgtcaaagaagacatagagctttgttgagcctaaagtgctt

SEQ ID NO: 202944 - DNA, 201 bp, Homo sapiens
tttggctaaaggcaattacctcatccctggaaaagcaactctttatgactcaaagaaaaatacatatttcccaggtagccgtggagccagtagatcagtccaagaataaaaaaatgtctttggagaatattccaaaataaatattaataggagccaggctgtcaaagaagacatagagctttgttgagcctaaagtgcttg

SEQ ID NO: 202945 - DNA, 201 bp, Homo sapiens
ttggctcactgcaacctccacctcctgagtttaagtgattctcctgcctcagcctccagagtagctgggactacaggcacccaccaccatgcccgactagttttttttttttttttcagtagagatggggtttcaccatgttgtccaggctggtctcaaactcctgacctcaagtgatccacccacctctgcctcccaaag

SEQ ID NO: 202946 - DNA, 201 bp, Homo sapiens
ttggctaaaggcaattacctcatccctggaaaagcaactctttatgactcaaagaaaaatacatatttcccaggtagccgtggagccagtagatcagtccaagaataaaaaaatgtctttggagaatattccaaaataaatattaataggagccaggctgtcaaagaagacatagagctttgttgagcctaaagtgcttgg

SEQ ID NO: 202947 - DNA, 201 bp, Homo sapiens
ctttaatacatttagaaaagatacacagattgagtaaagtagaggtttgcccctgagaaggactggagtgaggctcatctacatttcagatctttctttayttttcttttctttttttgacatcaaggcttgctctgttgactaggctggagtgtagtggcacaatctcggctcactgcaacccccacctcctgggttcaa

SEQ ID NO: 202948 - DNA, 201 bp, Homo sapiens
tggctaaaggcaattacctcatccctggaaaagcaactctttatgactcaaagaaaaatacatatttcccaggtagccgtggagccagtagatcagtccaagaataaaaaaatgtctttggagaatattccaaaataaatattaataggagccaggctgtcaaagaagacatagagctttgttgagcctaaagtgcttggc

SEQ ID NO: 202949 - DNA, 201 bp, Homo sapiens
aatcgcttgaacctgggaggcggaggttgtggtgagccgagatcatgccattgcactccagcctgggcgacaagagagaaactccgtccaaaaaacaaaayaaaacaaaataaaaaacaccctgcaggtaggaggccataatcctaagaggattaacgcaggaacagaaaaccaattactgcatgttttcacttataagcg

SEQ ID NO: 202950 - DNA, 201 bp, Homo sapiens
ttcaattaggagcattaaatattatatagctgtaccctaacttccctcataggaataataaaattctataataataactgatggaattcttgctgtgtgcmaaatgtgtgcagagacattacaagtgcattatctcactgtatgttcacatctgtccagagaggctccacccatccccagttgagaaatgagaaaactagg

SEQ ID NO: 202951 - DNA, 201 bp, Homo sapiens
ttacctcatccctggaaaagcaactctttatgactcaaagaaaaatacatatttcccaggtagccgtggagccagtagatcagtccaagaataaaaaaatgtctttggagaatattccaaaataaatattaataggagccaggctgtcaaagaagacatagagctttgttgagcctaaagtgcttggcaacagaacctggg

SEQ ID NO: 202952 - DNA, 201 bp, Homo sapiens
tctccacctggcccctcaagcaccttcatcctctgccggtgcttgttttgggtaatgcgtgtcccatctgttgatgccctccgcctgctgcagtgggaggytgctccgagaaggcaaagggctcctagtgcctggggagacacgtgctctcttgctctgcagccggtcttcattcattgctcccgagggtggagaaggaaa

SEQ ID NO: 202953 - DNA, 201 bp, Homo sapiens
tttaattggtagcgtactttttccccctcagggtacataaaaatggagtatcttatagttgaaggcatcttagatttgatgaaatacagtagtattatggkatttttatatatatatatatatatatatatatatatatgtataccatagttaaccatacacaactatttgattttgttgttttgttgttgttttgagaca

SEQ ID NO: 202954 - DNA, 201 bp, Homo sapiens
cataaaaatggagtatcttatagttgaaggcatcttagatttgatgaaatacagtagtattatggtatttttatatatatatatatatatatatatatatrtatgtataccatagttaaccatacacaactatttgattttgttgttttgttgttgttttgagacacagtcttgctctgtcgcctaggctggagtgcagtg

SEQ ID NO: 202955 - DNA, 201 bp, Homo sapiens
gcctgtagtcccagctacgtgggaggttgaagtgggagcagtgtgccatgatcacaccactgcactccagcctggggaacacagtgagaccctgacttcaaaaaaaaaaaaaaaaaaaagaagcatcctggtccctgagtgactaagtggagcagagtactgtgctgtccagccatctcctgctatctcctgtgtgggacc

SEQ ID NO: 202956 - DNA, 201 bp, Homo sapiens
ggaggcagagcttgcagtgagccgagatcgcgccactcactccagcctgggcgacacagcaagactccatctcaaaaaaaagaaaagaaaaaaaaaaaaargaaaatagccttgtttctcagtgttactagtactctatttacaggatgatggaatgattataatcatcccctacttaacgctgcttcttggagctgaggg

SEQ ID NO: 202957 - DNA, 201 bp, Homo sapiens
agctactcaggaggctgaggcaggagaacccaggaggcggaacttgcagtaaaccaagatggtgccactgcattccagcctgggtgacaaagggagactcygtctcaaaaaataatagtaataaaataaaataaaaataaaaaataaaaaaataaaaatgtatctgcaaatttgacactttccccatcaaacggtagagtt

SEQ ID NO: 202958 - DNA, 201 bp, Homo sapiens
cttgataatgtcttgtaatatttgaaaattacatgataatgatatgtcttgataatgtcttgtaatatttgaaaattacatgaaagtgtaatctgcatgaytgatgtagaagaaaaaaataagatcattgggtagaagaaacaaaggtacccatttttgaaattttatttatttgaactataaaccaggaatgcagtgtac

SEQ ID NO: 202959 - DNA, 201 bp, Homo sapiens
gagggaagcacaaatctagagacctcttagtccttgttttgtcttctaggacagaatttaacagtggatcaccatgtgttataaaccaagttttgtccccygctgaaattcatattttgaagccccaagcctcattgtgatgctatttggagatgaggcctttcggaggtaatcaggtttatttgaggtaatgaaggtgaa

SEQ ID NO: 202960 - DNA, 201 bp, Homo sapiens
taaagctattcggaggatcaaattaaataacctttgtagagcgattccaggaagtataaagttcataatacatgtaagacatgtcattttgaataaaaccrcagtttgaaaatttatggaacgtttgctccaaaggcacttcaagcgtctaacaatgattcatatctcttggaactacaaatgctacatgagcagttcagt

SEQ ID NO: 202961 - DNA, 201 bp, Homo sapiens
tgcatgttaataacttttctcttggatggtgttttaatccgctgggactaaatgattctgtcataaatccttgcagacgagaggatgggaactgccgtttmtgaagtcacctgcaatgtgccaagtactcaacacatgctacctcatgaattcctaggtagtggacctaggaggtggcaattatttgttccattgtacaga

SEQ ID NO: 202962 - DNA, 201 bp, Homo sapiens
cccctccctgttagcccctccttttcctccctatacctggtgatttttatgcacacaaagtatcactttttttttttaaatgcctttagttttatttattyttaaaattagacaccaggtctttctctgttgcccagaatggagtgcagtagtgtaactatagctcactgcagcctcctgagttcaagtgattcttctgct

SEQ ID NO: 202963 - DNA, 201 bp, Homo sapiens
gtatctaagaatcccctccctgttagcccctccttttcctccctatacctggtgatttttatgcacacaaagtatcactttttttttttaaatgcctttakttttatttattcttaaaattagacaccaggtctttctctgttgcccagaatggagtgcagtagtgtaactatagctcactgcagcctcctgagttcaagt

SEQ ID NO: 202964 - DNA, 201 bp, Homo sapiens
cctcatccctggaaaagcaactctttatgactcaaagaaaaatacatatttcccaggtagccgtggagccagtagatcagtccaagaataaaaaaatgtctttggagaatattccaaaataaatattaataggagccaggctgtcaaagaagacatagagctttgttgagcctaaagtgcttggcaacagaacctgggcta

SEQ ID NO: 202965 - DNA, 201 bp, Homo sapiens
ctcatccctggaaaagcaactctttatgactcaaagaaaaatacatatttcccaggtagccgtggagccagtagatcagtccaagaataaaaaaatgtctttggagaatattccaaaataaatattaataggagccaggctgtcaaagaagacatagagctttgttgagcctaaagtgcttggcaacagaacctgggctag

SEQ ID NO: 202966 - DNA, 201 bp, Homo sapiens
tcatccctggaaaagcaactctttatgactcaaagaaaaatacatatttcccaggtagccgtggagccagtagatcagtccaagaataaaaaaatgtctttggagaatattccaaaataaatattaataggagccaggctgtcaaagaagacatagagctttgttgagcctaaagtgcttggcaacagaacctgggctagt

SEQ ID NO: 202967 - DNA, 201 bp, Homo sapiens
gcagtttcagcaaaataggttgcacaggagccaagtgctgggtgaagcgaggaatgaatgagaggtaaagaagggagacagggagggaaaggaacatgtcaattaagccaattaaggctgtggaaaaagagactatttacttattttttattagtattaatattattattattatttttgaaacagaatcttgttctgttg

SEQ ID NO: 202968 - DNA, 201 bp, Homo sapiens
cagtttcagcaaaataggttgcacaggagccaagtgctgggtgaagcgaggaatgaatgagaggtaaagaagggagacagggagggaaaggaacatgtcaattaagccaattaaggctgtggaaaaagagactatttacttattttttattagtattaatattattattattatttttgaaacagaatcttgttctgttga

SEQ ID NO: 202969 - DNA, 201 bp, Homo sapiens
agtttcagcaaaataggttgcacaggagccaagtgctgggtgaagcgaggaatgaatgagaggtaaagaagggagacagggagggaaaggaacatgtcaattaagccaattaaggctgtggaaaaagagactatttacttattttttattagtattaatattattattattatttttgaaacagaatcttgttctgttgac

SEQ ID NO: 202970 - DNA, 201 bp, Homo sapiens
atacccaggggaccgggagttgacgatattaacatgatctccctcttttcagttcctggttctgttctctatgttttttccccgggccagaaatctcttcdcttgaactagaagaggaatctaatatttttcattttattaagatgttctttgtaactggtattatcgagttttgtaaatgttctacgtctatttaaaaag

SEQ ID NO: 202971 - DNA, 201 bp, Homo sapiens
atcaaaccctggtgacacccagctgcatgtcttcagccctcatctctctcctgagctccagagctgtttatctctagtaataatcattcccaaagtgtggygccccagacccacagcatccgcagaatctgagaacttgtcggaaatgcaaattcctgggctccactcagtcccctgaaatcagaagccgtgcaggtgaga

SEQ ID NO: 202972 - DNA, 201 bp, Homo sapiens
caatgagctgatggaactaaaatgaagaaggggttgggtcaggagggctgggtcaggaggtctggtccttctgggggctcttgggagatccatgtccttgscttttccagcttccagaagctgcctcctcccttggctcatggctatgtcgcatctccctttctctctggcacccttcatcacgtgaccttttcctccttt

SEQ ID NO: 202973 - DNA, 201 bp, Homo sapiens
attttgaagaaggcatgactttgcctactagagcttagcatgctttctgcttacaatcccacctgctggctgagtggagagcaaaattctttaaagatgtrggaatgtaagatgagaggaactcatttgctggggctgaatgccaagtgaaaattccgcttctttaatctacttcccttctcctatctttcccctgcattc

SEQ ID NO: 202974 - DNA, 201 bp, Homo sapiens
cccaaagtccattgtatcattcttattaggctaaacttaatttaacagtagttagtggcaggccagagatttgaagtcaggcctcagtacagatttggtgwtctgccttcctcagttcttggcatgtaggatcttggtgctcccacacagttttatcttttccttctctgagtgtcctggatggagtgtctcgcttcagtc

SEQ ID NO: 202975 - DNA, 201 bp, Homo sapiens
tttaatacagcatctattgtcagaatgtcttcagccccagtgtggacacgaagagccctgttttaacacagtacatacatctgaaggcatggaacagggaraaggggaaagtctgaaggcagaaaggaaggggtggggactgattgggaaagaaagaccctgaagaaggaggcgtgggtgggctaaggacatgaacaatgg

SEQ ID NO: 202976 - DNA, 201 bp, Homo sapiens
cggggtttctccatgttggccaggctggtctcgaacccctgacctcaagtgatccacttgcctcggcctcccaaaatgttgggattataggcgtgagccaycgcgcccggctttgtatgagattttgtctttgtgactaaatcacttctttgtgtacaaacttacattctgcccctgagcatgtgtgttcatgcttaactg

SEQ ID NO: 202977 - DNA, 201 bp, Homo sapiens
cattagagaagtgcaaatcaaaaccacaataatataccatctacatcaatcagaatggctattataaaaagtcaaaaaataacaggtgctggtgaggttgyggagaaaggaaacatttatacactgttggtgggagcataaattagttcagccattgtggaaagcagtgtggtgattcctcaaagaggaaacagaactacc

SEQ ID NO: 202978 - DNA, 201 bp, Homo sapiens
cgcctagtaagatttcatttctcaactcttagtcctgaacagacatctgaggatggccaggtacctgaagaatgctgctaacatggaatacaggcacccaygcagcaaacaaaccaactaaagcaattttgaagccatataaactgagcagggaggaaaaaaaaaacgtaaaaaaaatcaatttgtcattgttatttttag

SEQ ID NO: 202979 - DNA, 201 bp, Homo sapiens
ccccatccaggatgcggtcctgaagcgcctgtcgctgctggaggacatcgtgtaccggcagctgaatggtaaggacgcacgccggcgcctccggggctcgrcgcgggcgggccgggcacagggtgagccccagggtccttgcgcgctgcgccctgtgcctgggagccggcacatcctggctcccgcgcgctccttcttacc

SEQ ID NO: 202980 - DNA, 201 bp, Homo sapiens
ggctgggtcaggaggtctggtccttctgggggctcttgggagatccatgtccttggcttttccagcttccagaagctgcctcctcccttggctcatggctrtgtcgcatctccctttctctctggcacccttcatcacgtgaccttttcctcctttgcttccttccttcccacttataaaggcttttgtgattacattctg

SEQ ID NO: 202981 - DNA, 201 bp, Homo sapiens
tattagcatacagtttatgaggttcattcatgcatcagaaatccattgcttttcttggtggacatcccttttattattttttttgagacagaatctctccytgtcacccaagctggaatgcagtggtgtgatcttggctaactgcaacctctgcctctgggttcaagcaattcttctgcctcagcttcccgagtagctggg

SEQ ID NO: 202982 - DNA, 201 bp, Homo sapiens
ttaatacagcatctattgtcagaatgtcttcagccccagtgtggacacgaagagccctgttttaacacagtacatacatctgaaggcatggaacagggagaaggggaaagtctgaaggcagaaaggaaggggtggggactgattgggaaagaaagaccctgaagaaggaggcgtgggtgggctaaggacatgaacaatggt

SEQ ID NO: 202983 - DNA, 201 bp, Homo sapiens
aagctgtacaatcatggttattatttgttaatgatgaaaagatacagattaaaatcaacaggctgggcatggtggctcacacctataatcccagcactttgggaggccaaggcaggtggatcacctgaggtcaggaattcaagaccagcctgcccaacatagtgaaactgtgtctctactaaaaatacaaaaagtagctgg

SEQ ID NO: 202984 - DNA, 201 bp, Homo sapiens
tatggacagatgcagtgggtcatgcctataatcccagcattttgggaggctgaagtgggaggattgttgagaccaggagttcaagaccagcctgggcatcmtagcaagaccccatctctacagaaaaatttttaaaattagatggatgtggtggtgcgtgcctgaaactgcctttgcaaaattatgactgagacggtgaaa

SEQ ID NO: 202985 - DNA, 201 bp, Homo sapiens
agaatggcgtgaacctgggaggtggagcttgcagtgagccaagatcacgctactgcactccagcctgggttacagaacgagactccttctcaaaaaaaagaaaaaaaaaaaaaaacaactctgatccccgaatgctcagggagactgatttgagtaataataaaactcgggtctcccagacagctggctctggtgcgaatt

SEQ ID NO: 202986 - DNA, 201 bp, Homo sapiens
cgggcgcctgtagtcccagctactcaggaggctaaggcaggagaatggtgtgaacccgggaggcagagcttgcagtgagctgagatcgcaccactgcactccagcctgggcgacagagcgagactccatctcaaaaaaaaaaaaataaataaaacaaaaataaatgtatccatgtttccacactttcgagaccccaaatgc

SEQ ID NO: 202987 - DNA, 201 bp, Homo sapiens
catccagcatgggagaaagatgcagtctgggaggctaagctagtctagtcatttcacgtttttctgcctgctttatattctagccatgctggttagtgccyacccagattaagggtgagtctgcctttcccagcccactgactcaaatgttagtctcctttggcaacaccttggcagacacacccaggatcaatactttgc

SEQ ID NO: 202988 - DNA, 201 bp, Homo sapiens
ccatccatttctcctcttgtttatggaaatacaggaacatatgactgtttcatgtcttgtgcgttggagagaaagcatatcagtttttttgttgttgttctttttttttttggtttttttttggagatggattcttgctcttccgccaggctgcagtgcagtggcgcgatcttggctcactgcaacctccgcctcctgggt

SEQ ID NO: 202989 - DNA, 201 bp, Homo sapiens
actgatggaattcttgctctgtgccagatgcgtgcaaagacattacaagtacattatctcactgtatgttcacatctgtccagcgaggctccacccatccmcagaggggaaatgagaagactaagcgaggggaggttaactaagttgccctgtgttaaataagatataactgcgccccaaacctctgtaatcggaataata

SEQ ID NO: 202990 - DNA, 201 bp, Homo sapiens
tcccagtactttgggaggccaagatgggcagatcacttgaggccaggagttcaagaccagcctggccaacgtggcaaaaccccgtctctactaaaaaaaamccacaaaaattagctgggtatggtggcgggtccctgtaatcccagctacttgggaggcagaggcacgagaattgcttgaacccgggaggcggaggttgca

SEQ ID NO: 202991 - DNA, 201 bp, Homo sapiens
tcctgccagatcagcggcagcattagattctcataggagcgcgaaccctattgtgaactgtgcatgcattgcacgctccttatgaaaatttaataccttamgatctgaggtggagcagtctcatcctgaaaccattccccatccccccacacccttggaaaagttgtcttccatgaaactggcccctggtctcaaaaaggt

SEQ ID NO: 202992 - DNA, 201 bp, Homo sapiens
cagattctattttacaactgttcccctgaggttgagaagatgtgttgcctgttttctgagagcagtgtgtatttctatcacatgaggcattctgattttcygttttcactttcttctcgatatagttactttgtatatacggagtctgcttcctttttttttctgagacagagtcttgctctggtcacccaggctggagtg

SEQ ID NO: 202993 - DNA, 201 bp, Homo sapiens
gtatcaccatttacagatatatatatttcagatggactatagtgttaaatgaaagaaaccaaattagtcaaaaaccaatttttaaatagctcttccttttwaaaaaaaaaaaaaagagatagggtcttgctctgttgcccaggctacagtacagtagcatgatcatgacatactatagccaagaactcctctgctcaagca

SEQ ID NO: 202994 - DNA, 201 bp, Homo sapiens
tctgggtacgtggggagagggagggtttattttgtgatcaaggggaagcatgacggtctttacacgcactgtttctctgtagagttaggatatttgtcgcytccgaatctcatgctgaaatttgatccgcagtgttggaggtgggcctggagggaggtgtttgggtcatggggacagacccctcatgaatggcttggtgcc

SEQ ID NO: 202995 - DNA, 201 bp, Homo sapiens
gctggccttatcagcacttacactcacaaaccctttgtaatttttccactccttgcttctccacttgcccactccctattccttcatctccctgtaaaatrcccagtcacctctggacaaattagagttcagttcatgtaggatcctcttccctattgcaaaagttatcacagattaaaatgggcttaccattttaactag

SEQ ID NO: 202996 - DNA, 201 bp, Homo sapiens
aatgaaagaattatacaactcaccataatgtagaatcagggggagccctgagcttgttttcctgcaactaaacggtcccttctgggggtgatgggagacastaacagatcatcaggcattagattctcataaggagcgtgcaacctagatccctcgcatgcacagttcacaatagggtttctgcgtccataagaatctaat

SEQ ID NO: 202997 - DNA, 201 bp, Homo sapiens
tgacactttccccatcaaacggtagagtttaattcccctcttgttgatgatgcgctggcctccgtgacttgcttctagtgatcgaattcagtggaaataaygttccatgacttcagaggctggatcaaaaagggtgagggagcctctgcctgagggtgctcttcagggacatggatctttgaagccgtgtgccaccatacc

SEQ ID NO: 202998 - DNA, 201 bp, Homo sapiens
tactttttggaaagacagttcattggcactagtagagttttttggggagctggcaagctctgactgctgagtgactgcaatgggtaaaactagtcttagayttgcagcagatggtttcagttgttgttagataaaactggtttcagattacaataggcagtttcagcagtcaggcttgcaaagaatcacatttttgggatc

SEQ ID NO: 202999 - DNA, 201 bp, Homo sapiens
tctgtttcagttcttttcctgtttctttctatatattaatattttttttgtcctgcctgctaaatagctgttttctcaggttttctctttgtcctccactyttatttttccacaccagagtttccagtatagcaagtgggcaagtgccattaaacagggcaaaggccgattgtaagggtaagaggtgggggaactgaagaa

SEQ ID NO: 203000 - DNA, 201 bp, Homo sapiens
tccagagtagctgggactacatgcgcccgccactgcgcccagctaatttttttgtatttttagtagagacggggtttcaccgtgtcagccaggatggtctycatctcctgaccttgtgatccgcccgcctcggcctcccaaagtgctgggattacaggcatgagccaccgtgcccggccaaggctcacaggtttttctctg

SEQ ID NO: 203001 - DNA, 201 bp, Homo sapiens
ttagtagagacggggtttcaccgtgtcagccaggatggtctccatctcctgaccttgtgatccgcccgcctcggcctcccaaagtgctgggattacaggcrtgagccaccgtgcccggccaaggctcacaggtttttctctgtgtgtagtggttttgcattcccccgaggtcagctgtgtaccctctgccacatcactgcc

SEQ ID NO: 203002 - DNA, 201 bp, Homo sapiens
tcctgagtagctgagattacaggcttgcaccaccctgccccagctaatttttgtattttcagtagagacggggtttcaccatgttggccagactggtctcraactcctgacatcaagtgatccaccacctcggcctcccaaagtgctgggattacaggtgtgagcttccgccctgggccaagcacagccaagcattttaaa

SEQ ID NO: 203003 - DNA, 201 bp, Homo sapiens
gatggtctgatcccatagcttccccatgtggctctaagcagttacattttgctttgggtgtttcaggggaaggttttgtttttgtttttgttttgtttttrtttgtttgtttgttttgttttcagacagagtctcgctctgtcacccaggctggagtgcaatggcgcgatctcgggtcactgcaacctccgcctcctgggt

SEQ ID NO: 203004 - DNA, 201 bp, Homo sapiens
gctggagtgcaatggcgcgatctcgggtcactgcaacctccgcctcctgggttcaggcgattctcctgcctcagccttatgagtagttgggattacaggcrcccaccaccatacccagctaatttttgtattttcagtagtgatggtgtttcgccacgttggtcaggctggtctcaaactcccgacctcaggtgatccacc

SEQ ID NO: 203005 - DNA, 201 bp, Homo sapiens
ggcctcaagtgatcctcctgcctcagcctcccaaagtgctgagattacaggcatgaaccactgtgcctcgtctgactttatgtttcttatacaagcatatsgtgggattgctcctgggtagagacagaagttggaggtcccctttagtggtatctgtatttgttttcaagaatgaataatgtgaggtcaagttgtatcttt

SEQ ID NO: 203006 - DNA, 201 bp, Homo sapiens
tggcgcgatctcgggtcactgcaacctccgcctcctgggttcaggcgattctcctgcctcagccttatgagtagttgggattacaggcgcccaccaccatrcccagctaatttttgtattttcagtagtgatggtgtttcgccacgttggtcaggctggtctcaaactcccgacctcaggtgatccaccgaccttggcctc

SEQ ID NO: 203007 - DNA, 201 bp, Homo sapiens
ttcgccatgttggccaggctggtcttgaactcctggtctcaattgatctgcccacctcagcctcccaaagtgctgggattacaggtgtgagccaccaccgygcctggcccttatttttattttttgtagagatggggtctctctttgttgcccaggctggtctcgaacttctggcctcaagtgatcctcctgcctcagcct

SEQ ID NO: 203008 - DNA, 201 bp, Homo sapiens
cctgggcatgattttcagtattataatgagattatattgaggaaaaactcagtgaaaggtcagcgcttggagcccatcttgtcttgagctggctggattcrgtcaggctcttttcaggaatgccagcgtctcacttcactagccttggaagatggccacgttcttaccaggaatggtggagtccctctgtaacaatctggg

SEQ ID NO: 203009 - DNA, 201 bp, Homo sapiens
accaggagcagatactgatgccatgcttcttgtacagcttgcaaaaccatgagccagataaacctctattcttcataaattacctagtctgaggtgttcctttttttttttttgagatagagtttcgctcttgttgcccaggctggagtgcagtggcatgatcttggctcactgcaacctccacctcctgcgttgaagtca

SEQ ID NO: 203010 - DNA, 201 bp, Homo sapiens
gcgattctcctgcctcagccttatgagtagttgggattacaggcgcccaccaccatacccagctaatttttgtattttcagtagtgatggtgtttcgccaygttggtcaggctggtctcaaactcccgacctcaggtgatccaccgaccttggcctcgcaaagtgctgggattacaggcaagagccactgcgcccggcctc

SEQ ID NO: 203011 - DNA, 201 bp, Homo sapiens
cctgtcccttgggtgtggcagatgttagggcagagactgaggggcatcactgcacttgggagctagagttgaggcaagcagccaggaaggcctgcagatcrgccacacagtttcgcccatgtgagccaagcgataccgagaaacccaggtagaccctcgaaaggggagcgctcgccttagacagacccaagagacaagggc

SEQ ID NO: 203012 - DNA, 201 bp, Homo sapiens
cctgccatgtggccacactaaaccatcaggttcatgagggtgggcttaggaggatatagacacctgcaggcagcttcatgacacacccgccgtggaaaacaggggtgtcttccgtagcaaactcactatccaacacatctctccctctctgggccaaaatgttaactgagggccgggtgcagtggctcacgcctgtaatcc

SEQ ID NO: 203013 - DNA, 201 bp, Homo sapiens
cccaccaccatacccagctaatttttgtattttcagtagtgatggtgtttcgccacgttggtcaggctggtctcaaactcccgacctcaggtgatccaccsaccttggcctcgcaaagtgctgggattacaggcaagagccactgcgcccggcctcaggggaaggtttttaaagccactcaggaagcacgtgggtgaacct

SEQ ID NO: 203014 - DNA, 201 bp, Homo sapiens
ctgccatgtggccacactaaaccatcaggttcatgagggtgggcttaggaggatatagacacctgcaggcagcttcatgacacacccgccgtggaaaacaggggtgtcttccgtagcaaactcactatccaacacatctctccctctctgggccaaaatgttaactgagggccgggtgcagtggctcacgcctgtaatccc

SEQ ID NO: 203015 - DNA, 201 bp, Homo sapiens
aactcccgacctcaggtgatccaccgaccttggcctcgcaaagtgctgggattacaggcaagagccactgcgcccggcctcaggggaaggtttttaaagcyactcaggaagcacgtgggtgaacctgagggctgggatgtgaaggcggcagtgtctgccttctgtggccctgtgccccccaccctccccagcatctttaac

SEQ ID NO: 203016 - DNA, 201 bp, Homo sapiens
gaatgcctggatggcataatttcaggacaacatggtcagaacttttctttcttttcttttctctttttagagacaaggtcttgctctgtcacccatagctstgcaatcatagctcactgcagccttgacctcctaggctcaagaaatcctcccatctcggcctctcaagtagctgggattacaggcatgaatcaccatgcc

SEQ ID NO: 203017 - DNA, 201 bp, Homo sapiens
gtgccatgttggtgtgctgcacccattaactcatcattcacattaggtatatctcctaatgctatccctccccactccctccaccccacagcaggccctgrtgtgtgatgttccccaccctgtgtccaagtgttctcattgttcaattcccacctatgagtgagaacatgtggtgtttggttttttgtccttgcaatagtt

SEQ ID NO: 203018 - DNA, 201 bp, Homo sapiens
taaccttccactgaatacacaatttagtctggctcagtgtgtctgcatttttacaaaaacaatagaggcagaggaaacaatcagatatgaatttgtctcargtgagcagagggatgactttctgtcctgcacctgtgaagataagctatccgtttacattgtcagggtgaaattcaacagaaccctctgacggaaaagatc

SEQ ID NO: 203019 - DNA, 201 bp, Homo sapiens
ctatcaaatagacaaggatggcagcattggaccataggagtgggagggaaaagtaagctaccaactgtgagattcttattacctaaataaaatttttggtraaaaacgataaaaataaatactaaatcaccaccatctcaaaaaacaaaacaaaacactacaagcagggcagtcatttttgtggtcactgcccacctgcaa

SEQ ID NO: 203020 - DNA, 201 bp, Homo sapiens
atgcttttgattgaaactcaagccattgaagaatatttcagccagagtatgcagcaacccatttttctaggtccagtagttgacaccgtagacttgtcaaggaaagccaaatgcacacatcactgtgaacattggaaatactatctccaggatgttagaaaacacttttaaaaatgacttgaaggaaaagtcggaaggaga

SEQ ID NO: 203021 - DNA, 201 bp, Homo sapiens
aggagcctaaccaaggattggtcaaggagagcatctttgccaagaacacgctcctggtccccttcccctttgcagctttgatgaacccaacctctcaacamgagtggggttggggaaaggctctcttttgggactcccctgaaacagaaagaagctgtcatactgtccccccatcttccctccctcagcacaacctttaga

SEQ ID NO: 203022 - DNA, 201 bp, Homo sapiens
cccatcttccctccctcagcacaacctttagaccacagatatttgctgggaaagtgatcttttcattctttcctgtttcctttgacaaacagaaagggcaygggtttgaatgccagttgataatccttccatgttgctagtctcaggctccccacttggtccgtggacaggatcaagactccaaaaaccttggtgctctgg

SEQ ID NO: 203023 - DNA, 201 bp, Homo sapiens
agctcggtgggtaaggcgagtgatggggagtggctgtaaatacagatgaagctttgctcgcctgcgggccgctcacctcctgctgtgcagcctggttcctraaaggtcacagatcagtactggtccaaggcctgggggattggggacctctggtataaaagactaatcatgcacctgtctaaggcacttaccatgaatgga

SEQ ID NO: 203024 - DNA, 201 bp, Homo sapiens
gtttgctttcatcccctcctgacattctccagcatatatcccacactgcaatcttagggcaaattggatcacaccccacacgctgttgtgtgcatacactrcatcatgtagtggcccctccttgctttataggattaaaagtctgatctcttacttgacccacagaacccagtgtgctctggtcttttctttctctttatc

SEQ ID NO: 203025 - DNA, 201 bp, Homo sapiens
ttccatgtggctggggaagcctcacaatcatggtggaagtcaaggaggagcaagtcacgttttacatggatggcagcaggcaaagagagaatgaatgccawgcaaaacaggtttccccttatcaaaccatcagatcttgtgagacttattcactaccatgagaacagtatgggaaagaccctcccccataattcagtcatc

SEQ ID NO: 203026 - DNA, 201 bp, Homo sapiens
attctgagaaaaatttttaagaagaaggtaggagtctttctggttatttctgtaaagaagctagggaaaaaattcataagtggttgttgcagcatgcagattttttttttttttttgagatggcgtctcactctgtcctccaggctggagtgcagtggtatgatctcggctcactgcaacctccgcctcccaggctcatgt

SEQ ID NO: 203027 - DNA, 201 bp, Homo sapiens
ccagtctctgagctctcttgaattcttctttagaattttaagttagaatcttgtcctctctttttgtgtctggtctgtattgcatctagaaggcattcagkctgtttttgttttcataattgtgattgttgatgtagctattcaataaaatgaatgaatgaagttaattcaggatatatgaaaacatcacccataaaataa

SEQ ID NO: 203028 - DNA, 201 bp, Homo sapiens
tttcagagagaggaccctagcagaggcaccaagcaggaagtgcatggcacctgtggagtggccagtggcaagttagggttctagcagagagtgagggggcwgaggaagaggggaggccaggcaggaggacagatcaagctgctccagccaggagccagcccacaatcctgcgggctgcattcacaccgtgttctgttaata

SEQ ID NO: 203029 - DNA, 201 bp, Homo sapiens
ctgcccatgctccctgtcacctggagcagcatctctgctctaactcaagatttctacctccaagataactacttttatccttcgtggctaaacttcctatrtttgacctaccaagaaaacaattacagcctcccagggtcatgcttggtttctctgcactcagagcacacaacaccctcagtggaatctcctgagccacct

SEQ ID NO: 203030 - DNA, 201 bp, Homo sapiens
cctgggtgacaagagagaaactgcatctcaaacaaacaaacaaacaaacaaagaacataagtaaataaagcctctgtcagaaaacctctctggacagaaaraatagtgcctagaaaaccctaagtttggaatgggcttgatttaggaactgatagcagatactggccaattgtttgagggtgatggaagggaggtaggaac

SEQ ID NO: 203031 - DNA, 201 bp, Homo sapiens
ccttgaagaaaataggaacttgcaggggtgatttgagtgacttgagatcagcccaagggctgggcaggtgcttttcttccagagcagctctgcctaccaascctgtgccatggatgctctccatttctccccattctgcccatgctccctgtcacctggagcagcatctctgctctaactcaagatttctacctccaagat

SEQ ID NO: 203032 - DNA, 201 bp, Homo sapiens
ttctgattagctgggattacaagcacctgccaccacgcccagctaattttttgtatttttagtagagacggggtttcaccgtgttagccaggatggtctcsatctcctgacgtgatccgcccgcctccagccttgtgatcggcaaccgaaagtgctggaattacaggcgtgagccactgcgcccggccggctggagggttt

SEQ ID NO: 203033 - DNA, 201 bp, Homo sapiens
gcaaatggatctgctctgtcacctgtttataacccccggggtcattgactctcaagttcacattccccagatgtagatgcagctatgggacatggaattckcgatttattagtttgaatcaaaccaatgttgagatttacagtactggctgttgttgcttctgctggcctttgatagtttaagtaaggattgtagacagat

SEQ ID NO: 203034 - DNA, 201 bp, Homo sapiens
ttcctgtaacaaactaaggactaagcagggataaggtggaagagctggattcaagaaaatcctagagagaattagtaaaatgaggcaactaattggaaatsgatgaagtgggtgcactagcttgggagatggagtggaagtgatcttgttaaccaggagagagaatgctgtaggggttcacgttttgtaaggaagacagca

SEQ ID NO: 203035 - DNA, 201 bp, Homo sapiens
atgtgccaggcgtggtggctcacgcctgtaatcccagcactttgggaggcagaggtaggcggatcacttgagttctagagttcgagaccagcctggccaayatggagaaaccccgtctctactaaaaatacaacagttagcccggtgtcatggcacgcgcctgtaatcccagctactcgggaggctgcgacacaagaatca

SEQ ID NO: 203036 - DNA, 201 bp, Homo sapiens
agtagagatgaatttctcaacaaaggaattggaagctgagatggctttcctttacaaagtgcccctcatgaatgcacaactcagtgtgatatatttggttyaacactttggtattttgcacctcacatctctttgcttttcttttcgtcttttgctttcttttgtcctttttgtccttgctttgatctcactatggaatcg

SEQ ID NO: 203037 - DNA, 201 bp, Homo sapiens
ctgcttctgcttcctccatagtagtcagaccagaagaaaaaaaaagtataatgtgtgtttttcctcttttcacgatttgattttttccacatattgaagtratttttccttgaaaaggactgaatattaaaaaatacattttatgtctgtaatcctagcattttgggaggccgaggtgggtggatctcttgaggtcaggag

SEQ ID NO: 203038 - DNA, 201 bp, Homo sapiens
cagcacatagcacacgctctgtgcttccgttttctcatctgtaaagtggggtcgatcgtgcctttacctcacagagtctttaagaggtatgaaggaattgytgtaggccaacagcatgtggctcttaataaggacccagtaagtatgaagacaaatgttgtggaatgttacgagtttccaagacagcccattcactggtta

SEQ ID NO: 203039 - DNA, 201 bp, Homo sapiens
actaaaaatacaaaaaattagccaggtgtggtggcacgtgcctgtagtcccagctactctggaggctgagacaggagaatcgcttgaaccggggaggtggrggttgcagtgagccgagatggcatcactgtactccagcctgagcgacagagtgagactccctgtcaaaaaaaaaaaaaaaaaagataacgataatctgga

SEQ ID NO: 203040 - DNA, 201 bp, Homo sapiens
aattagaattagacaaacatccgcttctttttggaagcctgagttttatttaaaaatagaatgtcaaggctgggcgcactggctcacgcttgtaatcccarcactttgggaggccaaggcgggtggatcacttccagtcaggagtttgagaccagcctggccaacatgatgaaacctcgtctctactaaaaatacaaaaat

SEQ ID NO: 203041 - DNA, 201 bp, Homo sapiens
gtaataaaacatacatttaaagtattaactgttgcatttattggaatttaaaaaaaaaacctagaaaatccacttgctttgctgctgatttttctgcaacyctaggagaagtcactcttcactaaaagataatgataatcgctgggcacagtaaccccagcactttgggaggccgaggcgggcagatcacgaggtcaggag

SEQ ID NO: 203042 - DNA, 201 bp, Homo sapiens
tgaggcaggagaatcacttgaactcaggaggcggaggttgcagtgagctgagaccatgccactgcactccagcctgggcaacagagcaacactctgtctcaaaaaaaaaaaaaaaaacaaaagaaaccatcaaggatgcagtagcagccttagtgttggcttgaacctatttggaacagaagttcttgtctaaggagaccc

SEQ ID NO: 203043 - DNA, 201 bp, Homo sapiens
agagcagtggagcaatctcggctcactgcaacttccgccccaccaggatcatgcgattctcctgcctcagccccgctgagaggctgggattacatatgccygccaccacacccggctagtttttgtatttttaatagagacggggtttctccatgttaggacatcatctcttatcactcagtgcctgacacctctgccctg

SEQ ID NO: 203044 - DNA, 201 bp, Homo sapiens
aaagaaacagtgatcactggttttcagtgtggagagagaattcctctgcccccggcttcacctcatttcctttcagagacccccttccacctgtgtcatgycactaagccaccctttccctgattcctaacaatgtaaggagattggaactgaggctgggatgccttgctgttaatcttccagagaacccgatgcaatcaa

SEQ ID NO: 203045 - DNA, 201 bp, Homo sapiens
tgcccaggacagaccctgtttaggcctagtgtcccagcttgattttttgtttttaatttataacactatcttagttttttatataattgaggttcttgggttttttttttttttcttttcaaggcaattactatttttttttttttttttttttgagacagagtctcactctgtcacccaggctggagtgcagtggtgcga

SEQ ID NO: 203046 - DNA, 201 bp, Homo sapiens
ccagcttgattttttgtttttaatttataacactatcttagttttttatataattgaggttcttgggttttttttttttttcttttcaaggcaattactatttttttttttttttttttttgagacagagtctcactctgtcacccaggctggagtgcagtggtgcgatcttggctcactgcaacctccgcctcctgcgtt

SEQ ID NO: 203047 - DNA, 201 bp, Homo sapiens
ttttttttttttgagacagagtctcactctgtcacccaggctggagtgcagtggtgcgatcttggctcactgcaacctccgcctcctgcgttcaagcgatyctcctgcctcagcctcccgagtagctgggattacaggcacctgccaccacacctggttaatttttatatttttagtagagatggggtttcaccatgttag

SEQ ID NO: 203048 - DNA, 201 bp, Homo sapiens
gtagctgggactgtaggtgtgggccaccatgcctggctaattaaaaaaaaaatttgtgtgtagatggagtcttgctgtacacctttcccaggttcttttcraactcctaggctcaagggatcctcttgcttcagcgcttggattacaggcatgaaccactgtgcccagctctccctgcttttattttatttttttgtggtt

SEQ ID NO: 203049 - DNA, 201 bp, Homo sapiens
ctgccaccacacctggttaatttttatatttttagtagagatggggtttcaccatgttagccaggctggtcttcaacttctgacctcaggtgatccgcctkcctaggcctcccaaagttctggaattacaggcgtaagccacggcgcccagcctgtttactctttataatgtataattttgcaggttttagcaagcacatg

SEQ ID NO: 203050 - DNA, 201 bp, Homo sapiens
taaggaaagaagctgtctctgcaacataatggtgcagggtgaagcagcaagtgctgatggagaagctgcagcaagttctccagaagatctagctaaactcrttgctgaaggtgtctacactcaacaacagattttcaacgtagacagaacagccttctattagaagaaggtgctatctaggactttcccacatagagagga

SEQ ID NO: 203051 - DNA, 201 bp, Homo sapiens
attctttacagatgcaaatttccgccacaaaagatagctttgcaaggccacttctgtcagctgaccctgcagtggccgtttcaaaatacatcaaagtcacrtactttggggaaatattttgattttgcaaatcaaaaataaaagtcctcctgctgactaaatggaccaccctcttggccaagggtatcccaaggaaacctg

SEQ ID NO: 203052 - DNA, 201 bp, Homo sapiens
ggtgcgcaccatcacgcccagctaatttttctatttttagtagagacagggtttccaccatgttggccaggatggtctcgatctcttgacttcaagatccrcccttcttggcctcccaaagtgttgggattacaggcgtgagccacaacgcctggccggtttgctgattatattaagcccactgtccagtcccacttctca

SEQ ID NO: 203053 - DNA, 201 bp, Homo sapiens
gtcttgctctgttacccatgcaggagtgccatggtgtgatcatagctcgtggtaacctcaaactcctagggtcaagtgatcctcctgcctcagcccccccmaagtagctgggactgtaggtgtgggccaccatgcctggctaattaaaaaaaaaatttgtgtgtagatggagtcttgctgtacacctttcccaggttcttt

SEQ ID NO: 203054 - DNA, 201 bp, Homo sapiens
cattggtgggaatgaagttcctaaatagcttcttttatctcaaggttgcttagtagaagcactgacccctgctttgtcttttccctaagtctagttcctctttcaagttatgcctgggaacatttcttggagacacagcagtcgtagctctgggatatctacaaaggaggaacctagggacagctctctggttggaaggaa

SEQ ID NO: 203055 - DNA, 201 bp, Homo sapiens
ccagctgagcctttctcccttgcccagggatattaaattccacagccaaataagtgaaagtcacttctgctcctctttttttattcttttctttctttctktcctttctttccttcctttcttccttccttcctttctctctttctctctttctttttttctttttttgaaagagtctgtttctgtcacccaggctggagt

SEQ ID NO: 203056 - DNA, 201 bp, Homo sapiens
agacagagcgagactccctctcaaaaaacaacaacaacaataaaagcaaacataaggttgtagtccagttagaaattaacagcaatgatacattataaaargtaagggacacaatgtgtcttaaatacatatttaagttttggaggatgtttggttggtgggttggttcctggtatctcctgtggtacagaggagaaacag

SEQ ID NO: 203057 - DNA, 201 bp, Homo sapiens
tgcccagggatattaaattccacagccaaataagtgaaagtcacttctgctcctctttttttattcttttctttctttctttcctttctttccttcctttcttccttccttcctttctctctttctctctttctttttttctttttttgaaagagtctgtttctgtcacccaggctggagtgcagtgccataatcagagct

SEQ ID NO: 203058 - DNA, 201 bp, Homo sapiens
agcgagactccctctcaaaaaacaacaacaacaataaaagcaaacataaggttgtagtccagttagaaattaacagcaatgatacattataaaaggtaagrgacacaatgtgtcttaaatacatatttaagttttggaggatgtttggttggtgggttggttcctggtatctcctgtggtacagaggagaaacagcagaag

SEQ ID NO: 203059 - DNA, 201 bp, Homo sapiens
gcagaagccaacttgaacggagcacttgaaatcgacaggtccttggcttcggtcatgcctcttcccagtgcttcctgtgtaaaggatgtttaggtctttcsattactcatacacagacccagattcagaaaggaaaaactctttgtaaactgctcacttttagaaatgaaaagattgatccaagtggaaggagggagacga

SEQ ID NO: 203060 - DNA, 201 bp, Homo sapiens
actgctggactcaggggatccgcctacttcagcctcccaaagtgctgagattacaggcaggagccactgaacctggctgagctcagcattttttttttccaaaaaaaaaaaaaaacaaaaaaaacaaaaaaccatatttggctctacaaagcatattttgtgtaaaatagattctataggcaattaatgcaagagatccta

SEQ ID NO: 203061 - DNA, 201 bp, Homo sapiens
acttcagcctcccaaagtgctgagattacaggcaggagccactgaacctggctgagctcagcattttttttttccaaaaaaaaaaaaaaacaaaaaaaacmaaaaaccatatttggctctacaaagcatattttgtgtaaaatagattctataggcaattaatgcaagagatcctagggaaggctgtgtcacaagccactg

SEQ ID NO: 203062 - DNA, 201 bp, Homo sapiens
catttcatgattgtgttctgaactgggagaaaaataacccaaatttccctaagcaggtacattatcctgtctgccctcagaaagcctaatctgtgtctcatttttttttttttaatgtaggttgttatcttactcattttgggctgctgtaacaaaataacatataccgggtggcttataaacaacaaaaatttatttccc

SEQ ID NO: 203063 - DNA, 201 bp, Homo sapiens
agtgtggcatgatcatggctcactgcagcctggaactcacaggctcaagcaatcctcccccctcagcctcccaagtagctggaaccataggcgtgccccaycatgcccggctaatttttgaatttttctatagcaatggggtctccctatggttgcccaagctggtctcaaactcctgggctcaacctatcctcccacctc

SEQ ID NO: 203064 - DNA, 201 bp, Homo sapiens
cagtttttaaaaattctccactttaaagatatcattctgtagtcttttggtctccatggcttctgataagttcattatcatttgtattattgttcccctgyatgtgatttgtcatttttttctggctgttttcaagattttaactttgtattttagcagttttcctagaggtagttttctttctatttatccctgcttggg

SEQ ID NO: 203065 - DNA, 201 bp, Homo sapiens
gtaatcgaatttacacagcagaatgaaggaacagcagtgaaggaagagtagcaatgcagagagagaagggaaaaggagagggccatgttattctttgcccscgcaaggctagcccagcatttagcactgtgtcaggcacatagcagatgcccattccgtatttgttgaatgagtgaatggaagggcttctgcctgtttaga

SEQ ID NO: 203066 - DNA, 201 bp, Homo sapiens
gtgtcgtgggatgaagatgagctcacctgctggagacaattctcttctggaaaaaatccgattccctctcatccctactagggcccaggtcacaggttgcktctatgtgttaactctttcttcctcaatgttctccaagcctctccttgctgatcaatgacaacgccacccccttgggctcctgtgccatccctgaatctt

SEQ ID NO: 203067 - DNA, 201 bp, Homo sapiens
gcccagggatattaaattccacagccaaataagtgaaagtcacttctgctcctctttttttattcttttctttctttctttcctttctttccttcctttcttccttccttcctttctctctttctctctttctttttttctttttttgaaagagtctgtttctgtcacccaggctggagtgcagtgccataatcagagctc

SEQ ID NO: 203068 - DNA, 201 bp, Homo sapiens
cccagggatattaaattccacagccaaataagtgaaagtcacttctgctcctctttttttattcttttctttctttctttcctttctttccttcctttcttccttccttcctttctctctttctctctttctttttttctttttttgaaagagtctgtttctgtcacccaggctggagtgcagtgccataatcagagctca

SEQ ID NO: 203069 - DNA, 201 bp, Homo sapiens
ccagggatattaaattccacagccaaataagtgaaagtcacttctgctcctctttttttattcttttctttctttctttcctttctttccttcctttcttccttccttcctttctctctttctctctttctttttttctttttttgaaagagtctgtttctgtcacccaggctggagtgcagtgccataatcagagctcac

SEQ ID NO: 203070 - DNA, 201 bp, Homo sapiens
gaaaattcatttggaaatagaaaaagtgacccatagatttcaggttagtgtcgtgggatgaagatgagctcacctgctggagacaattctcttctggaaaraatccgattccctctcatccctactagggcccaggtcacaggttgcttctatgtgttaactctttcttcctcaatgttctccaagcctctccttgctgat

SEQ ID NO: 203071 - DNA, 201 bp, Homo sapiens
ttctttctttcctttctttccttcctttcttccttccttcctttctctctttctctctttctttttttctttttttgaaagagtctgtttctgtcacccakgctggagtgcagtgccataatcagagctcactgtagccgcgacctcctggattcaagcaatcctcccacctctgcctcccaagtagctggaccacagcca

SEQ ID NO: 203072 - DNA, 201 bp, Homo sapiens
aagcacagaagggaagacgcagaaatttattagcgcttataactgagaagttcagagttgcctctggctttagataaggccacactcaggagtttaagcartgggactctgccctccagtctgtcctgtagacaggctgtctccagtgtgatagataagacagcagtagattttcacccctggagaaagagggttttcctt

SEQ ID NO: 203073 - DNA, 201 bp, Homo sapiens
cctgccagtgaattacttctcatccctcagaagtcagctctcctggggccaggcacagtggctcacacctgtaattctaataccttgggtggctaaggtgrgaggatcacttgaggccgagagttcaagaccagcctgagcaacatagtgagaccccatctctacaaaaaaatataaacattagccatatggggtggcaca

SEQ ID NO: 203074 - DNA, 201 bp, Homo sapiens
taactatatactagtgttagtattcagtgaaagtggatcatcataaagttcttcatccttgttgtcttcacatactataagtatataagtatatatttaastatatactataatataaatagtgtgtgtgtatatagtgtgtgtatatatatctacaatacatgtatacatatatacacatatatatacacacacacatac

SEQ ID NO: 203075 - DNA, 201 bp, Homo sapiens
tggatacagcattcactatttgggtgatgagttgatgagaaacctaaacctcagcatcacacagtatacctatgtaacatgcctgcacatggaccctgaayctaaaattgaagaaaacaaaatatattttaaaaagaatattacaaaacagcaaggtaacttgttacacagtatatgacatgtcacatttttaaaatgata

SEQ ID NO: 203076 - DNA, 201 bp, Homo sapiens
tccttagcaaagtaacacagaaacagaaaaccaaataacttctctcttataagtaggatctgaattatgagaacacgtggacacatagaagggaataacamacactggggcctattggagggtagggggtggagggtggtaggagggaggggatcaggaaaaatattaaatagctaatgggtactaggcttaatacctggg

SEQ ID NO: 203077 - DNA, 201 bp, Homo sapiens
tattcaatggtgggtgaggtcggggaagctaatatccacatttgcttctcattattttatttaatccgttattttattagtctgttttcatgctgctgatraagtcgtacctgagactgggcaatttacaaaacaaggaggtttaatggactcacagttccacgtggctggggaggcctcacaatcacggtggaaggtgaa

SEQ ID NO: 203078 - DNA, 201 bp, Homo sapiens
cttttacagtggattcagaatcagtagctttataagaagggctttgctcagttcatgatgactctatgcatgattgactccatctctgtacctgaattacaaaaaaaaaaaatgtggcaagtaaagaaaaggcaaaatgttatttttttccccactcagttttgcactggggctcagcacgtatggtttcaggtaggctct

SEQ ID NO: 203079 - DNA, 201 bp, Homo sapiens
cccctttataaaaccatcagatcttgtgagacttattcactatctcaagaatagcacaggaaagacccacctccatgtttcaattacctcccacttggtcyctcccacaaaacattagaattgtgggagctacaattccagatgagatttgggtggggacagagtcaaaccgtatcaatctccataaatgcactatgatgt

SEQ ID NO: 203080 - DNA, 201 bp, Homo sapiens
tcaaggccacactaaccccagttgggctgagattaaaatgaggtccatagtaacagtcacgggtccacagctcttggagaccccctctttttttggagtcyttttttttttttttttttttttgagacagaggctctctctgtcactcaggctggagtgcaatggtgcaatctcagctcacttcaacttctgcctcctggg

SEQ ID NO: 203081 - DNA, 201 bp, Homo sapiens
tgtgggagctacaattccagatgagatttgggtggggacagagtcaaaccgtatcaatctccataaatgcactatgatgtaatctataattatcccaattttttttttttttttttgagatggagtctcactctgtcactcaggctgaagtgcagttgcacaatctcggctcactgcaacctctgccactcaggtttaagc

SEQ ID NO: 203082 - DNA, 201 bp, Homo sapiens
gagaatggcttgaactcaggaggcagaggctgcagtgagatgagatcgtaccactgcactccagtctgggtgacagagtgagactctgcctcaaaaaaaaytagtatgtattggacataattgtatgtgtgatacttttatgactggctgatgagtagcatcaccagcattgccacaaacatgtgagtaatgcattgtgct

SEQ ID NO: 203083 - DNA, 201 bp, Homo sapiens
agtggtggctcatgcctataatcccagcactttgggaggcctagtcaggcagatcacctgaggtcaggagttcaagaccagcctggccaacatggcaaaamcctgtctctactaaaagtacaaacattagccaggcatggtggtgggcgcctgtaatcccagctactcaggaggctgaggcaggagaattgcttgaatctg

SEQ ID NO: 203084 - DNA, 201 bp, Homo sapiens
cacttgaacctgggaggtggagtttgcagtgagctgtgatcacaccactgcactcccagcctgagtgacagggcaagagcctgtctgaaaataataataataataataataataataataataataataataataataatagtaaataatatatttcctccctggtcttgacttcatttgcagtgacagattctcatgact

SEQ ID NO: 203085 - DNA, 201 bp, Homo sapiens
tcgaggctgcagtgagctgtaatggtgccattgcacttcaacctgggcaacagggtaagaccctgtccaaaaaaaaaaaacaaaaaaaaacgcacttcttrctcctgctggtggattgttgcctgttgacagctcacagccaagttcctccctaagtattgagatgactgcagggtgctgccctgcctgggatgatgcact

SEQ ID NO: 203086 - DNA, 201 bp, Homo sapiens
tgcagtgagctgtaatggtgccattgcacttcaacctgggcaacagggtaagaccctgtccaaaaaaaaaaaacaaaaaaaaacgcacttcttactcctgytggtggattgttgcctgttgacagctcacagccaagttcctccctaagtattgagatgactgcagggtgctgccctgcctgggatgatgcacttcccaat

SEQ ID NO: 203087 - DNA, 201 bp, Homo sapiens
cactttgagatgcactgtcctacggaaattcatgctgtgattgtccttctggaagcgtgaacttgggccaggctcagtggctcacacctgtaatcccagcrctttggaggccaaggtgggaggatcgcttgagcccaggaattcaagaccagcctgggtaacatggcgagagtccatctcaaataaaataggctgggcaca

SEQ ID NO: 203088 - DNA, 201 bp, Homo sapiens
cacgtcactccagttctctcagtttattaatctgtcaaatggagacagtacactttcgtagaaccgttgtgagaatgcagttggacaatagagtgtttgaygtatcgctgttctccatcattattcccttttcctttcgaaatacattctcatggatccttgtcttgaaggagtgacctggatggagagtttgggggtgga

SEQ ID NO: 203089 - DNA, 201 bp, Homo sapiens
atgacctgcaggacattggaatattttgtgaatctccatagcaactctttcagcagaagtattttctttggatgatctgaagacacaggacagcgaagcatttttttttttaaatctccatacctcatgtccaagttaactgctatttaattgaatggcatttcattctcagaccgtcatccccttacctgaatgttaata

SEQ ID NO: 203090 - DNA, 201 bp, Homo sapiens
gcatccagattccatcatgcaaagatttgtggtcttgtgtttgtatctgtgacactgtataatttccaattggcttttaagagacagaaacctggatgccrttggctaaacagtgagagcatttgcctgcctttctgcctccttggaagctagagcagtcattaaaaactagagaagtgagcacacgcagcaccccccggc

SEQ ID NO: 203091 - DNA, 201 bp, Homo sapiens
cctggggtacagggggtatggcctaagtctcaaagacaagtggattctgatgcttgttttcaccaactactggcctttctcatttgcagtacttttttttktcttttttagagtgagtgtctcactctgttgcccaggctggagtgcagtggtgcaatcatagctcactacagccttaaactcttggtctcaagtgatcat

SEQ ID NO: 203092 - DNA, 201 bp, Homo sapiens
gtctctactaaaaatacaagaaaaaattagctgggcatagtggtgcatgcttgtaattccagctacttgggaggctgaggcaggagaattgcttgaacctrggacatagaggttgcagtgagcccagattgcgccactgcactccagcctgggcaacagagtgagactgcactgcacaaaaataaatcatagaataaaaaa

SEQ ID NO: 203093 - DNA, 201 bp, Homo sapiens
tctgtgttcttgtgtgtttgtgcaggctcaccagcctgtggatgtccaggtaccccgcagaggctgtcagcaggaagagtctgggcagacaggaaaactcrgggcttccttctgatttgcatttcaaaatgaaaatgagaacttttcaaaaaaatagttatcctgccaacaacattgttatactactgatgggctggggac

SEQ ID NO: 203094 - DNA, 201 bp, Homo sapiens
gaacacaccatccacatcagtgcacatgaaaatagttcaaaatacattaaaagatgccccctggctgattttggcatgaccagtagtacctacaactctgygttcttgtgtgtttgtgcaggctcaccagcctgtggatgtccaggtaccccgcagaggctgtcagcaggaagagtctgggcagacaggaaaactcagggc

SEQ ID NO: 203095 - DNA, 201 bp, Homo sapiens
aagacagagattgccaccttaaatttttaaaactccagctgtattccattttcaagagacacataaaaaacctcaggagagcgccgggcccagtggctcaygcctgtaatcccagcactttgagaggccgaggggggcagattgccagaactcaggagttcgagaccagcctgggcaacatggtgaaaccctgtctctact

SEQ ID NO: 203096 - DNA, 201 bp, Homo sapiens
agatgtgagccactgtacccaatgctcattctgctttttatgtatttcacttttgcacagatcccctaagacattggtctggaacacaccatccacatcartgcacatgaaaatagttcaaaatacattaaaagatgccccctggctgattttggcatgaccagtagtacctacaactctgtgttcttgtgtgtttgtgca

SEQ ID NO: 203097 - DNA, 201 bp, Homo sapiens
acctcggcctcccgaagtgctaggattacaggcctgagccaccacatctggccacctgtttgcctctatgtcacctgccaggaagagatagtcaggccccygtagcccctccctagagctgcagatgatgagctgctcacctgtaagtttgtctctgcagtggcacctttttcttccagctttcactgttacacaacgtac

SEQ ID NO: 203098 - DNA, 201 bp, Homo sapiens
gctaaggcccaagaatcacttgagcccaggtggcggaggttgcagtgagccgagatcacgccactgcactacagtttgggtgacatagtgagactttctcaaaaaaaaaaaaaaagaagaattcttaactacttaacttgtatgcattctcaaatctgtcttcttctaaccttcactgtcacacttgagttcagaccttca

SEQ ID NO: 203099 - DNA, 201 bp, Homo sapiens
ctaaggcccaagaatcacttgagcccaggtggcggaggttgcagtgagccgagatcacgccactgcactacagtttgggtgacatagtgagactttctcaaaaaaaaaaaaaaagaagaattcttaactacttaacttgtatgcattctcaaatctgtcttcttctaaccttcactgtcacacttgagttcagaccttcat

SEQ ID NO: 203100 - DNA, 201 bp, Homo sapiens
taatcctggctactctggaggctaaggcaggagaatcacttgaactcaggaggtggaggttgcagtgagccaagatcacgccattgtactccagcctggayaacagagtgagactctatctcaaaaaagaaaaaaaaaagaatatgacatttaagcagaaacttgaaagaggtgagagagtgagccattcaaacatctgga

SEQ ID NO: 203101 - DNA, 201 bp, Homo sapiens
aatcctggctactctggaggctaaggcaggagaatcacttgaactcaggaggtggaggttgcagtgagccaagatcacgccattgtactccagcctggatracagagtgagactctatctcaaaaaagaaaaaaaaaagaatatgacatttaagcagaaacttgaaagaggtgagagagtgagccattcaaacatctggag

SEQ ID NO: 203102 - DNA, 201 bp, Homo sapiens
cacgtggggcctagactggggaggggcaggaagccgagaactggacatgaatggaagtgttcacaggaggctgtgccacactttgtaaatcctaaaattgrgttgtagtttcctaacttattttcctcttataactgaaagtgagtggagggctaagggattgtcatctggctgagaagggagagctgtgatagcatggct

SEQ ID NO: 203103 - DNA, 201 bp, Homo sapiens
ttctgttgcaataaataccctacccatgaattttttgtttgcaattctgattatttccttctgatagagtgtattagtccagtcttatgctgttaataaaracatacccaagactgggtaatttataaagaaaaagaggttttaatggactcatagttctacatggctgaggaggcctcgcaatcatgttggaaggcgagg

SEQ ID NO: 203104 - DNA, 201 bp, Homo sapiens
gattgcgccactgtacttcaggttgggcaacagagcaagaccatgtctattaaaaaataagcctttgcttcccttgctctgtcttctcccctcttctctcrtctgccttggtcttggaggaggcagtagaaggagtaggggctggaggaagtatggagggccatgccactgctcatctgtctgcagaggtcctcgacccac

SEQ ID NO: 203105 - DNA, 201 bp, Homo sapiens
gctgaggaggcctcgcaatcatgttggaaggcgagggaggagcaaagggatgccttatggggtggcagggaagagagcatgtgcaggggaactgtcctttmtaaaaccagcagatctcatgagacttattcattatcatgagaacagcatgggaaaaacctcccttcatgaatcaattacctcccaccgggtccctcccac

SEQ ID NO: 203106 - DNA, 201 bp, Homo sapiens
gtctacaaaaaatacaaaaaaaaaaaaaattagccaggtgtggtggcatgttcctgagtcccatccactggggaggctgaggtgggaggatggcttgaacyggggaggtggatgttgcagtgagccatggtagcaccactgcactccagcctgggcaacagaatgagatccatctcaataaataaataaataaataaataa

SEQ ID NO: 203107 - DNA, 201 bp, Homo sapiens
ggggccgctggttttgcagtttgcttagagtcttttgccaggttctggagcttcagaagttcccaggaaggtaccctggacacgttcttgtgcgtgcgctygtgtgcatgtgtctgtgtgtgtatgcgtgtgcatgcccgttcccgtgtgtctgcgtacatacagcctctcacctgctttctcttccagccactccaccat

SEQ ID NO: 203108 - DNA, 201 bp, Homo sapiens
taatctaccctccctccagcccaatagtgagagggcccatcttagacttaggtcaccaaaatgtggtgaataatctctgattttagtttcagtttttgggttttttttttttgtttttttggtttttgtttgttttttgagacagagcctcactctgttgcccaggctggagtgcagtggcacaatctctgctcactgcaa

SEQ ID NO: 203109 - DNA, 201 bp, Homo sapiens
gagagaccattgaggctggagctatttttcagggctctctggtccaccccctgggaagtggcccactttggctgtgccccagttattctggtaatgaactrtgcccaggtactgccctaggcattgttccctctctctgttctgacaaccaggcacaaacttgtctccttgtatgcaaggggaaggcagtggtggagtggg

SEQ ID NO: 203110 - DNA, 201 bp, Homo sapiens
gggccgggcgccgtggctcatgcctgtaatcccagcactttgagaagccgaggtgggcagatcacgaggtcaggagttcgagaccagcctgaccaacatgrtgaaactccatctctactaaaaatacaaaaattagccgtgtgtggtggtgcgcgcctgtaatcccacgtactcaggaggctgaggcaagagaattgcttg

SEQ ID NO: 203111 - DNA, 201 bp, Homo sapiens
tgaaccctattgagctcataaacagtggggggtggagggccctttttgggacctggggtactgctgtccccagtgccttccttgagatgtaggcactgagkcctgatggatctactattgtaaatctctaccatctgtctttcttttctccagcccatcctcatccaatacccatctcatcatccatctcttttggtaaaa

SEQ ID NO: 203112 - DNA, 201 bp, Homo sapiens
ttctctctctcctctctatcttctctcttctctcttctctctcttccctctttttctacccctcctccctttctttgtcttctctttgtctctttgtctcrttctctctcctgtctctttctcttctgtctctatcttctctctttctcctctcttccctctttttctctctctcctctttctgtcttctctttgcctctt

SEQ ID NO: 203113 - DNA, 201 bp, Homo sapiens
gagggaggggatagaggagcagccgattatgcatttatcttgcaatcggtcaactgcattttgcataagatgaacatatggtagaggaagaagtgagataygcattggactcttggtggacagagggatgatttctagttttgtctttctccagaatctgtaaaggtaggattttaatttatgttgtcagggtgaaggagg

SEQ ID NO: 203114 - DNA, 201 bp, Homo sapiens
gttgtcagggtgaaggaggccatttggggagataagtaacctatcttgcagctttccatttaggaaaaaaaaagggaggcagtttttgcatgattcacttyccaagcttaactttcccctttggcatagtgagaatgtattttcctttcccgctcagaatctaccatgattagtagcagacaaagattaggacttgagtca

SEQ ID NO: 203115 - DNA, 201 bp, Homo sapiens
ggaggatctcttgaactcaggagttcaagcctgcagagagctatgattgtgccactgcaatccagccttggcaacagagcaagaccctgtctcaaaaaataaataaataaataaataaataaataaataaataaataaataataaagaaaagaaagaaatacacatcctcagcccccagattaagaaactctgggctgggt

SEQ ID NO: 203116 - DNA, 201 bp, Homo sapiens
ctctctcctttcagaatccgggaattgacatcggtgatgtctccgaaagaagagcattaaggaaaagtttaaagtgtaagaatttccagtggtacctggaycatgtttacccagaaatgagaagatacaataataccgttgcttacggggaggtaattcagaccgtgcatgcttttggcttggaatgctgttcaatatgct

SEQ ID NO: 203117 - DNA, 201 bp, Homo sapiens
gaggatctcttgaactcaggagttcaagcctgcagagagctatgattgtgccactgcaatccagccttggcaacagagcaagaccctgtctcaaaaaataaataaataaataaataaataaataaataaataaataaataataaagaaaagaaagaaatacacatcctcagcccccagattaagaaactctgggctgggtg

SEQ ID NO: 203118 - DNA, 201 bp, Homo sapiens
aggatctcttgaactcaggagttcaagcctgcagagagctatgattgtgccactgcaatccagccttggcaacagagcaagaccctgtctcaaaaaataaataaataaataaataaataaataaataaataaataaataataaagaaaagaaagaaatacacatcctcagcccccagattaagaaactctgggctgggtgc

SEQ ID NO: 203119 - DNA, 201 bp, Homo sapiens
ggatctcttgaactcaggagttcaagcctgcagagagctatgattgtgccactgcaatccagccttggcaacagagcaagaccctgtctcaaaaaataaataaataaataaataaataaataaataaataaataaataataaagaaaagaaagaaatacacatcctcagcccccagattaagaaactctgggctgggtgct

SEQ ID NO: 203120 - DNA, 201 bp, Homo sapiens
tcatgaggtctccccagtcatgtggaactgtgagtccattaaatgccttttttttttttaataaattactgaaattactcagtcttgggtatgtcttttctttttttttttttttttttttgagatggtgtcttgctctatcgcccaggctggagtgcagtggcatgatcttggctcactgcagcctccaccttccaggtt

SEQ ID NO: 203121 - DNA, 201 bp, Homo sapiens
gagtttcaccattttgcccaagctgatctcaaccctctggtctcaagtgatcctcttgcctctgcttctccaagtgctgaaattatagatgtgagccactscccccggccataattatattagctttatattggattgaatatcatatacagatgtgtagcatacaatgatgctttggtcatctgtggcctacacacgatg

SEQ ID NO: 203122 - DNA, 201 bp, Homo sapiens
attcacttatatcttgttttattttccctatatttataattctaaatttaatggttttatctatctgcagttggttttgaattgtgtttggaagggagacrtgcactattataccccatggagataggaaaggacccccaacaccatttattgaatgattctctccttgcttttggtttgtggtaccttctaggtatttat

SEQ ID NO: 203123 - DNA, 201 bp, Homo sapiens
ttaggaaaatccattacccagtccatgttttctcaaaaatatttctcaaaactcagttatattttctcaaaaaaatttgtttgatagtcagcttactcaartaagaatcccagcaaggtctacacactgcatttggctgatgtgtctctaaagtatctttcaatctgcaacatttcttctcacctttatttatttatttat

SEQ ID NO: 203124 - DNA, 201 bp, Homo sapiens
tcacaaggcaatcaatgaaagttagctcttgctatctgcagagttttagaacctgcacctattcacaggtgacggtgaggactctatagaagacagatgaytactggggaagattctacagagagatactccgcatgtgccctgtcttctctgtaacatcctcttcctgatgcctgagctgtgcagcatacgaatattttg

SEQ ID NO: 203125 - DNA, 201 bp, Homo sapiens
tagtttttcaaaatgtttacaactttcacatctctgctccatactccaatttcaggccagtatgtgggtttctgaatttctcagctggagtgcagtagcargatcgcgactcactgcaacctccgcctcccaggttcaagcgattctcctgcctcagcctcctgagtagctgggaccacaggggcacaccaccacgcccgg

SEQ ID NO: 203126 - DNA, 201 bp, Homo sapiens
aaatacaaaaaaaaaaaaaaatagctgggcatggtgacatgcgccttagacccagctactcgggaggctgaggaaggggaatctcttgaacctgggaggcrgaggttgcagtgagctgagatcgtgccactgcactccagcctggtgacagagcaagactccgtctcaaaaaaagaaaaaaaagaatctgtggtatatata

SEQ ID NO: 203127 - DNA, 201 bp, Homo sapiens
ttttctctctctcctctttctgtcttctctttgcctctttctctgtctctctctttctcttctctttttctttttctctttgtcattttctctctcctgtstctctttctcctctctctatatctctcgctgtctctctctcctctctctcttctcctctcttctcgattttgccccctcccagaatggagccatcatgaa

SEQ ID NO: 203128 - DNA, 201 bp, Homo sapiens
gagagaagtgcaacctggaaggccagctctgctgctctaccgggttgcatgagggaagaggagagcctggtcccaaatattgtcactggagatgggcaggwgatggtggcttgaactaagagggaaaaaaattggtgagaatttagtaaaggaggctgaagacccaggaggcattgagactgactctgaggtttaaaatgc

SEQ ID NO: 203129 - DNA, 201 bp, Homo sapiens
gtcgtcttggatctcccttcaccgtcttcttgtggactctctgaccctcttctgtgctgtctcctgtgctcttctcttggtttatgttcttattttggtgraacacaacacctggaagcttcttaagagagactgcaaggaagagaaaatctttcaagttcactcatgcctctaaagatggctttagcctcatcttctagg

SEQ ID NO: 203130 - DNA, 201 bp, Homo sapiens
ctcagctttttgcacgtgtacttcatttattcctcttaggaatcggaggtggtagttactattattatctcacccttttcacattgccacctccatggaaratgatggtgtttctacagcatagtggagtaaaataagacagctgccagaggtgacgagcttgggccctcttcccgggagccgtgagcactgagggggtct

SEQ ID NO: 203131 - DNA, 201 bp, Homo sapiens
tattcatctgttgatgggtacttgggttgcttctacctactgactattgcaaatagtgctactatgagcatgagtgtgcaaatatctgttcaagtccctgytttcatttctgttttgttttgttttgttttttgagacagagtctcgctctgttgcccaggctggagtgcagtggcacagtctcagctcactgcagcctct

SEQ ID NO: 203132 - DNA, 201 bp, Homo sapiens
acaaagaattgaacctttgttttcttctaagagttttatagtcctagcacttccatttaggtttatatccattgtgagctaatttttgtatatggtttgakgtagggatccaaattctttctatttttcttttttacatatatagttatcccatgagcatttgttcaagagtccaatttttcctcattgaatggttatgtc

SEQ ID NO: 203133 - DNA, 201 bp, Homo sapiens
gtcacctgtgccttcccaaaggaggagagtgtaagaaggcatgtctgaccacctaattcccatcatggtctcacctagtttttcaggtttctttggaatgsccttggccaagaagggggtccatcaatcagttggggggcttagatttgatttttgatttacagagtgtaccccacttttgagcatataaagggtgacatg

SEQ ID NO: 203134 - DNA, 201 bp, Homo sapiens
ctgaattccaacgtgagcagtagggtgaggctgaaactcccccaggagagaccttctcttatgtctgtctcttctgtctccagacttattccccagcccarggagaattagcttctgtgtgtgtctgttttgcattgctctaaaagaatatctgaggctggataatttataaagaaaagagggttatttggcttacggttc

SEQ ID NO: 203135 - DNA, 201 bp, Homo sapiens
tcacgcacctgtaatttcaggtacttgggaggccgaggcaggaggattgcttgagcccgggagttcaaagctgcagtgaatgcgctgtgattataccactrcactccagcctgggtgacagagtgagaccatcccttaaaaaaaaagttcctacgttcctacattctcagacccagtgtcctcgtttgtgaaacagagatt

SEQ ID NO: 203136 - DNA, 201 bp, Homo sapiens
gtcacgcacctgtaatttcaggtacttgggaggccgaggcaggaggattgcttgagcccgggagttcaaagctgcagtgaatgcgctgtgattataccacygcactccagcctgggtgacagagtgagaccatcccttaaaaaaaaagttcctacgttcctacattctcagacccagtgtcctcgtttgtgaaacagagat

SEQ ID NO: 203137 - DNA, 201 bp, Homo sapiens
aaattagctaggttagtgtcacgcacctgtaatttcaggtacttgggaggccgaggcaggaggattgcttgagcccgggagttcaaagctgcagtgaatgygctgtgattataccactgcactccagcctgggtgacagagtgagaccatcccttaaaaaaaaagttcctacgttcctacattctcagacccagtgtcctc

SEQ ID NO: 203138 - DNA, 201 bp, Homo sapiens
gcgattcagactctgagtccgtgttggcttagatgagtcatgatgagtgatgggcaaagaacaagcgtattttaatttgcactcagggtaaacataacatycttaaaaagcagagtttaacccagatgccttaattgctggttgcatagctcaagatgtctctgagccattccatttctctgaggagttggagtgccactt

SEQ ID NO: 203139 - DNA, 201 bp, Homo sapiens
tgggttccctgttgctccataacagtcaccaggaagcgattcagactctgagtccgtgttggcttagatgagtcatgatgagtgatgggcaaagaacaagygtattttaatttgcactcagggtaaacataacattcttaaaaagcagagtttaacccagatgccttaattgctggttgcatagctcaagatgtctctgag

SEQ ID NO: 203140 - DNA, 201 bp, Homo sapiens
tccccatccccccacacccttggaaaagttgtcttccatgaaactggcccctggtctcaaaaaggtgagggactgcttttgaagaggacactaagttttcyccttttgcatattttcccattcaccactcagtgtttaaaggctgcctccccatactttttaactttcttctctcccagaaacaatgccttgagtcatgca

SEQ ID NO: 203141 - DNA, 201 bp, Homo sapiens
tttgacaccagtaagccatcatggaggaaaggatataagagggtttgaggatgctcaagtgagataaccttcttgccgattccagcccagccctcagggcstttccatggttcagcccctgcaggggtcttcttgttgggttccctgttgctccataacagtcaccaggaagcgattcagactctgagtccgtgttggctt

SEQ ID NO: 203142 - DNA, 201 bp, Homo sapiens
ggctttgggggacccaggcctctttctctgccatctgctttgcttctcttttctatttccaactcccaattccgtttttctaattatccctgagaagtggytctcgtgatccacgtgcagagcacaggaaggcttgagttcctaaatatttcctgctgatgtatcacctaagtttatgaaatattccaaatattctgttgt

SEQ ID NO: 203143 - DNA, 201 bp, Homo sapiens
aagactgtgtggctgtccccaatccctaaagcaaggaggggactcctgggtccttccccagcagcacagtcctgtccaccaacacccctgtacgaccagaytgtgggatcatgtagattctcccttcactccctattttttgtttttttatttatttattttattttattttattttatttgagatgaagtcttgctttgt

SEQ ID NO: 203144 - DNA, 201 bp, Homo sapiens
tacaacatgtggccttttttcctggcttctttcactgaacataatgttttcaaggttcaaccaaattgtggcatatataagtacttcattctttttatgamtgaataatattctgagtatagatacagcacattttatttatctgtttatcagtttagttgatagacatttgggttgtttctactttggggctattaggga

SEQ ID NO: 203145 - DNA, 201 bp, Homo sapiens
ggtcacctgtgccttcccaaaggaggagagtgtaagaaggcatgtctgaccacctaattcccatcatggtctcacctagtttttcaggtttctttggaatscccttggccaagaagggggtccatcaatcagttggggggcttagatttgatttttgatttacagagtgtaccccacttttgagcatataaagggtgacat

SEQ ID NO: 203146 - DNA, 201 bp, Homo sapiens
ttctgctgggagtctaggcctgctgtgtgcatgctgggcgctgagcctcatgaaggagctcaggactctccatctgggatctagactttcatggaactttsctttgctcccattaccccttgcccttttctgtgcctgggaccccagccctggagcccctagtgggaggtactcagctgtctgggtggaattggcacaggg

SEQ ID NO: 203147 - DNA, 201 bp, Homo sapiens
ggaggattacttagggccaggagttcaagaccagccttggcaacatggtgagaccctgtctgtacccccccccaaaaaaaaataaataaaaattagctggrcatggtggtacatgcctgtagtcccagctacctggggactgaggcaaaaggatcacttgagcccaggaattcaaggctgcagtgagctatgattgtgcta

SEQ ID NO: 203148 - DNA, 201 bp, Homo sapiens
cacagacacacagggggaagaccatgtgaagacacttggaagatacagccatctacaagccaaggagagacgtctcagaatgaaaccaaccctgctgacarcttggactttcagcctccagaactgtgaaaaaataaatttctggtgttcaatacacccccctctgtattagtttgtaatggcaaactaatatatgaagtg

SEQ ID NO: 203149 - DNA, 201 bp, Homo sapiens
taatgagacaccttgagtcagaggcaccaagctatgctatgcccaaatttcccacccatagaaactctgggatagtaaatattgtttgggctgggcacagkggctcatgcctataattccaatgctttgggaggctgaggtgggaggattacttagggccaggagttcaagaccagccttggcaacatggtgagaccctgt

SEQ ID NO: 203150 - DNA, 201 bp, Homo sapiens
attttttgttatatttaatttccaagagcctttcttatttcctgacttttcctttttctaagtatcctgttcttgtttaatgaatatggtatctttccctygattctctgaggatgataagggggtttcccttgtgttctgcaaggggtctgtctactccttgctccaagtgtattttacctatttgtaggcttttatgtc

SEQ ID NO: 203151 - DNA, 201 bp, Homo sapiens
catgggtgacagagtgataccctttctcaaaaaccaaacaaacaaacaagtaaacggaaaatagccagccccagcacagagcttagcacacagccaggggsttaataaataattagtggctaaataagagttttggaactttttggggatgttttcccatcaccccactgcctcttaatgcctcagtttactcacttttca

SEQ ID NO: 203152 - DNA, 201 bp, Homo sapiens
ccaaactgaaacttgctgcaccagaaagcaaactgctttgtcaaggccactggctgtaggtttcagcaataccattgtcctcacagcctcactgttggacrggcctagtctcctgcttagggcgtttttctccagggctctgcaaactacacatcctgggtgcctgcataattggctgcctataggggtgccttgttatct

SEQ ID NO: 203153 - DNA, 201 bp, Homo sapiens
tgttttctctggattttgtatttaaaagcaaagcttaagtctctgacagatgcacccagctgcagtgtgagaaggcactcaaactgcaacaaagagaagaygactacaacttttagtagatacttaattttttgttgttttgtttttagagacaaggtgttgctctgtcacccaggctagagtgccgtggcaggatcataa

SEQ ID NO: 203154 - DNA, 201 bp, Homo sapiens
gtgctcttcagggacatggatctttgaagccgtgtgccaccataccggcttcgctgaagcccccatactggagggaccatgtggagagagagagagaaagvgagagagatgcccagggacccctggctgttccggcttccagctgtttgtgtctgttcagcgcaggagccagacacatgagtgagcaagcctcactccatc

SEQ ID NO: 203155 - DNA, 201 bp, Homo sapiens
tatttctttttagaaatctgtatacatccctgagaatacttttcatccatgtgtaacagatttcacttaactaatccagtcaggaactcctttttctcccwcatgggatgataattaaattcttttatattgggtgttatatttggatcatcttctgtcatcctaatttttattttcattttaatcattcttttgacatct

SEQ ID NO: 203156 - DNA, 201 bp, Homo sapiens
tccatttcttaagtgaattttgattcatttactcagtaacccagccgtttttacttttatttctttttagaaatctgtatacatccctgagaatacttttyatccatgtgtaacagatttcacttaactaatccagtcaggaactcctttttctccctcatgggatgataattaaattcttttatattgggtgttatattt

SEQ ID NO: 203157 - DNA, 201 bp, Homo sapiens
aagggaaatgtggggttggagcccccacacagagtccctactggggcactgcctagtggagctctgagaagagggccaccgtccaccagactccagaatgrtagatccactgacagcttgcaccgtgcacctggaagagccacagacactcaacgctagcttgtgaaagcagccaggagggggggctataccctacaaagc

SEQ ID NO: 203158 - DNA, 201 bp, Homo sapiens
agtctcgctctttcccccaggttggagtgcagtggtgtgatctcggctcactgcaacctctgcctcctgggttcaagcgattctcttgcctcagcctcccragtagctaggattacaggtgcgtgctactaggcctggctaattttgtgggttttgtttgtttgtttgtttgtttgtttgtttgtagtagagacagggatt

SEQ ID NO: 203159 - DNA, 201 bp, Homo sapiens
agatcaatgtctttgctttttactaaaccatattactaaattctagtgacctgattttatggtataccaccacaacagagattctatcaagttctctttaycttggtgatatggtttggctgtgtccccatccaaatctcaacttgaattgtagctcccagaatttccacgtgttgtgggagggacccagggggaggtagt

SEQ ID NO: 203160 - DNA, 201 bp, Homo sapiens
gtatactttggttatttttcccttccctgcacagctttttgtttttcctgtatttaaccattgcctttctgtttgtttccttaatttgttttctatatacygttaactaattcagctacatgctttctaccacttgtctgaattccctctcagtcctctcagcaaccttagatattctgtctgctttattttcatgaagag

SEQ ID NO: 203161 - DNA, 201 bp, Homo sapiens
ttatatgagaagggagactgcaggtgatggacatgtagtacattgtcaacagacatgagctcttattgtcactattttttaagagtcaaataaaccccacyggctatatttaagactcacagtgctgctaaatttttttctcccctgctctgtatttccaaaaatatttttggaaaaaagattcagtcttatcaattacat

SEQ ID NO: 203162 - DNA, 201 bp, Homo sapiens
caagtgatctgtctgcctctgcctcccagagtgctgggattacaggcatgaaccactgcggccgactctattcttttaaatatgccttttgtttacctctrtatctctaaatagtacactttagtcctacatcatgcattttgagatgtgggcattacttcttgactttgactatgggagacaaggtattaactgttattc

SEQ ID NO: 203163 - DNA, 201 bp, Homo sapiens
agcgtttgcttaggagcattgttaccaagattatatgagaagggagactgcaggtgatggacatgtagtacattgtcaacagacatgagctcttattgtcrctattttttaagagtcaaataaaccccaccggctatatttaagactcacagtgctgctaaatttttttctcccctgctctgtatttccaaaaatattttt

SEQ ID NO: 203164 - DNA, 201 bp, Homo sapiens
tctacctactctttagaggtaccactttatttatttacttatttattttgaggtggagttttgctctagtcgcccaggctggagtgcaatggcatgatctyggctcactgcaacctctgcctcctgggttcaagtgattcttctgcttcgacctccagagtagctgggattacaggcatgtgccaccatgctcagctaatt

SEQ ID NO: 203165 - DNA, 201 bp, Homo sapiens
atcatggtgctcttccctaccaggagtcctccccagatctgttctgcacattcattcactcaacagtatttggtgagtgctctagctgctggaaataccaygagaaatgacaggcataacttctctgctctcagggagatacctgaacatctggtggggtagaaggctccacagccacagcatggtcccacagatacaaac

SEQ ID NO: 203166 - DNA, 201 bp, Homo sapiens
ttcaagttatttgtcctccctatgcctcactttcctcatgtgtgaagtagaagcagaaagagcgtttgcttaggagcattgttaccaagattatatgagawgggagactgcaggtgatggacatgtagtacattgtcaacagacatgagctcttattgtcactattttttaagagtcaaataaaccccaccggctatattt

SEQ ID NO: 203167 - DNA, 201 bp, Homo sapiens
taccaaatgcaaaggtccattcttggaatctaccatttccagggtttccttctacgttcttctgttttctttgcttggcctttctttttctgattctatcrgttggtgtgtccagggctcagtattcaaacccctttctctttgtgtgtttctactgcccaggtcttctcctcaaggaacttgtctttaaactccatttag

SEQ ID NO: 203168 - DNA, 201 bp, Homo sapiens
attttttattttatttttttgagacagggttttgctgtgtcacccaggctagactgcattgtgatcatggctcactgcagcctccaactcccaggctcaarcgattctcccacctcagcctcccaagtatctgggactgcaggtgtgcatcaccatgcctggttaatttttctattttttgtagagtcagcgttttgccat

SEQ ID NO: 203169 - DNA, 201 bp, Homo sapiens
ctttacaaatgcaaaaccattcttcacttgagggcctttcaaaaacaaggcagtgggcaagatttggaccacggtttagcagtctcttcctcaggtcacartttagggttgtagagctgtgatttacttagcaaattctatgtgctgggtactgggctttatcttttcatatataggctcacataatcttcacaaaaactc

SEQ ID NO: 203170 - DNA, 201 bp, Homo sapiens
ttcctcaaagccaccatgctgggaagaccatgtgaacaggaactatagacacagaaaatgatgcccaaggagctcctggtgtttcaccctcactgtttcartcttcccagtgtcaaccacggatgtgaagaataccttagatgatgccagcacccagccttggagtcacccatctcagactgagtagaacagagacaacca

SEQ ID NO: 203171 - DNA, 201 bp, Homo sapiens
tgggccatatggtctctgtcataactacgcaactgtgccactgcagcgtgaaagcaggcatagacacctcataaacaaatgagtgtggctgtgttccaacyaaactttatttttggagagtaacatttgaattttatgtaatttccatgtgttgcaaaatatcattcttctctgaatgtttttcaatcctttacaaatgca

SEQ ID NO: 203172 - DNA, 201 bp, Homo sapiens
ctttttgttgtatacaaatggcaggatctcaaccctagatgggtcttctctggccaaaacccatgtcctgagtgttgatagggactcttagtgcagggcakacaggctctgatcaacaccccaagcagccctgccctccactctggccatggttaaggaaatgtttacagtcatatagagtgtcacacagttttgctactc

SEQ ID NO: 203173 - DNA, 201 bp, Homo sapiens
ctgatcattcctctgcttgaattgggcatcgtaataatgcctttcctacatatcatggccactttcccttcctgtctccaattgtatagggaattgcaggrtagggaagagaggactccaggagtatctgattttggtctagagactgataaaaatgggaagtccagggatcagcaggtgccaccagggcagatgtaaatg

SEQ ID NO: 203174 - DNA, 201 bp, Homo sapiens
atgggagcttcaattcaagatgagatttgggtagaaatgcagccagaccctatcagtgccttttcttcccttctgtcccctccacttctccatccttctcytcatcatcccatctccttgcctgtctttacctgtcctctctgaacaatgcaaatatttccatttaaatctattatatgttctctttctctctctaataaa

SEQ ID NO: 203175 - DNA, 201 bp, Homo sapiens
aacaaaacttttggtcccttagatgaaaagcactaattataaactctctggagttgtggcatgggctgttgtagataattaatgtttcagttaatagaatkctactacagaagcaagacatggagagatagatggtaaaaaacaaacaaacaaacaaaaaccctccacaaaattctgtttgctttcttcaggggaccagtc

SEQ ID NO: 203176 - DNA, 201 bp, Homo sapiens
aacccgggaggtggagcttgcagtgagccaagatcgtgccactgcactccagcctgggcgacagagcgagactctgtctcaaagaaaaaaaaaaaagaccratcagtagcagaatcaaccagcctcactttttgctttttcttctcatcagagagagagccctttcctgaattttgccattgatcaattgtgttgtgttgt

SEQ ID NO: 203177 - DNA, 201 bp, Homo sapiens
caaaaagatctctcatccatttctgtcatgtgaggacacagcaaaaagacagtatctatgaaccaggaagtgagccctcaccaaacacagaatgtgctggygccttggtcttcaactccccagcctccagaattgcaagaaataaatgtttgtggtttaagccacccagtctatggtatttttgttatggcaggctgaaca

SEQ ID NO: 203178 - DNA, 201 bp, Homo sapiens
ggttaaaggattgtaaacgcaccaatcggcaccctgtcaaaacagaccaatcagctttctgtaaaatgggccaatcagcaggatgtgggtggggccagacmagggaataaaagcaggctgccgagccagcagcggcaacccgctggggtcaccttctactctgtggaaggtatgttctttctgtctttgcggtagctttcg

SEQ ID NO: 203179 - DNA, 201 bp, Homo sapiens
cacaagctttttgaagtcctcttgtatgtgcagagggatgtatgccaaatacacattgtatatgtattatataagtttaaatcatggagaacagtatcatkgaaagtctgtagaaatctaaatttgtagcaaatatctagaaataatataacaaacttatgatagtggttagctaactggagcagtaggaaagagcttggg

SEQ ID NO: 203180 - DNA, 201 bp, Homo sapiens
cagcactctcttgggccttcagttctacaatgtcggacaacccatactcccagagaagctgccaatctggacttctgcttaacatggatttgttttgtgtrgtaatttgtgccagtccaccatcactgtggctggtctcatgaatccagctggaagctcggtgattactattattgctacagcactggggaaaaatccaag

SEQ ID NO: 203181 - DNA, 201 bp, Homo sapiens
tatgatatgatatgggcttccaggaatggaatctccacttacaacattacactcggaggaaacaaagaattgatttataattacttgatttgctacctttrtccagtaattgattaggttaggggttggcagacttctcctgaaacaggctggagagtaagtattttcagctctgtgggccatatggtctctgtcataact

SEQ ID NO: 203182 - DNA, 201 bp, Homo sapiens
gtaattttttttcttttttcttttttttttttttgagacagggtcttgctctgttgcccaggctggagtgcagtggcacgatcatggctcactgcaacctygacccccctgggcgcaagtgatcctcccacctcggcctcccaagtagctggggctacagtcatgccacaaccatgactggctgatttttgtattttttga

SEQ ID NO: 203183 - DNA, 201 bp, Homo sapiens
acacaacattccaccatgggtaagtgtcactcgcacctggaatttgggagggcatagtgagaaatgagctgacacccactcactggtccttgggagccttrtgtgcccatttatgagtgtagacttgatcttgaagacacctggagctcaaacacgagcatctgtctgaaatggagttcgttgaaggtggttttgtgggca

SEQ ID NO: 203184 - DNA, 201 bp, Homo sapiens
gaaaacaggcagtgtgtgagacccgggagagctggcctgcatgggaggtcctttatacacttggtaggatgccccagtcagtattttggagtttaacttcygtgcatgaagttcaatggactcccaggctcttaagaacttcagcttaaaggaaagaggagagaaatgtttcttgagtgtcttttatgaacattgaatttc

SEQ ID NO: 203185 - DNA, 201 bp, Homo sapiens
ggttgattctgtgtcttggctattgtgagtagggctgcaatgaacatgagagtgctgatatcttttcaacatactaagttcagttccaatggatatgtacycagacgtgggattgctggatcatatggtggttccatttttaattttttgaggagcctccatactgttttccatagtggctgtattaattttccatttcca

SEQ ID NO: 203186 - DNA, 201 bp, Homo sapiens
ggaggtcctttatacacttggtaggatgccccagtcagtattttggagtttaacttccgtgcatgaagttcaatggactcccaggctcttaagaacttcarcttaaaggaaagaggagagaaatgtttcttgagtgtcttttatgaacattgaatttccgactgtggtttctgtggcggctgcaggaggtttcagctggtg

SEQ ID NO: 203187 - DNA, 201 bp, Homo sapiens
catccatccatccaacataacacacttgtagactatagagatataaagaaaaataagaccatgtcgccatcctcaaggggtttatggtactgtaatagaasctcctcttttttgtcttccttacagaaaagtgtgcatttcttgctttctagtgagttgagataatagttaaatccattagattaatattgacctttcttg

SEQ ID NO: 203188 - DNA, 201 bp, Homo sapiens
gaggggagcagatttgaacagaagggatggttagcagttatgtccccagatcctttcttcaactctgcacagccagagactgccctttctcatctggcagmatatgggaggtttactccctagagaagatgaactatagttcatagaggtggccttggacagaggataacaaggctgcatatgaaatgggatgacttccca

SEQ ID NO: 203189 - DNA, 201 bp, Homo sapiens
catacttatctatggtgagaacatttaaaacctactctcttagcaattttcaaatatgtgatactttattaataactgtagtcaccgtgctgtgatatttycaaaacttatccctcccgtcaaaccgaacctttgtaacaaaaccccacggccactgccaccagcctttggtaaacaccattctattctctgcttctataa

SEQ ID NO: 203190 - DNA, 201 bp, Homo sapiens
ggaggaacccatggcccaatattgccgtgtgatgtaacatgatggcttgaacataccatttacatgtgaaccttcctgaaaccctattaaaatgatagcaraggaatagagagaatggcaacttacaaggaaaaaaaaccacaacaggttgggtgatgatcacagggaagagagacatgtacaaaattttggaagatggaa

SEQ ID NO: 203191 - DNA, 201 bp, Homo sapiens
catccaaaagcaataactaaccgaaatgggtgtagtgagtatttgggcattgctgcagtaacagaaagaccttcagtttcttggcatcatttccttcattyattgagttatgttccatgctctttgctgacctggactctacttactaaacatggtccttcgctagagagatcgagaagaagccaaaaagtctttgagctt

SEQ ID NO: 203192 - DNA, 201 bp, Homo sapiens
tttcatttaactttatgtcacaaagattttttccatattagtatttttcttttttaaaatgtagttgaatcaaacatttaattaagtaatgattgtatatmtttattaggtacactgtaatgttttaatatctatatacatgatggaacaattaaatccatctaattaacatgtccatcattgcacatacttatctatggt

SEQ ID NO: 203193 - DNA, 201 bp, Homo sapiens
atctgagaaagtttcttgtttgagataatgcttgaaggaccattaagggatagaaagttgaagatggggggccaggcgtggtggctcacgcctgtaatccyggcactttgggaggctaaggcgggcggatcacctgaggtcgggagttcgagactagcctggccaacgtgatgacaccctgtctgtactaaaatatacaaa

SEQ ID NO: 203194 - DNA, 201 bp, Homo sapiens
ctatagagttggtccaaattacatcatctgacagtctcagaggcagaagtcattattatcctttatgataaattcctaagagtagaatttctaggtctaasacatgtttatttttaagacttacgagacagactgccaaattactttccagaaaagttgtttttcatattgaatccttgttctttttcttcccttctccta

SEQ ID NO: 203195 - DNA, 201 bp, Homo sapiens
ttagctgagaaacctgttaaatctctctctctaccaaataagcatgtattcatttagaatcactaggaaaatatacatcacccctgctggaagctattttrtgtccctggacttttgctctccaaaacatctgtctgtttttatttcctgatgctctctcattagcctttcttattaggacattggcaaataaacatggcc

SEQ ID NO: 203196 - DNA, 201 bp, Homo sapiens
gatcgtgccactgcactccagcctggatgacagcgagactctgtctcaaaaagtaaaaattaaaatttaaaaaaaagcttaccatttgcatctgaaccacwgttcagactgtttttggatggggagtagtccatgggccacgcccctatctgggggcactgagggtagagaagcagggcctagaagaggggtctagaaggg

SEQ ID NO: 203197 - DNA, 201 bp, Homo sapiens
gagaagcagggcctagaagaggggtctagaagggtcaagaggagttggctggtggagaagaaggaaagattgtttcagagagaggaccctagcagaggcaycaagcaggaagtgcatggcacctgtggagtggccagtggcaagttagggttctagcagagagtgagggggctgaggaagaggggaggccaggcaggagga

SEQ ID NO: 203198 - DNA, 201 bp, Homo sapiens
agacaatattataacaggagtagagaaaagaaagtgaaactttcacccacagtcatccataacagttttttcaagtgtacacatttctgtttaaaggtatrtgaagtctgcattgttttaattctagcttagctttagttgcatatttgcaatttttcatttaactttatgtcacaaagattttttccatattagtatttt

SEQ ID NO: 203199 - DNA, 201 bp, Homo sapiens
gttcgagacagcctggccaatatggtaaaaccccatctctactaaaaatacaaaaattagcccagtgtggtagcacgcacctgtagtccagctactctggmggctgaggctggagaattgcttgaacctgggaggtggaggttgcagtgagctgagatggcactactgcactccagcctgggcaacagagcaacactcttg

SEQ ID NO: 203200 - DNA, 201 bp, Homo sapiens
acaaacttatgatagtggttagctaactggagcagtaggaaagagcttgggattggaaaagggacatggcgaccccacattaatctgtgaaatttaacttwaaaagtgtttgaactaaatacagactaatgttaagattttataaagcaaagtaatggtgtttattttattatttaaaaatttttgttatatattttagat

SEQ ID NO: 203201 - DNA, 201 bp, Homo sapiens
tgtgaaatttaacttaaaaagtgtttgaactaaatacagactaatgttaagattttataaagcaaagtaatggtgtttattttattatttaaaaatttttrttatatattttagatgttttattatgaacatattaaaaatccaaaacaccccagtactaacagacaaaatataaattgggaaaggttgaaacatatgtca

SEQ ID NO: 203202 - DNA, 201 bp, Homo sapiens
ccaatccaccaacgaggttccgaagcttatatactgtcttgaggttatagaaaggatgcatggccaaaaacaggttatggtggtaagtcagcttttattgraaggacagtttatggtggcgggagaaagaaagaggcttggctagcaaaggtggccttgttatgtagatgaagtctcacatggtagcagccctcagagaga

SEQ ID NO: 203203 - DNA, 201 bp, Homo sapiens
agtgagtgtaggcatgggctcctctacccagcatggttctgccaggcatctgtgatgttgccccagttatctggatgttcttgactgggccccagttcacyttcatattgaagaatcacgctccctggtaaagagaaggaaatgagttttgattggtgcctgtgttagtccattttcacactgctgacaaagacatactta

SEQ ID NO: 203204 - DNA, 201 bp, Homo sapiens
gtatagattttaaagcagctttctctaaacaggatttggatatactcccacatttctccttgggcggagggagaaaggatggatgttctgaacaacacatrttttaaaaaacccactgccaggcaagattaaaacctttgcctggaagggagtcggaagattctctgggttccagtaaatggtctcatgcctatttttccc

SEQ ID NO: 203205 - DNA, 201 bp, Homo sapiens
ggtgaattatgtggtccgtgaattctttctcagaagctgatggctatcggatgaccagtccttcaacaagatgaagacagattgagtatcaattattggtycacaatggcctggaacgtttctctctggttaaccctgagattttgcctgtcccttcttttgtcagagcagcacagagtacagcaggtgatccaatcgggg

SEQ ID NO: 203206 - DNA, 201 bp, Homo sapiens
ggctgggtgcggtggctcacgcctgtaatcccagcactttgggaggctgaggtgggaggatcacgaggtcaggagttcgagacagcctggccaatatggtraaaccccatctctactaaaaatacaaaaattagcccagtgtggtagcacgcacctgtagtccagctactctggaggctgaggctggagaattgcttgaac

SEQ ID NO: 203207 - DNA, 201 bp, Homo sapiens
gaacagccttgtgtccggccaagcttttccactgtggagcaggctgcttttccactgtgagcttttgtccctggaagcaaggccctgggggaccacctgcmgggtgccgggagcactgggatctgcctgccctatttcaggttgtccatgcatgcattcattcctgtgatatggatgggattcccattgcccggtgttggg

SEQ ID NO: 203208 - DNA, 201 bp, Homo sapiens
ggaggagggatggatagaggagtgactgataatgaagatggggctttggggtagaagtgatgaaaatgttccaaaattggtttttgtgacattgcataacwctatgactatactaaaaaccattggcttgtacacagcaagcaggtgaattatgtggtccgtgaattctttctcagaagctgatggctatcggatgaccag

SEQ ID NO: 203209 - DNA, 201 bp, Homo sapiens
tgacagtggttcctccctgctgtatgttaggtggtcctataattagtgacattgctcatgaataactaattaaaggcaatgattaacaatttagcaatccytaatccaacatataatttgataataaattataaggtatgggtgctgttagagcctgttagactcctttagttgaaagggatgccttggatatatagttgc

SEQ ID NO: 203210 - DNA, 201 bp, Homo sapiens
catttattttctttttgtcttgcttaatagcaaaagcatttaatattatgtatttccctcaagtatggatcttgctacagctcataagtttttatatgtartgtttgagttgtcactgttttctagatagtgtttaattccagactttctttcctctttggtctaagagttatttagaagtatttttaaaaaccaaatcaa

SEQ ID NO: 203211 - DNA, 201 bp, Homo sapiens
gctatcctcctacctgagcctcctgagcatctgggactacaggtgcacaccactatgcccagctaatttttaaattgttttgtagaggtggggtcttgctrtattgccctgtctgatctcaggctcctggcctcaagccatcttcctgccttggcctcccaaagtgctgggattacaggtgtaagccaccacacttgcccc

SEQ ID NO: 203212 - DNA, 201 bp, Homo sapiens
ggaggctgagacacgagaatcacttgaacccagcaggcagaggttgcagtgagctgagattacaccactgcactccagcctgggcaatggagtgagactckgtctcaaaaaaaaaaatgaacctcttctagattctctattccttctatcagccaatgctatccaggttcccttgaggcagtgccctgcctgtcattaaat

SEQ ID NO: 203213 - DNA, 201 bp, Homo sapiens
tgaaaagttttccagggcaaaaggagcataaagtgcagacctttattctgtagcttcagtgaagtataattagataaattttaattaaattaaaataattmatcacacagacaatattataacaggagtagagaaaagaaagtgaaactttcacccacagtcatccataacagttttttcaagtgtacacatttctgttta

SEQ ID NO: 203214 - DNA, 201 bp, Homo sapiens
ctttgaagaaagattttcctttaccaaagctcttctagattcttgactgggtgcagtgactcacacctgtaatcccagcactttgggaggtgaggcaggtrgatcacttgaggtcaggaattcaggaccaacctgaccaacatggtgaaatcccgtctctactaaaaatacaaaattagctgggtgtggtggtgtgcacct

SEQ ID NO: 203215 - DNA, 201 bp, Homo sapiens
ttactccttatgacatgtttgtttcaaacatattataatgttcaatgaagaaaatcctcttttattcattcctttcccccaaatagtatttttttctctcrtttttttctgttttaaattgcattttacataaaacaatataaataagcaatgaaaagttttccagggcaaaaggagcataaagtgcagacctttattctg

SEQ ID NO: 203216 - DNA, 201 bp, Homo sapiens
atagttcactgcagccttaagttcctgggctcaattgatcctcctgcctcagcctcccgagtagctgggactacaagcatgtgccaccatgcccagctagwttatttttatagagacggtgtttcactatgttacccaggctggtcttgaactcctagcctcaagtgatcctcctgcctcaccctcccaaagtgctgggat

SEQ ID NO: 203217 - DNA, 201 bp, Homo sapiens
tttaccagaagtcaggcagatgacagcactgtgcttcctgtatggcctccagaaatgtgagccaattcaatctcttttcttcataaattacccagtctcgrgtatttgtttatagcagtgcaagaatggtctaatacagatttgaacttgaattttaaaattaaaaaattttttgagacggggtcttgctttgtcacccag

SEQ ID NO: 203218 - DNA, 201 bp, Homo sapiens
ctcagataaaacaaatgtaaggtgttcgtctgttctcatgctactaataaagacatactcaagactgggtaatttataaaggaaagaggcttaattgaccygcagttcagcatggctggggaggcctcgggaaacttacaatcatggcagaaggagaagcaaatgtgtccttctttacatgggggtagcatggagaagtgt

SEQ ID NO: 203219 - DNA, 201 bp, Homo sapiens
cactgcactcaatttgtagtcttcccaccctttccacctgagtctccaaagtccattgtatcattcttatgcctttgcagctgtagagcttagctcccacrtatgcgtgagaacatacaatgtttggtttttccattcctgagttacttcacttagaataatattatagtctccaatccctttcaagttgctgcgaatgcc

SEQ ID NO: 203220 - DNA, 201 bp, Homo sapiens
atatataacattctattgaatattttttcactcatatctttatatgttttgatttgatatttattttctgaatccacacttctaaaggtatatagtagagrgatatttttggagattcttgatacgtattataatattttcctccagaaaatctatagtaattctactcttgttagaattttactagacccttccaatact

SEQ ID NO: 203221 - DNA, 201 bp, Homo sapiens
ggttttctgagaaagaaactcagataaaacaaatgtaaggtgttcgtctgttctcatgctactaataaagacatactcaagactgggtaatttataaaggraagaggcttaattgacccgcagttcagcatggctggggaggcctcgggaaacttacaatcatggcagaaggagaagcaaatgtgtccttctttacatggg

SEQ ID NO: 203222 - DNA, 201 bp, Homo sapiens
gtaatatgcacttgctgggctttttccttgcctctgggttctccatggagtgcgctgttgctggtgtctcttctggagcatgtaggggcctgtcggagagsggggccaagctactgtcctcatatgttcgaggacatttacagacactgatctctcttggtatccaaatcaaactcagcattaacaggctagtttccctcc

SEQ ID NO: 203223 - DNA, 201 bp, Homo sapiens
aattccctgataccgtctgggaggcctgatggttggttttctgagaaagaaactcagataaaacaaatgtaaggtgttcgtctgttctcatgctactaatraagacatactcaagactgggtaatttataaaggaaagaggcttaattgacccgcagttcagcatggctggggaggcctcgggaaacttacaatcatggca

SEQ ID NO: 203224 - DNA, 201 bp, Homo sapiens
gagcaacactcttgtctcggaaaataaataaataaataaataaataaataaaggagtagagtttatagtttagttaatagtgttctaccacttcctaaatkttggtaattgtcctatgattatataagacattattaacattagaagaagctagatgaaaggtttgtaggaaatctgtactatttttgtaacttttctgta

SEQ ID NO: 203225 - DNA, 201 bp, Homo sapiens
tgtaatatgcacttgctgggctttttccttgcctctgggttctccatggagtgcgctgttgctggtgtctcttctggagcatgtaggggcctgtcggagakcggggccaagctactgtcctcatatgttcgaggacatttacagacactgatctctcttggtatccaaatcaaactcagcattaacaggctagtttccctc

SEQ ID NO: 203226 - DNA, 201 bp, Homo sapiens
ttgggcttaatggtttttctttgtttttctaattttaattttaaagagtgtgcccactgttttgatttgcatttctttaattactgacatcattaaatccrttttcagtaattggcttattaaaggagttctgtttatgtgttcgtgtatgtgcaggaaactggtaccatattttttctttgtatgggggtgtgtgtgttt

SEQ ID NO: 203227 - DNA, 201 bp, Homo sapiens
atctattgaagttttagtgtattgtctttgagtctattttctatacagattatgagcctatgatatctcactttttccctttttcatttaacattaaatcrtgagtattttctgatgttattgatgatctgtttccattgttggaaatttaggttattttcaatttttcattattatatataacattctattgaatatttt

SEQ ID NO: 203228 - DNA, 201 bp, Homo sapiens
ctatcacctccattatgcatcaattaaaaataatagtaaaagcaaaaaaaaagtatttacctgctccaaaagttttctccaccctcttttattattattaktttgtgatgagaacacttaacataagatctacccccttagcaaatattcaattatacatacaatattattaactataggcgctatgttgtagctacatgt

SEQ ID NO: 203229 - DNA, 201 bp, Homo sapiens
tgggcatggcggtgcacacttgtaatcccagctactcaggaggctgaggcaggaggatcgcttgaacctgggaggcggaggttgcagtgagctgagattgygccactgcactccagcttgtgcgatagggcgagactctgtctcaaaaataaataaataaataaataataaatagaagtaagccactcaagctcagggtat

SEQ ID NO: 203230 - DNA, 201 bp, Homo sapiens
aatattctttcctgctcctacatagctatgataactctataatagtgcacagtttaatgtacctttattgcttttccattttctatcacttagttattagktcgtttctatttttttaaaaataatgaatgtttctatacctagcatctagactcagaaaacaaaacaaaactcaactcttttttccttctttaaaataat

SEQ ID NO: 203231 - DNA, 201 bp, Homo sapiens
acctgtgcatgtgtctttatgatagaacaatttatattcctttgggtatatacccagtaatgggattgctgggtcaaatgggtctgctttgagttctttgyggcttcaccaaattgctttctacaatggcggaactaatttacattctcaccagcagtgtataaccattaccttttcttcacaacctctccagcatctgtt

SEQ ID NO: 203232 - DNA, 201 bp, Homo sapiens
tgggtttgaagataagtatatactcacaaaactaacaccacaatcaatgctataaacctatcacctccattatgcatcaattaaaaataatagtaaaagcraaaaaaaagtatttacctgctccaaaagttttctccaccctcttttattattattattttgtgatgagaacacttaacataagatctacccccttagcaa

SEQ ID NO: 203233 - DNA, 201 bp, Homo sapiens
aaactgaggtccagagagctgaagaagggcttcttcaccaacccggaagaaagccatttgaaatattcccgtgttcggctgctaaccctggtggctctctkccccacactcctgttcctccatctttctcacaccttcctttccaagtgtggagtctatgagttattgagctgacaagcctggggcagtgtcaggggtaag

SEQ ID NO: 203234 - DNA, 201 bp, Homo sapiens
acatattacaaaattacagtaatcaaaacagtgtgatactggcatgcagacagacatatagaacgatggaatagaaagaccagaaataaacccttcatgtktgaggggaacatcacacactggggcctgtcatggggtgggtggagaggggaggaacagcattaggagatatacctaatgtaaatgacgagttaatgggtg

SEQ ID NO: 203235 - DNA, 201 bp, Homo sapiens
atctgtcctggactacaaaagatttgcagaacctgcctggagacacgtctttgtattaactattgcaattcacaccttctctgttgaagggcttggagccyccttgtgctaatgtggcagcctttctgcctcctgtgggtaaggactgcagtgaaatcagatcaccgtgactgaacgcagttctgagccagctgtcgactt

SEQ ID NO: 203236 - DNA, 201 bp, Homo sapiens
attagctgggcatggcggtgcacacttgtaatcccagctactcaggaggctgaggcaggaggatcgcttgaacctgggaggcggaggttgcagtgagctgrgattgtgccactgcactccagcttgtgcgatagggcgagactctgtctcaaaaataaataaataaataaataataaatagaagtaagccactcaagctca

SEQ ID NO: 203237 - DNA, 201 bp, Homo sapiens
tgcatctcttgggctgtgcatattgtgataaggtgatgggtattgttgcttactgggaggagaaagtattagtttacttatgacttttaatattagtttartggtgatttctaatattactgtctttcttattaaaagcaagccactcaatggtcgggtgtggttcatgcctgtattcccagcactttgggaggctgaggc

SEQ ID NO: 203238 - DNA, 201 bp, Homo sapiens
ctcagatgcggaagtgcactggggaccctcagggaccgtcagggtttggcagaatggttctacatgtgcaccctggtatctccagccatgtcagtgtgaaygaagacagagattttgtactcttggggtcatagcgtgactggaggctgcatctcttgggctgtgcatattgtgataaggtgatgggtattgttgcttact

SEQ ID NO: 203239 - DNA, 201 bp, Homo sapiens
cgtaaggaccactcctgtggagtgggagctaccagggcaagagtttatcaccaacagtgccttggacctaatagtaacttcataaatgtttactggatagrtataagtcccctagccttggaattgctctgaaacccaggatttcttaataaatgaagtaatctgataactgagataagcagttttgggtggctttgaaat

SEQ ID NO: 203240 - DNA, 201 bp, Homo sapiens
catgttggcttgaaagccccatgtctttatcagtaagtctggcccgtggcttcgtgcaagatgtttgtagatggtgtgtttgtattgatggagcatctgcyctgggtcagcctgcactgcatgctcaaccattagagagcacccatgtaaataattctagaccaccttccttgggatcctttgaccagacacattttggca

SEQ ID NO: 203241 - DNA, 201 bp, Homo sapiens
atccacacacacatccatccactaaccccatccattcatccatccatccatccatccatccatccatccatccatccatcctgcctacccttctgctcatyaatccattcatctgctcacctgatccacccgcccacccactcaccccatccaccgacccacccatccatctgtccatccttccacccatccatccatcca

SEQ ID NO: 203242 - DNA, 201 bp, Homo sapiens
tagtcccagtgtgtctttatcagcagcgtgaaaacagactaatacacttggcaattggtatttatttatatgtttcatagatgtttatggttttataaatacatagtgttctctggtttgcaattttcggtgtgcctttgacattttatgttaactatatatccatttcttaagtgaattttgattcatttactcagtaac

SEQ ID NO: 203243 - DNA, 201 bp, Homo sapiens
ccccataaaaaaattaaaaataaaaattagccaggagtagctgttactggggacgatgaggcgggaagatggcttgagcctggcagttcagtgttgcagtsagctatgattgcaccactgcactctagcctgggcaacagagcaagaccctgtctccaaaaaccaaaacaaaacaaaagaagaatatgaaacgtaaaacaa

SEQ ID NO: 203244 - DNA, 201 bp, Homo sapiens
ctcatccatccacacacacatccatccactaaccccatccattcatccatccatccatccatccatccatccatccatccatccatcctgcctacccttcygctcattaatccattcatctgctcacctgatccacccgcccacccactcaccccatccaccgacccacccatccatctgtccatccttccacccatccat

SEQ ID NO: 203245 - DNA, 201 bp, Homo sapiens
caccatgttgaccaggctggtcttgaactcctgacttcaagtgatccgcccgccttggcctcccaaagtgctgggattacaggcatgagccaccgtgcccrgctggacaagtgggatttctgaagtcaaacaggaaacttgaacacttagttattttttttccagagataaggtcttcttattttttattttatttattta

SEQ ID NO: 203246 - DNA, 201 bp, Homo sapiens
caagcaattctcctgcctcactttcctgagtagctgggactataggcatgtgccaccacacctggctaattttttgtatttttagtagagacagggtttcrccatgttggccaggctggtctcgaactcctgacctcaggtgatccacctgccttggcctcccaaagtgctgggattacagacatgagccaccacgcccag

SEQ ID NO: 203247 - DNA, 201 bp, Homo sapiens
tttctgtgctttgtgaagttagctattatagaatgtaaaacgtaaaatgcttgggcatgttggcccacacctgtaatcccagtgctctgggaggccaaggygagggaattgcttgaggccaggagttcaagaccagcctgagcaacatagtgagacactcccccataaaaaaattaaaaataaaaattagccaggagtagc

SEQ ID NO: 203248 - DNA, 201 bp, Homo sapiens
gaagtgttcttttgagtattttgtctgttacttcagtggtttcagcgggaaaagccagtgtggtctctgtttctccgtcttggttcgatgtggaagtcacygaattgaatttttacataatgggtttttatatagtttgctgcactatatttatttatttgagacagggtctcacactgttgctcaggctagagtacagtg

SEQ ID NO: 203249 - DNA, 201 bp, Homo sapiens
tttggcaagaacactttaagctctgctatgaacttcctagtgctgacattgggagatacataatgtctggttatctcactgtttctgatgttaggattcarcagcaggttcaggtgttgtcagcctgattgattcattataaagctccccatcaatctttcacttaattaatggttttagcagctaccaatgatcactgcc

SEQ ID NO: 203250 - DNA, 201 bp, Homo sapiens
tagactctacactcattctgcatttataagctgtaattcttccattaaaagtaacttttcctcctcaactatttgtgtattctgaaatacaattcaaaccrggaaagcaggataaatgcttgatttcttctttttatttaaacatcttcagaataatgagttggtgtcatagcaccctcttaagatgaccaatgaggtttt

SEQ ID NO: 203251 - DNA, 201 bp, Homo sapiens
aaccatgcccgtacatgtatttcatgtactacactatctcatatatagagaactgtagttatgtaataaacaaaaatgtgtttgaaacagcatgaaattgratttcctcatccataaattgtattatatttatgtcgaagttatagttcaagaaatagaactgcaatgttgatatttttataaatgatgtctaatgtattt

SEQ ID NO: 203252 - DNA, 201 bp, Homo sapiens
tcccagttacctgggaagctgaggcaggaggatagcttgagcccaggaggttgagggtgcagtgagccgtgattgcaccactgcactcccacctgagtgasagagtgagatcctgtctccaaaaaaaaagaaagaaaaaagaaaaaaaaaggactagagagagaacacaatcagggagggtggagaaggatactggggaca

SEQ ID NO: 203253 - DNA, 201 bp, Homo sapiens
ttacctgggaagctgaggcaggaggatagcttgagcccaggaggttgagggtgcagtgagccgtgattgcaccactgcactcccacctgagtgacagagtsagatcctgtctccaaaaaaaaagaaagaaaaaagaaaaaaaaaggactagagagagaacacaatcagggagggtggagaaggatactggggacaaagcca

SEQ ID NO: 203254 - DNA, 201 bp, Homo sapiens
cccatcccactctatccctcactcttcgcttcccatgtctggactctgatttagtaccattttccctgggtggtcctgatactcagtttatttgaaaaccrtggctgaaaatctgattccttgtagcttgtactcaaacaacaattcaagttagaaagcattgaaataccgagacagtttcagagaggctcaaggaagccc

SEQ ID NO: 203255 - DNA, 201 bp, Homo sapiens
gttagtgaaagctgctcttttttttttcctccttaaactctcttcacctcttgtttgcaagggccctctgtaaatgggtcatgtaccacgcaatgcataartattcagaaaggtgcttcctgcatgtccttctgaagagctgtgctttgcagagtttttgtgacttcatcgttcaaatgcaatgtgcacatctgttgattt

SEQ ID NO: 203256 - DNA, 201 bp, Homo sapiens
tataagagaagctgaggctcataaaaaagtgacctacttgaagaagatgaatatttaaaataagagctttaaaaataatttgcttcgcattggtggaccayagctcaaaataacagaaagcctaacagaaagacaggtttttcagggattgggaagggcagctggcactgtcttgagggcaatacttgaagtacccagggt

SEQ ID NO: 203257 - DNA, 201 bp, Homo sapiens
cactgatgtgtccaaagcttttgctctgattgatgtggagaggcttaggagggttttgaactcaaaaggagtgacatgctccaattcaagtgctttgtaasgatgactctactgcatggaagacgcactgtggaggacaagtgtagaagcagttaggaagctattgcaatgatccaggcaagggaagatggaaatggcaac

SEQ ID NO: 203258 - DNA, 201 bp, Homo sapiens
tgcatttgcatttttgtaaaatttgaggtcctgtttatctgttaaaaaccatttatcagttgattaattcaattgttgatttgcatacatttttaatgtcrcgaaggaattatctttgtctttaatatttattacgaatatgctttccacagactcatttcttacctttcagtgttgatcaattttttggatgggatgggc

SEQ ID NO: 203259 - DNA, 201 bp, Homo sapiens
attataatttaaaaaccttgttaatttgatagattacaatcacaccctgttttagtttttattttcttgattggtaatgagatcgaatatttttccaaatrtcatttatttgcatttgcatttttgtaaaatttgaggtcctgtttatctgttaaaaaccatttatcagttgattaattcaattgttgatttgcatacatt

SEQ ID NO: 203260 - DNA, 201 bp, Homo sapiens
ggcttgtgaggggaagttagcaagtactggggaagggaaagggaaaatccagggcgaatgagtaagagcacacagaataaagaggaaaaaagcatgcttgrtagtcttttagctgtctttttcatcatgcagtattggacacattatatgtatgacctatatatgtcaggctgtaatcgtacactgaggaacagctgtgcc

SEQ ID NO: 203261 - DNA, 201 bp, Homo sapiens
taccatgcctggctaatttttgtatttttagtagtgacggggtttttccatgttggtcaggctggtctcaaactcccaacctcaggtgatctgcctgcctyggccccccaaagtgttgggattacaggcgtgagccaccgcgcacggccacgaacatctttatatatcagacaaaaatagtcctatgtggaacttttaggc

SEQ ID NO: 203262 - DNA, 201 bp, Homo sapiens
tatttcataagttacagtaatattaacagatgattaatatgcactttaaaaagactcaagaaagtagagtcatgatcatgagtcattaatgtgacatgcayctctgttgtacaaaatagaatcaaatgccaatgatgtctttttaatgtgtcttaacttacggaatgcttaatttgttaatagttgatggggatatttaat

SEQ ID NO: 203263 - DNA, 201 bp, Homo sapiens
atggcacgatctcagctcacagcaaactctgcctcctgggttcaagagattgtcctgcctcagcctcccaagtagctgggattacaggtgcctgctaccaygcctggctaatttttgtatttttagtagtgacggggtttttccatgttggtcaggctggtctcaaactcccaacctcaggtgatctgcctgcctcggccc

SEQ ID NO: 203264 - DNA, 201 bp, Homo sapiens
gaaatgtttctttggtaaactggattctagatgaatatgtttcattctgtttgctggtagtacaatttttatatttcttaaagtgtaaaatctgctcctcktctggtgtttcctatatcagcttattataatattgatctcatgcttttacaagctaataccctctgtcttttttctcacatccaatagctgtccgtagct

SEQ ID NO: 203265 - DNA, 201 bp, Homo sapiens
tgcagtggagtgccttcggatgcccagcaaacatctgtaatgattgtctctgggtgtgtaaggttctaagcaaaaagttagcttgtatttcataagttacrgtaatattaacagatgattaatatgcactttaaaaagactcaagaaagtagagtcatgatcatgagtcattaatgtgacatgcacctctgttgtacaaaa

SEQ ID NO: 203266 - DNA, 201 bp, Homo sapiens
cctgtctccaaaaaaaaagaaagaaaaaagaaaaaaaaaggactagagagagaacacaatcagggagggtggagaaggatactggggacaaagccagggcrggagtgagtgttcttggagcttgttctgcagaggcaacagggtaccaggccagcgaaaggagtggcaggaggaggcgggacctggtctttttccttcctt

SEQ ID NO: 203267 - DNA, 201 bp, Homo sapiens
accacttcactccagactggtgacagagcgagactgtctcaaaaaaaaaaaaaaaaaattagctgggcatggtggcacacacctgtagtcccagctactcrggaggctgaggcaggagaatcacttgaacccgtggggtggaggttgcagtgagccaagattgcaccactgcactctagcctgggcgacagagtgggactc

SEQ ID NO: 203268 - DNA, 201 bp, Homo sapiens
tggggtttcaccgtgttagccaggatggtctcaatctcctgacctcgtggtccacccacctcggcctcccaaagtgctgggattacaggcgtgagccaccrcgcccggcaatttttgtatttttagtagagacgtgaaatgtttctttggtaaactggattctagatgaatatgtttcattctgtttgctggtagtacaat

SEQ ID NO: 203269 - DNA, 201 bp, Homo sapiens
attctcctctcttccagccctactttctgaatccattttctacgttccagccacatggctattctttcagctctttgaatatcctctatgtatcacttatstattgcagtgtaagcccaaatttagtggcctaaataacaattgattggattaagattctgaagtttggaagtctgggctgcggtcagccaggtggttctt

SEQ ID NO: 203270 - DNA, 201 bp, Homo sapiens
cccagctactggggaggctgaggcagcagaatcccttgaacctgggaggcagaggttgcggtgagctgagatcgtgccattgcactccagcctgggcaccragagtgaaactccgtctcaaaaaaaaaaaaaaattcattcttaacttggacacacatcgtgcctgtagcttgaacacctaccaaagataagggcatagag

SEQ ID NO: 203271 - DNA, 201 bp, Homo sapiens
tttcactgtcttagccaggatggtctcaatctcctgacctcatgatccacccgccttggcctcccaaagtgctgggattacaggcgtgagccaccgcgccyggccacaatagctaacatttattaagctctttcttaaagtatccagcaccgtaatgaagattttatatataaaagtgggtaatgaattttttcgggaaag

SEQ ID NO: 203272 - DNA, 201 bp, Homo sapiens
atgaccccagggctagcaacagagagggaagaaattgccaccctaaggtctgcagaggcaagaggagggagtggttaacagaatgcaaggatagctgtaamcctaagagaggcatgcctgataacaactggattatagaagatttagtaccttctactaaaccccagcccagtagggaaagagatgggagaataagtacac

SEQ ID NO: 203273 - DNA, 201 bp, Homo sapiens
agagatggggtttcactgtcttagccaggatggtctcaatctcctgacctcatgatccacccgccttggcctcccaaagtgctgggattacaggcgtgagscaccgcgcccggccacaatagctaacatttattaagctctttcttaaagtatccagcaccgtaatgaagattttatatataaaagtgggtaatgaatttt

SEQ ID NO: 203274 - DNA, 201 bp, Homo sapiens
tccgcaggaccctttcttgggaccagctgtacttgggatactcatagctgggtcttatgtgtggtagaaacataaactggatcgttccctttagagggtaycccttttgcttccagacctcttgggtggactcagaggccaaggtggaatatcactccttccgggaatacccctccataggggacttagctggactgttgg

SEQ ID NO: 203275 - DNA, 201 bp, Homo sapiens
tggagttcggggaagaatatttaagagctctttaatgatgttaaaaactttgctaatttgccgtgtcgttctaaaatccactttaattttttttttctgcstgcctacccgtcttcctgcaattgaactgattccaggagacttgaataaaggggataaaatgactaataaaatacacaaatctcacgaaatatcttttca

SEQ ID NO: 203276 - DNA, 201 bp, Homo sapiens
ccgaattttaaatcatgcaaacatttatatttgtgccaaagttccacaatttcctttagagcaattactgaaatgcattcacaagataaaaatggagttcrgggaagaatatttaagagctctttaatgatgttaaaaactttgctaatttgccgtgtcgttctaaaatccactttaattttttttttctgcgtgcctacc

SEQ ID NO: 203277 - DNA, 201 bp, Homo sapiens
gctgcttcttggagctgagggataagtattgaaatatggctaagttgtttgtaattataaacaactaaataatatatgcattgtctttgttacagtttctrctgaaaggaactggcatttttcaagatgagacaaactgaaaaggttagtttaagcattagcaattaaaaaaatcatgatttttgctgccaccgaatttta

SEQ ID NO: 203278 - DNA, 201 bp, Homo sapiens
tactctatttacaggatgatggaatgattataatcatcccctacttaacgctgcttcttggagctgagggataagtattgaaatatggctaagttgtttgyaattataaacaactaaataatatatgcattgtctttgttacagtttctgctgaaaggaactggcatttttcaagatgagacaaactgaaaaggttagttt

SEQ ID NO: 203279 - DNA, 201 bp, Homo sapiens
agagccagcacccagagtagctgcaagaggctgcagaccacagaggggaatcctgcttccccaggggtccccagcaaagagcgaccccgaacccaggtctycctgccccgggctgggcttgtggacccaaagcacttcctgggggcagctgtggagtttctgcatggagtagcatttctgattcctatgtcagtgctaggc

SEQ ID NO: 203280 - DNA, 201 bp, Homo sapiens
gtatattctagttggtttttgctgaattaaaaaacactattaatatgagatgtctacttgccccagcctgggcatccttttctagtgacagctgtatctcrtgactcatttccttatcaccctagaaacacttacttcactgacactgtctcagaggtcaccagtgcctttcattgccacaccaaagggctcttttcaggc

SEQ ID NO: 203281 - DNA, 201 bp, Homo sapiens
tgggtgtggtggcatgtgcctgtaatcccagctactcgggaggctaagtcaggagattcacttgaacccgggaggcagaaattgcagtgacccaagatggwgccacttcaccccagcctgggcaacagagcgagactctgtctctaaaaaaaaaaaaaaaacaatgtgtgaactattgatagatgttacaatatgaatgaa

SEQ ID NO: 203282 - DNA, 201 bp, Homo sapiens
tctttcttttttttttttttttttttgagatggaaactcactctgtcgcccaggctggagtgcagtagggcgatcttggcccaccgcaacctctgtctccygggttcaagtaattcttttgcttcagcttccctagtagctgggaggtgtcccaccacgcccagctaatttttgcatttttagcagagacaagatttcacc

SEQ ID NO: 203283 - DNA, 201 bp, Homo sapiens
atgtcaacatccacaagctgcgttgttttggactttgacacaagcccaaacaggagacctacccagcttccaagcaaggtggtttgagcagaaagacatcyctggggatgaaatgtgagtatttatcctgtacttggttctcccagccttttgggttatgcctgaggttcccgcctcatctctgttctaagttatgaataa

SEQ ID NO: 203284 - DNA, 201 bp, Homo sapiens
tcttaattggaacgtgccatatgtgctatgttctcgtccccagctgtcacaacccatgcattcacagtgagcagcatgcccaaacctcagcagctgctggyggggagaggtgttggtgataagcgtggcagtggtggcaatgggagttgatggtgtcagaaggagtgttgatagaattgtggcagtagtagcagtggtagc

SEQ ID NO: 203285 - DNA, 201 bp, Homo sapiens
tatttaataaaccaatcgttcctccccagaaaatgctcatgcttagaaaaattatgaatgcatttcaaagggattcacagatgtctcagctttagaactcytgcctaactccagggctagcacaatggaagtctctttaaatccacttacagagattagaagggtcttagtgtgttaatcccagtcttattatgttaatct

SEQ ID NO: 203286 - DNA, 201 bp, Homo sapiens
aacatgtcttaacttggtctctactaaaaacacacacacacaaaataagctgggcatggtggcatatgcctgtaatcccagctacttgggaggttgaggcrggagaatcgtttgaacccaggaggtggagattgcagtgaaccgatatcatgccactgcactgcagcctgggtgacagagtgagaccttgtctcaaaaaaa

SEQ ID NO: 203287 - DNA, 201 bp, Homo sapiens
tagtgtgttaatcccagtcttattatgttaatctggctgccctgctcctgatgatatgctgtgtccaggaagttcttgcccagatacttcacagcagaccyttcatcctgccagtgtgtgacttcccatggagctccagctgccccgtatcatatgcctttactctatgccaaatcccctagctcttcagctctcctccac

SEQ ID NO: 203288 - DNA, 201 bp, Homo sapiens
gtggtgcgacctcggctcactgcaagctccgcctcccaggtgcatgccattctcctgcctcagcctcccgagcagctgggactacaggtgcctgccaccaygcccggctaattttttgtatttttagtagagacggggtttcaccatgttagccaggatggtctcgatctcctgacctcgtgatccgcccacctcggcctc

SEQ ID NO: 203289 - DNA, 201 bp, Homo sapiens
ttaatcccagtcttattatgttaatctggctgccctgctcctgatgatatgctgtgtccaggaagttcttgcccagatacttcacagcagacccttcatcytgccagtgtgtgacttcccatggagctccagctgccccgtatcatatgcctttactctatgccaaatcccctagctcttcagctctcctccacattctgc

SEQ ID NO: 203290 - DNA, 201 bp, Homo sapiens
ctgcctcagcctcccaagtagctgggactacaggtgcatgccaccatgccaggctaattttttgtatttttagtagagatggggtttcaccatgttagccwggatggtcttgatctcctgacttcgtgatttgcccaccttggcctcccaaaatgctgggaatacaggtgtgagccactgtgcccatcttgggctggggtt

SEQ ID NO: 203291 - DNA, 201 bp, Homo sapiens
tgaaaccccatctctaaatataaaaattatccaggcatggtgatgcaagcctggaatcccagctactggggaggctgaggcaggagaatcgcttgaacccrggaggccaaggttgcagtgagatgagatcgtgccactgcattccagcctgggtgatagaccaagactgtgactcaaaaaacaaaaacaaacacccttctg

SEQ ID NO: 203292 - DNA, 201 bp, Homo sapiens
ctagttgccaaatctggagcgtcctttgtggaaaggaagaaagctcggtaattacttagagctaagagtgaccacaggaagttggaacatgagcacacccragcccaaggccagcgaagaaacaacctacgattagatgacctgcgagtctttaagaatatataagaagaaccaggcacagtggctcacgcctgtaatccc

SEQ ID NO: 203293 - DNA, 201 bp, Homo sapiens
tcaagccttcatttgctgcacgcagacattccacagggattgaggacaggcgcgggccctgggttatggaaggcttggtcctaggaccagggccagggtgmtggaggacacccactccctttacctccaaggactcatggtgtctggttgcagttggcccctcctgaagaaatagggagtcctgttcttggacagccctca

SEQ ID NO: 203294 - DNA, 201 bp, Homo sapiens
acacaccaaaaccaaaaacaaaaagagagggatggcatttggaaagcatctccgttcattaatgccagaggtggtctggtgttatatttcttctttcttgyagcccacagatgctggacggtaccaccatttcctgcaggaaggagcgaagggagagggcacatgtgcatattaaaatcagttgctgcagggaacatcaga

SEQ ID NO: 203295 - DNA, 201 bp, Homo sapiens
tcacgcaagtgagcagtcaagggcacatagactatgatatcagaaatgttgtggttgagattttcaccagcctctgactttctgggttggatagtgtccaraaaggatttccggggctctgttgagtagcagggaagactggcagtggtcctgaagggcagcagctttttagaaccatcagaggaaggtttgggtacctta

SEQ ID NO: 203296 - DNA, 201 bp, Homo sapiens
acattggctcatgcctgtaatccctgtactatgggaagctgaggtgagaagatcagttgaggccaggaattttagaccaacctgggcaacacagcaagacytcatctttacaaaaatcagctgggcatggtggtgcacacctgtggtcccagctcttcaggaggctgaggtgggaggatgttttgagcctaggagttcgag

SEQ ID NO: 203297 - DNA, 201 bp, Homo sapiens
gcaggtgggatttatggagggctctacctcctcctggcttcctcttctttttttttgagatggagtctcgctgtgtcgccaggctggagtgcagtggtgcratctccgctcgctgcagtctccgcttcctgggttcaagtgactttcctgcctcagctcccgagtagctgggactacaggcacccgccaccatgcccggct

SEQ ID NO: 203298 - DNA, 201 bp, Homo sapiens
tcataattcagttgtcaacaaatatcaagatcatcgtactgatatatgaactagggaatcaatgatgatttgacatgagttaatgaaacggcgcttacccrtttctgacatgtcaccaggagatttctgtatgcacagtagaatatgatgctaaatttggccagtgcagtttataatgcactcattcattcattgactcac

SEQ ID NO: 203299 - DNA, 201 bp, Homo sapiens
gaaaggacgctgcggtcttctcgaagccatttgacagatatccaggggatgccttgaacttgcagggtatatggcctgactgtcagggtagcccacggaarttatgcagaagctcttctctcaggtgtcagaaatatggcacagaatgcgacaaaaacccatagttcatttctggaggaatcagaaacttacggggtggcc

SEQ ID NO: 203300 - DNA, 201 bp, Homo sapiens
atgaaggtgaaactcttataatgggatcagggtccttataggagaggaagagacacaagctctccctctctctgtcatgtgaggatatagcaagaatgagrccatctgcaagccaggaagagagccctcaccaagaaccaaatctgcgtttaccttaatcttggacttcccagcctctagaactatgagacataaaggtct

SEQ ID NO: 203301 - DNA, 201 bp, Homo sapiens
caagaagactgggagaaattttcttaaatccatctcctcaagaatttggaggcggccgggcgcggtggctcacgcctgtaatcccagcactttgggaggcygaggcgggtggatcatgaggtcaggagatcgagaccatcctggctaacaaggtgaaaccccgtctctactaaaaatacaaaaaaaaattagccgggcgcg

SEQ ID NO: 203302 - DNA, 201 bp, Homo sapiens
tcttttatcagagttacctcatttaactgttataacatccctttgggttgaagttattatctctattttacagatgaagaaattgtgactcagaggagttragtaacttgccaacaggcacagagctgaaacattttagaagcagaaactcatagcttcagaatttaagtcattgttccttttactctacaatgctttggg

SEQ ID NO: 203303 - DNA, 201 bp, Homo sapiens
aagtcattgttccttttactctacaatgctttgggagtcagtgtatagtgggtcttagttgataggccagctgtcagggagaaagatctgagactctagaytcacaaaggttatcatcatttaacatcgtgacctccatttcctcaagtggtccaaacagttgttacctggttgccagatcagcatagatctgagtttctg

SEQ ID NO: 203304 - DNA, 201 bp, Homo sapiens
agctgtcagggagaaagatctgagactctagattcacaaaggttatcatcatttaacatcgtgacctccatttcctcaagtggtccaaacagttgttaccyggttgccagatcagcatagatctgagtttctgagagacgctgtttgttgtcaggtagacagggcagagtccacctcaaaagtgaagggtgaattagccag

SEQ ID NO: 203305 - DNA, 201 bp, Homo sapiens
gcgttgccaggggttgagagtaggaggggatgaggtatgactgctgatgggtacagagtttctttctgggttgataaaaatgttctggaattagatagtgrtgatgattactcaattttgtgattatactaaaaactgctgaatgaaacatttatgagtattgattttatggtatgtgaattatcttaataaagccaccca

SEQ ID NO: 203306 - DNA, 201 bp, Homo sapiens
tctctactaaaaatacaaaacaatattagccaggcatggtggtgtgtgcctgtagttccagttactcaggaggttgaggcatgagaatagcttgaactcargaggcggaagttgcagtgagctgagattgcgccactgcacttcccatctgggcagcagagcaagactctgtctcaaaaagaaaaaaaaaaaaattctatc

SEQ ID NO: 203307 - DNA, 201 bp, Homo sapiens; identical to SEQ ID NO: 35784

SEQ ID NO: 203308 - DNA, 201 bp, Homo sapiens
catctgggcagcagagcaagactctgtctcaaaaagaaaaaaaaaaaaattctatctagccctatacctcctggcaagctgcaagcctaaggtaaaaggasagcacagacttgacctccggactaggagcctcatgaagccttgaactggctctgtgattgttgatatgacggtctccatatcaacgcaaggcatggtttt

SEQ ID NO: 203309 - DNA, 201 bp, Homo sapiens
taaaacaaatgaactacagctacatagaggaacactgagaaatgctgaaaaaattttgaaatgaaaagagcagtgtatgcaagttatatgaggggtctttmaaagttcataaaaaatgcatattatgaaaaaatctatgcatggatttcaaaaatttttataccaaaataaacttgtgccaatttgttgtaacatgtctga

SEQ ID NO: 203310 - DNA, 201 bp, Homo sapiens
gcagaatatgctcaagctttctggaggaggtggggttctcctggcaatctgggagggggctcttctgctgctcagctgctgggccatggcagccaaccatsaggtattcggtgaccaaaagaaagcggccagcacccagccaggtgaccagatgtcttcatgcctcagtttcctcatctataaaatgtaaagaataataaa

SEQ ID NO: 203311 - DNA, 201 bp, Homo sapiens
agctgtgtatatctttccctgaacataaaggcagcttgctgtcattcatcactttgcatttggagaatttaaatatattcaggcagacattgtttagggasggggagggagggcttctgattttcttaccattttgcttctaacaatgactttgatttggaactaattggggtttaaagcacacgttaaccacatctctct

SEQ ID NO: 203312 - DNA, 201 bp, Homo sapiens
aagttgaagccagaacattctagaggaaggccaatcagtagcatctccaggcagagaaatacacctagacaaagacttagaggcaggaaagcctattgaaygtgcagaggacaggaagaagagacgctcaaggaaggagcatgagggatgaggagtcatggtaggtggacaataccccaaaggctcctggttcaggactgg

SEQ ID NO: 203313 - DNA, 201 bp, Homo sapiens
taggaaagttgaagccagaacattctagaggaaggccaatcagtagcatctccaggcagagaaatacacctagacaaagacttagaggcaggaaagcctaytgaatgtgcagaggacaggaagaagagacgctcaaggaaggagcatgagggatgaggagtcatggtaggtggacaataccccaaaggctcctggttcagg

SEQ ID NO: 203314 - DNA, 201 bp, Homo sapiens
caagtttcttcccacacaccctctctcttgcctaacatgtgtggctaaaaatcatcccttgggcctttttaactgttttgtgtccactttcaggtagattwtacaaagcatgcgccctgaggacccgattgcacccaggcagagaattccaagggaatgaaataaaaagactatttttttgcatatacatttctatgttaa

SEQ ID NO: 203315 - DNA, 201 bp, Homo sapiens
aacatgattttaaataatatagtattttaaaagcagtcactctggatggtgtgttgataaaaagctgagggaggcaaggagggggaactggggaaccagtyaggaggccattgcactaaccttatcaagaaaggaagttggcttagaacagggaggtagctgtggaggtggaatctggatatgatttgctaatggattgaa

SEQ ID NO: 203316 - DNA, 201 bp, Homo sapiens
cattgattgtgctagctccatctgtagtgtggttataataacacccaactcaactggatactccatgagatgctcagtaacccaagtttcttcccacacascctctctcttgcctaacatgtgtggctaaaaatcatcccttgggcctttttaactgttttgtgtccactttcaggtagattatacaaagcatgcgccctg

SEQ ID NO: 203317 - DNA, 201 bp, Homo sapiens
cagcagggaggcgcatgtggctggattaaataagatgatcaaggaaaagtctcagcaaacaatatgacatgtggctggaagttctggaagctcagaaagcyattattggattgcaagacccatcgcaaggatcttggacttttattttgggtgagattggaagcttccagaagattttcagcagagagatggcacaccctg

SEQ ID NO: 203318 - DNA, 201 bp, Homo sapiens
ggctggtctcaaactcctgacctcaagtgatctgccttccttggcctcccaaagtgctgggattacaggtgtgagccactatgccccgccaattttttttwaaaaaatttatttttaatttttgtggatacgtagtaggtgtatatgtttatagagtacatgagatactttgattcagacatgcagtgtgtaacaatcaca

SEQ ID NO: 203319 - DNA, 201 bp, Homo sapiens
atgggttcagtagaagcccaaacctcagcattatgcaatatatccatgtaacaaatgtgtacactaccccctgaatctaaaacttttaaaaatagaaaaamagaaagatacctaaaggaagagtattcaagagagaaggaacagccagtgcaaaggctctgagcaggagcaggcatggacggttcacagatcagcagggag

SEQ ID NO: 203320 - DNA, 201 bp, Homo sapiens
tgtcagaactccttactggagggattagcagcatcccctgtgacttcactggggtagaactcttggaagcttgcacgcagtctcctccagacctcctcccrtgtgcctgttccctctcttgctgctttttatttttatttattttattatttatttatttatttttgagacagggtcttgctctgtcgcctaggctggagt

SEQ ID NO: 203321 - DNA, 201 bp, Homo sapiens
cttgtccctttcacgccccagaagcttttctttttcttttctttctttctttcttttttttttttttttttttgagatggaaactcactctgtcgcccagrctggagtgcagtagggcgatcttggcccaccgcaacctctgtctcctgggttcaagtaattcttttgcttcagcttccctagtagctgggaggtgtccca

SEQ ID NO: 203322 - DNA, 201 bp, Homo sapiens
gctgccagcttctcagatttttgcccaattttcaattttgaaccaaccaaagaaagtgaaatatgtcctcctcactgatcacatggaaaccctgcttctamgttagcccacctcccgcttccccagaccagcggccttcagtcagggtgcacttgtccctttcacgccccagaagcttttctttttcttttctttctttct

SEQ ID NO: 203323 - DNA, 201 bp, Homo sapiens
ggctgcagtcagccgagactgtgctactgcactccagcctgggcaacagagtaagaccccgtctcaaaaaaaaaaaaaaaaaaaaaaaagaactctgactmgaaacatctgccgcaagtggctcaacatggccaggacatggctgccagcttctcagatttttgcccaattttcaattttgaaccaaccaaagaaagtgaa

SEQ ID NO: 203324 - DNA, 201 bp, Homo sapiens
tggtagacaataagccccatgggggcaggaaacatgtacccaccctgccctgcacagaacagcacattgtaagccctcattaagagttcagtggatgaatrgtcacttagtagattttagatacattgtagatgatttctagacaaacagttgcacgtgttaggagctctttgatagggctctgcagaggagtgggatttt

SEQ ID NO: 203325 - DNA, 201 bp, Homo sapiens
atggagtgcagtggcaagaacatagctcactgcagcctcaaactcctgggctcaagtgattcttccaccttagcctccccagtagctgggagtacaggtgyatgccaccgcacctggcttatttatttatttgtttttgagatggagttttactcttgttgcccaggctggaatgcaatggcatgatctcagctcactgca

SEQ ID NO: 203326 - DNA, 201 bp, Homo sapiens
tgactgaaaggtgcatttggcttgttcttgaggaggattttttttttttttttttttgagacggagtcttgctctgttgcccaggctggagtgcagtggcrcaatcttggctcaccgcaaactccacctcctgggttaaagcgattctcatgcctcagcctcctgagtagctgggattacaggcgcacaccaccatgccca

SEQ ID NO: 203327 - DNA, 201 bp, Homo sapiens
catttttatcttttaattcattttccacaagctttttgaagtcctcttgtatgtgcagagggatgtatgccaaatacacattgtatatgtattatataagyttaaatcatggagaacagtatcattgaaagtctgtagaaatctaaatttgtagcaaatatctagaaataatataacaaacttatgatagtggttagctaa

SEQ ID NO: 203328 - DNA, 201 bp, Homo sapiens
ggaaccacagacatgcaccaccacatccagctaattttttaaattactattttagagacagggtcctgcactattgcccaggctggagtgcaatggtatartcacagcttactgcagcctcaactacctgagctcaagtgattcccccaagtcagcctctcaagtacctgggaccacagacatgtgccaccacactcagct

SEQ ID NO: 203329 - DNA, 201 bp, Homo sapiens
tttacatgacaccaaactcaaaatcacttgttcctttccaagaaaacttcttattgcccattggagctaacaaatatatgtaactcaacaatttatatgaraccaagcgcagactcaaaacttctcaaaatgcatttcttacaatgagttagagtgtatgtagttgaaactaatcaatatatgtgaaatctagttcaatat

SEQ ID NO: 203330 - DNA, 201 bp, Homo sapiens
atagtgagaccctgtctctatgatttttttttaaataaccaggtgttatggcatgcacctgtagtcccagctacttgggaggctgaggcaggaggatcacrtatgcgcaggagttggaggctgcaattaactatgatcactttactgcactgcagcctgagtgatggagtgagacccctgtctcagaaaaaaaataaggtg

SEQ ID NO: 203331 - DNA, 201 bp, Homo sapiens
aaatatttgaagagatttattctgagccgaatgtgagtgaccatcgcctgggacacagccctcaggaagtcctgggaacttgtgcccaaggtggttggggygcagcttggttttatgcattttagggagacatgagacatcaatcaaatacatttaagaaatataagccaggcacggtggctcacgcctgtaatcccagaa

SEQ ID NO: 203332 - DNA, 201 bp, Homo sapiens
tctggctataacctgcgtattctagttttccttcaaggctgttaaatttgggttaatagttgtatgtgtctcttagatcatctcaaatggaaaattctttycccctaaatgagaattaattgtatttgagctcagagggttttttcccaatgcattagggtgtggataatgacgttcatttctcctcatgagcccaggagc

SEQ ID NO: 203333 - DNA, 201 bp, Homo sapiens
aacttctgacctcaagtgattcgcccgcctcggcctcctaaagtgctgggattacaggcgtgagccacggtgcccagccattatccccattttaaaaaatraggaagcagagtcccatagggctaaagtaattggcccagggccataaaatcattaagtagcagagcctggatttcttaagcaggccccagagtccaagtc

SEQ ID NO: 203334 - DNA, 201 bp, Homo sapiens
cagagaatgagcagtcttcattcattcaatgcagtgatgcatttgttcttttacccaacagatactttttgaacatttacaacgtgccagcatagtttaayctgtatatattcgacagacgctaagttaactgaaacggcgttcagaggtggattaagtattcatcagtgcgtatatagaaactgaaggcatggagtgggt

SEQ ID NO: 203335 - DNA, 201 bp, Homo sapiens
acacacatacacacacacacacacacacacacacacacacacacacacacacacatatatatatatggagacaagaccaaaacaatgcaatgtgagatccygggttggatcctgggaagaaaatccatgtttgtggttttgatttgcatgtcccttcaatgatagactggattaaaaaaatgtggtgcatatacatcatgg

SEQ ID NO: 203336 - DNA, 201 bp, Homo sapiens
tgcaagctttccttcatcagagaatgagcagtcttcattcattcaatgcagtgatgcatttgttcttttacccaacagatactttttgaacatttacaacrtgccagcatagtttaatctgtatatattcgacagacgctaagttaactgaaacggcgttcagaggtggattaagtattcatcagtgcgtatatagaaact

SEQ ID NO: 203337 - DNA, 201 bp, Homo sapiens
acaggaaatggagaggcagtgaaaagtcagtgaaaagtcacctcctgtgttcctcctttttcctttttccacttagaatccttaaagacaggcagtcttcyggttctacaaacctttaatacatttagaaaagatacacagattgagtaaagtagaggtttgcccctgagaaggactggagtgaggctcatctacatttca

SEQ ID NO: 203338 - DNA, 201 bp, Homo sapiens
ctgggattacaggtgcccgccaccatgcctgactaattttttgtatttttagtagacatagggtttcaccatgttggccatggctggcctccgtgattcayctgccttggcctcccaaagtgctgggattacaggcgtgagccacacaagtccaatattttacctagaagcctagcaattctttctgtgtaaggagatgca

SEQ ID NO: 203339 - DNA, 201 bp, Homo sapiens
cctttgaggtttgaaccctggtcatcccctgtcgttcccagatgccccactcaggcctgagtcctgctgagcagggtcaggccgacactgcatctgtgtgrcctgtgacagtgacagctcagtctctcggcctctccacacactcaccccaaagcaagcactgatcctattaagggtttattcatagcaacaacaggaaat

SEQ ID NO: 203340 - DNA, 201 bp, Homo sapiens
gagtggtagccatgtcaccagctgagcctttctcccttgcccagggatattaaattccacagccaaataagtgaaagtcacttctgctcctctttttttawtcttttctttctttctttcctttctttccttcctttcttccttccttcctttctctctttctctctttctttttttctttttttgaaagagtctgtttct

SEQ ID NO: 203341 - DNA, 201 bp, Homo sapiens
acccagccgagcctatcatcttaaccattatttcatgagtagccatagattaatacaaatctataagccaatgtttcttgacacttatgaccagcccccartaaaaatcttgcatactaactccctaatgagcttctctaatgggaaactcttctcatgtgttgtcagaactccttactggagggattagcagcatcccct

SEQ ID NO: 203342 - DNA, 201 bp, Homo sapiens
ctgtaagccctcacttcaagatattccactcttttataccaaaaccaatgtgtaagctccacaattttgtctgtagcttctgctttcctgaaatttacccygcctttattttattttattttattttattttaggagacggagtttcactcttgttgcccaggctggagtgcaatggtgcgatcttggctcactgcaacct

SEQ ID NO: 203343 - DNA, 201 bp, Homo sapiens
ctgcccacatatactttttaaaaagatttattttgttagagacagcatctcactctgtcacccaggctggagcacagtggtgccaccagagctcactgtgrccttgaactcctgggctcaagcaatcctgctgccttagcctcctgagtagctgggattacagtcacacaccaccataccaggcttttttatttttttttt

SEQ ID NO: 203344 - DNA, 201 bp, Homo sapiens
ctcacagaggtttaggaacttgccccaggccactgagcttagactgtggtcctcatcgaatagttatttgaaattcttaatgtcttggtttgtcaccaggyatttcactgcacacatttttttccctacctgggaaaagggtatatgggatcttaagaaaagggtaggggagttagagcatcatggtcaaataatgctgtt

SEQ ID NO: 203345 - DNA, 201 bp, Homo sapiens
aaatcagaaagtctttgaatctgcctataacctgtaagccctcacttcaagatattccactcttttataccaaaaccaatgtgtaagctccacaattttgyctgtagcttctgctttcctgaaatttaccccgcctttattttattttattttattttattttaggagacggagtttcactcttgttgcccaggctggagt

SEQ ID NO: 203346 - DNA, 201 bp, Homo sapiens
catcatgcaccaccatatcaagcagatatgatgtccatgtcataaatgaggaatttgacactcacagaggtttaggaacttgccccaggccactgagcttrgactgtggtcctcatcgaatagttatttgaaattcttaatgtcttggtttgtcaccaggcatttcactgcacacatttttttccctacctgggaaaaggg

SEQ ID NO: 203347 - DNA, 201 bp, Homo sapiens
ggggtcagcagtaaaggacttactaggttggcgacctgatgtcacccagagccagagaagtttccatatctcaatgaaccttttggattcgaagagagatmattactaactccacggactggccttagaagactcttcctctgacatcatccaattcattctgccacttaaaaaaagaaaaaaaatccaggtaccgtggaa

SEQ ID NO: 203348 - DNA, 201 bp, Homo sapiens
gctatgattgtgctactgcactccagcctgggtgatggagtgaatccccaaccttaaaagagtaataaataaataaataaataaataagtaaataataaayaaacatttctgaatttcacatgcaagaaagtgagctgaatgtggtgtcagagaggaaaggcagacaggaagggcagctggcctagaggcgttacagtgat

SEQ ID NO: 203349 - DNA, 201 bp, Homo sapiens
ctgctcttacataaaatctgttaacatacaacttgcttggaggtgcctggggcaggaagaatggaatttgacagaataatccccaccgcaaagatgtcatyactgtaatacccaagaacctatgaatatacagtgttagcttacatggcaaaagggactttgcagatgtgattaaaactaaagaccatgagatgggagatt

SEQ ID NO: 203350 - DNA, 201 bp, Homo sapiens
atactggtttcgaagtgtgtggcaggattcttcttaggggcagggccaaggagcaagatagcaggaaaggcttccccatgacaggcaagggccggtgaatwttaggcccactggtacttaatattgaattttacttttccccattctccattgtaattccctgacacactctgctcttacataaaatctgttaacatacaa

SEQ ID NO: 203351 - DNA, 201 bp, Homo sapiens
actcctgaccaggtgggtgtgatctgcccacctctgcctcccaaagtgctgggattacaggcgtgagccactgcacctggcccatctaatttattaatgtrtatggatgtatttactggttgctattatgcaattatgcagatacatttccccccagatccacaagatacttggatttggttacctaattcttgatttcca

SEQ ID NO: 203352 - DNA, 201 bp, Homo sapiens
caaaattcatgtggaagctttaacttctagtgtgatagcatttagagaacagaggtactgtaattaggtttagatgagaccttaggagtggagcccatgtratgggattagtgccctgataagaagagacgccagagagcttgttctctctctcttccccatgggaggacacaggcagaaggcagctacctgcaaggcaag

SEQ ID NO: 203353 - DNA, 201 bp, Homo sapiens
atgatctcagctcactgcaaacttcacttcctgggttcaagcgactctgctgcctcagcctctggatgagctgggattacgggcacccggcaccacgccckgctaattttgattttttagtagagatggggtttcaccatgttggccagactggactcaaactcttgacctcaggtgatcagccagcctcagccttccaag

SEQ ID NO: 203354 - DNA, 201 bp, Homo sapiens
acaggaacagaaaaccaaatactgcatgttctcacttataagtgggagctaaatgatgagaacacatggatgcatagagagaaacaacactcactggggcytatcagagagtggagagtgggacgagggagaggatcaggaaaaataactaatgggtactaggctaattatctgggtgatgcaataatctattcaacaaac

SEQ ID NO: 203355 - DNA, 201 bp, Homo sapiens
cagcactattcataatagcacagacatggaatcaacctaaatgcccatcaatgatagactggatgaagaaaatattgtacatatacaccatggaatactaygcagccataaaaaggaacaagatcatgtcctttgcagggacatggatggaactggaagccattatccttagcaaactaacacaggaacagaaaaccaaat

SEQ ID NO: 203356 - DNA, 201 bp, Homo sapiens
ccgtggcccgatctcagctgaccgcaacctccatcttctgggttcaagtgattctcctgcctcagcctcctgagtagctgggattgcaggcacgcaccacsatgcctggctaatttttgtatttttagtagagccagggtttcaccatgttggccaggctggtcttgaactcctgacctcaagtgatccacccacctcggc

SEQ ID NO: 203357 - DNA, 201 bp, Homo sapiens
tgggtatatgcccaaaggaatacaaatcattctgttataaagacacatgcagggccgggtgcggtggctcatgcctgtaatcccagcactttgggaggccraggcaggcggatcacgaggtcaggagattgagaccatcctggctaacatggtgaaaccccgtctctaccaaaaatacaaaaaattagccaggcatggtgg

SEQ ID NO: 203358 - DNA, 201 bp, Homo sapiens
ctacatagaccagcgaacatggggagattcagggagtgtgagcaaatattgagaaagagagtttgggatgtaaggtcatgagtcataaagtgtgtggatgygcagtccttctctctgaggggatctgccaaatccctgaggcctacacatttctgtccttagatttcttgttctttctttctgtaattactgcccaccact

SEQ ID NO: 203359 - DNA, 201 bp, Homo sapiens
ttcacagggtcctgaggggacatacaacctcctcagcttacaaaaatgatgggattcagagattaaagacaggtgtaggaaatcacaagggtattgattgygaaagtgataagcgttcatgaaatcttcacagtttatgatcagagattgcattaaagacaggcgtaaaaaattataaaagtattaatttggggaactaat

SEQ ID NO: 203360 - DNA, 201 bp, Homo sapiens
atccgcccacctgggtctcctaaagtgctgggattacaggcatgagccaccacgctcggcccaaattacaatttttaaaactctatacacattccgccccsgccctgccaggagtttctttttcagaaatcttttctaaaggaacagtctaaaatataaaagtgtttatataaaaagatttatcatagcattatccataat

SEQ ID NO: 203361 - DNA, 201 bp, Homo sapiens
ccagatcaccctcacatccaagtgagcatctatttaggataatgctgtgaattaggccatataggtggtgatcatatgtccctatctgcccaggacagacsctgtttaggcctagtgtcccagcttgattttttgtttttaatttataacactatcttagttttttatataattgaggttcttgggttttttttttttttc

SEQ ID NO: 203362 - DNA, 201 bp, Homo sapiens
tttcaggagggatgcacgtggaggggtgagggagaaaggggacacccgtctagccagccagatcagctgaatcaaccctggcgatcaatgggatgacagawgttgcagccagatcaccctcacatccaagtgagcatctatttaggataatgctgtgaattaggccatataggtggtgatcatatgtccctatctgcccag

SEQ ID NO: 203363 - DNA, 201 bp, Homo sapiens
cttttttatattattattattaatgagaacatggagattcagatagggcaatgccagctgtcaaacgaatgtcccatatcatttggtcttgggtactctgrtctgcatctggtgaattctggagagcacctcatatccttgagtccttcggtgttctccaggccacagcaaaacacagtggaaagactcataggaagcaga

SEQ ID NO: 203364 - DNA, 201 bp, Homo sapiens
cttgagcctgtggttaaaatttaatgagggctttcactctgaaggtgaccaccttctgactccctccccaggcaggaggcagacatcaagtctcctttccygctgggagcttagtggcactcccagcacagtgtggcccctttgttaggaaatggctgggtttcatctttcccagttccacctgcgtgcggaacttttcca

SEQ ID NO: 203365 - DNA, 201 bp, Homo sapiens
cctcaaccttctcagctccagtgatcctcccacttcagcctcctgagtagctgggactatgggcgtatgccaccatgcacagctaattttttcgtgttttkttttttttttttttttttttgagatagagttttgccatgtggcccaggctggtcttgaactcccatatgatcgcccaccttggcctcccaaagtgctggg

SEQ ID NO: 203366 - DNA, 201 bp, Homo sapiens
cttccttcctttttttctttttccctccctccctctctctcttcctccctccctctctcccttcctcccttccttccttcctttccttccttcctccctcyctccctccttccttcctttcttcctttccttttgtttcctttcctttcctttctttcttttcccttccttccttccttcctttcttccttccttccttcc

SEQ ID NO: 203367 - DNA, 201 bp, Homo sapiens
tttttttctttttccctccctccctctctctcttcctccctccctctctcccttcctcccttccttccttcctttccttccttcctccctctctccctccytccttcctttcttcctttccttttgtttcctttcctttcctttctttcttttcccttccttccttccttcctttcttccttccttccttccccccttcct

SEQ ID NO: 203368 - DNA, 201 bp, Homo sapiens
ccatatgttctaggaattctactcctaagcatttatttacttaagagaaataaggtggggctcagtggcttatgcctgtaatctcagtacttcgggagacygaggcgggaggattgcttgagcccaggagttccagatcagcctgggtaacagtgagacccagtatctatttaaaagaaaaaaaaagagagaaataaaaac

SEQ ID NO: 203369 - DNA, 201 bp, Homo sapiens
atttatttatttatttatttatttttgagacagggtcttgctctgttgcccaggctggagtgcagtggtgccatcattgctcactgcagccttgacctccygggctcaagctatcctcctacctgagcctcctgagcatctgggactacaggtgcacaccactatgcccagctaatttttaaattgttttgtagaggtggg

SEQ ID NO: 203370 - DNA, 201 bp, Homo sapiens
gctcacctgggggtgggagaggtgatatgtttagactgcctacagcagttccagcagggactaagaagctatgtcttggaacagaccaaatgaaaagcccyagctagtctcgggctgagatggccaagagttggatatagcaacttgtggtactgagcctagaggacttgaagaaaggggacatagagggtgggaggcagg

SEQ ID NO: 203371 - DNA, 201 bp, Homo sapiens
ggtgtgcaccaccatgcccacctgtattttgtattttttgtagagacagggttcaccgtgttgcccaggctggtctcaaactcctgggctcaaatgatctrcctgccccagcctcccaaagtgctgggattttacaggcatgagccactgtgcctggcttgaacctgaattttaaatgctaagaatgcacagattccaaag

SEQ ID NO: 203372 - DNA, 201 bp, Homo sapiens
ttcatgttgttccttctatcctgttatatggcacagacttgtgaaggttccctaagtctttttacttgttagtttatttccggaaggaataaggaagattmtctccaatcagtcaatcaagcaagcaagtaagcaagcaagcaagtgatcagtttcttgggctctgaactaactctgggttcagatcctgatacttccatt

SEQ ID NO: 203373 - DNA, 201 bp, Homo sapiens
gctcaagcctatgaaaatcagtagtttaaaaaattaccttaaggaggaaattggaaaattattcaatttggagcagagatacttgaaaaatttctcaaatwggtgaactagaattaggttaactgcctgtttctaggtaccttgattttcatgttgttccttctatcctgttatatggcacagacttgtgaaggttcccta

SEQ ID NO: 203374 - DNA, 201 bp, Homo sapiens
agcattactgcagagtttaagaatagctatgatgcagagagagattttaattatcatgtaaaggatctaattaaaaagacacacagtggtcggcttttcaygcgctcaagcctatgaaaatcagtagtttaaaaaattaccttaaggaggaaattggaaaattattcaatttggagcagagatacttgaaaaatttctcaa

SEQ ID NO: 203375 - DNA, 201 bp, Homo sapiens
ggtgagccaagatcgcgccactgcactccagcctgggcaacagagtaagactccgtctcaaaacaaacaaacaaacaaacaaaaaacaacaactctgatcyccggatgcttggggagactgatttgagtaataataaaactccggtctcccacacagctggctctgcgtgaattactcttttgccattgcaattcccctgt

SEQ ID NO: 203376 - DNA, 201 bp, Homo sapiens
tacatagaccagcgaacatggggagattcagggagtgtgagcaaatattgagaaagagagtttgggatgtaaggtcatgagtcataaagtgtgtggatgcrcagtccttctctctgaggggatctgccaaatccctgaggcctacacatttctgtccttagatttcttgttctttctttctgtaattactgcccaccactg

SEQ ID NO: 203377 - DNA, 201 bp, Homo sapiens
cttctccacttgcccactccctattccttcatctccctgtaaaatgcccagtcacctctggacaaattagagttcagttcatgtaggatcctcttccctaktgcaaaagttatcacagattaaaatgggcttaccattttaactagtgttctgcctttgtttgtatttcacgccataaaaatggagtgagggagagggtag

SEQ ID NO: 203378 - DNA, 201 bp, Homo sapiens
ggtcagggtcagtgggggtggtgcagccttgcagaacatgctctactgccactgaccattccagggttacttgtattttagccaaagcagtggggagtagrggggagtcacagatatagggcataggaaagcaggagttagggactaggggggatttaataagtgattggaagtgatgcagggcaggtgagccctaaaatt

SEQ ID NO: 203379 - DNA, 201 bp, Homo sapiens
tgtattttagccaaagcagtggggagtaggggggagtcacagatatagggcataggaaagcaggagttagggactaggggggatttaataagtgattggargtgatgcagggcaggtgagccctaaaattggggcttaacctgggaaggtttttggctttgctcaggaaagaattcaagagtgagccagtagtagaagaaa

SEQ ID NO: 203380 - DNA, 201 bp, Homo sapiens
gttcggctgctaaccctggtggctctctgccccacactcctgttcctccatctttctcacaccttcctttccaagtgtggagtctatgagttattgagctsacaagcctggggcagtgtcaggggtaagagccaatccctaccttgtggcttttgtcccatgttcacaggactagggtgaggtgttggagggagagaggat

SEQ ID NO: 203381 - DNA, 201 bp, Homo sapiens
atagccaatgaatgcataaaaaaggtgctccacatcattagtcattagggaagcacaaatcaaaaccacattgagataccatttcatacccactaagatarctataatttaaaaatagatggacaataacaagtgttggcaaggacgtggaaaaaatggaatccttatacgttgtctgtggaaatgtaaaatggtgaagct

SEQ ID NO: 203382 - DNA, 201 bp, Homo sapiens
atgtcacttgtcattggcaggcaaattggagttgttcacttggcacaatttcaattcttgggaactattatgggttgaattgcattttccccaaattcctrtgttaaagtcctaatccccagaacctcagaatgagactgtacttgtagaaaagatcttaaagatcttaagggataattaaattaaaatgaggtctttaga

SEQ ID NO: 203383 - DNA, 201 bp, Homo sapiens
ctcccaccttggcctcccagagtgctgggattacaggcgtgagcctcagcacccagccccagttttgcatttccagctgatttctaggtgatgctgatgcygctggtttgaggaaatgggacttgatccagaggatgtcagggagccactggaaggctcacctgggggtgggagaggtgatatgtttagactgcctacagc

SEQ ID NO: 203384 - DNA, 201 bp, Homo sapiens
caaaaaaaaaaaaaaaaaagtcaaatgcgatccatttaaatccaagttatttatggagcaccatcaccatctacgattggtgaaaagtgcctgtggggagyaggagattggctgggaagcctagaccttctcctctccctgaaggttctctgtagggaaatggggatgcacatggaaagcaatatgagctacagaatctaa

SEQ ID NO: 203385 - DNA, 201 bp, Homo sapiens
tcctttcttcctttccttttgtttcctttcctttcctttctttcttttcccttccttccttccttcctttcttccttccttccttccccccttcctttctycctttcctttccttttttctttccttccttccttccttttcttccttccttccttcattttcttctttctttttttaagagatagggtcttgctgtgtta

SEQ ID NO: 203386 - DNA, 201 bp, Homo sapiens
ccaaggaacatccttggtgaaggtttagcatcacacaggaccagaccagctgaggctgctgacctccctgggcctggtagagaatcctggtcaattgcagygtgttgtgggtaaggtcaggttgaagactggtacttttccttggtctagcaaaggagagttcgtaaagcaatccagccaggggccaagtgaatgctggca

SEQ ID NO: 203387 - DNA, 201 bp, Homo sapiens
cactgctcccacctcctcagcattgcctgccctaattaggtgggttttggaagaactcactagcaaccataacctttaaatagaccagaaattgtcttttrcagtggattcagaatcagtagctttataagaagggctttgctcagttcatgatgactctatgcatgattgactccatctctgtacctgaattacaaaaaa

SEQ ID NO: 203388 - DNA, 201 bp, Homo sapiens
cacttacaagcctaaccatctggataactggattttacaagccacttagaagacttagaagccactgagaagcttagaagccacttagaagcttcaaagcygtttagaagtctaagatcggggtaaccagtgctcctgtatgcagaagttccctgagattgcctttcatgttaggaatggaggtgctgtgagggtgggggg

SEQ ID NO: 203389 - DNA, 201 bp, Homo sapiens
gatggggcctcgctatgttgcccatattggtcttgaactcctgggatcaagcgatcctcctgcctcccaaagtgctgggattacaggcgtgagccaccgcrtccagcctaatttgcttttaggctcttcatgcctttatgcaaataatgacctgagaagctaacctctgattacccagtttattaaaaccaatgtcggtgc

SEQ ID NO: 203390 - DNA, 201 bp, Homo sapiens
gaatataacctggaggggaatgaatatagatggaaaggaccagcaacatgacctttttcccactcattgagaccctagggtggtggtgggatggatacccrtatagatcacagtgcacccagagatccaaattagatcagttctcacatgctcccaaagacccatgcctagtttcacgggtgttgctttggggacttttgt

SEQ ID NO: 203391 - DNA, 201 bp, Homo sapiens
ctggctgatgtcttcaccaacacacactttactgcaggtaaatcctccccatcttgagctcaggcatctaagagccttatcctcttaagataggctctgtkgagttagaaactgccccgctgactgaaatcgccagctccctggcccagctcttagacttcccttcctctctcccaaggtgggaaatagcttgttacttgg

SEQ ID NO: 203392 - DNA, 201 bp, Homo sapiens
aatgccagctgtcaaacgaatgtcccatatcatttggtcttgggtactctggtctgcatctggtgaattctggagagcacctcatatccttgagtccttcrgtgttctccaggccacagcaaaacacagtggaaagactcataggaagcagagaggaatggaacatgaaagcccaggtgcagaggctggaatcacgaggca

SEQ ID NO: 203393 - DNA, 201 bp, Homo sapiens
ctcaaaagaaatcaaccccgctgacaccttcatctcggacttccagtttccaggactgtgagaagatacatttctgttgttcaagccacacagctttgtgrcattactccacggcagccctagtggagtaatgcacagtgtcatggtgatggagtaacctaaatactccaaccactcgatgatttgatctctgctagcttg

SEQ ID NO: 203394 - DNA, 201 bp, Homo sapiens
tggattcaatcatgttagatttttcccattacttttaattctgcaaaagcagtttcaatttaggcatccagtcccctgccttgagtgtagcttcatctgayacatggactgggctgctacctgtgcctataccatgaggcacatgctacacttctgactgagtgaggctcagctgcagcttgaagcagatgggctttccta

SEQ ID NO: 203395 - DNA, 201 bp, Homo sapiens
ttgggagaccaagttgggagggtcacttgaggccaggagttcaaggccagcctggacaacatagccagacccttcctctacaaaaaaccccccaaaattarctggtcaccgtggtattcacttgtagtcccagctactctggaggctgatgggggaccatcacttgagctcagcagtttaaggttgcagtgagctttggtc

SEQ ID NO: 203396 - DNA, 201 bp, Homo sapiens
tgcagaattcttgaaaaatgtgaagtttagatagcagttaagtgggtaaccagaaagacattttctatgataaaaaggatggaacagacaagaatgttccwtatgggtagaaagggagggaaatggccgggcacagtggctcactcctgtaatcccagcactttgggaggctgaggtgggaagatcacaggtcaggagttc

SEQ ID NO: 203397 - DNA, 201 bp, Homo sapiens
tagatagcagttaagtgggtaaccagaaagacattttctatgataaaaaggatggaacagacaagaatgttccttatgggtagaaagggagggaaatggcygggcacagtggctcactcctgtaatcccagcactttgggaggctgaggtgggaagatcacaggtcaggagttcaagaccatcctggccaacatggtgaaa

SEQ ID NO: 203398 - DNA, 201 bp, Homo sapiens
gtaatcccagcactttgggaggctgaggtgggaagatcacaggtcaggagttcaagaccatcctggccaacatggtgaaatccgactctactaaaaatacraaaattagctgggtgtgatggcacgtacctgtaatcccagctattcgggaggctgaggcaggagaatcgcttgaacccaggaggcagaggttgcagtgag

SEQ ID NO: 203399 - DNA, 201 bp, Homo sapiens
tctggggttacctgggttgtacctgagggggtgaagacagtcacgttattgaacctactgtaaaaatgtaataaattctagaacttccataccctccacartcctagtgctgagtatttatgcaaaggaaaggaaatcagtgtgtcagagggatacctgcacccctgttcattgcagcagtattcataatagcaaaggtat

SEQ ID NO: 203400 - DNA, 201 bp, Homo sapiens
gactctgtctcaaaaagaaaaaaaaaaaaattctatctagccctatacctcctggcaagctgcaagcctaaggtaaaaggagagcacagacttgacctccrgactaggagcctcatgaagccttgaactggctctgtgattgttgatatgacggtctccatatcaacgcaaggcatggttttgcattgaggttatggagca

SEQ ID NO: 203401 - DNA, 201 bp, Homo sapiens
attttctagaattgaattaaaaatgatcttcagtttggaaatccaagtattcaacagggtgaagctggatagaaatctcaggaacatagccttgggtatayggaaactccacataggaaataacatgataaattaatggaaaaagaatgactgtagagaaatatggaaagtatgttcttactacatattgtaaataaaatg

SEQ ID NO: 203402 - DNA, 201 bp, Homo sapiens
aaaatacaaaaattagccagacatagcagcaggcacctgtaatcccagctattcgggtggctaaggcaggagaatcgcttgaacccaggaggcggaggttrcagtgagccgagatctcgccactgtattccggcctgggtgacacagcaagactctgtctcaaaaaaataaacaagaagagaaaaaaaagaaaaagaaaca

SEQ ID NO: 203403 - DNA, 201 bp, Homo sapiens
gcaggtggatcacctgaggtcaggggttcaagatcagactggccaacatggtgaaatcccatctctactaaaaatacaaaaattagccagacatagcagcrggcacctgtaatcccagctattcgggtggctaaggcaggagaatcgcttgaacccaggaggcggaggttgcagtgagccgagatctcgccactgtattcc

SEQ ID NO: 203404 - DNA, 201 bp, Homo sapiens
tcacaaagccaaggttggacttggggatctggataccagagataacgtgtacactttgatgtgtgggcctccggactgtgtgtgtgtgtgtgtgtgtgtgygcgtgtgtgtgtgtgcatgtgtgtgtatatgtgtgcatgtgtatatacccatgtattttttttactaaaaccattccattcacaatgcctaataatttga

SEQ ID NO: 203405 - DNA, 201 bp, Homo sapiens
tgcgccctctacctgtctaacttccgtattttttgtagagacaaggttttgccacgttgcccaggctggtcttgaactctttggctcaagcaatcctcccrcctcagcttcccaaagtgctgggattacaggtgtgagccactgcgcctggcctcaagttttgacctggaatggtggtgtgacttagagttacaaataact

SEQ ID NO: 203406 - DNA, 201 bp, Homo sapiens
cctctgtagaaacattagatgacaatggaagaatgcttaaataattttgagagaaaaaaataatgttccatttagaactcttaacagtcatctatagaatrctttgggccaggagcaaatgcaaagtaaacccatcgcaaaaatgtaggctcttaacaattttacctcctctgaatttgttttgaggaagctactcaagca

SEQ ID NO: 203407 - DNA, 201 bp, Homo sapiens
agacagagtctccctctgccacccaggctggaggggcttgatctctgctcactgcaacctccacctcctgggttcaagtgattctcttgcctcagcctccygcgtagctgtgactacaggtgcatgccaccacactcagctaatttttgtatttttagtagagatggggtttcgccatgttggccaggctggtcttgaact

SEQ ID NO: 203408 - DNA, 201 bp, Homo sapiens
cgtcaaagagtgttcctgttaagatggttcccccaggtaagagttgattccagatattgctcgccaagaccctgaggtcagacgccttggagaattccccwtggagatcccccgagccagaaatccagtgtctgttccctttctgtaaaaaccaacacacattgcgcctgtaatcccagcactttggtaggccaagatggg

SEQ ID NO: 203409 - DNA, 201 bp, Homo sapiens
ttagtgtgttaatcccagtcttattatgttaatctggctgccctgctcctgatgatatgctgtgtccaggaagttcttgcccagatacttcacagcagacycttcatcctgccagtgtgtgacttcccatggagctccagctgccccgtatcatatgcctttactctatgccaaatcccctagctcttcagctctcctcca

SEQ ID NO: 203410 - DNA, 201 bp, Homo sapiens
tgccttttaaaaagcgtgaggctggcagggcacggtggctcacgcctgtaatcccaacactttgggaggctgaggagggtggatcacgaggtcaggagttygagaccagcctggccaagatagcaaaaccccgtctctactaaaaatacaaaaattggctgggcgcggtggcaggctcctataatcccagctactcgggag

SEQ ID NO: 203411 - DNA, 201 bp, Homo sapiens
gatggaacaaaagatatgctgtatcgtcaagtgaagaaaaagacaagccaacccaaccacacagattaagttagaggaagaatcagaggtttttctgtggragctgcccagttaagtcaaaggtcaggaattctgtcccattctgatagtgtctcttgccttgacccttgggagtgtgtggcttgtgaggggaagttagca

SEQ ID NO: 203412 - DNA, 201 bp, Homo sapiens
catacaactcctaaaatccttggacttgccaaagtgcaggctttttgtatgctcatgttgactgatagctgcagggtggggctggtcacctgaagacaaakgtatgattagggggttgagacttaacctcgtctcccaacctcaaaggaagggtgggagctgaaggtcaagttgatctgatcacaacagccaatggtttaa

SEQ ID NO: 203413 - DNA, 201 bp, Homo sapiens
gaggcacgtacctgtagtcccagctacttggaaggctgaggcaggaggatcacttgaagccaggagttcaaagttatagtgagctgtgatcgcaccactgyactccagtctgggtgatagagagagaccctgtctcaaaacaaaataaaacaaaacttaacccagaactagatcattatatacatcttgtgctgatatgaa

SEQ ID NO: 203414 - DNA, 201 bp, Homo sapiens
gttcagtgaataaattgagctgcatgttagctttcagacacagagaagttccgtactgtatctaagaaacttcccgaaatgtcttgttccagtggatgacrtaacttgtcgtttgactaagaaattgcatcttaggaaattatctcaaggaaataagcagacaagtatttatacacaaggaaggtataagccagaggatta

SEQ ID NO: 203415 - DNA, 201 bp, Homo sapiens
caaagtagagcatattaacagtgtagaactaggctgggagtagtggcacatgcttgtaataccaacactttgggaggccaaggtggaagaatcgcttgagrccaggagtgtgagaccggcctgggcaacatagcgagacctcatctctacaaaaaaatttaaaaattaactgggcatggaggcacgtacctgtagtcccag

SEQ ID NO: 203416 - DNA, 201 bp, Homo sapiens
tggcatgatcccagctcactgcaagctctgcctcccaggttcacgccattctcctgcctcagcctcctgagtagctgggattacaggcgcccgccaccacrcctggctaatttttttgtatttttagtagagacggggtttcaccgtattagccaggatggtctcgatctcctgacctcatgatctgcccacctcggcctc

SEQ ID NO: 203417 - DNA, 201 bp, Homo sapiens
tatttttagtacagatacggtttcgccatgttggccaggctggtctcgaactcctgacctcaggtgatccaccctcctcggcctcccaaagtgctgggatyacagacgtgagcaactacacctggctggccgtctttacttcaaagcagtggagtcacagagccttatacatgaatggaaagtattgccaaaaggctccgt

SEQ ID NO: 203418 - DNA, 201 bp, Homo sapiens
tttttatttgttaacgttttcactggcattttatcccattatttgttctaattggtttttgctttaggagaggggttgatttttaattctaatgttatgcrtaccttatatccaatcgtatcactggatctatatactaattttctgagttattttgattatctcttgattttgaagcatgtaatcatataattgaatatg

SEQ ID NO: 203419 - DNA, 201 bp, Homo sapiens
attttgtctcttagaaagatcaggatggttgctatgtgaaaaacaacttggtgtggcacaaggtagaaggcaaataggccagttagatggtggctgccatyttctaggtgaggaatgatggtgatggtagggacggagacagaaagtcaattttatagacttaagatgtaagattggggctgggcgcagtggctcacacct

SEQ ID NO: 203420 - DNA, 201 bp, Homo sapiens
actaaccaaaccaaactaccaatttgatccaattcctatcaaaatcccagtggcagtttttgcagaaataaaacaaataatcttaacattccaatggaatktcaggggatcccgaatacccaaaataattttggaaaagaggaacaaatttggaggaatcacacttcctggttttcaaacatattacaaaattacagtaat

SEQ ID NO: 203421 - DNA, 201 bp, Homo sapiens
gcatttcgatacactaacaatgcacaatctgaaaagaaattaagaaaacaattccatttacaatagcaccaaaaagaataaaatacctagaaataaacctmaccaagaagatgaaagacttatacactgaaaattacaaacattgctgagagaaactaaagaagacacaaataaatgaaaagacatcttatgctcatggat

SEQ ID NO: 203422 - DNA, 201 bp, Homo sapiens
aaaaacacaggagcccccactataggagatcccactggccaaagctagaccaaacttagcagcaaaagaaataactatattattggattgaaatccacagwgtgaaaaacgaaaacaaaacaaaaaaagagaagaaaattcagaagtttgtattgatgcagatacaatcatttgctgcataatgacatcttggtcaacaac

SEQ ID NO: 203423 - DNA, 201 bp, Homo sapiens
aagctttaaattcactttccccattagtaataatcagtgaaattcatgagggaatttcatctgtccatggttcatgttggactgaaggatatttttgctgttttttttttttttccagtagaccctgggatggttgaccttagacttgaatcttttgggagcttgtttacaatgcagatttctgagctggtatctgggttt

SEQ ID NO: 203424 - DNA, 201 bp, Homo sapiens
agatgagagtgacccggttgcctttttttttcttaagtaatcgagcctagtgcttgggggcacattcactgtctagctgggcatttcacgatttcacccayctggtactaggcagctgatggctttgctgtcttcatacatttcttcccagtgtagctcttgaagacagaaggaatcactcctgagcagagcccactgatc

SEQ ID NO: 203425 - DNA, 201 bp, Homo sapiens
ctccttgaggaagccatgcatgctccctgccgagaccaaggagagaaaaccatgccttcgtctgggttcgcataacttttgtctacacttttgtcgtgtcrtttactgcaaaagttgtcccccaagctatccttttatttacatttgcttattaatttcaagaattatttgagatagtattcaagttacatactagaggaa

SEQ ID NO: 203426 - DNA, 201 bp, Homo sapiens
atttttggaaaaaaaaaaaagtaattaataggcattttctagaattgaattaaaaatgatcttcagtttggaaatccaagtattcaacagggtgaagctgsatagaaatctcaggaacatagccttgggtatatggaaactccacataggaaataacatgataaattaatggaaaaagaatgactgtagagaaatatggaa

SEQ ID NO: 203427 - DNA, 201 bp, Homo sapiens
taaagttttcaggctttgcaagctggccctttggatgcagagggcaattgtttcttagaacagaccgtgtacatttcatgccagagcactgcagggctgcyggggcattgtggaccttgcggagttttgtgattctttgatgatttcatgacccagatgtgcagagtgaaaggggctttttcaatggagcatcagtacaag

SEQ ID NO: 203428 - DNA, 201 bp, Homo sapiens
caggtattggggaagacaagccagcaactgctctgggctctgctttggaagtgcctttcatttctctttagtttttttttttttttttgaaacagagtcamgctctgttgcccaggctggagtgcagtggcacgatctcagctcactgcaacctctgccttttgggttcaacggatttcttatggctcagcctcccaagta

SEQ ID NO: 203429 - DNA, 201 bp, Homo sapiens
ctccaggccgtgtaggagtatttttctcctagtcttgtctactggagctgacagttagagaggtgtccttgggatcattaatcagcatttaacatttgtargcaatctagtttattactttgcttaaactctggagctcagagtcttgtttctgaagtctctcaggtaacattttgagaacactgcatgttctgccacaaa

SEQ ID NO: 203430 - DNA, 201 bp, Homo sapiens
ttccctgttggccatatgggaagccaggatgatcagaaggttgctctgggagcctatattcaggacaaggggagccggatgaatccagcctgtgatggcargagtctgggatggtgggtgcatctctactgcctgatggtaggggtggccttgcctttggggctctcattctctggttctgtgctgacccacagcccttgg

SEQ ID NO: 203431 - DNA, 201 bp, Homo sapiens
atcctcgccaacacttgttattttgttttcttgacagtagccattttaatgggtgtgaggtggtatctcattgtggtttatgtcacatttttgagtatacrttttaccctgctgggtatatgttattacactaggtgctggcttacagaggcaataagacccactttctgccatgagagaggaaactcacaatctgttgga

SEQ ID NO: 203432 - DNA, 201 bp, Homo sapiens
atgttgagggagggtccaggtgggaggtgattggatcctgggggtggtttcctcaaggctgttcttgtgatagtgagtgatttctcacgagatctgatggytttacaaggcagttttctctgatctttcttgtcctctcttgctgccaccatgtgagacgtgcttcttccccatctgtcatgattgtaagtttcctgaggc

SEQ ID NO: 203433 - DNA, 201 bp, Homo sapiens
ttatacccgatatcctttttttgttttcagatcaataagcattgctataacagaagttttattataggcttgcaaccttttatctgcgatcctgaaactcaaaaaaaaaaaaaaaaaagatgaggccgggtgcagtggctcatgcctgtaatcccagcactttgtgaggctgaggcaggcggatcacaaggacaggagttt

SEQ ID NO: 203434 - DNA, 201 bp, Homo sapiens
aagtcaggagattcacttgaacccgggaggcagaaattgcagtgacccaagatggagccacttcaccccagcctgggcaacagagcgagactctgtctctaaaaaaaaaaaaaaaacaatgtgtgaactattgatagatgttacaatatgaatgaatctcaaaatattttttattctgaaagaaagaagtcagccaagaaa

SEQ ID NO: 203435 - DNA, 201 bp, Homo sapiens
tgctgtgtgcacgtcctgagaacacagtcctggccctcgtgggatgtatagacattgccactgtagcgctggaatcaatgggatttactgcagagatgacygtgggggcgaggttaatgccaagggtcagactgaaccctatgtccttcctgtgtgtctgcttgtagatttctggagggaatgtttctttttattattaca

SEQ ID NO: 203436 - DNA, 201 bp, Homo sapiens
gaggttgcagtgagccgagatggtatcgttgcactccagcctgggcaacaagagtgaaacgccatctcaaaaaataaagaaaaagaaagaaatatgactgktgcaactgaggaacagaatttttacttttctttagtttatattaatttacatttaaatttttaaaaatgatgcttttcagttttggaaactgaatatgtt

SEQ ID NO: 203437 - DNA, 201 bp, Homo sapiens
tcaggtgatccacccaccttggcctcccaaagtgctgggatcagagtcgtaagccactgcaccctgccctggagggaatgtttcaacctcataatcccggyctctcaaagcctgcctctccttcatgcctgacaccggagggggaacaatgactgccatgttcaataaaacttttgtgggagatgatttaaattgctttga

SEQ ID NO: 203438 - DNA, 201 bp, Homo sapiens
cttttgaatgaaccctttataggcggtttctgctttatatgcaggggtggaaggtgaagaacctgctattgacagtgactttgaaagactttgagaaaatwgtgtaagtaggtacaaaatgtcatcacaaaccatgtgtcttataatacatgtagcaagaatggaatactgtgtagccataaaaaggaatgagatcatgtc

SEQ ID NO: 203439 - DNA, 201 bp, Homo sapiens
aaatacaaactagattttgaagacttagacttaaaaaaaaaaatccatccattgcatccatctgtccattcacaaaaatctaaatttaatcatcttcttctttttttttttttttttgatagggtcttgctctggtgtccaggctggagtgcagcagtgtaatcatagctcactgcaacctcaaactcctgggctcaaaca

SEQ ID NO: 203440 - DNA, 201 bp, Homo sapiens
tcccaggcttgtctcaaaccccggggctcaatggattgtcccacctcggcctcccaaagtactaggattacaggtgtgagccactgtcaggccaaagccatttttttttttaagtaacaacatacactcacaatgtgaaaatccgagaggagtagcaagtctagggaatgctgcaaatgactcgccaggttgccaattctc

SEQ ID NO: 203441 - DNA, 201 bp, Homo sapiens
tgctgaaggctgtggttttctttcctgtgcacattaattcaatgtcctttttactcagtagggtgtaaacatacatcatttaaattaacataaaaagtcakaaatgagacctccattaacatatccgcaggggaggaatgaggcagtcccacgtgacttcttgctgctgttgcctcccaggagtggggctgccaggcgggt

SEQ ID NO: 203442 - DNA, 201 bp, Homo sapiens
cctttgctatgctgacccaaaacctgctgcttggaaaatcacaggtaaaacctctgacagcatcactggtgtgagtcagtagggtattgttcaggcccagrttaatggggggagtgaaagttgagatttgctcgaatacacatattctcctgtagaataattactttgcaacccacacacttttggggacccagaattcat

SEQ ID NO: 203443 - DNA, 201 bp, Homo sapiens
ataggcggtttctgctttatatgcaggggtggaaggtgaagaacctgctattgacagtgactttgaaagactttgagaaaatagtgtaagtaggtacaaartgtcatcacaaaccatgtgtcttataatacatgtagcaagaatggaatactgtgtagccataaaaaggaatgagatcatgtcctttgcagggacatggat

SEQ ID NO: 203444 - DNA, 201 bp, Homo sapiens
tgttgcccaggctggagtgcagtggcacgatctcagctcactgcaacctctgccttttgggttcaacggatttcttatggctcagcctcccaagtagctgsattacaggcaagcaccattacgcctgggtaatttttgtatgtttagtagagacggggtttcaccatgttggccatactggtctcgaactcctgacctcag

SEQ ID NO: 203445 - DNA, 201 bp, Homo sapiens
ctcctagaggctcctgtggatgcaggaggatgcagggctccaggaggtatgtctctaaaggaggtgggaagtggcaacattgtttgattgcctagagtttktgactacattaagattttttcttaactcctcgttcaaaaagcttgggactgtttactgattgtgttaggccattgtgttgctataaaggaatacctgaga

SEQ ID NO: 203446 - DNA, 201 bp, Homo sapiens
gtttcagcaaaataggttgcacaggagccaagtgctgggtgaagcgaggaatgaatgagaggtaaagaagggagacagggagggaaaggaacatgtcaatyaagccaattaaggctgtggaaaaagagactatttacttattttttattagtattaatattattattattatttttgaaacagaatcttgttctgttgacc

SEQ ID NO: 203447 - DNA, 201 bp, Homo sapiens
catgattgtgccacggaggttggtgttttcaccgttagctgtgagagtgcaaaggcataagatgttagcagtggaagaccaaggtgtcactgatcgtttcraggttaccctacccctccagctggctgtcttcagcagttgaggagacgcaaactgcacagaggacaatgaaatggaaaaatgtgtggttttcaatgagca

SEQ ID NO: 203448 - DNA, 201 bp, Homo sapiens
tcttgtcttgtcccactggtaggtcttcaggggcaataacacacgcatggagctgtcatctcctatgataacaatgtatttttcttgaatccctcctgaargacttgcctgaggctgttttacagttactttttgtataaatagaaggaacacactctaaaataatgatgaaagtatagtgtagtaaatacagaaaccatt

SEQ ID NO: 203449 - DNA, 201 bp, Homo sapiens
tctctcccctgggtctctctgctgtagcctttgaactggtttgctttcatcccctcctgacattctccagcatatatcccacactgcaatcttagggcaarttggatcacaccccacacgctgttgtgtgcatacactacatcatgtagtggcccctccttgctttataggattaaaagtctgatctcttacttgacccac

SEQ ID NO: 203450 - DNA, 201 bp, Homo sapiens
tcactatgttggccaggctggtctcgaactcctgacctcaagtgatccacccaccttcgcctcccaaagtgctgggattacaggtgtgagccactgtgtcyggtccatgcctggcctttttaacagttaaatgtcatttcgttcatctagtaaacaactatgtagtaagcacctactgtgtgtccccgtggtgtgtaggtg

SEQ ID NO: 203451 - DNA, 201 bp, Homo sapiens
tactatgctaagtgcatacaccaggcactgtgctaagtgcatacaccaggtactgtgctaagtgcatacagtggatactatgctaagtgcatttaccaggyactatgctaagtgcatacagtgaataccatgctaagtgcatataccaggtcctatgctaagtgcatacagtggatactatgctaagtgcacataccaggt

SEQ ID NO: 203452 - DNA, 201 bp, Homo sapiens
actatgctaagtgcatacaccaggcactgtgctaagtgcatacaccaggtactgtgctaagtgcatacagtggatactatgctaagtgcatttaccaggcmctatgctaagtgcatacagtgaataccatgctaagtgcatataccaggtcctatgctaagtgcatacagtggatactatgctaagtgcacataccaggtc

SEQ ID NO: 203453 - DNA, 201 bp, Homo sapiens
gcatgagtaaaggcatagtggctggccgagagactagatacatctgctgtaaaccaaaaataaaattctcagtcctcccccagccacatgaatggaccacygtcctctcggccaagggcaatcccaagttaacctgaaaaatgagttcaggccatgatagggaggggaagctggacatacctcattatacccttctccctt

SEQ ID NO: 203454 - DNA, 201 bp, Homo sapiens
agcctgcccagttcctcctgctcctaaaggaactggagaggagtgtgagtgacagcttctcctgtcctctgttgataccctccattttcaagccccagtgmccctaactactggcactgagcaggcaggctttcaggcagaggcccctccaggccctggaagcccatggctctgttttctgcaagcctcttacctctacca

SEQ ID NO: 203455 - DNA, 201 bp, Homo sapiens
cagtgtctgatttacataggggtcacagattggttaatcagatatgacatttacatagcaggtggggaaggctggtggtccaccctaatcttattatgcaratgaactctccccttggccgcagccatcttgtcagctccttattgtacacttggctggcggagaagggaggatggagccaccattttgaacatgtctagt

SEQ ID NO: 203456 - DNA, 201 bp, Homo sapiens
tttacatagcaggtggggaaggctggtggtccaccctaatcttattatgcaaatgaactctccccttggccgcagccatcttgtcagctccttattgtacmcttggctggcggagaagggaggatggagccaccattttgaacatgtctagtcctaggtagttctttcctgccggcatctacccgtgcaagcgcctggctt

SEQ ID NO: 203457 - DNA, 201 bp, Homo sapiens
acgtatgtataatagctgccttatagttcttatctactcatttcaacatctggatcatccttgggttgattttttttaaatgaattttttccttgagttcrgattatattttttcatttcatcacctgtctagtgatttttgatcaattcctggacactattaagtatatgttgtggagactctggatcctgctatattcc

SEQ ID NO: 203458 - DNA, 201 bp, Homo sapiens
actgtctgagatcatgaggacatttagtattaggtttgtgcaaaagtaattgttttttgcatttaaagtaatggcaaaaactgcagttacttttgcaccarcctaatatttacctaaggattctagtggcctggggtcccagatgccttcaagcagttcagcagtgcaacatatatgtttccctttccttcatggctaatc

SEQ ID NO: 203459 - DNA, 201 bp, Homo sapiens
gccggcatctacccgtgcaagcgcctggcttgctcgtctatgtctgtagcttgactgtataggttgctgtttgttagaaaatgatttggggccgggtgcartggttcacgcctgtaatcccagcactttgggaggctgaggcgggtggatcacctgaggtcgggagttcgagaccagcctgaccaatatgaagacaccccg

SEQ ID NO: 203460 - DNA, 201 bp, Homo sapiens
gcaggagaatcacttgaacctgggaggtggaggttgcagtcagccgagattgcaccactacactccagcctgggcaacagagcaaggctctgtctcaaataaaaaaaaaaagataaggttgcaataactgttctgtagtgttcattctctccagggccaaccttctgtgattctacttctaacatcattgcccaaagcatc

SEQ ID NO: 203461 - DNA, 201 bp, Homo sapiens
ctgcactccagtctggggcaacagagcgagaccccgtatctttaaaaatatatatcccatcccagagtccaccctatagagaaacccaagtatttttccayttgttgaactaggaacatctgtggatattatgaacataaatattttattctaagcctctattgacctttcaattctctgaatcattgcaaaaattattct

SEQ ID NO: 203462 - DNA, 201 bp, Homo sapiens
aaactgggaaaagtcagctcaccatctccagcatggcagagagaaacgctgaggaaaattctccctattttcaggagtagtagcttgctcctctgggaagraggttaccagaaaggcccgcaaatgattggtaggatgcgagtaacaaattaaaatattctctttgccagaaacctgtgttgttgagaatcagacaaaggg

SEQ ID NO: 203463 - DNA, 201 bp, Homo sapiens
agtctgaattatcacttgaaggaggagatgccatgagcaggaaggaatcaaggctggagtgtgtaaaccaaagcactggagagccaggaagaccagaggaraaatgatggaccaggccaagcgatgcagagactgggtccagaggagccacttgagacaggtcgggtctttctggcgcccacactgtctttcctatgcatt

SEQ ID NO: 203464 - DNA, 201 bp, Homo sapiens
agtttcatgctgctgctgtaacaaatggcttcatagtggcataaaacaccacacatttattcttatagttttcgaggttagaaatctgaaatgagttttayaggactaaaatcaaggtgtctgcaaggctgccttccttctggaagctccaagggtgaatgtaattcattcctttcctctcctagcttccagaggctgcca

SEQ ID NO: 203465 - DNA, 201 bp, Homo sapiens
ttgagcctcaggtggttgaggctgcagggagctatgattgcacccttgcactgcagtctaggcaacagaccaggaccttgttgcaataataataataatamatttttaaaaacaattagttttgggacaagaaggctaaatggaaatttcatggatagatttaccaatatttttcttcctttttttttttttttttttttt

SEQ ID NO: 203466 - DNA, 201 bp, Homo sapiens
tgtaatttaatataattatgcaattatataacaagcacagctggcatgaagaggtttgggaacaaaacaataactgttgacaggtatacaattcaactggygggagcagaaacgggcagacctactagataaagggtgcttaccacttgtgagcccccaacatgcctggggcatctgctgtcactgtgtgttacagagatg

SEQ ID NO: 203467 - DNA, 201 bp, Homo sapiens
aatgagttttacaggactaaaatcaaggtgtctgcaaggctgccttccttctggaagctccaagggtgaatgtaattcattcctttcctctcctagcttcyagaggctgccagcattccttggcttatggccgcatcactccagtctctgcatctgtggctgcatcactttagtctctgcatctgtggctgcatggacttt

SEQ ID NO: 203468 - DNA, 201 bp, Homo sapiens
tttctgttgatctgtcttgaagttcccagatgcttctgctatctttgatatgctgttaatctcattccagttagtgtatattttacttctagatgattctkttttcacagtttctgatttgggggttagattccccatctgttcattcattgtgtatatatttttcatttaaaattcttggacgtatgtataatagctgcc

SEQ ID NO: 203469 - DNA, 201 bp, Homo sapiens
agcagttttcctagaggtagttttctttctatttatccctgcttgggttttggtgattttcttgaatctatatttttgtctttcactaaatctgtaagttrtaggcctatttcttcacgtcttttctgccttattctctctctcctttcctctgagactctaaatataagtgtattgaatggactgatattgtcccacagg

SEQ ID NO: 203470 - DNA, 201 bp, Homo sapiens
ggaagttatttgactgctcagagccaccggagcaaaaatactttccccaatttcccttggcaaatggatctcacacagcagaataactaaagcaaaggtckgtgtttcagtcagcctagcactcagcttctgaggtcttcacagatcccgggttctcctgggagtcagggagaatggcagaattatagaagtgtcaagaga

SEQ ID NO: 203471 - DNA, 201 bp, Homo sapiens
catcttgactgcaaatgaactcagagagagagagagagagagacagagagagagagagagtgggcaggcaggaagataaaaggttgagcacaatttgggcrtttgtttatgtgattgaactacggctggggctgggctaggtgctgttcatggctggaggaggcaggttcttttcctgtatgagatttttactttttattt

SEQ ID NO: 203472 - DNA, 201 bp, Homo sapiens
ttcccccttactgttctcatgatagaatcctcatgagatctggttgtttgaaagcatagcacttcccactttgctttctctatctctctcctgctctgccrtggtaaggcgtgcttacttccctttcatctttccccatgattttaagtttcctgagcttctgcagtcatgctttctgttaagcctgcagaactatgagtc

SEQ ID NO: 203473 - DNA, 201 bp, Homo sapiens
tcccactttgctttctctatctctctcctgctctgccatggtaaggcgtgcttacttccctttcatctttccccatgattttaagtttcctgagcttctgyagtcatgctttctgttaagcctgcagaactatgagtcatttaaacctttttcttcgtaaattacccaggctcaggtagagctttataggtatagagattg

SEQ ID NO: 203474 - DNA, 201 bp, Homo sapiens
agtctggatggtttctgctgggggctccccctgattggaaacatttgtccttgaacatcatttttgaagtattatataccagcctagctcagcaagaaaaktactcatgccagtgaccatcattattgtggaagctcttacttaaatcagttagggctgagcatagtggcacattgcctgtaatcccagtgctttgggagg

SEQ ID NO: 203475 - DNA, 201 bp, Homo sapiens
gctaggatggtcgctgtctcttgaccacgtgatctgcccatcttggcctcccaaagtgctgggattacaggcgtgagccaccacgcctggccccttgacarttttgactctcacccttgaagctactgtctgtagatatgcagaatgtcatggatgggaacttcttcaatggagacccatatgcaaccagtgtctgcctta

SEQ ID NO: 203476 - DNA, 201 bp, Homo sapiens
taaatattctattctgttttgtgttgcttttctatgactcttttatatttcacccttccttctagagtttattttggaatatggttcaagtttgcatcttktgttccaaagatctgtccctctttttagagaagagctttttcaaaataatcttataaataacccttctctttctcttatttggaggtgctaaatatgtta

SEQ ID NO: 203477 - DNA, 201 bp, Homo sapiens
tttggaacattttggatttcagatttccaaattatggatgctcagcctgttaaatacagtgcaaatatccccaaatttgaaaagatccaaaatctgaaatrcttctgaggagttgcagatcagcctaggtaacatagcaagatctcatctctacaaaaaattagccaagcatattggtgcatgcctgtggttccagccact

SEQ ID NO: 203478 - DNA, 201 bp, Homo sapiens
ggttcaagtttgcatcttttgttccaaagatctgtccctctttttagagaagagctttttcaaaataatcttataaataacccttctctttctcttatttrgaggtgctaaatatgttacattttatgctttttgtatataagtaggcttattttctctgtggtgttcttttggtctgtatttctttttttttcttcttct

SEQ ID NO: 203479 - DNA, 201 bp, Homo sapiens
tgataagtagctcagcttgtgaaaaagcaaagcaactattaactacaggaaaaaaacaaaagctcttaaagaaaggaattgcaattccaggcactccatgrctcaggggacagttcttggattttgggattaggggaaatggaaaacttttggctagagaatagtttccagattgaattgtggaagaaaaatttggagtgg

SEQ ID NO: 203480 - DNA, 201 bp, Homo sapiens
tacaattgttttcctgtaacaaactaaggactaagcagggataaggtggaagagctggattcaagaaaatcctagagagaattagtaaaatgaggcaactmattggaaatcgatgaagtgggtgcactagcttgggagatggagtggaagtgatcttgttaaccaggagagagaatgctgtaggggttcacgttttgtaag

SEQ ID NO: 203481 - DNA, 201 bp, Homo sapiens
taccagctgctggcaaatccaaggcgtaattggcatttgcaggtagggtccaaaggaaaaagcacatttttttgctttcagtttgaagtcatgtgctcagygacatcaagcattgagaagggagccagccccgggcaaggcagagacaaagggggttggggagcttgggtggagggcccaagggcccagcccatgcccaca

SEQ ID NO: 203482 - DNA, 201 bp, Homo sapiens
atgacctccaggtcattgcctggtgtggaccctgcctacctctccaatattttccactattctcctctcttccagccctactttctgaatccattttctaygttccagccacatggctattctttcagctctttgaatatcctctatgtatcacttatctattgcagtgtaagcccaaatttagtggcctaaataacaatt

SEQ ID NO: 203483 - DNA, 201 bp, Homo sapiens
aggtatacttgcctctctaaggggaggggcctgtgaaagtggagagtagaggagagatgagcaagaggagccctcgtcttctgtctcacacaagaggtgcygctaatgacagttcatgtttaggatttaaaatccagtctgagtcactggaggtgatgagctaaagtgcagacttaggctgaggcaggcaggataatgacc

SEQ ID NO: 203484 - DNA, 201 bp, Homo sapiens
agccatcggggaggtctggtcttaaacatgagctgccctgattctccctgcttgatgctgtgcaaataaatgacttcccttccaccgctggaaaaacctcygttggaagtctggaccttactgcattgagttagcagactcccatttaggttttgtaacagaaggtgtatctagaacactcacaagcagagttctagacct

SEQ ID NO: 203485 - DNA, 201 bp, Homo sapiens
tagcagttttcctagaggtagttttctttctatttatccctgcttgggttttggtgattttcttgaatctatatttttgtctttcactaaatctgtaagtygtaggcctatttcttcacgtcttttctgccttattctctctctcctttcctctgagactctaaatataagtgtattgaatggactgatattgtcccacag

SEQ ID NO: 203486 - DNA, 201 bp, Homo sapiens
tatgtgccaccatgcctggctaattttctgtatttttagtagagatggggtttcaccatgttgggcaggctggtctcgaactcccgacctcaagtgatccrcccactttggcctcccaaagtgctgggattacaggcgtgagccaccggattcagcctcagactggtcttgaatttccaccctcaatagattctcccgcct

SEQ ID NO: 203487 - DNA, 201 bp, Homo sapiens
agaaagagcaaaaaatctgacctgacactcagtttggattcgtgtctccatggcggggaggcattcacagagagggcagtgtgagtggcaggacaggaaargggaatgaggaggatggagttagatttggggtcccattgatttgttgggaaatactgcatcaggatgggttcatgaactacaaacccacagaggtagctt

SEQ ID NO: 203488 - DNA, 201 bp, Homo sapiens
gtccagcactttcctaataagtaaggggaaagagatggaggggtctggagcttcacttgcccctcgcaggctcaaagccttagagacaccctctcctctcytcagagtccacacgcaggacgcacagcagagctgtatccctgtgagcccagggcagctctgtcataagaagaaaggcaatcgattcaacttagttaccaa

SEQ ID NO: 203489 - DNA, 201 bp, Homo sapiens
cccgtccaggggctaaagtggcaggatttaattgttggatgtgagcaatgagaaagagcaaaaaatctgacctgacactcagtttggattcgtgtctccayggcggggaggcattcacagagagggcagtgtgagtggcaggacaggaaaagggaatgaggaggatggagttagatttggggtcccattgatttgttggga

SEQ ID NO: 203490 - DNA, 201 bp, Homo sapiens
gagtccaggagtttgggacctgcttgggcaacatagggagacctcatctctacaaaagttaagaaaattagccatgcaggatggtgcatgactgtattccyagcttcgcaggaggctgaaaaaaggaagatccctcgagcccagtagctcaaggctgcagtgaggtaagatcacccccactacactccagcctgggtgaca

SEQ ID NO: 203491 - DNA, 201 bp, Homo sapiens
ctatgctagtggccatccctggttccatctgggacctgtgagaagtcatggaatcaaccgtccacctccactcagctcaggtgacctggggccaacacagstggtgtcctgtctagaagccattgcccttgaatttgtttcctgtagcccttgtaacaaattgccacaaacttaaggccttcaaacaacagaaatgtatcc

SEQ ID NO: 203492 - DNA, 201 bp, Homo sapiens
tttacaaccttgactcttttgttttgccaccaccatcgagccttcatagcttgggctgaacttaaccacagacatcggcagagtgatgtgctcttgctgascggtgatcaaccgtgtggccctcagaggatttctgggttctgtgtgagatggagctgctccatcattcacacaagatgtcgtgcaaaaatgagtcgttgg

SEQ ID NO: 203493 - DNA, 201 bp, Homo sapiens
cctgtcacatgtaaaggctctatctacggcagttccatgggggacacaaatagctagaaagcgttttgagctgtctgaaggttgaggaagtgggatgcacrtggtgctagctttattttgggataggaaggagagaaggaggcaatgttccttttgcaggatctgttgatagaactctccttcccctaaggcatcaactgc

SEQ ID NO: 203494 - DNA, 201 bp, Homo sapiens
ttcggttatcactttaattactgcagatatacaagccacgacaaactggcctgatctatatataattacagacacaagaaatgctttggttttactaaatytcagatatcacattgccattgttcctctctcctaataagagtgtgtaaattacagatacagatgtttttaaaactttctgatagccagcgggtgcagtgg

SEQ ID NO: 203495 - DNA, 201 bp, Homo sapiens
tgtctggctttatttatgatttggctctgtgtttgtaagaagataacctttggtgacaccagaagctgggcaaggctttctaagcccccactgtttttttkttgttgttgttttttgttttttttttttgtttttttttgctgagacataccattctatatcacactgtggcatagtaattatctgcttttccgattatct

SEQ ID NO: 203496 - DNA, 201 bp, Homo sapiens
ccccccgagtagctgggattacaggaacgcaccaccacgtccagctaatttttgtatttttagtagagatgggtttcaccatgttggccaggatggtctcratctccttacctcgtgatctgcccgccttggcctcccaaccctctgtgtatctctgtatattcccctctccttataaggacaccagccactggattcatc

SEQ ID NO: 203497 - DNA, 201 bp, Homo sapiens
tgagaatcatccaactccagtgggtattttaggttgggtctgtgtgcatgtgactcgtatgtgtatgtgagtcctggtcttataatgaatgagtggagcamatctactcatggctcaatacccaactcaagtttccctccgctgtgaaaaggacacatctgattatagtagctgcagtggagctttttttatatgaatcat

SEQ ID NO: 203498 - DNA, 201 bp, Homo sapiens
gctggatatggtggcttgtgcctgttgtcccagctactggggaggctgaagtggggggattgcttgagtccagagtccaaggctacagggagctatgatcktgccactgcaccccatcttggataacagagtgagatgagtgtgtacatgtgacagtgtgtgtgtatatatatttatatattatacttacatattatatat

SEQ ID NO: 203499 - DNA, 201 bp, Homo sapiens
ttcctcatatgtaaaatggtgatgtaatcatatctactttatagaattgctgtgtggattaaattttccacgtgaaatgtatagaataatatacctatacrtttcacacaataatatacctatacatttcaggcacaagccaccacacctggccataccccttatcatctttaaaacaccttacattaaatgacaggatct

SEQ ID NO: 203500 - DNA, 201 bp, Homo sapiens
agaaatccagagggtccagcctgagacagatgccagggtgatggtgagagtctggggagggtattttccttcataaggttcttcccaggcctggatcagarggggcagctgtggattccccacagccaacatattgaggaagattcagccctcactagggatgttctgaggtcatgggagactttgtgaaagttggaggat

SEQ ID NO: 203501 - DNA, 201 bp, Homo sapiens
gttaaaatgtggattgagtgtgcacatttgtttttattttttccctaaattacaccaagactgcagaaaagagatctgagatacatatatatatatatatwtatatatatatatatatatatatataatacatgtatatatagagagcgagagaaagagagagatgcgaaagtatggggaaaacgatagaaaatagcaaca

SEQ ID NO: 203502 - DNA, 201 bp, Homo sapiens
agcagccccagccacaggccaccaccttcctctgggactcagcgtgtttctatctcatgagtagaatggagagtggattcactctgtttaaatttaatttrtagctattttctcactctctattctctttgccaagcctgagaatggagtgcatgttagtttatcagatgtagttccttgcatgcataagttcacagagga

SEQ ID NO: 203503 - DNA, 201 bp, Homo sapiens
aaagttggaggatgggctcagctacctcctgcttctgcttcctccatagtagtcagaccagaagaaaaaaaaagtataatgtgtgtttttcctcttttcaygatttgattttttccacatattgaagtaatttttccttgaaaaggactgaatattaaaaaatacattttatgtctgtaatcctagcattttgggaggccg

SEQ ID NO: 203504 - DNA, 201 bp, Homo sapiens
gactcattagttacatattgaatgctggattttgagactcccagagtcctgcctccaaatgcttaaagccgaattgtaccctccagtctttttttctttcttttttttttttttttgagatggagtctcgttctgtctcctgggctggagtacagtggtgtgatctgggctcactgcaacctctgcctcctaggttcaagc

SEQ ID NO: 203505 - DNA, 201 bp, Homo sapiens
agatcattggtcagccaaatgaggagatgggaggaaacctaaaatctgcctcctcaaaaggtttgggatggagttttcagggggtttttaagaggatgggygattggctaaagtgtggggattcctgactggttgagaagcaagaggatgaagtcctgggacaggaagatgaagaaactgtatgcctgtcctgagtcagtt

SEQ ID NO: 203506 - DNA, 201 bp, Homo sapiens
taacccatcttggaatgagcctacctgagtcagctcacctgcaaaaactgtcacttatgcagagcatacagtgtcttcacagcagaacagcctcacaggctcctgaaacttttctgtcattttcctttttttccactggtactaggaacctcatttccataaattaatttttttttttacaataaggtttttttttttttt

SEQ ID NO: 203507 - DNA, 201 bp, Homo sapiens
gtagggaaggcaaggaaggattctcctctagagccttcagagggtgcatgcccttgctgaccccttcatttgggacttctggcctctagaaccatgagagrataaatttctgttgttgtagtgcccccattttgtggtactttgctatggcagcctagggaacagatattaaaggtcatggtagccactggggatttgaca

SEQ ID NO: 203508 - DNA, 201 bp, Homo sapiens
gcagtaaaccaagatggtgccactgcattccagcctgggtgacaaagggagactctgtctcaaaaaataatagtaataaaataaaataaaaataaaaaataaaaaaataaaaatgtatctgcaaatttgacactttccccatcaaacggtagagtttaattcccctcttgttgatgatgcgctggcctccgtgacttgctt

SEQ ID NO: 203509 - DNA, 201 bp, Homo sapiens
tattgctgtggccatttttggaaaaccctgcccgtccaggggctaaagtggcaggatttaattgttggatgtgagcaatgagaaagagcaaaaaatctgasctgacactcagtttggattcgtgtctccatggcggggaggcattcacagagagggcagtgtgagtggcaggacaggaaaagggaatgaggaggatggagt

SEQ ID NO: 203510 - DNA, 201 bp, Homo sapiens
cagtaaaccaagatggtgccactgcattccagcctgggtgacaaagggagactctgtctcaaaaaataatagtaataaaataaaataaaaataaaaaataaaaaaataaaaatgtatctgcaaatttgacactttccccatcaaacggtagagtttaattcccctcttgttgatgatgcgctggcctccgtgacttgcttc

SEQ ID NO: 203511 - DNA, 201 bp, Homo sapiens
tgggtggggacacagagccaaactatatcattgtcccctttcaaaattaagagaaatttttgcagagaagggaaatagtgaggaagtgcacttaagtgggwcttgcaacatgtggttctgtcttcaacacgaaattcaataagggggaagcgaccacagaaccaacacattttcaaacagtgtggtaacctggtgagtgtg

SEQ ID NO: 203512 - DNA, 201 bp, Homo sapiens
accaagatggtgccactgcattccagcctgggtgacaaagggagactctgtctcaaaaaataatagtaataaaataaaataaaaataaaaaataaaaaaataaaaatgtatctgcaaatttgacactttccccatcaaacggtagagtttaattcccctcttgttgatgatgcgctggcctccgtgacttgcttctagtga

SEQ ID NO: 203513 - DNA, 201 bp, Homo sapiens
gtagtgtcactggctgtgccgcctgccccaagccttcatctttctccatctgagatgtttcttttctttcttttttttttgttttttgagatagtgtctcratttgttgcccaggctggagtgcagtggcgtgatcttggctcactgcatcctcctcctcctggattcaagtgattctcctgtctcagcttcccgagtagc

SEQ ID NO: 203514 - DNA, 201 bp, Homo sapiens
atctttctccatctgagatgtttcttttctttcttttttttttgttttttgagatagtgtctcaatttgttgcccaggctggagtgcagtggcgtgatctyggctcactgcatcctcctcctcctggattcaagtgattctcctgtctcagcttcccgagtagctgggattacaggtgcctgccaccacgcctggctaatt

SEQ ID NO: 203515 - DNA, 201 bp, Homo sapiens
tcagactgcgtgcaacttctgactcctccaaaaggtaactactaatagcctactgtcaactgaaagctttaccaataacataaaccatcaattaacacatrtttcgtatgttatatgtattatatgctgtgttcttataatcaagaaggctacagaaaatgaaatgttattaagaaaatcctaaggaatggctaggcatgg

SEQ ID NO: 203516 - DNA, 201 bp, Homo sapiens
gtgtctcaatttgttgcccaggctggagtgcagtggcgtgatcttggctcactgcatcctcctcctcctggattcaagtgattctcctgtctcagcttccygagtagctgggattacaggtgcctgccaccacgcctggctaatttttctgtttttatttatttatttttttgtttgagatggaatctcgctctgttgccc

SEQ ID NO: 203517 - DNA, 201 bp, Homo sapiens
tgttgcccaggctggagtgcagtggcgtgatcttggctcactgcatcctcctcctcctggattcaagtgattctcctgtctcagcttcccgagtagctggkattacaggtgcctgccaccacgcctggctaatttttctgtttttatttatttatttttttgtttgagatggaatctcgctctgttgcccaggctggagtg

SEQ ID NO: 203518 - DNA, 201 bp, Homo sapiens
accctggcgacatcactcaccttctccgagccttggtttccacattgagaagtgagttggaatagtggatctagaagtagtaataccttcttcataggacytatgtcaggattaagtgagataatgcatggaaatactttggcatagtgcttggtacccagcttaagtgcccaataaatggttaccaacagaaatataccc

SEQ ID NO: 203519 - DNA, 201 bp, Homo sapiens
ggagtgcagtggcacaatcttggctaactgcaagctccacctcccgggttcacaccattctcctacctcagactcccgagtagctccgactacaggcgccygccaccacacctggctaatttttgtatttttagtagagatggggtttcaccgtgttagccaggatggtctcaatctcctgacctcgtggtccacccacct

SEQ ID NO: 203520 - DNA, 201 bp, Homo sapiens
cttgcctccaggcgtctacatgggcacacacacatccccacaccctacaaggaaacccaagctggtttatacaagctcactttaggcagtttgccaaattmtactccgattcgttcagtggacagatagttacgtgaaatacttgcagtacgggaaacatttgtttctcagccctggggataatcaatagaggcaaatgcc

SEQ ID NO: 203521 - DNA, 201 bp, Homo sapiens
aactgttgacaggtatacaattcaactggcgggagcagaaacgggcagacctactagataaagggtgcttaccacttgtgagcccccaacatgcctggggsatctgctgtcactgtgtgttacagagatggagactgtcagtcgctggtgtcagttaagagagcctctgttttattattattttgggttttttttgagatg

SEQ ID NO: 203522 - DNA, 201 bp, Homo sapiens
gagtgcagtggcacaatcttggctaactgcaagctccacctcccgggttcacaccattctcctacctcagactcccgagtagctccgactacaggcgcctrccaccacacctggctaatttttgtatttttagtagagatggggtttcaccgtgttagccaggatggtctcaatctcctgacctcgtggtccacccacctc

SEQ ID NO: 203523 - DNA, 201 bp, Homo sapiens
tcagtggacagatagttacgtgaaatacttgcagtacgggaaacatttgtttctcagccctggggataatcaatagaggcaaatgcctttgcaatcacaaygcctgtttatgtgtggagttcttcattgttcttggtttgtgagtacagtaaacattctccaagtggcagcaggagagaaccacggtgctttcgtaacaag

SEQ ID NO: 203524 - DNA, 201 bp, Homo sapiens
gtggtggttcacacctataatcccagcattttgggaggctgaggagggtgaatcatttgaggtcaggagtgggggaccagcctggccaatataatgaaacycagtctctactaaaaatacaaaaaaattagctgagcatggtggcacactcctgtaatcccagctactcaggaggctgaggcaggagaatcccttgaacct

SEQ ID NO: 203525 - DNA, 201 bp, Homo sapiens
acaccattctcctacctcagactcccgagtagctccgactacaggcgcctgccaccacacctggctaatttttgtatttttagtagagatggggtttcacygtgttagccaggatggtctcaatctcctgacctcgtggtccacccacctcggcctcccaaagtgctgggattacaggcgtgagccaccacgcccggcaat

SEQ ID NO: 203526 - DNA, 201 bp, Homo sapiens
tacttgcagtacgggaaacatttgtttctcagccctggggataatcaatagaggcaaatgcctttgcaatcacaacgcctgtttatgtgtggagttcttcrttgttcttggtttgtgagtacagtaaacattctccaagtggcagcaggagagaaccacggtgctttcgtaacaagctgagatttacaggcttgtaagagc

SEQ ID NO: 203527 - DNA, 201 bp, Homo sapiens
cagacttctttgttcaatcttctgaataagtcacatttgaatggcgcacttattaacggtgacatagtagaggctatcccagttagatactggcataatcmaaaactgctccaaggacgtccacttgtcctatgaatgtggaacaaagtaaagatggtctgatcccatagcttccccatgtggctctaagcagttacattt

SEQ ID NO: 203528 - DNA, 201 bp, Homo sapiens
ttgtgccctaccaactcctttaatcccaggcaaaatgcaaagaaatgacagtagaaggatggaggacatgcatggataagggagtgaatacagtgttttcrccctccctgctctgccagcttctacaccaaaggttctaaagtcattttcaatactttcctggcattctatttttaagctctgaggaaagaataaaggcta

SEQ ID NO: 203529 - DNA, 201 bp, Homo sapiens
gtattaatgggagagccacgtgtgcgctgtgcagggagaaaggctcatcagtattacagatggcatgtccctttagttaatttagaagaaattccgatcasccaacagaactctgaggatggatgcaggaaaaagaagactgtggcatatggagggaacatatttgttcttggaaaatcagtagaaaatgtttaatgtcat

SEQ ID NO: 203530 - DNA, 201 bp, Homo sapiens
gtcagggagccactggaaggctcacctgggggtgggagaggtgatatgtttagactgcctacagcagttccagcagggactaagaagctatgtcttggaayagaccaaatgaaaagccccagctagtctcgggctgagatggccaagagttggatatagcaacttgtggtactgagcctagaggacttgaagaaaggggac

SEQ ID NO: 203531 - DNA, 201 bp, Homo sapiens
tgctcgagttgtctgagcctaaacacaatttgggtacataaagaacaaaatgccagccaggcgcagtggttcacacctataatcccagcactttgggaggscaaggcaggtggatcacctgaggtcaggagttcgagatcagcctggccaacgtggtgaaacgccatctctgctaaaaatacaaaaaattaactgggcgtg

SEQ ID NO: 203532 - DNA, 201 bp, Homo sapiens
aattttttaaaaggactttaggaggaaagccattatgcaaccgtcccgtttagtgaaagagaatgttgatttaaactgggaaaagtcagctcaccatctcyagcatggcagagagaaacgctgaggaaaattctccctattttcaggagtagtagcttgctcctctgggaagaaggttaccagaaaggcccgcaaatgatt

SEQ ID NO: 203533 - DNA, 201 bp, Homo sapiens
ggagagccacgtgtgcgctgtgcagggagaaaggctcatcagtattacagatggcatgtccctttagttaatttagaagaaattccgatcacccaacagarctctgaggatggatgcaggaaaaagaagactgtggcatatggagggaacatatttgttcttggaaaatcagtagaaaatgtttaatgtcatcataacctc

SEQ ID NO: 203534 - DNA, 201 bp, Homo sapiens
ctcctagactgaagccaccctcccacctcagactcctgagtagctgggactacaaacacatgccaccatgcctagctaattttgtttattttttgtgaagktggggtctcactatgttgcccaggcttgtctcacactcctgaccttaagcaatcttccagcctcagcctcccaaagcactgggattacaggcgtgagcca

SEQ ID NO: 203535 - DNA, 201 bp, Homo sapiens
ttctaatgtcatttttggatttctatatatctaaatttttcatgtgtaaaatatattagcatagtagtatgtgcatgtactgaaaaataaataaagtaaayatattggagaaggtatgctttacatttttaaacatcaaaaatgtttggagcccatagcctgtgagcatagtgaatataaatgaaccagtcatgttggctt

SEQ ID NO: 203536 - DNA, 201 bp, Homo sapiens
gtcatcataacctcatttgcataaaaatagtcacatgcggtaaaccagataaaagcaaaggaagacgtgacggaaccaatgctgtttggagtttcgtttcrttatgaataacataaataattcaattgaataaataaatacgaaattgctttaagtagatgtactacaagtgattattccttgaaaattccttaatggtac

SEQ ID NO: 203537 - DNA, 201 bp, Homo sapiens
accagcctgtgccccccaggctggagtgcagtggcacaatcttggctcactgtagccttgaactcctggactcaagctattctcccacctcagccttccargtagctgggactacaggtacatatcatcacatctggctaattttgtgtttttgtttttgtttttatagaggtctcactgttttgccaggctggccttgaa

SEQ ID NO: 203538 - DNA, 201 bp, Homo sapiens
ttttagattggaagcaagtgtgataatagcattgggaaatggagaagatacttataattaccttgggtagtaagtaggactttgggcagttttgcaagtgrgtactttgtcatgcttttccagctttcactaatgtcaggtgatactttcatcattagaagaaaaatagttactaaaaaggaaataataaacatgatgacc

SEQ ID NO: 203539 - DNA, 201 bp, Homo sapiens
caaaatggcaaagaaatggaatcaactctctaaatgtctatcaacagtagactagataaagaaaatgtggtacatatacaccatggaatactatgcagccrtaaaaaagaatgagatcatgtcctttgcaaggacatggatggagctggagtccattatccttagcaaactaatgcaggaacagaaaatcaaataccacat

SEQ ID NO: 203540 - DNA, 201 bp, Homo sapiens
aaatacacatggatgaaaaacacatgacaattttaaatttatttcatagtcaaagaaaataaaaaattaaatacacagaggtgttttttttccccctatcygcaaatgaacaaagattcattttttgtgttgatactttacaggcaaggccttagtaatatgaaaaaaatcatatcttctgtgagtgcaaattgaaacaag

SEQ ID NO: 203541 - DNA, 201 bp, Homo sapiens
tcatggtagccactggggatttgacatagcgaagtgtcctgatctggggtatgtttttagaaggtcattctgaatgatgtttggagaatggattgcagagwgcaggagagatgtaaggagtccagtttggaggatagtgctagtaggagatgatagtgattccgactagggtgtgcctagtgatatgtgcctagtgatttg

SEQ ID NO: 203542 - DNA, 201 bp, Homo sapiens
gtagactagataaagaaaatgtggtacatatacaccatggaatactatgcagccgtaaaaaagaatgagatcatgtcctttgcaaggacatggatggagcwggagtccattatccttagcaaactaatgcaggaacagaaaatcaaataccacatataaatgggagctaaataatgagaacacatggacacatggagggga

SEQ ID NO: 203543 - DNA, 201 bp, Homo sapiens
gtagccactggggatttgacatagcgaagtgtcctgatctggggtatgtttttagaaggtcattctgaatgatgtttggagaatggattgcagagtgcagragagatgtaaggagtccagtttggaggatagtgctagtaggagatgatagtgattccgactagggtgtgcctagtgatatgtgcctagtgatttggctgt

SEQ ID NO: 203544 - DNA, 201 bp, Homo sapiens
atagtgatgaatctgatctctgaatgaggaagggctttctaagaatgaaatccacgcaagaaatgcaaaggaaatgtgtcatggatccaagctcataaatwttaaaataatctgtacatcaactgagtagagaaataatacaccaaactgaaaatacatataccacaaatgctatagatgaacaaataccattaatatata

SEQ ID NO: 203545 - DNA, 201 bp, Homo sapiens
tatgctccatgagcctggatgacatgtgtttgttttattgttaaggagcaggtatgcatacctccctctccagtccttcctgatcacaggcagtgttcgcytctccccctcaacctcctcaaatgctgtttatcaaaatcttaaaaaacacaatggttcccaaatggcacttggccaattttgtattggattttataacat

SEQ ID NO: 203546 - DNA, 201 bp, Homo sapiens
tatgtatgtatgtatttatatgtattttatatatatatactgtatatgtgtacatgtgtatatatacatatatatacacacatacatatatatgcacatamcacacacacacacacacacacacacacacacacacacacatttaaatatatctatattttaaaagattccagttttggaaatggcatgccaaaccctcac

SEQ ID NO: 203547 - DNA, 201 bp, Homo sapiens
actccatctttacttaaaatacaaaaattatctgggcgtggtgccacgtgcctgtagtcccagctattcaggaggctgaggcaggagaattgcttgaaccyggggggcagaggttgcagtgaggcgagatcgcaccactgcacgccagccttggtaacagagtaaaactccatctcaaaaaaaaaagattaagctttgaat

SEQ ID NO: 203548 - DNA, 201 bp, Homo sapiens
agtggcaaaaagactggaggtggcccggggctagaacacccagagaggagcatgaactgcagatcgggctggattggggtgaagactcactgccaatggcrcaccctctcctgaggaaatctaggtagagcccagcccaggaggaggaagggaaggttaaggcaatctcagccataactccagctccttgaccgcagggat

SEQ ID NO: 203549 - DNA, 201 bp, Homo sapiens
gtaatttacaaaagaaagaagtttaatggactcatagttccacgtggctagggaggcctcacaaacatggcagaaggtgaaaggcacgtttcacatggcgrcagacaagaggagagagaagagagtttgtgcagggagactcccctttataaaatcaccagatcttgtgagatttactcactgtcacgacaatagcaccgg

SEQ ID NO: 203550 - DNA, 201 bp, Homo sapiens
tcaccccccttgcaggatgtgctgcaggggcatggcttgtctgttcgccacccttaataggacggggagcaagtaaacagtcaggtgcaggagcgggggcsagtgcttttgggctgcagccccacggtagcatctaagatgggtgcctgtggctgccaaagccctattgggcatgttgcatttatacgtttgtactcagat

SEQ ID NO: 203551 - DNA, 201 bp, Homo sapiens
aagaaagaagtttaatggactcatagttccacgtggctagggaggcctcacaaacatggcagaaggtgaaaggcacgtttcacatggcggcagacaagagragagagaagagagtttgtgcagggagactcccctttataaaatcaccagatcttgtgagatttactcactgtcacgacaatagcaccggaaagatctgcc

SEQ ID NO: 203552 - DNA, 201 bp, Homo sapiens
atacaccaggcactgtgctaagtgcatacaccaggtactgtgctaagtgcatacagtggatactatgctaagtgcatttaccaggcactatgctaagtgcmtacagtgaataccatgctaagtgcatataccaggtcctatgctaagtgcatacagtggatactatgctaagtgcacataccaggtcctatgctaagtgcc

SEQ ID NO: 203553 - DNA, 201 bp, Homo sapiens
gtggcgtgaccatagctcactgcagctcaagtgatccttccacctcagcctccccagtagctgggactacagttacacacaaccatgcctggctaagtacttttttttttttttttttttttggagagacagggtctctctgtgttgcccaggctgttctcaaactcctggcctcaagtgattacctctccttggcttccc

SEQ ID NO: 203554 - DNA, 201 bp, Homo sapiens
agccttgtatcccagcaatagagcctgtgtgatcatggtgtattcacattttgatgtgctgctgaattcagtttgctagtattttgttgaggacttttgcrtctgtgttcatgagggatataggtttgaagttttccttcttgttgcatctctgccagattttggtatcaggctgatgctggtttcatagaatgagttagg

SEQ ID NO: 203555 - DNA, 201 bp, Homo sapiens
tggcgtgaccatagctcactgcagctcaagtgatccttccacctcagcctccccagtagctgggactacagttacacacaaccatgcctggctaagtacttttttttttttttttttttttggagagacagggtctctctgtgttgcccaggctgttctcaaactcctggcctcaagtgattacctctccttggcttccca

SEQ ID NO: 203556 - DNA, 201 bp, Homo sapiens
ggcgtgaccatagctcactgcagctcaagtgatccttccacctcagcctccccagtagctgggactacagttacacacaaccatgcctggctaagtacttttttttttttttttttttttggagagacagggtctctctgtgttgcccaggctgttctcaaactcctggcctcaagtgattacctctccttggcttcccaa

SEQ ID NO: 203557 - DNA, 201 bp, Homo sapiens
ttctcattcatcgtttaaatgtcatctttaccttgaggtaacaaattaagtacgtttattttttctgaaaatatttatggatgccataggctcttgagggwtatctgtcatccaagaataggccattatattttgaacttaaaaaataatgtataatttattattaatttacagcccttcttaagttttttgacacaagat

SEQ ID NO: 203558 - DNA, 201 bp, Homo sapiens
gctaatgcatgcggggctgaatacctaggtgatgggttgatagttgcagcaaaccaccatggcacatgtttatgtatgtaacaaacctgcacatcctgtgygtgtatcccagaacctaaaataaaatatttttaaaaattaggtaacagagtctcagtatgctgtccaggctcaagtgcactggcatggggcttcagctgt

SEQ ID NO: 203559 - DNA, 201 bp, Homo sapiens
ggtgctccacggacatcgctagcttaattaatggactctatgttgtaatttattatcaaacagcaattaaacagagataaaataggcactgaggagggtartttcctgtcttgcagcatgtgtttgtcaacaagatgttccgggccactcagagagccttgcttgctcggaaatgtctgtcgccttggttttggctgatta

SEQ ID NO: 203560 - DNA, 201 bp, Homo sapiens
cagtcagagacctagcatccatgccatccaccttaagacttgatctttcttgttaaggtgatcaccgcaaagatttgagccctggtcctcacttagaggcycgtgttgtcttcccatcatgaagttggaaccaagccatggtagaacagtgactcggcatccacacctccactagctgagctctcatgggtcgtgttttgt

SEQ ID NO: 203561 - DNA, 201 bp, Homo sapiens
aaggtgaatcagaaactcaaaagaatgcaaccatttgtgtcttatctacctatgacctggtagcctcctccatgctttgagttgtcctgcctttccggacygaaccaatgttcatcttacatatgttgattgatgtctcatgtctccctaaaatgtataaaaccaaactgtgctctgaccaccttgggcacatgtcatcag

SEQ ID NO: 203562 - DNA, 201 bp, Homo sapiens
cgtcactgtaatggggagacaaagctaggctgaattgatgaaagctggaaagactactttactgggtcttattcattattttcagcagcatagcataaccstgctctttaaaaaatggactaaattgagagtctgttgaacttcccccgttcaacatggggtattcatttgttattaggaacggcaatttttatgcatgta

SEQ ID NO: 203563 - DNA, 201 bp, Homo sapiens
gaggagggtaatttcctgtcttgcagcatgtgtttgtcaacaagatgttccgggccactcagagagccttgcttgctcggaaatgtctgtcgccttggttktggctgattactaattagaattagacaaacatccgcttctttttggaagcctgagttttatttaaaaatagaatgtcaaggctgggcgcactggctcacg

SEQ ID NO: 203564 - DNA, 201 bp, Homo sapiens
ttgtgtcttatctacctatgacctggtagcctcctccatgctttgagttgtcctgcctttccggactgaaccaatgttcatcttacatatgttgattgatrtctcatgtctccctaaaatgtataaaaccaaactgtgctctgaccaccttgggcacatgtcatcaggacctcctgaggctgtgtcacaggcatgcatcct

SEQ ID NO: 203565 - DNA, 201 bp, Homo sapiens
ccacgttggccagggtggtcttgatctcctgacctcatgatccacccacctcagcctcccaaattgctgagattacaggcatgagccactgcacccagccttttttttttttgagacaggttctcgctgtgttgcccaggctggagcgcagtggtgaaatcatggctcactgtagccttgacctgggctcaagagattttc

SEQ ID NO: 203566 - DNA, 201 bp, Homo sapiens
cccatgtgtgagagggactcagtgggtgaaaattgaatcatgaggtcagtttcccccatactgttctcatggtagtgataaagtgtcgtaagatctgatcrttttataaggggaaacccattacacttgactctctaattctctcttgccgctgccatgtaagcagtgccttttaccttctgccatgactgtgtggcctcc

SEQ ID NO: 203567 - DNA, 201 bp, Homo sapiens; identical to SEQ ID NO: 35781

SEQ ID NO: 203568 - DNA, 201 bp, Homo sapiens
gtgtaatggtgtgatctcagctcagtgcaacctctgcctcccgggttcagtcgattctcctgcctcagcctccgtagtagctgggactactggtgcatgcygccacacctggctaattttttgtattttagtagagacggggtttcactcccacccaggctgttctcaaactcctgagctcaggaaatccaaggcctgact

SEQ ID NO: 203569 - DNA, 201 bp, Homo sapiens
tgggttaaatgtggtgtattaatctgttctggcattgctataaagaaatacctcaggctgggtaatttacaaataaaagaggtttaattgactcatggtgycacaggctatataggaagcatgatgctggcatctgctgggcctccggggaggcctcaggaaacttacaattgtggcggaagatgaaggggaagaaaggtt

SEQ ID NO: 203570 - DNA, 201 bp, Homo sapiens
aactagctgagcgtggtggctggtgcaggtaatcccagctactcggggctgaggcaggagaattgcttgaacccgataggcagaagttgcagtgagctgakatcgcgccactgcactccagcctgggtgatagagtgagactctgtctcaaaaaaaaaaaaaaaaaaaaaatggtacctggcacacaacagtaattattaa

SEQ ID NO: 203571 - DNA, 201 bp, Homo sapiens
agctctgtttaaggtttctgtctctaatgatgtcaaccttggcaaattgcctttccctaggaaattatccattacatctaggcttttaaatttatttgtakagggatctgcaaatgagtctttatttttatttttaacagttatttgtttcaatgattatttccccctttggtttcttatttatgtatttgtgctttctct

SEQ ID NO: 203572 - DNA, 201 bp, Homo sapiens
tgggaggaaggagagtatctcctctacaggattcctgggaggataaaatgagctgtgatgtgtgaagttcttagaacggtacctggcatggccaagcaccrtggctcacgcctgtaatcccagcactttgggaggccaaggcgggtgatcacttgaagtcaggagttcaagaccagcctggccaacatggggaagtcctgt

SEQ ID NO: 203573 - DNA, 201 bp, Homo sapiens
ataaagaaaagaggtctaactggctcacagttctacacgctgtacgagaagcatgacaccagcatttgctcaggttctgtcgaatgcttgaggctgtgccmcctctcagaggagggtgaagaggagccagcgtgcagagatctcatggtgagagtggaagggagagaggggtggcaggtgccgggtgccaggctcttttca

SEQ ID NO: 203574 - DNA, 201 bp, Homo sapiens
gaggtaattcagaccgtgcatgcttttggcttggaatgctgttcaatatgctgtgggttgcttcgctggggagaaatagagttgctcattcattcattcartgagtggtttttggaggtgctggccctgatagcaagattctctctagctggggggttggggtagggaacaaatgtgatgaatgttacaatggactatgga

SEQ ID NO: 203575 - DNA, 201 bp, Homo sapiens
ttacaaaacaaaacaaaaaaagaaaacaaatgagacaaacaaaagataaatgtagaagatatgacatccaaatagtaggagatatcgtaagtgtatatcayaatatatcataagaggaagtgagtggatagtatctaaaacagatgaaccaaataaaagcagtagctattatttagaacaatagggatgtgtaatgccaga

SEQ ID NO: 203576 - DNA, 201 bp, Homo sapiens
cggaggttgcagtgagccaaggtcgtggcactacactccagtgtgggtgacagaacaagacgccttgctccttaaaagacgtccttaaaaataataataaytttctcgtagctgtatttcacatcaagaaacaaataatcctgataaaacttatttgactagctacttattggtatcaacaagctcttattgaataaatat

SEQ ID NO: 203577 - DNA, 201 bp, Homo sapiens
gtgactccacctgtgccccactctggccagagctccacagtcactaacaccccttggcttctctctcctttcagaatccgggaattgacatcggtgatgtmtccgaaagaagagcattaaggaaaagtttaaagtgtaagaatttccagtggtacctggaccatgtttacccagaaatgagaagatacaataataccgttg

SEQ ID NO: 203578 - DNA, 201 bp, Homo sapiens
gtctcactgtgttgcccaggctggagtgcagtggtgaggtcgtagctcattgcagcctccagctcctggcctcaagcgatccccccacctcagtctcccaygtagctgggagtgcaggcttgccccaccatgttcagctaatttaaaaaaaattttttagtagaacgatgcctcactggtcttggacttctagctgcccag

SEQ ID NO: 203579 - DNA, 201 bp, Homo sapiens
ttactaaggaaatgcgtaagagcagaaactgagaatgtaggtcgtcaacatcagcgtgtcccagaaatccatttgcacagcaatgataaggatggttgacytgtctgggacctttattgctgtaggttcctgattttgcttaggaaggaggattccctggcctgggtctggatgaatcaaataggtctccttaaaccaccc

SEQ ID NO: 203580 - DNA, 201 bp, Homo sapiens
catcaagaaacaaataatcctgataaaacttatttgactagctacttattggtatcaacaagctcttattgaataaatatgtaactgaatgacatcctggrggctcattattattatatgagttacccaaagttcccagaatttctggtatgcagtgctgtagccaacagtggtcattcctatatctgcttttacagtttt

SEQ ID NO: 203581 - DNA, 201 bp, Homo sapiens
cctcagcctccaaagtgctaggactataggcctgagctaccacacctggcctgattagtcacttttggagccatttaatttatcaaggacctactgaagtkccagcactgtactaggcaagaaaaaaggaaggtggatacaaaacgcatatgattgcttctgttttctaggagctcagagtttaaatggaagagaccgagg

SEQ ID NO: 203582 - DNA, 201 bp, Homo sapiens
catttctgtaaaagcagagtgaattattcattagaacatcattacaagctttgcaatggaaaattattttcacttctgcatgtaatgaacttcgcaaagarccaacaaaaggagaaattttgcaggtataggaaagaaaagacaggaggtggttgtaggcatttattttcttgtcgtaatcaaataattcctctaataatt

SEQ ID NO: 203583 - DNA, 201 bp, Homo sapiens
cattattattatatgagttacccaaagttcccagaatttctggtatgcagtgctgtagccaacagtggtcattcctatatctgcttttacagtttttactrtctataccagttactctcaaaacttcatgggcataagaaacacctgggggggtgtcaattgaaatacaaaataaataaaaaataaaaaaccactatcaac

SEQ ID NO: 203584 - DNA, 201 bp, Homo sapiens
acgcatatgattgcttctgttttctaggagctcagagtttaaatggaagagaccgaggctttgtcagcagcaatcacacaagctattgggtgaaatgacaragatgctctgagcatgtgaagtggagtagagaagacggctgggggcagcatggaggctggttggaaaggctttctgagtagggtgtcactcaagctgagt

SEQ ID NO: 203585 - DNA, 201 bp, Homo sapiens
ctgctaattcctggccatcttgcagctgagtctgcagagtcatatttcagatactttattttccctgtcagcacacagcagccattatgggttcatttctrtaaaagcagagtgaattattcattagaacatcattacaagctttgcaatggaaaattattttcacttctgcatgtaatgaacttcgcaaagagccaacaa

SEQ ID NO: 203586 - DNA, 201 bp, Homo sapiens
gtgagggcgttttaggaagagaggatgtctgagccagagggcaaggtcaagaatcaacgtgcagaggttgagggagacagcggttcttcttgctaaagtgraacttgcaaggtgatctacacggctggagaagcagcaacgatggatcataaatgaccaggagggagaagggccagtatgtggactttattctaagggaac

SEQ ID NO: 203587 - DNA, 201 bp, Homo sapiens
gttttgccacgttgcccaggctggtcttgaactctttggctcaagcaatcctcccgcctcagcttcccaaagtgctgggattacaggtgtgagccactgcrcctggcctcaagttttgacctggaatggtggtgtgacttagagttacaaataactcaagtcttttgactgtagccaagtgctttgtccatgactgcagac

SEQ ID NO: 203588 - DNA, 201 bp, Homo sapiens
acaaaataaaacaaaacttaacccagaactagatcattatatacatcttgtgctgatatgaataaagatctgtttcttagtatgaattttccattctacaytggcagggcgcagcttcagccagatgggaaaggcagccttcagggatgtcagttgtgcattattgagaacataagaaaactcatgtgttgccatgggcag

SEQ ID NO: 203589 - DNA, 201 bp, Homo sapiens
ctctgatgcacggctcgtgcgcttgaaatccgggcttagggactattgcttcagcagttaacgtcaggaatctattttatagtcacaacagaaaattaacrtctcctttgcttttctttctatctcagctctgacagtcttcccctagatcaaggctaatgactgcctctggatgagatggcaaatccagcatagaaaaag

SEQ ID NO: 203590 - DNA, 201 bp, Homo sapiens
tgcacagtggactctctgaactgggtgggatgtttcccagggcctggctggtggttgaaactcagtaagtctttcaacaagggagtgcatgatgaagccargtagcactaagaaaagtgcaggtgtgagctagtggcaaaaagactggaggtggcccggggctagaacacccagagaggagcatgaactgcagatcgggct

SEQ ID NO: 203591 - DNA, 201 bp, Homo sapiens
aatgacaactctcgctgcatctatctgaagtcacactgccctgttatggaggttggcctctgtggctgtgcgttgttgtcgtcttggatctcccttcaccrtcttcttgtggactctctgaccctcttctgtgctgtctcctgtgctcttctcttggtttatgttcttattttggtggaacacaacacctggaagcttctt

SEQ ID NO: 203592 - DNA, 201 bp, Homo sapiens
taatgagggcagattgatctattctcagactcactaagctctggtcaagatgggctcagggaatgggtgtacaaagccggggcactctggagaagcagacragatgagactgcagattttcctttgtcagggaattttgtttttattttaagtcatttgtttcactcagtttgaatattgacattggcctgtgttaagccc

SEQ ID NO: 203593 - DNA, 201 bp, Homo sapiens
tgggtgatggagcttaatttcactggggaaattccaagagccagtgtaaactcagacctcagagttaacttgctccaagggtgaggaagctggggtatttwtacacctttagcagcaaatgttttagtgtaagaaccccctgggactccaccctggaggaagttctgcttcaggaggcttggggtaaggctgaaaatgtgc

SEQ ID NO: 203594 - DNA, 201 bp, Homo sapiens
tttcgtataatgacttcttttcctctgggtagatgcccagtagtgggattgctggatcaaatggcagttctacttttagttctttaaggaatctccacacygttttccatggtggttgtatgattttacattttcaccagcagtgtagaagtgttaccttttcactgtaaccacgccagcatctattattttgttactttt

SEQ ID NO: 203595 - DNA, 201 bp, Homo sapiens
ctgacctcatgatccacccacctcagcctcccaaattgctgagattacaggcatgagccactgcacccagccttttttttttttgagacaggttctcgctrtgttgcccaggctggagcgcagtggtgaaatcatggctcactgtagccttgacctgggctcaagagattttcccacctcactctcctgaggagcagagac

SEQ ID NO: 203596 - DNA, 201 bp, Homo sapiens
atgatatctaggtgaaattaaccagccttttttgaatgaatgatccctaagtttgaattggtggggtctgtgtaaatggatgagggccatttgaatagacrttgggacacttgaagatgaaaaattcatggtcaaatacaacatttttctgacttgtgctagaaagatgtcagattctcttttttgtttaatacagtgatt

SEQ ID NO: 203597 - DNA, 201 bp, Homo sapiens
acaatactttgcatccttcaatccaattaagttgacactcaatactaaccatcacagggcaagtgtatatttaattcttttttttttttttggaggtggaktcttactctgtaacccaggctagaatgcagtgatgcaatctcagctcactgcagcctctgcctcccaggttcaagtgatcctcccgcctcagcctcccaa

SEQ ID NO: 203598 - DNA, 201 bp, Homo sapiens
ttgggacacttgaagatgaaaaattcatggtcaaatacaacatttttctgacttgtgctagaaagatgtcagattctcttttttgtttaatacagtgattmctaatactcagcacgtcgacctgttgcttggaagtgatttactcattctctggtctgggagaattactgcctttttttttcttcatgactcagagtgggc

SEQ ID NO: 203599 - DNA, 201 bp, Homo sapiens
tgcaatctcagctcactgcagcctctgcctcccaggttcaagtgatcctcccgcctcagcctcccaagtagccgggattacaagtatgtgccactatgccyggctaatttttgtatttttaatagagttggggttttgccatgttggccaggctggtcttgaactcctgacctcatgtgagccacccaccttggcctccca

SEQ ID NO: 203600 - DNA, 201 bp, Homo sapiens
ctctttacacaggctctgcatgagtaagtggcatgtgtgcacccagagtctttgagagaatgcatcttggtctttaaccatcatctaccatttatttatttatttatttatttatttatttatttatttatttatttttgagacagggtcttgctctgttgcccaggctggagtgcagtggtgccatcattgctcactgca

SEQ ID NO: 203601 - DNA, 201 bp, Homo sapiens
tctttacacaggctctgcatgagtaagtggcatgtgtgcacccagagtctttgagagaatgcatcttggtctttaaccatcatctaccatttatttatttatttatttatttatttatttatttatttatttatttttgagacagggtcttgctctgttgcccaggctggagtgcagtggtgccatcattgctcactgcag

SEQ ID NO: 203602 - DNA, 201 bp, Homo sapiens
ctttacacaggctctgcatgagtaagtggcatgtgtgcacccagagtctttgagagaatgcatcttggtctttaaccatcatctaccatttatttatttatttatttatttatttatttatttatttatttatttttgagacagggtcttgctctgttgcccaggctggagtgcagtggtgccatcattgctcactgcagc

SEQ ID NO: 203603 - DNA, 201 bp, Homo sapiens
tttacacaggctctgcatgagtaagtggcatgtgtgcacccagagtctttgagagaatgcatcttggtctttaaccatcatctaccatttatttatttatttatttatttatttatttatttatttatttatttttgagacagggtcttgctctgttgcccaggctggagtgcagtggtgccatcattgctcactgcagcc

SEQ ID NO: 203604 - DNA, 201 bp, Homo sapiens
ttttctgacttgtgctagaaagatgtcagattctcttttttgtttaatacagtgattactaatactcagcacgtcgacctgttgcttggaagtgatttackcattctctggtctgggagaattactgcctttttttttcttcatgactcagagtgggctggactcccctctaaagaagccattaaatttgatgaagagcca

SEQ ID NO: 203605 - DNA, 201 bp, Homo sapiens
tttgagacagagtgtcgctctttcgcccaagctggagtgcagtggcgcgatctccgctcactgcaaactccgcctcctggtttcacgccattcgcctgccwcagcctcctgagtagctgggactacaggcacctgccaccacggccggctaatttttttttttttttgcatttttagtggagacggggtttcaccgtgtta

SEQ ID NO: 203606 - DNA, 201 bp, Homo sapiens
actcagcacgtcgacctgttgcttggaagtgatttactcattctctggtctgggagaattactgcctttttttttcttcatgactcagagtgggctggacwcccctctaaagaagccattaaatttgatgaagagccacattccttgcaaggcttgacctcaaacatttgagattagccctttgaatttctctttctggaa

SEQ ID NO: 203607 - DNA, 201 bp, Homo sapiens
tgggagtagtggcacatgcttgtaataccaacactttgggaggccaaggtggaagaatcgcttgaggccaggagtgtgagaccggcctgggcaacatagcragacctcatctctacaaaaaaatttaaaaattaactgggcatggaggcacgtacctgtagtcccagctacttggaaggctgaggcaggaggatcacttga

SEQ ID NO: 203608 - DNA, 201 bp, Homo sapiens
tccgctcactgcaaactccgcctcctggtttcacgccattcgcctgccacagcctcctgagtagctgggactacaggcacctgccaccacggccggctaatttttttttttttttgcatttttagtggagacggggtttcaccgtgttagccagggaggtctcgatctcctgaccttgtgatccgcccatctcggcctccc

SEQ ID NO: 203609 - DNA, 201 bp, Homo sapiens
gaaactgaaggcatggagtgggtgacaaagtgggtacagatgttgtctcttcccctttgcccctttgggtaaattaccgtatgatcttaaatacattgtcmaggaataagccactgaaaacggagaaggttttgatgacagcgctgcatgcatgtttttgttaagaaacactccaagggcatcattcttgggctatgtcaa

SEQ ID NO: 203610 - DNA, 201 bp, Homo sapiens
gaaggattgcttgagcctaggaattagaggctacattgagctgtgatcatgccttgtactccagtctggacagcagagcaaggccttgtcttcagaaaagaaaaaaaagacataaaattggcaggacctgtcatggatttgatgttgaggttgggagagatggagaaggtgaggggaaaaacaggagtctagggataccct

SEQ ID NO: 203611 - DNA, 201 bp, Homo sapiens
cttgaagtaacccatcttggaatgagcctacctgagtcagctcacctgcaaaaactgtcacttatgcagagcatacagtgtcttcacagcagaacagcctyacaggctcctgaaacttttctgtcattttcctttttttccactggtactaggaacctcatttccataaattaatttttttttttacaataaggttttttt

SEQ ID NO: 203612 - DNA, 201 bp, Homo sapiens
aaccacttagcccacaattcctcctggaagaagcaagcaaagtgaggattcttgcttatgggagaattttctatctgtatcgtttccctgtggtataaccraagttgggaaatagaaacagaacatcatacacgcaaaacaaattttgccaccaaattcagccaacaaaagtcaagaagggggtatgtagacactcaagag

SEQ ID NO: 203613 - DNA, 201 bp, Homo sapiens
tctctactaaccacttagcccacaattcctcctggaagaagcaagcaaagtgaggattcttgcttatgggagaattttctatctgtatcgtttccctgtgstataaccgaagttgggaaatagaaacagaacatcatacacgcaaaacaaattttgccaccaaattcagccaacaaaagtcaagaagggggtatgtagaca

SEQ ID NO: 203614 - DNA, 201 bp, Homo sapiens
gccaggtaaatggcattcctggcaatattcctttggaccagtgaggaaagtagaacattttatggggtagtgcagatgtgtgactaaatatttttcattakaacccgttttcaatgactcattaaagcaatttttaaacccaggcatggagtcagggagcaaaactgtcttagggagaaaagagggaggtatgtcaggaca

SEQ ID NO: 203615 - DNA, 201 bp, Homo sapiens
gtctctattcccaggccctttgccaacatttggcctccttgacttccttccatggccagcagctgggtctaacctaacatgcgagggcatctagctgtccwgtcccagatcaaagaagtctggaacatctattctctactaaccacttagcccacaattcctcctggaagaagcaagcaaagtgaggattcttgcttatgg

SEQ ID NO: 203616 - DNA, 201 bp, Homo sapiens
ctggagtgcagtggcatggtcttggctcactgcaacctctgcctcctgggttcaagcggttctcctgcctcagcctcccaagtagctgtgattacaggccygtgcaacaccatgcctggctaacttttgtattttcagtagatactgggcttcaccatgttggccaggctggtctcacactcctgacctaaagtgatctgc

SEQ ID NO: 203617 - DNA, 201 bp, Homo sapiens
atccttgaacatggtatatcttttcattcattcactgagtcttgcaacatcattgtgagaccctgattctttatatattgtccgtaccttgaaattcagcygccttgttttactctctaagacaccagtttcctgtctctattcccaggccctttgccaacatttggcctccttgacttccttccatggccagcagctggg

SEQ ID NO: 203618 - DNA, 201 bp, Homo sapiens
ccaagcgctggccatgggtttaccttgacatgtgtgcaggggaggtgggaaggggacagtctggaccactggcatttggaccacacatcataatgacagcygagaagggaacctatttggtatagaccgagcttcccttctgtttgacatgtttgttggtggtttccagacaagtgtccctaatctatgtggttgtttgcc

SEQ ID NO: 203619 - DNA, 201 bp, Homo sapiens
gtcgttgatccattttgagttaattttttatatggtgtgaggtaggagccatgtccattcttttacatgttgttccagcacaatttgttgaagatattatyccttagcccactgaattgtcttgacacccttgttgaaagttagttgaccataagtgtgagagtttatttctggactttcagttctattccattgatccgt

SEQ ID NO: 203620 - DNA, 201 bp, Homo sapiens
ataacatgcctcattgccctctgagggccccgagaggatcctcgcagcatttgtagggtggaatttgttcttgaagctctgtttctggttgctcattcctygcttccttgcaaataccagagaggaaatgagtcatctcagagacaagcctctcactcattcctaccagctgctggcaaatccaaggcgtaattggcattt

SEQ ID NO: 203621 - DNA, 201 bp, Homo sapiens
taatgctgtcctccttagggtttattctcagttcttagccaaggagaagcctaagggaaccagtgattcacgccttgggacgactggatgaggattcggcygaaatcttacactatgtccagctgcagtgcctgagcttttatccttcctctgactctgcatttccgatctctccttccccaggtgtaaggagctcaagta

SEQ ID NO: 203622 - DNA, 201 bp, Homo sapiens
cggctaatttttttttttttttgcatttttagtggagacggggtttcaccgtgttagccagggaggtctcgatctcctgaccttgtgatccgcccatctcrgcctcccaaagtgctgggattacaggcatgagacaccgcgcctggccctgttgtacatttaagtagtaggtcttattcattttatctaattatatttttg

SEQ ID NO: 203623 - DNA, 201 bp, Homo sapiens
cactgcaacctccacctcccaggttcaagtgattcttctgcctcagcctccagagtaactgggattacaggtgcccgccaccacactcagctaatttttgwatttttagtagagatggggtttcatcatcttggccaggctggtctcaaactcctgacctcaagtgatccgcccacctcggcctcccaaagtgcatgagcc

SEQ ID NO: 203624 - DNA, 201 bp, Homo sapiens
gttgctttcaaatttctttatttattgtaatcttctgtaaaaaggggatgcaggccaggcacggtgactcatgcctgtaatcccagcactttgggaggccsaggtgggcggatcaccagaggttgggagttcgagaccagcctggccaacatggtgaaactgtctctactcaaattacaaaaaaattagctggatgtggtg

SEQ ID NO: 203625 - DNA, 201 bp, Homo sapiens
aggccaggcacggtgactcatgcctgtaatcccagcactttgggaggccgaggtgggcggatcaccagaggttgggagttcgagaccagcctggccaacayggtgaaactgtctctactcaaattacaaaaaaattagctggatgtggtggcgggctcctgtaatcccagctactcgggaggctgaggcaggagaatcgct

SEQ ID NO: 203626 - DNA, 201 bp, Homo sapiens
gtgaaactgtctctactcaaattacaaaaaaattagctggatgtggtggcgggctcctgtaatcccagctactcgggaggctgaggcaggagaatcgcttraacccaggaggcggaggttgcagtgagttgagattgtgacattgcactccagcctgggtgaccgagcgagactctgtctcaaaaaaaaaaaaaaaaaaag

SEQ ID NO: 203627 - DNA, 201 bp, Homo sapiens
cacctgatccacccgcccacccactcaccccatccaccgacccacccatccatctgtccatccttccacccatccatccatccatccatccatccatccayccatgtatgtgtccacccacccacccatgcacttatccattagctcactccatccatccatccacccactcatctatccatatgtatattcatccatcat

SEQ ID NO: 203628 - DNA, 201 bp, Homo sapiens
ccattttcagtaattggcttattaaaggagttctgtttatgtgttcgtgtatgtgcaggaaactggtaccatattttttctttgtatgggggtgtgtgtgtttatttttatatatatatatataatttgtgtgtgcatgcgtgtatggcttaatactatacatgtgtggattttccagtcatattggctttcttttcatgt

SEQ ID NO: 203629 - DNA, 201 bp, Homo sapiens
ctttgtatgggggtgtgtgtgtttatttttatatatatatatataatttgtgtgtgcatgcgtgtatggcttaatactatacatgtgtggattttccagtyatattggctttcttttcatgtgtttttttctggcctcataatactgatgcctgctgagaactcagatatttattgagtgaatgaatgtttatctttgctc

SEQ ID NO: 203630 - DNA, 201 bp, Homo sapiens
agaccgagcttcccttctgtttgacatgtttgttggtggtttccagacaagtgtccctaatctatgtggttgtttgcctttaacagatggttccaggttayagtggggcccccaatgcctgaggccaccgggaaattgagaaatcagatctagtgagttaccaatttctttgactggtctcactagccactgacgagtcca

SEQ ID NO: 203631 - DNA, 201 bp, Homo sapiens
ttttgttgagaatgatttctttttgatatgacactgagccactgcatgtagtcatatgggtatttatacaaattaccaaattgctttgccagctagagaawatatatatatatatatttgacatgtctctttgtcaaatatatgaggtgtgtgtgttcatgtgtgtgtatacatatgaggtgtgtgtttgtgtgtgtatat

SEQ ID NO: 203632 - DNA, 201 bp, Homo sapiens
atctatgtggttgtttgcctttaacagatggttccaggttacagtggggcccccaatgcctgaggccaccgggaaattgagaaatcagatctagtgagttrccaatttctttgactggtctcactagccactgacgagtccaccagctcctttcaaatttaatttcaggggtcaaatgcccccttctatttggggctcttc

SEQ ID NO: 203633 - DNA, 201 bp, Homo sapiens
ttgttttgggatttgtcatgggtacaacatttagagccactgatgtatacaagcaatgaggtggacatgtgcctgtaattttttttcttttttcttttttytttttttgagacagggtcttgctctgttgcccaggctggagtgcagtggcacgatcatggctcactgcaacctcgacccccctgggcgcaagtgatcctc

SEQ ID NO: 203634 - DNA, 201 bp, Homo sapiens
tagttctgatgatttaggctggaaaacaccgttttctgccaacgatgcagtcagctgcatagaacaagctgccattgttaattaggtaagttatgtggtcraggaagtaccttttactggtggtctttattcagaataaggaagaggggacttgtgatggagccacacagagaactagcaggtcaccagccagagcactgg

SEQ ID NO: 203635 - DNA, 201 bp, Homo sapiens
caaagcattcaagacatgacttgggtactgtgagttttataagggaaacagagcataaaagtttggaaaatttgcagcctatgtgatagaaaagaaaaaamccattttctggggagaaattcaaggcagctgcagaaatttgcataagaagcaaggagcctaatgttaatccccaagaccatggggaaaatgtctccaggc

SEQ ID NO: 203636 - DNA, 201 bp, Homo sapiens
acagcagggcataccttcaagacatctgctattccaggagcctctgagtcctccccagactctacagggagagctgagggactttgggtcaatgcacactkagtgtgctggctgatatccacaccacagagcccaggacaggaagcccatgtctctgccacacaggacagatgtgctgagcttcctgccacctgtctgtta

SEQ ID NO: 203637 - DNA, 201 bp, Homo sapiens
ggttcttcaataagtcctagaatactagaactctgtgctctgcacaacctactcttagtacacatgaccagaatgccttttctctgttacattgattaatrtattaaaccaatacttatcaagtatctgggatgagcctaacctatgtcagtagatatatcagccaaagattagtggtccctgacctcatggaacctgtag

SEQ ID NO: 203638 - DNA, 201 bp, Homo sapiens
ataatgaccacagtgcatgcccagtgatggcaatgttgtgggcatccaggccagcagcaggattccagggcaggcactgaccctggcagttcaccctgggmttgctggaccccacagcagggcataccttcaagacatctgctattccaggagcctctgagtcctccccagactctacagggagagctgagggactttggg

SEQ ID NO: 203639 - DNA, 201 bp, Homo sapiens
agaaattggcatacagctggagctaactctgtttccaaacaagattttagtcattgtatgtttaagtctctcatgcttcttcagagccacctgttcaccarcagaggaaagtctccaagtggagtgactgattttatgtttattttattttagtttgttactttttgaggcgggggctgaagtgcagtggcagcatcatgg

SEQ ID NO: 203640 - DNA, 201 bp, Homo sapiens
ccagggcaggaagggccagtgtctgctgctgtcgcatgtggtcgggggtgtggttctgactcctccccttactgactgtggggttatgaaccactttctcyacctctttgaccctcagtttcctcatctgtgataagctgatgagggagttggttttggtgctttctgtcattactggactggtcctggagtttggagcag

SEQ ID NO: 203641 - DNA, 201 bp, Homo sapiens
tcaagcgattctcctgcctcagcctcctgagtagctgggattataggcacccaccaccaagcctggctaatttttgtatttttagtagaaacagggttttkccatgttggacaggctggtctcgaactcctgacctcaagtgatccacctgcctcagtctcccaaagtgctgggatcataggcatgagccaccatgcccag

SEQ ID NO: 203642 - DNA, 201 bp, Homo sapiens
aggcatcttccagcctcccttgcacagccatgccgccacttggatccgtgcagcagcaggctttgacctctgaccctaggatgtcattggtgccactgcaratccatggagcttcctctgcatatatctatatgcccagctctgtcctcactgtttcccctgctcactgtggttacaatgcaggtcagaggcaccaaccag

SEQ ID NO: 203643 - DNA, 201 bp, Homo sapiens
ccacgttcttaccaggaatggtggagtccctctgtaacaatctggggagaagtaattcaaggagagaaacaggttctttcttttatggttgggaattctgyttggttagctaagttaggagggcctgctttctgcggtgtgactcaggtcagctggtgaagggaggcagggaggttggggaggggaagatgtgaagggtct

SEQ ID NO: 203644 - DNA, 201 bp, Homo sapiens
cagtggcttctcatttacaacaaagatcaatttctttttaacatgacctccaggtcattgcctggtgtggaccctgcctacctctccaatattttccactmttctcctctcttccagccctactttctgaatccattttctacgttccagccacatggctattctttcagctctttgaatatcctctatgtatcacttatc

SEQ ID NO: 203645 - DNA, 201 bp, Homo sapiens
ggtttttttttttttttttttttttttttgctttagttgaattcatcaagataagctgtattatactcagattcatttactgaactgagaatctgaaggaygcctcccttctgctcccgtatgtgtgcgagtgtgtgtgtatgtgtgtgtgtgtctgtctgtgtgtcttttcttcccttttagagaaagcagtgctgtaca

SEQ ID NO: 203646 - DNA, 201 bp, Homo sapiens
gttagagatgttagctactgtgtttgaaaaagttatgtatagcctgggcaacatagtgaaatactgtctcttaaaaaaaatacaaaaagaaattagccagrtgcatggcacagacctgtagtcctagctacttggaaggctaatgcactggagcctgggaggttgacggtacattgagctatgatcacaccactgcactcc

SEQ ID NO: 203647 - DNA, 201 bp, Homo sapiens
gacaaacacatattgtaacaaaactttattttcttctgaaaattgcctacatgattaatatggcctgacatagcccaagctgctcagcataagaaacagcygtatttcttgctccctcttcagctctgcttctctctcactccatggcttcatctgttttctttgttctgctccctgttccgttgtgctatatattgtgca

SEQ ID NO: 203648 - DNA, 201 bp, Homo sapiens
ggatttcacaaactggtgtcagatcttatcattgtattatttatgttgcctaccctcttttatttattcttcatctttttctccctctgtgcttcattctkcatagtttcttctgtcttagcctctagttcattaatgctctcttcagctgtgtctaatctgctgataaatgatccactgagttcttaatttttgaacttt

SEQ ID NO: 203649 - DNA, 201 bp, Homo sapiens
gcgccgggcccagtggctcacgcctgtaatcccagcactttgagaggccgaggggggcagattgccagaactcaggagttcgagaccagcctgggcaacayggtgaaaccctgtctctactaaaatacaaaaaattagctgggcatggcagcgtgtgcctgtaatcccacctactcgggaggctgaggcaggagaattgct

SEQ ID NO: 203650 - DNA, 201 bp, Homo sapiens
actcaggagttcgagaccagcctgggcaacatggtgaaaccctgtctctactaaaatacaaaaaattagctgggcatggcagcgtgtgcctgtaatcccasctactcgggaggctgaggcaggagaattgcttgaaccagggaggtggaggttgtagtgagccaagatcatgccactgcacgccagcctaggcaacagagc

SEQ ID NO: 203651 - DNA, 201 bp, Homo sapiens
cagagcataaaagtttggaaaatttgcagcctatgtgatagaaaagaaaaaacccattttctggggagaaattcaaggcagctgcagaaatttgcataagwagcaaggagcctaatgttaatccccaagaccatggggaaaatgtctccaggccatgtcagagaccttcacagcagcccctcccatcacaggcccagaagc

SEQ ID NO: 203652 - DNA, 201 bp, Homo sapiens
agtgtgtggcaggattcttcttaggggcagggccaaggagcaagatagcaggaaaggcttccccatgacaggcaagggccggtgaatattaggcccactgrtacttaatattgaattttacttttccccattctccattgtaattccctgacacactctgctcttacataaaatctgttaacatacaacttgcttggaggt

SEQ ID NO: 203653 - DNA, 201 bp, Homo sapiens
agtcccagtgtgtctttatcagcagcgtgaaaacagactaatacacttggcaattggtatttatttatatgtttcatagatgtttatggttttataaatacatagtgttctctggtttgcaattttcggtgtgcctttgacattttatgttaactatatatccatttcttaagtgaattttgattcatttactcagtaacc

SEQ ID NO: 203654 - DNA, 201 bp, Homo sapiens
tttttcaatctttttcgctcccaccccacagacacccttgttcgtcctggagtattttaaagcaaatcccagatactatgtcatgtcacctgtaaatgtcrgatattatatcctggggctttgctgatgtttcctcatggaatttaacttgcttctgtagacccttgtatttgctataaactgctggttagaacaagggca

SEQ ID NO: 203655 - DNA, 201 bp, Homo sapiens
tttcagtttttccacttgccaggcaggtgcttgaggaagttatttgactgctcagagccaccggagcaaaaatactttccccaatttcccttggcaaatgratctcacacagcagaataactaaagcaaaggtctgtgtttcagtcagcctagcactcagcttctgaggtcttcacagatcccgggttctcctgggagtca

SEQ ID NO: 203656 - DNA, 201 bp, Homo sapiens
agaattttcttctcttaatcagaccaattaggttgcttttatctagggatgtgactgttagatttcaaataccttatatcattctggttttcttttttttkttgttgttcttacctctataagtcatgccctcctttttatttatttttaaagaagtacctaagtcatgtacatagtcgttgttaaaaaaattcaggctgg

SEQ ID NO: 203657 - DNA, 201 bp, Homo sapiens
atagtcgttgttaaaaaaattcaggctgggcatggtggctcacgcctgtaatcccagcactttgggaggctgaggtgggccgatcacaaggtcaggagatygagaccatcctggctaacacggtgaaaccctgtctccactaaaatgtacaaaaaaaattaactgggcatggtagcaggtgcctgtagtcccagctactcg

SEQ ID NO: 203658 - DNA, 201 bp, Homo sapiens
gtctccactaaaatgtacaaaaaaaattaactgggcatggtagcaggtgcctgtagtcccagctactcgggaggctgaggcaggagaatggtgtgaactcsggaggcggagcttgcaatgagccgagatcgcaccactgcactccagcctgggtgacagagctagactccgtctcaaaaaaaaaaaaattcaataataggg

SEQ ID NO: 203659 - DNA, 201 bp, Homo sapiens
tgaggcaggagaatggtgtgaactccggaggcggagcttgcaatgagccgagatcgcaccactgcactccagcctgggtgacagagctagactccgtctcaaaaaaaaaaaaattcaataatagggaaatagagtaaagcaatagcccatctccaggctttccagctccatgctaatttgcactgtgggtaatgtatcgtg

SEQ ID NO: 203660 - DNA, 201 bp, Homo sapiens
tactgaacccactaagtgctccatattatattatagtagaggttcctgctatcacagagctaacattctaactcaccacctgtagggtggtgaatctgggrgaagtggggctgcatctgttaatgctgtcctccttagggtttattctcagttcttagccaaggagaagcctaagggaaccagtgattcacgccttgggac

SEQ ID NO: 203661 - DNA, 201 bp, Homo sapiens
ctccacctcctgtcagatcagcagtagcattagcttctcataggagcatgaaccctgttgtgaactgcacaagcaagtgatctaggttgtacccctgcccyttttttttttgagatggagtctcgctccatcacccaggctggagtgcagtggtatgatcttggctcactgcaaccttcacatctcaggttcaagcgattt

SEQ ID NO: 203662 - DNA, 201 bp, Homo sapiens
gctgcatccaggttgccgcaaaggccatggttttgttcttttttatgcctgtctagtattccatggcgtatacgtaccatattttcttttttctttttttycttttttttgagatggagtctcgctgtcgcccaggctggagtgcagtggtgcgatctcggctcactgcaggctccgccccccgggttcacgccattctcc

SEQ ID NO: 203663 - DNA, 201 bp, Homo sapiens
tgctccaagtgcgagggagctgtggtatttatacacctttaggataatgaggccccggttctgtgctatcttagcaccttgctactagctgtcgcacttastagcatgtggtgtgtctgcacagtggactctctgaactgggtgggatgtttcccagggcctggctggtggttgaaactcagtaagtctttcaacaaggga

SEQ ID NO: 203664 - DNA, 201 bp, Homo sapiens
ctgcatccaggttgccgcaaaggccatggttttgttcttttttatgcctgtctagtattccatggcgtatacgtaccatattttcttttttctttttttcyttttttttgagatggagtctcgctgtcgcccaggctggagtgcagtggtgcgatctcggctcactgcaggctccgccccccgggttcacgccattctcct

SEQ ID NO: 203665 - DNA, 201 bp, Homo sapiens
ggcaggagaatcccttgaatttggaaggcggaggttgcagtgagccgagatcacgccactgcactccagcctgagcggtgacagagcgagactccatttcaaaaaaaaaaaaaaaaagtccactggccacataacctctgagcttttgtctgatcttttgtctccactgtcttctttatgcttcacatcccattcatccac

SEQ ID NO: 203666 - DNA, 201 bp, Homo sapiens
gcctggctggtggttgaaactcagtaagtctttcaacaagggagtgcatgatgaagccaggtagcactaagaaaagtgcaggtgtgagctagtggcaaaawgactggaggtggcccggggctagaacacccagagaggagcatgaactgcagatcgggctggattggggtgaagactcactgccaatggcgcaccctctcc

SEQ ID NO: 203667 - DNA, 201 bp, Homo sapiens
ggtcgaaattagttaaaggaatgcgtaaagaagaggttgtgttcagcaagccatggtgctaatattctgattaagtgtgagctttttggcacacagcgtasatgagatgtgctgttgtattaataggctgtaaattataaataattgcttgataggatgagaacctgaagcgatgggtttctttacagaatgctgattatt

SEQ ID NO: 203668 - DNA, 201 bp, Homo sapiens
gctataaaggaattcctgaggctgggtgattcattgattgacagattgattgattgattttgagacagggtctctcactctgtcgcccgggctggagtgcrgtggtgcgatcacagcttgttgcagcctccaactcctaggctcaggtgatcctcctgtctcagccccctgagaggctgggaccacaggcatgtgccatca

SEQ ID NO: 203669 - DNA, 201 bp, Homo sapiens
ttttttttttttttagttagctggacatggtgatgcacacctgtagtcccagctgaggcaaaaggatcacttgagcccaggatttcaaggctgcagtgagmtatgatcgagtcactacattgcagcctgggtgacagagtgagaccctgtctctttaaaacaaacacacaaaaaactcataacatggagagtcaagaactc

SEQ ID NO: 203670 - DNA, 201 bp, Homo sapiens
aggatttcaaggctgcagtgagatatgatcgagtcactacattgcagcctgggtgacagagtgagaccctgtctctttaaaacaaacacacaaaaaactcwtaacatggagagtcaagaactctgatttgtttcagatctggatcactcactacaagacctattactttttattttagtcctcatagtgcaggattttatg

SEQ ID NO: 203671 - DNA, 201 bp, Homo sapiens
agatgttctttgtaactggtattatcgagttttgtaaatgttctacgtctatttaaaaagacccccacacactgtaatcatggaattgaattcctgccagwcatcaattttgtgtattctggtaggctatgagtttattttttttaagtctttttgataatggtgttttaaaatctccttttataatgactcttccttcct

SEQ ID NO: 203672 - DNA, 201 bp, Homo sapiens
ggacaaaccatatcactcggccccctcccttcttaaactgggatcacttgtgattctcagcatcaggacacactgggcagtctgctccactttatgtgttytgacagtttcccattggaattgtccaataggatctaccactcaagcccagaacaattcaaacctgtaaggcctctgtctcccagatggtcatcctgggtc

SEQ ID NO: 203673 - DNA, 201 bp, Homo sapiens
actggacttaaggcaaaaatctggacagaatgcaatgggcttctctgtatttactgcttctgatcttatcaagacctactgcctatcctcaggagcaggtyaaagcagaacatgtcttgagagatacgagatatgatacagtgaatgtcttccactgatccaggcagtagacagaaagcctgtagtcagaacatccaatta

SEQ ID NO: 203674 - DNA, 201 bp, Homo sapiens
ttagtttaattaggtcctacttgtctatttttgtttttgttacagttgcttttggggacttagccaaacattctttgccaaggctgatgctgagaagagtrtttcctaggttgtcttccatgatttttattgtttgaggtcttatatttaaatctttgatccatcttgagttaatttttgtatatggtcaaagataaggtt

SEQ ID NO: 203675 - DNA, 201 bp, Homo sapiens
ctgggattcggatgtagtcaggcccagagtctgtgttcttacctgctgttctgtctttcctggaaaagatttgactagctggaccttgccagctggaggakatttttaccggctgagtatatgcaagataacacaatgcagggtatagttctgcaaatgagtgtgtttggggtcttaaagcccactgtcatgtttcatgat

SEQ ID NO: 203676 - DNA, 201 bp, Homo sapiens
gctggagtgcagtggtgcgatctcggctcactgcaggctccgccccccgggttcacgccattctcctgcctcagcctcccgagttgctgggactacaggcrcccgccacctcgcctggctaattttttgtatttttagtagagacggagtttcaccgtgttagccaggatggtctcgatctcctgacctcgtgatccgcct

SEQ ID NO: 203677 - DNA, 201 bp, Homo sapiens
agcagctgggattacaggcatgcgccatcgtgtctgggtgatttttgtatttttagtagagatggggttttgccacattggccaggttggtctcgaactcytgacctcaggtgatccacccacctcagcctcccaaagtgctgcgattacaggcatgagccactgcacctggccaaagagtctactgttgaccagaagtct

SEQ ID NO: 203678 - DNA, 201 bp, Homo sapiens
ataaagtccatcaacacatactatgtatgtcatatgtattgtatatcatattcttacaataaaggcgagctagagaaaagaaaatgtttttaagaaaatcrtaaggaagaagaaaatctatttactgttcgttaagtggaagtggattgtcataaagttttcatcttcatcgccttcacattgagtaggctgaggaggaga

SEQ ID NO: 203679 - DNA, 201 bp, Homo sapiens
tttttgttttcagatcaataagcattgctataacagaagttttattataggcttgcaaccttttatctgcgatcctgaaactcaaaaaaaaaaaaaaaaargatgaggccgggtgcagtggctcatgcctgtaatcccagcactttgtgaggctgaggcaggcggatcacaaggacaggagtttgagaccagcctggccaa

SEQ ID NO: 203680 - DNA, 201 bp, Homo sapiens
ccaccgtcctctcggccaagggcaatcccaagttaacctgaaaaatgagttcaggccatgatagggaggggaagctggacatacctcattatacccttctsccttttcagaattactgacagagcagactctttaattctgaaaagaagcatttacaatctattctccctgaagcctgctacctggaggcttcatctgcat

SEQ ID NO: 203681 - DNA, 201 bp, Homo sapiens
tgatcctcccacctcagccttctgagtagctgggactacaggcatgtgccattttgcctggctgatttttaattttttttcttgtagaggcagactgtcaytatgttgtccaggctggtctcaaagtcccggcctcaagcagtcctcctgcctcagcctcccaaagtgctgagattacaggtgtaagccactgtgcccaac

SEQ ID NO: 203682 - DNA, 201 bp, Homo sapiens
ctatgttaagtgaaataagtcgggcacagaaaagaacatattgaatgttctcactcatatgtggaagttaaaaaagtcgacctcatggggccagagagtgragcgatagataccagaggctgggaagggtgaatggcaggggtagggttcgtagagaggttggttaatgggtgcaaaaatacagttagaaggaatacattc

SEQ ID NO: 203683 - DNA, 201 bp, Homo sapiens
aaatgacaactctcgctgcatctatctgaagtcacactgccctgttatggaggttggcctctgtggctgtgcgttgttgtcgtcttggatctcccttcacygtcttcttgtggactctctgaccctcttctgtgctgtctcctgtgctcttctcttggtttatgttcttattttggtggaacacaacacctggaagcttct

SEQ ID NO: 203684 - DNA, 201 bp, Homo sapiens
ttctcactcatatgtggaagttaaaaaagtcgacctcatggggccagagagtggagcgatagataccagaggctgggaagggtgaatggcaggggtagggktcgtagagaggttggttaatgggtgcaaaaatacagttagaaggaatacattctaatatttgatagcagagtagggtgactgtagttaacaacaatgtat

SEQ ID NO: 203685 - DNA, 201 bp, Homo sapiens
tcccaattcatagaaatgatcaacccttgaggtgatggacaccccaaaaccctgacttgatcatgacacatttgatgcatgtaacaaaataccacacgtamcccataaatatttatatatatatatatatattttttttttttttttttttttttgagatggagtctctctctgtcactcagtctggagtgcagtggcgcg

SEQ ID NO: 203686 - DNA, 201 bp, Homo sapiens
atcaatgtaatatttatgggattcagcacattttagaatctcatctttgctcatagtatccattactgctattaccttttagtagctgttttacaagaatsagaaagtactgtagagactgtctgccatttatggaagaaggctgggtactctagaaccaatggatttagagtggaaacagagcatttctgttatcgagga

SEQ ID NO: 203687 - DNA, 201 bp, Homo sapiens
gaaatgatcaacccttgaggtgatggacaccccaaaaccctgacttgatcatgacacatttgatgcatgtaacaaaataccacacgtaacccataaatatttatatatatatatatatattttttttttttttttttttttttgagatggagtctctctctgtcactcagtctggagtgcagtggcgcgatcttggctcac

SEQ ID NO: 203688 - DNA, 201 bp, Homo sapiens
accttctatgatatgaccagaattgttgtcactcaaaatctctaatcactggggatgtacccacgtgatagcagaaatttacatgcttttgggagaattgrtgaaggttcgtgtcccactctgtccctcctctttagcccctccgattaggaataaaaatgctagaaggagtgcttggagcatagtggaggagagagaatt

SEQ ID NO: 203689 - DNA, 201 bp, Homo sapiens
tgattatctcttaaatagtgattagacagccaggggctgggtggagggggaatggggagttattgcttaagggtatgggatttgtctgaaaagatgaaaawagttgtggaaatagatgatgatcgcacaataataggtatgtacctaatgtcactgaactgtatacttaaaatggttaaaatagtaaatttcatgttatgt

SEQ ID NO: 203690 - DNA, 201 bp, Homo sapiens
cacctgcctgaaatgaacgaataaataaaaattcatgataatccaatccagggttgatttccgcttatattgctgaaaccatgtaaggtttcaaccagatragatgtggtctccacgatctccccacttggttttaagtggggagatactagattgaaggcttatgtggatgggaatacttacctacatcagtgtagacag

SEQ ID NO: 203691 - DNA, 201 bp, Homo sapiens
ggcagcagaattacttgagcccgggaggtggaggttgcagtgagctgagattgcgccacggcactccagcctgggcaacagaatgagattccatccccccygccctcctccaaaaaaaatgtgggagtaggaatttactgatcagtttcttttcaaatagccttcgtgctagtcttccttattctggtctgtccattttac

SEQ ID NO: 203692 - DNA, 201 bp, Homo sapiens
tgagattgcgccacggcactccagcctgggcaacagaatgagattccatcccccctgccctcctccaaaaaaaatgtgggagtaggaatttactgatcagkttcttttcaaatagccttcgtgctagtcttccttattctggtctgtccattttacccccagttccaaaggcacctgctgctgccggttccattgcctctt

SEQ ID NO: 203693 - DNA, 201 bp, Homo sapiens
agcctgggcaacagaatgagattccatcccccctgccctcctccaaaaaaaatgtgggagtaggaatttactgatcagtttcttttcaaatagccttcgtrctagtcttccttattctggtctgtccattttacccccagttccaaaggcacctgctgctgccggttccattgcctcttgagtgtcctctggtatatatcg

SEQ ID NO: 203694 - DNA, 201 bp, Homo sapiens
ttgtattcaaaggttgaaagcaagatggctgaaaactttttggagtggaaggttataccctctgcacttccaaaagggattttggagaagtcacactggcmttgtttgcttttcttcttggtttataattgcagagatgggagaagtcttgtgtttccaagagataacattcttcctgtgtcgctgaggctctgagtgaaa

SEQ ID NO: 203695 - DNA, 201 bp, Homo sapiens
ccccattgaggcattgattggcatttaacatgaattttgagggaacacagacattcagcacatagcacacgctctgtgcttccgttttctcatctgtaaartggggtcgatcgtgcctttacctcacagagtctttaagaggtatgaaggaattgctgtaggccaacagcatgtggctcttaataaggacccagtaagtat

SEQ ID NO: 203696 - DNA, 201 bp, Homo sapiens
ggccaagtttggaggaagggccactaagaaaaggaatcttgaaggacgtctgccggctcatagcagccgggatataaaagccaggcctggttcccatcccrctgtacggattgcaaactgtcagaagatagctgtcctgggtgaatgcatcagagatgtcttctgactcctagactgatgagattttcttttctgccagaa

SEQ ID NO: 203697 - DNA, 201 bp, Homo sapiens
cgaggctgtagtgggctgtgatcactccactgcactccagcctgggcaatagaaggagaccctgtcacaaataataataaaaaaagagtaagcttttgaaragttcgttatttttctgctgacaccaaaagctgaaaaatagcctttgagtagagcatgggcaaatttgtacagcagagaaggtaatcttttgggtctaca

SEQ ID NO: 203698 - DNA, 201 bp, Homo sapiens
aatgctatattagtttcctcttgctgctataacaagttactatgaaaataatgacttgaaacagcacagattgatgctgctacagttcttgaggtcggaartttgcaatgagctgatggaactaaaatgaagaaggggttgggtcaggagggctgggtcaggaggtctggtccttctgggggctcttgggagatccatgtc

SEQ ID NO: 203699 - DNA, 201 bp, Homo sapiens
ctcgaaaaaaaaaaaaaaaagcaaggaggttgaatgaaataggttgatttcaatgctatattagtttcctcttgctgctataacaagttactatgaaaatmatgacttgaaacagcacagattgatgctgctacagttcttgaggtcggaagtttgcaatgagctgatggaactaaaatgaagaaggggttgggtcaggag

SEQ ID NO: 203700 - DNA, 201 bp, Homo sapiens
ctacatcagcagcctgggagggactggttgtcaacaccgattgcacaaaccttctaaatcagtgtcttttggagaggtacaagaatttatttatttatttwtttatttatttatttatttatttatttatttatttttgagacagagtctcgctctgtcgcccaggctggagtgcagtggcgccatcttggctgcctcctg

SEQ ID NO: 203701 - DNA, 201 bp, Homo sapiens
caaaggaattaaaaaagtagatgctagaggagttatctcttgctgctcctgtttacaatttctgagcttctcccagtaaaagccccattgccttcctaggrccaccatttctcctcattttggtgtggattatacaaagttcttcatttttggagatggactggggagagtgtgtgccccacctccacctacaaaccctgc

SEQ ID NO: 203702 - DNA, 201 bp, Homo sapiens
ctgggcatggtggcgggcgcctgtagtcccagctactcgggaggctgaggcaggagaatggtgtgaacccaggaggcagaatttgcagtgagccaagatcrtgccactgcactccagcctgggcaacagagcgagactccatctcaaaaaaaaaaaaaaaaaaaaaatcagatctcatgagaactcattcactatcacaag

SEQ ID NO: 203703 - DNA, 201 bp, Homo sapiens
tgaggcaggagaatggtgtgaacccaggaggcagaatttgcagtgagccaagatcgtgccactgcactccagcctgggcaacagagcgagactccatctcaaaaaaaaaaaaaaaaaaaaaatcagatctcatgagaactcattcactatcacaagaacagcatggaggtaactgctcccataatttaattacctcccact

SEQ ID NO: 203704 - DNA, 201 bp, Homo sapiens
gaggcaggagaatggtgtgaacccaggaggcagaatttgcagtgagccaagatcgtgccactgcactccagcctgggcaacagagcgagactccatctcaaaaaaaaaaaaaaaaaaaaaatcagatctcatgagaactcattcactatcacaagaacagcatggaggtaactgctcccataatttaattacctcccactg

SEQ ID NO: 203705 - DNA, 201 bp, Homo sapiens
atctgtggctgcatggactttgttactttgatcctcctgtatacctcttataaggactcttgtgatatcatcaggcccacccagataaatccggcatagtcccccccatctcatgagccttaatttactcacatctgccgatatggtttggctctgtgtcccaacccaaatcttatctcaaattgtaatccctatgtgtcg

SEQ ID NO: 203706 - DNA, 201 bp, Homo sapiens
aggcaggagaatggtgtgaacccaggaggcagaatttgcagtgagccaagatcgtgccactgcactccagcctgggcaacagagcgagactccatctcaaaaaaaaaaaaaaaaaaaaaatcagatctcatgagaactcattcactatcacaagaacagcatggaggtaactgctcccataatttaattacctcccactgg

SEQ ID NO: 203707 - DNA, 201 bp, Homo sapiens
ggtttggctctgtgtcccaacccaaatcttatctcaaattgtaatccctatgtgtcggaggaggggcctggtgggatgtgactgaatcatgggagcggacytcccccttactgttctcatgatagaatcctcatgagatctggttgtttgaaagcatagcacttcccactttgctttctctatctctctcctgctctgcca

SEQ ID NO: 203708 - DNA, 201 bp, Homo sapiens
gccactgcactccagcctgggcaacagagcgagactccatctcaaaaaaaaaaaaaaaaaaaaaatcagatctcatgagaactcattcactatcacaagarcagcatggaggtaactgctcccataatttaattacctcccactgggtccctcccacgacacgtggggatatgacaactacagttcaagatgagatttgag

SEQ ID NO: 203709 - DNA, 201 bp, Homo sapiens
gaggatcatttgagcccaggagtttgaggctgcagtgagctatgattgcgccactgtacttcaggttgggcaacagagcaagaccatgtctattaaaaaawaagcctttgcttcccttgctctgtcttctcccctcttctctcgtctgccttggtcttggaggaggcagtagaaggagtaggggctggaggaagtatggag

SEQ ID NO: 203710 - DNA, 201 bp, Homo sapiens
tgagacaggagaatcgcttgaaccggggaggtgggggttgcagtgagccgagatggcatcactgtactccagcctgagcgacagagtgagactccctgtcaaaaaaaaaaaaaaaaaagataacgataatctggaagcagtgatggaaattgtcagatgtggttggagtgggatacagggatttgcattctactttccttg

SEQ ID NO: 203711 - DNA, 201 bp, Homo sapiens
ttgatcagccatgaaaagtttgacttttaactgttggtcaaatacaatcatggcatttccaaaaatttttctctaatgagataatgtgtgtgtgtgtgtgwgagagagagagagagagagagaatgagagacacacagaaagagaatgtgaatcataggtttccactgacctgttttaattttagagactcatttcaggga

SEQ ID NO: 203712 - DNA, 201 bp, Homo sapiens
gattacaggaacgcaccaccacgtccagctaatttttgtatttttagtagagatgggtttcaccatgttggccaggatggtctcgatctccttacctcgtsatctgcccgccttggcctcccaaccctctgtgtatctctgtatattcccctctccttataaggacaccagccactggattcatcctaatctagtatttct

SEQ ID NO: 203713 - DNA, 201 bp, Homo sapiens
agacagggtcttgctctgttacccatgcaggagtgccatggtgtgatcatagctcgtggtaacctcaaactcctagggtcaagtgatcctcctgcctcagccccccccaagtagctgggactgtaggtgtgggccaccatgcctggctaattaaaaaaaaaatttgtgtgtagatggagtcttgctgtacacctttcccag

SEQ ID NO: 203714 - DNA, 201 bp, Homo sapiens
ggctgaggcaggagaatcgcttgaaccagggaggcagaggttgcagtgagccgagatcacaccacttcactccagactggtgacagagcgagactgtctcaaaaaaaaaaaaaaaaaattagctgggcatggtggcacacacctgtagtcccagctactcgggaggctgaggcaggagaatcacttgaacccgtggggtgg

SEQ ID NO: 203715 - DNA, 201 bp, Homo sapiens
tcttgtctgcatggcacgtcagctgcggttgtctggctgtggctgtgcttgatttctcctctgtgttctgagagtcaaggaatcctcctgtctaggacatyccatctttgtggctcagggaaaagaacagtggctgaacttcgaaatggctgtttctgctctgatgtgacaccgtcattttgctcacatcccattggcaaa

SEQ ID NO: 203716 - DNA, 201 bp, Homo sapiens
gctgaggcaggagaatcgcttgaaccagggaggcagaggttgcagtgagccgagatcacaccacttcactccagactggtgacagagcgagactgtctcaaaaaaaaaaaaaaaaaattagctgggcatggtggcacacacctgtagtcccagctactcgggaggctgaggcaggagaatcacttgaacccgtggggtgga

SEQ ID NO: 203717 - DNA, 201 bp, Homo sapiens
gagcccccaaattcaagggtaaaaaggagctactgagagaggccaggaaagcctgccttgggctcgagcagctgtgtgcacacagctctccaggagccgcmgttgtctcaggatcacagctttcctgcagagggaggatgttgcattttgcacctttatgtaaagttttcaagtgcagctttccaacggcgatactgagaa

SEQ ID NO: 203718 - DNA, 201 bp, Homo sapiens
ttttgactcccccaaaacttatttacaaatagcttaaggttaaaactggagcatgtgtttaaggttattcctctctgtgcaggcatcatctgaccacgtctttttttttttttttttgcaatccttttttgtgccttgttatcccaatcattattgggcataattaataaggaaataattgaattaaaatattctggagat

SEQ ID NO: 203719 - DNA, 201 bp, Homo sapiens
ctttcctgcagagggaggatgttgcattttgcacctttatgtaaagttttcaagtgcagctttccaacggcgatactgagaagtttcaaactgatagtaaygttcacacttctttattcttcctcgtataggaggaactgcgttcaggagcttttaaggatgaagtttgaaagttattttttctggggctattttatactt

SEQ ID NO: 203720 - DNA, 201 bp, Homo sapiens
attcctggacagtttttatttgttaacgttttcactggcattttatcccattatttgttctaattggtttttgctttaggagaggggttgatttttaattytaatgttatgcataccttatatccaatcgtatcactggatctatatactaattttctgagttattttgattatctcttgattttgaagcatgtaatcata

SEQ ID NO: 203721 - DNA, 201 bp, Homo sapiens
cactctttttcatgatacaagatcatatagaaaaggacaagggggtgtggcattctgaggaactggagggatgttggggagctctttatggctcttgcccygggtcccacccagctgcctctcgggatatggagatcaatatcttgaggcataccagttgcagaactcaaatagaaaggaggttgaggccgggcctggtag

SEQ ID NO: 203722 - DNA, 201 bp, Homo sapiens
tttcaatgctatattagtttcctcttgctgctataacaagttactatgaaaataatgacttgaaacagcacagattgatgctgctacagttcttgaggtcrgaagtttgcaatgagctgatggaactaaaatgaagaaggggttgggtcaggagggctgggtcaggaggtctggtccttctgggggctcttgggagatcca

SEQ ID NO: 203723 - DNA, 201 bp, Homo sapiens
ggaggtagctctcaatgagatggatggggagcaggaagggggatggagtgggaaggtggtcttcccctggagttgggttgcacagcagccagactctcctycaactacccctggccgaactcccctcagcatccacgtcattctgttgttgctagcctgctggtgtctgctggtgtctgtccatgtgttctgctcctctca

SEQ ID NO: 203724 - DNA, 201 bp, Homo sapiens
caaatgccaatgatgtctttttaatgtgtcttaacttacggaatgcttaatttgttaatagttgatggggatatttaattgcagggatgaatttttatggwccttctgaaattattaagcggatacaatatgctttcttaaacatgaggacatggcagtttctctttcttgctgtgaagccaacattttaatagtacgatt

SEQ ID NO: 203725 - DNA, 201 bp, Homo sapiens
gcctgctaaatagctgttttctcaggttttctctttgtcctccactcttatttttccacaccagagtttccagtatagcaagtgggcaagtgccattaaasagggcaaaggccgattgtaagggtaagaggtgggggaactgaagaacacaggtcctgcccaaggaggcagctgttcccagctctgcttggtggtgccagt

SEQ ID NO: 203726 - DNA, 201 bp, Homo sapiens
aagccctcattaagagttcagtggatgaatggtcacttagtagattttagatacattgtagatgatttctagacaaacagttgcacgtgttaggagctctktgatagggctctgcagaggagtgggattttaaactgggccttaagagggtctggttaaagggaatccaacagtagaaaggatgtatcttaatgaaaatac

SEQ ID NO: 203727 - DNA, 201 bp, Homo sapiens
gactacaggtgcgtgcctccacacctggcttttatttttattttaatttttttttgtatttttagtagagacgaggttttaccgtgttaaccaggttggtstcaatctcctgacctcgtgatctgcctgcctcagccccctaaagtgctgggattacaggtgtgagccaccaccacgcctggcctcatttactcttaacag

SEQ ID NO: 203728 - DNA, 201 bp, Homo sapiens
ttaatgctggctttcagcaaggatcttatttggagcacctacgtgtggcctcgacatgtggcctgggatccttcacaacatggtgtctggattatgagggygagtggggaggaggagagagagaatgagaacaccaagcagaacaatactgaattttaggatgtagcctctgaagtccccatataccgccgctgtcgcccc

SEQ ID NO: 203729 - DNA, 201 bp, Homo sapiens
ctccaggagccgccgttgtctcaggatcacagctttcctgcagagggaggatgttgcattttgcacctttatgtaaagttttcaagtgcagctttccaacrgcgatactgagaagtttcaaactgatagtaatgttcacacttctttattcttcctcgtataggaggaactgcgttcaggagcttttaaggatgaagtttg

SEQ ID NO: 203730 - DNA, 201 bp, Homo sapiens
ctgcaggatccagcgtgggcaggtccctgggagcctcagtttgcatctgagttccagccttcccaaagcccagccttaagtagctaaatgctgttcattcygtgtggtcttgggaggtgtgcctcacgggagagaagagaggtttcatgtctatttctctatgtttcagggctgagccggttctatcccgcatccaggaaa

SEQ ID NO: 203731 - DNA, 201 bp, Homo sapiens
aggtgtgggaggtggtacttggtcttgggaccaggtggtgagtgaggtaggagagatggtacttggtctaagcctccttagatggctgtgctctctgccartagcaaagggcatccccaggggagaatttcatgagtggaggcttggccagggccatggtcctaagcctgcctggaagccttggaaaattagtgccatttg

SEQ ID NO: 203732 - DNA, 201 bp, Homo sapiens
gagacaggagaatcgcttgaaccggggaggtgggggttgcagtgagccgagatggcatcactgtactccagcctgagcgacagagtgagactccctgtcaaaaaaaaaaaaaaaaaagataacgataatctggaagcagtgatggaaattgtcagatgtggttggagtgggatacagggatttgcattctactttccttgt

SEQ ID NO: 203733 - DNA, 201 bp, Homo sapiens
aatctgagctgtaagactgtagaaatcaaacctgtttggtgtgggagggtttctcaggaatagggagcttgagtaactttagtgtttagtttgacctttgtttaaaaaaaaaaaaaaaagcccacacaccaaaagaattttattttttcttgtctttgatcagagaatttcagtaacccatgtttgagttatggtttcatt

SEQ ID NO: 203734 - DNA, 201 bp, Homo sapiens
gatgcctgtaatcccagtactttgggaggccaaggcaggaggattgcttgagcccaggagtttaagaccagcgtgggtaacatagcaagaccctgtctcarcaacaacaacaacaacagaaatctcaaaccctcagggacaggtcattatgaattcttgagggacactttttttttttttttttgagatagcatctcaccc

SEQ ID NO: 203735 - DNA, 201 bp, Homo sapiens
cagcctgggcaacatggtgaaaccctgtctctactaaaatacaaaaaattagctgggcatggcagcgtgtgcctgtaatcccacctactcgggaggctgasgcaggagaattgcttgaaccagggaggtggaggttgtagtgagccaagatcatgccactgcacgccagcctaggcaacagagcaagactccatctcaaaa

SEQ ID NO: 203736 - DNA, 201 bp, Homo sapiens
agcactctgggagggcaaggcgggtggattgcttgaagtcaggagttcaaaaccagcctgaccaacatggtgaaaccctgtctttaccaaaaataaaaaawtttttttttaaaaaattagctggtgtagtggcgtgcacctgtaatcccagctacttgggaggctgaggcaggaaaatcacttgaatcaggaaggtagagg

SEQ ID NO: 203737 - DNA, 201 bp, Homo sapiens
tcaggaggctaaggcccaagaatcacttgagcccaggtggcggaggttgcagtgagccgagatcacgccactgcactacagtttgggtgacatagtgagaytttctcaaaaaaaaaaaaaaagaagaattcttaactacttaacttgtatgcattctcaaatctgtcttcttctaaccttcactgtcacacttgagttcag

SEQ ID NO: 203738 - DNA, 201 bp, Homo sapiens
gagggcaaggcgggtggattgcttgaagtcaggagttcaaaaccagcctgaccaacatggtgaaaccctgtctttaccaaaaataaaaaattttttttttwaaaaattagctggtgtagtggcgtgcacctgtaatcccagctacttgggaggctgaggcaggaaaatcacttgaatcaggaaggtagaggttgcaatgag

SEQ ID NO: 203739 - DNA, 201 bp, Homo sapiens
gtaattgtttttttctccttgagttgtgttagaaaaagttcttttctgttatcacagcttagtatatgccaggcccaggagggaatggggtcataccaagmccctggaagaattttggaggaaaaagaatcttgttctgtttcatgggtcttctgggaatgcagaagaggaggatccgagggaaaggaggttctgagagaa

SEQ ID NO: 203740 - DNA, 201 bp, Homo sapiens
gttctccacctccatccatgtggtcgcaaatggcaggatttccttcttgttgaagggtgaatgctattccattgtgtatgtgtgtgtgtgtatacacaccytgttttctttatcaatacatctgcaaaaagatagtgagattatttttgtatcttggccattgtgaataatactgcagccgctcagtgtagatatttctca

SEQ ID NO: 203741 - DNA, 201 bp, Homo sapiens
ctggagcctgggaggttgacggtacattgagctatgatcacaccactgcactccagcctaggggacagagtgagaccctgtctcaaaaaaaaaaaaaaaagagagagagagagagcgggaaagcaagagttatttgtcaagttaatttgtaaccgaggacggtgttacctgcctctagtgagaatttttgtttacttctgc

SEQ ID NO: 203742 - DNA, 201 bp, Homo sapiens
ttctccacctccatccatgtggtcgcaaatggcaggatttccttcttgttgaagggtgaatgctattccattgtgtatgtgtgtgtgtgtatacacaccckgttttctttatcaatacatctgcaaaaagatagtgagattatttttgtatcttggccattgtgaataatactgcagccgctcagtgtagatatttctcaa

SEQ ID NO: 203743 - DNA, 201 bp, Homo sapiens
ggagcctgggaggttgacggtacattgagctatgatcacaccactgcactccagcctaggggacagagtgagaccctgtctcaaaaaaaaaaaaaaaagagagagagagagagcgggaaagcaagagttatttgtcaagttaatttgtaaccgaggacggtgttacctgcctctagtgagaatttttgtttacttctgcca

SEQ ID NO: 203744 - DNA, 201 bp, Homo sapiens
cttgcaactgactatcggagttccaaatgtgagaggtcggaacattttagtcactcacctgcggagagagggagactatagggccttagaccagtaaggcytttagaccacctgggcccgcccctcattctacaggtgagatctgagcctgcggggaggcagctggagaagggtatgtgtgggaccagctggtggcccgcc

SEQ ID NO: 203745 - DNA, 201 bp, Homo sapiens
tgagcccaggaggttgagactacagtaggctatgttcgcaccacctccctccagcctgggggacagagcaagaccttgtctctttaaaaaaaaaaaaattwtccagcttttttagtttttttaggctatagagttggtccaaattacatcatctgacagtctcagaggcagaagtcattattatcctttatgataaattcc

SEQ ID NO: 203746 - DNA, 201 bp, Homo sapiens
tattattacaattttttttttaattgagatggagtcttgctctgttgcccaggctggtgtgcactggtgtgatcttgactcactgcaacctccgcctcccrggttcaagtgattctcctgcctcagcctctggagtagctggaattacaggtgcctgccaccatgcctggctaatttttgtatttttagtagagaagaggt

SEQ ID NO: 203747 - DNA, 201 bp, Homo sapiens
caacataacaagaccttatctctacaaaaattaagaaaatcagccacacgtgatggtgccgcctgtagtcccagctactcgggaggctgaggtgggaggawcccttcagccgaggagttcgaggctgcagtgagctaagatcgctccactacactccagcctggatgacagagtgagaccctgcctgattacttttttttt

SEQ ID NO: 203748 - DNA, 201 bp, Homo sapiens
cgaggctgcagtgagctaagatcgctccactacactccagcctggatgacagagtgagaccctgcctgattactttttttttaaagtaataatactttttwaaaaatattttttaattattatattaaaatatatatttaatatatactaataattatatataataatatataataaaatatatatttaaatatgtatata

SEQ ID NO: 203749 - DNA, 201 bp, Homo sapiens
atttagtactttaatttggcccaaatacacaagtgtgcgcagtattggacacttaaaaatttgttaagaggatagatcttgtgtgaaaggttcttaccacaaaaaaaactaaacgaaaatgaaataaaaatgaataatgtaaaggataggtaaattacaaagtacacaaaggcaaaaaagaatttcactgtcttttgaatg

SEQ ID NO: 203750 - DNA, 201 bp, Homo sapiens
gtgagcaaatattgagaaagagagtttgggatgtaaggtcatgagtcataaagtgtgtggatgcgcagtccttctctctgaggggatctgccaaatccctraggcctacacatttctgtccttagatttcttgttctttctttctgtaattactgcccaccactgcccccaccccaccatctcatttgtgcaggggtgaaa

SEQ ID NO: 203751 - DNA, 201 bp, Homo sapiens
gctccgcggtggcacataacaactcatttcaagtcctgccaatcaggaagctcacctgagccttggcatcccgggtttttactgtgggtcagtcacatagrcatggagagccttgcatgactctccttagctactcaacctccagcccttgcccaccagaagttaaactgcagtagcatcgtccagggccttggcatgcaa

SEQ ID NO: 203752 - DNA, 201 bp, Homo sapiens
ttaattgctttattttcatttccttcgtaaatgatatctaggtgaaattaaccagccttttttgaatgaatgatccctaagtttgaattggtggggtctgkgtaaatggatgagggccatttgaatagacattgggacacttgaagatgaaaaattcatggtcaaatacaacatttttctgacttgtgctagaaagatgtc

SEQ ID NO: 203753 - DNA, 201 bp, Homo sapiens
caccatagatagtttcttgattcttacccttctccctccctccactttcaagtaggcctcatgtctattgttcccctctttatgtccatgtgtactcgtcrtttagccccgacttataagtgagaactggtggtatttggttttctgttctgagttagtttgcttaggacaatggcctccaactccaggttgccgcaaagg

SEQ ID NO: 203754 - DNA, 201 bp, Homo sapiens
tacaccagtgaattgccaggggctcttggaccttctgccacagattgaaggctgcactgtcaacttccctactttagaggttttgggattcagacaggttkctttactcctcagcttgcagacggcttattgcgggacttcaccttgtgatcatgtgagtcaattctccttaataaactcccctttatatatacatctatc

SEQ ID NO: 203755 - DNA, 201 bp, Homo sapiens
tatagttatggatatataaaattaaataccttaatccttgactttattatttttcttctatcacatataatcctatttggagcaaaaatactttgagcacatgttaattttgctagttttttgggatagtttttcccgccagtactcccatttgcagaactagtggtaaatgctaatggaaaacttcttcagttagcagat

SEQ ID NO: 203756 - DNA, 201 bp, Homo sapiens
gaagatagacattctccacctttctttttttccctgtcctgctagtcttccaataacagagaaatggcctgttcacttttgccacccgtgggttctgtgtycttaggcagatcactcacttgttgtgtaaatgagcttttaattttcttgtccttaaaacttcaccagcattgaaatgtcgattgttccactagtagaaaa

SEQ ID NO: 203757 - DNA, 201 bp, Homo sapiens
atagttatggatatataaaattaaataccttaatccttgactttattatttttcttctatcacatataatcctatttggagcaaaaatactttgagcacatgttaattttgctagttttttgggatagtttttcccgccagtactcccatttgcagaactagtggtaaatgctaatggaaaacttcttcagttagcagatt

SEQ ID NO: 203758 - DNA, 201 bp, Homo sapiens
ttgtttattagagacaaggtgtcactctgttgcccaggctagagtacagtggtgcgatcatagctcactgcagctttgaactcctgggcccaagtgatccycttgcctcaaccttctgagtagctgggactacagttgtgcattaccatgacaagctaattaaaacaaatttttatttgtacagtcagggtctcgctgtat

SEQ ID NO: 203759 - DNA, 201 bp, Homo sapiens
tttttcttccttttttttttttttttttttttgagacaggagtctcactctgttgccaggctggagtgcagtggcatgatctcggctcattacatcctccrcctcctgggttaaagctattctcctgcctcagcctctcgaatagctgggattacaggtgcgtgccacgacacccagctaatttttgtatttttggtagag

SEQ ID NO: 203760 - DNA, 201 bp, Homo sapiens
ttagataaaatttaaataaaaccattagggaaagagctgtgtcagaatgttggaccctttaaactcaagataaaaatcaatctgtatgtcactttctgttsaaatgaagcaaaagcatctgcagtttggcagttatctgtgacttgctgtttttattctgtgctatttcttcttgctgtagttcctcctagcaaaagggaa

SEQ ID NO: 203761 - DNA, 201 bp, Homo sapiens
cctgtgttcatggattagaggacttaagagtgttaagatggcatttcttcctaaattgatctagagattcaatgcaatccctatcaaaatgccaactgccttttttttttttttttgcagaaatggaaaagctaatcctaaaatacatatgaaattcaagggacacaaaatagccagaacagtattgaaaaagaacaaagt

SEQ ID NO: 203762 - DNA, 201 bp, Homo sapiens
cctcttgccatttagataaaatttaaataaaaccattagggaaagagctgtgtcagaatgttggaccctttaaactcaagataaaaatcaatctgtatgtyactttctgttcaaatgaagcaaaagcatctgcagtttggcagttatctgtgacttgctgtttttattctgtgctatttcttcttgctgtagttcctccta

SEQ ID NO: 203763 - DNA, 201 bp, Homo sapiens
cattcccactagtaatgttgcatcacaagtgattttaaaaccaagcacaggtgtttgtactcaacatgggaagaatctttgtggagttttgagcagagttyaggggttgtcatttgaagatgtgttacacatcagtgtggaagcagattcagcatgagggagcaggtagaaagtgctggagtactctaattctccgccgat

SEQ ID NO: 203764 - DNA, 201 bp, Homo sapiens
ctgtacattcccactagtaatgttgcatcacaagtgattttaaaaccaagcacaggtgtttgtactcaacatgggaagaatctttgtggagttttgagcasagttcaggggttgtcatttgaagatgtgttacacatcagtgtggaagcagattcagcatgagggagcaggtagaaagtgctggagtactctaattctccg

SEQ ID NO: 203765 - DNA, 201 bp, Homo sapiens
tgcagtgagccgagattgcactactgcactccagcttggagtgcaggttcttttttctgtcttatgtattaaaaagaaacacattttcaacattaaaaacaaaaaaaaaaaaatcagccaggcgcggtagctcacgcctgtaaatcccagcactttgagaggctgcggcgggcaaatcgcgaggtcaggagttcgagacca

SEQ ID NO: 203766 - DNA, 201 bp, Homo sapiens
ggagtggaattgctgggtcatatggtaactatatttagcattttttgtttttgtttttgagacagagtcttgctcggtcacccaggctggagtgcagctgygggatttttgctcattgcctcctaagtagctgggactacaggtgcacatcaccacactcggctaatttttgtatttttagtagagactgggtttcaccat

SEQ ID NO: 203767 - DNA, 201 bp, Homo sapiens
cttggagtgcaggttcttttttctgtcttatgtattaaaaagaaacacattttcaacattaaaaacaaaaaaaaaaaaatcagccaggcgcggtagctcaygcctgtaaatcccagcactttgagaggctgcggcgggcaaatcgcgaggtcaggagttcgagaccagcctggccaagatggtgaaacctcatctctacaa

SEQ ID NO: 203768 - DNA, 201 bp, Homo sapiens
taaacaataactccccctacctgctgtcaacgccccccactattcttctttctctgtctctagaatttgactactctacatacctcatttaagtgaaatcwtacagtaattgtccttttgtgactggtttatttcacttagaatatcgtcctcaaagttcattcaagttgtagcatgtgttaggatttccttccttttgaa

SEQ ID NO: 203769 - DNA, 201 bp, Homo sapiens
atttagctaataagaataatgcaactgtgagcatttgtgcacaagtttttttggggacgaatgtttccatttttcttgggtggaaatttcttaggagtggrattgctgggtcatatggtaactatatttagcattttttgtttttgtttttgagacagagtcttgctcggtcacccaggctggagtgcagctgtgggattt

SEQ ID NO: 203770 - DNA, 201 bp, Homo sapiens
tcaggaggcggtgttaaccaactaggtgaccatatagggtttaggaagaaacaggcttcagggcaggagcctgtaaaacaggctgattgctcaaattgagyacattcctataatccctggagaccctgcctgtttgcttacaatactggtgcctgtgccagtgggtatagattggatgtgtgatacaaccaaagaagggca

SEQ ID NO: 203771 - DNA, 201 bp, Homo sapiens
ttgatgggtacttgggttgcttctacctactgactattgcaaatagtgctactatgagcatgagtgtgcaaatatctgttcaagtccctgttttcatttckgttttgttttgttttgttttttgagacagagtctcgctctgttgcccaggctggagtgcagtggcacagtctcagctcactgcagcctctgcctcctggg

SEQ ID NO: 203772 - DNA, 201 bp, Homo sapiens
ttgagatcaggagttcgagaccagcctggccaacatggtgcaaccctgtctctactaaacatacaaaaattagccgggcatggtgctgggtgcctgtaatmccagctacttgggatgctgaggcaggagaatcgcttgaacccaggaggcggagactgcagtgagctgagatggcaccgctgcaccctagcctaagcaaca

SEQ ID NO: 203773 - DNA, 201 bp, Homo sapiens
atgtcattccacattcttgcttatagcctcatctgtcaccagaaagaagagcagctgaggcattcttcctacgaccattccctgaagctcttttttttttktgtgtgtgtggggggtgggatatagtcttgctttgtcaccaggctggagtgcagtggtgcaatctcggctcactgccaccactgcctcctgggttcaagc

SEQ ID NO: 203774 - DNA, 201 bp, Homo sapiens
ctcaagaaaaaaaaaatcaggctcctgacggggaaagatgttgcccaaagggtaactgagagggatctgaagaagagggagcctgtctactcccctcctcrgtgaaggtgatgtgatgagcttctgatccctctgtctgctcccctctttcctctctcctttcctctccccttctctactgtcctctccttcctctctcta

SEQ ID NO: 203775 - DNA, 201 bp, Homo sapiens
aagaagagcagctgaggcattcttcctacgaccattccctgaagctcttttttttttgtgtgtgtgtggggggtgggatatagtcttgctttgtcaccagrctggagtgcagtggtgcaatctcggctcactgccaccactgcctcctgggttcaagcgactctcctgcctcagcctcccgagtagctgggactacaggca

SEQ ID NO: 203776 - DNA, 201 bp, Homo sapiens
aaaaaggagttagcaccaagagtcatttgagtaacaatttaaaaaatattatatttattaatttaatgtatatatgaatttaaaaatatatgcgtgcgtgwatatatatacacatacgcatgtgaatttaaaaatatacatatagcacacatatttagcataaattttgtgtacatgtaataattgaagtgcttattatag

SEQ ID NO: 203777 - DNA, 201 bp, Homo sapiens
gcatcaagactttcctttctggcaggagacaggtagcacactcagaaggggcaattaaagagaggttaccaaaatatttacaaagattgtgaagggttaagggaaaccaataaggaatgacaagggttagtgaatgaccccagggctagcaacagagagggaagaaattgccaccctaaggtctgcagaggcaagaggagg

SEQ ID NO: 203778 - DNA, 201 bp, Homo sapiens
ctaatagtgccacttggctttaactgtcgtcagctgttaggtgcaaaagttattgctgtctttgccattacttttagtggcaaaaacgacaattagttttrcaccaacttaataaaataactcaggcggaaaagaagggaacaatgaattctcgcaggcctggtgccaagaagccaccccattctcttcctgctttctctc

SEQ ID NO: 203779 - DNA, 201 bp, Homo sapiens
tccctccctctctcccttcctcccttccttccttcctttccttccttcctccctctctccctccttccttcctttcttcctttccttttgtttcctttccyttcctttctttcttttcccttccttccttccttcctttcttccttccttccttccccccttcctttctccctttcctttccttttttctttccttccttc

SEQ ID NO: 203780 - DNA, 201 bp, Homo sapiens
aaagtgcaggctttttgtatgctcatgttgactgatagctgcagggtggggctggtcacctgaagacaaatgtatgattagggggttgagacttaacctcrtctcccaacctcaaaggaagggtgggagctgaaggtcaagttgatctgatcacaacagccaatggtttaatcaatcattcctaagtaatgcatcctccat

SEQ ID NO: 203781 - DNA, 201 bp, Homo sapiens
gttaagaccaacttgagttcggctggtggacttgaactcttatttatctttgccaacagtttctggggcctgcaaaataagcacgttaaaataccagtgatttttttttttttttttgctgctttgttgaacctttgtggcagattaagtgggggtgaaaatggaagcacatggaccaaaaaatatgtaattcacaggtgt

SEQ ID NO: 203782 - DNA, 201 bp, Homo sapiens
gggtgggagctgaaggtcaagttgatctgatcacaacagccaatggtttaatcaatcattcctaagtaatgcatcctccataagaactcaagaggacaggrtttggagaactcccagatagctagacacatggaggttcctggagggtagagcgactagggagggcatggaagtgccacaccccttcccccttacctcacc

SEQ ID NO: 203783 - DNA, 201 bp, Homo sapiens
gccacataaggagaaaaaaatctcattgggaccatcattccctgtgtctccttggtgggatatgcatgcatgcttagtcttaatttctatactgttttataaaaaaaattctccttctggcccctctgactgcattggaaaggctgcccagggggttgtgctaggcaaacacatctgaaatgcattttagctctaaggtgg

SEQ ID NO: 203784 - DNA, 201 bp, Homo sapiens
gtctgaaaaagcaagctgcaaacgtagataagcaagctggaagcttgcttgggtgaatactagcagcagtgccaatagagcagggctacctgagggccagkcatgttcaatatggtggctccatctccccttttctttgtcaccatgtgtgcagtagaggaacaggccacatgggtggccagcttcgttgtgtgctatgca

SEQ ID NO: 203785 - DNA, 201 bp, Homo sapiens
tttgggtaaggagacagagccaagccatatcaatggccatataccttggaggtcctttgggtgtcctccaagaatatatatatgtatatatatatgtatatgtgtgtgtgtgtgtatatatatacacacatatgtgtgtgtgtatatatatacgtatatgtgtgtgtgtatatatacatgtatatatatttgagatagagt

SEQ ID NO: 203786 - DNA, 201 bp, Homo sapiens
gcatgcaccaccacacccagctaattgtatttttagtagagacgggattcatcatgttggccaggctggtcccgaactcctgacctcaagtgatccgcccrcctcagcctcccaaattgctgggattacaggcgtgagccatggcccccagccatactgagatatacagctcatatcactcatctatttaaaagcgtacag

SEQ ID NO: 203787 - DNA, 201 bp, Homo sapiens
caggccacatgggtggccagcttcgttgtgtgctatgcaaatggcacacctagtcctaaccagtttttcgcgcactatgtaaatggcacacctggtccaamcaatcttttgcaccctatgtaaatcagaccccacctcctcaagctcatctataaaagcttctgcatttcactgcagaagcggaaacccattctctccagg

SEQ ID NO: 203788 - DNA, 201 bp, Homo sapiens
ccctatgtaaatcagaccccacctcctcaagctcatctataaaagcttctgcatttcactgcagaagcggaaacccattctctccaggaccccctctctgkgctgagagctcttttctttcttttgcctattacacttctgctcttaacctcactctggagtgtctgcatcctagtttctgtggccgtgagaaaacaaatc

SEQ ID NO: 203789 - DNA, 201 bp, Homo sapiens
agaagatattcaaactaccaataaacaggggctaatttcatgaataatcagagaaaccacagtaaactaaaaccactattcaataaccctgtacatccatmtgaatagttaaaagcaaacaaaccgaaccctctgacaattctaatggttgacaaggatatatggagtaattagaactctcatatattgctagtgggagtt

SEQ ID NO: 203790 - DNA, 201 bp, Homo sapiens
ctctctatgttgcctcactggtctcaaattcctggcctgaagcagtccttctacctcagcctcccaaagctctaggattacaggcgtgaaccaccacatcyggtattaattactttcttttcattttgttttatcccatagtgcctgcattgatataggatgtcctaaaacattctcagaaaacttctccaccatgcaaaa

SEQ ID NO: 203791 - DNA, 201 bp, Homo sapiens
aaatctcatcttgaattgtaatctccctaatccctacatgttgagggagggtccaggtgggaggtgattggatcctgggggtggtttcctcaaggctgttsttgtgatagtgagtgatttctcacgagatctgatggttttacaaggcagttttctctgatctttcttgtcctctcttgctgccaccatgtgagacgtgct

SEQ ID NO: 203792 - DNA, 201 bp, Homo sapiens
gctccacagccacagcatggtcccacagatacaaacacaaatctctgagtcccatctctggacccagtccatagttctggaccagacccaagaagctgcatttttttttctcttctcttttcttttttttttttttttgaaacggagtctcgctctttcccccaggttggagtgcagtggtgtgatctcggctcactgcaa

SEQ ID NO: 203793 - DNA, 201 bp, Homo sapiens
ccacagatacaaacacaaatctctgagtcccatctctggacccagtccatagttctggaccagacccaagaagctgcatttttttttctcttctcttttcttttttttttttttttgaaacggagtctcgctctttcccccaggttggagtgcagtggtgtgatctcggctcactgcaacctctgcctcctgggttcaagc

SEQ ID NO: 203794 - DNA, 201 bp, Homo sapiens
tccacactagtcttgaatggctgtgtccatgctgcagcaaagggcatgatatcgttcctttttatggctgcatagtattccatggtgtatatgcaccacatttttttttaatccagtctacaattgatgagcacatgggttgatttcatgattttgctattgtgaatattgctgcaatgaacgtaggaatacaggtgtctt

SEQ ID NO: 203795 - DNA, 201 bp, Homo sapiens
ggtgggcagatcacctgaggtcaggagttcgagaccagcctgaccaacatggagaaaccccggctctactaaaaatacaaaattagctgtgcatggtggcrcatcctgtaatcccagctactcagggggttgaggcaggagaattgcttgaacctgggaggtggaggttgcggtgagccaagattgtatcattgcactcca

SEQ ID NO: 203796 - DNA, 201 bp, Homo sapiens
agccttacagagtaacagagagaggaggtgtgggaattgagggaagtgacttgatttgctaggctggaaccagtacatgctaggctggaacccagtacatrctaggctggaacccagtacatgctaggctggaacccagtacatgctaggctggaaccagtacatgctagaccggaaccagtacatactaggacggtgcct

SEQ ID NO: 203797 - DNA, 201 bp, Homo sapiens
agcaagaagatcgcttgagcccaggagttcaaggcttcagtgagccatgattatgccattacactccagcccaggcaacagagcaagaccctgtctcattaaaaaaaaaaaaaaaaaaaaaaaaaaactacatgtttaaggtgtacaggtgatgtttggatatacatatacattgtgaaatgagcaccacaatcaaactga

SEQ ID NO: 203798 - DNA, 201 bp, Homo sapiens
ttgggtaaggagacagagccaagccatatcaatggccatataccttggaggtcctttgggtgtcctccaagaatatatatatgtatatatatatgtatatgtgtgtgtgtgtgtatatatatacacacatatgtgtgtgtgtatatatatacgtatatgtgtgtgtgtatatatacatgtatatatatttgagatagagtc

SEQ ID NO: 203799 - DNA, 201 bp, Homo sapiens
agtagctgggattacaggcatgcaccaccacacccagctaattgtatttttagtagagacgggattcatcatgttggccaggctggtcccgaactcctgayctcaagtgatccgcccacctcagcctcccaaattgctgggattacaggcgtgagccatggcccccagccatactgagatatacagctcatatcactcatc

SEQ ID NO: 203800 - DNA, 201 bp, Homo sapiens
cctgcccacctgggctgtttccatcacctcctattggttttgcctccatccccagtgcctgctgtcctgccctcctacctcccacagtgccctgtggacamcatcccctgaacgacacccagccacacctacacctagcagcccaccttcggtctatctcatcttcctgtggttggatctcccatatatagtgaagataaa

SEQ ID NO: 203801 - DNA, 201 bp, Homo sapiens
actgctttccacagtggctgaagcaatttacattcccaccagcagtgtacaagtgttcctgttctctgcagccttgccagcatctgttgttttttaactttgtgtgtgtgtgtgtgtgtgtgtgtgtgtgtgtgtgtgtgttttgtttgtttgtttgttttttgagacagagtcttgctctgttgcccaggctggagtgca

SEQ ID NO: 203802 - DNA, 201 bp, Homo sapiens
acagagccaagccatatcaatggccatataccttggaggtcctttgggtgtcctccaagaatatatatatgtatatatatatgtatatgtgtgtgtgtgtrtatatatatacacacatatgtgtgtgtgtatatatatacgtatatgtgtgtgtgtatatatacatgtatatatatttgagatagagtcttgctctgttgc

SEQ ID NO: 203803 - DNA, 201 bp, Homo sapiens
ctgctttccacagtggctgaagcaatttacattcccaccagcagtgtacaagtgttcctgttctctgcagccttgccagcatctgttgttttttaactttgtgtgtgtgtgtgtgtgtgtgtgtgtgtgtgtgtgtgtgttttgtttgtttgtttgttttttgagacagagtcttgctctgttgcccaggctggagtgcaa

SEQ ID NO: 203804 - DNA, 201 bp, Homo sapiens
agccatatcaatggccatataccttggaggtcctttgggtgtcctccaagaatatatatatgtatatatatatgtatatgtgtgtgtgtgtgtatatatayacacacatatgtgtgtgtgtatatatatacgtatatgtgtgtgtgtatatatacatgtatatatatttgagatagagtcttgctctgttgcccaggctgg

SEQ ID NO: 203805 - DNA, 201 bp, Homo sapiens
tgctttccacagtggctgaagcaatttacattcccaccagcagtgtacaagtgttcctgttctctgcagccttgccagcatctgttgttttttaactttgtgtgtgtgtgtgtgtgtgtgtgtgtgtgtgtgtgtgtgttttgtttgtttgtttgttttttgagacagagtcttgctctgttgcccaggctggagtgcaat

SEQ ID NO: 203806 - DNA, 201 bp, Homo sapiens
atcaatggccatataccttggaggtcctttgggtgtcctccaagaatatatatatgtatatatatatgtatatgtgtgtgtgtgtgtatatatatacacayatatgtgtgtgtgtatatatatacgtatatgtgtgtgtgtatatatacatgtatatatatttgagatagagtcttgctctgttgcccaggctggagtgca

SEQ ID NO: 203807 - DNA, 201 bp, Homo sapiens
tcaatggccatataccttggaggtcctttgggtgtcctccaagaatatatatatgtatatatatatgtatatgtgtgtgtgtgtgtatatatatacacacwtatgtgtgtgtgtatatatatacgtatatgtgtgtgtgtatatatacatgtatatatatttgagatagagtcttgctctgttgcccaggctggagtgcag

SEQ ID NO: 203808 - DNA, 201 bp, Homo sapiens
gcaggaggattgcttgagcccgggagttcaaagctgcagtgaatgcgctgtgattataccactgcactccagcctgggtgacagagtgagaccatcccttaaaaaaaaagttcctacgttcctacattctcagacccagtgtcctcgtttgtgaaacagagattgtaataataccttccccctgagcttgtcacgggatta

SEQ ID NO: 203809 - DNA, 201 bp, Homo sapiens
ggctgcccaggctgtgaaagccaaggaggctggtccttctttctgtcagtggcagcaatgaaacactggatattggatctccatcatttaaatggataaaktggtgtgtgtgtgtgtgattgtgtgtgtatgtgtgtatgtgtgctgagtagctggaacatttgaaatggcagaaggcaatgagaacccttaacaacaaaa

SEQ ID NO: 203810 - DNA, 201 bp, Homo sapiens
ctgttatttgtaactcttgggggagtttttattttagtttcctctttaataaataaacttagtactcctgttgcatatgaaagattagctaaacaaaaaarttcagttgttatcaaagtgttccagaaacatatagaaagagcctcaatacaaaaagctttgtattttaattcttcttcttcttcttcttcttcttttttt

SEQ ID NO: 203811 - DNA, 201 bp, Homo sapiens
atggcggaactaatttacattctcaccagcagtgtataaccattaccttttcttcacaacctctccagcatctgttattttttttactttttaatgataaycattatgactggttgaaatggtatctcattatggttttgattttcctttttctaaaaaaaaatcaccatgatctcatcccttggggacagcatctattga

SEQ ID NO: 203812 - DNA, 201 bp, Homo sapiens
ccctaatccctacatgttgagggagggtccaggtgggaggtgattggatcctgggggtggtttcctcaaggctgttcttgtgatagtgagtgatttctcaygagatctgatggttttacaaggcagttttctctgatctttcttgtcctctcttgctgccaccatgtgagacgtgcttcttccccatctgtcatgattgta

SEQ ID NO: 203813 - DNA, 201 bp, Homo sapiens
ctgttcttgtgatagtgagtgatttctcacgagatctgatggttttacaaggcagttttctctgatctttcttgtcctctcttgctgccaccatgtgagaygtgcttcttccccatctgtcatgattgtaagtttcctgaggcctccccagccatgtggagctgtgagtcaattaaatctcttttctctataaattacctc

SEQ ID NO: 203814 - DNA, 201 bp, Homo sapiens
atgtggagctgtgagtcaattaaatctcttttctctataaattacctcttttctttataattaaacctcttttctttataaattacccagtctcagatatrtctttatggcagtgcgaaaatagactaatacatctactcttcaatgatttcagtgtctgctcatcattcttgtctaatataattccggcttgctttatga

SEQ ID NO: 203815 - DNA, 201 bp, Homo sapiens
catgctcaggctatactccgatggattatatcagaaaatctgggtggggtcaggcactagaggtctttaaagttgcctggatggttccaacgtgcggtcaygtctgagagtcgctgcttgagatgcatcctggattctgcctggcaggactcatgggcccctgttccctttcggagcttagagggattgagcaaagccact

SEQ ID NO: 203816 - DNA, 201 bp, Homo sapiens
ggaggattgtgatctggggaagagagcgtgcacacacgcatcttggttggacctgaagggatgctatgttgttctttgattaacacacatgctctgtgtawtgtcacttctctggtctaaaacccttgacactgggacttcccatgactggaggatcaagtctgaattttataaggtggcttcagaacacctggtacactg

SEQ ID NO: 203817 - DNA, 201 bp, Homo sapiens
gctttccacagtggctgaagcaatttacattcccaccagcagtgtacaagtgttcctgttctctgcagccttgccagcatctgttgttttttaactttgtgtgtgtgtgtgtgtgtgtgtgtgtgtgtgtgtgtgtgttttgtttgtttgtttgttttttgagacagagtcttgctctgttgcccaggctggagtgcaatg

SEQ ID NO: 203818 - DNA, 201 bp, Homo sapiens
atccattgtaaagtgtgaagttcagtggcaataagaacattcccagtgttgtgcaactatctccacgatctacttccagttttcttattcccccaaatagygacccagtgcccattaagcagtcacttcctattcctccctcccaccaaacagtgaaggctgccaatctactttctgtctctatggatttgcctattttgg

SEQ ID NO: 203819 - DNA, 201 bp, Homo sapiens
ctcactgcaacctccgcctcccaggttcaagtgattcttctgccttagcctccagagtagctgggactacaggcacacaccatacttggctaagttttgtrtttttagtagagacagggtttccccatgttgcccaggatggtctcaaacttctgacctcaagtgatctgcccgcttcggtctcccaaagtactaggacta

SEQ ID NO: 203820 - DNA, 201 bp, Homo sapiens
agaacttgatcttgcctttacactcaactccttggagacctgtgttgttcccaggatagctttcatttatgcaacttacaccggcagtgggcacctgtggwatgtattgtgggtgccatggaggatgtattagttcttgccctgctgtaaagaaatacctgagactgggtaatttataaagaaaggaggtttcattggctt

SEQ ID NO: 203821 - DNA, 201 bp, Homo sapiens
gaaacttgcctatgtatcccctgaaactaaaacaaaagttgaagtttaaaaaattaatacaagaaatgagctctccattcccagacacacacaaacacacrcacacacacgcaaaattttgacaccagtaagccatcatggaggaaaggatataagagggtttgaggatgctcaagtgagataaccttcttgccgattcca

SEQ ID NO: 203822 - DNA, 201 bp, Homo sapiens
tgtgttctgtaaatatcacaacactggccactagtttgagattttaaaattgaagttgaaaaatagtgttttttaaaaaaattaactgaatttaaaacgtaaaaaaaaaaaaaaaatccaggattactgtccttccgtggaagtataacaattggacttctatatgaattatatagtttctttttgttttcctttagcctg

SEQ ID NO: 203823 - DNA, 201 bp, Homo sapiens
tcattgcttctttgtttgttcacagagtgacagaaggaagtcaaggcaccattatgactcggatgagaaatcagaaacaagagaaaatggtgttacagatkacctggatgctcccaaggccaaaaaatctaaaatgaaagagaagctaaatggagacactgaagaaggatttaatagactttcagatgaattctccaaatc

SEQ ID NO: 203824 - DNA, 201 bp, Homo sapiens
gaggatctcttagcccagtattttgaggttgtaatgagctatgattttgccattgcaatgtaggttgggcgacagagcaagattccatctctttaaaatamatgaataataaaaggatgtttttgaaattaaaagaatttccctgggaagccaagacaggaaaatttcttgaggccaggcattcaaaagcagcatggaaac

SEQ ID NO: 203825 - DNA, 201 bp, Homo sapiens
agagtctgtagcacaggttggtcttgaactcctggcctcaagtgatcctcccactttgaccttccaaagtgttgggaatattggtgtgagccaccataccyagtaaaaaatttgttattataaatcatttcaaacatattttttagatgagggacttgtataatgaatctccatgtacccaacactcagcttcaacaatta

SEQ ID NO: 203826 - DNA, 201 bp, Homo sapiens
aaataaattctaggtattctatcatttcaaccataaatatttgcatatttctaaatattaatgactttaaaaaagaccttatcataataccataattaaaytcccccaaaataattccttaatatcatccaattttatttaaatttttccatttgtttcctaaactttttaaatacagggtccataaagctcatagattgt

SEQ ID NO: 203827 - DNA, 201 bp, Homo sapiens
gcatgttggccaggctggtctcgcactcctgacctcaggtgatcctcccgcttctgcctcccaaagtgctgggattacaggcgtgagccaccataccctgyccatgttattattattgtgattattatttggtaaagatgggattttgccatgttgcccaggctggtcttgaactcctgagctcaagggattcacctgcct

SEQ ID NO: 203828 - DNA, 201 bp, Homo sapiens
gtgcatcaagctttgaaccacgatctttgatcacctctgataaggtagaaatctgtgagaaaattgtacatgagtgggaaaaggttaaaattgaacatagkaaatattgtagtgaattattgtgctttttgtgcagaaaaaaactgttttgctctatgagaaactggtctccttattttcctctactccctaataaatcct

SEQ ID NO: 203829 - DNA, 201 bp, Homo sapiens
ccctgggctttgggcctctcctccgcgtggcccctcagcccttcccgttggcgcctgaatctcagatgggcagactcaagctcccatcaccatggaatctrttctttctctcctgaagcagtgacgcttgccatttcgttttcattggccctcttagaagatgattaagaaaaaatgattgctttgaatatgtgttgcttc

SEQ ID NO: 203830 - DNA, 201 bp, Homo sapiens
acaccaccacacccggctaatttttgtatatttagtagagatggggtttcaccatgttgggcaggctggtctcgaactgctgacctcaagtgatcgttttrcctcggcttcccaaagtgctgggattatagacgtgagccaccatacccggccatatatgtttgtttgagttcattcacaatggtatgcttttatttgttt

SEQ ID NO: 203831 - DNA, 201 bp, Homo sapiens
ccaggttcaagtgatcctcccacctcagcctcctgagtacctgaaaccacaggtgcatgctaccatgcctggctaagtttcatttttgtagagatgggatytctctaagttgcccaggctgctctcagtcctgagctcaagtgatccacttgcctctgcctcccaaagtgctgggattacagtcgaaagccactgtgccca

SEQ ID NO: 203832 - DNA, 201 bp, Homo sapiens
ggctgaggttggtaggatttgagcccggaggttgaggccacagtgagctgtgatggtgccactgcactccaacctgggcaacagagtgggaccctgtttcaaaaaaaaaaaaaaagtgttccactaattttccttgtaagttaatctgtaaaaaattaaaaacagtaaatgaggaagagttgagtataaattatttaggcc

SEQ ID NO: 203833 - DNA, 201 bp, Homo sapiens
ctccatttttactaaaaatacaaaaaattagccggtcatggtggcgggcgcctgtagttccagctactcgggaggctgaggcaggagaatggcgtgaatcygggaggtgaagcttgcagtgagccaagatcgcgccactgcactccagcttgggtgacagagcgagactctgtctcaaaaaaaaataaaagaaaaaaaagg

SEQ ID NO: 203834 - DNA, 201 bp, Homo sapiens
atttacagtatacagccatcatttctatctagttccaaacattttcatcaccccagaaggaaacccaacaaccgttaaacagttactctccattccctccttttttttttttttttttttttttgagacagagtttagctctgttgcccaggctggagtgcagtggcctaattttggctcactgcaacctccacctcccgg

SEQ ID NO: 203835 - DNA, 201 bp, Homo sapiens
tgagaatacttctggcgtcacagctctagagctgctgcttttgttatttttgttagtgcttaaaaatatagtctgtaaattatatctgagtaaagctgttaaaaaaaaaaggtctactttctagttctagctgtgtctttcctcatttttctctgtatctttttttttctttgatcctgttattcttggcatccttagttt

SEQ ID NO: 203836 - DNA, 201 bp, Homo sapiens
cgtctcccacagtactgggattacaggtatgagccactatgcccagcctggtcccttccttccttccttccttccttccttccttccttccttccttcctytctctctctctctctttctttctctttctttctttccttccttccttccttctttccttctttccttcctttcctttctttccttcctttcctttctttc

SEQ ID NO: 203837 - DNA, 201 bp, Homo sapiens
ccttccttccttccttccttccttccttccttccttccttccttcctctctctctctctctctttctttctctttctttctttccttccttccttccttcyttccttctttccttcctttcctttctttccttcctttcctttctttcctttcttccttcctttctttccttcttttctttcttttctttccagatggagt

SEQ ID NO: 203838 - DNA, 201 bp, Homo sapiens
ctgttgattttttccgaccatcagctcagagactgatagaagagaaaggtgcagtggatgcattggctgcagctttagcccacatttctggtgcatcaagytttgaaccacgatctttgatcacctctgataaggtagaaatctgtgagaaaattgtacatgagtgggaaaaggttaaaattgaacatagtaaatattgta

SEQ ID NO: 203839 - DNA, 201 bp, Homo sapiens
gaatgttagtattagaatagaatgtatatttagaatgttagaatttatttagaatgtatatttagaatgtatatttatagaatgtatttaattagtacatktaattagtaatacatagtttaattttagaatgtataaactgagtatgaatttatgatctcgaaaattgaaaatatttttgcttattttctggttttcatt

SEQ ID NO: 203840 - DNA, 201 bp, Homo sapiens
ctctctctttctttctctttctttctttccttccttccttccttctttccttctttccttcctttcctttctttccttcctttcctttctttcctttcttycttcctttctttccttcttttctttcttttctttccagatggagtttcactcttgttgcccaggctggagtgcaatgttgtgatcttggctcactgcaac

SEQ ID NO: 203841 - DNA, 201 bp, Homo sapiens; identical to SEQ ID NO: 35800

SEQ ID NO: 203842 - DNA, 201 bp, Homo sapiens
attttggccaggatagtctcaatcccttgacctcatgatccgcccaccttgctctcccaaagtgctgggattacaggcatgagccactgcgcctggcctctttttttttttttttttttgagatggagtctcactgtgtcgcccagactggagtgcagtggtgcgatgtcgactcactgaaacctccgtcctctgcccccg

SEQ ID NO: 203843 - DNA, 201 bp, Homo sapiens; identical to SEQ ID NO: 35803

SEQ ID NO: 203844 - DNA, 201 bp, Homo sapiens
acctcaagtgatccgcccactttggcttcccaaagtactgggattacaggtgtgagccactgtgcccagcctggtccctttcttccttccttccttccttycttttccttcctttcctttcccttccttccttccttcctttctttcctttccttttttttttttttttttttttgatggagtttcgctcttgtcgcccaa

SEQ ID NO: 203845 - DNA, 201 bp, Homo sapiens
tagaggaaatacaggatgtcagctgtgcttggaaagaacttaacagaaagctgagtagtaatgcagtgtctcagattaccagaatgtgcctcctgaaaggraatatggtaggcttttccagacaattaaaaagctttttaatcaactaccccaaatgtttacaaacactagcaaattttgttctttctctttgaagcctaa

SEQ ID NO: 203846 - DNA, 201 bp, Homo sapiens
gagccactgtgcccagcctggtccctttcttccttccttccttcctttcttttccttcctttcctttcccttccttccttccttcctttctttcctttccttttttttttttttttttttttgatggagtttcgctcttgtcgcccaagctggagtacgatgatgtgatcccagctcactgcaacttctgcctcccgggtt

SEQ ID NO: 203847 - DNA, 201 bp, Homo sapiens
tcgtcagtttattgatgaccatttgtctatattgtttttaagtgctgttgaggagagtctttgtcttacagtctcccaggaaggctaattcttgaccagayagaaaaaatacacaagagaaatattttaaaataattttaatgaaacaaataatgtggtattttctttcttcaaagcatttggccatccagtgtcattggt

SEQ ID NO: 203848 - DNA, 201 bp, Homo sapiens
gtgttagccaggatggtctcaatcttctgacctcgtgatttactgcctgccttggcctcccaaagtgctgcgattacaggtgtgacccactgcgcccggcyggtttcaaaggtttttaggagacagaattcttaggactcagatagtggattgaaagatgagagggaaacagaataaaacctagttttttttgtttttttt

SEQ ID NO: 203849 - DNA, 201 bp, Homo sapiens
ctttgtcttacagtctcccaggaaggctaattcttgaccagatagaaaaaatacacaagagaaatattttaaaataattttaatgaaacaaataatgtggyattttctttcttcaaagcatttggccatccagtgtcattggtctcagaggccagcagttattggagatgtccttcaagtctacagtgggtctgaagggag

SEQ ID NO: 203850 - DNA, 201 bp, Homo sapiens
tttgttcacctttttatccctagtgcccaacatgttgtaggtcattattatatttgtggagtaaataggtggtcattgccaccatcttaggccaccgatamcctctttatttcctttttcagaaacagggtcttgctctgtcacccaggctggtgggtgggtgacggatcattaaaaaaaaaaaatatatatatatatata

SEQ ID NO: 203851 - DNA, 201 bp, Homo sapiens
cattgccaccatcttaggccaccgataacctctttatttcctttttcagaaacagggtcttgctctgtcacccaggctggtgggtgggtgacggatcattaaaaaaaaaaaatatatatatatatatatatgtatatatatatatacacacacacacacacacacacacacacacaattttttttttgagatggaattttg

SEQ ID NO: 203852 - DNA, 201 bp, Homo sapiens
ttcagaaacagggtcttgctctgtcacccaggctggtgggtgggtgacggatcattaaaaaaaaaaaatatatatatatatatatatgtatatatatatayacacacacacacacacacacacacacacacaattttttttttgagatggaattttgctctgttgcccaggctggagtgcagtggcacagtctcgggtcac

SEQ ID NO: 203853 - DNA, 201 bp, Homo sapiens
ccttttcagtctgttccagcagtgctcaaatatttgtaggttccactccccattctttatgtatgatatttcttctaccaggaactccctagccttctgcyccttcttttacctagtagttccttatgatgttaggtctcagcttcagtgctgctttcccctcaaacaagactgagttagatttccctcttaagtattcct

SEQ ID NO: 203854 - DNA, 201 bp, Homo sapiens
ttgtttgtttgttttttttttttttgagatgaagcttcactcttgtcccccaggctggagtgcaatggcacgatctcagctcactgcaacctccacctccygggttcaagctattctcctgtctcagcctcccaagtagctggaattacaggtgcctgtcactgcgcctagctaattttttgtatttttagtagagacaga

SEQ ID NO: 203855 - DNA, 201 bp, Homo sapiens
acagaatatttaccaaactcttagcagtgaattatttctaagtcactagtattagggaagcttttacattttatgttaaatattttctgtcatgtttgactttttttttttacagtaagcatgcattgttaaaatcatcaaagtaagatttaaaaacatgcaaaaggagcacagactagatgttgttgtgctatcagttgc

SEQ ID NO: 203856 - DNA, 201 bp, Homo sapiens
agcgattctcctacctcagcctgctgagtagttgggattataggcgtgtgccaccatgcccggctaagtttcatatttttagtagagacgcagtttcactrtgttggtcaggctggtctcaaactcctgacctcctgatctgttccagttgggttaccaaagtgctgggattacaggcgtgagccaccacggctggcccaa

SEQ ID NO: 203857 - DNA, 201 bp, Homo sapiens
cccaggctggtcttgaactctggggctcaagtgatcctcctaccttggactcccaaagtactgggattataggtgtgagccactgcacctggcctttttgkattattattattattatttttatttttgagacagagtttcactcttgtcgcccaggctagagtgcaatggcacaatctcggctcactgcaacctatgcct

SEQ ID NO: 203858 - DNA, 201 bp, Homo sapiens
catgcagtttggtttttaaatggcctgctctttgttgttaatgaattaatgatatgaattaaataaatactttaatacatttatatagcaaaattaaaactgtaatcttgtgactgatttcttctaatggttttgaaaaatgatgttatgttattaatttaactttactgcataggttcattctagcttggaatttattaa

SEQ ID NO: 203859 - DNA, 201 bp, Homo sapiens; identical to SEQ ID NO: 35802

SEQ ID NO: 203860 - DNA, 201 bp, Homo sapiens
atgcagtttggtttttaaatggcctgctctttgttgttaatgaattaatgatatgaattaaataaatactttaatacatttatatagcaaaattaaaactgtaatcttgtgactgatttcttctaatggttttgaaaaatgatgttatgttattaatttaactttactgcataggttcattctagcttggaatttattaac

SEQ ID NO: 203861 - DNA, 201 bp, Homo sapiens
agtattaaattaactttcagcttattgacaactaagaccatagaagaaacatcttgggttatataattcttattatctaacaaacattgcagcttttttcttttttttttgagacagggtctcaccctgtcacccaggctggagtgcagtggcgtgatcttagctcactgccacctccgcctcccaggcccaagcgatcct

SEQ ID NO: 203862 - DNA, 201 bp, Homo sapiens
taccaaatggagatatagatgaatatgaaaaaaaatcaaagcgagtatcatctttagatacttctactcataaatcaagtgataataaactagaggaggtrtggaagctttttattttgcatttgacattgttgttgaactataggttgatttgaatttttttaggctaattagaattgattctataacatttcttgatta

SEQ ID NO: 203863 - DNA, 201 bp, Homo sapiens
cctttaccccaaaatccacacatataaattgtttggaatgttgaaaagggcaacaggattgaaataaatatattattattaacattattatttggattccrgaatgactgcaacttgctagatttttaaaaaatattaccttttataatctttaggatgttgagtcctatatccatcgctctggacgcacaggtagagctg

SEQ ID NO: 203864 - DNA, 201 bp, Homo sapiens
ttcaccccaagttttacatttttcattatttttttgaagcttgggaggatttttaagagcgggctacatcgtgggaaattaagaaaacatttgaattcttyttgtttatttaagattctgaagacaatcctcagactttacttttttctgcaacttgcccacagtgggtatacaaagttgcaaaaaaatacatgaaatcca

SEQ ID NO: 203865 - DNA, 201 bp, Homo sapiens
ttttaaatagtttgtttgaatctggatccaaatacaattcttgacgttgctactgattgatatgcgtcttaaacattttataatctatagttccttttttyttctttgcaattttctgttgaaaaaactcatttgttggccaggcgcagtggctcacacctataatcccagcactttgggaggacgaggatggtagatcac

SEQ ID NO: 203866 - DNA, 201 bp, Homo sapiens
acagggtgttagtggctttaaatttctttcatgggttaaaccaaaatccagtctttatcaggaatgtcctataggcttttcctcttgctatcttcttgacrtcatgtcttatcactctcccctttcttatttcagccaccctaacctatttggttttcctcagacataaacttaactattacacaaggcctttgtacatac

SEQ ID NO: 203867 - DNA, 201 bp, Homo sapiens
ttgccaaacccaccagtggaatgttcgtttgtcttttcccaaaaagtaccagtattggaaagaaagatagccttagcaacagggtgtcttaataacaacattttttttttttctttgagacaagagtcactctgtcgcccaggctggagtgtagtggcacgatctcggctcactgcaacctctgcctcccaggttcaagca

SEQ ID NO: 203868 - DNA, 201 bp, Homo sapiens
caggcatgagccaccgcgcccagcctctgcttatgttttagaaatcatgagaccattttgtcagttatttgttacatgtgtcatctgtggatttttagttktgttatcctagttgatgtgtgttatgtgggaactagagactcaaagtcactgtcttccccagtgtcattttaactaattgtgtagcattagctttgatgt

SEQ ID NO: 203869 - DNA, 201 bp, Homo sapiens
ggacatggaacaacatatagggtctacacaaactcttctagagaatactgtagattcttagcagtagttgtaaattcttattggatactgtgtttagttaytttttaaatttagaaaatacattaagcagccactgagtcatgcattattagtaaaacaaaaaaaatctacacatatgcatctaatttaaaatgttttgct

SEQ ID NO: 203870 - DNA, 201 bp, Homo sapiens
tgagagtcttctctcacattgtttttgtttcctgtattttggggatagtgcttaacagtagtttttaaaaaccatattccttttttttttccttataagtrtacatgtcaggcagggcgcagtgactcacgcctgtaatcccaacacttgggaggctgagacaggtggatcactgaaggtcgggagtttgagaccagcctg

SEQ ID NO: 203871 - DNA, 201 bp, Homo sapiens
ggattgcttgagcccagaagtttaggtagagttttgtagagaccctgtctctacaaaaaataaaaaaattagccgggtgcggtggctcatgcctgtaatcycagcactttgggaggctgaggcaggcagatcacctgaggtcaggagttcaagaccagcctggccaacatggttaaatcccatctctgctaaaaatataaa

SEQ ID NO: 203872 - DNA, 201 bp, Homo sapiens
aatgcttgtttgtggtaggaataactgtgtcaccaggtggcatgtctttaggcagacatagaagaattatgattgtcattttcaaatgaatatattttttyctaatgctagtcgtaaagaagtattttaattaaatctcattttacaggtcgaggggtaacatatctctttcctattcaagttaagacctttggtcctgta

SEQ ID NO: 203873 - DNA, 201 bp, Homo sapiens
taatggatatgcaattaaaaatctatcactagattttgtaaaactcctgtgccttttctgaccaaaaggagaacataaaaagcatagagaagtagctcttstttaattgcacttacttttacatcatccttttcaatattctgccttgtttttagctttaagatttatatgcattcgtcaaaagtttagactaatttttta

SEQ ID NO: 203874 - DNA, 201 bp, Homo sapiens
ttgggaacctcactgaagagacctgaaggaagtaaggggggaatgtaataaatacatgctgctgttccttttgctatttgtgatgtgtctttaaatacttygacattaatgttgagattcctggttttaaatgcacctaaaaaaagtcttcttggttttaatttagatatgtctttagaaaagtatctttttgttttttaa

SEQ ID NO: 203875 - DNA, 201 bp, Homo sapiens
aaaccacagtcattatcagtagaagaaaaacagtaattttttttgagatggaatttcactcttgttgcctagtctgcagtgcaatggtgtgatctcagcaygctgcaacctccacctccctggttcaagtgattcctcctgcctcagcctcctgagtagctgggattacaggcgcccaccaccacacctggctaatttttt

SEQ ID NO: 203876 - DNA, 201 bp, Homo sapiens
gcacctgtaatcccagctacttaggaggctaaggcaggagaattgcttgaacccgggaggcggaggttgcagtgagccaagatcgtgccactgcactccartctggagacagagtgagacaacatctcaaaaaaaaaaaaaagaaaaaagaactaaaggtaatatttaccgtatttatgacaggcaactaggtaacatgtc

SEQ ID NO: 203877 - DNA, 201 bp, Homo sapiens
gggtgtggtgacccgcacctgtaatcccagctacttaggaggctaaggcaggagaattgcttgaacccgggaggcggaggttgcagtgagccaagatcgtrccactgcactccagtctggagacagagtgagacaacatctcaaaaaaaaaaaaaagaaaaaagaactaaaggtaatatttaccgtatttatgacaggcaa

SEQ ID NO: 203878 - DNA, 201 bp, Homo sapiens
acaaaaagttgccataaagaaacctgggatgaggtggattaaaaggttttaaatcatattgcctttaccccaaaatccacacatataaattgtttggaatrttgaaaagggcaacaggattgaaataaatatattattattaacattattatttggattccggaatgactgcaacttgctagatttttaaaaaatattacc

SEQ ID NO: 203879 - DNA, 201 bp, Homo sapiens
aagcttgcagtgagccaagatcgcgccactgcactccagcttgggtgacagagcgagactctgtctcaaaaaaaaataaaagaaaaaaaaggctgggtgcrgtggctcacgcctgtattctgaacactttgggaggctgaggcgggcagatcacgaggtcaggagatcgagaccatcctggccaacatggcgatacctcgt

SEQ ID NO: 203880 - DNA, 201 bp, Homo sapiens
aaaaacaaaaacaaaaacaaaaaagataaaactgatcttttaatctgctagggctatgaaatctttaaatgcaagaaatagaaattcaacgaactattaawatattaatttaggaattaattgtaaagacttccatttttctttaatgtaactctttcattttcagggaattacttttaaacgtgtaggtgttccttctac

SEQ ID NO: 203881 - DNA, 201 bp, Homo sapiens
ttctttatattatataaatacgataattgctgatattcatatacatttgagcttaatgcataatctttggggaaaaatgttgaatccttgtgttatggccyttttttttttaatttgtgaatttgctgtttggcaggaagcacatgtgtttgttgatctaaataaggtcctttaaatctgtatttctagcagtggaatgta

SEQ ID NO: 203882 - DNA, 201 bp, Homo sapiens
tttttttttttttttgagtcagagtctctctctgtttctcaggctggactggaatggcacaatctcagctcatggcaacctctgcctcccgggttgaagcrattctcctgagtcagcctctcaagtagctgggattacgggcacgcaccaccatgcctggcaaatttttgtatttttagtagagacggtgtttctccatgt

SEQ ID NO: 203883 - DNA, 201 bp, Homo sapiens
attgcactccagcctgggtgacagagcaagactccgtctcagaaaaaaaaaaaaaaaaattagctgggcgtggtggcagacgcctgtaatcccagctactygggatgctaaggcaggagaattgcttgaacccaggaggcagaggttgcagtgagccaagatcacgtcattgcacaccaatctgggcaacaagagcgaaac

SEQ ID NO: 203884 - DNA, 201 bp, Homo sapiens
gctgggcatggtggcacatgcctgtaatcccagctactcaggaggctgaggtaagagaatcgtatgaacccgggaggctgaggttgcagtgagctgaaatmgcaccactgcactgcagcctgggtgacacagcgagactccatttaaaaaaaaaacccaaaaaacccaaaaattagctgggtgtggtggcgcgtgcctgta

SEQ ID NO: 203885 - DNA, 201 bp, Homo sapiens
gagcgaacctggtcctggagacatctataagactagagcctgctggtgggattttcaaataataacaaaacagactaatttgggcagcacatccctgtgawggggaggaggaaacaaaaagggcagggcaggttcacttggatgtgacttatttggtgtagcacaaatgaatgctgctggggtatctgatggtttctacct

SEQ ID NO: 203886 - DNA, 201 bp, Homo sapiens
ggaaacaaaaagggcagggcaggttcacttggatgtgacttatttggtgtagcacaaatgaatgctgctggggtatctgatggtttctacctggtaggtgwtaatagtttagctaaatgtcattttgctttgagtgacttattgggctccattccgtttatccatatgtgtacatatacctatttgtatgtatgtttttaa

SEQ ID NO: 203887 - DNA, 201 bp, Homo sapiens
tggtttctacctggtaggtgttaatagtttagctaaatgtcattttgctttgagtgacttattgggctccattccgtttatccatatgtgtacatataccyatttgtatgtatgtttttaaaaattcaggacctagttaagttttacatgttacatttggtattatgtctctttagtctcttttagtctggaactgttttc

SEQ ID NO: 203888 - DNA, 201 bp, Homo sapiens
taacttgtggggtgatactttagcattgagcagatatcctatccctagtaacccaccaaatgcttaagacagtatttaaaacatatttctttagaaaataytgagatttgagctaagaagtacctaagaagttatttagtctcaactctcatccaatgaagaatccctctttggcagatgggtcatttaatctctgattaa

SEQ ID NO: 203889 - DNA, 201 bp, Homo sapiens
tgttttttaaacctcttgctcaggtacttgttttggctccaacaagggaactggcaaaccaagtagccaaagacttcaaagatataactaggaaactcagygtggcgtgtttttatggtggaacatcatatcaaagccaaagtgagtaaatatgtttgatagacgtgcaaaggcatatttgatactcatatttaaataaat

SEQ ID NO: 203890 - DNA, 201 bp, Homo sapiens
aaagaaatttcaagcaaagttaaagtgaagtagtttttgcatatgaatgtgatgtgtatggatccatagatgtctttgataatttcatgaattataaagcyggtatatcttatttacagtttttatatttagttgacccttttcttctcttttcttcagtcctgacctttgcttttaaataaatgaattttctaaagaggt

SEQ ID NO: 203891 - DNA, 201 bp, Homo sapiens
ctactcataaatcaagtgataataaactagaggaggtatggaagctttttattttgcatttgacattgttgttgaactataggttgatttgaatttttttrggctaattagaattgattctataacatttcttgattagtgtctagtattcttagttgcactagagtctgtacaggtgaagcctgagccttttttcctttg

SEQ ID NO: 203892 - DNA, 201 bp, Homo sapiens
gggcctctcctccgcgtggcccctcagcccttcccgttggcgcctgaatctcagatgggcagactcaagctcccatcaccatggaatctgttctttctctyctgaagcagtgacgcttgccatttcgttttcattggccctcttagaagatgattaagaaaaaatgattgctttgaatatgtgttgcttctgtcaccccgt

SEQ ID NO: 203893 - DNA, 201 bp, Homo sapiens
ctggtatatcctaattcaaaataagcacattagcaattattgttcgatcttaaatgcaaacgagtttttatttaataatttttattgcagtgtcccctgcrttctaacaaaactaaaataatttggtatctgttctgtccttgaaaaagaaagtatgatagcatcattttaactattttcttagctttctgtgctttattc

SEQ ID NO: 203894 - DNA, 201 bp, Homo sapiens
atcctctgtccagcagtttctcctcagtatggggctttgtcctggaaagtgagcattggctgttaatttagaaagtttttatagggcccagcttgctccartccctgcagaccttaactctggctcctcacaatcaccctcaagtatataaaaatcctcccaggttcagctgctgttgtcaacaatttgagaatatgcctt

SEQ ID NO: 203895 - DNA, 201 bp, Homo sapiens
tacctcagcctcctgagtagctgggattacaggtgcctgccatcatgcctggctaatttttgtatttttagtagagacggggtttcaccacattggccagkctggtctcaaactcctgacctcaggtaatccacccgccttgcccttccaaagtgctgggattataggcgtgagccaccgtgctcagccttcatttatttc

SEQ ID NO: 203896 - DNA, 201 bp, Homo sapiens
ctagccacagacacaccaacctttatgttcctaaacctaaattaattaactttctacactcctatacccactctgtctccagcattccctagggctaaatmatacatctacccattgcttaaaccagaaatttatgtattattcttgaatttattccttacccttggccatccagccaactacatagtatttttggattat

SEQ ID NO: 203897 - DNA, 201 bp, Homo sapiens
gtacatatgcacacatacttacgtacatatattgtcctgcttttaagaagtggtatttcaagtatctgcttttggtgaagaaaaagtaaattaaaaaaatrtatatttgccaagcatggtggcccatgcctattagcccagcactttgggaggccaaggcagaaagattgcttgagcccaggaatttgagactagcgtggg

SEQ ID NO: 203898 - DNA, 201 bp, Homo sapiens
gaggtttcaccattttggccaggatagtctcaatcccttgacctcatgatccgcccaccttgctctcccaaagtgctgggattacaggcatgagccactgygcctggcctctttttttttttttttttttgagatggagtctcactgtgtcgcccagactggagtgcagtggtgcgatgtcgactcactgaaacctccgtc

SEQ ID NO: 203899 - DNA, 201 bp, Homo sapiens
tttgacaatcacctcttccaaatttttcaaacccacagaaaaactgaaagaataatgcagtaaccacatacgatccacctagattcaactgttaaaagtcygtatcatgtgctttatatccttttttagctctaatttgtaattaaaaaaaaatgacatgtaataattgtacatatttatagggtatgtggtgatgtttca

SEQ ID NO: 203900 - DNA, 201 bp, Homo sapiens; identical to SEQ ID NO: 35809

SEQ ID NO: 203901 - DNA, 201 bp, Homo sapiens
gtgtggctgcagggcagggaacagagagtacaggaagttgatggtagagactggctggagggataagcagtggtcagaccgtggagggcctgcaggccacwgtaatggttttcatgggagcccttggagaggtgaaagctaggaagcagcagctgatagatgtttcagaagacaattctggctgctggcagaaaataaact

SEQ ID NO: 203902 - DNA, 201 bp, Homo sapiens
tagtccttactcagtttgaaattatttcattgactcctaagcttaaccttccttagtattgagttggtactgttttaagaaaggtgttaccaatcttagtrcattttttaccttttttaaaataaacaaagggtttgatatagatagtagctgtgttctcatttgttctggggatgcattatctggagtcgtacagtctta

SEQ ID NO: 203903 - DNA, 201 bp, Homo sapiens; identical to SEQ ID NO: 35810

SEQ ID NO: 203904 - DNA, 201 bp, Homo sapiens
tgagttactactactcagttgatgactcatcattttcatgattgattccttaaaaggtttcctctgttgttgattttcttcctccctaattttcactcccrtttcctgcctcatccacaatccctgtaggcaaccacgttagttgttgctataaaatagatagcactattgtgtatgggtgtgcgcacacatgcatgtgtg

SEQ ID NO: 203905 - DNA, 201 bp, Homo sapiens
atcttttcatatgcttatttgccatccatatgtcttttttttgctaagtgaccatccatatagttttcccatttgtaatggattatttgctttcttactgmgttttgagagtgtatgtttgtatattcatacacagtcatgtgatttattatatatatgatggtagtcccataagattataatggacctgaaaagtttctc

SEQ ID NO: 203906 - DNA, 201 bp, Homo sapiens
acattgttgtgcagcagatctccaggactttttcatcttgcaagatcgaaactctgtgttaaacaacaccccattttcccctctctccagctcctgagaayccccattctactttctgtttctctgaatttgactactttaggtatctcatataagtagaatcatagtacatagtatttgtctttttgtgactggtttttt

SEQ ID NO: 203907 - DNA, 201 bp, Homo sapiens
tctcattgaaaatctaaacccctcagtcattcatggcattctgtgtctcggccctatcctactttctcactttatttcttgccatttcttttaacgagccyttcttgcacttgctttcatgaacgctttttaccagccagtcctcactatttactggtgctggtatatgtcctgtattctgtcatctgtgtattttattga

SEQ ID NO: 203908 - DNA, 201 bp, Homo sapiens
tgtttattatatattatatatattataatatatattatatattatatattattttcttatatatttattatttatttattatatatttattatatattatatataatacatattatataatacatataatatataatatataacattatatattttattatatatgttatatattatattataatatataacatatataat

SEQ ID NO: 203909 - DNA, 201 bp, Homo sapiens
attatatattatatatattataatatatattatatattatatattattttcttatatatttattatttatttattatatatttattatatattatatataatacatattatataatacatataatatataatatataacattatatattttattatatatgttatatattatattataatatataacatatataatacgta

SEQ ID NO: 203910 - DNA, 201 bp, Homo sapiens
gaaagtcaaaaactccagtttaaaaaaataactttgtaaatcatcccccctcatcttccctactctgttggttcttgtttttagactggactctcaggtgyaacaatattattgttactggtggagagtactgactacaaatcacccaggttcttggcattttgaacaaagaattggacaaaattcacaaacaaagcaaca

SEQ ID NO: 203911 - DNA, 201 bp, Homo sapiens
atatattatatatattataatatatattatatattatatattattttcttatatatttattatttatttattatatatttattatatattatatataatayatattatataatacatataatatataatatataacattatatattttattatatatgttatatattatattataatatataacatatataatacgtatta

SEQ ID NO: 203912 - DNA, 201 bp, Homo sapiens
tatattatatatattataatatatattatatattatatattattttcttatatatttattatttatttattatatatttattatatattatatataatacwtattatataatacatataatatataatatataacattatatattttattatatatgttatatattatattataatatataacatatataatacgtattat

SEQ ID NO: 203913 - DNA, 201 bp, Homo sapiens
atattatatatattataatatatattatatattatatattattttcttatatatttattatttatttattatatatttattatatattatatataatacawattatataatacatataatatataatatataacattatatattttattatatatgttatatattatattataatatataacatatataatacgtattata

SEQ ID NO: 203914 - DNA, 201 bp, Homo sapiens
tattatatatattataatatatattatatattatatattattttcttatatatttattatttatttattatatatttattatatattatatataatacatattatataatacatataatatataatatataacattatatattttattatatatgttatatattatattataatatataacatatataatacgtattatat

SEQ ID NO: 203915 - DNA, 201 bp, Homo sapiens
attatatatattataatatatattatatattatatattattttcttatatatttattatttatttattatatatttattatatattatatataatacatattatataatacatataatatataatatataacattatatattttattatatatgttatatattatattataatatataacatatataatacgtattatata

SEQ ID NO: 203916 - DNA, 201 bp, Homo sapiens
ggtaaaccacgcatcctttgcaaacttcttaacggtcaggtgtgcatgcggctgcctgtgagtgtgtgctgttggtgatgtatgaagatggtgagctggaygtggccctcagacctgtgtgaattgtcattctcagtgtgggcatgtttttctctttcaaatcagttatctagccacactttttttttttttcagttacca

SEQ ID NO: 203917 - DNA, 201 bp, Homo sapiens
tgtggtttttttttttttcagttaggagattggattttcactgaccagtcttcgtttttcttattcctttgtgagaattgatctgtaagatgactggctgsttggtgtcagagatgctgcctgtggtgaggcacagtggtgaaggaaaaggggaagtgtgctacccacttgctgacgctgatcagttgtttaagtagctgt

SEQ ID NO: 203918 - DNA, 201 bp, Homo sapiens; identical to SEQ ID NO: 35808

SEQ ID NO: 203919 - DNA, 201 bp, Homo sapiens
gccttcagttgctccgcagagtcttccactgtgggaaggtaaaccacgcatcctttgcaaacttcttaacggtcaggtgtgcatgcggctgcctgtgagtrtgtgctgttggtgatgtatgaagatggtgagctggacgtggccctcagacctgtgtgaattgtcattctcagtgtgggcatgtttttctctttcaaatca

SEQ ID NO: 203920 - DNA, 201 bp, Homo sapiens
gggggcacagggctggaggcagtggatgcaataatgtcctgtccttgtcatccctggttcctgggaacatagcgtgggacatgctatcccagcagttaaastccaatgccacataggctctatgattatgtggattatttttattgctagctcaaaaagaatgcagtaagttgcacgtagctcataaataatcatgtggtt

SEQ ID NO: 203921 - DNA, 201 bp, Homo sapiens
agaggaaattaatttggttaatgtatttaataaatatggtccaaaaaccaaggcaagtataattaacaacgagccagtcagaggaaggactcatgaacccstaattagcatttttgaacaggaggaccacgacttggacagctgttgtcgtatcttagaagcctggtcagctaatttctgggtggcatcccttactaattc

SEQ ID NO: 203922 - DNA, 201 bp, Homo sapiens
tttttgctacactgctgagctatatgtccggtctactattgaatagtcatgggcctatccttttgcatgcctgatcttcctctgacctggagggagataastgcattctgagcattgctgttgggccttctcctcctgtccaggtgaatgtctccatcattcctgcagtttgaattatgctaattgatatggtatcctttc

SEQ ID NO: 203923 - DNA, 201 bp, Homo sapiens
ggaaatacaagtgtgtgccactgtgcctggctaatttttgcatttttagtggatatggggtttggccatgttgccctggctggtcttgaactcctgaactsaagcaatttgcctgccttggcctcccaaagtgccgggatgataggtgtgaaccactgtgcccagcctagaaactatgtttttaaactggtaacataaata

SEQ ID NO: 203924 - DNA, 201 bp, Homo sapiens
cacctaaatattcacctaattattcagcgaataggtgaataattatttattcacctattcacctaatacatgtaattattatatataatatattaataattataatatataataataataattatattataataattatatattataatatagtataatatagcatataatatatattataatatgtatatataatatata

SEQ ID NO: 203925 - DNA, 201 bp, Homo sapiens
acctaaatattcacctaattattcagcgaataggtgaataattatttattcacctattcacctaatacatgtaattattatatataatatattaataattataatatataataataataattatattataataattatatattataatatagtataatatagcatataatatatattataatatgtatatataatatatat

SEQ ID NO: 203926 - DNA, 201 bp, Homo sapiens
ctaaatattcacctaattattcagcgaataggtgaataattatttattcacctattcacctaatacatgtaattattatatataatatattaataattataatatataataataataattatattataataattatatattataatatagtataatatagcatataatatatattataatatgtatatataatatatatac

SEQ ID NO: 203927 - DNA, 201 bp, Homo sapiens
accctggttcatcgtcatatgagtgtaatggaactttcttgacttccagcagtgtctggtgttactcacgttatatgagtagctcaattccatgagttgcytggaattccatttccaatggctttgtggaatttccatgagttcatattggttaaataacagatactgtttcacttgagtgtatgagttcttatttgggga

SEQ ID NO: 203928 - DNA, 201 bp, Homo sapiens
gttgaggaagttcccttctgtttcaaatttgctgagaaatttttggtttttcatgtttttaaatcagaaatggatgttagattttgtcaaatactttcacttttttttttttttttttgagacagagtctcaactctgtcacctaggctggagtgcagtggctcagactcggctcactgcaacctctgcctcccgggttca

SEQ ID NO: 203929 - DNA, 201 bp, Homo sapiens
tcttcttgaatatactagtatatcttttgtaataaatacagttctaaaaatttgaatagaaatattaataaattagaatattattgtaccatattattacwtatatatatacacattattacatgtattagtacattattgaacgatagcacagtttgattcttgattttaccacatgctagcttgtgaccattggtaaag

SEQ ID NO: 203930 - DNA, 201 bp, Homo sapiens
atagactgttaaattgaaataatgtcccactatttgggcatttgggcagaggaacattacccacttccattgagcatgtatgtgtttgtgggttttgtggtttttttttttttcagttaggagattggattttcactgaccagtcttcgtttttcttattcctttgtgagaattgatctgtaagatgactggctggttggt

SEQ ID NO: 203931 - DNA, 201 bp, Homo sapiens; identical to SEQ ID NO: 35835

SEQ ID NO: 203932 - DNA, 201 bp, Homo sapiens
gaggtgggagaatggcttgagcccagaaagttgagtttgcagtgagcagtgataatgccgctgcactccagcctgggtgagagagcaagaccctgtctccaaaaaaaaaaaaaaaaaaaaagaggaagacaaaaaaaaaaaaaaggtgatgatagaagaaagacaatattcaaatgcataatggttgataattctccagaa

SEQ ID NO: 203933 - DNA, 201 bp, Homo sapiens; identical to SEQ ID NO: 35832

SEQ ID NO: 203934 - DNA, 201 bp, Homo sapiens
ggtttctaggaatatatctaagaaaagatagtaagacctttattgagagaattataaaaatttatggaaaaaattttgaaagcttaaacaaatggaaaagwcaatatactcatggatagagagactgaatattctaaagatgtaagtcattccctccgatttataaagtcaatacaatcttaataaaaaccccagttggtt

SEQ ID NO: 203935 - DNA, 201 bp, Homo sapiens
taagattataatggacctgaaaagtttctcttgcccagtgacgttgtgtttgtggtgatgccagtataaacaacaaacctgggctgccagttacacaacamtgtagcacataccattgcatacatcacataatatttataaacgatcataaaacgactttgttactggtttatgtatttactatagtatacttgttattgt

SEQ ID NO: 203936 - DNA, 201 bp, Homo sapiens; identical to SEQ ID NO: 35833

SEQ ID NO: 203937 - DNA, 201 bp, Homo sapiens
ataaaactttattcacattgttgtgcagcagatctccaggactttttcatcttgcaagatcgaaactctgtgttaaacaacaccccattttcccctctctycagctcctgagaacccccattctactttctgtttctctgaatttgactactttaggtatctcatataagtagaatcatagtacatagtatttgtcttttt

SEQ ID NO: 203938 - DNA, 201 bp, Homo sapiens
gacaggcttcccctcttttttatttttattttatttttttgggatggagtcttgctctgtcagccaggctggagtgcagtggcacgatcccagctcactgsaatctctgcctcccaggttcaagtgattctcctgtctcagcttcccaagtagctgggactacaggtgcctgctaccacgcctggctaatttttgtatttt

SEQ ID NO: 203939 - DNA, 201 bp, Homo sapiens
tggcagtttggtttgtagagagtgttttaatgaatcataaaacctttgtgaacttgccatccactgacatggtgcagcctggaagattttcgtgcctcctkacttgagtaactgtaaggcattattgtggtgtgatacagttaacatagggctatggagaggagaaaatatttccttttggttcataataaaaggataatt

SEQ ID NO: 203940 - DNA, 201 bp, Homo sapiens
atctaggaatacccccaagtatttctaaattaaacagaacgcttgtaaataatctgcatgtcaaagaaattagaaaacattttgaagtgagtgataatggwtatgtaacatattgaaatttgtggaatacagacagctaaggcagtgtttagagataaacttacagctttaaaatttttactagaaaggaaagtctaaaat

SEQ ID NO: 203941 - DNA, 201 bp, Homo sapiens
ctaagtttaccagatttctccttacattatgagtacagaggcttctgttttttttatgaaacaggaattgtaataaacagttaatcaccacatttctcaattttgcagctgtgacagcatgatgatacagattaagacatccctcagtgcagaatgcagaacagttctcatgatttccaccttcatttagtttgagctggc

SEQ ID NO: 203942 - DNA, 201 bp, Homo sapiens
agacagagaaattgtgtaaaagcttaaggcttatcttttatagttattaactattgtcaatacatgcaaatatttctttgtttatggatcaaatccatctscagagtgtcacacaattgtttttgagatactcttaatctagctaatttctttctgttttcagaaactttaaaagcaactgctgttgaattttcagcttta

SEQ ID NO: 203943 - DNA, 201 bp, Homo sapiens
gtctatacactgaaagacataaaacattgttggaagaagttgcaagagatctaaataaaaggagagatactgtgtacatcaattggaagacaatattgttmaggttagtggttggctgacttttgtgaaagaccattagatagtagatattttaagctttgcaggtcatgtggtctctgttgtaactactgaactctgctg

SEQ ID NO: 203944 - DNA, 201 bp, Homo sapiens
taatggggtcccagacacttctgagtctcatgatgcagtggtatctttacaactgactttctagattgacacttttatgtttgttttttttcctgttgtcrtgtttctcaaagtgtggtctaggtctcattttccagattgaattacagtttatgaaggtgtccttatagtcagctgatggtggaaaggtagagtcaaagt

SEQ ID NO: 203945 - DNA, 201 bp, Homo sapiens
aaatcagcttccgtaagactaaaattgtatctggtgataaacacaatgttagagaaacattctgggtgcccatcattattagaccatgtttgcttaatackaatttgtcagttagaatatgtttccagttgtggatgtttcttttttgtctttcttttctttttgcccccaggcattgtctactctggactccatcactct

SEQ ID NO: 203946 - DNA, 201 bp, Homo sapiens
ctgcctgacaactgaccttacctctgtttaagtcagaccatactaagtttatgctccatatttgatgaaagtctattgagctatattcctcatgatgcatrgtagacaaacaaatgagtatgactgactgatttttatgttattttaatggatatcacaattctgtgaaccactgtaaaatttctatgtcattacctttgt

SEQ ID NO: 203947 - DNA, 201 bp, Homo sapiens
gacaaacaaatgagtatgactgactgatttttatgttattttaatggatatcacaattctgtgaaccactgtaaaatttctatgtcattacctttgtcacrtacagtagtagaaggacccagagacaaagcagatctgtgaaattcctagcagagtatgatttgtattaaggtcagcatttgggttctgaacaagacagtc

SEQ ID NO: 203948 - DNA, 201 bp, Homo sapiens; identical to SEQ ID NO: 35826

SEQ ID NO: 203949 - DNA, 201 bp, Homo sapiens; identical to SEQ ID NO: 35831

SEQ ID NO: 203950 - DNA, 201 bp, Homo sapiens
atcgttctctgcactttccctcctgcctcccaacagtggccttcctatctggcttggtggggctgctgggctctgtgccaggcctctttgtgctgcagacscccgtgttgcccagtgacctcctgagttggagttgtgtgggggcagaggggatcctcgccttggtctccttcacatgtgtgggctatgcggtcaccaagg

SEQ ID NO: 203951 - DNA, 201 bp, Homo sapiens; identical to SEQ ID NO: 35806

SEQ ID NO: 203952 - DNA, 201 bp, Homo sapiens; identical to SEQ ID NO: 35807

SEQ ID NO: 203953 - DNA, 201 bp, Homo sapiens
tttttgcatttttagtggatatggggtttggccatgttgccctggctggtcttgaactcctgaactcaagcaatttgcctgccttggcctcccaaagtgcmgggatgataggtgtgaaccactgtgcccagcctagaaactatgtttttaaactggtaacataaataactttgaaaagtgaaaaaatttaattaaaaatgt

SEQ ID NO: 203954 - DNA, 201 bp, Homo sapiens
tgcacatttttttgttctttttttcatcccgtcaacacttttgagtgtgtgttatgtggcagatgccttgttagatactagaagcaaagaaatcagcttcmgtaagactaaaattgtatctggtgataaacacaatgttagagaaacattctgggtgcccatcattattagaccatgtttgcttaatactaatttgtcagt

SEQ ID NO: 203955 - DNA, 201 bp, Homo sapiens
tggttaggccaactcagatatacagaacatattgaaatttacatataatttgattttttttttttactgtaaaaccttttgacagtgttcaagctgttttbaattctgatgtttaaaataagttgtcatttgatagttttatattgtatacttctagtccttactcagtttgaaattatttcattgactcctaagcttaac

SEQ ID NO: 203956 - DNA, 201 bp, Homo sapiens
actcctaagcttaaccttccttagtattgagttggtactgttttaagaaaggtgttaccaatcttagtacattttttaccttttttaaaataaacaaaggrtttgatatagatagtagctgtgttctcatttgttctggggatgcattatctggagtcgtacagtcttacttgtgctttaagaggatcattaacaaactaa

SEQ ID NO: 203957 - DNA, 201 bp, Homo sapiens
gtccctcttacccaccaattgtcacagtgcccaaatccatcgatgatgaagctcttcggaaggtagctacatttcgacatggagggcgcttcccagtactmagctattaccacaaaaaaaatgggatggtaagtgcacagcactactgcttgatgtactgaaaggcttgggttggggatcttttcgtagaaatgttccctt

SEQ ID NO: 203958 - DNA, 201 bp, Homo sapiens
gtatttgaggttattggccctggtagagggccttgcctccccattgatggctgctgactgatcagggtggtagttactgaagctttgaatggctgtggcartttcttagacaagacagcaatgaagattgccgcatcaattgactcttcctttcatgaaagatttctctgtagcatgtgataccgtttgatagcattttta

SEQ ID NO: 203959 - DNA, 201 bp, Homo sapiens
atctcaggatactacttttcttgctcatccataagaagcaactccttatttcttcaagtttcatcatgaaattgcagcaattcagtcaaatcttcaggttmctaattatttatttatttaggagacagggccttgctctgtcacccaggctggagtgtagtggcaggatcacggcgcaccgcagcctagaactcctgggct

SEQ ID NO: 203960 - DNA, 201 bp, Homo sapiens
tctgtttattgcccggtctggtctcaaattcctgagctcaaacaatcctcctgcctcagcctcccaaagtgctgagattacaggtctgacccactgcaccyagcattttgttttttatgagatggggtctttccctctgtcacccaagctggagtgcagtggcacagccatagctcattttaacttcaaactcctggcttc

SEQ ID NO: 203961 - DNA, 201 bp, Homo sapiens
gagcacaggcagagtagatttagtgtaacccttaaggcccctaggattttcagaattgcaaataatcactggcttcagcttaaagtcaccagctgcatttyttcgctgacaagagagtttgcttctttccttaaacctcatgaaccagcctctgctagtttccaacttttcttctacagcttccttacttctctcagcctt

SEQ ID NO: 203962 - DNA, 201 bp, Homo sapiens; identical to SEQ ID NO: 35818

SEQ ID NO: 203963 - DNA, 201 bp, Homo sapiens; identical to SEQ ID NO: 35820

SEQ ID NO: 203964 - DNA, 201 bp, Homo sapiens; identical to SEQ ID NO: 35821

SEQ ID NO: 203965 - DNA, 201 bp, Homo sapiens
accaatcccctctttgaagccaacaaccttgtcatctggccttcagttgctccgcagagtcttccactgtgggaaggtaaaccacgcatcctttgcaaacytcttaacggtcaggtgtgcatgcggctgcctgtgagtgtgtgctgttggtgatgtatgaagatggtgagctggacgtggccctcagacctgtgtgaattg

SEQ ID NO: 203966 - DNA, 201 bp, Homo sapiens; identical to SEQ ID NO: 35822

SEQ ID NO: 203967 - DNA, 201 bp, Homo sapiens; identical to SEQ ID NO: 35823

SEQ ID NO: 203968 - DNA, 201 bp, Homo sapiens; identical to SEQ ID NO: 35824

SEQ ID NO: 203969 - DNA, 201 bp, Homo sapiens
atgactcagtgtagctcttccatttcttcattagataatttagtcatgttctctgactcaaatactgaagactgataggaaaagcctcaccctggttcatygtcatatgagtgtaatggaactttcttgacttccagcagtgtctggtgttactcacgttatatgagtagctcaattccatgagttgcttggaattccatt

SEQ ID NO: 203970 - DNA, 201 bp, Homo sapiens
cacatagaggttttagaatcgtccactcagcttcccctaatgttgacctgttttataactgtagtgtaatcaaaatgaggacaaaattaggacattgacaytggtgcagtactattaactagaccacagactttatacaattttcataggattttaaaaaaatgaattgttttggatttatagattaattggagtcaaatt

SEQ ID NO: 203971 - DNA, 201 bp, Homo sapiens
tttcttccataatagcttcatagttttactgttcatttttaggtctttaatttggattctatctttgtttcaagtgtgataagaacctatttttctccatrgagcaagccagttttcttaatcccatcacgtgacaacccaaccttggctggtttatgtcaagttatcctatatatacgggtctgtttctgagctctctgt

SEQ ID NO: 203972 - DNA, 201 bp, Homo sapiens
ttaccacaaaaaaaatgggatggtaagtgcacagcactactgcttgatgtactgaaaggcttgggttggggatcttttcgtagaaatgttcccttttgctmtctgtctgttcactgaaatgattgtccaggtctccaccacaagggcttccttcatgtaagctttagggaatcaggagtagggtgttttctgtggtgagga

SEQ ID NO: 203973 - DNA, 201 bp, Homo sapiens
ataatgcttcacaagtctgtggaatactttcatatatatcgcttacatcattttatttgatcctttcaacatgcaaggttgtatacaagttttacagttayacctggttttttttttaatggacctcagaaaattgagttactactactcagttgatgactcatcattttcatgattgattccttaaaaggtttcctctgt

SEQ ID NO: 203974 - DNA, 201 bp, Homo sapiens
aaaaaaaatgggatggtaagtgcacagcactactgcttgatgtactgaaaggcttgggttggggatcttttcgtagaaatgttcccttttgctatctgtcygttcactgaaatgattgtccaggtctccaccacaagggcttccttcatgtaagctttagggaatcaggagtagggtgttttctgtggtgaggatgtgatg

SEQ ID NO: 203975 - DNA, 201 bp, Homo sapiens
gagaggtaaaagattccaaagatagtacagactcttattagaagctaattatagtgggtaaggccttagccatttgaaaatcacaagtgctcaaattaacytctgcattaatttagggtcaatgatgggctagccatcttctcatttttttttggtcagctctattaaggtttgattgacaaataaaaattacatgtattt

SEQ ID NO: 203976 - DNA, 201 bp, Homo sapiens
tcaggaggctgaggcaggagaatcacttcaccctgggaggccgaggttgcagtaaactgagattgcaccactgaactccaccctggggtgacagagtgagwctctgtctcaaaacaaacaaacaaacaaacaaaaaacagtagtgtagtcacaaggaatctgatttgggatgtgtttttgaaagtggagctgccttgcctt

SEQ ID NO: 203977 - DNA, 201 bp, Homo sapiens
atacaatatattagttttaactacagttaccatgctgtacaatagacctacagaactaattcctcctaagtgaaactttgttgttacctttgatcaacatstccccatatctgtgtccctcctaccccgacccctcctgctactttctcttcctctggcaaccaccattctactctctgtttctatgagtttaacttgttt

SEQ ID NO: 203978 - DNA, 201 bp, Homo sapiens
gagaccaggttttgccatgttggtcaggctggtctcgaactcctgacctcaagtgatcctcctgcctcggcccctcaaagtgttgaaattacaggcatgarccactgtgcctggcctaccctcttttttaaggctgaatagtattttattgtgtattgtaccacattttcttaatccattcatccattgacgtgcatttag

SEQ ID NO: 203979 - DNA, 201 bp, Homo sapiens
tttattgtgtattgtaccacattttcttaatccattcatccattgacgtgcatttaggttgaatccatatcttgactattgtgaatagtgctgcagtgaaygtgggaatgcagatacctctttgagatcctgatttcgtttccgatattcaaaatatttacccagaagtgggattactggatcttattgcagtttcatctt

SEQ ID NO: 203980 - DNA, 201 bp, Homo sapiens; identical to SEQ ID NO: 35816

SEQ ID NO: 203981 - DNA, 201 bp, Homo sapiens; identical to SEQ ID NO: 35817

SEQ ID NO: 203982 - DNA, 201 bp, Homo sapiens
gcccccgcccggccagccgccccgtccgggagggaggtggggggtcagccgcggcctggccagccgccccgtccgggagggaggtggagggtcagcccccsaccggccagccgccctgtccgggagggaggtggggggtcagcccccacccggccagctgccccgtctgggagggaggtggggggcgcctctgcccggctg

SEQ ID NO: 203983 - DNA, 201 bp, Homo sapiens
gggggtctgaggtgggagaatggcttgagcccagaaagttgagtttgcagtgagcagtgataatgccgctgcactccagcctgggtgagagagcaagaccytgtctccaaaaaaaaaaaaaaaaaaaaagaggaagacaaaaaaaaaaaaaaggtgatgatagaagaaagacaatattcaaatgcataatggttgataatt

SEQ ID NO: 203984 - DNA, 201 bp, Homo sapiens
ctggcgctgtccctggggcttctggtctatcgttctctgcactttccctcctgcctcccaacagtggccttcctatctggcttggtggggctgctgggctstgtgccaggcctctttgtgctgcagacccccgtgttgcccagtgacctcctgagttggagttgtgtgggggcagaggggatcctcgccttggtctccttc

SEQ ID NO: 203985 - DNA, 201 bp, Homo sapiens
cctgtattctgtcatctgtgtattttattgacttcttccttctgctggaatgccttgcctctcccaagtttgtttaacatttgccaaatgcctttatgttmtggacgttttgttaggcatttaagacaccaaggtaaataaaatatgttacagttcttgtctttcaggagttcacaggcaatgagcctgttacctgtctat

SEQ ID NO: 203986 - DNA, 201 bp, Homo sapiens
tttccctctgtcacccaagctggagtgcagtggcacagccatagctcattttaacttcaaactcctggcttcaagcaatcctcctgccttgggctccataratgctggggttacaggcatgagtcaccatgccccaccttcaggttccacttctaattctagttcttttgctatttctgtaacatctgcagtgacttctcc

SEQ ID NO: 203987 - DNA, 201 bp, Homo sapiens
aaggatgatttaattgctttgtaccaaacctccttgtggagcttagagataagtgatgggatgaaatccttgttctgtggattaagtcctgccatgccggmgtttcagtgtgtgtttcatgctcctcaacctagagctgggagaagaagaagctctctattaggtaaaatcctatggtaggcatctatattgaataagact

SEQ ID NO: 203988 - DNA, 201 bp, Homo sapiens; identical to SEQ ID NO: 35836

SEQ ID NO: 203989 - DNA, 201 bp, Homo sapiens
taggagtccgtatactcaaatatattctgctgcctcacgtagaatcccattggaagaatagctggcaagtgctcagttatctaaattgtagcaataagttrgtgaagctttttttcagtgtttcacctgcctttggaagtgaaatgttttcagttctctcagcattaatgtgtttaaaggaaaagacctctttctagtgac

SEQ ID NO: 203990 - DNA, 201 bp, Homo sapiens
aaagaggagatataatttattatgtgacagtattttgagacagagaaattgtgtaaaagcttaaggcttatcttttatagttattaactattgtcaatacrtgcaaatatttctttgtttatggatcaaatccatctgcagagtgtcacacaattgtttttgagatactcttaatctagctaatttctttctgttttcaga

SEQ ID NO: 203991 - DNA, 201 bp, Homo sapiens
tctatattttgttttatgaggtaggagagaaggtttcatgatttatagatggatagaaaaataactttggatggagatgtttttgctacactgctgagctrtatgtccggtctactattgaatagtcatgggcctatccttttgcatgcctgatcttcctctgacctggagggagataagtgcattctgagcattgctgtt

SEQ ID NO: 203992 - DNA, 201 bp, Homo sapiens
caagatgaaatatgagtgcttattgcctgtgagagtggttgctgacttgcatttaaaataatggtggttctgattgacggcagccctgagttaggtcagayatggacgctggctgttctgcttctgtttggtgtgattggcagccaaagacagtatagatgtaggaaaaatatatatatatatatttatatggataatgga

SEQ ID NO: 203993 - DNA, 201 bp, Homo sapiens
cgtgaggccatcaggaccagggcttttctttgatgggaggtctttttaatctccttactcattattggtctgttcatattttctttcttcatgactcagtyttggtaggttgtatgcttctaggaatttatccatttcttctagattatccagtcaatttgttaatgtgtaattgttcacagtagtctcttatgatccctt

SEQ ID NO: 203994 - DNA, 201 bp, Homo sapiens
ttgttacacagtaaaatgatcctttctaacctccgggatatcttatttcatactacttgatatgtgcgattacatctggatctcaagttgagaacacctartggtagtgatgttgagtatatgaagtgattttagttcatatagttaattcactcagttaaaggttgctaatccttgagtcttgtggcagaagacttgaac

SEQ ID NO: 203995 - DNA, 201 bp, Homo sapiens
gtattcaattgcatccttttcagtacctcaagattcctgtatattttagagtataataaaatacagatgtgagttgtggcaacaaaagaaaaaagaatgtrtaatacataaattacatcttatccacaaatgtaattttaatccattgtatatacctttcttgcttctgttttccattcctggattcaataggtattttcc

SEQ ID NO: 203996 - DNA, 201 bp, Homo sapiens
atgatttccaccttcatttagtttgagctggccacctcaaaggcagagacttccagactcttgggaaggttcagggttttggttaattttgccatgtttgrgtccctttttctgatatatattggcctattattttcacctccatacaaatttgcccttataattaattactgaaaacatgaaaatagagtttaaatgaat

SEQ ID NO: 203997 - DNA, 201 bp, Homo sapiens
tcattattaatatttggttttctagtgcatataaagttatgtttacactataatgcagtctgttaattgtgcaatagtattatgtctaaaaaaacaatatrcatacctgaatttaaaaatactttattggtatttgaggttattggccctggtagagggccttgcctccccattgatggctgctgactgatcagggtggta

SEQ ID NO: 203998 - DNA, 201 bp, Homo sapiens
tttttgagatactcttaatctagctaatttctttctgttttcagaaactttaaaagcaactgctgttgaattttcagctttattatgcttctaggtaattmtgcgaagtggtcagccactcactggtacaaacgggaggaggtgcaaggaggacgagaagctgataaatgctaccctcagggctggaaagcgtggctacat

SEQ ID NO: 203999 - DNA, 201 bp, Homo sapiens
aatctggactttgtgtccaaaaaatgctatcagcttagctattaaaaatgggtagaaagtcttaaaaatctagaagtaggattttagtgatttttaaaacrggaatagagaaatagaggaaaaactgttatagtgctaagtaaatggtacataacacatttcttcctgcctttgttgaattttacttaaggaaatgagaag

SEQ ID NO: 204000 - DNA, 201 bp, Homo sapiens
agtatggtgtgaggtaagggttgagtttcttctgcatgtgcatacccagtttttccaccaccactcatgggagaagctcctttccccattgtatgttctcrgcaactttttcaaacatcaatttaccataaatgcatggatttatttctgggttttattctgttccattagtcaatgtgtctgtttttatgccagtgccaa

SEQ ID NO: 204001 - DNA, 201 bp, Homo sapiens
taatacttggtaaatagcagctaccatttgagggtcctctgtcattacttactataattttatggtgatgcttttttaaaaaaattgtggttagaaaacasttaaccgtttttaagtgtacagtttagtagggtataaaactttattcacattgttgtgcagcagatctccaggactttttcatcttgcaagatcgaaact

SEQ ID NO: 204002 - DNA, 201 bp, Homo sapiens
gttgactagaagtggtgacagtgaacatctttgtgttattcatgattttagagagaaataattcaatccttcaccgttaagtgtgctattagatttagggktttttttgtggggttttttgtaaatgcccttatcaggttgaggaagttcccttctgtttcaaatttgctgagaaatttttggtttttcatgtttttaaat

SEQ ID NO: 204003 - DNA, 201 bp, Homo sapiens
gcttttggcctgactcagctttcgacgtgccttcctcactaagcttaatcatttctagcttttgatctaaaatgagacatgctactcttcctttcatttgmacacttacaggccattgtagggttattagttggctggcctaatgtcaatattgttgtgatccctggaatagagagtctccctgaagagagagtcaaagga

SEQ ID NO: 204004 - DNA, 201 bp, Homo sapiens
ctgggttaatcagcccagtgagctgagtaaattcaccaatcccctctttgaagccaacaaccttgtcatctggccttcagttgctccgcagagtcttccastgtgggaaggtaaaccacgcatcctttgcaaacttcttaacggtcaggtgtgcatgcggctgcctgtgagtgtgtgctgttggtgatgtatgaagatggt

SEQ ID NO: 204005 - DNA, 201 bp, Homo sapiens
agagattctgacaactgcctgcctagcggctcagtgcatcgacaggtaaagtgcatttcagcgttcctgagcgaaacatggcgctgctaactagactttgkgtttatccagacatatgtttatagattatgtgaaagtttgcagtaaattactgtgtaggctagtcaacaccatcccattattgatgaggtgtgtgcctag

SEQ ID NO: 204006 - DNA, 201 bp, Homo sapiens
tggagcagtgagaacacacacagcatttgttgattaagttcactgtcttatatggacgtggttcctgatgcccccaaaacttgtagaagtaacatcaaagrtcactgatcacagatcaccatagcagttgtaataataatgaaaaattttgaaatattgtgagcattactaaaatgagacagagacacaaagtaaaacatg

SEQ ID NO: 204007 - DNA, 201 bp, Homo sapiens
gtggtatctttacaactgactttctagattgacacttttatgtttgttttttttcctgttgtcgtgtttctcaaagtgtggtctaggtctcattttccagwttgaattacagtttatgaaggtgtccttatagtcagctgatggtggaaaggtagagtcaaagtcagaaaaataattttagtgtatgtctatagttttgat

SEQ ID NO: 204008 - DNA, 201 bp, Homo sapiens
tttagtgtatgtctatagttttgatgagaagaggctttaaccaacgattaaagcagaaagggtaaatgccttctgtgttaagagctgctttttggttttgwaaagggaaagaaaaattcagctaaaaggttctgtgaaatttgttataacttaaagaggtcttgccatgtgaaatttgagattcattatagtcgtattttt

SEQ ID NO: 204009 - DNA, 201 bp, Homo sapiens
tcttccttctgctggaatgccttgcctctcccaagtttgtttaacatttgccaaatgcctttatgttctggacgttttgttaggcatttaagacaccaagrtaaataaaatatgttacagttcttgtctttcaggagttcacaggcaatgagcctgttacctgtctatgagtattcagtttaaccatttcgaccgctacct

SEQ ID NO: 204010 - DNA, 201 bp, Homo sapiens; identical to SEQ ID NO: 35834

SEQ ID NO: 204011 - DNA, 201 bp, Homo sapiens
cacatcaaagagattctgacaactgcctgcctagcggctcagtgcatcgacaggtaaagtgcatttcagcgttcctgagcgaaacatggcgctgctaactrgactttgtgtttatccagacatatgtttatagattatgtgaaagtttgcagtaaattactgtgtaggctagtcaacaccatcccattattgatgaggtgt

SEQ ID NO: 204012 - DNA, 201 bp, Homo sapiens
aactggctgactcacatcaaagagattctgacaactgcctgcctagcggctcagtgcatcgacaggtaaagtgcatttcagcgttcctgagcgaaacatgrcgctgctaactagactttgtgtttatccagacatatgtttatagattatgtgaaagtttgcagtaaattactgtgtaggctagtcaacaccatcccatta

SEQ ID NO: 204013 - DNA, 201 bp, Homo sapiens
aatcaaacttgtggaagcttgtaatgaccaaacacataacatggaccgatggctcagtaaattggaggcctctaactggctgactcacatcaaagagattytgacaactgcctgcctagcggctcagtgcatcgacaggtaaagtgcatttcagcgttcctgagcgaaacatggcgctgctaactagactttgtgtttatc

SEQ ID NO: 204014 - DNA, 201 bp, Homo sapiens
ctttttgcccccaggcattgtctactctggactccatcactctgatgtaccctttcttttaccgtcctatgtttgaagtgatagaagatggctggcattcyttccttcctgagcaagaatttgaactctattcttcagctgtgagttaacttttgagaactgtggattatgagaagtaacccaataccttatttgacttgt

SEQ ID NO: 204015 - DNA, 201 bp, Homo sapiens
attctgggtgcccatcattattagaccatgtttgcttaatactaatttgtcagttagaatatgtttccagttgtggatgtttcttttttgtctttcttttytttttgcccccaggcattgtctactctggactccatcactctgatgtaccctttcttttaccgtcctatgtttgaagtgatagaagatggctggcattcc

SEQ ID NO: 204016 - DNA, 201 bp, Homo sapiens
agtttatgacattgcaaattatcatcttgttttcctgaatatatcataaaatggtatttggatctatttgataattttgtgggatatttctgaagaatcartgagcatgtacatacaagtagtgacttctcaaatattgtattcaattgcatccttttcagtacctcaagattcctgtatattttagagtataataaaata

SEQ ID NO: 204017 - DNA, 201 bp, Homo sapiens
gttaaatccttgaatactgaaaaggatggtagaggccactggagaatacataatagacagtcagcttctgaggtagtgaaaatgatttcccaaacaatgakaacagtgtttgaacttttaaattttgccactggtgcctttacttcttataattgttgttaaaacctgccaactctatgtatgtttagttgaagtcaaggt

SEQ ID NO: 204018 - DNA, 201 bp, Homo sapiens
ctgtggtgaggatgtgatgctgaattctttccatgatcctgctcagccgtataaaagccctgatagctttatctccaggacactatacaaaggaaactagygtttatttgatgcttacagcaacattcttctggtagaaaaatgagaaatttctctgttcagaataatggtaaaatacttgaatttttcttaacaacttta

SEQ ID NO: 204019 - DNA, 201 bp, Homo sapiens; identical to SEQ ID NO: 35825

SEQ ID NO: 204020 - DNA, 201 bp, Homo sapiens
tggtagctgtttgttaaattaaaccgaattaccgttaatgccagttgttacgccgtattctagtatgttatactctcaaaggcagttcacgtgtggaaaamtatttgccctttgtggaaacgggtctcagattgctttggcttctgagtctgagaccaaatcagtttctgtctcttctctggatgtcagctgtcacatcta

SEQ ID NO: 204021 - DNA, 201 bp, Homo sapiens
atgttgtactcaatacactaaataaactgaactcagtagactaaaatgttgtgctcaataaacgcttgttattaacagagttcattgaccatgttggacayttcccatttgtactcttccctgattttcctatcagggaaggagcatcaatattgattcacggaacagaaggaactgattccacactccaggtgacctcct

SEQ ID NO: 204022 - DNA, 201 bp, Homo sapiens
gcaacaatgaaagtgaaaggtgagtacactgctcacatggggacctttccttttccgttgttttggctacttcctaagtagccagaatctcctaggagacsacgatttggatctatattaaaattatttataaaaaggtagaggctacagttaattataatttaaatgacctgaagtatattcttttatgagagcatgtcc

SEQ ID NO: 204023 - DNA, 201 bp, Homo sapiens
cttagccctggactgtactctggcagggagggacaggagggattggcaatttctatagccaaggaagtttggtgaatatgacataatatcctccccacttrgaggggaggattaactcccccacttagaagggaggatttaatgattaacgcataatcattaaaggctttaagacactcttcagtaaagcaatgtatataa

SEQ ID NO: 204024 - DNA, 201 bp, Homo sapiens
gaattgaatgtattatctttttggttgatgtaaggtttaccacagactgtctttcaatctgtgttaaaatgtatttttttctaaaacatgccgatcgactrttatccttctctaacagtttattcacatgataaagagtgttccagagttttagaattattatgaagcctgttcattgtatgtggatatagattaaatatg

SEQ ID NO: 204025 - DNA, 201 bp, Homo sapiens
tgtattttatgtacatgtaagttattttccctaaaagctaagtctctaaaaaattttaagttttgtttgagatttgactcaacctccacttttaatattartatgggcgtaagaaggatacagtggactttggggacttgggggagggacagaagggggacgagggataaaagactacaattagggttcattgtatactgc

SEQ ID NO: 204026 - DNA, 201 bp, Homo sapiens
cgattgagctttttgacaaatctattgatttttcaacactttgtttctctaccaaaagtcttgtattctatcttctttcatactgagaagaaattgtcctmgtaagaggagcactcaataatggttgttataaattaattactttaatggcagtgttctttcttgatcagatgtaagttgaagctacagcagaagacgatg

SEQ ID NO: 204027 - DNA, 201 bp, Homo sapiens
attgggaggctcaggtgagtggatcacttgaggtcagaagttcaagaccaggctggccaacatggtgaaaccccatctctactgaaaatacaaaaattaamcaggccaatttggtggtgcgggtctgtagccccagctactcaggaggctgaggcaggagaatcacttgaatctgggaggcaaaggttgcagtgagcagag

SEQ ID NO: 204028 - DNA, 201 bp, Homo sapiens
tataatatgtatatataatatatatacataaatatataatatatttatatatatataatatatatataatgatgtcaggtaataagggccaggaaggaaartaacggaagatgagaggataaagagcactgggaggcagtttccttagaaaggatttcagagaaggcaggtgacatctgactacagaccggaatgaaatga

SEQ ID NO: 204029 - DNA, 201 bp, Homo sapiens
atataatatatatataatgatgtcaggtaataagggccaggaaggaaagtaacggaagatgagaggataaagagcactgggaggcagtttccttagaaagsatttcagagaaggcaggtgacatctgactacagaccggaatgaaatgaggaagctagaactgtgagtgtctgggggaagagcattgcagccagagggaac

SEQ ID NO: 204030 - DNA, 201 bp, Homo sapiens; identical to SEQ ID NO: 35811

SEQ ID NO: 204031 - DNA, 201 bp, Homo sapiens
aaagagcactgggaggcagtttccttagaaaggatttcagagaaggcaggtgacatctgactacagaccggaatgaaatgaggaagctagaactgtgagtrtctgggggaagagcattgcagccagagggaacagcgaatacaaagacttgagatggggaacatgcttggcatgtgcagagaagagcgaagaggccagtgt

SEQ ID NO: 204032 - DNA, 201 bp, Homo sapiens
tattataataattatatattataatatagtataatatagcatataatatatattataatatgtatatataatatatatacataaatatataatatatttayatatatataatatatatataatgatgtcaggtaataagggccaggaaggaaagtaacggaagatgagaggataaagagcactgggaggcagtttccttag

SEQ ID NO: 204033 - DNA, 201 bp, Homo sapiens
ttatataatatatattatatttcacctatataatatatataattattcacctaattatattaaataattattcacctaaatattcacctaattattcagckaataggtgaataattatttattcacctattcacctaatacatgtaattattatatataatatattaataattataatatataataataataattatatta

SEQ ID NO: 204034 - DNA, 201 bp, Homo sapiens
tagtcatgggcctatccttttgcatgcctgatcttcctctgacctggagggagataagtgcattctgagcattgctgttgggccttctcctcctgtccagrtgaatgtctccatcattcctgcagtttgaattatgctaattgatatggtatcctttccccgctgcacccccccccccgccatccagtatagaaatacttt

SEQ ID NO: 204035 - DNA, 201 bp, Homo sapiens
cagttggatattcctggaatggaggaatgcttgaatatagccagttccattgaggtaagtattttggaagcaaaatctaatgaaacataattttatattaygactcagtgtagctcttccatttcttcattagataatttagtcatgttctctgactcaaatactgaagactgataggaaaagcctcaccctggttcatcg

SEQ ID NO: 204036 - DNA, 201 bp, Homo sapiens; identical to SEQ ID NO: 35827

SEQ ID NO: 204037 - DNA, 201 bp, Homo sapiens; identical to SEQ ID NO: 35829

SEQ ID NO: 204038 - DNA, 201 bp, Homo sapiens; identical to SEQ ID NO: 35828

SEQ ID NO: 204039 - DNA, 201 bp, Homo sapiens; identical to SEQ ID NO: 35830

SEQ ID NO: 204040 - DNA, 201 bp, Homo sapiens; identical to SEQ ID NO: 35843

SEQ ID NO: 204041 - DNA, 201 bp, Homo sapiens; identical to SEQ ID NO: 35844

SEQ ID NO: 204042 - DNA, 201 bp, Homo sapiens; identical to SEQ ID NO: 35845

SEQ ID NO: 204043 - DNA, 201 bp, Homo sapiens
cagccacgggtgaccagggtctccaatcactccttaagatgcctttgactggctgggcgcagtgactcatgactgtaatcctagcactttgggtggtcaasgtgggagggttgcttgcaacatggcaagaccccgtctctacaaaaaaagtaaaataataaaagtaaagatgcctctgaggggatctgtttggttcatatt

SEQ ID NO: 204044 - DNA, 201 bp, Homo sapiens
tggcatgagatgtttcctgtatcgcaaatggatctataatgaccttccccacctccagcctctgggtggccatgagttcaaagtggctgccaatatctgayctgttgttgttatcattcactcctccttgcctgctgctttcctcccttatcacctcaccctttgttctcctccagctctgtttcctgccaccctaatctt

SEQ ID NO: 204045 - DNA, 201 bp, Homo sapiens
agggaaagcagggagctctgcagatccaggggccctgcactgctactctctaaggggtggtgagccaggacttctggtgtgggaaactttctgacagctcrctcttgaagggtagttatgcagaagggctggtaggccaagttttagctgtttccctcaggacctcttaggtcttctgaagatggtgagatctggttcatt

SEQ ID NO: 204046 - DNA, 201 bp, Homo sapiens
tttttatctttccactctactcagatatgccttgctttaagagtgtgccgtgccttactgtttggtgatgccattatgaagggcatcaaaataactgctgktggccctttactaccacctaccctcttgtctcctcttgtcctctatttttctctcttctacttctattctgggctaggaacatcccttcccccaacatgc

SEQ ID NO: 204047 - DNA, 201 bp, Homo sapiens; identical to SEQ ID NO: 35848

SEQ ID NO: 204048 - DNA, 201 bp, Homo sapiens
gtcagtgtttcctgacggtttccacaaagaagattccaaaattacaacctgccagtctgaagaatctccaaaacatcccgcacgcatcctggaggcgcggscttggggatgggactgcccgcccgggtcctgaacaggatgcgtgcgcgcaggcacacacacaccagccagcctgtgtgtgcggccggagtccggtgcggt

SEQ ID NO: 204049 - DNA, 201 bp, Homo sapiens; identical to SEQ ID NO: 35841

SEQ ID NO: 204050 - DNA, 201 bp, Homo sapiens; identical to SEQ ID NO: 35850

SEQ ID NO: 204051 - DNA, 201 bp, Homo sapiens
tgagaaactggtgatgttccagaggaggtgagtgaagccctgatggaggtggggatatggccctggcacctggtcattagggaccccattttttctcctgmgactttcaaaatataagctgagaaatttgctgggtttgcatgttcacaatcttaatttaaaatcccaatttttaacatcccacgggcccgtagccataga

SEQ ID NO: 204052 - DNA, 201 bp, Homo sapiens
cttgggggaggtggatggtatagctggaacgtgaaatctttggtaaagcttaagacactgtacaaattggatttatgcacagggctaatttttccctgatwtggccacactgactgcttgaatatttaaatgcttttttgtaccagttgataaatggccatagtctgaatgccctaagagtcccctacaactaagggcttc

SEQ ID NO: 204053 - DNA, 201 bp, Homo sapiens
taaccatggcataaggcagaatattttctgtactatgagaggtacaaaggggagggagattgctcaatgggcaacaccaaggaagtgatatgaaataaatagtgttggaatccaccaacggatagaaatttttacaactatgtgtggggagagacagtgcaaacagaagaaacagaatgagctaaaacacgaagcatgttc

SEQ ID NO: 204054 - DNA, 201 bp, Homo sapiens
cagaggaagatatggggacgcccagcagcccacttcccagttagagattatatctggcacctcctgagcctgcaggcctccaggaaggtgagggaagacartggtggggtgcttcactgacagcttgaagaatatcccaccattgtctagagagcgttgcccggtgagagtatgggctgacagggatgtggcaaaggcgag

SEQ ID NO: 204055 - DNA, 201 bp, Homo sapiens
catgttttatgtaaaaatgaaaggataagaaacaaaacacaaaaaaacactgattttgattccaggttctaaaacaatttccaaatgccatgtatgctccrggcccggcggctcatgcctgtaatcccagcactttgggaggctgaggcgggcaggtcacctgaggtcaggagtttgagaccagtctggccaacacggtga

SEQ ID NO: 204056 - DNA, 201 bp, Homo sapiens
ataaccatggcataaggcagaatattttctgtactatgagaggtacaaaggggagggagattgctcaatgggcaacaccaaggaagtgatatgaaataaatagtgttggaatccaccaacggatagaaatttttacaactatgtgtggggagagacagtgcaaacagaagaaacagaatgagctaaaacacgaagcatgtt

SEQ ID NO: 204057 - DNA, 201 bp, Homo sapiens
gataaccatggcataaggcagaatattttctgtactatgagaggtacaaaggggagggagattgctcaatgggcaacaccaaggaagtgatatgaaataaatagtgttggaatccaccaacggatagaaatttttacaactatgtgtggggagagacagtgcaaacagaagaaacagaatgagctaaaacacgaagcatgt

SEQ ID NO: 204058 - DNA, 201 bp, Homo sapiens; identical to SEQ ID NO: 35851

SEQ ID NO: 204059 - DNA, 201 bp, Homo sapiens
gcacttttgagagccttaaatctctttcattttggagtctcccaaagaagcccttaggagaatgcctctggcaacactgagagccagaggcaaaaccattyaagtctctttcttaaggccagagcaatgagatgttgcttaaccatcaatctggacattttcctcccctggggaggagagaaggaataaatctccaactga

SEQ ID NO: 204060 - DNA, 201 bp, Homo sapiens
agataaccatggcataaggcagaatattttctgtactatgagaggtacaaaggggagggagattgctcaatgggcaacaccaaggaagtgatatgaaataaatagtgttggaatccaccaacggatagaaatttttacaactatgtgtggggagagacagtgcaaacagaagaaacagaatgagctaaaacacgaagcatg

SEQ ID NO: 204061 - DNA, 201 bp, Homo sapiens
ccagccacaaaagaatcaaacccctctacctgggaggcatgggaacatggtactaaaccattggctttctagggtttgtgttgagcaatcataggctagcrcaagggaaactactcagggagagagtttattggaaagggaggagagagctcattggaaagagaggaaaagagaggttgttatccacaaaactattttgac

SEQ ID NO: 204062 - DNA, 201 bp, Homo sapiens
gtgtgaacctgggaggcagagcttgcagtgagctgagatcgcgccactgcactccagcctgggcaacagcaagactccatctcaaaaaaaaaaaaaaaaaagtttatagcaaagacagaatgaagggaaatggggaaagggaatgcatcatagtcattaagctgtagcaatgggcaaatgatagcatgtggcgtttggctt

SEQ ID NO: 204063 - DNA, 201 bp, Homo sapiens
tgggaggatcactggagcccaggagtttgaagctgcagtgagccatgatatcaccactgcactccagcctgggtgacaagaccccaactttaaaaaaaaaatttcaaaagtgaataacttaggactccaccacagtgggattgaagttgatgttcccagactcgtgaactcttattttgagataatgagagcaaacacttt

SEQ ID NO: 204064 - DNA, 201 bp, Homo sapiens; identical to SEQ ID NO: 35854

SEQ ID NO: 204065 - DNA, 201 bp, Homo sapiens
ctcctccgggaagtcttctctcgttctctggagctggtctggagtgtacctttcctctggagcctatagctcaatcatctagagttataaagatacagtgrctgacgcctgtaatcacagcactttcggaggacaaggcaggtggatcacttgaggtcaggagtttgagaccagcctggccaacatggcaaaatctcatct

SEQ ID NO: 204066 - DNA, 201 bp, Homo sapiens
aatggaggcatgacactaaacacagactgaaaaagagtgctgattagaaagagaaaggagcccaaaggcagacgggaaaaccagccaaggatggagagacktctgttcattagtttgtagtttggacctcacctatcttaccaatgtggtattatgctctagtaaaaagtcagcgatggccgggcatggtggctcatgccc

SEQ ID NO: 204067 - DNA, 201 bp, Homo sapiens
ccaaagaattagggagtagctagcagaaaatggaggcatgacactaaacacagactgaaaaagagtgctgattagaaagagaaaggagcccaaaggcagaygggaaaaccagccaaggatggagagacttctgttcattagtttgtagtttggacctcacctatcttaccaatgtggtattatgctctagtaaaaagtcag

SEQ ID NO: 204068 - DNA, 201 bp, Homo sapiens
gttcttaccttcaaaaagtttgtagcctatcggggtggagagataagccaagtatccagataaccatggcataaggcagaatattttctgtactatgagargtacaaaggggagggagattgctcaatgggcaacaccaaggaagtgatatgaaataaatagtgttggaatccaccaacggatagaaatttttacaactat

SEQ ID NO: 204069 - DNA, 201 bp, Homo sapiens
ctgtggagcaaaaggaaggaagagagatattggtacattctttaagggatggaaaaagtcatgaagaagcccagaggtcgtttgaaaatgcagtcatgatyacgagttgcatgcctggccttgttattgggttgtatgagctcttttgcaaggcaccagaatggtgcaccctgcagctgcagcttatctactgattgagac

SEQ ID NO: 204070 - DNA, 201 bp, Homo sapiens
tttatagcaaagacagaatgaagggaaatggggaaagggaatgcatcatagtcattaagctgtagcaatgggcaaatgatagcatgtggcgtttggcttakcttggagcaagaggaagaaaggaaaccaacttagtggtggcaatatcccaagaacttgccacatttgcatgatcatctctgccatagcagcttatacctt

SEQ ID NO: 204071 - DNA, 201 bp, Homo sapiens; identical to SEQ ID NO: 35859

SEQ ID NO: 204072 - DNA, 201 bp, Homo sapiens; identical to SEQ ID NO: 35860

SEQ ID NO: 204073 - DNA, 201 bp, Homo sapiens; identical to SEQ ID NO: 35861

SEQ ID NO: 204074 - DNA, 201 bp, Homo sapiens; identical to SEQ ID NO: 35862

SEQ ID NO: 204075 - DNA, 201 bp, Homo sapiens; identical to SEQ ID NO: 35864

SEQ ID NO: 204076 - DNA, 201 bp, Homo sapiens; identical to SEQ ID NO: 35866

SEQ ID NO: 204077 - DNA, 201 bp, Homo sapiens; identical to SEQ ID NO: 35842

SEQ ID NO: 204078 - DNA, 201 bp, Homo sapiens
aatttgttacaatgtgtggtgtctccaactgcaactaagttctgtggccactgaggatctattgtttctagctgtttccctaggaatgaaacattgttaasagtttctatcaaggccacagcttctgcctgctagagctactgaacagaggaagatatggggacgcccagcagcccacttcccagttagagattatatctg

SEQ ID NO: 204079 - DNA, 201 bp, Homo sapiens
gagaattgcttgaaccccagaggtggaggttgcagtgagctgagatcgtgccactgcactccagcttgggcaacagagcaagactccacccccaccccccrggttcaagcgattgtcctgcctcagcctgcctcagcctcccaagcagctaggattataggtgcccgccaccaccctgggctaattttttgtatttttagt

SEQ ID NO: 204080 - DNA, 201 bp, Homo sapiens
tgattatagcctagttgcctaggtttgtttgtttgtttttgtgtttgtgtttcaacagtctttctctcttgcccaggctggagtgcagtggcacaatcatrgctcactgcagccttgacttcccaggctcaagcaatccttctacctcaacctcctgagtatctgggactacaggcacacaccgccatgcctggctaattt

SEQ ID NO: 204081 - DNA, 201 bp, Homo sapiens; identical to SEQ ID NO: 35846

SEQ ID NO: 204082 - DNA, 201 bp, Homo sapiens
tgggaagaacctgggggtactgagatgcaggactgtcaatgctgggggttgagagctttggaaccttgtgcttgtgggctttgaagtgtgctgtgctggaragtcagctttccctgaaagagcttttctgtttgagtcatttgcttggctgcctgtcccacccctgccagccacaaaagaatcaaacccctctacctggga

SEQ ID NO: 204083 - DNA, 201 bp, Homo sapiens; identical to SEQ ID NO: 35840

SEQ ID NO: 204084 - DNA, 201 bp, Homo sapiens
taaaaatacaaaaaattagccaggcgtggtggcgggcacctgtagtcccagctacgtgggaggctgaggcaggagaatggtgtgaacctgggaggcagagsttgcagtgagctgagatcgcgccactgcactccagcctgggcaacagcaagactccatctcaaaaaaaaaaaaaaaaaagtttatagcaaagacagaatg

SEQ ID NO: 204085 - DNA, 201 bp, Homo sapiens
tgtgctttgtcctgtttctcttagaaatctgtgagctccccaggggtgggagcagaactttggctccattctcccccacacagcagagaattgactttccrctgggcacaggggaggctcagtcaacactctatccccatgtggctacgttggcttagaggcacagaatgggagagaagcaggctcttggctgaggaaaag

SEQ ID NO: 204086 - DNA, 201 bp, Homo sapiens
gcctgggcaacagcaagactccatctcaaaaaaaaaaaaaaaaaagtttatagcaaagacagaatgaagggaaatggggaaagggaatgcatcatagtcaytaagctgtagcaatgggcaaatgatagcatgtggcgtttggcttagcttggagcaagaggaagaaaggaaaccaacttagtggtggcaatatcccaagaa

SEQ ID NO: 204087 - DNA, 201 bp, Homo sapiens; identical to SEQ ID NO: 35853

SEQ ID NO: 204088 - DNA, 201 bp, Homo sapiens; identical to SEQ ID NO: 35852

SEQ ID NO: 204089 - DNA, 201 bp, Homo sapiens
atgagctaaaacacgaagcatgttccagcaatagagtccttttgcttgaagtatagggtatgggaagaagtaagactggagagactaatgccattcttgtygagtcctaaaagcagacttaggacttaattcaataagcaataggaagccattacatcttttgaactgcaatgtggcatagttacggacgtgctttaggaa

SEQ ID NO: 204090 - DNA, 201 bp, Homo sapiens
gaggtctcaacttggacatcttctcttcccaccttcagaatttaggagcttcacctttcttgttttaatccctatggacaatgttaaattagcaactggtygtgattccagcatttcttatgactgagcacttttgagagccttaaatctctttcattttggagtctcccaaagaagcccttaggagaatgcctctggcaa

SEQ ID NO: 204091 - DNA, 201 bp, Homo sapiens
cgcggctcagcgcgtaccggcgggcttcgaaaccgcagtcctccggcgaccccgaactccgctccggagcctcagccccctggaaagtgatcccggcatcsgagagccaagatgccggcccacttgctgcaggacgatgtgagtttcccagcctggccccgtaccgccgggtcgcaggcgcgggctgggcttccaggggac

SEQ ID NO: 204092 - DNA, 201 bp, Homo sapiens
gagtacgctagacttgtctgacctagaagctgagaaactggtgatgttccagaggaggtgagtgaagccctgatggaggtggggatatggccctggcacckggtcattagggaccccattttttctcctgagactttcaaaatataagctgagaaatttgctgggtttgcatgttcacaatcttaatttaaaatcccaatt

SEQ ID NO: 204093 - DNA, 201 bp, Homo sapiens
ggagtacgctagacttgtctgacctagaagctgagaaactggtgatgttccagaggaggtgagtgaagccctgatggaggtggggatatggccctggcacstggtcattagggaccccattttttctcctgagactttcaaaatataagctgagaaatttgctgggtttgcatgttcacaatcttaatttaaaatcccaat

SEQ ID NO: 204094 - DNA, 201 bp, Homo sapiens; identical to SEQ ID NO: 35902

SEQ ID NO: 204095 - DNA, 201 bp, Homo sapiens; identical to SEQ ID NO: 35839

SEQ ID NO: 204096 - DNA, 201 bp, Homo sapiens; identical to SEQ ID NO: 35858

SEQ ID NO: 204097 - DNA, 201 bp, Homo sapiens
cagatcatcaggtgtcacagagagaggacataccttgaaatgccctagatgatgtcatttactttgcaggacttccttgccttgcttctgattaatgtcaygactggtctgtctgagggtactgttatctacaaagagccaaatattagctcttagtagctattctttatccatgcctgattagggtcagtattatttttg

SEQ ID NO: 204098 - DNA, 201 bp, Homo sapiens; identical to SEQ ID NO: 35863

SEQ ID NO: 204099 - DNA, 201 bp, Homo sapiens; identical to SEQ ID NO: 35865

SEQ ID NO: 204100 - DNA, 201 bp, Homo sapiens
gaggcggattagctgcaggacatggagattttccagacccagggcagggagagccatctcccaactgagaactgtgcttagggtcagccccataagatctyaggttgggatgggtctgggaactgaagcttgctgggcctgcagctgggatgcacagtaggttggcctgggagactggaagacagaggcaggagggtgagc

SEQ ID NO: 204101 - DNA, 201 bp, Homo sapiens
aagtggtggggaaagacctgctgaaagggtcgctcctcttcacaggtcagtgctacgtgggatcacaggtcacatgtgaggtccaaagaccagccagattmtttcctggctctctgggatgggagcttatattcatttctgctcaagactctctgactcagggccacttaattttcccagatgggatttaattccttggtg

SEQ ID NO: 204102 - DNA, 201 bp, Homo sapiens
atatcgaaaccaaatcctaaagcagtttataatttagcctgacacactgtgcaagccaggttttgtatgcaagtttgtgtgtatcattaactaatgaaatmttaaaaagcagtttggcttatttatagataatggagctgtttcttaaccttgtgccttttttttaagctggtagaagcatatcctggttattatctggaa

SEQ ID NO: 204103 - DNA, 201 bp, Homo sapiens
ctcctcgaagggccatctgtgggccaggcgctccagtcccctcactctgttcccacaagccagcagccagtgaccaaggctgtaaatcctgtcattgcctkgatgtagtcaccaatatttatgtgacaccatactgtaccagactctagacctggcttgatggctctaatggtaaaaatgtaagtgtggtactcatgctca

SEQ ID NO: 204104 - DNA, 201 bp, Homo sapiens
cacaggtggtgaaggcatttgggaaacatgagaatgatgggacaggaagcagtgggggagcatggggtggcaaaggggaatgtttgcctggagtttgggcrggtgccaccagggacctgaacctctgcttttgtctttacagtgaccgaaggaagagaccaagatgaatgcagaggtgagttctttacaaagaccagttta

SEQ ID NO: 204105 - DNA, 201 bp, Homo sapiens
gcaaaggggaatgtttgcctggagtttgggcgggtgccaccagggacctgaacctctgcttttgtctttacagtgaccgaaggaagagaccaagatgaatrcagaggtgagttctttacaaagaccagtttaagggatgcttttcttattgtgtccctcatttctcctttgcagagtctccattccctttcagaaacatca

SEQ ID NO: 204106 - DNA, 201 bp, Homo sapiens
tgcttttgtctttacagtgaccgaaggaagagaccaagatgaatgcagaggtgagttctttacaaagaccagtttaagggatgcttttcttattgtgtccytcatttctcctttgcagagtctccattccctttcagaaacatcagcacaaacttgagaacatttcccctctagcctactgaagtgcacgtggttctgggt

SEQ ID NO: 204107 - DNA, 201 bp, Homo sapiens
ccatttagtcctaacaaaaggcctaggagcaagatgctattattacccattttgtagatgaggaaaatgagcaataagtcaattgctgtaagtcacagggrgttaaggagcatcacagagatctaagccctgatgtttttgacccatgaatgcctttgttcttgcctatatccagctaatcccatccatccagttcaaatg

SEQ ID NO: 204108 - DNA, 201 bp, Homo sapiens
ttggtcaggatggtcttgaactcctgacctcaagtgatctgctcaccttggcctctcaaaatgctgagattacacgcatgagccactgcacccagccctgrctctcatttttgcacaggagaggcaagcatcagatgagggattgggacagagagcagttaatataatataatagtaacttcttaaaatcatagtactttc

SEQ ID NO: 204109 - DNA, 201 bp, Homo sapiens
tcactaattatcagttgactaaatgataggatgattcagagactgttaagtaatcttctaatgcaatccagagcttgggagggtcagtgaaagtgtagagraaggaaatcatatgacagaaattttcaagcaaaactagttgtggcccagaggctggctggagggagaaagacagaagaaggaccatcggccacagtcggg

SEQ ID NO: 204110 - DNA, 201 bp, Homo sapiens
cacctgggctctgtaaattatttagaacagtaagggttttagagtgtttctggatgcctttgcagagaggtgggtctcctggtagtaaaagaagcagacaytgggtattttaaaaagaaaaaagaatttgagttcctgaatgaagcctgatctagtccattttgaggagtttcttcttcgctaggaaaaggcagagaggcc

SEQ ID NO: 204111 - DNA, 201 bp, Homo sapiens
ccctcctgttactacacagactgtagcacacagtgcacactaggctgtcgtttgcttctttcacccgatcatctatcttggagaccagtccctttcaatayataaagggcttcctcgttcttttatttttatattgccatgtaatactctatatcacgagtctatcataactttcatagccagcctgttattaatgacata

SEQ ID NO: 204112 - DNA, 201 bp, Homo sapiens
tttttgtctttggttctgtttatatgctggattaccgttattgatttgcatatgttgaaccagccttgcattccagggatgaagcccacttgatcatggtsgataagctttttgatgtgctgctggatttggtttgccagtattttattgaggatttttgcatcaatgttcatcaaggatattggtctaaaattctctttt

SEQ ID NO: 204113 - DNA, 201 bp, Homo sapiens
cacccctcagtgcagccagagtgtgagggtctgtgtttcagctttagcatcccatcaccctgtcacactgttcccaaaacattctgacttatttctcataycaggtcttttttaacaaaagcacattcataattttcctcccaaagcacctgggctctgtaaattatttagaacagtaagggttttagagtgtttctggat

SEQ ID NO: 204114 - DNA, 201 bp, Homo sapiens
tcacccgatcatctatcttggagaccagtccctttcaatatataaagggcttcctcgttcttttatttttatattgccatgtaatactctatatcacgagyctatcataactttcatagccagcctgttattaatgacatatagattatttccatcttttgcttgttataagcaaggctgcagtaagcctaagtcacttga

SEQ ID NO: 204115 - DNA, 201 bp, Homo sapiens
tgcctcaccttgaagtttttctacagtgattttacattttcttctaccctctttatctcaaaaaaaattttttttctaagttggcagagcacattcctaaytatgaactccatttttgcatctggagtgccaaacaccagcttctctgagtccaagggtgggggcgcaagctcactctgtgactgtgatttggacctaagt

SEQ ID NO: 204116 - DNA, 201 bp, Homo sapiens
tttaagattttggctggaggcagacgggagcagtatcttgaccaaatggatttctcacaccaatactcttttttatgtttatatatatatatttttttgawatagggtatcactctgtcacccaggctggaatgcagtggtacaattatggctcactgtaacctcgaactcctcaggcccagatgatcctcccaccttagc

SEQ ID NO: 204117 - DNA, 201 bp, Homo sapiens
atacagataaactgaagttcagaggcatgagtggcttcacagaggtaacgtagcggtcatgagacagagctggattggagctcagctctctaagtggctgsaactgttgtgggtggctgcttagtattctgtccaaagaactaggctgggcatagtggctcacgcctgtaattccagcacttggggaagctgaggctggtg

SEQ ID NO: 204118 - DNA, 201 bp, Homo sapiens
taaagctcacggcccttgtccactagaggcaagatgccccttgacctcttcttccaaatatactcttttgtgtcttgtcttttattcccacattcgccccmctttgttcagtcccccgaggtccatgcaggttacaagtggcaccccaaacagcaacaggatcgggtgctctgcatagtggcatccgaacacaggacttcg

SEQ ID NO: 204119 - DNA, 201 bp, Homo sapiens
ccttccttatcctacttcctgcctcctcatcacttcctcacttacctaattcttttcttcttctcctttgctttcctcaccctcctctaggccattccctytcccttttggaaggcagggggaagagacctcaggcacagggacggtccacacacccagttcctgacacattgcctctgttgtgctgtgcaaggccccgct

SEQ ID NO: 204120 - DNA, 201 bp, Homo sapiens
ttccttatcctacttcctgcctcctcatcacttcctcacttacctaattcttttcttcttctcctttgctttcctcaccctcctctaggccattccctctyccttttggaaggcagggggaagagacctcaggcacagggacggtccacacacccagttcctgacacattgcctctgttgtgctgtgcaaggccccgctct

SEQ ID NO: 204121 - DNA, 201 bp, Homo sapiens
tgtttcagcccgagaggaagtttggcgtggtggtggttggtgttggccgagccggctccgtgcggatgagggacttgcggaatccacacccttcctcagcrttcctgaacctgattggcttcgtgtcgaggtggctcacaatgtctttgtgcttcataattcatggaaagcccagtgaggcggattagctgcaggacatgg

SEQ ID NO: 204122 - DNA, 201 bp, Homo sapiens
ggggagaaggatggtgctcctttcttctgtctaccattgagttccatttctctgttactctgaaatagaagggagctcgggagcattgatggagtccagcrgatttctttggaggatgctctttccagccaagaggtggaggtcgcctatatctgcagtgagagctccagccatgaggactacatcaggtgggttttccac

SEQ ID NO: 204123 - DNA, 201 bp, Homo sapiens
ctgagtaaggtgaccaatcatggtttgcccatttgcctcctctgccagcatctgatgaagaagctgtgccctctgaatgactcccagtagtatcagattcrtgtgtccactggaggagggacccagggagggcagaagtaccaggccatgggctgggtctgggttaatggggaaagctccctcattattggagatggggca

SEQ ID NO: 204124 - DNA, 201 bp, Homo sapiens
ctggtgccagcaagcacccacttgtgctcttgtgtaatctctaacatgattcttttgtcttttgtctttgcagtccactgtcatggattgaagaaaaaggrcctggtctaaaacgaaacagatatttaagcttccatttcaagtctgggtccttggagaatgtgccaaatgtaggagtgaataagaacatatttctgaaag

SEQ ID NO: 204125 - DNA, 201 bp, Homo sapiens
ggatggtgctcctttcttctgtctaccattgagttccatttctctgttactctgaaatagaagggagctcgggagcattgatggagtccagcagatttctytggaggatgctctttccagccaagaggtggaggtcgcctatatctgcagtgagagctccagccatgaggactacatcaggtgggttttccacacaggcag

SEQ ID NO: 204126 - DNA, 201 bp, Homo sapiens
aaacaaaacaatacaaaactgacaagatgtaatgaaagcagtactaagagagaagtggatagttgtaaatgcttacattaaacaagaagaaagatctcaawtcaacatcctaactttacatttcaagggactaggaaaagaagagcaaactcaatcgaaaattagcagaaaaaagcaagtaaagattagaacataaataaa

SEQ ID NO: 204127 - DNA, 201 bp, Homo sapiens
atggttctgatgggaggcggtgccttgtttggtcttgaagttgagtagaagtcaatgaggaagcaagatgttggggaggcagaggctgactctctctctctttttttttttttttatgagacaaagtcttgctctgtcacccaggctggagtgcggtggtgtgatctcagctcactgcaacctccatctcccgggttcaag

SEQ ID NO: 204128 - DNA, 201 bp, Homo sapiens
aagccataccaccctccagaagggagaaattaagactttcccaggccagacgcagtggctcatgccctgtcagcccagcactttgggaggccaaggagctygggacaaccctgggcaacataatgagaccctgtttctacaaaaatcttttacaacttttttttttttttttttggtggggtacagagtcttgctgtgtca

SEQ ID NO: 204129 - DNA, 201 bp, Homo sapiens
aacctaaagacatggtggagcaccttcaagaacaggttttggcgggactgacttctctccaagcccccatttcggggactgtctcatcccatcctgatgcygtggcttcctgtgtgttttgggctggcttccatcttgctcgtcgggaccctgccagctcctttgttttgtagttttctgctcgatgcctacagtgttttc

SEQ ID NO: 204130 - DNA, 201 bp, Homo sapiens
gaacagacctgggaatatatggatacggatgtgtgtgtgtactgtggttaccatgtgtgtttatcacaatcaggcattgagtgaacgacaggaaaacaacmaaagacacagctggaaaatacatagtttctttaataaccatggatgtggaaacacagagactgttacatagtgctggggaaaatataacatgttccccag

SEQ ID NO: 204131 - DNA, 201 bp, Homo sapiens
ctgcaacctctgcctcccgggctaaagtgattctcctgcctcagcctcccaagtagctggggttacaggcacccgtcactatgcccgggtaatttttgtatttttttttactagagacggggttttgccatgttggccaggctagtctcgaactcaagtgatccacccaccttggcctcccaaagtgctgggactacaggc

SEQ ID NO: 204132 - DNA, 201 bp, Homo sapiens
gcgggactgacttctctccaagcccccatttcggggactgtctcatcccatcctgatgctgtggcttcctgtgtgttttgggctggcttccatcttgctcrtcgggaccctgccagctcctttgttttgtagttttctgctcgatgcctacagtgttttcagactccaccttggtcccttgtgtttcagcccgagaggaag

SEQ ID NO: 204133 - DNA, 201 bp, Homo sapiens
ttcatggttctcatccctgtgcttaaccaaagagaatgagatcaaatgctgtgctgggtccaagggcaggggttgccacagccttcccttttcagaggccytctgccctctgcaagctaggagtggtcatcggcatcggcttcctggacagcctatgcaggtggaggggctggagaggcatctgtagtgcatttttcatca

SEQ ID NO: 204134 - DNA, 201 bp, Homo sapiens
ctcgaagtcgcatgccagtttgcaccctaaatgtgttaacgtattggatttggattaggtttggtagtcacaatgtttggccaagtgcttggaactggaaktgaccatagagatcacttctcatgagataaaagtagattgttccttttatttttatgttattttatttttgaggagtcttgctctgtcacccaggctgga

SEQ ID NO: 204135 - DNA, 201 bp, Homo sapiens
actcacagttcagcatggctggggaggcctcaggaaacaacaattatggtggaaggcaaagggaaagcaaggcaccttcttcacaaggtggcaagaaggcraagtgctgagcgaagggggaagacccccttataaaaccatcagatctcgtgagaactcactatcatgagaacggcatgggggaaaccacccccgtgattc

SEQ ID NO: 204136 - DNA, 201 bp, Homo sapiens
cggattcaagtgattctcctgcctcagcctcccaggtagctgggattacaggcgcccaccaccacatttggctaacttttgtattttttgtagatacaggktttcaccatgttggccaggctggtcttgaactcctgacctcaagtgatccacccacctcggcctcccaaagtgctgggattataggcttgagccaccgcg

SEQ ID NO: 204137 - DNA, 201 bp, Homo sapiens
tagcctcaacctcccaggctcaagcagtcctcccacctcagccttccaagtagctggaaacacagatgtgcgccacaatacccagctaattttaaaatttktgtaaacagtgtctccctatgttgcccagcctcatctcaaactcctgggctcaagtgatccacctgtcttggcctccaaagtgctgggattacaggcatg

SEQ ID NO: 204138 - DNA, 201 bp, Homo sapiens
gaactcatcattttttatggctgcatagtattccatggtgtatatgtgccacattttcttaatccagtctatcattgatggacatttgggttggttccaartctttgcttttgtgaatagtgccgcaataaacatacgtgtgcatgtgtctttatagcagcatgatttatagtcctttgggtatatacccagtaatgggat

SEQ ID NO: 204139 - DNA, 201 bp, Homo sapiens
gggagcttatattcatttctgctcaagactctctgactcagggccacttaattttcccagatgggatttaattccttggtggcccttgggtaaagagtatrttagaaatctcaagcatatttgtgctctgtcccaacctattaactagttggagattatttttcaacaggaagttgtacattaaaactcttttaaaaggat

SEQ ID NO: 204140 - DNA, 201 bp, Homo sapiens
tgatttgcatttctctgatggccagtgatgatgagcactttttcatgtgttttttggctacataaatgtcttcttttgagaagtgtctattcatatccttygcccactttttgatggggttgtttgtttttttcttgtaaatttgtttgagttcattgtagattctggatattagccctttgtcagatgagtaggttggga

SEQ ID NO: 204141 - DNA, 201 bp, Homo sapiens
ctccggctttgttcttttggcttaggattgacttggcaatgcgggctcttttttggttccatatgaactttaaagtagttttttccaattctgtgaagaamgtcatttgtagcttgatggggatggcattgaatatataaattaccttgggcagtatggccattttcacgatattgattcttccaacccatgagcatggaa

SEQ ID NO: 204142 - DNA, 201 bp, Homo sapiens
gcttgatggggatggcattgaatatataaattaccttgggcagtatggccattttcacgatattgattcttccaacccatgagcatggaatgttcttccayttgtttgtatcctcttttatttcattgagcagtggtttgtagttctctttgaagaggtccttcacgtcccttgtaagttggattcctacccattttattc

SEQ ID NO: 204143 - DNA, 201 bp, Homo sapiens
atgattagatttggggtatgcatctttcacagaaatagtatgcaagtggccaggcatggtggctcacacctgtaatcctagcactttgggaggccaaggcrggcagattacttgaggtcaggagttcaaaaccagcctggcctacactgtgaaaccccgtctctactgaaaatatcaaaaaaattagccaggcatgatgtg

SEQ ID NO: 204144 - DNA, 201 bp, Homo sapiens
gaggttgcagtgagccgagattgcaccactgcactccagcctgggcaacaagagcaaacatctcaaaaaaaagacatgagaaattttcttaggcagactaygtagaatacctcaagtttatttttattcagtgccaaaataaaagttaatctttgttgccatctcccagaacatttgctagactgtactatgagcttttaa

SEQ ID NO: 204145 - DNA, 201 bp, Homo sapiens
tattggtgtataacaatgcttgtgatttttgtacattgattttgtaccctgagactttgctgaagttgcttatcagcttaaggagattttgggctgagacratggggttttctagatatacaatcatgtcatctgcaaacagggacaatttgacttcctcttttcctaattgaataccctttatttccttctcctgcctga

SEQ ID NO: 204146 - DNA, 201 bp, Homo sapiens
atttctgttcttttacatcttctgaggagtgctttacttccaactgtgtggtcagttttggaataggtctggtgtggtgccgaaaaaaatgtatattctgwtgatttggggtggagagttctgtagatgtctattaggtctgcttggtgcagagctgagttcaattcctgggtatccttgttaactttctgtctcgttgat

SEQ ID NO: 204147 - DNA, 201 bp, Homo sapiens
aattgatccctttatcattatgtaatggccttctttgtctcttttgatctttgttggtttaaattctgttttatcagagactaggattgcaacccctaccrttttttgttttccatttgcttggtagatcttcctccatccctttattttgagcctatgtgtgtctctgcacgtgagatgggtttcctgaatacagcacac

SEQ ID NO: 204148 - DNA, 201 bp, Homo sapiens
ggaggctgcacggagagcggtgcccgcgtcaggtgaggcgcgcgcggggaacgggggtcgcgcgcaggggagcgggggtcgcgcgcggcttccatagagcrctagggcctgagctcgaagccccaggcccgcaggaggcccgggcccgcggccgccagagccgggacgcagcctgggcgccgcctgccccgccccgccccg

SEQ ID NO: 204149 - DNA, 201 bp, Homo sapiens
tttgtggtgttctctgtatttcctgaatctgaatgttggcctgccttgctagattggggaagttctcctggataatatcctgcagagtgttttctaacttsgttccattctccccgtcactttcaggtacaccaatcagacgtagatttggtcttttcacatagtcccatatttcttggagactttgttcatttcttttta

SEQ ID NO: 204150 - DNA, 201 bp, Homo sapiens
taaaaaatctaaaggaaaacaaaacagtgaaagaacatgatatagtcagtgtagagaataaaattatttatgtaattaatattgaggatgcagataacacrttgtgaaatcttgcttgtaaaaaatctcgatctgctgaagaaagatgttctctctagagatctttgaaagcataattattgagcttttaaaatgttagaa

SEQ ID NO: 204151 - DNA, 201 bp, Homo sapiens
gatagctcatctgtgtgcacctgagcccgttgtgtttcggagtcaaagcaaataaaggctcaaactccaagactgttttgcagaccggctgcagtagatayggggggaggagaaacctgctttaaattgcttcaagcaagttgtttctgcaaaggtgttgacttttttctttcaactttctagtgagtcactgcagcctga

SEQ ID NO: 204152 - DNA, 201 bp, Homo sapiens
ttgccttctacttgtaaacttaacttcctcataaagcaacctttttcgattacctgctccatcctgactcattccgatttcctgctctgccataaccattkttcccgccaaaccactcaccctgtcactctctttaaattagccagttggagttagtttggcctgtgtggtctaaccctagccaataggggaatgacacag

SEQ ID NO: 204153 - DNA, 201 bp, Homo sapiens
taatttgaaacattagaaacattcagaattaaagtgttttatttctctgtaaaaacccatcgagagtagttttcaacagtagtggcctccttcttctcacyagacagtttaggatgtggagccggcatccttggcaaattatcatactcccttctcagtttggatcagcttccaacgttttctcctttgtgctttcaatgt

SEQ ID NO: 204154 - DNA, 201 bp, Homo sapiens
cctcctgtctagaacagtagctaactgtctcctggcccacagacacatccctgatctcatcttgcctttggacacaggtagataccatcttgttctcttarattttcatttcatttctcaggttttcgtttcattcatttctctttttttctttttctttttgaaacggagtctcactctgtcgcccaggctggagtgcag

SEQ ID NO: 204155 - DNA, 201 bp, Homo sapiens
gcaggagaatttcttgaacccgggaggcacagtttgcagtgagacgagatcgcaccactatactccagcctgggtgacagagggagactccccatctcacaaaaaaaaaaaaaaaaaaaaaaaaaaaaaaggaaacgatgctgtttttcacattgtgttctgtcaggtaacatccaatatcagttcatctaattactaatg

SEQ ID NO: 204156 - DNA, 201 bp, Homo sapiens
tctctcgcctgacctggctggtctccctctttggggagctttctcttgtgtctgccactttggaagagcgaaaggaagatcagtatatgaaaatgacagtrtgtctggagacagagaagaaaaggtaagtcatgagaagccatgaggaggaggaaatttaaggacatcctagtacatttgcaggtatgatccaaagggagc

SEQ ID NO: 204157 - DNA, 201 bp, Homo sapiens
ttctttgccttctacttgtaaacttaacttcctcataaagcaacctttttcgattacctgctccatcctgactcattccgatttcctgctctgccataacyatttttcccgccaaaccactcaccctgtcactctctttaaattagccagttggagttagtttggcctgtgtggtctaaccctagccaataggggaatgac

SEQ ID NO: 204158 - DNA, 201 bp, Homo sapiens
aggtctgttggagtttgctagaggtccactccagaccgtttgcctgggtatcagcagcggtggctgcagtacagcggtggctgtagaacagcggattttcrtgaaccgcaaatgctgctgcctgatcggtcctctggaagttttgtctcagaggagtacctggctgtgtgaggtgtcagtctgcccctacttgggggtgcc

SEQ ID NO: 204159 - DNA, 201 bp, Homo sapiens
gactctccttccaccttttcagcacctgccctcatgcctcaccttgaagtttttctacagtgattttacattttcttctaccctctttatctcaaaaaaawttttttttctaagttggcagagcacattcctaactatgaactccatttttgcatctggagtgccaaacaccagcttctctgagtccaagggtgggggcgc

SEQ ID NO: 204160 - DNA, 201 bp, Homo sapiens
gctcacgttaaaaggcctaacaagtaatttttctcaaaaataaagttcttcccctaagagcagcttgactattaagataccagtgtcttcactcatatcttttttttttttttttttttttgagatggagtgttgctctgtcgcccaggctgaagtgcagtggtgcaatcttggctcaccgcaacccctgcctccccggtt

SEQ ID NO: 204161 - DNA, 201 bp, Homo sapiens
acagacacatccctgatctcatcttgcctttggacacaggtagataccatcttgttctcttagattttcatttcatttctcaggttttcgtttcattcatwtctctttttttctttttctttttgaaacggagtctcactctgtcgcccaggctggagtgcagtgatgcaatcttggcccactgcaatttctgcctcccag

SEQ ID NO: 204162 - DNA, 201 bp, Homo sapiens
ctcacgttaaaaggcctaacaagtaatttttctcaaaaataaagttcttcccctaagagcagcttgactattaagataccagtgtcttcactcatatcttttttttttttttttttttttgagatggagtgttgctctgtcgcccaggctgaagtgcagtggtgcaatcttggctcaccgcaacccctgcctccccggttc

SEQ ID NO: 204163 - DNA, 201 bp, Homo sapiens
cgttgggcacctgggccaccattcctgagggctttcattacagaaaggagaccctgacatggcctggcatttttgcacggtaaagccactgatacatagtrgaacctcatttcaaaatctgtcttcatccttgaaaatggtaatataatgagagtacaaaccattaatttgtacaagaaactgtgttaagttaagtaagtt

SEQ ID NO: 204164 - DNA, 201 bp, Homo sapiens
gaactcctgacctcaagtgatccacccacctcggcctcccaaagtgctgggattataggcttgagccaccgcgcccagctgtttcttttgttttggagatraagtaattcaagactctcccaggtcatacacgctgtgaatggtactgttggcactcaatgccagatcccctgacttgaactctgaggctatttttctcac

SEQ ID NO: 204165 - DNA, 201 bp, Homo sapiens
tggatagacatttttctgaagaagttattcagacggcaaacaatcatatgaaaagatgctcaataccactaatccttatagaaaatgcaaatcaaatccayagccaccgtcagtaaccaccagcatcagtcagcagccatcaacatggaagcaagaccttccttcagcaaaaagatggaggatcagatggtagcatttttt

SEQ ID NO: 204166 - DNA, 201 bp, Homo sapiens
cagtttgcagtgagacgagatcgcaccactatactccagcctgggtgacagagggagactccccatctcacaaaaaaaaaaaaaaaaaaaaaaaaaaaaarggaaacgatgctgtttttcacattgtgttctgtcaggtaacatccaatatcagttcatctaattactaatgatatcacttcattaggtggtgtctgacgg

SEQ ID NO: 204167 - DNA, 201 bp, Homo sapiens
agaaatgaaaaaatttttatagagcgaaaaaattttatatagcaaaaaaattgttaacagctttcttttataatccaaaatttattttattttatttttakttttattttttgagatgggctgcagtgcactggtacgatcttggctaactgcaacctccacctcccaggttcaagtgatcttcccagctcagcctcccaa

SEQ ID NO: 204168 - DNA, 201 bp, Homo sapiens
tctttggcagagtaccaaggaaaagccctatctgtacagaacctttgtgcctgggaacttgatggctgcaacctgagcctcaacctagtttgcttgcggasccagaagagaagctaaaaaccttcagttaaccaagccagacaccaagaaagttaaaccgaaagagaaccccccaccccccgcaaaaaaaagaagtaaagt

SEQ ID NO: 204169 - DNA, 201 bp, Homo sapiens
ctttggcagagtaccaaggaaaagccctatctgtacagaacctttgtgcctgggaacttgatggctgcaacctgagcctcaacctagtttgcttgcggagscagaagagaagctaaaaaccttcagttaaccaagccagacaccaagaaagttaaaccgaaagagaaccccccaccccccgcaaaaaaaagaagtaaagtg

SEQ ID NO: 204170 - DNA, 201 bp, Homo sapiens
cagctctgtgagcaactagctggggtaccccagctgaatgtgctttaaaaacagcaatgtggccaggtgcagtggctcatgcctgcagtctcagaactttrggaggccgaggcaggaggatcacttgaacccaggagttcgacgttgcagtgagctgtgatcatgcgtgccactgcattccagtctgtgttaaagaacaaa

SEQ ID NO: 204171 - DNA, 201 bp, Homo sapiens
aaagccactgatacatagtggaacctcatttcaaaatctgtcttcatccttgaaaatggtaatataatgagagtacaaaccattaatttgtacaagaaactgtgttaagttaagtaagttaagtacaagtaactgtgatgtgcattaatccatatgacaatcctataaagtggtattcactacccccattatacagataaa

SEQ ID NO: 204172 - DNA, 201 bp, Homo sapiens
agaatgagatcaaatgctgtgctgggtccaagggcaggggttgccacagccttcccttttcagaggccttctgccctctgcaagctaggagtggtcatcgkcatcggcttcctggacagcctatgcaggtggaggggctggagaggcatctgtagtgcatttttcatcacctctggttatccatttgcctgacctttcctg

SEQ ID NO: 204173 - DNA, 201 bp, Homo sapiens
gtttgagtctagaaccagaaagtctggaaattgcagggcagtgccgcagtgccttggctgtgaagcagggtgctttaccctccctgaactccaggcacttygtctgtaaaatggaattaatactagcttttttttttgccagggttctgaggattagggttaatgtgtatgaactagctgacccagagaggctcacatctg

SEQ ID NO: 204174 - DNA, 201 bp, Homo sapiens
cccaaagtactgggattacaggcgtgagccactgcgcccagctccaaaagcaggctattttcaacacaaagcctacacgatcacccatgcccccttccccrggtagtcttaaggttgccaaggtcggttttgtttgttttggaatgggggtggttatttcactgtcattcatggttctcatccctgtgcttaaccaaagag

SEQ ID NO: 204175 - DNA, 201 bp, Homo sapiens
aaaacatttaacattgtatcaattttcttgatattgaaatagctcaaaggtattaccattttctccatagctattataataccttcataccttattgccayttacacatcaggtagttataagaatacaggcttgcagggctaaaatactttgattcttctacttttaccagactactttaaatcactaaagaggatatat

SEQ ID NO: 204176 - DNA, 201 bp, Homo sapiens
cctccggtcccctcccggtctccgccaccccgcttcggggcccccgccccccagccgggcagccaatcggagctgggatcccgccccggtccgcaaagcckgtggcgcccggaggctgcacggagagcggtgcccgcgtcaggtgaggcgcgcgcggggaacgggggtcgcgcgcaggggagcgggggtcgcgcgcggctt

SEQ ID NO: 204177 - DNA, 201 bp, Homo sapiens
aaagtatcagaagggaaattctgtagccagagagctaaaaattacaatagggtctctaattatacttcaacttttttaggaataattctcagtgtgttttcccacatttcatatgtaattttttttttttttttttttttgagacagagcctcgccctgtcaccaggctggagtacagtggcgcgatctcggctcactgca

SEQ ID NO: 204178 - DNA, 201 bp, Homo sapiens
ttctgtagccagagagctaaaaattacaatagggtctctaattatacttcaacttttttaggaataattctcagtgtgttttcccacatttcatatgtaattttttttttttttttttttttgagacagagcctcgccctgtcaccaggctggagtacagtggcgcgatctcggctcactgcaacttccacctgctgggtt

SEQ ID NO: 204179 - DNA, 201 bp, Homo sapiens
taatcaaatagtgaaactttccattaatggacagtgtatacctttttgtgtatttaaaaaaaaaaacactgaatatagtgcctttgtgacaggggagcttrgttcctgacaatgtcctcttgagtcttttttttttttttttgagatggagtctcactgtgtcgcccaggctggagtgcagtggcgccatcttggctcact

SEQ ID NO: 204180 - DNA, 201 bp, Homo sapiens
atggacagtgtatacctttttgtgtatttaaaaaaaaaaacactgaatatagtgcctttgtgacaggggagcttagttcctgacaatgtcctcttgagtcttttttttttttttttgagatggagtctcactgtgtcgcccaggctggagtgcagtggcgccatcttggctcactgcaacctccgccccctgggttcaagt

SEQ ID NO: 204181 - DNA, 201 bp, Homo sapiens
aaacactgaatatagtgcctttgtgacaggggagcttagttcctgacaatgtcctcttgagtcttttttttttttttttgagatggagtctcactgtgtcrcccaggctggagtgcagtggcgccatcttggctcactgcaacctccgccccctgggttcaagtgattctcattcctcagcttcctaagtagctgggatta

SEQ ID NO: 204182 - DNA, 201 bp, Homo sapiens
taagagtacagtcagcctgcctgctgaggagggaccaccagggaccaccatcagcaagggatccaatgtctttctgcctctgcagaatgaaggttggggcrcggggggcgctctacttcttagggatattgtgggaataaaaggaaataggcaaaaaatgtttttgaaaaacaaagcacatactgcgcacccgtgggccac

SEQ ID NO: 204183 - DNA, 201 bp, Homo sapiens
taaaaaccttcagttaaccaagccagacaccaagaaagttaaaccgaaagagaaccccccaccccccgcaaaaaaaagaagtaaagtgggttaaagtgathtgttagcacagaaagagaacataagggtcatctaagttcatctgccccctcttctatttcaaggtgcagaaactaaggcacaagggaccccgtgtcctgc

SEQ ID NO: 204184 - DNA, 201 bp, Homo sapiens
atggcaggtcctgccagtcactcacagctctgtgagcaactagctggggtaccccagctgaatgtgctttaaaaacagcaatgtggccaggtgcagtggcycatgcctgcagtctcagaactttgggaggccgaggcaggaggatcacttgaacccaggagttcgacgttgcagtgagctgtgatcatgcgtgccactgca

SEQ ID NO: 204185 - DNA, 201 bp, Homo sapiens
gtgaggcggattagctgcaggacatggagattttccagacccagggcagggagagccatctcccaactgagaactgtgcttagggtcagccccataagatmtcaggttgggatgggtctgggaactgaagcttgctgggcctgcagctgggatgcacagtaggttggcctgggagactggaagacagaggcaggagggtga

SEQ ID NO: 204186 - DNA, 201 bp, Homo sapiens
ctctctggtctcccctcatctcctcttgtcacccctccttccttgctacccctgctcacctgtttgccccctccttcgtcttaatgctgagggtccggagyggcttcttggactattctttgaacatactaaattgcagtcctccagaaactcagctaggaagaaaaaaaagtacatatttcttattgccttgcttgtccc

SEQ ID NO: 204187 - DNA, 201 bp, Homo sapiens
aagccactgatacatagtggaacctcatttcaaaatctgtcttcatccttgaaaatggtaatataatgagagtacaaaccattaatttgtacaagaaactgtgttaagttaagtaagttaagtacaagtaactgtgatgtgcattaatccatatgacaatcctataaagtggtattcactacccccattatacagataaac

SEQ ID NO: 204188 - DNA, 201 bp, Homo sapiens
gaggcaggagaattgcttgaacctgggaggcagaggttgcagtgagctgagatcaggccactgcatttcagcctgggcaacagagcgagactccttcttgaaaaaaaagaaaagaaaaagaaattatgttaactctgtgacctgatttttttcctgtgttttcttatgaaagttttcgggcatattgtgaagttgaaagaa

SEQ ID NO: 204189 - DNA, 201 bp, Homo sapiens
gtaagggaaattgaaccttgaaccttaacccaaaaccatcaagatgggaaataccccaagcaagacagggagcaagataaataaagatggtaacaaagatrtcatcctggatggccccctaggtctcatgttaaaatactggaaggataatgaaaggactaaacataggaaaaagcaacaaatgataaaatatttctgttt

SEQ ID NO: 204190 - DNA, 201 bp, Homo sapiens
gtgtcctgcccccgccagtcagcaccactcatcccggatcccacctcacctcccgggtcagtcttaggctcggcctgtcttgcccctcgtttcctcgtgtggaaacctggctggatgcacacccagattgctgcacgctgtggtctcatcattccctgcacccatcagaagaacgcccctcaacctttttagcacctcatt

SEQ ID NO: 204191 - DNA, 201 bp, Homo sapiens
tgaaataggcctacagattactacaaacagctgtataggattattggccattaagggccagctgaaatgagttagtaaacttaagaaagttcaataaccaragagtcaaaaggagaaggtgatagtaaatcatgaggcaggtggggtctggatagaataggaatggagagggaagaaatttggtctaacatggcgtgggcc

SEQ ID NO: 204192 - DNA, 201 bp, Homo sapiens
gattcgtgtaactaaaaatgtagaagacacagtaagctcatcttacatagagaccctgttgattccataggcagaagttagcccctaggtctgtcttgccraaaatgataagctccaattgtttagcagagaaacaggggagggtatcgtcaggctgtattcataagaggtactgttttgaacactaaccaaagcaagaca

SEQ ID NO: 204193 - DNA, 201 bp, Homo sapiens
ttttttttttttttttcatatgcagtctctttgaagaagagattatgtcctacgtccccctgcaggctgccttccaccctgggtatagcttctctccccgmtgttcaccctgttcttcacctcagaactccccaggtaacaggaatctggcctaatagctcctgttaagtggccacgtgtgtttcctccagtgaaggtgaa

SEQ ID NO: 204194 - DNA, 201 bp, Homo sapiens
ggatgtcgcactcagagttagtatcattcagtactgccgtaggtctccagactagagtatcttttagtctggttcctccaagttgtagcattcagaagtcyctcttagaggtagttgtgctcgtcgttaaaatatgttttcaagatagtatctccctgttgtcacttcctccaaacaagtgtaccaacagcattgttaagg

SEQ ID NO: 204195 - DNA, 201 bp, Homo sapiens
aattacattcaccatgagccatctattcctgcacttataccgtagaacttgttgaaatatcacaagctctccagccctgtacagtcttctatccttccatrcccaggcctctatttccatcattctgttccttcattgctttgggacactcagtcattcagcccctctctgcattcctagctatgtcactcctcccacatg

SEQ ID NO: 204196 - DNA, 201 bp, Homo sapiens
ccaggctggtctccaacttctgagcattcctcctgcctcagcctcccgaagtgctgggattacaggcatgagccaccacatccagccccatttttattttyctttaacaatgtctttaacatttctccagatgatcaaggtctacatgaatgactcatagtttccttgaccactccaatctctttgaccttcaattacatt

SEQ ID NO: 204197 - DNA, 201 bp, Homo sapiens
agtctcgctctgtcccccaggctggagtgcagtggggtgatctcggctcaccacaacctctgcctcctgggttcaagcaattctcctgcctcagcctcccragtagctgggattacaggcgcatgccactatgcctggctaatttttgtatttttagtagagagggggttttcccatgttggccaggctggtctccaactt

SEQ ID NO: 204198 - DNA, 201 bp, Homo sapiens
atggatccccttatttactctgccacagccagtaaaactctttctacccacggcacaattttccttttataatatcaacaataaaagcagatcaagttagkaaaaattgcaaagtttattgtcacacaaaaagtatagattacaatctgggagacttcaaaccaagtggtaaaaagctccactaagcagttacaacacagt

SEQ ID NO: 204199 - DNA, 201 bp, Homo sapiens
gcgttctcggctcaggatctcagacgctgaaaccacttgtgttctcatctagggccttgtctggtgaaaacattgtttccaagatcattcaggttgttggyagaattgagatccttgctagttattggccagagcagtccatgacacctgaccctctccatcatcaaagccattgatggagaatgtcccttgcattgaatc

SEQ ID NO: 204200 - DNA, 201 bp, Homo sapiens
aaattccaccttatggtcttcccaattcaaagcaaatatacaattctctgttggcagtctgcgctgcagtcccctgggctaggaaaccccgtcgccacacmccctggttgagaggcatgcaacagtgatcccacccgctggttgagagtggtccttgctgcaaagtggtccttgctgcaaagtactcgagactcagatttc

SEQ ID NO: 204201 - DNA, 201 bp, Homo sapiens
ctctcaaatgagagttttgtggacatagaactctaggttgacagttatttttccctcagtactttgatgtataactagacacaaaataacagtttccccarctatgatcaatataatgtcagtcaaccatatactacacacacaacacacagagggaggtgccacagtcaaatatggaagcactgcatactatcttgcaaa

SEQ ID NO: 204202 - DNA, 201 bp, Homo sapiens
tatacaattctctgttggcagtctgcgctgcagtcccctgggctaggaaaccccgtcgccacaccccctggttgagaggcatgcaacagtgatcccacccsctggttgagagtggtccttgctgcaaagtggtccttgctgcaaagtactcgagactcagatttcttccctggttgctcatgattgatccggtgggcatcc

SEQ ID NO: 204203 - DNA, 201 bp, Homo sapiens
caggttttctatttcctcttgaattaattttaaaatttttattttctggaaaatattcattatatatgctttctatttattttcagaatgttttcatagtwatatacccaaaatatatgcaaaacgtggaagctgtatctccaaaatatatagagagaacaaccatagtttttttatatctctactatctctttttattaa

SEQ ID NO: 204204 - DNA, 201 bp, Homo sapiens
tgctgcaaagtggtccttgctgcaaagtactcgagactcagatttcttccctggttgctcatgattgatccggtgggcatccaacctgagttagaacagtyagagaatcatgctgaaaatttagacctaggtcagagggagtcaagttggtctctcttgcgcttgaactctggtatgtaaaccacaggaggtgttggcagt

SEQ ID NO: 204205 - DNA, 201 bp, Homo sapiens
ccggggggggtctcgaactcctgacctcagttgattcacctgcctcggcctcccaaagtgctgggattatagtcatgagccgccatgcctggccttgctcrtatttttaaacaccagcatcaaacagccctgaaaactgctctttctaggagcttggctttgtggggccgctagaaggatgcaaggcctttgaggagacaa

SEQ ID NO: 204206 - DNA, 201 bp, Homo sapiens
ctgcattgttgggactgggatgaggagagacagagtcaaaattttcttgctaacaagctgtctgatgggatgaggagggtatctggccccaattattgacsaatcatggggcacttaatgacctgagttttcctatgagcacaaaagtgccaaatctgaggtcacagaacatccttttacatctgtttatatatagataca

SEQ ID NO: 204207 - DNA, 201 bp, Homo sapiens
gccttagatgttagcagcgtcaagagtctttcaaagagtgtgagaaaaaaagctggctgttcatgcagttttcacactctgaaatgaaatctaccccaggmagacacaacaggttttcactagattttctaatatataagaagttagaaaatatgagaagaccaaacctgaaggcagtaacactgagtaaagcatggaaac

SEQ ID NO: 204208 - DNA, 201 bp, Homo sapiens
tgaaagaacaagactgaaaccatggacaccacttgcattacctgttttaaaacatgtgtttcatgtgattgaatagcccaaatagagttaatttaatatcmtttaaatcattaatatcatttgccataacatgtatggcaaagtgccatctgtatcagttaagaactagctggggccaggtgtgatggctcacacctgtaa

SEQ ID NO: 204209 - DNA, 201 bp, Homo sapiens
agacctctagggaagtgtgtgatgtaatccaggaaatggatcctccagcctaggctgagagcagatcagccttgggacctttaggggtacagaggagaggrgaggcttcctactttcagatgatgaatagaaaacaaaggctacactggctgtccctactatccagacttctagggactttctctttatagtctaatttta

SEQ ID NO: 204210 - DNA, 201 bp, Homo sapiens
gtagagacagagtcttgctatgttgcccaggctggtctcaaattcctggcctcaagtgatcctcccgcctcagcctcccgaagtgctaggattacaggcasgagacatcacacctggcctgttattaatttctttgttcaaacttctgagagagacatggtacaatagccaagtaactagaaacatgaggaaaaagcagca

SEQ ID NO: 204211 - DNA, 201 bp, Homo sapiens
ggaagggaagccttacagagcacagcctaagcaaaggtgcagaggtcggattgagaaaggctcacagagagacagtgactagttcggtctgagccaagcarcaggttcccgcttgctgtgccttggttttcagaaaactttagtgctgcatggaagagttggaacttttttaagggaccactgaatgaatttgaggaaagt

SEQ ID NO: 204212 - DNA, 201 bp, Homo sapiens
attacaggcacgagacatcacacctggcctgttattaatttctttgttcaaacttctgagagagacatggtacaatagccaagtaactagaaacatgaggraaaagcagcagaaagtttatttctgagtttgatattaaataagttggcatttactgtatagaaaaaaatcccacaattagtggctgaaactcacagccat

SEQ ID NO: 204213 - DNA, 201 bp, Homo sapiens
ggcaatttgagctgagctcagctgggtggttcctcaggatgctgctgggctcacctgtccatcgtgggtcagctgcggagtcggccacaggctgacctgaratggctgccactagggtggcttgttcctgctcctgtggcctggtggcctctcatcttgcagcaggcttgcccaagctcattctcatggcagtggcagggt

SEQ ID NO: 204214 - DNA, 201 bp, Homo sapiens
gcaacaaagtgagacctccatctctacaaaaaataaaaatttaaaaatgttagctctgtttggtggcatgcaccagtagacccagctacttgggaagctgrgatgggagaatcacttgagctggggaggtctgcagtctagcctgagctatggagcaagaccttgtctcaaattaaaaacaaaaaacaaaaaacaaaaaaa

SEQ ID NO: 204215 - DNA, 201 bp, Homo sapiens
cagctgtctctcttagccctattgtgctggaggcctgctggggatcgtgctggtctccaggggctcagatctagacatgcaggctccgtccctgcatgccraggttctggcattacactggggagacaagcatgtacttctttttgtgctttgtgtgaaatagtaagaggaggagccctagcctgaccttggggcaaagac

SEQ ID NO: 204216 - DNA, 201 bp, Homo sapiens
tacttctttttgtgctttgtgtgaaatagtaagaggaggagccctagcctgaccttggggcaaagacctaatcacctccaagttacaggaactcggccagttgggaaggaaggtctgggctcagggccaagtggcatacaggggtgggaaggggtgaggctggggtaggtgagacagaattggaaaagaaacattccaggg

SEQ ID NO: 204217 - DNA, 201 bp, Homo sapiens
aaagacctaatcacctccaagttacaggaactcggccagttgggaaggaaggtctgggctcagggccaagtggcatacaggggtgggaaggggtgaggctrgggtaggtgagacagaattggaaaagaaacattccagggaaggagcccagggtcagaggttctaggcagtttagacatatgcctgcagagcacacagagc

SEQ ID NO: 204218 - DNA, 201 bp, Homo sapiens
tgctttaagtagaaaaagcattccgattaggcttgcattctagaaactgcattctggcagaagtgtggcgagaagactgtaaggtgctgatattagaggcytgagaccaccaagaaactatggcataaaaacaggtgagaaacaaagaacacctggaatgagaaaaatggaaggggctgattcagaaagaggcttaggagg

SEQ ID NO: 204219 - DNA, 201 bp, Homo sapiens
gggacactcactcttaaagccctgagacagctgggctgggagaagccctggctagctgtgttcggggctgtgtgacaagagcatgctggcaggcccagagyttccagccatcctcaaccaggcaagaggccacatcatacgtctagccctagctgctgtcaatggcaacagcatgtgagaaccgcaggagaactgccatgc

SEQ ID NO: 204220 - DNA, 201 bp, Homo sapiens
gtgttcccattgttcaattcccacctatgagtgagaacatgtggtgtttggttttctgtccttgcgatagtttgctcagaatgatggtttctagcttcatycatgtaagatcggggtggggccaggcacagtggctcacacctgtaatcccagcactttgggaggctgaggcgggcggatcacaaggtcaggagatcgaga

SEQ ID NO: 204221 - DNA, 201 bp, Homo sapiens
gctgagattacagacacacatcactacgcctggttaatttttttgtatttttagtagagatggggtttcactatgttcattagccaggctggtcttgaackcctgatgtcagatgatctacctgcctcagcctcccaaagtgctgggattacaagcatgagccacagcacccggcctttagaggatacttcttgatgccga

SEQ ID NO: 204222 - DNA, 201 bp, Homo sapiens
gggactgttaacccattttgatctccatgagatggatacagatccccaggcatgcgcacaggccacattcttgaaatggggccttgctctaaaggcctgtkgcaggtgtgtgtggcgagaggccaaatttggcaggcaagaatatggggcagacaagggacactgacctaactaagattctgtgtctggacctgcagccag

SEQ ID NO: 204223 - DNA, 201 bp, Homo sapiens
cagatttcttccctggttgctcatgattgatccggtgggcatccaacctgagttagaacagtcagagaatcatgctgaaaatttagacctaggtcagaggragtcaagttggtctctcttgcgcttgaactctggtatgtaaaccacaggaggtgttggcagtgagagaggagaaatgagcttagaggagccaaagggaga

SEQ ID NO: 204224 - DNA, 201 bp, Homo sapiens
ccgattggctagcaacttagaactttttaaaaggggcaaaggcagaggagaacaaagcaaggaggaagtaacttgtggaatgctgagaaaggtaaaaacamcttcaaataaggaagaggaacaggctatgacctaatgcttacttggaccaatataagcatgccagggcaaatatttaggctaaattgtgggagctaagaa

SEQ ID NO: 204225 - DNA, 201 bp, Homo sapiens
aaaggcggctgcggtcacttcaggagtgtggcctgtgctcatccctggggaacagtacatgggctgcaaggtccgacccctgggctgttgtttggggtaargctactgtcctgagtagaggaataacactaataataccagcagctaaacttctttgagccatcccaatgtacctggcatcatgctgagcaccttaaatat

SEQ ID NO: 204226 - DNA, 201 bp, Homo sapiens
taagaagttttccacccttttctgatttctggaactgttgaaatagcagaaaggtttactgtccttgagtttttgaaagaacatgtctttaaaaatatgtrtatccagtcccagtatcaattttggagatagtcctttctcctcaaagtttcctacttggcactgtggttatcggtctatttaagttttctacatcttcct

SEQ ID NO: 204227 - DNA, 201 bp, Homo sapiens
gggttttctctttgtctttggttttcaagttggatttcggcattcccaggcatggtttttgtattagtttcctagagctgtcataacaaagtcccacaaawtgagtggcttaaaactacaaaaatatattgtttcatagttctggtggccagaagtccaaaatgaaggtgtgggcagagttgtttccttctgaaggctcta

SEQ ID NO: 204228 - DNA, 201 bp, Homo sapiens
tctcttcagagtcaataacactagcatgttatttcatggaaaaagaatcaactacttcaaacataccaatttgaagtgtttttataaatatatttattctrtggaatcagataatctattcattttaacatctttatagcagctatagagtaggaaaccctctgagtctaaaaagagccacataaaaggcattggagatag

SEQ ID NO: 204229 - DNA, 201 bp, Homo sapiens
tttatctactgaatttttaggtacacagctttgcgttacttcctttgtagttgctttagggaccataaaataccttcctatattttcatgatctacattgrgttaattttgtaccactttacataaaatgcagtaactcttcaacaatattacctgcatttatccacactcgtgatctttcttgttatagttattatatat

SEQ ID NO: 204230 - DNA, 201 bp, Homo sapiens
ataacatttaaagggtcaataaggcactctgggttctgcccggaacacaatggcattgccattcctgtattctctggtctgtgcagctcaaataattaagrcttctaaaccttcaccttcctgtattatccagttagatgaagatatagcagggccaggtgcagtggctcacgcctgtaatcccaacactttgggaggcca

SEQ ID NO: 204231 - DNA, 201 bp, Homo sapiens
ctgtgcagctcaaataattaaggcttctaaaccttcaccttcctgtattatccagttagatgaagatatagcagggccaggtgcagtggctcacgcctgtratcccaacactttgggaggccaaggcaggaagattgcttgagtccaggagtttgagactaccctgggcaacatagcaagacctgtctctacaaaaaataa

SEQ ID NO: 204232 - DNA, 201 bp, Homo sapiens
ggaatgcaatggcgcactctcggctcactgcaacctttgcctcccaggttcaagtgattctcctgcctcagcctaccgagtagttgggattacaggcatgygccaccacgcccggctaattttgtatttttagtagagacggggtttctccatgttgattaggccggtctcaaactcctgacctcaagtcatctgcctgcc

SEQ ID NO: 204233 - DNA, 201 bp, Homo sapiens
aggagtttgagactaccctgggcaacatagcaagacctgtctctacaaaaaataaattagccaggcatggtggtgtgcaactgtggtccctgctactcggragactaaggcgagaggatcacttaacccaggaggtcaaagctgcagtgagccgagatcgcatcactgcattcagcctgggcaacagagtgagactctgtc

SEQ ID NO: 204234 - DNA, 201 bp, Homo sapiens
tttcaggagcaatctcttacccagctccactcctgactgtcttagctacctgaggacctaactttgctgtgttcctcagcttctgtacctgtgcaagtctrtagaaaagccatccctcatagagcatcctgagagcctgtgatacaaacttagaattctgcaaaatacataggacgttaggacattgctattcagcagtat

SEQ ID NO: 204235 - DNA, 201 bp, Homo sapiens
gatgtgagaaagaataattgcctactgagaagacgctaagatcagtagacataggtcatgaatgttgataattttactaaaatcatagggtcccagtggargcttcttggaggtatttatgggtttgaaattctttcaccttggaccagtggctttagcactgtggacactggcttctgcatcttactgtaaaatatggct

SEQ ID NO: 204236 - DNA, 201 bp, Homo sapiens
tcccgagtagctgggactacaggtgcccgccaccacgtctggctaattttttgtatttttagtagagacagggtttcaccatgttagccaggatggtctcratctcctgaccttgtgatccacccgcctcggcctcccaaagtgctgggattacaggcgtgagccaccacgcctggccaatgaaattctttaatatgatac

SEQ ID NO: 204237 - DNA, 201 bp, Homo sapiens
aatacaaaattagccaggcatggtggcaagcgcctgcaatcccagctacttgggaagctaaggcagaagaatcacttgaacccaggtgcagtgagcagagrtcgcaccactgcactccagcctgggcaacaagagtgaaactccgtctcaaaaaaaaaaaaaaaaaaaagagagagagagaaagtatttgacatgaaatat

SEQ ID NO: 204238 - DNA, 201 bp, Homo sapiens
aaatgtggggggcatcagagaatacagacatcactagactatcacattctaccaaaatggaggtctggaaggaagatcaaggtggttagtatacagtcttyctcatatccagatgatcccaagtggggagctcagtgtgcctcctataaaaagctgtagagaaagtcacattaaaagaaaaggcaacacaggatttcaatc

SEQ ID NO: 204239 - DNA, 201 bp, Homo sapiens
ggcatatgaaatactctatctctataccgagtctagaaatttggacctacagacacagccttttcttggaacttctgttcttttcttcatatttaccctcraaaagaagaggcttattttacaatatgaattttctataacacagaacataaatttctggtgaaaattaaacacttaaaacctgcctaacccttcaacaat

SEQ ID NO: 204240 - DNA, 201 bp, Homo sapiens
taaacacttaaaacctgcctaacccttcaacaatgaaaaggttaagtattaaaataatatgatgaaatatttttcagaaggggaagagtagattatgtcarttctttttaaacagtcaataatagaagggaaaaggcagaaagagttcaggaacatgcagaaaaaagtagtcaaaataatccacaatcaggccttaccctt

SEQ ID NO: 204241 - DNA, 201 bp, Homo sapiens
gatttctctccctttgctatgtgagaacacagcaagaaggcagccatctgcaaaccaggaagagagcccttagcagaaacctgatccaccagcaccttgayattgaactttccagccttcagaactgtgaggaataaatgtctgtagtttaagcaactcagtctatgatatttttatagcagtccaaaatgacttagatac

SEQ ID NO: 204242 - DNA, 201 bp, Homo sapiens
ctctgtgcagaccatgactttttcttttcttgtttattttctcttatttcattttaaattcaaggggtacatggcttgtttgttataagggtattacatgmataataatgaggattgggcttctaatctacccatcacccaaatattgaatattgaactcaataagtaatttttcaacctttatccctctcccaatctccc

SEQ ID NO: 204243 - DNA, 201 bp, Homo sapiens
tgttgaccacttgtatttcctgttttgcaaaatgtctgttcatgccctttacccagtttttaatgtggttgtttttttcttgttgagttgtttgagtcatstgatatagactcatctctgagcctacccagacaaagatatatttgagagccccaaggtgacatctctaggtcagtcaagtggccaagagccccaaggtga

SEQ ID NO: 204244 - DNA, 201 bp, Homo sapiens
cagcaaattctaaacctacagacattatagtttcatgaaatcccacaccaatggagcacaatgtctttttttttatagaagacactcacttgctgtgaagrctgcatttgcagtgtcaggggccccttagaaggaacaaacatccagttcctgcaccctgaatctgaatcaactgcaactgggagaagcaactaccaattg

SEQ ID NO: 204245 - DNA, 201 bp, Homo sapiens
ctggattgttttcttatttccccttcttgacttgtttttggattatttgaatatattttagaatttcatttcaatttatctactgaatttttaggtacacrgctttgcgttacttcctttgtagttgctttagggaccataaaataccttcctatattttcatgatctacattgagttaattttgtaccactttacataaa

SEQ ID NO: 204246 - DNA, 201 bp, Homo sapiens
gctcaccaccccttctccttctcaggctcattattcgccgggatcatttgttggagggaaccttcaatcaggtgatggcctattcgcggaaagagctccarcgaaacaagctctacgtcacctttgttggagaggaggggtgaggcaccaggagttttatgcagacacctaagcaagggtgggccagagcctcagggtcag

SEQ ID NO: 204247 - DNA, 201 bp, Homo sapiens
cacagagacctactccagtgatctaggattagggacttttgtggcacagaaggcactagactcagtgatgatattactgctgctcttgtcgttggcctggkagacactgctgggataccctgcctccagcctgaatgcttgggataggcttagaaagtactcagctggttccatccaggataggggactgcagcgtcagtg

SEQ ID NO: 204248 - DNA, 201 bp, Homo sapiens
ctcagcattttgctaagcaggttacttgcaaaatgctcaggaagtcaatgctccgacaagcatttaaatcagtaaaggcacttacatctggaggtggccaratctgtatggccagttcttcctagcagtgacctcgttctgtcttttatgtggctggcaattttaaagagtgatgttcattcagcttatctcttaccatat

SEQ ID NO: 204249 - DNA, 201 bp, Homo sapiens
gactgagttgtagagattctctgtgtctttattgctttctatgtctagctgttctatcagttgccacaagaagcatgtttaaatcctttactatgttcatrgaattgtctgtttctctaattctgtcaacttttgtttcatgtattttgaagctctggtattaggtacttgcatagttatgtctatgcatcatgtttataa

SEQ ID NO: 204250 - DNA, 201 bp, Homo sapiens
ttgtctgaaaacatcactatttcacctatagttttgaagagtaatttcacaatatatatagcgggaactcaaagttaggtgtttttctctttagcacttasgaatgtcatttatcttctgaaaagtcaatggttagtctttttgtcattcctttgaaggtaactatcttcccccatcttatgcttctaagacttttatctt

SEQ ID NO: 204251 - DNA, 201 bp, Homo sapiens
aggcacttacatctggaggtggccagatctgtatggccagttcttcctagcagtgacctcgttctgtcttttatgtggctggcaattttaaagagtgatgytcattcagcttatctcttaccatattgtgattctatgtaactcttccccactatctgcaagcacaactgccatatgggctccatactcaaaccctccacc

SEQ ID NO: 204252 - DNA, 201 bp, Homo sapiens
ttcttgtttttatcctacggcttatcctgaagcttaatgagaagctattatcttctcaaaagttggctttaccccattctctggaactccaattacatacrgtggatcattccattgtgtccctctgttcctttttctctatgtactttctcccctttctttcctctaccttctttcaatccggatattttcagtcgacct

SEQ ID NO: 204253 - DNA, 201 bp, Homo sapiens
ccacggtctgaaaaaggttctggaaaaatgactcgagtctgctacatggctggaagaggaggcttcctttagtccctaacaagcacacagggattgttcayggtaaagcaaaaggacaagaacaggtgcctcccttgtgtcatcaatgagaagattccttaagcagcttaagatgaatgctcaaacacatcaaataaaagt

SEQ ID NO: 204254 - DNA, 201 bp, Homo sapiens
ccatgcaagggaaagtctggctggctctgatatttctcacaaacaagacatccagagggaggtgatccaggcggtgccgctgctgagtgagcccccagggmtcccagctctccgggcctgccactgcaccatccttagcagatggcctcatcctcctctgttaaagcctcaagtccaaattccaggcaggaagaaagcaac

SEQ ID NO: 204255 - DNA, 201 bp, Homo sapiens
gaatgtttggaaaatccagcactatcagaatgttttttggctaaaaacgtcaactagaattcactttaagttctgaaatgatttctgaagctttggttaasactgattttgttctggcagaatactggcaaactctccccagccctctgctctgggccacctcccttccatcccacgtgctgcagttggagttattgatct

SEQ ID NO: 204256 - DNA, 201 bp, Homo sapiens
gctgggcagcttgctacagtattgaatagtctatgttgtctacaaaggcccttctccactcctaaaagtgttgcctttgccaggggttaggagggtcctcmaagttctctcctaaaggacatgtagaaagtcggcaccacttatttggccaggcaaggtagctcttagggaggctagggcaggtgaatcgcttgactccag

SEQ ID NO: 204257 - DNA, 201 bp, Homo sapiens
gagccctggactctgctgctcaatctatggctgtcatggtcttagaagggagccatgttctccaggggttgcaactcagggatcttgatcaagtccatccrgacagtactaacacacttttcattgcactgcatgcagtagcctcttctgattcagaacccatgccgcgagcaggacggcctttccctctgcccttcatgt

SEQ ID NO: 204258 - DNA, 201 bp, Homo sapiens
actccatgtcaaaaaaatcaaacaaaaaaacaaaagcacagactttgaaatcaaagaggcgggttcaaatctcatctctgatgtcaaccagccctgacaayctgtaagccttcattttctctttcttgtattaaggatataatctctaccttgcggagtttgtgttcaggattaaatcagaaaatgtattttaagtgctta

SEQ ID NO: 204259 - DNA, 201 bp, Homo sapiens
ggaatagagtgagctgggcaaggggttagcttggcacatccatccatggtggtgggtggtgagctggagccagctcatgtgagctgacagctcatgtgcamctcttcccaactccacatttagtgaaatcagccatcgagggagtatttacaccaagaaaattggcaaacactacagactggagctggaactggtgcctcg

SEQ ID NO: 204260 - DNA, 201 bp, Homo sapiens
tgttttcttatttccccttcttgacttgtttttggattatttgaatatattttagaatttcatttcaatttatctactgaatttttaggtacacagctttkcgttacttcctttgtagttgctttagggaccataaaataccttcctatattttcatgatctacattgagttaattttgtaccactttacataaaatgcag

SEQ ID NO: 204261 - DNA, 201 bp, Homo sapiens
cgagtctgctacatggctggaagaggaggcttcctttagtccctaacaagcacacagggattgttcatggtaaagcaaaaggacaagaacaggtgcctccyttgtgtcatcaatgagaagattccttaagcagcttaagatgaatgctcaaacacatcaaataaaagtgcaaactaaaatatttaacaatgtaaatttcca

SEQ ID NO: 204262 - DNA, 201 bp, Homo sapiens
cttcaggaggcctgcctggatttaaccccgccagagccaagctatgcttcctccccggagttttcacagcaccctgtgcacttctcttcaccacttgctcygtggtgatgagatactgcattgctgtgtctatctcccttcctagcttgtaaactcaaaatgaatgagtaccttaggatcttcctatgcacctggcacata

SEQ ID NO: 204263 - DNA, 201 bp, Homo sapiens
taagctgtcccccagcttgtgatgctcattctccaggagctcactctttttctttactcaggtcctgcatcatcccctcagcaatgttgacactccctggyacattcagaaggaattattctcccccctcatcacttccccaaaagaaacctggagcccaaattattggtgggagtttaagatgatatttggtggggtagg

SEQ ID NO: 204264 - DNA, 201 bp, Homo sapiens
atccaggcaagcagccttttatggtcaaattttctatataattctgggcttggaactagacactgtatctcattctaaaactagataaattcccttcttgygtgaaattaaatatattactttagtggaacacttacaaattccaagatcctatgctgagtgaaaggtgttctggacaagcaaggaggagggctatgctgc

SEQ ID NO: 204265 - DNA, 201 bp, Homo sapiens
aagctgtcccccagcttgtgatgctcattctccaggagctcactctttttctttactcaggtcctgcatcatcccctcagcaatgttgacactccctggcrcattcagaaggaattattctcccccctcatcacttccccaaaagaaacctggagcccaaattattggtgggagtttaagatgatatttggtggggtagga

SEQ ID NO: 204266 - DNA, 201 bp, Homo sapiens
ttgggaagctaaggcagaagaatcacttgaacccaggtgcagtgagcagagatcgcaccactgcactccagcctgggcaacaagagtgaaactccgtctcaaaaaaaaaaaaaaaaaaaagagagagagagaaagtatttgacatgaaatatgaatgattcagaaaggactttgactccaaaaaatattccattttgctgc

SEQ ID NO: 204267 - DNA, 201 bp, Homo sapiens
tcttctgacttgaaaatccagtatgtctttggttcctgggtggtctgctgttgaggcattctattaccacttacctatatgtataagaagattggtatcastcaatgctgtgcagttttgtggtgcagatgtgggtattagaggtctccagaaagctgctgggacacctgggatgcaggcactttcctgctgcatcaccac

SEQ ID NO: 204268 - DNA, 201 bp, Homo sapiens
tttctccagtgaactcacaaaaaatcaccttgctgctgcagtccccagcggtcaagttcatcaccaaccccgagttcttcactgtgctacatgccaattaygtgagtgccctaaaatgcagagggggcggcctggctcggcaagacccaaaacacagctttgtaaagtcatctgatagatctaaaagggtagaattttaac

SEQ ID NO: 204269 - DNA, 201 bp, Homo sapiens
aggaagggagaaggcagcaggtgatgtggttagcgaactagcaaggcccagatcatgcagggccttgtaaaccatttaagggctttgtaaatcacttaagsgcttttactctgaacgaaaggaggacattgtagagttttcagcagagaagtgacattgtctgcctcaggttttgaaaagtttgcccaagttgctgtgtag

SEQ ID NO: 204270 - DNA, 201 bp, Homo sapiens
atgaatcctaccaactgaatattgttaaataatctcaaatagtacaagaattaccttattgctgatattcattcattcaacaaatatttattgaatgtttrccctgtgctaggtactattgtgggtaagcaaaacaaagattcctgccctcatggagcttacagtctagtctggaagacagattagcaaacaataaaataa

SEQ ID NO: 204271 - DNA, 201 bp, Homo sapiens
cagtatttgtgaatgtctgaggggaaaccagttgtgtatttgagatctcctgtgctgtaactctcgccccatctagtgagccaccaggaaaaagggggtayaggttaccagaaacctctcatctagaagttttagtcctatctgagattccactgctctgcagtgcctggaaacattttgttttaaaatcagcttacttag

SEQ ID NO: 204272 - DNA, 201 bp, Homo sapiens
cagagtcatgaatgggagtaaggcccttataaaaggccttgagagagtgagtttgcccactaggtacagtagcaccaccacgatcacccccagctgtcacraccaaaaatgtttccagacattgccacaattctcctaggaggcaaaatcactctgttgagaatcactgttttcatgatggaagactggaaaaagaaaagg

SEQ ID NO: 204273 - DNA, 201 bp, Homo sapiens
caatagccccagggatcaaaaactctgtctgggggtggtgacagtaatcaacactgaaatgaaaacaaaatgcattttttgattgtttttgaatttagaaytggccccctgacacgtgaagtaagtatttcccctaaattaaagctacagtgtcgtctgttggtgggagtgtaaactagttcaaccattgtggaagacagt

SEQ ID NO: 204274 - DNA, 201 bp, Homo sapiens
agcaaaaggcaaacccaggtttcatgcctgctccaactctcagtagaacctgggcagctttcttaacctatctgagtctcagcctcctagttcaccaaaasgacataagagtgcctgatgtggtttgacggatgcgtctctcagaattcatatgttgaaacttaatcaccaacgtgatgatattaagaggtggggccttta

SEQ ID NO: 204275 - DNA, 201 bp, Homo sapiens
tttcccagtttaacccacataaatataataatgaacatagcctttccatgtgtttggacctggatgctgaagcctaacctgcatttcaggttgtagactcraggctggtgtccgtgtttgatgccagggagctggagctggtgatagctggcaccgcggaaatcgacctaaatgactggcggaataacactgagtaccggg

SEQ ID NO: 204276 - DNA, 201 bp, Homo sapiens
ttttgctatgctatcgtatttaaagacattaacatgggatttattcttctaaataacaaattagtcaagtaatatacagttactcatgtaaaaaatatatrtcagctatcacaattacttcaaaaagaagttgcaattaaccatttttcattcacataaccagacagctcagaatttagctattagagaagcatgagttta

SEQ ID NO: 204277 - DNA, 201 bp, Homo sapiens
tgcctgcatatttcctcctctttcttgttattctttatttttcctgccaggaatgtcctccttcttccctccacttgcacaagccctttgcacgctgctcrtagcttcacttcctttctgaagttttccttgcttctaccttggcacacatagatttctcctctctctgaatgcctcttgcatttgcagtcaatggcaaat

SEQ ID NO: 204278 - DNA, 201 bp, Homo sapiens
attcataaaaagaaatacaaatggatatactgccatataggatagactggcaggactcaaggttttatacaattaatgttgattatttctctaaaagtacwgctcttattgtttcctcttgctgaaactaaacactcttcagactcaatttatatcacattattctactgttacttaatctttttgagcatctgaagacat

SEQ ID NO: 204279 - DNA, 201 bp, Homo sapiens
gccaacacataatcagtgtttttgatgaagaaatcagaacaaactgaacagaaacagtaatagaagaaaacttccttgagctgaagataattttgagtatktaaattaaagaagaccatcaggtgctcagagaaagaaatgtatatgaagagaccaacacctagacaaatctcatttaaaaaggttttttttttttttttt

SEQ ID NO: 204280 - DNA, 201 bp, Homo sapiens
attatattcataggccctttggtctctaccaggcccttctactccttatctacacctatatgaggcaggaacattttaagtggagtctcagttgtttaaayagaaagcagacatctctgagaacatcacagaacataaagtccttttataaaatgactattttctaaatctgctcttgttctaaaacttgacctggttgca

SEQ ID NO: 204281 - DNA, 201 bp, Homo sapiens
acatattagcagatttaagttcattattcttaagaatgtttatacatagaggccgggcatggtggctcacgcctgtaatcctggcactttgggaggcgcargcaggcagatcatgaggtcaggagatcgagaccatcctggctaacacagggaaaccctgtctctactaaagatacaaaaagtcagctggtcgtagtggca

SEQ ID NO: 204282 - DNA, 201 bp, Homo sapiens
ttgcctctgccatgaagacatgggctcacagacctaccagaggaggaagccccaccaccaccccaacttggttcacaaagctactttataaggtgatcagsgttggttcatctcctgcagtccccaaacacatcatttttcttacatttattccaagacaaccattcccagcaaaggaaagtgactaggaatataaagtta

SEQ ID NO: 204283 - DNA, 201 bp, Homo sapiens
cagagtccctgagtcaatagttatttcatgtttgttattgtaaacaatttcacatttccttttcaaaggaaaatcattgaatgaactaaaatgactgaatratctgattcatcagtggattcaaaagtatccaattgttaggataagtctgtgatgttttagccaggaatgatataaccacattttgaagtgaggtctggg

SEQ ID NO: 204284 - DNA, 201 bp, Homo sapiens
ttattgtaaacaatttcacatttccttttcaaaggaaaatcattgaatgaactaaaatgactgaatgatctgattcatcagtggattcaaaagtatccaaytgttaggataagtctgtgatgttttagccaggaatgatataaccacattttgaagtgaggtctgggcagccatttgtttggtaatttgcctttctcactg

SEQ ID NO: 204285 - DNA, 201 bp, Homo sapiens
agagaccaagaaaggtagaaggaagaagaagatgaatagagattgattaatgggtacaaatatacagtttgatagaagaaataaaatctagtgtttgatasatcaatagagtgactgtaatttataataatttataatttgtaatttataatatgtttttatatatttatatgtatttataatatgtttccaaatggctac

SEQ ID NO: 204286 - DNA, 201 bp, Homo sapiens
tttcccccaggtccatgtagcagtagttgagcatatacaaggggaagtaaggaaaacctgggaagagaagcagctattcaactctttgtctaaacaaaacytcacatggggcacaactggcaaaacagataactgagccgctcaaaaatgctcattcatggaaaaaaaatcagtggaatccaattaagtctgttaactaat

SEQ ID NO: 204287 - DNA, 201 bp, Homo sapiens
attctccaggagctcactctttttctttactcaggtcctgcatcatcccctcagcaatgttgacactccctggcacattcagaaggaattattctcccccmtcatcacttccccaaaagaaacctggagcccaaattattggtgggagtttaagatgatatttggtggggtaggaagtacacttacagattcagagaatga

SEQ ID NO: 204288 - DNA, 201 bp, Homo sapiens
cccttctgtggtccctccctgattagcataataactaacctcctgaattctttttcaggtaaatcagggatttcttcttggtttggatccattgctggtgmactagtgtgatttttgggaggcattgacaagacttgttttatcatattaccagggttggtgttttctggttccttttcatttgggtaggctctatcagag

SEQ ID NO: 204289 - DNA, 201 bp, Homo sapiens
gaaaaacaaaacattttagcaacattgttttcaaatacctactagattctagataatccatgtaacaattgtgttctgaaatttccgaggaaggcaattgwttaattaagagagacctcagaagagctccttaatgccttgttcaggctcctctccagcagtttcctggaaatccctaaataataataagtggagatgcag

SEQ ID NO: 204290 - DNA, 201 bp, Homo sapiens
cagaatctcctgggaggtttcaaattacaccgaaaacattgccagagagagagactcttccccctccactgcccaggggaggctccattcctgacccatcygggtgtggctagaatggggaaaaggctgggacccaccacccgctgctgggaggttacatgggctgacccgccttgcctcctctcctcagccacgtgtgca

SEQ ID NO: 204291 - DNA, 201 bp, Homo sapiens
actcaaatatgagggtaagacagctctcagggccacaaagcagtgaaaaaaactctgagcagatggtaagagaatcagacttccatatccacaatgcccctccctcccctcaatctacctggcaccaagtgcatggaaaatttttccccaactcatgatttatacactggaaaaagtgaaatggaggtagacaaccagctt

SEQ ID NO: 204292 - DNA, 201 bp, Homo sapiens
gaacataaagtccttttataaaatgactattttctaaatctgctcttgttctaaaacttgacctggttgcacaaattgttttagacctctctaaaggccaycacaagagaaatcagatcaaaagcagcggttccgttcctatcatacctgatgtgtttgatctctctctccctcctcaccccttcctcttttctccacatc

SEQ ID NO: 204293 - DNA, 201 bp, Homo sapiens
tcagagttaagaaaagcatggtctagcctgaggatgtggtctctgaactgatggctgatctccatttcttggtgtcagccattgatgggaataacagacakaaaggaggagggagaaggccctctgatgtgaagaaggctaattgttgtcaaaatgccagggatttattctaggtcccattgctccatgcatagaaagcca

SEQ ID NO: 204294 - DNA, 201 bp, Homo sapiens
ctcccacccacaactcctggcaactaccattctattttctgtttctatgaatttgactactctagatacttcatataagtggaattatacaatatttgttyttttgtggctgacttatttcacttagcataatgtcctcaaggctcatccatgttgtagcatgtgtctgaatttacttcccttttaagactaaataatatt

SEQ ID NO: 204295 - DNA, 201 bp, Homo sapiens
gtccacaacactaaggaatttggaagccctgattatgccatgaggactggccaccttcagagttaagaaaagcatggtctagcctgaggatgtggtctctraactgatggctgatctccatttcttggtgtcagccattgatgggaataacagacataaaggaggagggagaaggccctctgatgtgaagaaggctaattg

SEQ ID NO: 204296 - DNA, 201 bp, Homo sapiens
agatcacgtcattgcactccagcctgggcaacaagagcaaaactccatctcacaaaaaaaaaaaaaaaaagaaaaaaaaagaaaactactcatttaacttycctgccatgtactcactgaacaggcaaaatacactgttctctgtgcatgactacttttagcccatctttcacatatgccctattgtagagggtaagtttg

SEQ ID NO: 204297 - DNA, 201 bp, Homo sapiens
cttttccccatcagcagccgagtgttttaagtcattaacaaaaaccataaaagacttgcattggcagcacactttacaatcattctcaccccaacaaagcrtgttacagagaggaagtcctgataacccagttttactagacatgaatggaccaaaaatccatgggagagtcctttcatggtgattgcaacaagattcgtg

SEQ ID NO: 204298 - DNA, 201 bp, Homo sapiens
tttgtgttagcttttaaactggatcagggcaacatcttattgttcaggtttgccctctgcagccagcgtggtttctggcatggaggcagcacccttcaggwcctgaggcaggtgccacacagcaaaaggcaaacccaggtttcatgcctgctccaactctcagtagaacctgggcagctttcttaacctatctgagtctca

SEQ ID NO: 204299 - DNA, 201 bp, Homo sapiens
taaaatcatagggtcccagtggaagcttcttggaggtatttatgggtttgaaattctttcaccttggaccagtggctttagcactgtggacactggcttcygcatcttactgtaaaatatggctattgggtcagatgatctctaagcattcttctgacttgaaaatccagtatgtctttggttcctgggtggtctgctgtt

SEQ ID NO: 204300 - DNA, 201 bp, Homo sapiens
ttttttaatacatgcatttgggctccgctggcccattcagaccttcagagggagctagcacagtccttgttcattgtgtattttgtcagaatccttccaartcagggcttggattgccccagaacactgagatgaggtgatcctgaaaagaaggtatcctgtcttgatctctggccaagatctgctctgtgtacctccttg

SEQ ID NO: 204301 - DNA, 201 bp, Homo sapiens
caatctcttacccagctccactcctgactgtcttagctacctgaggacctaactttgctgtgttcctcagcttctgtacctgtgcaagtctgtagaaaagycatccctcatagagcatcctgagagcctgtgatacaaacttagaattctgcaaaatacataggacgttaggacattgctattcagcagtattggaagagg

SEQ ID NO: 204302 - DNA, 201 bp, Homo sapiens
gacagataatagacaagcttggggtttgtttttttaagccatatacagctgcataatatgttaagtgccatgaagaacatgattagaattcagcaatagtrgataatatgctggtgcagaggaagaggacttacatcctaaacagaacacagggaaggcttttccaggtaggtgatgcttaagctgaaacctgaaggatga

SEQ ID NO: 204303 - DNA, 201 bp, Homo sapiens
tcatggtaaagcaaaaggacaagaacaggtgcctcccttgtgtcatcaatgagaagattccttaagcagcttaagatgaatgctcaaacacatcaaataamagtgcaaactaaaatatttaacaatgtaaatttccacttaccgatttctctgccttgtctgtgttccaggttcaggtttagcggtcgcatcctgggtctg

SEQ ID NO: 204304 - DNA, 201 bp, Homo sapiens
ccttctttcaatccggatattttcagtcgacctatctcccggtttacgaaccctctttctgctctacctgatctcctgctaaacacatgcataaagttcckaatttcagctattctatttttcagtaataaaatcctcatttgattcttttctattggttttaattttctggcaaaggctgtacttaatatatccattttc

SEQ ID NO: 204305 - DNA, 201 bp, Homo sapiens
ggttggccaagtatacatatttaatgggttatagcaggagttatgaatattcacaaaggggttcctgaaatatgcatattgaaaaacatgtatgtaacatwcaacccaagttaacattagggtagagacttaacatttaaatgaattactattaggccgtatacatcaaaagctaaagcagggacatggaggcactcaggt

SEQ ID NO: 204306 - DNA, 201 bp, Homo sapiens
aaattacttctctccccaggtacagagctcctgccagccttcggggaaacctgctgaagagggcaaagtatactttgctatttgattttgagtgaccatcytttgggatggaattctttcctgtcacccaaagtattgtcattggagttattagggaaaggtgaaggtgaggtggctgtgagacttgcattgaaactatat

SEQ ID NO: 204307 - DNA, 201 bp, Homo sapiens
ttgttgtagattctggctattagtcctttgtcagatgtatagattgtgaagattttctcccaatatgtgggttgtatgtttattctcctgactgttccttstgccatgcaaaagctcttcagtttaattaggtcctaggtatttatctttgtttttattgcatttgcttttgggttcttggtcgtgaaatccttgcctaag

SEQ ID NO: 204308 - DNA, 201 bp, Homo sapiens
cacaattacttaacaaactgtattaagacaactgggtagccatctgtaaaagttttaagttagatccctaacctaactcatgacactaaataaattccagytggatcagaaacctgaatgtaaaaattttttaaaaaggaaaaaagagataatttttatttttaatcttgcactaaagaatgctgatacagatatggcaca

SEQ ID NO: 204309 - DNA, 201 bp, Homo sapiens
aatttgccaggcatggtggtgcacatctgtagtcccagctacccaggagtctgaggtgggaggaccacttgagtctaggaagtcaaagctgcagtgagctrtgatggtgctactgcatccagcctgggtggcacagcaagcaactcttaaaaaaaaaaacaaaaaaaaaacagcagagttgtggaggcagaatatgaacaa

SEQ ID NO: 204310 - DNA, 201 bp, Homo sapiens
tcattcctaattaactcattatttccaattcgcaccatgaaagctataggataaatgcctcatttttccaacccctctctttttcctcgtagtgattagcrtaagagccctgaaattgaggaccctgtgccttgtcttcaaggtggtaaagaaagcaggagctgtgcagactggaagctggcttggtgatggtggcatcag

SEQ ID NO: 204311 - DNA, 201 bp, Homo sapiens
aagaactgcaaattcaaaagcttccagggagccaggtcattatcacatgtcatcagatctaaaatgccatggactttcagaccaaccattgattttcataytgccaagctagaaaaacttcctaattttaattacaagacttatgagtggtgtactgcataatgattatcaaacgtgaagcagtgggtgcttggaatgaaa

SEQ ID NO: 204312 - DNA, 201 bp, Homo sapiens
gaaaactgagcattagagcaattgattgcctcaccctaacacagacagaggaggagctggcagagaaagggacatgctggctccagcctggctgcctcttmacaccatattgtacacctgcctgtgaccacctccgtaaatgctcccaaccatccatccactccacatccagggaattcaacatgcattcctgaattattt

SEQ ID NO: 204313 - DNA, 201 bp, Homo sapiens
ggaatcagatattagataatctgctaacataattcttaagatagaagtcagaggttaaaaaacaaatacaatataaataacaacattagcctgatttagarcatgtattatgtgacacttttatacacattatgccattccgttctcaggggaactcagtgagatacgttttattatgatctccatttgatgcaaaagaaa

SEQ ID NO: 204314 - DNA, 201 bp, Homo sapiens
gagtgaccatcctttgggatggaattctttcctgtcacccaaagtattgtcattggagttattagggaaaggtgaaggtgaggtggctgtgagacttgcaytgaaactatattattcttagggaggttttgatgactgatggtatttgagctgtaatatcttggtccatgtgtcagttgtgggatgctgtcatagcccaac

SEQ ID NO: 204315 - DNA, 201 bp, Homo sapiens
ttaacctaatttaatccttataatctgggaaaatgtgattgatacattcagtattaacacaagctaaccagaatgatgggtcaaaaaatatcacactttcraatgatcagttttaccacaactggtttttcattgaattgaagagcaatactaagtatgttatttgccatctctatatggtcagagggtttgttaagagtc

SEQ ID NO: 204316 - DNA, 201 bp, Homo sapiens
cctgcatgtttctgctgtcttctaattaaacccttccagaaattctgccccacccacttccccaccagcttcagctgtgtcacctatcatctcaagttgtragccctcatctcaggtccatggactctcaaatcagctcagatgagggaggaatgtgtccatcagttccctcatttgggccagctgaagggtgtagaagct

SEQ ID NO: 204317 - DNA, 201 bp, Homo sapiens
gcagtgctgccccagctcaaacaacttaccctacatgagctgccaacacttgcccctagatccagcgtgatgccaaagcaatcagggagatgttcctgccmcccctgcatgtttctgctgtcttctaattaaacccttccagaaattctgccccacccacttccccaccagcttcagctgtgtcacctatcatctcaagtt

SEQ ID NO: 204318 - DNA, 201 bp, Homo sapiens
caagttttagaacatgtggggatacatgtatctctgggtctctatggtgacttctatttagaaagcacatctattgtgggataaatgtggaaaaggagacrctggggctccaggcagttttacagaagaaattccctgcactgtgagttttaatcccagcacttcctgaatcctttctatgccactctgggtagtgcattc

SEQ ID NO: 204319 - DNA, 201 bp, Homo sapiens
gggatacatgtgctaaacatgcaggtttgttacataggtatacatgtgccatggtggattgctgcacccatcaacccgtcatctaggttttaagccccacrtgcattaggggtttgtcctaatgctctccctccccttgtcccccaccacccaacaggccccagtgtgtgatgttcccttccctgtgtccatgtgttctca

SEQ ID NO: 204320 - DNA, 201 bp, Homo sapiens
tccagttggatcagaaacctgaatgtaaaaattttttaaaaaggaaaaaagagataatttttatttttaatcttgcactaaagaatgctgatacagatatsgcacaaattctcaaagtcatagaagtcatctgacatagtcaaatattatttttaaatttctgcatgacaaactatactataaacaaattgaaagcaacat

SEQ ID NO: 204321 - DNA, 201 bp, Homo sapiens
aacctaaagtcagtttttaggggggaaaaatgcaacggccaataaacacacaaaagatgttccatcaagagaatgagaagacaaattacagactggaagamtatatctgcaaaatacatatttgatcaagggctagtattcacaatgtaccaagaactcacgaaagtcaacaatgagaaagcaatcaagccaacttttaaa

SEQ ID NO: 204322 - DNA, 201 bp, Homo sapiens
gtttattgcttattgtctgtttcttgtggcaggattttaagctttttaagaacagaaatctttgttttgctcattgataaaacatcaagggccaagaatcrtgcctagtatatagttggcattcaataaatctctgttgcaccaatgacttatagagttacctgagggaagaaaccagaatactaggtatagcaggaataa

SEQ ID NO: 204323 - DNA, 201 bp, Homo sapiens
agattctgctaaagttttacaaagtggttttacaaatttacacttccaccagcagtgtatgagagctccagttgttccacatccttgccaacacttgataytgtctttttatttttagttgtgaaagggtatgtagtagtattgcagtgtagctttatttgtatcttcctgatgattaatgaagtgaacattttttcatgt

SEQ ID NO: 204324 - DNA, 201 bp, Homo sapiens
gccccaggcttctttgcctggttcatccagccaaaaagatagtgagatttgtattggcattttagctgctctgtaccactattgcagtgactgtggcggcrttcagggcaaagatcccactgtgaagaattcattccatgcccgtctcttgttgcagtgaacaagttttagcaattaactgtgtagcaattagaaacaatt

SEQ ID NO: 204325 - DNA, 201 bp, Homo sapiens
acctcagatctcagttcagttctttaagccctaactgcaaactgatttcatttgccctgtgcgtgtatgattctgggatcagccataaacttgggctgagyttctatacatcgtttggggctctcctttggctctcttctttccggaattcctcctttactctctggtggtgctggttgccccaggcttctttgcctggtt

SEQ ID NO: 204326 - DNA, 201 bp, Homo sapiens
tgacagtgcctgtcctcgaaatgcaggttaaccgctgtgtcctttgttagaggacttggccccgcactaagcatgctgagtttcatccactgatgttctcmctcatgtggagagtatttgtggtgcatcctggaaacgcaattgcaggtagctttctgagccgactagcaatctaaactgagcccacggtgatgagatttt

SEQ ID NO: 204327 - DNA, 201 bp, Homo sapiens
aatcagagtgagtgttcagcagcaccatgccgtggaaagcttgttccatagatccccttggcatgagcccttagccagtttttccatagtcctgggataamccttttgggacctcctccattcaggatgggcagcaatctgattgtttactagaagtgaggcaaacctgggtttaatgtgccatctagtgtcaaaaaggag

SEQ ID NO: 204328 - DNA, 201 bp, Homo sapiens
taacatggatggaactggaggtcattatgttaagtgaaataagccaagcacagaaagataaatattgcatgttttcattcgtatgtgggagctaacaaagyggatctcatggagattgagagtagattggtggttaccagagaccaagaaaggtagaaggaagaagaagatgaatagagattgattaatgggtacaaatat

SEQ ID NO: 204329 - DNA, 201 bp, Homo sapiens
gaaacaaacctgtttttattattattaaaattttaaaggagcaagattatgaattggccagattcccttcagcctaatcattttataaaatcattttcacygatacaatttcaaagcagagttcttctaggtaaataactaggtttccttttgatatggttttttcgaatatcgtgctgaagttaaatttcatatgatttt

SEQ ID NO: 204330 - DNA, 201 bp, Homo sapiens
aaagtttggagaagctgtaggactgcatgatggtctgccatgttgtagagattgtcccagcctgataatgtgcctatgctttggtctacagactttgatamtagactatgatgttaacatcattatatgggagagatatcatattgcaaatagaaaaataagagtaaatgaagagttatttcctatatgagaattatttgg

SEQ ID NO: 204331 - DNA, 201 bp, Homo sapiens
gccaaaatcattaaattagagaagattcaagagcatcttccaaataacggggctgtgaggtggtgtcaggatttggaggagaaagcccagggctggggttraggacataggcagagggagaagaaggtgatgagagagatggggatgttctgttctctttgctgggctttcacatgttccctgctaaatgacatgtggaca

SEQ ID NO: 204332 - DNA, 201 bp, Homo sapiens
agcagtttcctggaaatccctaaataataataagtggagatgcagcagttcaacactctactttgctaaatggaaatacattataattacaatagtaaacrtctattgacctatcattctagtgccttaggccctgctttaataaatactttttgcaaatttgaatgtgaaaagacatggtttgcataagtagttacaaag

SEQ ID NO: 204333 - DNA, 201 bp, Homo sapiens
ccctgcactgtgagttttaatcccagcacttcctgaatcctttctatgccactctgggtagtgcattcctgatcaggaagcactgaagagacagttgtgcrtaggcgctatagtgagaaacgctgctgcaacagacagaagaaaagattgacccctattatcttttgctaataggatacgttcgaattataaagaagcttt

SEQ ID NO: 204334 - DNA, 201 bp, Homo sapiens
tatgcaaaacgtggaagctgtatctccaaaatatatagagagaacaaccatagtttttttatatctctactatctctttttattaatctgatgccttgatktattattataatctataaattataagtttgaaaaaaaggccctgaaagtttatggttgctaagctctctaagtctttgtatatttgaaaatgtttttatt

SEQ ID NO: 204335 - DNA, 201 bp, Homo sapiens
actgtggaaagtgtgtctgaggatgcggtgaagcaatgcctgtgatgctctcagcacttgccccacatggggtaactacccagtaaaagttaattagtacygttttgtgagcttttctataatgtttctctctgggactactccagctctctggttacaaaatacatagatttcaacatcatagagaaaatgcatatttgg

SEQ ID NO: 204336 - DNA, 201 bp, Homo sapiens
cccaggaggcggagcttgcagtgagccgagatcgcgccactgcactccagcctgggcgacagagcgagactccgtctcaaaaaagaaaaaaaaaaaaaatrgaagccccttcagaggactgtggaaagtgtgtctgaggatgcggtgaagcaatgcctgtgatgctctcagcacttgccccacatggggtaactacccagt

SEQ ID NO: 204337 - DNA, 201 bp, Homo sapiens
cctgagtagctaggactacaggcacatgccaccacacctggctaatatttttaaaaatttttaaatttttgtagagatggagtcttgctttgttgcccacrctggtctcaaactcctgggctcaagcgattctcctgtcttgtcctcccaaagtgctgggattacaggaatgagccactgtgcccagcctctttgagtttc

SEQ ID NO: 204338 - DNA, 201 bp, Homo sapiens
ttttctccaatcactattttcattcatggtgctcgtgttgtaattgtgtttgcctccctcctaaagggcagcctccaggggcagagatgtacctgcctgtmctcttcagagctgttccttatcacccaccagagcagtacctggcacacagcagacggcccataaaacatttgtatccaacaaacatgggttattccctgg

SEQ ID NO: 204339 - DNA, 201 bp, Homo sapiens
gaccctcagctccaagggtctttgttgtttgcatggctctaccaatagctaaacctagtgaatgtaagtctggcaagaaaagaagactaaaaaggcagaayttgcatttgttaagttgaatgatagatttcaagaatatagttatttggaaacatcttgcttttattttagagaaatgcagcttgagtcatcactgatgat

SEQ ID NO: 204340 - DNA, 201 bp, Homo sapiens
tcggctcactgcaacctccgcctcccaggttcaagcgattctcccacctcagcctctcaagtagctgggattacaggcctgtgccaccatgcttggctaatttttttttttttttttttttagtagagatggggtttcaccacattggccaggctggtttcaaactcctgacctcaggtgatccacccacctcagccttcc

SEQ ID NO: 204341 - DNA, 201 bp, Homo sapiens
tgaaaggcactttggtgatatcggttcatattttaaatcacatgcctttgactcagcacacatgtctagaaatttgtcctaccgatacattaacacctaawtaaaattactaatatattaggatcttcatcacagccttgttgatagttgaaaaatatctgtaacagtctaaatgtccagcagtagagcactggttaaata

SEQ ID NO: 204342 - DNA, 201 bp, Homo sapiens
cctcagctccaagggtctttgttgtttgcatggctctaccaatagctaaacctagtgaatgtaagtctggcaagaaaagaagactaaaaaggcagaatttrcatttgttaagttgaatgatagatttcaagaatatagttatttggaaacatcttgcttttattttagagaaatgcagcttgagtcatcactgatgatagc

SEQ ID NO: 204343 - DNA, 201 bp, Homo sapiens
agttctctactgtaccagttgtcagtgatatgtgactatgccaaatacagacattctcaagcacgtaaaaatagagaaattgcccacatgtcaaatatacratttcaggattgcgaaaattgtggatggcagaaaccggtagtgaataaggaaactaattacttataaagagatatgctgaaatgattgcaaggatgtatt

SEQ ID NO: 204344 - DNA, 201 bp, Homo sapiens
tatgcttcctccccggagttttcacagcaccctgtgcacttctcttcaccacttgctccgtggtgatgagatactgcattgctgtgtctatctcccttcckagcttgtaaactcaaaatgaatgagtaccttaggatcttcctatgcacctggcacatagtaggcacttgataagtttgttgaaattggaaacgtatgaac

SEQ ID NO: 204345 - DNA, 201 bp, Homo sapiens
tcatgagcaataaacagggtacactaacaacaataaagaaagaaaaacacaggtctaaattggcatgaaaaatgtctaagatatagttttaagagaaaaargatagtgaagaacagtgtgtaaaacacactactgtttacagggaaaaagagtttatgttgatcaggcacagtggctcatgcctgtaatcccagcactgtg

SEQ ID NO: 204346 - DNA, 201 bp, Homo sapiens
ggaggcaaggaatagggagaagggggcttccaggctgaagcaataacacaagcaagggctgagagcggggaatggcagcacgtgttcaggaaggtgcagcyggccagtgcagagggtaagatgcccggagcaacatcacaggggatgcagttgagaaagagtttggtgagccacaaacaaaagaccctgctgtctgggcgc

SEQ ID NO: 204347 - DNA, 201 bp, Homo sapiens
caaagagtgtgccttagtaataggacaatcatagattttgtctgcatactaagcatttgaaataggcctacagattactacaaacagctgtataggattaktggccattaagggccagctgaaatgagttagtaaacttaagaaagttcaataaccagagagtcaaaaggagaaggtgatagtaaatcatgaggcaggtgg

SEQ ID NO: 204348 - DNA, 201 bp, Homo sapiens
gcacctggcacatagtaggcacttgataagtttgttgaaattggaaacgtatgaacacactgcaatttccctcacattgaaaaaacaacaacccaaacctycatgtcatgccctcctccactgaccactccactgctcccctttagaggtgcattcctagaaagagttatctgtgctggctttctccactgcctctcctcc

SEQ ID NO: 204349 - DNA, 201 bp, Homo sapiens
tgtagatctataataatgtacagttgacccttcaaaatgcaaaggttagggcgctgagtcctgtacagttgaaaattcatgcataacttttgattttccamaaacttaactactggtagcctgctgttgactagaagtcttattaataacaaaaatggtcaattaacaaatattttgtaggttataggtattataaactgc

SEQ ID NO: 204350 - DNA, 201 bp, Homo sapiens
tgaaacttcctgagagagcaaagaatggtaagaaggacagtaaggagataatgggtccaaccttttgaccaacagtcacaggtatgtgacttagagaccaygggaaaaggaattactgaattagaagacaaactaaaacaaaatcatccccaacccagtggaaacagaagatgaaaatagaactttttaaaacccagaaat

SEQ ID NO: 204351 - DNA, 201 bp, Homo sapiens
tcatttccacactggttttctttcactggtgaagtaagatgcaaagagataaaattcccaaaccagcagagggcttaggcaacaatacatccttttttttaaaaaaaaacaaaaaaccttttgcagatatagttcacaaatttatcttttaaccaagtggccgtttctctggaaacaaagagtgtgccttagtaataggac

SEQ ID NO: 204352 - DNA, 201 bp, Homo sapiens
tacagtgtttgcccttttgtgcctggcttatttcagtgaacatagtatcttcaaggttcaaccatgttgccgcgtgtgccagaatttcctccctttttaargctgaatagtattccctagtatgtatatgctctattctgattatccattcctctgtaggaggatccacgggttgcttgatataggtatttctttgaggaa

SEQ ID NO: 204353 - DNA, 201 bp, Homo sapiens
ggggatgttctgttctctttgctgggctttcacatgttccctgctaaatgacatgtggacactgctgctccctttttcaacccagtcaaagaagccactgygaacaccccccaggttctggtgatgccatttcctgcaacggtgcttcacccgcactgaagttggatcagagtgcatttccctgtttaatcccattctgtc

SEQ ID NO: 204354 - DNA, 201 bp, Homo sapiens
tcaccgtctatctccaggacttttcatcttcccaaactgaaattctgtccccactaaacaccagctcctcattctccccatcctcggagcccttggcagcmaccatcctacttcctgtctctaggaatttgaccacactaggcacctcatataggaggaatcatacagtgtttgcccttttgtgcctggcttatttcagtg

SEQ ID NO: 204355 - DNA, 201 bp, Homo sapiens
acaaacaaaacatgcaggtttcacctatcttgtgcccctgagtggctcgttaagctctttggccagcattttagcaaagggaagctaggagagcccagatytggtgatgtggctttgggtattttgcacaaaatgctggcagtgtgtgggtgctgtggcacctgcctgaagacctgtcgctgtcatttctgcagcccgcag

SEQ ID NO: 204356 - DNA, 201 bp, Homo sapiens
cagtgacactgtgtgcattcacgttgtccaaccatcatcaccgtctatctccaggacttttcatcttcccaaactgaaattctgtccccactaaacaccarctcctcattctccccatcctcggagcccttggcagccaccatcctacttcctgtctctaggaatttgaccacactaggcacctcatataggaggaatcat

SEQ ID NO: 204357 - DNA, 201 bp, Homo sapiens
aggtccatgacactcaggaaaccagaatcctgagtcctcaaatctgatcgctcacgactggtaccactggctgcctcttaactgcccacagcgtgggcgtrgctgctgctgatctcgggtcggtgtcaggtgctccttccaccttctgagggagttcatcaggagattcatggaggctgtgaagaggatgacaatcatcag

SEQ ID NO: 204358 - DNA, 201 bp, Homo sapiens
aacatctataatttttttaaataaatttttttacaaggaaaaagccttgtaaaatatttttaaattttttttaaatattcccttttctctcttctcatgastggtctggctttatctagatgctcaaacttgtagtgtcacaatttagtccttgatgcaaagggaaagaatgttggcatgtgctaatatatgagtgctaaa

SEQ ID NO: 204359 - DNA, 201 bp, Homo sapiens
agacagagtttcgttcttgttgcccaggctagagtgcaatggcacggtctcggctcactgcaacctcctcctccctggttcaagtgattctcctgcctcamcctccctagtagctgagattacaggtgcccaccaccacgccccgctaatttttttgtatttttagtagagatggggtttcaccatgttggccagtctggt

SEQ ID NO: 204360 - DNA, 201 bp, Homo sapiens
aaaagttttatggtacccagggatgataagagagtgaaagaagcatgtgtacactattgggcccatttttttcaaggcagtttagcaaaatttatcaaatktatcaaaatttatcttgggcatatttgcaaaagctatttgggatatatagacaaaattattcattgctgcattgtgggaacagcaacaacaggaaagcca

SEQ ID NO: 204361 - DNA, 201 bp, Homo sapiens
ccatctattcctgcacttataccgtagaacttgttgaaatatcacaagctctccagccctgtacagtcttctatccttccatacccaggcctctatttccrtcattctgttccttcattgctttgggacactcagtcattcagcccctctctgcattcctagctatgtcactcctcccacatgccctcaatcttgggaatc

SEQ ID NO: 204362 - DNA, 201 bp, Homo sapiens
tggcgcaatctcggcccactgcaagctccacttcctgggttctcgccattctactgcctcagcctcccgagtagctgggactacaggtgcccgccaccacrtctggctaattttttgtatttttagtagagacagggtttcaccatgttagccaggatggtctcgatctcctgaccttgtgatccacccgcctcggcctcc

SEQ ID NO: 204363 - DNA, 201 bp, Homo sapiens
acccaggcctctatttccatcattctgttccttcattgctttgggacactcagtcattcagcccctctctgcattcctagctatgtcactcctcccacatrccctcaatcttgggaatccaggctcgggaatttgtgacctcttcctctcccacattccatagctctcactgacatttaaccagtccacactctgccaccc

SEQ ID NO: 204364 - DNA, 201 bp, Homo sapiens
aataggaggatcacagaggatttttagggcaatgaaattctttttttttttttttttgaaatggagtcttgctctgtcacccaggctggagtgcagtggcrcaatctcggcccactgcaagctccacttcctgggttctcgccattctactgcctcagcctcccgagtagctgggactacaggtgcccgccaccacgtctg

SEQ ID NO: 204365 - DNA, 201 bp, Homo sapiens
ggagggatagataaatctgatacagcttaagcttttaagagcaaaatcaactaatttacatcattaaagaaaagacaaaccatctgacaaatgggccagamcctaaagtcagtttttaggggggaaaaatgcaacggccaataaacacacaaaagatgttccatcaagagaatgagaagacaaattacagactggaagaat

SEQ ID NO: 204366 - DNA, 201 bp, Homo sapiens
tattatacatttcttggtttgtaaattttctcaaatcctttgtagaaaaagataagctttgattttttttttttttaaatcccattacccacctggtggcrtaacaaagccgagtgtaggatagcaaaagctgcaggcatcttcttgatcaaagtaaaatctgctcatggactaaaaaagtattacgttctttcttccaac

SEQ ID NO: 204367 - DNA, 201 bp, Homo sapiens
aacatacctgataaaaatactaaagaaaataaagcctgaatcatttcttattctctggcataatttttctccagtgggcacctggctatttgaccatagtrtcaatggctataacatgagaactctaaagatacaaacttgaacactgacagaagacagaactggtgaaatcttaagttgacccatcctataaagtcatat

SEQ ID NO: 204368 - DNA, 201 bp, Homo sapiens
ccaggctgaagcaataacacaagcaagggctgagagcggggaatggcagcacgtgttcaggaaggtgcagccggccagtgcagagggtaagatgcccggarcaacatcacaggggatgcagttgagaaagagtttggtgagccacaaacaaaagaccctgctgtctgggcgcagtggctcacgcctgtaatcctagcactg

SEQ ID NO: 204369 - DNA, 201 bp, Homo sapiens
attcctagaaagagttatctgtgctggctttctccactgcctctcctcccattctctccagccagcttcctcccctgcacccctaatgaagattgccaaarccatctggtgacctctcagactgcttactacctgatctcagaggcatttgacacagtcggcctctgcctccttcctgcaccatgcgctccacatccctgt

SEQ ID NO: 204370 - DNA, 201 bp, Homo sapiens
acccatgagaactggagatgggacactaggacccggaggcagcatctggaaagagcttaaggaggtggcaaagtttctttactttgaacaagagctcaaakgaggacagaggaaaggctcagaaggaaagagaagggcagaagctaggtcagagtcgaagtagcactgggcagtgtggagatagaataaaggagaggggag

SEQ ID NO: 204371 - DNA, 201 bp, Homo sapiens
cacaggtaaatccagaatcgcccctgttttggtgcatttgttatgtatggatggattccatttgtatatgcatttataaaagtattacttattccctacaraaaatttgaggaaaagatcaaagcaaaaatcgtctataatttcaacacctagataacattttagaagagtgttttattgctagtagcatttccccttaga

SEQ ID NO: 204372 - DNA, 201 bp, Homo sapiens
atgattcccattttgcaggcaagttaactgatattaaacaggtgtcccaaagtcacacaggtcacaagatccaaaccaaggcagcctaacatcagaccttrtgatatcatcctccacagcacattgccttccttgaattgttggcaaatggcccgaagaagagtcaagtcaacaaacagcaatgcgctgaaggggagggtt

SEQ ID NO: 204373 - DNA, 201 bp, Homo sapiens
aaaattaaccaggtgtggtggcacgtgcctgtaatctcagctactcgggaggctgaggcaggagagtcgcttgaacccaggaggcagagattgcagcaagycaggattgcgccactgcactccagcctggcgacagagtgagactctggctcaaagaaaaaaaaaaaagctgtgttttcaatatgagataaaaagatattc

SEQ ID NO: 204374 - DNA, 201 bp, Homo sapiens
atattattatccccactttacaagtgagaaaactgaggctcaggaagattaattgacttttccagtgtcataaagctggtaagtgactagaccggggtcarcatagaagtcttccaagccctggtttcttgctgtccactgccccacaccaccgggcaatgcttggtttggtgcacgggaatgaggtaagcaggcactcgg

SEQ ID NO: 204375 - DNA, 201 bp, Homo sapiens
gaagagagtccaccaacaggctttgtgtgagtaacatggctgtttatttcacctgagtgcaggtgggctgagtacgaaaagagagtcagcaaagggtggtrggattatcattagttcttataggtttgggataggaggtggagttaggagcaattttttgtgggcagcgggtggatctcaccaagtacatttcaagggtgg

SEQ ID NO: 204376 - DNA, 201 bp, Homo sapiens
acacaggtcacaagatccaaaccaaggcagcctaacatcagaccttgtgatatcatcctccacagcacattgccttccttgaattgttggcaaatggcccraagaagagtcaagtcaacaaacagcaatgcgctgaaggggagggttgagtctttttggggcctttaagccacttgggaagatgggctggaaatgtgtgaa

SEQ ID NO: 204377 - DNA, 201 bp, Homo sapiens
agccgagattgcaccactgtactccaacctaagcaacagagtgagactccatctcaaaaaaaatgaaataaaataaaataaataaaagtttaaaagaaaawctgagctgctctggctaacatgatatacaaagctcagggcttcacacactcaatcccaccctaaacagtctttaaggggacacagcggcataaagcctga

SEQ ID NO: 204378 - DNA, 201 bp, Homo sapiens; identical to SEQ ID NO: 35931

SEQ ID NO: 204379 - DNA, 201 bp, Homo sapiens
atggaggcaaagcagactaacggtgctgggagtcactgcaggcatcacagtgagctctgtggtgctgcccatgcacgttggtgtcgttctgccttcttccttttttttttttttttttttctttttgagacagagtctccctctgttgctcaggctggagtgcagtggcttgatctgggctcactgcaacctctgcctctt

SEQ ID NO: 204380 - DNA, 201 bp, Homo sapiens
agataattttgagtatttaaattaaagaagaccatcaggtgctcagagaaagaaatgtatatgaagagaccaacacctagacaaatctcatttaaaaaggtttttttttttttttttttcccccaaatatagccacagtagacatctgggctgaaaatgcatgatacgtacaaaagaacaatcctcatgctaatctcagac

SEQ ID NO: 204381 - DNA, 201 bp, Homo sapiens
gataattttgagtatttaaattaaagaagaccatcaggtgctcagagaaagaaatgtatatgaagagaccaacacctagacaaatctcatttaaaaaggtttttttttttttttttttcccccaaatatagccacagtagacatctgggctgaaaatgcatgatacgtacaaaagaacaatcctcatgctaatctcagact

SEQ ID NO: 204382 - DNA, 201 bp, Homo sapiens
aaattaaagaagaccatcaggtgctcagagaaagaaatgtatatgaagagaccaacacctagacaaatctcatttaaaaaggttttttttttttttttttycccccaaatatagccacagtagacatctgggctgaaaatgcatgatacgtacaaaagaacaatcctcatgctaatctcagacttgtcttctgagatgcca

SEQ ID NO: 204383 - DNA, 201 bp, Homo sapiens
atacaaactcctgtgccctccagtggagatgaacatgctgggagaggcagctggaccttgctgaataggaagttgcatttgctacatccatctggacagayaaaaagaaaaggaatttagcactttgagaaggtacttatttcttgtgaaaaagcatacctagggaagatcagataaccttcagataagtatccagatttt

SEQ ID NO: 204384 - DNA, 201 bp, Homo sapiens
aaaataccaattctgttatttttctttggcaggagggaaggggttgatgataccaaaaacaaaaacttgcaacatactaaaaccaaggatatgaaaataayttatatcagagtccaggaatgttcccacaaaccacagagttgtggtttggattgaggaatctaaccatgaactgtctgtgctcttcatctgaaggaaaac

SEQ ID NO: 204385 - DNA, 201 bp, Homo sapiens
attcattgtctcacagattgtaaataatggagctgaaattcaaacccagtgtgatccccctaaactctttacattctgcttaaccatttatagaactttctttttttttttttttaaatggagtctcaccctattacccaggctggagtgcactgatgtgattataactctctgcagccttaaagtcctgagctcaagtga

SEQ ID NO: 204386 - DNA, 201 bp, Homo sapiens
aattaaagaagaccatcaggtgctcagagaaagaaatgtatatgaagagaccaacacctagacaaatctcatttaaaaaggtttttttttttttttttttyccccaaatatagccacagtagacatctgggctgaaaatgcatgatacgtacaaaagaacaatcctcatgctaatctcagacttgtcttctgagatgccaa

SEQ ID NO: 204387 - DNA, 201 bp, Homo sapiens
aggggttgatgataccaaaaacaaaaacttgcaacatactaaaaccaaggatatgaaaataacttatatcagagtccaggaatgttcccacaaaccacagrgttgtggtttggattgaggaatctaaccatgaactgtctgtgctcttcatctgaaggaaaacagagcatgctttccacaccaaggagacttggacttcat

SEQ ID NO: 204388 - DNA, 201 bp, Homo sapiens
tcacagacaccctcccctagatgctaccgcggggccggagcccaaaagcactcactccggttcctgcacctgcccgtctgcatgctccctctcccataagrggtttgagcatacgagccacacccctgttgcatgtcctgtgaggggggtcagggaactctcctatttcacaagttctaaggggagaattgttttacccaa

SEQ ID NO: 204389 - DNA, 201 bp, Homo sapiens
ttttaagtgcttagaatggttcccagaatttagtagataacaaataaatagtaggtggtggtggaggcaatggtagtcactattttatgatgaatgttttwtatatatatgtctttcacactctaataagtcaggatctccaagatcacccctaggttcaacaatttgctaggaggactcacaagactcagcatctagtta

SEQ ID NO: 204390 - DNA, 201 bp, Homo sapiens
cttcctactttatccactgtctctagtgtaagaacatgtcaaccttgatgttatgacagaaacaataggctgtgatgcatgcagcattcctgcctgttctrgagggctgcctttcattgtcttgcacagagcaagggcttatataccccttccctatggtacataagccctgggtctagggagtaacagtgcagagatcta

SEQ ID NO: 204391 - DNA, 201 bp, Homo sapiens
gaactagctcttgacatcattttctctatgtttaactgttttctatttatttttatatatgcccttattttcatttatttatctcctttattgccttctattttttttttttttagctccttagggtaaaagtctaggtcttgcttttagacttacatttattctctaatacaattatttaagcaataagttttcttctaa

SEQ ID NO: 204392 - DNA, 201 bp, Homo sapiens
tttcccgactccgtgccttacagtgttaacaaagaccaatatgacacctgctctaaaaactggtggttttttgggggtttttagtttgtttttttgactartagtttcaccatgtgatcttgaagagataacacagtgttttcagtgcctctcaacttctgaaatggagagcatttctctgttagacttgactagtctttg

SEQ ID NO: 204393 - DNA, 201 bp, Homo sapiens
aaccctccctacaccccgccctactgttcaccggtcacagtctctgcctcttccatgggagcagaacagttcttcagtggctaggatctagggttgcctgygctggaagagattaagccatatgcaccctgctttgtagaagaatgatgaccgggacacccacttaacaccccagagctgtcttcagttaccttttctgcc

SEQ ID NO: 204394 - DNA, 201 bp, Homo sapiens
ttgttctccattggatctgttacgtcacaagcatctccatatgttaaaacaacttcaacccatctgggcacatgaacttgtactttccttactataacttscatccatagggaatagcttcaaatttcttctgcagttcttaggggttgccaggcaaaatatcatctttaagatagaattcaatgtcagtttctcctggta

SEQ ID NO: 204395 - DNA, 201 bp, Homo sapiens
gggaatagcttcaaatttcttctgcagttcttaggggttgccaggcaaaatatcatctttaagatagaattcaatgtcagtttctcctggtaactgtagtrggtaattaataattatctaactagtcatctgaacttgggaaattcatttaatctctcagggacttagttttctcatttgtaaaatttaaaaaataaagtt

SEQ ID NO: 204396 - DNA, 201 bp, Homo sapiens
ctattcattgagttcactatttcaaagtacagtttatcagaatttctcggattcaaaatttctgtttggttcattttgtagacttaattctttgctagtartttcaatcttgtcttctttttgctcgagtgttttaagtatatgttcagtgacatctacttgttttttgtttttaatttagaaaggggactttattttgta

SEQ ID NO: 204397 - DNA, 201 bp, Homo sapiens
cattgagttcactatttcaaagtacagtttatcagaatttctcggattcaaaatttctgtttggttcattttgtagacttaattctttgctagtagtttcratcttgtcttctttttgctcgagtgttttaagtatatgttcagtgacatctacttgttttttgtttttaatttagaaaggggactttattttgtataagg

SEQ ID NO: 204398 - DNA, 201 bp, Homo sapiens
attaggcatgtaaaaccaaacaagacaaatccccatgctcatcaagccacctgcctaagatacgggcaagtgtgtagcggggagacagacaagaaaacagrcaatgacagagcactattccatgcctctggaggtggacaatatagggtactttgtaaggaccaattatgggcaggcccagaacatgatgcagggttttcc

SEQ ID NO: 204399 - DNA, 201 bp, Homo sapiens
tccacaggttgccgactgatgggaccagctacctagaattgttagacataagccaattaatttggaagacacctcaactttataataaatggtcttgagcscttgtgcttggcagagattaaatggcaagaccaggttccaataaacatcaatcaccatgtatcttcaatattggggtgaaggtccccaaagttgccaaag

SEQ ID NO: 204400 - DNA, 201 bp, Homo sapiens
gtcccctccatcttccagcctgcaatggtgtgtcaaacccttctcaccttgaatctttgacttcctctctctctttgacctctaggcccagattgaaagartttgtgtgattcagtcagccccttataatgtccctttgttaaagtcagctatcctgattccagagtaattcacagtccctgagcacatacaccacagagg

SEQ ID NO: 204401 - DNA, 201 bp, Homo sapiens
gttttttccaaaaatagaaattttattctctagtgaggcattatcagaaaatgctgtgaaattggtattcatattttataaaatttataaatgtgtaaaaygctgatgagctaaatggatctattttgtactgctgagcataattttatatgttatcataatcattaataaaaattagatgaatttaaaagtcagttgctt

SEQ ID NO: 204402 - DNA, 201 bp, Homo sapiens
gtcccagggcagaaggcagtacacacaatcccacaggactgtattttcacgggcaattaggtttcataggagccactgggaggagccccctttgtttgatrgcgtggcacacttttcaaagctgtttatcacgcattattctagttgatgcccagcacatctgtggagagaggcaggaactacccttctggttaagtgatc

SEQ ID NO: 204403 - DNA, 201 bp, Homo sapiens
gttggcagaattcagttccttgtggttaggacagaagtgcctgtttcctgtttccttgctgactcagccaggggccaacctgggtccttcatgccgcccayattccttaccacgtggtcccctccatcttccagcctgcaatggtgtgtcaaacccttctcaccttgaatctttgacttcctctctctctttgacctctag

SEQ ID NO: 204404 - DNA, 201 bp, Homo sapiens
ggttatgtggcctatgcttgtgctaacatgtatcattttaagaaacgactacgttatgagtcactctttacataattgtcagtgtgagaaggattttcagrgccagatttcagatttgatgctgttaatcagtttctctgcagccaccaaaatgtctgtgagctcatttatgtctgtggtggtgacgaatctaaccttaca

SEQ ID NO: 204405 - DNA, 201 bp, Homo sapiens
catggtgaaaatgagtccctggagtcccagggcagaaggcagtacacacaatcccacaggactgtattttcacgggcaattaggtttcataggagccactrggaggagccccctttgtttgatggcgtggcacacttttcaaagctgtttatcacgcattattctagttgatgcccagcacatctgtggagagaggcagga

SEQ ID NO: 204406 - DNA, 201 bp, Homo sapiens
gcttgtgctaacatgtatcattttaagaaacgactacgttatgagtcactctttacataattgtcagtgtgagaaggattttcagggccagatttcagatktgatgctgttaatcagtttctctgcagccaccaaaatgtctgtgagctcatttatgtctgtggtggtgacgaatctaaccttacagttgtcacaatcaga

SEQ ID NO: 204407 - DNA, 201 bp, Homo sapiens
aaagagagaaatcctgggctcctattgtcatggtgaaaatgagtccctggagtcccagggcagaaggcagtacacacaatcccacaggactgtattttcaygggcaattaggtttcataggagccactgggaggagccccctttgtttgatggcgtggcacacttttcaaagctgtttatcacgcattattctagttgatg

SEQ ID NO: 204408 - DNA, 201 bp, Homo sapiens
cagattggaacgtgattcctgtctgactcggacagcaatttaagtgtgagaatctagggaagtgtcctcagagtgccagaacctctcttccaggcccgttygtttgggcatccctcaaaagagggtaccccttaaaaccagacatgtcctgacacctgttagccaatcattgagggtggagtgacaactaaatcaaggtag

SEQ ID NO: 204409 - DNA, 201 bp, Homo sapiens
tcaataacttctcaaagtctttctgcaaattaccaagatattaatcacaatgaattaaataataggacattacagaagaaacagacaggtgataggcatcyacccacctcacatcttagaactaagtgttttaaatcaatgacctctaatggggtaggatggatgctgagaagtctaaataatggacttaacttggataca

SEQ ID NO: 204410 - DNA, 201 bp, Homo sapiens
gttaacatgacattttgactgagacaaaagtaaccacaacttatcatcctagaaccttaatttgacagtttgttattctcattgtagctacacatatatamctgtgaagttatgtaatgcaaaatgccaacactttcaacggcatagcatttcaaaaataacttccaaatccgaaattgtctgtgaatcttaaaagtcaat

SEQ ID NO: 204411 - DNA, 201 bp, Homo sapiens
ccaccacgcccagctaatttttgtatttttagtagagatgaggtttcaccatgttggccaggctgatctcaaactcctgaccacaaatgatccacccaccycggcctcccaaagtgttgggattacaggcgtgagccaccgtgcccggcccatatcttttaacctaaagaagactactgtaatattcgtatctacagcatt

SEQ ID NO: 204412 - DNA, 201 bp, Homo sapiens
agattatggcatggaaatcatagctatgatttttattttgaagacaaatccagagaaaatatattacttgtttcttaggtatgtctgtttctgtaagcttyattagacctttctgattaaaattataataatccacaaagatcctttctctattataaactgaggagcaggtggtaggattctacacaccagaagaaatgc

SEQ ID NO: 204413 - DNA, 201 bp, Homo sapiens
tcctgatagaagtgtaaagtgttatttggaaagcaatttggccccaggaagggaggatccttaaaatatattcttttttttttttttttttttttttgagrctgagtcttgctctgttgcccaggctggagtgcaatggcgtgatcttggctcactgccacctccacctcccgggttccagcaattctcctgcttcagcct

SEQ ID NO: 204414 - DNA, 201 bp, Homo sapiens
ttataaactgaggagcaggtggtaggattctacacaccagaagaaatgcataccactcagaaaatgtaatcttttcctgaggaacttttctgtacatgttmtgtacaaaatgtacgatgacaaaatcttgaacagtactgatgtgagctagtgcttcaagttattattaatggttttacatagtaagtgtcatagggattt

SEQ ID NO: 204415 - DNA, 201 bp, Homo sapiens
ctgatgtgagctagtgcttcaagttattattaatggttttacatagtaagtgtcatagggatttgcaatagagggccctatttttggcccagattctaagmagaaatagctgcttattagatgttggacactggtctaagaccactagctgtattagctcaaggaatcctttcaacaagattttgaggtaggtacttatag

SEQ ID NO: 204416 - DNA, 201 bp, Homo sapiens
tagcactatgtctggaacagaacaaagtacccaatacccattatctcatgcatgaatggacatccttcttccaggtgttattgtctataaatccctgaccstgactattaaagggaatatcccagtgatcagagtggagaaattcggggaaatactatcccttggagaactgctataatgaggcaaatttctacctgggtg

SEQ ID NO: 204417 - DNA, 201 bp, Homo sapiens
tcatgcatgaatggacatccttcttccaggtgttattgtctataaatccctgaccctgactattaaagggaatatcccagtgatcagagtggagaaattcrgggaaatactatcccttggagaactgctataatgaggcaaatttctacctgggtgtgaaacttgttatatctctgctgaagacccagggagctaggaaaa

SEQ ID NO: 204418 - DNA, 201 bp, Homo sapiens; identical to SEQ ID NO: 35929

SEQ ID NO: 204419 - DNA, 201 bp, Homo sapiens
aacagttcttatcggtaatgagtgttcatttgcccagtcatttttttgccagagaaggggcagcctaaaatgtgcaatccacatagcagattacaagtagrcttaccagttatctcatttagtgctcccctgtaagtactccccactttgcagatgaagaaagactatagaagtgacactattggcaaatggcacaaaagg

SEQ ID NO: 204420 - DNA, 201 bp, Homo sapiens
atcccagcactttgggaggcctaggtagggggatcacccgaggttagaagttcaacctagggtttcaccctggcccatatggtgaaaccccatctctgctaaaatacaaaaattagccaggcacggtggcatgagcctgtagtcccagctactcaggaggctgaggcaggagaatctcttgaaccagggaggcggaggttg

SEQ ID NO: 204421 - DNA, 201 bp, Homo sapiens
cttcttgggagtatttccagcatcattagtggcccttcgtgtgggtcccacaatgttattcaaagtttacaatattgcacttaaacacagtggaaaatatkcagtaaacaagaaagatcactttttactgtgatacacagtttactggagagaggctattcatcagcaacacttgcgttcatcgcaaaaaacagcaggagg

SEQ ID NO: 204422 - DNA, 201 bp, Homo sapiens
gcgtaggaccagaggggccaaaggggctggggtgccccttcaacctctcttacaagggcattaatcccatttaaatcatcatcccatattttaaaaacacrcaggggctcctgatgatacataacagaaaatctaagcagccaaccttactgacagtttgtaatgactccccccttgaccatggtgaggtgaacctcacac

SEQ ID NO: 204423 - DNA, 201 bp, Homo sapiens
gcggttccgttcctatcatacctgatgtgtttgatctctctctccctcctcaccccttcctcttttctccacatcctgtcttcctccctccctttgcctcrtgcaggttaccacgatgggcatcttgtgatccgctggttctgggctgcggtggagcgcttcaataatgagcagaggctgagattactgcagtttgtcacg

SEQ ID NO: 204424 - DNA, 201 bp, Homo sapiens
ttgacttttccagtgtcataaagctggtaagtgactagaccggggtcaacatagaagtcttccaagccctggtttcttgctgtccactgccccacaccacsgggcaatgcttggtttggtgcacgggaatgaggtaagcaggcactcggtgctgtcagaaccacacctggagggtggtgagctcttaggaatgctgaattg

SEQ ID NO: 204425 - DNA, 201 bp, Homo sapiens
tcttaggaatgctgaattggatcatgatttgattgtgttcgttcattctagatgacaaactaagggagttcaccaaggctctaaataaatgcaataaaagyaactagtaagtaaaccatgagtgttcagactaggtgctattcgtcaatgctttctgtttactcccagaaatgatcttttacagaattaatttggttccaa

SEQ ID NO: 204426 - DNA, 201 bp, Homo sapiens
aactagctcttgacatcattttctctatgtttaactgttttctatttatttttatatatgcccttattttcatttatttatctcctttattgccttctattttttttttttttagctccttagggtaaaagtctaggtcttgcttttagacttacatttattctctaatacaattatttaagcaataagttttcttctaat

SEQ ID NO: 204427 - DNA, 201 bp, Homo sapiens
taaactgagcccacggtgatgagattttcttcaacgccactctttggatgctgctgacttgtgatgaaatgggcagggaacccttatgatttaaagctgcractctgaatgcctcagtcccgagagtcctcagcctggcatgcagaacaagccccttcacctccacggggtcagagatcagattgtatcatgaccctccat

SEQ ID NO: 204428 - DNA, 201 bp, Homo sapiens
cttaaagagtcaaatatgggcataaacaccaggggtcagggttgggcctgaacttttagagtatacttctctttttttaattgttttttggttgttgttgtttttttttttttttgaggagtctcgctctgtcacccaggctggagtgcagtggtacgatctcagctcactgcaacctccgtctcttgggttccagcagtt

SEQ ID NO: 204429 - DNA, 201 bp, Homo sapiens
cttgatcaaaatccagtttatttgctcttatgcaaatatttcaagaagaaatataaactttccatatattatatgcatatatatatatatatatatatatacacacatatatgcagattccctgcagttacaaggcttacgtctcagcagcatggtctccggcacttcctccctaggatagagtcaaaccacacactactg

SEQ ID NO: 204430 - DNA, 201 bp, Homo sapiens
ttgatcaaaatccagtttatttgctcttatgcaaatatttcaagaagaaatataaactttccatatattatatgcatatatatatatatatatatatatayacacatatatgcagattccctgcagttacaaggcttacgtctcagcagcatggtctccggcacttcctccctaggatagagtcaaaccacacactactgg

SEQ ID NO: 204431 - DNA, 201 bp, Homo sapiens
tgatcaaaatccagtttatttgctcttatgcaaatatttcaagaagaaatataaactttccatatattatatgcatatatatatatatatatatatatacacacatatatgcagattccctgcagttacaaggcttacgtctcagcagcatggtctccggcacttcctccctaggatagagtcaaaccacacactactggg

SEQ ID NO: 204432 - DNA, 201 bp, Homo sapiens
gatcaaaatccagtttatttgctcttatgcaaatatttcaagaagaaatataaactttccatatattatatgcatatatatatatatatatatatatacayacatatatgcagattccctgcagttacaaggcttacgtctcagcagcatggtctccggcacttcctccctaggatagagtcaaaccacacactactggga

SEQ ID NO: 204433 - DNA, 201 bp, Homo sapiens
ggctggagtgcagtggcgggatctcggctcactgcaagctccgcctcccgggttcacgccattctcctgcctcagcctcccaagtagctgggactacaggygcccgccactacacccggctaattttttgtatttttagtagagacggggtttcaccgttttagccgggatggtctcgatctcctgacctcgtgatccgcc

SEQ ID NO: 204434 - DNA, 201 bp, Homo sapiens
acccctttctttttaacgaaggcagagttctcagtttcaaagatttatcagccttcacttaaccagtttcctctttgtaaacagttttgggtttttctccagtcttttactattgttagtaatgctccaataaacatccctgttaaatgtatcttttgcacatttgcgcaaattaatccagaaggaaaatctctaaaaata

SEQ ID NO: 204435 - DNA, 201 bp, Homo sapiens
acaataaaatccacagcaaacactatacttactggtaaaatattaaaatatatttccttagaaccaagaacaagacaaggatgcacactttagccacttcygtttaatattgtgctagagattctagccagtgcaacaaggtaaaaaaataaacaaataaagtatgtcagctttggaaaggaggacacaaaactgtctgta

SEQ ID NO: 204436 - DNA, 201 bp, Homo sapiens
cattaccctacaattacccaaaccactgccagacaacttaaagagtcaaatatgggcataaacaccaggggtcagggttgggcctgaacttttagagtatrcttctctttttttaattgttttttggttgttgttgtttttttttttttttgaggagtctcgctctgtcacccaggctggagtgcagtggtacgatctcag

SEQ ID NO: 204437 - DNA, 201 bp, Homo sapiens
gatatgcatctgctggcactgtccatcgttgaggacatatttggaaaatggcaatctgcacaggaaaagcaggccaaggacatccgtgtctttttttattytctctctctctgttttagaacacaggttggcaaacttttttgtacagggccaggtagtaaatattttaggctttgcaaggcccacagtccctgtctaaat

SEQ ID NO: 204438 - DNA, 201 bp, Homo sapiens
ttctaccttttaaaaggagagatacagttctggaagagcatgtgggtctaaaaatatcgttgaaccattttgagaaatgcagtctgccataaagcatttarggaatcctcccagtagcagctgccttagtctttggcaggccccgttccctgccttggtcaaggtcacacacttgggcagcttcttgctggcaacccctgc

SEQ ID NO: 204439 - DNA, 201 bp, Homo sapiens
acacacacatcatatatatatacacacacatcatatatatatatacacacacacacactacagccacttgttgattgatgggcatttgggttgcttgcacrattttgcaattgtgaattgtgctgctataaacatgcctgtgcaagtatctttttcaaataatgacttcttttcctctgggtagatgcccagtagtgggat

SEQ ID NO: 204440 - DNA, 201 bp, Homo sapiens
aagttaaaattcaatttatttctgaaaaaaaattgttcttgaataaaagtagatactatagattaagaacagagattgcaaaataacagcctaaagagcatttttttttttttttgagatggagttttgctcttgttgcacaggctggagttcagtggtgcgatctcagctcaccgcaacctctgcctcccgggttcaagt

SEQ ID NO: 204441 - DNA, 201 bp, Homo sapiens
gttttttggttgttgttgtttttttttttttttgaggagtctcgctctgtcacccaggctggagtgcagtggtacgatctcagctcactgcaacctccgtytcttgggttccagcagttctcctacctcagcctcccgagtagctgagattacagacacacatcactacgcctggttaatttttttgtatttttagtagag

SEQ ID NO: 204442 - DNA, 201 bp, Homo sapiens
ttgaatttcatataattttcacatgctacaaaatgttactcttcttttatttctttttccaacaatttaaaatgtaaaaagctcacaaccacacaaaaacrggtggtgggccacatttagcccacaggctgtaatttgcctaccctacccctgctttagaatacagacagtccgttcaacttaaccattttttgctttaca

SEQ ID NO: 204443 - DNA, 201 bp, Homo sapiens
tctgcaaaatacataggacgttaggacattgctattcagcagtattggaagaggaaataagagatcagaagaaaatgtatttctgagtttatgtgttggcrtctaattttcctcttctttctcacatgattcagggagaaaatccattacattcggactgagggtaatcacgggcttgagaagttgtcctgtgatgcggat

SEQ ID NO: 204444 - DNA, 201 bp, Homo sapiens
ttgcaaaataacagcctaaagagcatttttttttttttttgagatggagttttgctcttgttgcacaggctggagttcagtggtgcgatctcagctcaccrcaacctctgcctcccgggttcaagtgattctcctgcctcagcctcccaagtagctgggattacaggcatgtgccaccacgcctggctagttttgtatttt

SEQ ID NO: 204445 - DNA, 201 bp, Homo sapiens
gtagggggctaggcctgaaatccttctggaaaagcttccctgggcagctctcctccatcacggccaccctgaaaatggcctagactgaaaaactcaccgcwtgttctagaggattctagtaactgcaacgcaagtgggaccccacccttgtacctgtgtccatcacagtccttagatttgcaattgagctagcaagagctg

SEQ ID NO: 204446 - DNA, 201 bp, Homo sapiens
tgctgccattggcattcactccaaagagcagaggctgctctctgctttccccagcacccaactctgaaagggcacactagaatctgggtgcaaacaggtcyccccacctccgggcacagaatgagcttcctggacctctgctttctttgcagcctggactacagtggcccctcgcgggagttcttcttccttctgtctcag

SEQ ID NO: 204447 - DNA, 201 bp, Homo sapiens
ctagaacatctctgttttggttttgcttatttttcaagcaaagatagtatttaagatttgatagattttacaactacgaaatctttccagaatgcaaggamccagtgtttctttacattcttttgcctgtgcttacatgaagcagttacagttttcaaaaggagaagtgcttatttcttagttcatctgttcttggtaatg

SEQ ID NO: 204448 - DNA, 201 bp, Homo sapiens; identical to SEQ ID NO: 35937

SEQ ID NO: 204449 - DNA, 201 bp, Homo sapiens
gattttgtcaaatgctttctctgtatctattgagatgatcatgtgattttgttttcaattctgtttatgtggtatatcacatttattgacttgcatatgtyaaaccatccctacatccctcttataaaacccatttgatcatggtggattatctttttgatatattgttggattcatttagctactattttgttaaagatt

SEQ ID NO: 204450 - DNA, 201 bp, Homo sapiens
aaggtagagttaaacactggctggatgctacctcgtgaatggctgcttgaggtgaagaccttgttttttttaaattggaataaactctaaatgttgggaascttccagcctgagatattgaatgactgtgattgttcctattcttcatccagcctttgaagaatctggttgcctgagaatcctgcttaccccttatgccac

SEQ ID NO: 204451 - DNA, 201 bp, Homo sapiens
gattctattttaagcctatttttaagtgatgatgctcagtgctaacaagcgttctatgagatggtcagagtcacatttcctgatagaagtgtaaagtgttrtttggaaagcaatttggccccaggaagggaggatccttaaaatatattcttttttttttttttttttttttttgagactgagtcttgctctgttgcccag

SEQ ID NO: 204452 - DNA, 201 bp, Homo sapiens
gtgtgtatgtagctagagatatgtaaatataaatatattagtatgtgattatatgattcagataaaaaatatggaagggcacattttagattatcaatatktgtcacaggagatgagccgaggtaacaggagccagccatgccaggagaagccaaagtctatataaaaattacatctgtgggtaaaaaataaataaatctc

SEQ ID NO: 204453 - DNA, 201 bp, Homo sapiens
tttgctctggttgcccaggctggaatgcaatggcgcactctcggctcactgcaacctttgcctcccaggttcaagtgattctcctgcctcagcctaccgartagttgggattacaggcatgcgccaccacgcccggctaattttgtatttttagtagagacggggtttctccatgttgattaggccggtctcaaactcctg

SEQ ID NO: 204454 - DNA, 201 bp, Homo sapiens
accacatggcctaactgacatctatagaacatttcactcaactgctgcagaatacacattttttctatcaacacatggaacattcttcagaatagaccatrtattaagccacaaaataaatgtcaacaaattcaaaaaagtagaaatcttatcaagtatcttctctgaccacaaaaggaataaaacaaaatcattaacaag

SEQ ID NO: 204455 - DNA, 201 bp, Homo sapiens
tgaggatcttcttgtggtggagggctgaggggtcagagttctctgggaaactcaactcttatgggtgaaaaatgctttcaagcaactggcatgtgaccctrgcgtgccagacgtgaaaacatctagcatctcttgtcacaatatatgcagctggtgtttcctttcagtcaatgaaacaaaaataagtgaagtgaagacatt

SEQ ID NO: 204456 - DNA, 201 bp, Homo sapiens
actaacaatgaaatatgaatgcaagttaagctacacttgaccaaatggtaataaatgtttacttccatttctatcattgaagggaaaatgtgagcattaakcactccaggctttcatatgcccatgtcttctgagcagagccaccattttttataatttctaataaccaactccagaactaggagctgatcaactctttgt

SEQ ID NO: 204457 - DNA, 201 bp, Homo sapiens
attaaaatactcgtttaagaaaaaggaaaacaacctttgccaacaacttctcagaagagtaccatgacgtccatttccaaaagggtagtatagaggcaagmtggcttcacttccccccacagaaaatttaaaacaattgtatggcaccaagatgatcaccagcaatatcccagaactcaaatatgagggtaagacagctct

SEQ ID NO: 204458 - DNA, 201 bp, Homo sapiens
tttgttccaaggtatagtttaagtccattgtttctttgttgacttcctgtcttaatgacctgtctagtgctgtcagtgaagtattgaagttcccccactaytattatgttgctgtctatatcatttcttaggtctattagtaattgttttataaatttgggagctccagtgttaggtgcatgtatgtttaggattgtgata

SEQ ID NO: 204459 - DNA, 201 bp, Homo sapiens
tatctgttaagtgcatttgttccaaggtatagtttaagtccattgtttctttgttgacttcctgtcttaatgacctgtctagtgctgtcagtgaagtattkaagttcccccactactattatgttgctgtctatatcatttcttaggtctattagtaattgttttataaatttgggagctccagtgttaggtgcatgtatg

SEQ ID NO: 204460 - DNA, 201 bp, Homo sapiens
ggtagttcaaggggcatctgtattcgataaggacttccttacagttttgtattgctgttgagcacatcaggacttccctgggcttgcctgcctcacccackggtatagaaagcacactgcatggtcattaggaagagaggtattgaccagaactgtgatggtgcttatttccttctagggatagggtggtcagctacacac

SEQ ID NO: 204461 - DNA, 201 bp, Homo sapiens
tgaaaacaccagcatcctccctagattctcgatgggcaggaaaccccaccttccctctttcctcttcccatcttccttattcccaaaataatctccccccrtaacctgagtgctgcatcagcctgggcagtgatctgatactctgatttatatactttaaaacaaaggtgtaaataatacacaagtcccctagggatcttg

SEQ ID NO: 204462 - DNA, 201 bp, Homo sapiens
tcagctactagtgaagaagccaaaaatgaccctgttgaaattaatagaagctttttttttctcatataaaagccctgttgaggctgagtgtggtggtccaygcctataatcctagcacttcaggaggccaaggcgggtggatcgcttgaggccaggagctcaagaccagcctggccaacatggcgaaaccctgtctgtact

SEQ ID NO: 204463 - DNA, 201 bp, Homo sapiens
tgtcacggtcaaaaactcggcagctcctgtaagtctcatttctccgtctttggttagacctaactctggtctttcttcactttcctattttgttcttgtgygtgcgtgtgtgtgtgtgtgtgtgtgtgtgtacgtgtacatacacacatatggagatatactgatagattgattatgaataaatggaaagacacctcaaaa

SEQ ID NO: 204464 - DNA, 201 bp, Homo sapiens
tactgttggttttgttttgttgttgttgttgttgttgttggctattttggctaatggaagggaaaaataacatgattgtgtataaatgactttgtttccartaagaatcaaatccaaaagctgccaccattagttttaaaacgtattctgtgttttaaccaaagatgttctttcttagtcatgcctgtggaattatatgtg

SEQ ID NO: 204465 - DNA, 201 bp, Homo sapiens
cccactgctatcgctagggtaggccccctgcactcttagcccagatgcgtacagcatcccaaccatcacaactgtgttcagtgcagccggacaaaggaacrcacagcccatcccttcaaggaggcctcctgacagtgccatacacttctgcttacatcccattggacagaatttacttacatgccacacctagctgtgaga

SEQ ID NO: 204466 - DNA, 201 bp, Homo sapiens
ggaaaaataacatgattgtgtataaatgactttgtttccaataagaatcaaatccaaaagctgccaccattagttttaaaacgtattctgtgttttaaccraagatgttctttcttagtcatgcctgtggaattatatgtgaaattaatttgcatttccttatccaggagtggaaactgtcttccagtcaagtgacagtgg

SEQ ID NO: 204467 - DNA, 201 bp, Homo sapiens
tcttagcccagatgcgtacagcatcccaaccatcacaactgtgttcagtgcagccggacaaaggaacacacagcccatcccttcaaggaggcctcctgacrgtgccatacacttctgcttacatcccattggacagaatttacttacatgccacacctagctgtgagagaggttggaaaataaagtctttaactgggccgc

SEQ ID NO: 204468 - DNA, 201 bp, Homo sapiens
acatttcagaaaaagagtgagagaaggtggcacatgcaataatgagaaacgcaaggaaattggtagagaaaaagaaacacaggcagaaaggtaaaacagayagcatggaaaggtacccacaaggagcgggatggaaaatccctcctgtgagtagaagggaatgggaaatgcctttctttcacaaggatgtttcgaggactt

SEQ ID NO: 204469 - DNA, 201 bp, Homo sapiens
gagagaaggtggcacatgcaataatgagaaacgcaaggaaattggtagagaaaaagaaacacaggcagaaaggtaaaacagacagcatggaaaggtacccmcaaggagcgggatggaaaatccctcctgtgagtagaagggaatgggaaatgcctttctttcacaaggatgtttcgaggacttcctttattctaggccaga

SEQ ID NO: 204470 - DNA, 201 bp, Homo sapiens
agcaatggttcattctcaagattgatccctgggccagcagcatcaggatcacctgggaactcatcagaaatgcacattctggaaaaaaaaaagagaaaagraaaaagaaatgcacattcttgggccctacaccaaacctactgaatcggagactcagggggtggggctggcagtctgtgttttaagtcctgcgggtgattc

SEQ ID NO: 204471 - DNA, 201 bp, Homo sapiens
gagaatctcttgaaccagggaggcggaggttgcagtgagccgagatcgcaccattgcactccagtttgggcgacaagagtgaaactctatctcaaaaaagaaaaaaaaaaggcttgcagaaggcatattccaaataactgaaagttgaacactttagataatgacattgtaaaatgtttttgtgcagacttgagaagatgt

SEQ ID NO: 204472 - DNA, 201 bp, Homo sapiens
agcaagaagatatcatacatgagaaagaaaaaatctgaatttcaaatgagaagactttcagttatgacacaaactagctgtgtgcctacacacacatgctmcacacacacacacacaaatggtctcagcaatttcttattaattgaacacacacacatacacacactcatagttacagaatgtctaagaggcataccatgt

SEQ ID NO: 204473 - DNA, 201 bp, Homo sapiens
taatagtgattaaagagcaagattaaaggcacggcagggtggagctgagaagtacaggaaagataagtgcttagactttatgtagtctatgaaccatttatattattattattattattattattattatcattattattttagttttaggatgacatgataaaacggatttggggccaggcatagtggctcacacctata

SEQ ID NO: 204474 - DNA, 201 bp, Homo sapiens
aatgaataaataaaatgagaaggggcctaggaagagacactactgcaagaagcaaacagaatcttggtctgacaaaaagcatgtctttttttcagaaagtrtatttttttcccagaaagtataattttctttggaaaatagaactatttaaaagacatctattcatcatccatgaaatggtacaggagcacatgacttctg

SEQ ID NO: 204475 - DNA, 201 bp, Homo sapiens
aatagtgattaaagagcaagattaaaggcacggcagggtggagctgagaagtacaggaaagataagtgcttagactttatgtagtctatgaaccatttatattattattattattattattattattatcattattattttagttttaggatgacatgataaaacggatttggggccaggcatagtggctcacacctataa

SEQ ID NO: 204476 - DNA, 201 bp, Homo sapiens
gaggccaaggcgggtggatcacgaggtcagcagatcgagaccaccctagctaacatggtgaaaccccgtctctactaaaaatacaaaaaattagctgggcrtggtggcgggtgcctgtagtcccagctactcgggaggctgaggcaggagaatggcgtgaacctgggaggcagagcttgcagtgagccgagatggcgccac

SEQ ID NO: 204477 - DNA, 201 bp, Homo sapiens
atagtgattaaagagcaagattaaaggcacggcagggtggagctgagaagtacaggaaagataagtgcttagactttatgtagtctatgaaccatttatattattattattattattattattattatcattattattttagttttaggatgacatgataaaacggatttggggccaggcatagtggctcacacctataat

SEQ ID NO: 204478 - DNA, 201 bp, Homo sapiens
tgtattatataatgaaataatcctatagctcactgtgatgtataatcagtgggagccctgagctggttttctgtgattagatgctgccatctgggggtaaygagagacggtgacagatcatcaggcattagattctcataaggagtgtgcaacccagatcccacacatgcacggttcacaatggggtttgtgctcctatga

SEQ ID NO: 204479 - DNA, 201 bp, Homo sapiens
agtcccagctactcgggaggctgaggctggagaatggcgtgaacccaggaggtggagtttgcagtgagccgagattgcgccactgcactccagcctgggcracagagcaagactctgtctcaaaaaaaaaaaaaagatcagggtgagcttgcacatgtttatagactgagtggaataggccataaaaatagggactctcat

SEQ ID NO: 204480 - DNA, 201 bp, Homo sapiens
tccaagattttagaacagtagttaaaactggctttaatctgagggccattcttctctccactgaacctaatcgccctctgttagacttagcaaagaaagcrttctccagcatcacagtgtcagctcgcactggaggataccccaatcttccacagctgtcgtttgagtagccaacaagagtgacagtggtgatggacattt

SEQ ID NO: 204481 - DNA, 201 bp, Homo sapiens
cagctactcgggaggctgaggcgtgaacccgggaggcagagcttgcagtgagccgagatggcaccactgcactccagcctgagcgacacagcgagactccmtctcaaaaaaaaaaaaaaaaaaagaactagctggaagactctaacacatatgatgaaagggcgttgctgtgtaccagccatctgtctgcttcctaatgca

SEQ ID NO: 204482 - DNA, 201 bp, Homo sapiens
gtccatcaatgatagagtggattaagaaaatgtggcacatatacaccatggaatactatgcagccataaaaaaggatgagttcatgtcctttgcagggacwtggatgaagctggaaaacatcattctcagcaaactatcacaaggacagaaaaccaaacactgcatgttctcactcataggtgggaattgaacaatgagaa

SEQ ID NO: 204483 - DNA, 201 bp, Homo sapiens
ggaaggaaatgaaagaaagagagagagagaaagaaagaaagagaaagaaagaaagaaagaaagaaagaaagaaagaaagaaagaaagaaagaaagagaaaraaagaaagaaaagaaaagaaagaaaaagaaagaaagccatgttggcatcatgtttgcagtgagattcaaatcagtcactcagttgctgtcagacgtccct

SEQ ID NO: 204484 - DNA, 201 bp, Homo sapiens
tgtaaatgatgagttgatgggtgcagcaaactaacattgcacatgtataactatgtaacaaacctgcacattgtgcacatgtaccctagaacttacagtattataaataaataaataaataaataaataaataaataaataaatagttacagtgtcattttacatattggttcgttttggtcacttttgctatgctatcgt

SEQ ID NO: 204485 - DNA, 201 bp, Homo sapiens
ataaccagagttacctacgtaaagcatagattaaatcatgacctccctacccttcaaaaaagctttcatggtttccatcacatatgaaataaagtcaagatttttttttttttttgagacagagtcttgctctgttgcctgggctgaagtgagatggtacaatctcagctcactgcaacatctgcctcccaggttcaagca

SEQ ID NO: 204486 - DNA, 201 bp, Homo sapiens
taaatgatgagttgatgggtgcagcaaactaacattgcacatgtataactatgtaacaaacctgcacattgtgcacatgtaccctagaacttacagtattataaataaataaataaataaataaataaataaataaataaatagttacagtgtcattttacatattggttcgttttggtcacttttgctatgctatcgtat

SEQ ID NO: 204487 - DNA, 201 bp, Homo sapiens
atgatgagttgatgggtgcagcaaactaacattgcacatgtataactatgtaacaaacctgcacattgtgcacatgtaccctagaacttacagtattataaataaataaataaataaataaataaataaataaataaatagttacagtgtcattttacatattggttcgttttggtcacttttgctatgctatcgtattta

SEQ ID NO: 204488 - DNA, 201 bp, Homo sapiens
tgatgagttgatgggtgcagcaaactaacattgcacatgtataactatgtaacaaacctgcacattgtgcacatgtaccctagaacttacagtattataaataaataaataaataaataaataaataaataaataaatagttacagtgtcattttacatattggttcgttttggtcacttttgctatgctatcgtatttaa

SEQ ID NO: 204489 - DNA, 201 bp, Homo sapiens
ggcgcagatcattagttatgaagtgttttgattttcttcttttttaaaaaaatatttcccccctcacgaatgactgtgaatgtagcaaactgacacacacrcacaaatggatttcccactctttggggttgtttcttgtagtgcttagttttacagtcatgcttttttgatgatgttgccacggcagtgaatgaatctgaa

SEQ ID NO: 204490 - DNA, 201 bp, Homo sapiens
aagtatccaattgttaggataagtctgtgatgttttagccaggaatgatataaccacattttgaagtgaggtctgggcagccatttgtttggtaatttgcytttctcactgaattcacccaggccctgtgatttgagtgacctggaatatttggatgaggaattccaccagagtttgcagtggatgaaggacaacaacatc

SEQ ID NO: 204491 - DNA, 201 bp, Homo sapiens
tcagtaccttcttgacgctttcttcacgaggcccttctacaaggcactcctgagactgtaagtgctttgcagaccatgcttccaacccagccctgtctgcrgggcaaggacaccgacctctctggtgccactgacccttttgtcactattttgccctaaccattcctgttagggttatggtggcttcctgttctgagtgct

SEQ ID NO: 204492 - DNA, 201 bp, Homo sapiens
aaaacaaagaacttctggcagggagcagctagtcaggtgattcaaggctccacagcagggaatctatgtgtgctgggcttcttgtacccactgctggagasccacatgagtcttccaggtccaggtgttagcctctggcgaggaagacattccttgtctaaggcagacactggccatgcaggaggaagcacatgaagcaag

SEQ ID NO: 204493 - DNA, 201 bp, Homo sapiens
cagacattccaaagaatatggatgctgggtggtaacaagtattttatcattagccaatattttataattggcactaatcacctaagtgataaaagaaaaaktcaccatcagactacttatggactgctttgtttaggtacctgtgtccacaagtgccaaacatatatgtatttttttctttaaaccagtaactaagtccag

SEQ ID NO: 204494 - DNA, 201 bp, Homo sapiens
caatcacttccatcccattacataacgattccactcagaactctccagtggctttttcaccatcattcctgctgctctgcccttgcctgacactgcctcattctttccacctaattccagcctcgagagtcctctttctaatccttgaatacagcaagatggttcttccctcagggcccttgcacttcaggtttctctgct

SEQ ID NO: 204495 - DNA, 201 bp, Homo sapiens
agcctggtaatttttttaaattttaagaaaacaaatcctataaacagtgaattggggaaagcaaatcaccttcaaatgaactaaactcatgttggctacasatcttgtcctctagggaactaaatgccagaaggaaaaggactgatgttgtcatttagtcatcacatcatcacaatcactaacatttactgagcacttaat

SEQ ID NO: 204496 - DNA, 201 bp, Homo sapiens
agtggcgggtggagcgcggcgtggtacagcagaccgaggcgctggtgcgcggcttctacgaggtgaggcccggtggcctggggaaggcaagctgtggccarggtgctgcttcacggggcctcatcctccaggctccctgagggagcagcagctcaggtggtgaaaacagagagggagagccaaggtgggcagtgggctcag

SEQ ID NO: 204497 - DNA, 201 bp, Homo sapiens
acgatcttggctcactgcaacctccaccttcctggttcaagcgattctcctgcctcagcctcctgagtagctgggactacaggcgcccactatcacacccrgctaatttttgtatttttagtagagacggggtttcactattttggccaggctggtctcaaactcctgacttcatgattggcccgtctcggcctcccaaag

SEQ ID NO: 204498 - DNA, 201 bp, Homo sapiens
agttctcggagggactgctttcaacttttccccattcagtattttgttggctgtgggtttgtcatagatggcttttattgcactaaggtatgttccttctrtgacgattttcctgaaagttttaatcataaatgttggattttgtcaaatgctttctctgtatctattgagatgatcatgtgattttgttttcaattctgt

SEQ ID NO: 204499 - DNA, 201 bp, Homo sapiens
gagccactcgtacccgttctgggaaggtaggagccctcctgaaatccaggtttctagacattagccaagagccaaccttataagcagttgagtagtctcargctgctatgttaacttctgtctacacacattcctgcagatgtggcctgggttttgcaaatttctgtgatgcttgtacttcctgccttttttctttcattg

SEQ ID NO: 204500 - DNA, 201 bp, Homo sapiens
aggctcagacaacggtaaaatagctagaaagttaaataactaaaaactgagctattagctaacgttaatagctaaactgagagctaagctattttggtccattaattaactactttgattaattttgtagagtgaattgttcagtcgtttgaccatgaaaggctgcttgcctggataactaaatgcacatcgtttttgcga

SEQ ID NO: 204501 - DNA, 201 bp, Homo sapiens
attctcccaggaggtccttcttttcaggtattgccaagctttaaaaaatgccatgatcttcaaaaacctaagattattgacatgcacaagaggatatgccracaatacagtcccagggcactgaatctttcctttttaggtggtgtacccctctgagtatctaatttaaaaaactctttctcttaaagtgcatgtatacaa

SEQ ID NO: 204502 - DNA, 201 bp, Homo sapiens
ccagggagctggagctggtgatagctggcaccgcggaaatcgacctaaatgactggcggaataacactgagtaccggggaggtgagtgggcaggagctgtratgatgcaatgatcacaaatagaactcagcactttccaaaagattgttttgttgaggtgaaattgatgtaaaataaaattgactaaagcgaacaagtcag

SEQ ID NO: 204503 - DNA, 201 bp, Homo sapiens
ggctcagacaacggtaaaatagctagaaagttaaataactaaaaactgagctattagctaacgttaatagctaaactgagagctaagctattttggtccattaattaactactttgattaattttgtagagtgaattgttcagtcgtttgaccatgaaaggctgcttgcctggataactaaatgcacatcgtttttgcgac

SEQ ID NO: 204504 - DNA, 201 bp, Homo sapiens
atgagttgatgggtgcagcaaactaacattgcacatgtataactatgtaacaaacctgcacattgtgcacatgtaccctagaacttacagtattataaataaataaataaataaataaataaataaataaataaatagttacagtgtcattttacatattggttcgttttggtcacttttgctatgctatcgtatttaaag

SEQ ID NO: 204505 - DNA, 201 bp, Homo sapiens
gctcagacaacggtaaaatagctagaaagttaaataactaaaaactgagctattagctaacgttaatagctaaactgagagctaagctattttggtccattaattaactactttgattaattttgtagagtgaattgttcagtcgtttgaccatgaaaggctgcttgcctggataactaaatgcacatcgtttttgcgact

SEQ ID NO: 204506 - DNA, 201 bp, Homo sapiens
tgagttgatgggtgcagcaaactaacattgcacatgtataactatgtaacaaacctgcacattgtgcacatgtaccctagaacttacagtattataaataaataaataaataaataaataaataaataaataaatagttacagtgtcattttacatattggttcgttttggtcacttttgctatgctatcgtatttaaaga

SEQ ID NO: 204507 - DNA, 201 bp, Homo sapiens
ctcagacaacggtaaaatagctagaaagttaaataactaaaaactgagctattagctaacgttaatagctaaactgagagctaagctattttggtccattaattaactactttgattaattttgtagagtgaattgttcagtcgtttgaccatgaaaggctgcttgcctggataactaaatgcacatcgtttttgcgactt

SEQ ID NO: 204508 - DNA, 201 bp, Homo sapiens
gttgatgggtgcagcaaactaacattgcacatgtataactatgtaacaaacctgcacattgtgcacatgtaccctagaacttacagtattataaataaataaataaataaataaataaataaataaataaatagttacagtgtcattttacatattggttcgttttggtcacttttgctatgctatcgtatttaaagacat

SEQ ID NO: 204509 - DNA, 201 bp, Homo sapiens
tcattctcatggcagtggcagggttaccagagagtggagacacacaggtctcttgaaaccctgatgcagaactgacccgttgtcacttctgacatgttctrttggttgaaacaaggcacaaggccagccccaattcagcaaggggaagagcagcgaagtcccaatacaactgggtgtggatacaaggaggagaggaattgt

SEQ ID NO: 204510 - DNA, 201 bp, Homo sapiens
cctaacatcagaccttgtgatatcatcctccacagcacattgccttccttgaattgttggcaaatggcccgaagaagagtcaagtcaacaaacagcaatgygctgaaggggagggttgagtctttttggggcctttaagccacttgggaagatgggctggaaatgtgtgaaactcaattaccttttgaactctcactaaaa

SEQ ID NO: 204511 - DNA, 201 bp, Homo sapiens
ttgatgggtgcagcaaactaacattgcacatgtataactatgtaacaaacctgcacattgtgcacatgtaccctagaacttacagtattataaataaataaataaataaataaataaataaataaataaatagttacagtgtcattttacatattggttcgttttggtcacttttgctatgctatcgtatttaaagacatt

SEQ ID NO: 204512 - DNA, 201 bp, Homo sapiens
agaatcgtgaaggtactgttttcaggtggctctttagacaaacccatggcatcacagtgctgagcccttcaagtcatgctgatgcctgaagttccatttcraatttatttcctttggttataaaatatgtgaaagtaaattctttacaaagcaacccagaaaacatgttcataatttctgattacacttagctattatttt

SEQ ID NO: 204513 - DNA, 201 bp, Homo sapiens
acacttggcctaaatccaacagtctgctgtgtgggtgaaggcttgtgtgctgccactgtcaggagcgaagtacagaggttgaaatgcctttttcccaatgmattctgttgctttgcttcactttttttcagatctaaggagagaagggtcactttctccagtgaactcacaaaaaatcaccttgctgctgcagtccccagc

SEQ ID NO: 204514 - DNA, 201 bp, Homo sapiens
acatcagaccttgtgatatcatcctccacagcacattgccttccttgaattgttggcaaatggcccgaagaagagtcaagtcaacaaacagcaatgcgctsaaggggagggttgagtctttttggggcctttaagccacttgggaagatgggctggaaatgtgtgaaactcaattaccttttgaactctcactaaaatgtg

SEQ ID NO: 204515 - DNA, 201 bp, Homo sapiens
tgatgggtgcagcaaactaacattgcacatgtataactatgtaacaaacctgcacattgtgcacatgtaccctagaacttacagtattataaataaataaataaataaataaataaataaataaataaatagttacagtgtcattttacatattggttcgttttggtcacttttgctatgctatcgtatttaaagacatta

SEQ ID NO: 204516 - DNA, 201 bp, Homo sapiens
gtgtgctgccactgtcaggagcgaagtacagaggttgaaatgcctttttcccaatgcattctgttgctttgcttcactttttttcagatctaaggagagargggtcactttctccagtgaactcacaaaaaatcaccttgctgctgcagtccccagcggtcaagttcatcaccaaccccgagttcttcactgtgctacatg

SEQ ID NO: 204517 - DNA, 201 bp, Homo sapiens
ttagctattattttctgaatacatatgagtatataattagcacaatacattccaggtatttaatgtattgacaaaagagcccagctgtttggcttactacrcttttccatgaggaattgaaacatgtgatgataaattatcattattgcagcttcattttctagctttttcccttaatttataaaagccaacctttgtctg

SEQ ID NO: 204518 - DNA, 201 bp, Homo sapiens
cctccacagcacattgccttccttgaattgttggcaaatggcccgaagaagagtcaagtcaacaaacagcaatgcgctgaaggggagggttgagtcttttkggggcctttaagccacttgggaagatgggctggaaatgtgtgaaactcaattaccttttgaactctcactaaaatgtgcaaaacccagatggaactatga

SEQ ID NO: 204519 - DNA, 201 bp, Homo sapiens
atgggtgcagcaaactaacattgcacatgtataactatgtaacaaacctgcacattgtgcacatgtaccctagaacttacagtattataaataaataaataaataaataaataaataaataaataaatagttacagtgtcattttacatattggttcgttttggtcacttttgctatgctatcgtatttaaagacattaac

SEQ ID NO: 204520 - DNA, 201 bp, Homo sapiens
tttctagctttttcccttaatttataaaagccaacctttgtctgcgaaggacccctttctttactgtaggttcctggagggcagggtcatgtgtcactcakctctgtgtcctcaggacctggcacagtctctagttcagagtgagtgctacacagtttgttcagtcaaattaaattccacaatgctcttcaaagactaatg

SEQ ID NO: 204521 - DNA, 201 bp, Homo sapiens
tattttatggtatatatgggactggcttagagtcatcccgtctgtggttatgtaaagccaaaccacgttatcatagctttgttgcacagttattttttttaaaaaaagctatggcttgtttgttgcccatgtcagtccgagaaaccagtgtaattctgactttggaaattccaccttatggtcttcccaattcaaagcaaa

SEQ ID NO: 204522 - DNA, 201 bp, Homo sapiens
tgggtgcagcaaactaacattgcacatgtataactatgtaacaaacctgcacattgtgcacatgtaccctagaacttacagtattataaataaataaataaataaataaataaataaataaataaatagttacagtgtcattttacatattggttcgttttggtcacttttgctatgctatcgtatttaaagacattaaca

SEQ ID NO: 204523 - DNA, 201 bp, Homo sapiens
gcatttaaatcagtaaaggcacttacatctggaggtggccagatctgtatggccagttcttcctagcagtgacctcgttctgtcttttatgtggctggcarttttaaagagtgatgttcattcagcttatctcttaccatattgtgattctatgtaactcttccccactatctgcaagcacaactgccatatgggctccat

SEQ ID NO: 204524 - DNA, 201 bp, Homo sapiens
tgtgcagcctctgtaaacaagccagaaccagtctatggttggcaatctcttatcagaagaaagttactgaaatcattctcttttatggttttttatttttmtttttattattttattttattttccataagttattggggtacaagtggtatttggttacatgagtaagttctttagtggtgatttgtgagattttgatgt

SEQ ID NO: 204525 - DNA, 201 bp, Homo sapiens
cttcctgagttacattatacttagaataatagtctccagcctcatccagatcactgcaaatgttaattcattcatttttatggttgtgtagtattccatcwtatatatatatacacacacacacacacacacacacatcatatatatatacacacacatcatatatatatatacacacacacacactacagccacttgttg

SEQ ID NO: 204526 - DNA, 201 bp, Homo sapiens
gtaatcatatgtatatacaatttcatccatgagctaattaccatttacacttaacacttgacagctggattatcattagataatcattagatctattttawtcaaaatctcctaggacatatttatacaatctgcctacatttttccttcaatttgtctcataagttaagtttggtgtttggggatactttggtttttact

SEQ ID NO: 204527 - DNA, 201 bp, Homo sapiens
ttcctgagttacattatacttagaataatagtctccagcctcatccagatcactgcaaatgttaattcattcatttttatggttgtgtagtattccatcatatatatatatacacacacacacacacacacacacatcatatatatatacacacacatcatatatatatatacacacacacacactacagccacttgttga

SEQ ID NO: 204528 - DNA, 201 bp, Homo sapiens
agctgacacaaaccacctggctgtcaacctacaggtggtaggcaatgcataggtgaatgcagtccccagagtcatggcttgggaaacaggacattacaatsgtgtcctggaggcatccaggcatggatgcagttatagcaaccctctggcctcattcactgacccaacaaaatgtgtgaacccccaaaatttgccagtaca

SEQ ID NO: 204529 - DNA, 201 bp, Homo sapiens
ttatatatatatgtctttcacactctaataagtcaggatctccaagatcacccctaggttcaacaatttgctaggaggactcacaagactcagcatctagwtatactcgtggtatgacttattacagtgaaaggacacttagcaaaattagctaagggaaaaggtgcttagggcaaagtctggaggaagccaggagcaagc

SEQ ID NO: 204530 - DNA, 201 bp, Homo sapiens
cagaatcgtgaaggtactgttttcaggtggctctttagacaaacccatggcatcacagtgctgagcccttcaagtcatgctgatgcctgaagttccatttyaaatttatttcctttggttataaaatatgtgaaagtaaattctttacaaagcaacccagaaaacatgttcataatttctgattacacttagctattattt

SEQ ID NO: 204531 - DNA, 201 bp, Homo sapiens
tccaattttcatgcagagtccctgagtcaatagttatttcatgtttgttattgtaaacaatttcacatttccttttcaaaggaaaatcattgaatgaactraaatgactgaatgatctgattcatcagtggattcaaaagtatccaattgttaggataagtctgtgatgttttagccaggaatgatataaccacattttga

SEQ ID NO: 204532 - DNA, 201 bp, Homo sapiens
cgtttgagtagccaacaagagtgacagtggtgatggacatttctaaagaaataaattcattaaacagtagattttctctttataaattattagaatttttrtattcgtcacaccatcacaccatcacgggtgtgatgacccgtgcctgtaatctcagcactttggaaggctgaggtgggaagatcacctgaggtcaggagt

SEQ ID NO: 204533 - DNA, 201 bp, Homo sapiens
aacattaaaacactatcagccagtgatttatctttttattttcatgtcacaaactaataaatggaataaatacagagtcatctgagtaacaactggtttgrggctatgtgtttgttattactgggtaccctgggtttgttaactcctgaatatccaaaggtggtcactcttcctatttaggcccaggtaaggggcaattta

SEQ ID NO: 204534 - DNA, 201 bp, Homo sapiens
tcaaaaactcggcagctcctgtaagtctcatttctccgtctttggttagacctaactctggtctttcttcactttcctattttgttcttgtgcgtgcgtgygtgtgtgtgtgtgtgtgtgtgtacgtgtacatacacacatatggagatatactgatagattgattatgaataaatggaaagacacctcaaaatggtcaag

SEQ ID NO: 204535 - DNA, 201 bp, Homo sapiens; identical to SEQ ID NO: 35934

SEQ ID NO: 204536 - DNA, 201 bp, Homo sapiens
ctgggtagccatctgtaaaagttttaagttagatccctaacctaactcatgacactaaataaattccagttggatcagaaacctgaatgtaaaaatttttwaaaaaggaaaaaagagataatttttatttttaatcttgcactaaagaatgctgatacagatatggcacaaattctcaaagtcatagaagtcatctgacat

SEQ ID NO: 204537 - DNA, 201 bp, Homo sapiens
aaaatatattttctattcattgagtggaagtggatcatcataaagtttgtcttcactttgaataggctgaagaggagcaggaaaggaaggtttggtcttgytgtctcggggtggaggaggtggaaggggggcaggagaggcaggcacacttggtgtaactttatggaaatacatcataatttctgtcgtttttgctttttc

SEQ ID NO: 204538 - DNA, 201 bp, Homo sapiens
gctgggagatcaaaacggaccagcagggaaaggtgagtgtgacccacgtgcggggctttcatcaaacaggctccttccccagggtgaagctagcaagggcrtgaggaggagagtgtggggaggagttatgtctgagagatgtgctatcggccgccagcagtaaaggggctgataaccacccacatctgggtttctcaacct

SEQ ID NO: 204539 - DNA, 201 bp, Homo sapiens
ctcacttgctgtgaaggctgcatttgcagtgtcaggggccccttagaaggaacaaacatccagttcctgcaccctgaatctgaatcaactgcaactgggaraagcaactaccaattgaatatgcaccatgccagatggcctggcatatttatgtgctttgagttgccatgtcctgtgtgccagagagctaaaactggtttc

SEQ ID NO: 204540 - DNA, 201 bp, Homo sapiens
gatgttgttttggggggcaggtagaccactttgatgccttggtgttgaactcaaggggttctgggtggccaagggcattgtccaatatcaaaaaaaaaaacaaacaaactttaaaaggtagtccctttctggcaaggtacttcctaacttcgggaacaaagcactgacagaaccaatccagaaaagaggttctcattatcc

SEQ ID NO: 204541 - DNA, 201 bp, Homo sapiens
cattatacttagaataatagtctccagcctcatccagatcactgcaaatgttaattcattcatttttatggttgtgtagtattccatcatatatatatatacacacacacacacacacacacacatcatatatatatacacacacatcatatatatatatacacacacacacactacagccacttgttgattgatgggcat

SEQ ID NO: 204542 - DNA, 201 bp, Homo sapiens
gtaatctcagctactcgggaggctgaggcaggagagtcgcttgaacccaggaggcagagattgcagcaagccaggattgcgccactgcactccagcctggygacagagtgagactctggctcaaagaaaaaaaaaaaagctgtgttttcaatatgagataaaaagatattccacaaaaagtgccaggttttcacacctgct

SEQ ID NO: 204543 - DNA, 201 bp, Homo sapiens
attatacttagaataatagtctccagcctcatccagatcactgcaaatgttaattcattcatttttatggttgtgtagtattccatcatatatatatatacacacacacacacacacacacacatcatatatatatacacacacatcatatatatatatacacacacacacactacagccacttgttgattgatgggcatt

SEQ ID NO: 204544 - DNA, 201 bp, Homo sapiens
gattgcagcaagccaggattgcgccactgcactccagcctggcgacagagtgagactctggctcaaagaaaaaaaaaaaagctgtgttttcaatatgagataaaaagatattccacaaaaagtgccaggttttcacacctgctggcatagctgcagtgatggcttcatgaatttcgttttccttttttacaatggtcccta

SEQ ID NO: 204545 - DNA, 201 bp, Homo sapiens
ggccttgggcctcaatttctcttttgttgagacaaggtctcactctgtagcccaggctagaattcagtggtgttatcaggttcactgcaactttgacctcytgtgctcaagcaatccccctgcctcagcctcctgagtagctaggactacaggcacatgccaccacacctggctaatatttttaaaaatttttaaattttt

SEQ ID NO: 204546 - DNA, 201 bp, Homo sapiens
ttatacttagaataatagtctccagcctcatccagatcactgcaaatgttaattcattcatttttatggttgtgtagtattccatcatatatatatatacacacacacacacacacacacacatcatatatatatacacacacatcatatatatatatacacacacacacactacagccacttgttgattgatgggcattt

SEQ ID NO: 204547 - DNA, 201 bp, Homo sapiens
tcataaaagaagtcaaaagcagtcaaacaatcagaaccgttctgccagattgtctaacatcgatttgttttctggcactgcttcttctagatcttcttccycgtcacctggcactggttcagaagcattcatctccatcaagtcatcttctgttagttcctctggcgtggtgtctgtcagctcttgaatttctccaagatc

SEQ ID NO: 204548 - DNA, 201 bp, Homo sapiens
gaacccgggaggcagaggttgcagtgagccaagatcatgccactgcactccagcctgggcaacagagcgagattctgtctcaaaaaaaaaaaaaaaaaaargtctctgcctggctgttaaggccccataacaccccccggaaatattccttcctgccttcaccagacacacctctactctagtggcttactgttgcctgca

SEQ ID NO: 204549 - DNA, 201 bp, Homo sapiens
tatacttagaataatagtctccagcctcatccagatcactgcaaatgttaattcattcatttttatggttgtgtagtattccatcatatatatatatacacacacacacacacacacacacatcatatatatatacacacacatcatatatatatatacacacacacacactacagccacttgttgattgatgggcatttg

SEQ ID NO: 204550 - DNA, 201 bp, Homo sapiens
ttttttcagatctaaggagagaagggtcactttctccagtgaactcacaaaaaatcaccttgctgctgcagtccccagcggtcaagttcatcaccaacccmgagttcttcactgtgctacatgccaattatgtgagtgccctaaaatgcagagggggcggcctggctcggcaagacccaaaacacagctttgtaaagtcat

SEQ ID NO: 204551 - DNA, 201 bp, Homo sapiens
ataaaagaagtcaaaagcagtcaaacaatcagaaccgttctgccagattgtctaacatcgatttgttttctggcactgcttcttctagatcttcttcctcktcacctggcactggttcagaagcattcatctccatcaagtcatcttctgttagttcctctggcgtggtgtctgtcagctcttgaatttctccaagatcta

SEQ ID NO: 204552 - DNA, 201 bp, Homo sapiens
ggtcagcattcatgggcatgcccagctggttaaccacagctgaacaccctggtgcaggcttcagccctggcttcacccactcagttcagcagaccctcagytccaagggtctttgttgtttgcatggctctaccaatagctaaacctagtgaatgtaagtctggcaagaaaagaagactaaaaaggcagaatttgcatttg

SEQ ID NO: 204553 - DNA, 201 bp, Homo sapiens
tgttaattcattcatttttatggttgtgtagtattccatcatatatatatatacacacacacacacacacacacacatcatatatatatacacacacatcatatatatatatacacacacacacactacagccacttgttgattgatgggcatttgggttgcttgcacgattttgcaattgtgaattgtgctgctataaac

SEQ ID NO: 204554 - DNA, 201 bp, Homo sapiens
aaagaagtcaaaagcagtcaaacaatcagaaccgttctgccagattgtctaacatcgatttgttttctggcactgcttcttctagatcttcttcctcgtcdcctggcactggttcagaagcattcatctccatcaagtcatcttctgttagttcctctggcgtggtgtctgtcagctcttgaatttctccaagatctatat

SEQ ID NO: 204555 - DNA, 201 bp, Homo sapiens
aatatgtgggttgtatgtttattctcctgactgttccttgtgccatgcaaaagctcttcagtttaattaggtcctaggtatttatctttgtttttattgcwtttgcttttgggttcttggtcgtgaaatccttgcctaagccaatgtctagaaagttttttcaatgttatcttctagaatttttatagtttcaggtcttag

SEQ ID NO: 204556 - DNA, 201 bp, Homo sapiens
ctgcagccatgaaccaatggtgagttctacctgcagaagacttggaagttgtatgtgtttcacgtgggtcagtagtttgtccttgatttttctttttgcctttttattaaacactagactgggaagctcgaattgacagccacgggcgggtcttttatgtggaccacgtgaaccgcacaaccacctggcagcgtccgacgg

SEQ ID NO: 204557 - DNA, 201 bp, Homo sapiens
ttcagtattttgttggctgtgggtttgtcatagatggcttttattgcactaaggtatgttccttctatgacgattttcctgaaagttttaatcataaatgytggattttgtcaaatgctttctctgtatctattgagatgatcatgtgattttgttttcaattctgtttatgtggtatatcacatttattgacttgcatat

SEQ ID NO: 204558 - DNA, 201 bp, Homo sapiens
tccccagacgcggcacactcttccaggcctttatggcttggccacatgctcccatggcaggaaaatgcctcccacctgcctcccacctgaaacatatctcrtcctacagacctgactcaatgtcgtgccccaggaagccgtcccagaatccctcacacagagccagtgacttcctcccctatagcttctggaatgtgcctg

SEQ ID NO: 204559 - DNA, 201 bp, Homo sapiens
ctatgaactttaccagagagaatccctccctctttatggtccaaggaaccagaagctttgcctgcagtcatgtctgtgacgtgtcctttcctctgtgaacrtgggcctgcaaagccacgttccccaaagggagctgatggggcatcaatgtcccctcgaagccatgagtctctctcctataaaccccttagtatgcctcag

SEQ ID NO: 204560 - DNA, 201 bp, Homo sapiens
tttattgacttgcatatgttaaaccatccctacatccctcttataaaacccatttgatcatggtggattatctttttgatatattgttggattcatttagmtactattttgttaaagattttagcatctatgttcatcaaggacatcggtatgtagttttcttttttggttaagtcctttcctggttttggtattagggta

SEQ ID NO: 204561 - DNA, 201 bp, Homo sapiens
  misc_feature (1)...(201): n = A,T,C or G
caacaggcggttggtgatcagtatgcaatgagctcccctaaaccacagtgaaaggagaatggcagctagagacgctccccttacacttttctgctcagacngtatgaggagactggaaagtaattaagtatcttaagaaacctgttcctagtaggtatttggaaagctagatttagaatttggaggcgagagacaagttaa

SEQ ID NO: 204562 - DNA, 201 bp, Homo sapiens
ttccatatgcatgcacaattcttacatggttatgatggtgatatgtagttagtttcatattcttttttcacttactacactgtaagcatttaatattgccrcatagtcttcaggttaacatgtaattgcttgtatagtattccactgaatggctgaagtttagttaacctgatttcatattgttgaatgttttgcttattg

SEQ ID NO: 204563 - DNA, 201 bp, Homo sapiens
ttcctggttttggtattagggtaatgctggcttcacagaatgaattagagagggttccttctttctctatcttgtggaatagtgtcaaaagtaccaattcwtctttcaatgtctggtagaattttgctgtgaatctgtctggtcctggacttttttttgtttgtaatttttaaattaccattttaatctcactgcttgtta

SEQ ID NO: 204564 - DNA, 201 bp, Homo sapiens
ctaccactttcattgacccccgaatccctcttcagaacggtcgtcttcccaatcatctaactcaccgacagcacctccagaggctccgaagttacagcgcyggagaggtaaccctccctacaccccgccctactgttcaccggtcacagtctctgcctcttccatgggagcagaacagttcttcagtggctaggatctagg

SEQ ID NO: 204565 - DNA, 201 bp, Homo sapiens
aagggtcactttctccagtgaactcacaaaaaatcaccttgctgctgcagtccccagcggtcaagttcatcaccaaccccgagttcttcactgtgctacaygccaattatgtgagtgccctaaaatgcagagggggcggcctggctcggcaagacccaaaacacagctttgtaaagtcatctgatagatctaaaagggtag

SEQ ID NO: 204566 - DNA, 201 bp, Homo sapiens
ttgtggaatagtgtcaaaagtaccaattcttctttcaatgtctggtagaattttgctgtgaatctgtctggtcctggacttttttttgtttgtaatttttwaattaccattttaatctcactgcttgttattggtctgctcagggtatctaattcttcttgatttaagctaagagggctgtatttttccaggaatttatcc

SEQ ID NO: 204567 - DNA, 201 bp, Homo sapiens
taccgatttctctgccttgtctgtgttccaggttcaggtttagcggtcgcatcctgggtctggctctgatccatcagtaccttcttgacgctttcttcacraggcccttctacaaggcactcctgagactgtaagtgctttgcagaccatgcttccaacccagccctgtctgcagggcaaggacaccgacctctctggtgc

SEQ ID NO: 204568 - DNA, 201 bp, Homo sapiens
accttgctgctgcagtccccagcggtcaagttcatcaccaaccccgagttcttcactgtgctacatgccaattatgtgagtgccctaaaatgcagaggggrcggcctggctcggcaagacccaaaacacagctttgtaaagtcatctgatagatctaaaagggtagaattttaacataagcaagaaaaaacaaagaaaaca

SEQ ID NO: 204569 - DNA, 201 bp, Homo sapiens
taagaattctgccaatctgtattcgtatgtttcttcccagttatgtctttaaggcctaagaccagacactctactgccctgtgcctgcctttggagcttgwgcggggaaagggacagggaggagggaggtaggggttagggatagttccccaaggactgccaggaggaggaatgggtgctgggcagatgaaaacaccagca

SEQ ID NO: 204570 - DNA, 201 bp, Homo sapiens
gttatgtctttaaggcctaagaccagacactctactgccctgtgcctgcctttggagcttgagcggggaaagggacagggaggagggaggtaggggttagrgatagttccccaaggactgccaggaggaggaatgggtgctgggcagatgaaaacaccagcatcctccctagattctcgatgggcaggaaaccccaccttc

SEQ ID NO: 204571 - DNA, 201 bp, Homo sapiens
agaaagttccatgcactgttgaatagaatgtgtgttctgtgtttgttgaatgaaatgttcttttttttcttcgtttttgtttttgttttgttttgttttgttttttgagacggaattttgctctggttgcccaggctggaatgcaatggcgcactctcggctcactgcaacctttgcctcccaggttcaagtgattctcct

SEQ ID NO: 204572 - DNA, 201 bp, Homo sapiens
gagccccaatcccttctagcttgtagggtttctgctgagaaatctgctgtcaatctgatacgttttcctttatagtttacctggtgcttctatctcacagmccttaagattctttccttcatcttaactttagataacctgatgacagtgtgcctaggggaagatctttttgtggttaatttcccaggtgttctttgtgct

SEQ ID NO: 204573 - DNA, 201 bp, Homo sapiens
tcctttatagtttacctggtgcttctatctcacagcccttaagattctttccttcatcttaactttagataacctgatgacagtgtgcctaggggaagatmtttttgtggttaatttcccaggtgttctttgtgcttcttgtatttggctgtctaggtctcttgcaaggccagggaagttttcctcaattattcccccaaa

SEQ ID NO: 204574 - DNA, 201 bp, Homo sapiens
tttgcttaaatcctaggtctgccatgaaccatatgtgtgaccttatgtaagtggccttaattttgacctcattttccttagatgtaaaataagaatgacakgtgacatttactgaggtctgattatatgccaagcattgtgctaaacacatttttttaagaaggctaataatgattggctatacatcataggattcttgtg

SEQ ID NO: 204575 - DNA, 201 bp, Homo sapiens
agaactcaaatatgagggtaagacagctctcagggccacaaagcagtgaaaaaaactctgagcagatggtaagagaatcagacttccatatccacaatgcccctccctcccctcaatctacctggcaccaagtgcatggaaaatttttccccaactcatgatttatacactggaaaaagtgaaatggaggtagacaaccag

SEQ ID NO: 204576 - DNA, 201 bp, Homo sapiens
gaactcaaatatgagggtaagacagctctcagggccacaaagcagtgaaaaaaactctgagcagatggtaagagaatcagacttccatatccacaatgcccctccctcccctcaatctacctggcaccaagtgcatggaaaatttttccccaactcatgatttatacactggaaaaagtgaaatggaggtagacaaccagc

SEQ ID NO: 204577 - DNA, 201 bp, Homo sapiens
ggcaggagagtcgcttgaacccaggaggcagagattgcagcaagccaggattgcgccactgcactccagcctggcgacagagtgagactctggctcaaagaaaaaaaaaaaagctgtgttttcaatatgagataaaaagatattccacaaaaagtgccaggttttcacacctgctggcatagctgcagtgatggcttcatg

SEQ ID NO: 204578 - DNA, 201 bp, Homo sapiens
aactcaaatatgagggtaagacagctctcagggccacaaagcagtgaaaaaaactctgagcagatggtaagagaatcagacttccatatccacaatgcccctccctcccctcaatctacctggcaccaagtgcatggaaaatttttccccaactcatgatttatacactggaaaaagtgaaatggaggtagacaaccagct

SEQ ID NO: 204579 - DNA, 201 bp, Homo sapiens
cagcaccatgccgtggaaagcttgttccatagatccccttggcatgagcccttagccagtttttccatagtcctgggataacccttttgggacctcctccrttcaggatgggcagcaatctgattgtttactagaagtgaggcaaacctgggtttaatgtgccatctagtgtcaaaaaggaggcaattatttatagtaggg

SEQ ID NO: 204580 - DNA, 201 bp, Homo sapiens
ctagtgtcaaaaaggaggcaattatttatagtaggggaaaaaaaagaaagatatcaacaggtaaattacaaagaatctctacacaaacatatccaataataaaaaaaaaaaaaggccagacagagaagactgaaataaataactaatccttcaatgcaaagacatagctgtatatctacaagaaaaacagcaaacagaaaa

SEQ ID NO: 204581 - DNA, 201 bp, Homo sapiens
cactgaatggctgaagtttagttaacctgatttcatattgttgaatgttttgcttattgcttttgtcactgttttttgtcacaagggcctgctaaatactragattgccttatagtggagggtttccttagggttctattcccaaaagattaggccaagggagataaatgtggatttggcatttggtatcaatgcctaact

SEQ ID NO: 204582 - DNA, 201 bp, Homo sapiens
tacatgagaaagaaaaaatctgaatttcaaatgagaagactttcagttatgacacaaactagctgtgtgcctacacacacatgctacacacacacacacayaaatggtctcagcaatttcttattaattgaacacacacacatacacacactcatagttacagaatgtctaagaggcataccatgtagtgaattgctgggg

SEQ ID NO: 204583 - DNA, 201 bp, Homo sapiens
agaatctctacacaaacatatccaataataaaaaaaaaaaaaggccagacagagaagactgaaataaataactaatccttcaatgcaaagacatagctgtrtatctacaagaaaaacagcaaacagaaaaccatgacctcctcaagtgggcaaagaaaggaactagtgattgaccccaatgagacagcaatacgtgtactc

SEQ ID NO: 204584 - DNA, 201 bp, Homo sapiens
ttctctacaattaggttatattatttataaatagaagggaatttaaaacgacgttgcttgcttttagctgaggaatagatctctttctgggaggttctggmgggtttcaacacttgctttgtgtttgaggcaagggtgatgatgtggaaccctgtccttgtgcagaatagaactgcttgcttcttcagtgcctccatccat

SEQ ID NO: 204585 - DNA, 201 bp, Homo sapiens
agctgccttagtctttggcaggccccgttccctgccttggtcaaggtcacacacttgggcagcttcttgctggcaacccctgctttcctgccatggctacrttccctgagtcctcagcagagagaagatcacagagtgccatccttcaccatccatcactcttcataacctcccaccacagatgtacggggtggtgaatta

SEQ ID NO: 204586 - DNA, 201 bp, Homo sapiens
atccattcagtcggctgagacatgttggtcacatcattgcatttgcttggggttcacaagcaggtgggatcagctgcattaaccccaggcagtcaacaatrttgtatttccactagcttggaggagtaattaacctgattggttgcattaatttcaagaggtaagtctattgttgattttaaagaaactaagttaaaaatg

SEQ ID NO: 204587 - DNA, 201 bp, Homo sapiens
aggacttttatactgccggatgtccagataaaatatgaagctctaagaattaaatagtgtggcattggcacagaacagacaaatagctaattaaatagatkagaatccagaaatagatgcaccacatagcatcatcgttttacgacaatagtgctgctgctgtatgttatggaaaggatagcctgttcaatatttgatgtt

SEQ ID NO: 204588 - DNA, 201 bp, Homo sapiens
ctgccgcacaaaacacccaggtgtgtttatttcagcattgtttgtaaagacacaaacctagaagcaatgcaaatgtccatcggcaggggaatggttaaatrtattacagcagatccacactgcacagtcatatgaggcataaaaaagactgaattagaaccttaccaggtgatagagaaagatttcctcaagatattgttg

SEQ ID NO: 204589 - DNA, 201 bp, Homo sapiens
gcaacctgttaagagataagtaatataaaaatatgtaaattgagacaatgtaaaatccaaatgttgggaggatggagttaaattatagaggcttttttttwaatttgttctttgtttctattctttgtgatctaagataagttgtcatctccttaaaataacttgttacatctataagatttttttgtaagcctcatggca

SEQ ID NO: 204590 - DNA, 201 bp, Homo sapiens
ttttaactttttaataatagatttgtgtacattttatgttagtaaatgataaaatagactagtatctacatatattttatggactcattacatttctaactttttttttcattttaaaaaagcttctattaattttctaggtatgcaggtcatctgcgagttttttcaaattgttgtaagtctccaaaaaaattcccaata

SEQ ID NO: 204591 - DNA, 201 bp, Homo sapiens
gttctatgagatggtcagagtcacatttcctgatagaagtgtaaagtgttatttggaaagcaatttggccccaggaagggaggatccttaaaatatattcttttttttttttttttttttttttgagactgagtcttgctctgttgcccaggctggagtgcaatggcgtgatcttggctcactgccacctccacctcccgg

SEQ ID NO: 204592 - DNA, 201 bp, Homo sapiens
aaggaactcatgaatgaatcaccaacatgaaaacataggggacactcttctgtttacgtggggtgggagactggaggtactgcctcttgttctacagtgaygcctgaggctcattcacagaacctgagactcagagacacactgtttgatattcacttgccaaagtgttccttgtacttgtctgttagcatcatttttcaa

SEQ ID NO: 204593 - DNA, 201 bp, Homo sapiens
ttctatgagatggtcagagtcacatttcctgatagaagtgtaaagtgttatttggaaagcaatttggccccaggaagggaggatccttaaaatatattcttttttttttttttttttttttttgagactgagtcttgctctgttgcccaggctggagtgcaatggcgtgatcttggctcactgccacctccacctcccggg

SEQ ID NO: 204594 - DNA, 201 bp, Homo sapiens
cttaaccatttatagaactttctttttttttttttttaaatggagtctcaccctattacccaggctggagtgcactgatgtgattataactctctgcagcmttaaagtcctgagctcaagtgatcctcctgcctcagcctcccaagtagctgggaactacagatgcgtgctaccactgccagctacatctatagaactttg

SEQ ID NO: 204595 - DNA, 201 bp, Homo sapiens; identical to SEQ ID NO: 35940

SEQ ID NO: 204596 - DNA, 201 bp, Homo sapiens
caggtttgatcagcagtggggacatttgtacatttgctttttgggcaaggcatcaggtggacttgcccttctagaacagaaagaaagggaagggattcggyatcctctctctagataatttacccaggccctactcacaatctctaacctctcaaagaggcattttggaagtttagattctatcctagcccaacattaagg

SEQ ID NO: 204597 - DNA, 201 bp, Homo sapiens
tagaggtcgggtgcagtggctcccaatactttggagttgggaggatcagttaaggccaggagttcaagactagcctgggcaacatagaccacattctaccaaaaaaaaagaagaagaagaagaaagaaaaaaaattaaccaggcggagtggggcttgtctgtggtcccagctactcaggaggctgaggcaggagggtcatt

SEQ ID NO: 204598 - DNA, 201 bp, Homo sapiens
aagtgcttaggccagaaatggagaggaatttctgatgattataatgtcattaagatgccccaaacctggagcaggaagagatggaggcaaagcagactaayggtgctgggagtcactgcaggcatcacagtgagctctgtggtgctgcccatgcacgttggtgtcgttctgccttcttccttttttttttttttttttttc

SEQ ID NO: 204599 - DNA, 201 bp, Homo sapiens
cacatcaagataaatatattcatatgatgaatcttgacatgaatatatccagtgacctagaaaaaagaggacgtgaaaattaaatgaggacttcttaaacaaaaggcttttctcttctttctctgcagcagggtccaaatgttgacttctcagggattagaggcaaggagcttagcacagaatagacaaaacgaaatgttc

SEQ ID NO: 204600 - DNA, 201 bp, Homo sapiens
gggaggcggagcttgcagtgagccgagatcccgccactgcactccagcctgggcgacagagctagactccgtctcaaaaaaaaaaaaaaaaaaaaaaaaamatagagaaatataataaccagtgaaaaaaagatgaaaatattttttatctaaaaaaatacatacctaattaaaattgaaattcttcatatttcagatagc

SEQ ID NO: 204601 - DNA, 201 bp, Homo sapiens
tgcattctgttgctttgcttcactttttttcagatctaaggagagaagggtcactttctccagtgaactcacaaaaaatcaccttgctgctgcagtccccmgcggtcaagttcatcaccaaccccgagttcttcactgtgctacatgccaattatgtgagtgccctaaaatgcagagggggcggcctggctcggcaagacc

SEQ ID NO: 204602 - DNA, 201 bp, Homo sapiens
ggtgtatgtgtgccacattttctttatccagtctatcattgatgggtattcgggttggttccaagtctttgctattgtaaatcgtgctacaataaacataygtgtgcatgtgtctttatagtagcatgatttatgatcctttgggtatatacccagtaatgggattgctgagtcaaatggtatttctggttctagatcctt

SEQ ID NO: 204603 - DNA, 201 bp, Homo sapiens
gaggaccacttgagtctaggaagtcaaagctgcagtgagctatgatggtgctactgcatccagcctgggtggcacagcaagcaactcttaaaaaaaaaaamaaaaaaaaaacagcagagttgtggaggcagaatatgaacaaaatatgagcaaaagagatgcaagcagccaggctagatctgaggaaatgaccccaggggg

SEQ ID NO: 204604 - DNA, 201 bp, Homo sapiens
taccactttctcttaatgtccccaaaaataatccaagatcaagattgtgaagtgggggaaataaaagaatatctcattgccaaagcccattgataaggggmatagattgagaaaagtatgtttggaccgtgtcttacaggtttcaccctctaacttggaaaggatatgctgcacaggaggctgagagttaggaatacaact

SEQ ID NO: 204605 - DNA, 201 bp, Homo sapiens
gggtggagtagtgggttggagggggtggaagctagtgagccaggaatgctgattggtcagagatgaaatcatagggagtcggagctgtcttcttgcagtgrgtcagttcctgggtgggggccacaaaatcagactagccagtttgttgatcttggtggtgccagctgatccatcaagtgcagggtctatgaaatatctcaa

SEQ ID NO: 204606 - DNA, 201 bp, Homo sapiens
tcctcagcagagagaagatcacagagtgccatccttcaccatccatcactcttcataacctcccaccacagatgtacggggtggtgaattacaacaaatgwttctctctgtaattccaccaccactcagctcattgcccccttccacattttgttctaagaggccggctcaggaaatgccttgcagtaaccactacaggca

SEQ ID NO: 204607 - DNA, 201 bp, Homo sapiens
agcagaggacagaagaaggaaaaggcctgacctttgccctctggcccttaaaggcttttgcaagaaaaccagcatggtgtgaggcaggaggaaccatctgaaaaaagggccatcctttgtcccgggcccttctcactctgcaaagatcaagagcactggcctctgattatgtgacccaagcagctggtgctgcaggcctgc

SEQ ID NO: 204608 - DNA, 201 bp, Homo sapiens
gaaccttataaaacgctgcatttccctcaaacaggcctatttcctccactgggctaaaatcaggctctgctaattttctcttgtgttcctttctggtgccrctttctgattcaggaaattcgggtcattacagaatcagactcaaatcctacatattggactgtgtggcgcagatcattagttatgaagtgttttgatttt

SEQ ID NO: 204609 - DNA, 201 bp, Homo sapiens
gaaatgcacattcttgggccctacaccaaacctactgaatcggagactcagggggtggggctggcagtctgtgttttaagtcctgcgggtgattctgcgtrgctcaggttggggaacctgtggcctagagaataacacccatcctactgcagggcgccctctggggctccctcttccctctccactggtctcctggccctg

SEQ ID NO: 204610 - DNA, 201 bp, Homo sapiens
gctgcatttccctcaaacaggcctatttcctccactgggctaaaatcaggctctgctaattttctcttgtgttcctttctggtgccactttctgattcagraaattcgggtcattacagaatcagactcaaatcctacatattggactgtgtggcgcagatcattagttatgaagtgttttgattttcttcttttttaaaa

SEQ ID NO: 204611 - DNA, 201 bp, Homo sapiens
actctcctaatctctgcctaaattgctcattatgcaactgctaccagtttacataattgccaattaaatatttcctttagttagttaccctgttttaattycattaagttcaatttataaaagttctgtttagaggcgatctacctcagatcttttctgaagcaagatggaatataataagcatcttagttctataaatgg

SEQ ID NO: 204612 - DNA, 201 bp, Homo sapiens
ttgcaccatcactctccaccgccagtggacactggcaatgtcaggaggtagtttgggttgtcccagcttgggaggctggtactactgggcatctagtaggyaggagtcagagatgctgttaaacatcctataatacaccagaaagcaaacatcaacagtgctgaggctgaggaaccaactctattcttttgagaactgcaa

SEQ ID NO: 204613 - DNA, 201 bp, Homo sapiens
accgacctctctggtgccactgacccttttgtcactattttgccctaaccattcctgttagggttatggtggcttcctgttctgagtgcttagatatcacwtacattttttagcacaataaaaaggtatttggggattttgttgttgttgtaagggaagattctattatcaaaatctcatatcatggagatgaatcatttt

SEQ ID NO: 204614 - DNA, 201 bp, Homo sapiens
atgctgcaagagcgtcagccaagcttagcaagaaaccacacactcaggtaagcctcgcccctcactccctggaactctaggtctttccagccatttttccyggtgggaaaacacctctgtggagacagagcggaagcttattatacattgtatttgtgcatttaaatgagaacttgaatcctcaagatgaagggttcgggg

SEQ ID NO: 204615 - DNA, 201 bp, Homo sapiens
ggtccaagcaatcggagagaaggttagacctcaaacctgatcagagtgagaataggaccatcagggggacaaaggtgtcaccaacagtttaaaaacaagargggcgggggatcggtgtcaaacggggttgctggggcaatgtatgcctgtcttgtatatacatgtgtgcatgtgtatctgtgtatgagcatagatgactgt

SEQ ID NO: 204616 - DNA, 201 bp, Homo sapiens
acaggccaaaaaagccttctccttgcaagactttgcattttcttcctgggagaaaatgactgggtggcttaaacaacagatatgtatttctcaaagttccraagctgggaagtccgagcccaggatgctggcacggttgggttctggtgagggcctctttggggatgcagatggctgccttcttgctccatccacacgtta

SEQ ID NO: 204617 - DNA, 201 bp, Homo sapiens
cagagaggtagggtgatgggccccatgggtcctatcttgtggcagacatgagaccaaggcagcctctgctaaggaatgaataaataaaatgagaaggggcytaggaagagacactactgcaagaagcaaacagaatcttggtctgacaaaaagcatgtctttttttcagaaagtatatttttttcccagaaagtataattt

SEQ ID NO: 204618 - DNA, 201 bp, Homo sapiens
tttggcaccttgatcttggatttctcagccttcagagctgtgagaaataaatttctattatttataaattactcaagccatggtattttgttatagccacrggaatgaactaagacactcacatattagacttctctgattattggaccagcataactgaaccacacactttagttttcaaatgttggcaactgaagaact

SEQ ID NO: 204619 - DNA, 201 bp, Homo sapiens
aggctaaatgtattaaatgcatttttgaattgccagtattttcaacttttgatgagtttattgggtcataatccatggtagttcaaggggcatctgtattygataaggacttccttacagttttgtattgctgttgagcacatcaggacttccctgggcttgcctgcctcacccactggtatagaaagcacactgcatggt

SEQ ID NO: 204620 - DNA, 201 bp, Homo sapiens
atttaaaggcaggggcgatgtatgacatgctttgtatcaactgcagcacctttcacatggcaggggctcaaaaaatatttgttaagtgggtgaaaagcaaraaaaagaaaagccctgaaagtaaatgcaaagcataataaatgtaatttttgtgccactgtctgattgtctttaggcctcccctgatttcaattaagtttt

SEQ ID NO: 204621 - DNA, 201 bp, Homo sapiens
ttgcaactcaagaaaatcagaggttgaaaatctgtaatacaaatttcaaagagctcttgcaacttgaaaaaaagaggagatacaaccctgggaaaactggyaaagaatatgaaaaagttggtcagagaagaacaaattcaaatgattgataaacccattaaaaaatgtcaacttttccagtggtgaaggaaatgaaaacta

SEQ ID NO: 204622 - DNA, 201 bp, Homo sapiens
acagtgacatctgtagtgcggccctgtgcccggaggtactgactcctaagtacaactgcctgctccacagctccactcagatataaataggcagcacaaaygtaatatgtctgaaagagaactctccatttcctcctccaagccctgttctggtgtttcccatctcagtaaatggcacccggttgctctggcccaaggccg

SEQ ID NO: 204623 - DNA, 201 bp, Homo sapiens
ctattttatgtgatagaatcagctgtcatggaaattgatgtgtttacccaaaagtcgagttataattgctggaaggccacaagagtcaacagattcaacamcgggtcatccgaggccaggccttctgccttcagtctgtgctctgcaacatttgcacattcagacacacaacaccggatttaacatcacagaaagtaatgg

SEQ ID NO: 204624 - DNA, 201 bp, Homo sapiens
agtttttctgataaaataaaagggatcttagctgactaactagttctcagggaaatattcttgggtctcttaaaggtttttccatcagcttggttagtgcrtttataatacacacattaatgtaaagatggaggtacataaattgttgaaatttttacacaaatagctgtgactagctgaactggatttccaaaagttaaa

SEQ ID NO: 204625 - DNA, 201 bp, Homo sapiens
tgtatcacacgttcccaaaattctagagtcaatatggtacctaagaatattgaaaaatccgccaacacccacaaaatttagacacaaacaacccttatccrttgcagcagctactaatctaagccttgttccttctctctaagcaaaaccagagtttgcagaacctggtacatatttagacttacattgctgttgccagct

SEQ ID NO: 204626 - DNA, 201 bp, Homo sapiens
ctaactagttctcagggaaatattcttgggtctcttaaaggtttttccatcagcttggttagtgcgtttataatacacacattaatgtaaagatggaggtrcataaattgttgaaatttttacacaaatagctgtgactagctgaactggatttccaaaagttaaaattcaatttatttctgaaaaaaaattgttcttgaa

SEQ ID NO: 204627 - DNA, 201 bp, Homo sapiens
gtatcacacgttcccaaaattctagagtcaatatggtacctaagaatattgaaaaatccgccaacacccacaaaatttagacacaaacaacccttatccgytgcagcagctactaatctaagccttgttccttctctctaagcaaaaccagagtttgcagaacctggtacatatttagacttacattgctgttgccagctg

SEQ ID NO: 204628 - DNA, 201 bp, Homo sapiens
actgagttgccggcgtgccctgaccctgctcactgtctctttgctcccacagaatctgtaccagaacaggtttttaggcctggccgccatggcgtctcctkctagaaactcccagagccgacgccggtgcaaggagccgctccgatacagctacaaccccgaccagttccacaacatggacctcaggggcggcccccacga

SEQ ID NO: 204629 - DNA, 201 bp, Homo sapiens
attctgccagggaggctgcaaaatgtagtactttagctggacattatcaatcaaaataaaactgagattctgttattaaggaggaaaggtagaatggatgycgggtaggtatctagcgatttttgctccattgtcctagggagaaaatttgaacttaaaaaataatttgtaaaaagtaattgattttcagagaaaagcctg

SEQ ID NO: 204630 - DNA, 201 bp, Homo sapiens
cctagggagaaaatttgaacttaaaaaataatttgtaaaaagtaattgattttcagagaaaagcctgaatttccaaatataggaaatatttgcaatgtgtraatctattcagttgttctgtataataagtaatgttgtttgaggagttttaaatgatagttggccatgcttatttcataatgtcaattttttaaaaaagca

SEQ ID NO: 204631 - DNA, 201 bp, Homo sapiens
atagaaaataggtagctggggaatgactctggtagagtccaagcaatcgggaaaggccaccagcatgcagggcaggctgaggacatgacattcccaccccrtgtggggccatctactctggagtagagacttctctagatttagaggctgggtcatgtgtagtcaaagatgtatttcttatgttgtctttatcagcattaa

SEQ ID NO: 204632 - DNA, 201 bp, Homo sapiens
tcctgtaagtctcatttctccgtctttggttagacctaactctggtctttcttcactttcctattttgttcttgtgcgtgcgtgtgtgtgtgtgtgtgtgrgtgtgtacgtgtacatacacacatatggagatatactgatagattgattatgaataaatggaaagacacctcaaaatggtcaagaggaatgagatccata

SEQ ID NO: 204633 - DNA, 201 bp, Homo sapiens
ttattgggccacgagaaatagcagcctgaccctcagtttggtccgggaacaaagtcattgaattgttcttagctcagctttcacatttgtaagcaggagtrggagtgaatgatacctaattcttaaacagttaaaatagtgcgtatggaagaactggctctgtgccactcacctgtgttgctttccccagcccctttgttg

SEQ ID NO: 204634 - DNA, 201 bp, Homo sapiens
actgccccctggtggcggcgcagagcagctcctcctccaaagccttctgcttccacagcccctgggggccacttctgcagtgctgcctcctccggaggtgycccaccgtggttaggagcagagtgttggggtgatggccatggaagcagtggccatgcagcctgagccatggcagaaccccagagtgcacccacaacaaaa

SEQ ID NO: 204635 - DNA, 201 bp, Homo sapiens
tcatcagaataaaagaaaaatatgtatttatttcaggtgtttcacagcccttgattaaggggactgtaacattcaatgttaattaagacttcctcttcccrggtagtttgggctgggcaatgccaacatttaccttcccgagtctcctttttacacttttaattttcacgtgtgttcatgtgaagagaccaccaaacaggc

SEQ ID NO: 204636 - DNA, 201 bp, Homo sapiens
agatggagaccatcctggctaacacagtgaaacgctgtctgtactaaaaatacaaaaaattagctggacgtggtggcagatgcctatagtcccagctactygggaggttgaggcaggagaatggcgtgaacctgggaggcagagcttgcagtgagccaagattgtgccactgcactccagcctgggcaagagaactagact

SEQ ID NO: 204637 - DNA, 201 bp, Homo sapiens
cccaacatatttaatctctgtaaatagaaatcaactaaagttaaaagattgctaggccgggcgtggtggctcacgcctgtaatcccagcactttgggaggycgaggcaggcggatcacgaggtcaggagatggagaccatcctggctaacacagtgaaacgctgtctgtactaaaaatacaaaaaattagctggacgtggt

SEQ ID NO: 204638 - DNA, 201 bp, Homo sapiens
cttgacatgtccataactcagttttctcagtactgggaatgattagttcttaggagttatataggagttaactaaaactgatttataatagcaatcagacrtaccacatggtcactgtggaactcgttagttctgtttgtcaaatatttctgtggtccatctcccaggcaccttataggattatacttcctgctccctgag

SEQ ID NO: 204639 - DNA, 201 bp, Homo sapiens
gtctttttctattcatataattcatattattgtgatcatgaattgtatttgtcctgtttgtgttacttaacactgcaaaacaagcatttcccatcttattrgcatttagtgttacatgtaattatatatatttatatataaattattataatttagaaaagttaaactattatatgtgcatatcacctatacctaacctat

SEQ ID NO: 204640 - DNA, 201 bp, Homo sapiens
aacagacagacttttacattttcaggactactcactagttcttaacagagcctgacctagctgggggtctacatggactccagtaaccatggcatggagamaagggcctggtggggagagaggttgatgtctgggatgaagggatgggtgtgtgaagagagtttaagaagaaagttcttgtggagggaggaaagaacccag

SEQ ID NO: 204641 - DNA, 201 bp, Homo sapiens
tcagagctgtgagaaataaatttctattatttataaattactcaagccatggtattttgttatagccacaggaatgaactaagacactcacatattagacytctctgattattggaccagcataactgaaccacacactttagttttcaaatgttggcaactgaagaacttactttaagtaatgaccttcaagtaatgacc

SEQ ID NO: 204642 - DNA, 201 bp, Homo sapiens
atcccaacatctgcgcttaaacaaaagaaagtttacttttaggcagaagggtgcgtgaccctgtaggaataccatatgcatcattcttgctcatagtggcsccagcggtgggccttgtacagctgtcttcctgctgttgctgctcagttgaaaaggcctgacagttcagtcctaaagtgaagccaagaaagagaattcaga

SEQ ID NO: 204643 - DNA, 201 bp, Homo sapiens
gaaatttcctggtttcaggtattcctgtgtagcaacacaaacacactaagacactgatgaaacaccaaaagccattctccagatggatcactaatgaatcraagcacgacattaatagtgagaaaatgatagtataaaaaggactagtggtgagtatttaaatcaatcaaatacctaagtataaataaaagtaattgttgt

SEQ ID NO: 204644 - DNA, 201 bp, Homo sapiens
attttgttatagccacaggaatgaactaagacactcacatattagacttctctgattattggaccagcataactgaaccacacactttagttttcaaatgytggcaactgaagaacttactttaagtaatgaccttcaagtaatgaccaggtgagtctcggtgcagttagtccactgagttcatgtcctgattccctgcta

SEQ ID NO: 204645 - DNA, 201 bp, Homo sapiens
ttcaacaagggtgattttgtctccccaaaggacatgaggcaatgtctggagacatttttggctaccatatctaggggagtgtcactggcatctaatgggtrgagattcacttccatctgcttccattaataagaatgccaacaaaaaataagctattaaactcaggtttgaagaatgctttacagatcattggactaaata

SEQ ID NO: 204646 - DNA, 201 bp, Homo sapiens
ttacaggtgtgtgccaccaggcccggctaatttttgtgtttttagtacataaggggtttctccatgttggccggggggggtctcgaactcctgacctcagktgattcacctgcctcggcctcccaaagtgctgggattatagtcatgagccgccatgcctggccttgctcgtatttttaaacaccagcatcaaacagccct

SEQ ID NO: 204647 - DNA, 201 bp, Homo sapiens
agtctacaatgcaaagaaaacaaaaaagcagaatatagccaggtcacatcctgtggccatatagcaataaaactgaattgtaagtaaatttaagcacaatygtaagaacaaaatctttgccagctggaaagtaaaagcaatgttctagatgactcttgggcttaaaataaaataaagacttagaaaccattgagaaattgt

SEQ ID NO: 204648 - DNA, 201 bp, Homo sapiens
ataattgggagataattctcatattgaaaaattccaaaaaatttatgtactctaccctcgagaagatggaacataattctccaccccataagcatgagtcragcctagtaaatgtttttcaaagagcgcagtatggaaaggaggaagaacactacctcaaccagctgatcaaggctaacatctctagtatgtcattagtgg

SEQ ID NO: 204649 - DNA, 201 bp, Homo sapiens; identical to SEQ ID NO: 35945

SEQ ID NO: 204650 - DNA, 201 bp, Homo sapiens; identical to SEQ ID NO: 35946

SEQ ID NO: 204651 - DNA, 201 bp, Homo sapiens; identical to SEQ ID NO: 35947

SEQ ID NO: 204652 - DNA, 201 bp, Homo sapiens; identical to SEQ ID NO: 35948

SEQ ID NO: 204653 - DNA, 201 bp, Homo sapiens; identical to SEQ ID NO: 35949

SEQ ID NO: 204654 - DNA, 201 bp, Homo sapiens; identical to SEQ ID NO: 35950

SEQ ID NO: 204655 - DNA, 201 bp, Homo sapiens; identical to SEQ ID NO: 35951

SEQ ID NO: 204656 - DNA, 201 bp, Homo sapiens; identical to SEQ ID NO: 35952

SEQ ID NO: 204657 - DNA, 201 bp, Homo sapiens; identical to SEQ ID NO: 35953

SEQ ID NO: 204658 - DNA, 201 bp, Homo sapiens; identical to SEQ ID NO: 35954

SEQ ID NO: 204659 - DNA, 201 bp, Homo sapiens; identical to SEQ ID NO: 35955

SEQ ID NO: 204660 - DNA, 201 bp, Homo sapiens; identical to SEQ ID NO: 35956

SEQ ID NO: 204661 - DNA, 201 bp, Homo sapiens; identical to SEQ ID NO: 35957

SEQ ID NO: 204662 - DNA, 201 bp, Homo sapiens; identical to SEQ ID NO: 35958

SEQ ID NO: 204663 - DNA, 201 bp, Homo sapiens; identical to SEQ ID NO: 35959

SEQ ID NO: 204664 - DNA, 201 bp, Homo sapiens; identical to SEQ ID NO: 35960

SEQ ID NO: 204665 - DNA, 201 bp, Homo sapiens; identical to SEQ ID NO: 35961

SEQ ID NO: 204666 - DNA, 201 bp, Homo sapiens; identical to SEQ ID NO: 35962

SEQ ID NO: 204667 - DNA, 201 bp, Homo sapiens; identical to SEQ ID NO: 35963

SEQ ID NO: 204668 - DNA, 201 bp, Homo sapiens; identical to SEQ ID NO: 35964

SEQ ID NO: 204669 - DNA, 201 bp, Homo sapiens; identical to SEQ ID NO: 35965

SEQ ID NO: 204670 - DNA, 201 bp, Homo sapiens; identical to SEQ ID NO: 35966

SEQ ID NO: 204671 - DNA, 201 bp, Homo sapiens; identical to SEQ ID NO: 35967

SEQ ID NO: 204672 - DNA, 201 bp, Homo sapiens; identical to SEQ ID NO: 35968

SEQ ID NO: 204673 - DNA, 201 bp, Homo sapiens; identical to SEQ ID NO: 35969

SEQ ID NO: 204674 - DNA, 201 bp, Homo sapiens
ccagggccccagaacatactcaaacatttgtttgagtgggaggtggggagagagttcttttgagtcaatgaacatctgttcagaactgctgtgctgggtcscaagaaaacagagcttataatctgtctcttccctgccagaggtaccagcagagatttactatactaggtatatgtgcttgtggtggcattgtactgtgtc

SEQ ID NO: 204675 - DNA, 201 bp, Homo sapiens
gaactttaggaagagccaagaggggccaactctcggttccctcacaactgccagtttcctcccgcgctcagccgacgtcacgcgcacccgtgtccgcgggyaggcgccacggttccggaccagacctacccctcctctattctccccgccctttctcacctcggtccaaactcctcggtctgccctgtctgagaagaggag

SEQ ID NO: 204676 - DNA, 201 bp, Homo sapiens
tgcaggagcaggtgttagatcccacagcccttccaggagctgttagcagctggattcatgtggattttattagaaagttgttgcccaatgaagtgcagaarattggaagtgaaggggcattggcagaggtcagcctggattaccagggtcaagaacagccacccccaaaggaagaaaagacaactcgcccaggtcttaagc

SEQ ID NO: 204677 - DNA, 201 bp, Homo sapiens
cccaggttcaagcaattctcctgcttcagcctcctgagtagctgggattacaggcgcccaccaccacgcctggctaattttttgtatttttagtagagacrgggtttcaccatgttggccaggctggtgtcaaactcctgacctcaggtgatctgcccgtctgagcctcccaaagtgctgggattacaggcgtgagccacc

SEQ ID NO: 204678 - DNA, 201 bp, Homo sapiens
ctgcctggtaaactagtgacccatcagaatccttatggggtaccttgttaacctaaagatgcttctttgctgcctttccatcttacgttgcacaaaacacmctgtaacttgtctgttggaatgtcttccactttcactagcctgtaaatctctaggaagttggtgcttggtagtattcagcttcatatctatctgtcaatc

SEQ ID NO: 204679 - DNA, 201 bp, Homo sapiens
tgtgggcaggccaggtcccatccgctctcaggacctcagttttcctgtctgcaccgggagaagggaggttccctgactctgagccttgcttgtccccgtcsgagtggggatagggtgggtcgtccaaatcccagaggcgggagaggtccaggtttagggcccagaggcccaggcgccgaaccttcccctccctgggcctca

SEQ ID NO: 204680 - DNA, 201 bp, Homo sapiens
tcaacagtgctagaccctgtctcaaaaaaaaaaaaaaactcaacgaaatatttttttctatatgaagttactctctgtagatgacctctctgcattgtcaraaaccacactgctggggggttctgtgcttcaggggctcaggatatgggctgggggaaatggggttacaggtttgacgataaaacttgtactgcctctctc

SEQ ID NO: 204681 - DNA, 201 bp, Homo sapiens
ttcatggtgaacagagctatgaaagggacaaaaattatagactttggagttagacttacttggattgaaatcccatcctttacaggccagctatgcccttrtgcaagtattttaaccttttgaaataatatcagtgtccttgtaaattagatataataatgcttctcttgaaaggttgttttgagctttagaaacaatagt

SEQ ID NO: 204682 - DNA, 201 bp, Homo sapiens
gtacccttaagggcccacttgattttagttctcagtggaggaaatgagccttggagcgatgggaatctgcctctggcaaacctctggtcgctgcagggccsgagagggatgcgccctcctctaagttggcagtgaggtgtgggcaggccaggtcccatccgctctcaggacctcagttttcctgtctgcaccgggagaagg

SEQ ID NO: 204683 - DNA, 201 bp, Homo sapiens
aacctgacttgctatacacatggtctgtttcactctctgcagagaagagggaatggaaaggtgggattgctcaaaccccgagaactagacactacctgccytgcacccccttcccaggcatgttaggatattgccaatctccaggcttcctttagcaacacctagaaaagtcactgaatggctgggtgtggtggctcatac

SEQ ID NO: 204684 - DNA, 201 bp, Homo sapiens
gcttctcttgaaaggttgttttgagctttagaaacaatagttgtcaaaagtcttgcacagtatagctggcacagtatatatagatgcttaattgacaacgyggcatgaaacactgtttctgctaaagggatattagaatatggagaacaggtcagagggaaaatttggagagctcttcctgtacctaaagttacatttctg

SEQ ID NO: 204685 - DNA, 201 bp, Homo sapiens
tgagctcttgaggctgcagtgagctgtgatcataccattgccctccagtctggatgacacagagagacattgtcaaaaaaaaaaaaaaaaaaaaaaaaaaaaggactgggaattttgaaactggaaatgattttataaatcttgtctgtcctctctcagggccatttgtgtcctaagccctactctttcatggtgaacaga

SEQ ID NO: 204686 - DNA, 201 bp, Homo sapiens
atgctgggattaaaggctcgagccactgaacccagcctcgacctcattttttttaatgacttcatgctatttcatcatatagatatactgtactttttgcytattcccatattgatggatatttgtttctggctcttttcctttttgatattgcaaacaaagttgtagtgaacattgttatatgtacatcttttttttttt

SEQ ID NO: 204687 - DNA, 201 bp, Homo sapiens
gaactgctgtgctgggtcccaagaaaacagagcttataatctgtctcttccctgccagaggtaccagcagagatttactatactaggtatatgtgcttgtrgtggcattgtactgtgtcagtttagctaagctggattcccagtatccttcctatctgcttccaggtgagggttgtccacaagaaaatttcgtgagagatt

SEQ ID NO: 204688 - DNA, 201 bp, Homo sapiens
gtgagctcttgaggctgcagtgagctgtgatcataccattgccctccagtctggatgacacagagagacattgtcaaaaaaaaaaaaaaaaaaaaaaaaaaaaggactgggaattttgaaactggaaatgattttataaatcttgtctgtcctctctcagggccatttgtgtcctaagccctactctttcatggtgaacag

SEQ ID NO: 204689 - DNA, 201 bp, Homo sapiens
gaggcaggagcaaggtaccccacatctataactttctaatgctttttgagcatctttatagggagggcatgggatcagctacctgtttctgcctcaaccayggaccaataatatgagatctttgttcaccagttctacagtgatggggtgcttccttttggcttctggaatggggtaagttcttgacataaatagggagtc

SEQ ID NO: 204690 - DNA, 201 bp, Homo sapiens
tgtgaaggacagagcagggtctgtacgctgtgaaggacagagcagggtaccaggcatagtggcagtacctgtactttctctctgatctggctcaccttgtyggtgaaggtcatcacacagcccccagcacccctagctcctactgaatttcctccttcagctcctctgagtcctgggccatgtgtgcagtcagctctgtag

SEQ ID NO: 204691 - DNA, 201 bp, Homo sapiens
agaggccacattgactgagggtagttgccagggtcctgcagttatacacaaaggtcagtctctgattcctggatgccttccattggtcctgggcatgctgsctttttctgtgggctatgagatcacagttagctagtctgcattactgtccatcaccagattgctaccccccagtatggagcttcctattttgtgtaactt

SEQ ID NO: 204692 - DNA, 201 bp, Homo sapiens
gtttgcttctgaggatctccagtgtcacaacaaacacatgccagccctgttttacagggagccctggaggagttgggatagaggccacattgactgagggyagttgccagggtcctgcagttatacacaaaggtcagtctctgattcctggatgccttccattggtcctgggcatgctgcctttttctgtgggctatgaga

SEQ ID NO: 204693 - DNA, 201 bp, Homo sapiens
gcccagcctgcccgtctgcccagctgacttacacggcaggctgttcctgttgttgaggagcgtgatggcggggtcatccttaggggtctggggtgtgcccygggttgtgggggccttagtggagtccccgtctgtgaaggcctccatgtcaggggactgaggtgagctgtccatgtggcaggcagtgagtgcgttctgata

SEQ ID NO: 204694 - DNA, 201 bp, Homo sapiens
aatgggtagagatggtggaaaggagtggagagaagtatggatggtagaagcttactttccacacatcctatcttcatttcttgattcaagtgattctcttmtgtaccttggacagctcagagcatgggcctcagtttccccatctgccaagaagatttatattggagtgcctctcaaattttttacccctaaccctctctg

SEQ ID NO: 204695 - DNA, 201 bp, Homo sapiens; identical to SEQ ID NO: 35981

SEQ ID NO: 204696 - DNA, 201 bp, Homo sapiens; identical to SEQ ID NO: 35983

SEQ ID NO: 204697 - DNA, 201 bp, Homo sapiens
ttggaattgcacctgccccaacttcaggagaaaaaccagagatccagtaagttcttggaataaagtacactcagctgatctgctagggtgtagtaaggggrtgggagaaggacaaatgcatgaaaaagaagaatgattcttcaacattcctgtgtaactcccactgaagtcccatgagattatgtatctttcttggctgac

SEQ ID NO: 204698 - DNA, 201 bp, Homo sapiens
gatatactttttggatactctcttggcatctattaatacatcactgtgggtaccagtggttattgagctctgagcccttctttttatatatatatatatatttttttttaattatactttaagttctagggtacgtgtgcataacatgcaggtttgttacatatgtatacatgtgccatgttggtgtgctgcacccattaa

SEQ ID NO: 204699 - DNA, 201 bp, Homo sapiens
atatactttttggatactctcttggcatctattaatacatcactgtgggtaccagtggttattgagctctgagcccttctttttatatatatatatatatwtttttttaattatactttaagttctagggtacgtgtgcataacatgcaggtttgttacatatgtatacatgtgccatgttggtgtgctgcacccattaac

SEQ ID NO: 204700 - DNA, 201 bp, Homo sapiens
ttcctagttgaataccttgtatttctttctcctgcctgattgccctggccagaactttcaacactatgttgaataggagtggtgagagaggacatccctgwcttgtgcccgttttcaaagggaatgcttccagtttttgcccattcagtatgatattggctgtgggtttgtcatagatagctcttattattttgagatacg

SEQ ID NO: 204701 - DNA, 201 bp, Homo sapiens
ttctctgatggtagtttgtatttctgtgggatcggtggtgatatcccctttatcattttttattgcgtctatttggttcttctctcttttcttctttattrgtcttgctagcggtctatcaattttgttgatcttttcaaaaaaccagctcctggattcattgattttttgaagggttttttgtgtctctgtctccttcag

SEQ ID NO: 204702 - DNA, 201 bp, Homo sapiens
ggaatattggtgaacagcaaatgttgctgcctgatcgttcctctggaagtttcgtctcagaggggtacccggccatgtgaggtatcagtctgcccctactkgggggtgcctcccagttaggctactcaggggtcagggacccacttgaggaggcaggctgtccgttcttagatctgaaactccgtgctgagagaaccacta

SEQ ID NO: 204703 - DNA, 201 bp, Homo sapiens
tattctgaagacaaatttcacttacttccaagttttccctaaggctggctgtggttgcttttcttttcttttctctttctttctttcttttttttttttgmggggggagacagagtctcgctctgttgcctaggatgaagtgcagtggtgtgatctcagctcactgcaacctctgcctcccaggttcaagcgattctcctg

SEQ ID NO: 204704 - DNA, 201 bp, Homo sapiens; identical to SEQ ID NO: 35975

SEQ ID NO: 204705 - DNA, 201 bp, Homo sapiens
agcttcataccaagtcttcctggatttcccttgttctggatactcttgtttacccaggtccagttgcctggctccttgagaagtctgtacttacttccttygatgttatgattttcctttataacaagtacaggacattcttaggctgtaggacaatttgccaaaaatcagttcacagaatgaccacattgctatattatt

SEQ ID NO: 204706 - DNA, 201 bp, Homo sapiens; identical to SEQ ID NO: 35979

SEQ ID NO: 204707 - DNA, 201 bp, Homo sapiens; identical to SEQ ID NO: 35980

SEQ ID NO: 204708 - DNA, 201 bp, Homo sapiens
agccttcataaatgctttattttaaaatcttttttttaaactttttttttaacctgaagaaaatctttgtggggtgggggtatatagggaggggagtggtracaggctccatagggattttgcaaagggatgggtgtaatgcaacagcagtggcttgagcctggtggcctcaggtgatgaagaccagccaggcaggcaccc

SEQ ID NO: 204709 - DNA, 201 bp, Homo sapiens
acagcatttgaaattccctccaggcatcagctggggaaggaaggccggtgtctgaggttggtgccagaaggatttcctgccctgactcactttgcttcccygcagcaccggtttctgttccccttctttgactcagcctatcagggcttcgcatctggaaacctggagagagatgcctgggccattcgctattttgtgtct

SEQ ID NO: 204710 - DNA, 201 bp, Homo sapiens
ctgatcattcaaaatgatcttataaagtctttttactgtatatcctgtgacctaataaattaacatttagatatttttcctaagaaaacactcatgaatawgtgtaaatatatgaacatttatcacaatgtttataatagcaaataatttaaagcaacacagttaataaattatatataaaacaaatattatttatccact

SEQ ID NO: 204711 - DNA, 201 bp, Homo sapiens; identical to SEQ ID NO: 35976

SEQ ID NO: 204712 - DNA, 201 bp, Homo sapiens
ttctttctctttcatattttatttattcatagcacattatttgtgaatgacatattatcataaatataaacacatagcctaataatgttatagaatagatrtaacacccagacacagaactgaaacataacagaactggtttttctataaacatcccaaatttttttgcatctacctagtatcctttgtaggtagttcaaa

SEQ ID NO: 204713 - DNA, 201 bp, Homo sapiens
taagaacagcagtattccagtcttttctttctctttcatattttatttattcatagcacattatttgtgaatgacatattatcataaatataaacacatarcctaataatgttatagaatagatataacacccagacacagaactgaaacataacagaactggtttttctataaacatcccaaatttttttgcatctacct

SEQ ID NO: 204714 - DNA, 201 bp, Homo sapiens
agtagttgtaaggttttgatgagataatacaattaaaagccttagcacagagcaggcatagagtaagtgctcattattaccttatttttgtaaatattatmtgacctcaccattatcagcctgtgaccctgtttcttctctttcaggtaggaggtgtgcaatctttggggggaacaggtgcacttcgaattggagctgatt

SEQ ID NO: 204715 - DNA, 201 bp, Homo sapiens
tgggttgaagactggcactcctgctcagtagctggtaactttgagcaaggttcttcacctctctcagcctcagtttcctcagttgtaaacatgggcaaatmatagtacctttttcatgtagtagttgtaaggttttgatgagataatacaattaaaagccttagcacagagcaggcatagagtaagtgctcattattacct

SEQ ID NO: 204716 - DNA, 201 bp, Homo sapiens
gcccaatgcttggctcaaattaggtactcagtaagtgaacaaacttttctccaatttccttcactgttctgttttgaccggaaggtggtgggattctcctrgttcacagttacaaactcttaacttggacacagcatgagcctccactatgtataactcttttccattctccagcatatcgcacggatgactgccatccct

SEQ ID NO: 204717 - DNA, 201 bp, Homo sapiens; identical to SEQ ID NO: 35982

SEQ ID NO: 204718 - DNA, 201 bp, Homo sapiens
tggaattctgttgctgacaaatgaaaacagagattccatgttggggagtttcttcctctaatactgcatttcttatatagttgttaactatgttgggcagrtgctgttcctctgcccattgatctccatttgatgacttacactgtaagacttaaggctattttttgtagccttgaccctgggaacatagccctccctctt

SEQ ID NO: 204719 - DNA, 201 bp, Homo sapiens
gggtggagtacagcggtgcaatctcgggccactgcaacttctgccccctgggctcaggtgatcattccacctcagtgtccaagtggctgggaccacaggcrtgaaccaccatgcccggctaattttttgtagaaacggggtctcaccatattgctcaggctggtctcaaactcctgagctcaagtgatctgcccgcctcgg

SEQ ID NO: 204720 - DNA, 201 bp, Homo sapiens
ttggggagtttcttcctctaatactgcatttcttatatagttgttaactatgttgggcagatgctgttcctctgcccattgatctccatttgatgacttamactgtaagacttaaggctattttttgtagccttgaccctgggaacatagccctccctcttaatctagtttctcctgttttatatttttgaccataaaaca

SEQ ID NO: 204721 - DNA, 201 bp, Homo sapiens
tagtacctgggaccacaggtgtgtgccaccatgcccggctaatttttaagatttttttgtagagacagggtctccttatgatgcccaggctggtcgtcaaytcctgggctcaagcaatcctccctcctcagcctcccaaagtacttggattacaggcatgagccactgtgcctggccagcatgcaaatttattaacttgca

SEQ ID NO: 204722 - DNA, 201 bp, Homo sapiens; identical to SEQ ID NO: 35984

SEQ ID NO: 204723 - DNA, 201 bp, Homo sapiens
atgggaagctgaggcaagagaattgcttgagcccagggggttgaagctgcagtgagctgtgttcgtgccactgcactctcacctgggcaacagagtgagamcctgtctcaaaaaaagaaaaaaatattgtgagttagattcaccagagccggagggtagactatgagtggtatgagagtattgtttgattcacctacccag

SEQ ID NO: 204724 - DNA, 201 bp, Homo sapiens
tataccatcttggggttatagaaagaatgggagcttggagcttgccagaacagattatggcaggcagagaagagaaggcctggttagcaaaggtggtcttrttatattatgtagataagacaggtagcagccctcggagaaaatagcggtaaaggtctatttcttttagacctttaaaggcatcacactctcagttaatct

SEQ ID NO: 204725 - DNA, 201 bp, Homo sapiens
accattatcagcctgtgaccctgtttcttctctttcaggtaggaggtgtgcaatctttggggggaacaggtgcacttcgaattggagctgatttcttagcrcgttggtacaatggaacaaacaacaagaacacacctgtctatgtgtcctcaccaacctggggtgagtctttcagctgaagtgagaggaaaaacagaaacc

SEQ ID NO: 204726 - DNA, 201 bp, Homo sapiens
ataaaaggactagaaattgtggaaagagaaggtggaatcattttgtagcagagtgtgacatgaaggacgctcagaatcaggtttctcatagataacgtttkgtctgtgcatagcatttgttaaaaaaaaaaaaaaaaagtcggccgggcgcggtggctcaggcctgtaatcccagcactttgggaggctgagacgggcgga

SEQ ID NO: 204727 - DNA, 201 bp, Homo sapiens
tgtggagtgggtttatctcttctaagcacatttttaatgtattctactgatttttaaaaaaatgaatttgctttctgtagtgggagagaaagggtggagtkaaaagttgagaacaggaaatgaaaaattatgcctgggaatgtttccactggtatctatgcatctatcgtgtttccagaagttaaaaccatgttcaaggga

SEQ ID NO: 204728 - DNA, 201 bp, Homo sapiens
gaccacattgctatattattgattcaccaaaaacttgtttctgttagttgctgatgtttagagcaacttgtgtttcactgaagccatccagtatttaatakatttttagggagtgataacttcttgagaatttgatatttcaagtgtcatatatgtcatgaatgtcaaggattagttaatgtggagtgggtttatctcttc

SEQ ID NO: 204729 - DNA, 201 bp, Homo sapiens; identical to SEQ ID NO: 35977

SEQ ID NO: 204730 - DNA, 201 bp, Homo sapiens
caatccccccgcccagggagcacgaattgtggccagcaccctctctaaccctgagctctttgaggaatggtaaggggctcccagtctggtgggccgggggrtggggagtgcagaacagtaattgtcccagtacatttaactgggtctcttcctttcattttggcagaagcaggataaaattactttaacttctttgactct

SEQ ID NO: 204731 - DNA, 201 bp, Homo sapiens
atttcaactggtggggtggtagtggtgatggattctttaaatacctggtgaggcatccccttctgctggtggggcctcttaattaaaaaaaaagaggctcrtttaccttttgctcacggtaaaagttcatctaccttgaaccagaatttgatctttgttccactcccctgcccctcctttccttcctttaaaccacagata

SEQ ID NO: 204732 - DNA, 201 bp, Homo sapiens
tgcttgcttcaggctttctctagacatctcttgcttttaaaaaagcacatggatccatgaacttaatagtatgacagcctagctcttgttatctctgtgaycctgggcaaatggtttgacttttctggctgcagcagccagatccttaaaatagacatcacaatatctattttgtgggttgctatccaaattaaatgagag

SEQ ID NO: 204733 - DNA, 201 bp, Homo sapiens
aagatgcttgttgttagtaagggaaggcagccaacagagaagtcgaatgattctaccttctgtcaatctgccattctctccaaacgctttcaaccactcaytctccatggggacgatactgcctccatggggacgaaaattggctctctggggcaaaaaaaaaaaaagcctgaaatactaaaatgttgccttccaaagtgc

SEQ ID NO: 204734 - DNA, 201 bp, Homo sapiens
tgtgagtttgggaagccggcaggactcctcaggcctctgacatgccagtgaacttcagaggtgggattgtttcaccaattttgctcactcaagagcagggyactccaacctccaggctctgccagttcccaggtgtgtaaccgtgagcaagaagacagtaaccttgcagacagtaacccctcctccacagggtggttgaga

SEQ ID NO: 204735 - DNA, 201 bp, Homo sapiens
tttaaaccagtggccattatcattcccctgggtcagtgttgtgatgtagcctgtaattcatgcattgaggaaaccacatcttggagtcatctgatttattmcccacatgctgtgtacagtaggttttccttttatatatcatgttacccagatgccctgataagcagaatggcagaggacaataaaggttgcacacccata

SEQ ID NO: 204736 - DNA, 201 bp, Homo sapiens
aagacctgaagttccatctctggctcccagttgggtctctctgctccctgttccttctcttccagagcagaattattgatcgattgaagactgctgattgrgagccaaaacagatgtgtccctggtaaaaacagtgacttgaggttccatctcacattctttccattccagctgagacatactgccccaggctgctggaac

SEQ ID NO: 204737 - DNA, 201 bp, Homo sapiens
attgatcaggtacctcatgcatggggccttacccaatgtattgtaaaaatgaaatgtcaaagggaggctgccgcgggtactcaatgcaagtccaggttagsgaagaactaaaggaagcacttcatagccagcatttcatatcgctgtccgtctgatggttgtttttaggtgataggggtgtcctggtggatataatgtata

SEQ ID NO: 204738 - DNA, 201 bp, Homo sapiens
gcgcaagcaagcaccttcacatggcccagcaggagagagagcaaagcgggaggtgctatacacttttaaaaaaccagatgtagtgagaactcactcactgycacaagaacagcaaggcagaaatctgcccccatggtccatcaacactggagattacaattcaacatgagatttgggtggggacacacagccaaactatat

SEQ ID NO: 204739 - DNA, 201 bp, Homo sapiens
cctgtgtgttttcgggtaccatctttcctgtctggattggtatttacgtcactgtccatgcttcaggacaggtaatgtgaagacaatggctgaccggattytgaccatgagatctgaactcagggcacgactagaagccctcaaaacccctgggacctggaaccacatcactgatcaaattggcatgttcagcttcactgg

SEQ ID NO: 204740 - DNA, 201 bp, Homo sapiens
gggttgtttaacatccctggggctcatctgttaaatgaggagccaagattgaatgacctctctcccaaattctactcttaagattctactgggccaggcayggtggctcacgcctgtaatcccaacgctttgggaggccgaggcgggcggatcacgaggtcaggagattgagaccatcctggctaacacggtgaaaccccg

SEQ ID NO: 204741 - DNA, 201 bp, Homo sapiens
ttgatttgtgtatgttgaaatagccttgcatcccagggatgaagcccattgatcatggtggataagctttttgatgtgctgctggatttggtttgccagcrttttattgaggatttttgcgtcgatgttcatcagggatattggtctaaaattctcttttttggttgtgtctctgccaggctttggtatcaggatgatgct

SEQ ID NO: 204742 - DNA, 201 bp, Homo sapiens
aaaggaaaggagagaactcaagttgtctcaacctacacactcaggcatcaagagagggtgattctgagtgatgacatccctcagcaagtgaagtttaagaygtgagccaaggtgagggtggtgtaacaaggcagggacgcccagggaagtacagggtgtcattagttagcaagaggcattttagtgccacaaaaggaacaa

SEQ ID NO: 204743 - DNA, 201 bp, Homo sapiens
ttttaacagtcaggaccctcagctgcagatctgttggagtttgctggcggtccactccagaccttgtttgcctgggtatcagcagcggaggctgcagaacrgggaatattggtgaacagcaaatgttgctgcctgatcgttcctctggaagtttcgtctcagaggggtacccggccatgtgaggtatcagtctgcccctac

SEQ ID NO: 204744 - DNA, 201 bp, Homo sapiens
ggagcacgaattgtggccagcaccctctctaaccctgagctctttgaggaatggtaaggggctcccagtctggtgggccggggggtggggagtgcagaacrgtaattgtcccagtacatttaactgggtctcttcctttcattttggcagaagcaggataaaattactttaacttctttgactctcagatatttgtaaaac

SEQ ID NO: 204745 - DNA, 201 bp, Homo sapiens
ttgaatgacctctctcccaaattctactcttaagattctactgggccaggcacggtggctcacgcctgtaatcccaacgctttgggaggccgaggcgggcrgatcacgaggtcaggagattgagaccatcctggctaacacggtgaaaccccgtctctactaaaaatacaaaaaaattagcagggcgtggtggcgggcgcc

SEQ ID NO: 204746 - DNA, 201 bp, Homo sapiens
agctaatttttgtatttttagtagagacagggtttcaccatgttgaccaggctggtctcaaactcctgaccttaagtgatctacctgccttggcctcccamagtgctgggattacaggcgtgagccactgtgcctggccttttttgtttgtttgtttgtttcagacacggtctcgctctgtcacccagggtggagtacagc

SEQ ID NO: 204747 - DNA, 201 bp, Homo sapiens
tttgttgtcttttagcagcaatgttatgttaggttcttgaaaagatttaggaagcttttcttctctaagaagagttttaaaacttttttattggccaggcrtggtggctcatgcctgtaatcccagtactttgggaagccgaggcaggcggatcacgaggtcaggagttggagagcagcctgaccaacatggtgaaacccc

SEQ ID NO: 204748 - DNA, 201 bp, Homo sapiens
agtgactcaaacacacagaatcccctgcccttgcattcagtttcggggagaggaacagactctaaatgtaatctttttgactatatcagtaagaaaatgaygtagtatactaaagatgataaatgctataaaaatggagcaggaggtggcatgttaggaattctaggagtggatacagttttaactagggtggttatgata

SEQ ID NO: 204749 - DNA, 201 bp, Homo sapiens
aaccaaaagccagggtaggagtcatttaatcactgcctcagggcacaggcttttagaaagagtggcacacccagggctgtgttggcttgaggctctatccycttgggtgaccaattcacacaggtaaacctcttcttaagcttgctttctttgttcactggtttggaggggtcaagggaaaacttaccctttgccctctga

SEQ ID NO: 204750 - DNA, 201 bp, Homo sapiens
cccaactccggagcagtggaagcagattgcttctgtcatgaaggtaactgccccttcagagcatctcttaaaaaatagtatatattcttatttaatgtatktagaagcaatacctgtttgctgtttgctgaggaattaggaaaatggagaaaagtccaaagaagaaaataagtattaactgtaaattttattacctaaaga

SEQ ID NO: 204751 - DNA, 201 bp, Homo sapiens
cctgtgcacacaacccaactgggattgacccaactccggagcagtggaagcagattgcttctgtcatgaaggtaactgccccttcagagcatctcttaaaraatagtatatattcttatttaatgtatgtagaagcaatacctgtttgctgtttgctgaggaattaggaaaatggagaaaagtccaaagaagaaaataagt

SEQ ID NO: 204752 - DNA, 201 bp, Homo sapiens
aatgggacagatcccaaaactatcaagggtgcagtgctggcccaaccccttctgcggatttccacaattgtacctcattagggtttctaagaggagtccayggctcctcccccaagaggaagatgctaacatgcttttcctactaaccatcagcagggtggctctcatttgggtgaagaactagctactcactcaaggttc

SEQ ID NO: 204753 - DNA, 201 bp, Homo sapiens
tggcccaaccccttctgcggatttccacaattgtacctcattagggtttctaagaggagtccacggctcctcccccaagaggaagatgctaacatgctttycctactaaccatcagcagggtggctctcatttgggtgaagaactagctactcactcaaggttctcagcagcttcttgcccacgttttcctcaaaatcgct

SEQ ID NO: 204754 - DNA, 201 bp, Homo sapiens
ggttcagcaaatgccagcccttctcactgtcgtcttagttccttcctcgtctttatgcatactggcttctcatttgggttttacttctcatttctggcatwcactcctgcaaaatcttaccatctggcctcccaaagtagtgtgccaaggcttccccgtgacctcaccgcagcctcacacctggcccggagcggcatgcct

SEQ ID NO: 204755 - DNA, 201 bp, Homo sapiens
gtccttacttacaaaaacaagtaaaggagggaggtcagaattgacctgtgggcatggtgtgcagacttctgtcctagaggacaaacaactgaatgggacakatcccaaaactatcaagggtgcagtgctggcccaaccccttctgcggatttccacaattgtacctcattagggtttctaagaggagtccacggctcctcc

SEQ ID NO: 204756 - DNA, 201 bp, Homo sapiens
ggtgggagaaggacaaatgcatgaaaaagaagaatgattcttcaacattcctgtgtaactcccactgaagtcccatgagattatgtatctttcttggctgrcctgggcactctttggtttgtcatggctaaacttgctttcagcacttacagtttttccatgtaagttttgtttgttttttgctttgatttgcacttaaga

SEQ ID NO: 204757 - DNA, 201 bp, Homo sapiens
aaggcagggtcatcctcaccccacaccagcccagcctgcccgtctgcccagctgacttacacggcaggctgttcctgttgttgaggagcgtgatggcgggrtcatccttaggggtctggggtgtgccccgggttgtgggggccttagtggagtccccgtctgtgaaggcctccatgtcaggggactgaggtgagctgtcca

SEQ ID NO: 204758 - DNA, 201 bp, Homo sapiens
cctccatcctcaggtacactacctcgctggggcttctcagcccgtctgagcggctgcctggggaggacagtgagtgcatcacctctctgctttggagaagmcccagggctcaggtggtgtgagccctgggaagggctagaagaggaaggcagggtcatcctcaccccacaccagcccagcctgcccgtctgcccagctgac

SEQ ID NO: 204759 - DNA, 201 bp, Homo sapiens
ggagaaatgttgaaagattgcctcaaattgaatttgaatggacaccatttggtctcttaatttaaaaccagtccaaaacctccaagcgtttctttgcagcsggatgtatacaaagaactagtattactgtcaatctaaatacatctttttaaaacgtcagattttgcctgccacggtggctcacgcctgtaatcccagcac

SEQ ID NO: 204760 - DNA, 201 bp, Homo sapiens
ttacagccttgatgacaatttgcatgacgttatctacttttaaagcttgtgcacatggattttcttgatgtattatgcaataatacttcatcaaatgtgasttttgtgtggcaactgcatcatctattaattgtacaagtccctctcttttacctaccatcgccagggcagcatctgtagctatatcacatatgtttacaa

SEQ ID NO: 204761 - DNA, 201 bp, Homo sapiens
ggttccagttgagaatcatgatgttcttattcttattactggtagagaaaattataattgctccaggtaaagtttgcattttcaatgatttccttttgttygttttgtttttcccacagtactctttccattccttaccccagtttttgaagcattaaatgtctctctgtttccaaaagataccataaattttttaagtaa

SEQ ID NO: 204762 - DNA, 201 bp, Homo sapiens
cttatgcagatctatgaatgaataaataagcatttctcccatccaccttctaattttggtgactaggagggtttagggacagcatttggtagtgggaatgrtttgattagcttagatctgacgaagactaatcaatgaaaacatggcagcggcagattacaaactgctgatcatgatggacagtgtgatcctcatcccctt

SEQ ID NO: 204763 - DNA, 201 bp, Homo sapiens
tcactgagcacatcaatggacatgccagttattaaaatacttcacgaatactatgatcatttaccagtatgagttattctctggagcttctaatacttcartagtactgcatggactcagttgagagttaattcaaaatctcagattatccaattctgtttctttccttccaggcaccacctacctatgatgccgtggtac

SEQ ID NO: 204764 - DNA, 201 bp, Homo sapiens
tattatcttatgcagatctatgaatgaataaataagcatttctcccatccaccttctaattttggtgactaggagggtttagggacagcatttggtagtgrgaatgatttgattagcttagatctgacgaagactaatcaatgaaaacatggcagcggcagattacaaactgctgatcatgatggacagtgtgatcctcat

SEQ ID NO: 204765 - DNA, 201 bp, Homo sapiens
tggaaacctggcttctcctggctgtcagcctggtgctcctctatctgtgagtaactgtccaaactcctctctttgtttccttggacttggggtgctaatcrggccccttttcccttatctgttttgaagatcaaaagagatgttcaaggagaagtagctgaagtgttggacgctacaaacgcatagaagttattattatct

SEQ ID NO: 204766 - DNA, 201 bp, Homo sapiens
aaggcgaaaaagcaattggacatgatagctagatttgtttcaggaaaacatcctgctttccaaggatttagatgaatgtttttgttcactggtgactcagstaacacgtcttcaagaagccatagggaggttgagggagggaagtcaagaagggaggttgaggactgcacttttgatttacttctgacttcacgagtcact

SEQ ID NO: 204767 - DNA, 201 bp, Homo sapiens
agcaccgactagatttccttcagctgatgattgactcccagaattcgaaagaaactgagtcccacaaaggtaaccaaggagtgcttctgagggctactggyggggacactaagagggagggccttgttctgaaaatgtgcaggaagtattccaggaagatgagaatttttgccacatagcagaacaacacacatttagatg

SEQ ID NO: 204768 - DNA, 201 bp, Homo sapiens
aggttaccccactgcaggatagtctctgcccaggtcttcatgggatgaagctcttgtcaacctaaatacaaacagagagaggttctctgaaagaagaggawaattacttgggagtagaatattgcaatgggaatctgcttgccgttataaactatgtgcaaattcagggaggtaaacaagacaaagatgctccatagaaaa

SEQ ID NO: 204769 - DNA, 201 bp, Homo sapiens
cctgggtaagcagttatgaccagagatggaaccggcaactctttggccagaaagctgtatccaaaagacagagaagatgagaaacagggagggcaaaggcraaaaagcaattggacatgatagctagatttgtttcaggaaaacatcctgctttccaaggatttagatgaatgtttttgttcactggtgactcaggtaaca

SEQ ID NO: 204770 - DNA, 201 bp, Homo sapiens
atatggcttgccataatatcatatacagtcaataaatatttgttaaataaggatgcctcttcaatatattttgtgcaaccatgaagatcaccacaactaaygtgagaaaaaatgtttctgttgaactctagtctttaggcccagtgggatttatgaaaagtgccatctctttagctgaggatgaagaatggaagagaatac

SEQ ID NO: 204771 - DNA, 201 bp, Homo sapiens
aaaggcaagcctgtcaccttgaaagagtaagtaggagcacagccatggggttctgagctgtcatgagcccttccagctgcctgccatggagtcgacagtcrcactgttgggttactccagtgaccagacaaaagcagggcagcgctgcaactccaaagagccacctaagagggagtggctcccatgaggcggcaagtcagc

SEQ ID NO: 204772 - DNA, 201 bp, Homo sapiens
ttgtcagcacgtttttgcatataatgcctcttcaaattgtagtctttgaaaactggcacaaattccgtggaaattaagcagagtgcttcgctatttgcctyaacaagaaaaagtcatttgtccacttttcattgaacaatcttccttcatccataatttttgttttttagggttttctttttaagacattgtggaagccat

SEQ ID NO: 204773 - DNA, 201 bp, Homo sapiens
tctttccttcactttatatgaactggccactcaccctgatgtccagcagaaactgcaaaaggagattgatgcagttttgcccaataaggtgaggggatgasccctggagatgaagggaagaggtgaagccttagcaaaaatgcctcctcaccactccccaggagaatttttataaaaagcataatcactgattccttcact

SEQ ID NO: 204774 - DNA, 201 bp, Homo sapiens; identical to SEQ ID NO: 139188

SEQ ID NO: 204775 - DNA, 201 bp, Homo sapiens
ccactgcactccagcttggtcaacagaacaagacagaaaggaagaaagaaagagagagagagaaagaaagagagaggaaggagaggggaggggaggggagrggagtggggaggagaggagaggagaggagagaaaaggagaggagagaggagaggagaggaaaaggtgtgtaggctccacccaaagcatggccaggtttac

SEQ ID NO: 204776 - DNA, 201 bp, Homo sapiens
gcactccagcttggtcaacagaacaagacagaaaggaagaaagaaagagagagagagaaagaaagagagaggaaggagaggggaggggaggggagaggagkggggaggagaggagaggagaggagagaaaaggagaggagagaggagaggagaggaaaaggtgtgtaggctccacccaaagcatggccaggtttacccctg

SEQ ID NO: 204777 - DNA, 201 bp, Homo sapiens
attctccatatgcttgtttaactattgtagatccccttgaaattagacacgcaaggacttcttcaaccagaaaaacccattgttctaaaggtggattcaasagatggaaccctaagtggagaatgagttattctaaggatttctactttggtcttcaagaaagctgtgccccagaacaccagagatttcaacttagtcaat

SEQ ID NO: 204778 - DNA, 201 bp, Homo sapiens
tgtgtgcgattctttgctattggctgcagctatagccctgcctccttctccagcacataaatctttcagcagcttggctgaagactgctgtgcagggcagrgaagctccaggcaaacagcccagcaaacagcagcactcagctaaaaggaagactcacagaacacagttgaagaaggaaagtggcgatggacctcatccca

SEQ ID NO: 204779 - DNA, 201 bp, Homo sapiens
aaattagacacgcaaggacttcttcaaccagaaaaacccattgttctaaaggtggattcaagagatggaaccctaagtggagaatgagttattctaaggayttctactttggtcttcaagaaagctgtgccccagaacaccagagatttcaacttagtcaataaaaccttgaaataaagatgggcttaatctaatgtactg

SEQ ID NO: 204780 - DNA, 201 bp, Homo sapiens
catccaatcataaatttattttgtcgtatttgtgatagaaaggaacaagtttatccacaaatttatttatttatttatttatttatttatttatttatttwgagacagggtctgactctacgacccaagctggagggcagtggtgcaatctcagctcactgcaaactctgcctcccaggctcaagccatcctcccgcctct

SEQ ID NO: 204781 - DNA, 201 bp, Homo sapiens
ggatcacctacatgagatcaaatgccagttctcagcctcctccagatccaccaagtgagaacctctacttggaaatttatatcaaacataccgatcaggargcacactatcccagtaagggtgattttaactggcagtacttgaaagtgtgttcgcaaggttaatctactgcaaagttttatttttccctttgaaatgcat

SEQ ID NO: 204782 - DNA, 201 bp, Homo sapiens
atcaaaaatatgtatgaccattactattgtaaactaaaatgtttttgtcaatctagagccctcacacactttagctgtcaacaccccaccacaaaccccaytgccctaagcatccaataatcaactttctgcctctatagatttgcctattctggacacttcatagaaataatatcattgatttttctctgttgtttttta

SEQ ID NO: 204783 - DNA, 201 bp, Homo sapiens
ggcttccctgggccacagtggaagaagaagtgtcgtgggccacacataaaatacacacacacacacacacacacacacacacacacacacacacacacaaatggtctgtgtatagttttcattatatatctaccaccacagataagcaaaaatgtccttgcataataatcctaattatgcactgccccattcagagggtct

SEQ ID NO: 204784 - DNA, 201 bp, Homo sapiens
gagtggcataggagatacccacgtatgtaccacccagcttaacgaatgctctactgtcatttctaaccataatctctttaaagagctcttttgtctttcartatctcttccctgtttggaccacattacccttcatcatatgaagccttgggtggctcctgtgtgagactcttgctgtgtgtcacaccctaatgaactaga

SEQ ID NO: 204785 - DNA, 201 bp, Homo sapiens
gcttggctgaagactgctgtgcagggcagggaagctccaggcaaacagcccagcaaacagcagcactcagctaaaaggaagactcacagaacacagttgamgaaggaaagtggcgatggacctcatcccaaatttggcggtggaaacctggcttctcctggctgtcagcctggtgctcctctatctgtgagtaactgtcca

SEQ ID NO: 204786 - DNA, 201 bp, Homo sapiens
ttctaaactgtttcccacaacagctgcaccattttaccaggagcatataatggttctaatttctctacattcttgccaacacttggttttctcatctgtttaaattatagacaccttactacatgtgaactggtctcatcgtgattttgatttactcttctctaatggctaataaaattgagcaacattggccatctttat

SEQ ID NO: 204787 - DNA, 201 bp, Homo sapiens
ttctcttcatatttcccagatcgatcctttagtaaatccacatgtcctgggctatatgttgcctagttagaacatcaaaactgaaacaaggaagcaggaargtttgtttttaagtgtcagaagtgaaaactctgagtgagtattgtaatgtgctgtgtctgacatctagaggtggcatttcccacacttattatgtgttaa

SEQ ID NO: 204788 - DNA, 201 bp, Homo sapiens
catataaattgaatcatataatatgtggtcttttgtgactggcttctttcatttagcattacattttcaaagttaattcatgttgaaacatggatcagtayttcatttctttttatgaccaaataatatttcattgtatagatatgctgcattttgcgctaggtgtagtggctcatgcctgtaatcccagcactttgggag

SEQ ID NO: 204789 - DNA, 201 bp, Homo sapiens
tctaaactgtttcccacaacagctgcaccattttaccaggagcatataatggttctaatttctctacattcttgccaacacttggttttctcatctgtttaaattatagacaccttactacatgtgaactggtctcatcgtgattttgatttactcttctctaatggctaataaaattgagcaacattggccatctttata

SEQ ID NO: 204790 - DNA, 201 bp, Homo sapiens
ctccccaggatgtattttacagatttgagaggaagaacaagaaggttctgctttcctgctgcttttcttcaaaggcagcaccctatgagtgagcctgagcwgggagtgcttataatgaagacaatatggaggctgtccatcaacttcagatatttaaccacaaaatgagttctgtttttttttaaaagaaaggcaaaatta

SEQ ID NO: 204791 - DNA, 201 bp, Homo sapiens
ctaaactgtttcccacaacagctgcaccattttaccaggagcatataatggttctaatttctctacattcttgccaacacttggttttctcatctgtttaaattatagacaccttactacatgtgaactggtctcatcgtgattttgatttactcttctctaatggctaataaaattgagcaacattggccatctttatat

SEQ ID NO: 204792 - DNA, 201 bp, Homo sapiens
taaactgtttcccacaacagctgcaccattttaccaggagcatataatggttctaatttctctacattcttgccaacacttggttttctcatctgtttaaattatagacaccttactacatgtgaactggtctcatcgtgattttgatttactcttctctaatggctaataaaattgagcaacattggccatctttatatc

SEQ ID NO: 204793 - DNA, 201 bp, Homo sapiens
tgttaagagaatatccttatgctaatttttatttttcttaaatgtcaatagtaattatttcccttcttttatttctgagactagtaaactgagtcatctcttatttcttcatcaatgtagctaaaagtttgccaattttgatgatattttcttttgtggtaaaatttgagctttttttttgagatggacttttgctcttgc

SEQ ID NO: 204794 - DNA, 201 bp, Homo sapiens
caagaaagaaaaaacacgaaatggtaatgtcaaggatttcagtctctgtgtaagtgattgtgccaaattcataactcctccacacatctcaatgggccatygagcacatcactgggtatggagaattattaaaataatttataaatgcaacaatcttttaccagaatgaattattctccggagctcctaacacttcaatag

SEQ ID NO: 204795 - DNA, 201 bp, Homo sapiens
tcagaaaccacataccatttaaccatcatccccttccaatcttcctcaccatttttttttttttttttttttagacagagtctcgctgtgttgcctaggcyggagtgcatggtgcgatctgggctcactgaaacctccacctcctgggttcgagtgattctcctgcctcagcctcctgaggagctgggattacaggtacac

SEQ ID NO: 204796 - DNA, 201 bp, Homo sapiens
tctcagctcactgcaacttgcgcctccctggttcaagcgattctcatgactgggtcccaagtagctgggactacaggcacatgccaccatgcccggctaatttttgtatcagtagagatggggttccgccatgttggtcaggctggtctcaaactcctgacctcaagcaatctgcctgcctcagcctccctaagtgcaatt

SEQ ID NO: 204797 - DNA, 201 bp, Homo sapiens
ccagttataaagttcttttgtcatatttgggttacaaaagaactagtttatccccaaactatttatagggtttttatataacatagtgttactctccacattttttttttgcatggagtcttgcttcgtcgcccaggctggactgcagtggggtgatctcggctcactgctacctccgcctccagggttcaagtgattctc

SEQ ID NO: 204798 - DNA, 201 bp, Homo sapiens
taccttggcaggcacaggacaaggacaagaccaagaaattatccctccacccaatccaagttgaatgcgtaatcgactttgcctctattctctcttttcayatgtttgcattatcttatgtaaaatggagatttctttatcacaatagaaatatataactgactttttcctctatgccctcttttcacatgcaaaatgcag

SEQ ID NO: 204799 - DNA, 201 bp, Homo sapiens
ggtgttgtgtcagtgtagaccacttaatgttacagtctgggcatccgatttgtcattctctgtacagatgtttaggactgctgctgataagcctctcgtgycaaaccattgcagactgcttctggttttttaggattatgaacatatgcggtatggtaggcatcaaaatacaaggaaataggcctgttatagaggggaagg

SEQ ID NO: 204800 - DNA, 201 bp, Homo sapiens
cttttcctcttcaatttttcacctactagttttaccacccatggatggttttgactgaaaccatcattactatgatggtcgcaaaataatgaccatgatcratttcaagccatcaaagtttgacaaccatatgacataattgtgaatattaacaattaattctaaagagcaggaagtggaggctgggcatggtggctcacg

SEQ ID NO: 204801 - DNA, 201 bp, Homo sapiens
aaaaattagtcaggcatggtggcgggtgtctgtaatcccagctatcaggaacctgaggcaggagaatcactggaacccagaggtggaggttacagtgagcygagatcgcaccactgcactccagcctggtgacagagcaagaccccgtctaaaaaaaaaaaagatatgctgcattttgcttatccattcatagttgatgga

SEQ ID NO: 204802 - DNA, 201 bp, Homo sapiens
ataggtagggcaatgctattgtttgttgtctgaactggaatgtaatttgaattatgctggaacaacatgtgtaagctgagcctgtcctgggcagactgggracatgtggtcactcagctatgggatgccccgatcaactttggagtgatctatttgtttaatcaatatcactgttagttcttacttttacaaaaataatct

SEQ ID NO: 204803 - DNA, 201 bp, Homo sapiens
tttagagggaaggaaaagcataaacacctctgagaaaacaggaaagaaggtgtcagcaaagggcctcagtaaccctctgtaattcaatggatgtagtgatrcacaaactcattattagttcaaaagataaaaaaaaaaaacctcacctagtgatatggtttggctctgtgtccccagccaaatctcatcttgaattgttat

SEQ ID NO: 204804 - DNA, 201 bp, Homo sapiens
ttcataactcctccacacatctcaatgggccatcgagcacatcactgggtatggagaattattaaaataatttataaatgcaacaatcttttaccagaatkaattattctccggagctcctaacacttcaatagtactgcatggactaagttgaaagttaattcccaatctcaatttatccaaatctgtttctttcttccc

SEQ ID NO: 204805 - DNA, 201 bp, Homo sapiens
taatcccaacactttgggaggccaaggaggtcctcgcctcccaaaagccaccacaccctgcataacgtgtagttttaatagtttttatgtttcattaactwgtttttatgtactactgtgaaagtaggttcagtaagaagaacaaggacagcatagatctttacagatacataccttttggagctggaccccgaaactgca

SEQ ID NO: 204806 - DNA, 201 bp, Homo sapiens
ttccacctcctgtggctgcaccaacacaaaatcagagaccactcattgtacttctctttgcatcattcagtcaccaaacagatagtaagtggttaccgtgwgtcaggaactgggccaggcagtgagaaatccatatactaaaaaaagtctgttgtgaagaatgtttgacatacacataactatattctatagacaccaggc

SEQ ID NO: 204807 - DNA, 201 bp, Homo sapiens
catcctcatccctgatggtttaagccacttcattgaggacagagggaagcagaggttctcctggtcctgtttgtgtctgcagtcctgtgccggctcccttrtactctcagttgttgatgactcttccaaagcaaagtcacctgctttctagacttctcagaagttcttccttggaagtgttgggcatgatattctgggaat

SEQ ID NO: 204808 - DNA, 201 bp, Homo sapiens
cacctgtaatcccagctactcaggaggctgaggcaggagaaatgcttgaaccagggaggcgaaagttgcagtgagccaagatcgcgcattgcactccagcrtgggcgacagagcaagactccgtctcaaaaagaaaaaaaaaaatcagctgggcctatttgtgtgcatctacttctcattctctattgtgatcacagcgtc

SEQ ID NO: 204809 - DNA, 201 bp, Homo sapiens
aaggaaaaaaaaaagattccctctaactgccagtaaatggtagcaagcctaatggtagcaagtcattggatttgacttttttgccctggttaaatgtagcrttcagtacattcgaaataatacttgaattgtattttgtttcttctgccagggtctttggaattttgacagagaatgtaatgaaaaatacggagaaatgtg

SEQ ID NO: 204810 - DNA, 201 bp, Homo sapiens
tagggtaagtgttatttgagctccctcttttgcttcttatcgatgcaaacccaagcttagtcctatcagtaaaaatgctcctcctcaggaggaatttccartgttttacactttcagaaatggtgtgtatgctccacccagagcagggccaggtttataccaggactctcatcttaatggtcagggggtttgggtttgcct

SEQ ID NO: 204811 - DNA, 201 bp, Homo sapiens
agctttactcattcagtccttattttagtctcatatattgtgggcctccagcacatatgcatgtaaaattttgtatggattttcactgtaaccacccaagrgattcaccttgccccctgcctcaacagagcccattcatcaagacaggggaattgtaatagagaatgagttaatacatgctgccaacaaaaagagccaaac

SEQ ID NO: 204812 - DNA, 201 bp, Homo sapiens
ttcttatcgatgcaaacccaagcttagtcctatcagtaaaaatgctcctcctcaggaggaatttccaatgttttacactttcagaaatggtgtgtatgctscacccagagcagggccaggtttataccaggactctcatcttaatggtcagggggtttgggtttgcctcagttgcacggcacagatatctgggggatcagc

SEQ ID NO: 204813 - DNA, 201 bp, Homo sapiens
atctcactttttagctctagaagtctttttgtatattcctagaaaggttctacattgacatttatgtcacccgaaaatagaggcccttctatttcttgccrtccaatctgtatgcctttaatttttttctcatctatagcactgagacatccaatatgatgttgaataagaatggtgagagtggatatttttgtattgttt

SEQ ID NO: 204814 - DNA, 201 bp, Homo sapiens
tggcttttctactggctgccgctgtagacccacctccttctccagcacataaatatcgctgttaacattaactaaatcacctctgggcagagaaacaaagytctatatgcacagcccagcaaagagcagcacacagctgaaagaaaaactcagaagacagagctgaaaaagaaaactggtgatggatctcattccaaactt

SEQ ID NO: 204815 - DNA, 201 bp, Homo sapiens
atggtaggcctatattttcaaatgtattaatcaaatttttattcttaaatgattatatattcatggaaacttgcccagaaaatggacaggaaagtgctttrtacttcgtcctatttcccccaatggtgatgtcttatttaactgtagatacagtgtatttctgtcactctagtaacagaaaattgccattgacacaatcca

SEQ ID NO: 204816 - DNA, 201 bp, Homo sapiens
cacttcaatagtactgcatggactaagttgaaagttaattcccaatctcaatttatccaaatctgtttctttcttcccaggcacctgtcacctacgatgcyctggtacagatggagtaccttgacatggtggtgaatgaaacgctcagattattcccagttgttagtagagttacgagagtctgcaagaaagatattgaaa

SEQ ID NO: 204817 - DNA, 201 bp, Homo sapiens
cacatctcaatgggccatcgagcacatcactgggtatggagaattattaaaataatttataaatgcaacaatcttttaccagaatgaattattctccggarctcctaacacttcaatagtactgcatggactaagttgaaagttaattcccaatctcaatttatccaaatctgtttctttcttcccaggcacctgtcacct

SEQ ID NO: 204818 - DNA, 201 bp, Homo sapiens
aggtttcaagttattggactaataggcctgtcgcaagttgggaaatagcattcttttctttatttttcctctaatcctggggggaaaataaaagaaagggrcttttcatgtaattgcattgtttcttcaaagtgcattcttagtcttttgcttattactaatttttttttcaaaagtcactaaatcaaaccacccctttgt

SEQ ID NO: 204819 - DNA, 201 bp, Homo sapiens
gcacaatctcagctcactgcaacttgcgcctccctggttcaagcgattctcatgactgggtcccaagtagctgggactacaggcacatgccaccatgcccrgctaatttttgtatcagtagagatggggttccgccatgttggtcaggctggtctcaaactcctgacctcaagcaatctgcctgcctcagcctccctaagt

SEQ ID NO: 204820 - DNA, 201 bp, Homo sapiens
ggacttataaaatggtcatgtctatccttaaaagttatcttctttttctatgcccattttctgccaaactaactctgcaaaggaaacttgttaatttacartctccctagctatataaaaaagtatcctttccctccatctttgccaatctatgcttttaaatgtaatttttgccattttaataaaaatggcatcttttta

SEQ ID NO: 204821 - DNA, 201 bp, Homo sapiens
tctgacatctagaggtggcatttcccacacttattatgtgttaagctggaaaactggaaagtgagtccactctgtcatttgcccactcactcattttctcrctcaacaaaatgccttggacttttatttaaatctgctagactaaaagtggtccctgatgtttttgactttctaattcagctagaattctagagagaatac

SEQ ID NO: 204822 - DNA, 201 bp, Homo sapiens
tccacacatctcaatgggccatcgagcacatcactgggtatggagaattattaaaataatttataaatgcaacaatcttttaccagaatgaattattctcyggagctcctaacacttcaatagtactgcatggactaagttgaaagttaattcccaatctcaatttatccaaatctgtttctttcttcccaggcacctgtc

SEQ ID NO: 204823 - DNA, 201 bp, Homo sapiens
cactaagttttaccaattcgtggccccctctaatgtttactggaatgcccacagctacaaaatgtcaattttcccctctagaaaccccagccagttaagaraaatcaatatgcaactcaaaatatatttctttgacacttttctttttttgagatggagtcttgctcttgtcacccaggctggagtgcaatggggtgatct

SEQ ID NO: 204824 - DNA, 201 bp, Homo sapiens
tttggaaagccgaggtgggtggatcacgtgaggtcagaagttcaagaccagcctggtcaacatgatgaaaccctgtctctactaaatatacaaaaattagytgggtgtggtggcaggtgcctgcaatcccagctactcgggaggctgaggcaggagaatcgcctgaaccctggaggcagaggttgcagtgagccaagattg

SEQ ID NO: 204825 - DNA, 201 bp, Homo sapiens
ttctttcctctttaaattcggaagttcccaaaaccctctttggaaaaacacaggtcgcagctacccctgtggctcatgtgtttccaggtgtcccctcaagytttgactcaataaacctctatcaatcaagacacctgcctcagtcactttttggttaacaccttggtaaccacaatgggattcactgagggcagtttggcc

SEQ ID NO: 204826 - DNA, 201 bp, Homo sapiens
ctttggaaagccgaggtgggtggatcacgtgaggtcagaagttcaagaccagcctggtcaacatgatgaaaccctgtctctactaaatatacaaaaattakctgggtgtggtggcaggtgcctgcaatcccagctactcgggaggctgaggcaggagaatcgcctgaaccctggaggcagaggttgcagtgagccaagatt

SEQ ID NO: 204827 - DNA, 201 bp, Homo sapiens
ggactgttgtggggtggggggaggggggagggatagcattaggagatatacctaatgctaaatgatgagttaatgggtgcagcacaccaacatggcacatrtatacatatgtaacaaacctgcacgttgtgcacatgtaccctaaaacttaaagtataataataatagaaaaaaaaacaaaacaacaaaacaagaaaaaaa

SEQ ID NO: 204828 - DNA, 201 bp, Homo sapiens
attcaggccccacctgaggaaagggaatgtccatccccatgtgtgccagtatatctgtctttggtcagaataaggcaggaagcagagtcaggagcacccgraaagtcaggcttggaagaaagtgaggctcagtcctttggatgttaatctgactggcccagtgtacctaaataattaataaatatcctcctgaaccccatt

SEQ ID NO: 204829 - DNA, 201 bp, Homo sapiens
gcagaaactgcaggaggagattgacgcagttttacccaataaggtaaggggatgatcccctggagaaggagggagaaggtgaagcctcagcaagaatgccycctcaccacttgccaggacaatttttgcaaaaagcgtaagcatcagttctttcatttacactatgcagaaaggctgtaaagagtaaaaacaaagggagaa

SEQ ID NO: 204830 - DNA, 201 bp, Homo sapiens
aactggattaaagtgactttgccttattctggctctgtaggatacacatcagagtgaagccacccgcagtgtgactctgaattgcttttctatttttgctyttagggatttgggagcttcactggaattttgcttcatctaaactgtgatgctctacactaaccacttttcctaaaatatatttcctctcctttcagctct

SEQ ID NO: 204831 - DNA, 201 bp, Homo sapiens
aaggtaaccaagaactgcatctgggggctactgatggggacactcagagagaaggccctgttctgaaaatgtgcagaaagttttccaggaaaatgagaatytcttccacattgcagaaaggcacacatttggatgttataaatgatagctggaggcactttctagaagcacacaggcatagccacattccaggcttgaagg

SEQ ID NO: 204832 - DNA, 201 bp, Homo sapiens
tttctctttttgcttccagcatcgagtagatttctttcaacagatgatcgactcccagaattccaaagaaacaaagtcccataaaggtaaccaagaactgyatctgggggctactgatggggacactcagagagaaggccctgttctgaaaatgtgcagaaagttttccaggaaaatgagaatttcttccacattgcagaa

SEQ ID NO: 204833 - DNA, 201 bp, Homo sapiens
atgtggacttttatgttatttctctctctctctctctctcatctaatttttaaaaacagttttattgaaaacaaaattcacataccatataattcacctasttaaaatgtataattcaatggtttttggtacatttaaagatatgcacaaccaacatcattgttaacttctggacatttttgtaaacttctgaacattttt

SEQ ID NO: 204834 - DNA, 201 bp, Homo sapiens
aagagtaagtagcacagtcttgaggttctgagctgtcatgagcccctccagctgcctgcagtggagctgatattcccactgttgggttactccagtgatcrgacaaaagcagggctgtggtgttgcaactccaataggccacccaagatggtgttgctcacaaaagaaagctaggaagctgagagaaaaggatcttctccc

SEQ ID NO: 204835 - DNA, 201 bp, Homo sapiens
tcattacaaaatatcatttactgttccatgctgggcaaagccatgtccttctgagactcgagtctgcgtagttaactatgggtggtgttgtgttttagatkgtccccatcatttcccaatgtggagatatgttggtgagaagcctgaggcaggaagcagagaacagcaagtccatcaacttgaaagagtaagtagcacagt

SEQ ID NO: 204836 - DNA, 201 bp, Homo sapiens
ctatgacacaactagcaccactctccccttcattatgtatgaactggccactcaccctgatgtccagcagaaactgcaggaggagattgacgcagttttasccaataaggtaaggggatgatcccctggagaaggagggagaaggtgaagcctcagcaagaatgcctcctcaccacttgccaggacaatttttgcaaaaag

SEQ ID NO: 204837 - DNA, 201 bp, Homo sapiens
tcctgtgtcagcctcccaaagtgctgggattacacgcttgcaccactgtgcccagcctgttttattaaaaccactcattggactacagtcaatcacctcamttctagatttttgtctctgtagctttcgtatatccagaggtcatccattttgaagactagtgccctaggaactctattacttgatgtcactcaaagatgt

SEQ ID NO: 204838 - DNA, 201 bp, Homo sapiens
gtttgtagaatggatattaattctcctttaaatattaggtagaattcattattggaactatctggcctggccttttctttgtgggtagttttgattactgwttcaatgcctttatatgttatagatctattcagattgtctgtttctttccaactcagtttctgtagtttgtgtctttcaaagaatttatccattttacct

SEQ ID NO: 204839 - DNA, 201 bp, Homo sapiens
ccaactcagtttctgtagtttgtgtctttcaaagaatttatccattttacctgttatctaatttatacaattgttctaataataaaattgttaagagaatrtccttatgctaatttttatttttcttaaatgtcaatagtaattatttcccttcttttatttctgagactagtaaactgagtcatctcttatttcttcatc

SEQ ID NO: 204840 - DNA, 201 bp, Homo sapiens
actcagtttctgtagtttgtgtctttcaaagaatttatccattttacctgttatctaatttatacaattgttctaataataaaattgttaagagaatatcyttatgctaatttttatttttcttaaatgtcaatagtaattatttcccttcttttatttctgagactagtaaactgagtcatctcttatttcttcatcaat

SEQ ID NO: 204841 - DNA, 201 bp, Homo sapiens
cgaggtcaggagatcgagaccatcctggctaacacggtgaaaccctgtctctactaaaaatacaaaaaaaaaaaaaaaaaaaattagccgggcgcagtggygggcgcctgtagtcccagctactcgggaggctgaggcaggagaatggcgtgaacccgggaggcggagcttgcagtgagccgagatagcgccactgcactc

SEQ ID NO: 204842 - DNA, 201 bp, Homo sapiens
ctgtagtttgtgtctttcaaagaatttatccattttacctgttatctaatttatacaattgttctaataataaaattgttaagagaatatccttatgctamtttttatttttcttaaatgtcaatagtaattatttcccttcttttatttctgagactagtaaactgagtcatctcttatttcttcatcaatgtagctaaa

SEQ ID NO: 204843 - DNA, 201 bp, Homo sapiens
tctctactaaaaatacaaaaaaaaaaaaaaaaaaaattagccgggcgcagtggcgggcgcctgtagtcccagctactcgggaggctgaggcaggagaatgrcgtgaacccgggaggcggagcttgcagtgagccgagatagcgccactgcactctggcttgggtgaaagagcgagactgtgtctcaaaaaaaaaaaaaaaa

SEQ ID NO: 204844 - DNA, 201 bp, Homo sapiens
atggtggtgataattcaggggtttatgagattgcagagacaacatatgcagaaatgaaaacacatcagaaagacaatgagttgcttagtgttcatagacaraagtaagtcattcaatatctacactagttagagaaaatttaaaagtgactttaaattctccatttcaaatatcttctgtattttctctccttttccttaa

SEQ ID NO: 204845 - DNA, 201 bp, Homo sapiens
gcctgtagtcccagctactcgggaggctgaggcaggagaatggcgtgaacccgggaggcggagcttgcagtgagccgagatagcgccactgcactctggcytgggtgaaagagcgagactgtgtctcaaaaaaaaaaaaaaaaagaaaagaaaaaaagaaaaagaaaattcagttcactaggcagctatttaccgctggat

SEQ ID NO: 204846 - DNA, 201 bp, Homo sapiens
aagcatttatccattgaattgcagacattccaattgcactctaaatgattttaaaatgtacagttattattgactgtagtcactctgttgtgctatcaaaycataggtcttattcattctttctaactattttttgtaaccttttattatccttacctcccccgcccccactacccttcccagagtctggtcaccatcctt

SEQ ID NO: 204847 - DNA, 201 bp, Homo sapiens
tcccacaacaatagcaatgtggcatcactcgtctggggtaatacccgaggtttgttgtcccacagatatagggggtctccctatagtggacgcacaaagartaaggttaagagcagaggttggataggtgaaagaaagagaaaagctctctcctgccgagagagggggcccccagtgggtcttctgacctgcggtaaagtg

SEQ ID NO: 204848 - DNA, 201 bp, Homo sapiens
gggtggatcacgaggtcaggagatcaagaccatcctggccaacatggtgaaacctcatctctactaaaaatacaaaaattagccaggcatggtggtgggcrcctgtagtcccagctactcgggaggctgaggcagcaaaatcgcttgaacccgggaggcagaggttgcagtgagccaagattgcgccattgcactccagcc

SEQ ID NO: 204849 - DNA, 201 bp, Homo sapiens
caggacaaggacaagaccaagaaattatccctccacccaatccaagttgaatgcgtaatcgactttgcctctattctctcttttcatatgtttgcattatyttatgtaaaatggagatttctttatcacaatagaaatatataactgactttttcctctatgccctcttttcacatgcaaaatgcagatttgctgagcact

SEQ ID NO: 204850 - DNA, 201 bp, Homo sapiens
tattccaaaagaataatacattgtgtagaaagaaaaaataaaaacctgattgtactaaagttttgagcatagacgttatggagtggtgggaggggaaggtrtttgatagctgttggctggcagtgactggggcaggaaagttacaatgaggaagttggaataacttcaatcccttcattattttgctgaggataccaccaa

SEQ ID NO: 204851 - DNA, 201 bp, Homo sapiens
gccaacatggtgaaacctcatctctactaaaaatacaaaaattagccaggcatggtggtgggcacctgtagtcccagctactcgggaggctgaggcagcaraatcgcttgaacccgggaggcagaggttgcagtgagccaagattgcgccattgcactccagcctggcaacagagcaagactcagtctcaaaaaaaaaaaa

SEQ ID NO: 204852 - DNA, 201 bp, Homo sapiens
gcaggtggatcacctagggtcaggagttcgagaccagcctggccaacatggcgaaaccctgtctctactaaaaatacaaaaactagccgggtgtggtggcrcacacctgtaatcccagctatttgggaggctgaggtgggagaatcacttgaaccagggaggcggaggttgcagtgagccaagatcacactactgcactcc

SEQ ID NO: 204853 - DNA, 201 bp, Homo sapiens
agtggcgcgatctcagttcactgcaaactctgcctcccaggttcaagtgattcttgtgcctcagcctcccaagtagctgggattacagctgtgcaccaccrtgctcatctaatttttgtattttagtagagatggggttttgccatgttggccaggcgggtctcaaactcctgggctcaaatgattcacccacctcaacct

SEQ ID NO: 204854 - DNA, 201 bp, Homo sapiens
ttataaatgatagctggaggcactttctagaagcacacaggcatagccacattccaggcttgaagggcaaccctgaacaagtgtggcactcccggaggtcrgtcagtgatctgtggatcacccacatcagataaaatgccagttctcagcctcctccagatccacttactcagaacttggaaacgtacatctaacatccaa

SEQ ID NO: 204855 - DNA, 201 bp, Homo sapiens
caactattgtgaatagtgctgctgtgaatagttgtttacaagtttatgtttgaatacttgatttttcttcttttaggtatatattcagcagtggaatggakgcgttttatagtagtaattccatgtttcacttcttaaggagtttctaaactgtttcccacaacagctgcaccattttaccaggagcatataatggttcta

SEQ ID NO: 204856 - DNA, 201 bp, Homo sapiens
tcattaaaatttctctttttgcttccagcatcgagtagatttctttcaacagatgatcgactcccagaattccaaagaaacaaagtcccataaaggtaacsaagaactgcatctgggggctactgatggggacactcagagagaaggccctgttctgaaaatgtgcagaaagttttccaggaaaatgagaatttcttccac

SEQ ID NO: 204857 - DNA, 201 bp, Homo sapiens
ggagtttctaaactgtttcccacaacagctgcaccattttaccaggagcatataatggttctaatttctctacattcttgccaacacttggttttctcatytgtttaaattatagacaccttactacatgtgaactggtctcatcgtgattttgatttactcttctctaatggctaataaaattgagcaacattggccatc

SEQ ID NO: 204858 - DNA, 201 bp, Homo sapiens
cttctttcatttagcattacattttcaaagttaattcatgttgaaacatggatcagtacttcatttctttttatgaccaaataatatttcattgtatagayatgctgcattttgcgctaggtgtagtggctcatgcctgtaatcccagcactttgggaggccgaggtgggcagatcacaaggtcaagagatcaagaccatc

SEQ ID NO: 204859 - DNA, 201 bp, Homo sapiens
cctggcctttttttctttctttctttctttttttaaacagagtctaactctgttgccaggctggagtgcagtggctcaatctcggctcactgcaacctccrccttccaggttcaagtgattttcctgcctcagcctcccaagtagctgagactacaggcatgcgccaccacacccaactaatttttgtatttttagtagag

SEQ ID NO: 204860 - DNA, 201 bp, Homo sapiens
gctcttctgtttaggtcttcgatgcatcttgattttcattttatatgccgtgtgacgtaagagcccagctttattcttacacttggctatccagttgtccyaggaccatttgttgaaaagacgattttgtccccattcaatgatcatgacaccttcctcaaaattcagtggaccagagacatgtggatgtattctggactg

SEQ ID NO: 204861 - DNA, 201 bp, Homo sapiens
gagactacaggcatgcgccaccacacccaactaatttttgtatttttagtagagacggggtttctccatgttggccaggatgatctcgatctcttgacctygtgatctgcctgcctcagcctcccaaagtgagccaccatgccctgccttcctcaccttttttatgttgcccaggctggtcttgaactcctggcctcaagc

SEQ ID NO: 204862 - DNA, 201 bp, Homo sapiens
gaggcagaggttgcagtgagccaagattgcgccattgcactccagcctggcaacagagcaagactcagtctcaaaaaaaaaaaaaaaaagttatatggttyaatgctttacatttaagtttatgatacattttgtgttaattttttgtcttaattttttgcataagatgtaaagtttaggtcatagttcactttctgtggc

SEQ ID NO: 204863 - DNA, 201 bp, Homo sapiens
ttgctagattgatccagtttgctagtattttgttaaggatttgtgcatttatatttacaagatatgttagtctgtagtttctttatcctgtgatatatttktccagttttaatatgatggtaatactggccttatagaatgaatttggaaatgttccctcatttcctagtttttgaaagtgtttgtagaatggatattaat

SEQ ID NO: 204864 - DNA, 201 bp, Homo sapiens
acctgaggcaggagaatcactggaacccagaggtggaggttacagtgagctgagatcgcaccactgcactccagcctggtgacagagcaagaccccgtctaaaaaaaaaaaagatatgctgcattttgcttatccattcatagttgatggacatttgtgttgtttctacctttcaactattgtgaatagtgctgctgtgaa

SEQ ID NO: 204865 - DNA, 201 bp, Homo sapiens
ttcccaatggcagggaccttgtcttgttaggcatgctgtctctactgctggcacagactctgtacataatacttgttggaagagcaagtcagaattgaccratttctctgttttctggagtagaggacttctgtgtttcctccatcttggcacttccacctcctgtggctgcaccaacacaaaatcagagaccactcattg

SEQ ID NO: 204866 - DNA, 201 bp, Homo sapiens
ttaattttccatgttttactctactcagtttctttggggcctacaccatggatgtaatcactggcacattatttggagtgaacttggattctctcaacaayccacaagatccctttctgaaaaatatgaagaagcttttaaaattggattttttggatccctttttactcttaatatgtatgtggacttttatgttatttc

SEQ ID NO: 204867 - DNA, 201 bp, Homo sapiens
tatgatgggagatgatgcagcagattgttctgattgtgtgtgggttttcacctgtcttgctctggcatagcacttcttgctgtgtgtatagcagaaggaargtaaagaggtgctggttttaattttccatgttttactctactcagtttctttggggcctacaccatggatgtaatcactggcacattatttggagtgaac

SEQ ID NO: 204868 - DNA, 201 bp, Homo sapiens
ctaactcaccttagtgtctccatcactcccagcacagggccagctgcatcactgatacccaataaatgcctcatgagtatgatgggagatgatgcagcagrttgttctgattgtgtgtgggttttcacctgtcttgctctggcatagcacttcttgctgtgtgtatagcagaaggaaggtaaagaggtgctggttttaatt

SEQ ID NO: 204869 - DNA, 201 bp, Homo sapiens
ctgaacagggtgtggctgttctataaagtgctgaagagacatcagctctgggcgtagactgtggggtctggcaatgtcaaatttattgattggccgagaargagttaattattttattcttgtcctgcagaagcacagtgttgacacaccttttaccatccacactcaacacaaactactgtaattgtctgattattgggt

SEQ ID NO: 204870 - DNA, 201 bp, Homo sapiens
gccagattcccaaaatgatagaaggccacatatctccccagatggcgtccctcgtaagtttctcacaaggacgttccttatgagtccctaaatcttttagkatacatatcctccttccccccatgaaccagcccttaaaaccaagttctgttgaatctcacttaccctgacaatgtcaatttccagtttaccttggcaggc

SEQ ID NO: 204871 - DNA, 201 bp, Homo sapiens
ctagagcagagcttgcaggaatccccaaagatcagccgaaatcaattattcaggccccacctgaggaaagggaatgtccatccccatgtgtgccagtatayctgtctttggtcagaataaggcaggaagcagagtcaggagcacccgaaaagtcaggcttggaagaaagtgaggctcagtcctttggatgttaatctgact

SEQ ID NO: 204872 - DNA, 201 bp, Homo sapiens
tgctattgtcaacctaagtaacaaacagagagaggctatctaaaagaaaaagatgatctgggaattgagcattgcaaggggaatatgcgtgtcataggaawctccatgcatattcagtatgtgaacaaaaataaaatctttgagaccctaaactcactatgacaaagggaaaatcgagcttgagaattaagtcatacctta

SEQ ID NO: 204873 - DNA, 201 bp, Homo sapiens
tgagctttttttttgagatggacttttgctcttgccgctcaggctggagtgcaatggcacgatgttggctcactgcaacctccacctcctggggtcaagckattctcctgcctcagcctccagagtagttgggactacaggcatgcaatactatgcccggctaatttttgtatttttagtaaagacaaggtttttactgtt

SEQ ID NO: 204874 - DNA, 201 bp, Homo sapiens
atgttatagatctattcagattgtctgtttctttccaactcagtttctgtagtttgtgtctttcaaagaatttatccattttacctgttatctaatttatwcaattgttctaataataaaattgttaagagaatatccttatgctaatttttatttttcttaaatgtcaatagtaattatttcccttcttttatttctgag

SEQ ID NO: 204875 - DNA, 201 bp, Homo sapiens
ggggtcaagctattctcctgcctcagcctccagagtagttgggactacaggcatgcaatactatgcccggctaatttttgtatttttagtaaagacaaggwttttactgttggtcaagctggtctcgaattcctgacctcaggtgatccacctgcctcggcctcccaaagtgctgggattataggcgtgagccaccgcgcc

SEQ ID NO: 204876 - DNA, 201 bp, Homo sapiens
tacaggcatgagccactgcacccggcctacacattttttttaattgagatggagtctcactctgttacccaggttggtgcagtggcaccatcttggctcaytgtagcctctgcctcccagtgatcctgccacctcagcctcccaactttgacacattttaatgtggccttaccagaacttcccttgtctaaatctagggaa

SEQ ID NO: 204877 - DNA, 201 bp, Homo sapiens
tacatttaaagatatgcacaaccaacatcattgttaacttctggacatttttgtaaacttctgaacattttttgtaaactcagaaaccacataccatttawccatcatccccttccaatcttcctcaccatttttttttttttttttttttagacagagtctcgctgtgttgcctaggccggagtgcatggtgcgatctgg

SEQ ID NO: 204878 - DNA, 201 bp, Homo sapiens
tttctaaactgtttcccacaacagctgcaccattttaccaggagcatataatggttctaatttctctacattcttgccaacacttggttttctcatctgtttaaattatagacaccttactacatgtgaactggtctcatcgtgattttgatttactcttctctaatggctaataaaattgagcaacattggccatcttta

SEQ ID NO: 204879 - DNA, 201 bp, Homo sapiens
taaactcagaaaccacataccatttaaccatcatccccttccaatcttcctcaccatttttttttttttttttttttagacagagtctcgctgtgttgccyaggccggagtgcatggtgcgatctgggctcactgaaacctccacctcctgggttcgagtgattctcctgcctcagcctcctgaggagctgggattacagg

SEQ ID NO: 204880 - DNA, 201 bp, Homo sapiens
cagccaccatgccagtctctaagtgcccaaaaaagtcggagtccctgtggaaggggtgggaccggaaggcccagaggaacggcctgcggagccaggtataygctgtgaatggcgactactatgtgggcgagtggaaggacaacgtgaaacacggtgagtgggactccgggacgggcggccggagtggggtcagagccacag

SEQ ID NO: 204881 - DNA, 201 bp, Homo sapiens; identical to SEQ ID NO: 36035

SEQ ID NO: 204882 - DNA, 201 bp, Homo sapiens
gaggcaaaggccccgaggccagaacatgcccagtattttccaggaacagcaatgaagcaagtgtgtggctggagcagagacgggttgccaggagtgggggkgcaaggtgtgagtggaaaggggaggggcgagcagatcaccagggccttgaaggccactggaagggctgtggcttttaccctgagtgaccagggtagcccc

SEQ ID NO: 204883 - DNA, 201 bp, Homo sapiens
tctcctgggtacttggtgtctaggatgatgcgcagagcctgtcccagctctctagattcgtctagttgggggcccctgaggctcaggcaggcacaccaccsccaccccccggcggccatgtctgcagcattgcccatctgtgtgtcaccagggaaaggaacacaggtctggaagaagaaaggagccatctatgagggggac

SEQ ID NO: 204884 - DNA, 201 bp, Homo sapiens
agagaatatacctggggtgttcaaggaacagccaggaggacggtgtgggtgaaacagagtgaggaagaggaggaggtcagagaggttgcaggccggggacrgtggctcacacctgtaatcccagcactttgagaggccgaggcaggcagatcacttgaggtcaggagttcaacaccaggctggccaacatggcaaaacccc

SEQ ID NO: 204885 - DNA, 201 bp, Homo sapiens
ttgggaggctgagataagagaattgcttgaacctgggaggaggaggttacagtgagctgagattgcgccattgcactccagccagggagtttccaagaackaatctccatctcaaaaaaaaaaaaaaaaaaaaaagaggttgtgggttaaagaagaagggtagtcagatcatataggaccctgtcagccatggtaagaact

SEQ ID NO: 204886 - DNA, 201 bp, Homo sapiens
gcctcccaatgtgttaggatttgcactgagctctggaagagcgacccctgggggtctagcttagtttggtgtaccctgcaccacacctccctgtcctttcycccagagaacgggaaccgctacgagggctgctgggagagaggcatgaagaacggggcggggcgtttcttccatctggaccacggccagctgtttgaaggc

SEQ ID NO: 204887 - DNA, 201 bp, Homo sapiens
cagacagggaacagacaaggttttgttttcagtcagggcatccctagcaagggaggtggctcctgatgaggctggcagcaccccacacggcaggcagcgcyagtcaaggctggcagcctgggtcctccatgctctccaaaccaacttcttggtatttccctccaggtcaaaatcctagaccctgatggtgtgctggcggag

SEQ ID NO: 204888 - DNA, 201 bp, Homo sapiens
tggtagagatggggattcacttgccaggtgcggtagctcacgcctgtaatcccagctctcagggaggcagaggtgggagatagcttgagcccaggagttcraggcctgcttgggcaatatagcgagaccccgttctccacaaaaaggaagaaaaaaaaagacaaataaataaataagtgagacacggattcaccatgttgg

SEQ ID NO: 204889 - DNA, 201 bp, Homo sapiens
ccctaacccctttccagcaccctccagccttgcagaagcagccaccatgccagtctctaagtgcccaaaaaagtcggagtccctgtggaaggggtgggacyggaaggcccagaggaacggcctgcggagccaggtatacgctgtgaatggcgactactatgtgggcgagtggaaggacaacgtgaaacacggtgagtggga

SEQ ID NO: 204890 - DNA, 201 bp, Homo sapiens
ccctgtggaaggggtgggaccggaaggcccagaggaacggcctgcggagccaggtatacgctgtgaatggcgactactatgtgggcgagtggaaggacaaygtgaaacacggtgagtgggactccgggacgggcggccggagtggggtcagagccacagtgggcaacagggccaggaaggcagagtgcagagctcactggg

SEQ ID NO: 204891 - DNA, 201 bp, Homo sapiens
gttcctaggtggggagccacaagatcacataaatcagtttattgatttgggtagtgccagctgatccatcaagtgcaaggtctgcaaaatatcttaagcaytgatcttaggagcagtttagtgaggatcagaatcttgtagcttccagctgcatgactcctaaaccataatttataatcttgtagctaatgttaatcctac

SEQ ID NO: 204892 - DNA, 201 bp, Homo sapiens
gacaggaaagtgcaggagagtctactcaggctggtggaaaggtgataagaaatcggtgagcaggcctgccagccggggtgtgtgtgtgtgtgtgtgtgtgygtgtgcgcgcgtgtgtgtttaggggaagccgagagaggcctgggagaaaagagaggggaggtctacagggaggaggacagggttgtgctgctcgtgggag

SEQ ID NO: 204893 - DNA, 201 bp, Homo sapiens
tagccaggaagaaaaaaaagggagaaagatgggaggcaaaaaaatagcaaagggaacgagatgtaaaacagcagagtgtgtctgccctgggacaggagtgaggagaagagttgcgggggccctcagggatatgtgggaaatcaggattttgaggagtagacttggcttctcaacccaacctcctcgggtgtgatctgcaaa

SEQ ID NO: 204894 - DNA, 201 bp, Homo sapiens
cgccggccccgcccacccgaccacgcccccggcagcgagctggccacgcccatttggtcccacagagacaggccacaccccacactcttgtcccacactgrcccttgtgtcaatgtgggacaagagaggaagagcaccctatctctcccctcagtcacaaaaggtcacatatatatgatgctatttatatgaaatttttag

SEQ ID NO: 204895 - DNA, 201 bp, Homo sapiens
gcagtggctcatgcctgtaatcccagcactttgggaggcagaggcgggcggatcatgaggtcaggagtttgagatcagcctggccaacgtggagaaacccygtctctactaaaaatacaaaaagtagctgcatgtggtggtatacacctgtaatcccagctactcaggaggctgaggcaggagaatcacttgaactcggga

SEQ ID NO: 204896 - DNA, 201 bp, Homo sapiens
gcgattctcctgcctcagtctcccgagtagctgggattacaggcatgtggtaccacacactgctaattttgtatttttagtagagacagagtttctccatattggccaggctggtctcgaactcccgacctcaggtgatccgccagcctgggcctcccaaagtgctaagattacgggcatgagccaccgcgcctggccctg

SEQ ID NO: 204897 - DNA, 201 bp, Homo sapiens
gcacatctgtagtcccaacttttcaaaaggctgaggcaggaggattgcttgatctcaggaggctgaggttatagtgagctatggtggtgccactacactcyagcctggacaacagagcaagacttgtctcaaaaagagggaattcagggcaggcttcctgtaggaggtgacactaaaagatgctaggagttagccaggaag

SEQ ID NO: 204898 - DNA, 201 bp, Homo sapiens
gaaaaaaaaagagaaaacagtaaattagcaggtattagtcacctacaacatgccaggaacagtttgtttgtttgtttgtttgattttgagatggagtttckctcgtctcccaggctggagtgcaatgacgtcatctcggctcactgcaacgacgtcatctcggctcactgcaacccacgcctcccaggttcaagagattct

SEQ ID NO: 204899 - DNA, 201 bp, Homo sapiens
tgttggccaggctggtctcaaactcctgacctcaagtgatcagcgcgcctcggcctcccaaactgctgggttacaggcgtgagccactgcgcccagccccsccataagatattcttatacccattttacagctgagatatctgaggctcagagagacccaaagaattaacttacttggtcaaggtcacaaagctcagaggg

SEQ ID NO: 204900 - DNA, 201 bp, Homo sapiens
aagaaagaaagaaatggaactttcctggccttctcctgggtacttggtgtctaggatgatgcgcagagcctgtcccagctctctagattcgtctagttggrggcccctgaggctcaggcaggcacaccacccccaccccccggcggccatgtctgcagcattgcccatctgtgtgtcaccagggaaaggaacacaggtctg

SEQ ID NO: 204901 - DNA, 201 bp, Homo sapiens
aaataataacaaaggctcccatgatttgagagaggaaaaaaaaaataaaaaaataaaaaaaaccaataaaggctaacattgacatcgtatttcctacttgyaggctctaagtgctgtacacatatcctggaatctagtgataagaaacaaccccatgagatactgtttttcttttcagaaaattagaatggtcccgtaatt

SEQ ID NO: 204902 - DNA, 201 bp, Homo sapiens
caccctccagccttgcagaagcagccaccatgccagtctctaagtgcccaaaaaagtcggagtccctgtggaaggggtgggaccggaaggcccagaggaayggcctgcggagccaggtatacgctgtgaatggcgactactatgtgggcgagtggaaggacaacgtgaaacacggtgagtgggactccgggacgggcggcc

SEQ ID NO: 204903 - DNA, 201 bp, Homo sapiens
tacagatgcacgccaccaagcccagctaatttttgtattttcagtagagacgaggtttcaccatgttggttagctggcctcgaactcctgacctcgtgatycgcccgcctcagcctgccaaagtgccgggattacaggcgtgagccaccgcgcccggccaagacctcgcgttttctaatccaaaaaattagccgggcgtgg

SEQ ID NO: 204904 - DNA, 201 bp, Homo sapiens
ggcgggcgcctgtagtcccagctactgaggaggctgaggcaggagaatggcgtgaacctgggaggcggagcttgcagtgagccgagatcgcgccagtgcamtccagcctgggcgacagagcgagacaccgtctcaaaaaaaaaaaaaaaaaaaaaaaaaaaaggaaagaaaaagaaaacgcgagatcttaaaaccaggtct

SEQ ID NO: 204905 - DNA, 201 bp, Homo sapiens
aggtcaggagttcaagaccaccttggccaatatggtgaaatcccatctctactaaaaaaatacaaaaatgggccaggtggggctgggcgtggtggatcacrcctgtaatcccagcactttgggaagccgaggcgggcggatcatgaggtcaggagattgagaccatcctggctaacacagtgaaaccctgtctctactaaa

SEQ ID NO: 204906 - DNA, 201 bp, Homo sapiens
attggtaacagcgtctttcaaatgccagctccaccatccctctctcccctgcagagaacacaaacgcttcaggagaaattcaagcctgtgtcacccgatcrctcagaccagtgcggctctggctggaggagtcagcagcagctccaggcatgaccccggcaccctcatagggcccctcactacccccagcactgggtcatt

SEQ ID NO: 204907 - DNA, 201 bp, Homo sapiens
gagtgatcttggctcactgcagcctccctctccagggttcaagcaattctcctgcctcagcctcccgaatagctgggattacaggtgtgggacaccatgcmccgctaacttttgtatttttagtagagatggggtttcaccatgttggccaggctggtcttgaactcctgatctcaagtgatccacccaccttggcctccc

SEQ ID NO: 204908 - DNA, 201 bp, Homo sapiens
tgcagcctcaacttcttgagctcaagccatcctcccacctcagcctccagagtagctgggactataggtgcacaccactatgcccagctaattaaaaaaawttttttttttgcagagatgtggtctcactatgttgctcaggctggtcttgatctcctgggcttatgagcctcccatcttggcctcccaatgtgttaggat

SEQ ID NO: 204909 - DNA, 201 bp, Homo sapiens
ttggtagcattatagaaatgattgtaaagatgtagtgctttctgaagtaacaaaattcagtactttgaaagggaaaaccagaattacttttggctttatcrtagtccatttttttcttgtttattttttttccaacttttattttagattcagagggtacacgtgcaggtttgtcacgtgggtaaattatgtgttgctgga

SEQ ID NO: 204910 - DNA, 201 bp, Homo sapiens
ctggtgttgaactcctgggttcaagtgatctgccagccttggcctcccagagtgctgggattacaggtgtgagccaccgtgcctggcctgcaaattaaacrtttttaaaatcgtatcagtgccagtgaggattcattcatttattcaacaaacacatcctgattgcctactatgtgcattgctctagacttgtgagcaaga

SEQ ID NO: 204911 - DNA, 201 bp, Homo sapiens
atcattcctgactgaatgtatatgctaccaataagcagttattttcttatacttattcatgcataagtacttaacagtaaaaaatatgacataactcgcayaggaacaaggatggcaaaaaaaaaaatatgacacaccactgatacagtgaaaaaataatgtggtcagggtagctaggcaacagtagcatcaccagaaacc

SEQ ID NO: 204912 - DNA, 201 bp, Homo sapiens
gatctgccagccttggcctcccagagtgctgggattacaggtgtgagccaccgtgcctggcctgcaaattaaacatttttaaaatcgtatcagtgccagtgaggattcattcatttattcaacaaacacatcctgattgcctactatgtgcattgctctagacttgtgagcaagacagacaggaacttctatcctagagga

SEQ ID NO: 204913 - DNA, 201 bp, Homo sapiens
atgacttagacattggtggtggtctccttagcagcctggatgctgttcatctccatgatgccatccttcccagatctatctgcaccatgtgcctgcctttyaaaggcccatgtgatatcctcaaaagccctgccatgggtctcagggactttgaagaaggtaaaggtcaagaaggtgatgaggaagctggcgaagataata

SEQ ID NO: 204914 - DNA, 201 bp, Homo sapiens
ttcccacttaatgatgctgtattttaaaaggttattgtatactgtaattttatttttgtaggtgaagagaaacagaagcagctgaagggccaggaagtggrtctttctagggatgtggcattctgctggatggctttttaaaatgggttttttcctttagggagaccgaataaactgtgttgtgcacctgcattttgactg

SEQ ID NO: 204915 - DNA, 201 bp, Homo sapiens
gggtaaaataaataaaactcaagttaatttgccttgtagagctatatggaagtgaggaaggtgctcttacataaaccccgtctgccttccacactcatatrtatatcttcttcctgataagtctgaggttgggggaactgcgccttacttttcctctcctatatcccctagtgcggcaatattagaacccaaggaaggaaa

SEQ ID NO: 204916 - DNA, 201 bp, Homo sapiens
gtgcctgcctttcaaaggcccatgtgatatcctcaaaagccctgccatgggtctcagggactttgaagaaggtaaaggtcaagaaggtgatgaggaagctrgcgaagataataaaaatacaggctcctaaataataagcagcagaggggaagagcagtccgactaagaagttggaggtatagttggagcagccggccattg

SEQ ID NO: 204917 - DNA, 201 bp, Homo sapiens
aaattatgtaattaaaccagagggtaaaataaataaaactcaagttaatttgccttgtagagctatatggaagtgaggaaggtgctcttacataaaccccstctgccttccacactcatatgtatatcttcttcctgataagtctgaggttgggggaactgcgccttacttttcctctcctatatcccctagtgcggcaat

SEQ ID NO: 204918 - DNA, 201 bp, Homo sapiens
cgtggtggtgcgcacctgtagtctcagctactcaggaggctgaggcaggagaatcgcttgaacttgggaggcagaggttgcagtgagccgacatagtgccrctgcactccagcctgacgacagagtgagactccatctcaaataaataaataaataaataaatttatatatatatttaaagccattatattatagcttata

SEQ ID NO: 204919 - DNA, 201 bp, Homo sapiens
ccagcctggggcaaaaaaatgagaccccctccaccgctacaaaaagtaaaaaaaaaaatagctgggcgtggtggcacgcgactgtggtcctagctacacakgaggctgaggcagaaggatcacgggctcaggctgcagtgcgccatgttcgtgcctctgcactccagcctgggtgacaaacagaccctgtcttaaaaaaaa

SEQ ID NO: 204920 - DNA, 201 bp, Homo sapiens
aaggacagaaattgtcaagaggtaatgtgcagacttcaggcaccacataatataccctccaataatgaactacatttctccctaaattcttcatattgcaygctaacctccccagcatgaaatcttctactgtataacctctctttaaacacctccctccaatctcaatttccttctgtttttattatttggcaaaattac

SEQ ID NO: 204921 - DNA, 201 bp, Homo sapiens
tttttttttaaagatatggtgtcttgccatcttgcccaagctggtcttgaacttctggggtcaagtgatccttccacctcagcctcccaaagtgttgggaktataggcgtgagctgccatgcctggctgacaatttctacatttttaatcgcatgagtaatgtgatttagaattcctggatcatgttaaggacagtaatta

SEQ ID NO: 204922 - DNA, 201 bp, Homo sapiens
gggacgtgagcaacatctcagagggagggatatttgcctggtcactcaaagtgttattgataaattcctttatgatcatctcaggagcactgatgactccmgtgttgtagccaacttggaaagagccaattgtagcaactgtaatggcaacgatcagagctggggtgaccttctgtgtccgcatggtcctaatctaattct

SEQ ID NO: 204923 - DNA, 201 bp, Homo sapiens
attcaaatatgccagatcaatatatttaatattaattttctttcactgctgtgacaagctcagtgacttaaacaacacaaatttattatcttagggttctktagttctgtatcttgccgttcagaagccaaaaatgggtctgactggctaaaatcagcattgggagagctgcattccagagaccctagggaatattccctt

SEQ ID NO: 204924 - DNA, 201 bp, Homo sapiens
ttgcatcacaaatttcattgtatttttctttttgctaattttttaaaaactagaactacccccatcccccccctttttttttttgagacagagtcttgctstatcgcccaggctggagtgcagtggagcgatcatggctcactgcaacctctgcttcccgggttcaagcgattcttctgcctcagcctcccaagtagctgg

SEQ ID NO: 204925 - DNA, 201 bp, Homo sapiens
acaggagaacttttagttgtgtattatttcaacagaggaagatttttacttctgcaacatccaccaaatcatcttaggttcaaccaaacattcagacttartaagtctacaataggctgtatttggcaccagtctactcagaaggctataggacaggaaccacacagctcaccagcaggacaattttgaacctcctttcag

SEQ ID NO: 204926 - DNA, 201 bp, Homo sapiens
aatgcatgttaaaatgaaagatattcacaaaatattctttctcctatgtattttgatcctcatatttctaccttcactctttcagtcacatttttaattamctcatcctgtcttatagcttttttttttctttttctttttttttttttgagagacaggttcttgctgtcacccagccaggctgggatgcagtggtgcgaa

SEQ ID NO: 204927 - DNA, 201 bp, Homo sapiens
cttagtaagtctacaataggctgtatttggcaccagtctactcagaaggctataggacaggaaccacacagctcaccagcaggacaattttgaacctcctytcagaagacggtcttctaacagcaatctatgaaatggtatctccccaggtgacagctcacggtcctccttaaaggacatacagttacaagagttttccac

SEQ ID NO: 204928 - DNA, 201 bp, Homo sapiens
ctaaggattgatcacattgggatgggagatcaagcaaagaaatatttgtagaggaggggaaatggatctataggggatatacagggggatggattttcaarttggattgattctaagttgaaatcttgaagagaaggtgtggtgacagtggttaggatgttgtgggttcctgacataaagtagttaaatgatatatcttgg

SEQ ID NO: 204929 - DNA, 201 bp, Homo sapiens
gtaccaccacactcggctaacttttgtatttttggtagagatggggttttgccatgttggctaggctggtctcaaactcctggcctcaagtgatctgcccrccttggcctcccaaattgctgggattacaggcgtgagccaccgcacctggccagtttactttaaatgtggtgtagtctcatggtaaactgaatttgtcat

SEQ ID NO: 204930 - DNA, 201 bp, Homo sapiens
gtttcttttgctgtatagaagctctttagttaggtcccatttacctatttttgtttttgttagaattacttttggagactttgccatgaaatctttgccasggcctatgtccagaatggtgtttcctaggttttcttctaggtttttatagttgtaggtcttatatttaagtctttaatccattttgagttgattttgtat

SEQ ID NO: 204931 - DNA, 201 bp, Homo sapiens
aatatagttaaaattgtatgaatgctgaatatatactataatagcaatgtctaaagcagttgtttattctgttatacttatttttgtgctagatactgtaraacaatttttaaagtctttattcagtaaagatcacctgaatgagaaataggctgctattgaacttagagctgcagttctggaatgtctatcatttgatgt

SEQ ID NO: 204932 - DNA, 201 bp, Homo sapiens
attctggatattagacctttgtcagatgcatagtttgcaaatgttttctttcattcagtaggttgtctgtttaagaaacctgtcgatagtttcttttgctrtatagaagctctttagttaggtcccatttacctatttttgtttttgttagaattacttttggagactttgccatgaaatctttgccagggcctatgtcca

SEQ ID NO: 204933 - DNA, 201 bp, Homo sapiens
ttacccagaagtcatgcaggagcaaattgtttaatttccatgtaattgtgtggttttgagagatcttgatattgatttctatttttattgagctgtgatcygagagagtgcttggtttgatttcagtttttttttttattttgttcagaattgctttatggccaagcatgtggcctatcttagagtgtgtgccgtgctcag

SEQ ID NO: 204934 - DNA, 201 bp, Homo sapiens
tggcacgatctcggctcactgcagcctccacctcccgggttcaagcgactctcatgcctcagcctcccgagtagctgggatcacaggcatgcgccaccacrcctcgctaattttttatattttcagtagagacgggatttctccatgttggtcaggctgtctcgaactccccacttcaggtgatctgcctgcctcagcctc

SEQ ID NO: 204935 - DNA, 201 bp, Homo sapiens
tcaggtagtgtgatgcctacagctttgttatttttgcttaggatcgccttggctatttgggctcttttttggttccatacaaattttagagtagtttttttgtaactctgtgaaagatgatattggtagtttgacaggaataacaaataagaatctgtaaattgctttgggcagtaagaccattttatcaatattgattct

SEQ ID NO: 204936 - DNA, 201 bp, Homo sapiens
aagtggaagaccctgatgaattctccaaaacaaagctggttttgtctcttgtagggttctgtgtagcctcacctagtgcatcgtaatttcttacttgaggragaccagcaccctgaaaacgaactggaaagctgccttcttcagtcaaatctgctaaatcatacctacaatgaatgatattcaataacttctgtcatggca

SEQ ID NO: 204937 - DNA, 201 bp, Homo sapiens
atgctaattgtatatatatttaggatagttgtcttcatgtttaattgaactctttatccttgtgtaatgttcttctttgtccttttttatcattgatgatwtaacatctgttttctctgaaataagaatagcagcccctgctcttttttgttttccatttgcttgatgtttctccattccttttctttgagcctgtgggca

SEQ ID NO: 204938 - DNA, 201 bp, Homo sapiens
aaatacaactactattatctctgattttgttcttggttgagaattgaggagagaaattttggaatataggagatgtcacttttggacttagatcaaatccwcagttgacctaaagcttggcttttaaggccaactgagtgttacaggagaacttttagttgtgtattatttcaacagaggaagatttttacttctgcaaca

SEQ ID NO: 204939 - DNA, 201 bp, Homo sapiens
ctccatgttgctcagggtggtcttaaactcttgagctcaagcaatcggtccacctcagcttcccaaagtgctgggattacagacatgagccaccatgcccrgcccatctgccttcacctgagttaatgacctgaagttttccttttccattgtgtctctgacaagttttggtatgagaatgatgctggcctcatggaatga

SEQ ID NO: 204940 - DNA, 201 bp, Homo sapiens
actgattttggaaaatggccatgattctataagaacctaaaagctctcaatttcttgatggccaagttatctcaactgagtttttaatcatgggctgtgtrctagctgtgggtgttgtaaaaatggcttctctcatactcactttcctcatgtataaaataagcatcattaaagacaaccccaccaatttcatggaattgt

SEQ ID NO: 204941 - DNA, 201 bp, Homo sapiens
gtagtgcaatcttggctcactgcaacctccgcctcccaggctcaagtgatcctcccacttccacctcctgagtggctggggctacagttgtataccactaygcctgggtaattttttgtatttttttgtagagtcggggtttctccatgttgctcagggtggtcttaaactcttgagctcaagcaatcggtccacctcagc

SEQ ID NO: 204942 - DNA, 201 bp, Homo sapiens
tgtggtttttgttttgtttttagttctgtttctgtgatgaatcccatttattgatctgcatgttgaaccaaccttgcatctcaagaataaagcctacttggttgtggtgtattatcttttcaatgtgctgctggattcagtttgcaaatacttttttgaggatttttatgtttatattcttttttctttttcttaagacag

SEQ ID NO: 204943 - DNA, 201 bp, Homo sapiens
atgtggtttttgttttgtttttagttctgtttctgtgatgaatcccatttattgatctgcatgttgaaccaaccttgcatctcaagaataaagcctacttggttgtggtgtattatcttttcaatgtgctgctggattcagtttgcaaatacttttttgaggatttttatgtttatattcttttttctttttcttaagaca

SEQ ID NO: 204944 - DNA, 201 bp, Homo sapiens
ccaaactgctttctacggtggctgaactaatttatattcccaccagcagtgtataagtattcccttttctccacaacctcaccagcatcttttttttttttaattatttttttttgaaattttaagaatagccattctaagtggtatgagatggtatctcattctggttttgatttgcatttctgtggtgatagtgatgtg

SEQ ID NO: 204945 - DNA, 201 bp, Homo sapiens
gtgaacagtgcagtgatgaacttaaggacgtgtgtgtcactttggtagaacaatttgtttttctttgggtatattctcagtagtgggattggtggatcaartagtggttctattttaagtttttttaaagaaatctccaaactgctttctacggtggctgaactaatttatattcccaccagcagtgtataagtattccct

SEQ ID NO: 204946 - DNA, 201 bp, Homo sapiens
atccatgttgcagcaatggatgtgatttgggtttttttaaaaatggctttatagtattccatggtgtgtatgtatcacattttctttatccagttcaccaytgatgggcatctcagttgattgcatgtgtttgctaatgtgaacagtgcagtgatgaacttaaggacgtgtgtgtcactttggtagaacaatttgtttttc

SEQ ID NO: 204947 - DNA, 201 bp, Homo sapiens
cctaaagcttggcttttaaggccaactgagtgttacaggagaacttttagttgtgtattatttcaacagaggaagatttttacttctgcaacatccaccamatcatcttaggttcaaccaaacattcagacttagtaagtctacaataggctgtatttggcaccagtctactcagaaggctataggacaggaaccacacag

SEQ ID NO: 204948 - DNA, 201 bp, Homo sapiens
aagtagggaagatagttatttttataagtttttcaaaaagaagtctttgtttttgtaaacatttggtctaacttcatatgtatttgataaattacttttgwgaatgcttatttttaaacaggagtttagtaatttcatgaattacctatatctatattcttagtagtataagcacttcacagatgttttctcattttcctt

SEQ ID NO: 204949 - DNA, 201 bp, Homo sapiens
catccattgggtcttaggtcttctccttccttcctcagtgtttttcaaatgactttcaaaataaaaccttattttggcaaaggcaaaaaaaaaaaaaaaaaaggaaaattaattaaaccctgatccccccaggcatccattgtgatgaattaacttccttcctatgcatctagaatgggactacagtatttctgtatcatt

SEQ ID NO: 204950 - DNA, 201 bp, Homo sapiens
tagttgtagatgtgcagctttatttctgagttctctaacctgttccatggcctatgtgtcagtttttgtaccagtataatgccgtttgggttactgtctcrtagtatagtttgaagtcaggtagtgtgatgcctacagctttgttatttttgcttaggatcgccttggctatttgggctcttttttggttccatacaaatt

SEQ ID NO: 204951 - DNA, 201 bp, Homo sapiens
tgccatgaaatctttgccagggcctatgtccagaatggtgtttcctaggttttcttctaggtttttatagttgtaggtcttatatttaagtctttaatccrttttgagttgattttgtatatggtgaaaggggtctagtttctatcttctgcatatggctaggcagttatcccagcaccatttattgaatagggattcttt

SEQ ID NO: 204952 - DNA, 201 bp, Homo sapiens
gttaattatttatagtaagctgttaggtgcaaagaattgcataggagtctgtatatttcttaacatggatgaacttcattgtctcaaaaaaaaaaaaaaaactaccacaaaaataccagcatatttatttctcttttgagattataggaaggaaaaatgatggaaacatacatagggatagtgctgaatttgctatttaaa

SEQ ID NO: 204953 - DNA, 201 bp, Homo sapiens
aagtaacccatgcatcatggcatggtattcaaacataggatttattttgagattacattatattcaaccattcattcattagcaaataattgtcaaaaacwattttgtgtcaggtgctgtatttgagactagggattcagcagttttgtatttttagaacatgaccctgtctataaaatttatgtattttatgatactgta

SEQ ID NO: 204954 - DNA, 201 bp, Homo sapiens
aggattacagatgtgagccaccgcacccagccaagaaacccttttaacctcaagtatactgtgattaattaaagtataccaagtgtatacacattggaatsttggcttaggactaagtagtacagtacccttatagaagacaaaattaaatgtacatgtttctgaataataattggaatttcccgaaattcagactgtttt

SEQ ID NO: 204955 - DNA, 201 bp, Homo sapiens
aagattgctagttatctattgatttcatttatctgtgattatctttccgttaaaaaagcagataattgagaagccctgcactgttctttttttttttttttaaatgtatttatgaagaaggacaaagcagagaacttggttttgttactggctgaatgatatattttggcaaatacttaaaataattcatctttttaaagc

SEQ ID NO: 204956 - DNA, 201 bp, Homo sapiens
atagagtttatttatgttgcatttatatcttatgcacataacctgaaggtaattttatacaagattttaaataactttgtgcatgaaacaaagtttgtgtrcactgaacaatcaaaaataaaagtgtcaggtgtggaattttctacttgtggcatcatgttggctctcacaaagttttggattttgaaacatttcaaattc

SEQ ID NO: 204957 - DNA, 201 bp, Homo sapiens
tataaaggagagggtgattggggaaagaagcagagatttgattttgaatagatggtcttattcaacttctgatagaagaatttgagaacatgatctaaagrttgctagttatctattgatttcatttatctgtgattatctttccgttaaaaaagcagataattgagaagccctgcactgttctttttttttttttttaaa

SEQ ID NO: 204958 - DNA, 201 bp, Homo sapiens
gagtcaaatgatcactggtttctttcacacttcaagaagcttttgttttttgagacagagtctcgctctgtcacccaggctgaagtgcagtggcatgatcrcagctcattgcagcctcgacctcctggactcaggcaatcctcctgcctcggcctccctagtagctgggactacaggcatgtgtcaccatgcccagctaat

SEQ ID NO: 204959 - DNA, 201 bp, Homo sapiens
cttggtgcttggcaaccccatgcagggttcccagcttcctcctttttcagattcagggtctgtgtcctccccatatccactctcaatgtcttctttctgartatctgttcagcatgtgccagtctactcgatgatggtctctctcagtgggagaatgtcatgtcttcctggctgtgcctagtcagccatcttggctcctct

SEQ ID NO: 204960 - DNA, 201 bp, Homo sapiens
atagcaatgtctaaagcagttgtttattctgttatacttatttttgtgctagatactgtaaaacaatttttaaagtctttattcagtaaagatcacctgaatgagaaataggctgctattgaacttagagctgcagttctggaatgtctatcatttgatgtaattctgcttcctttgtgagagcagtctctgacatggtaa

SEQ ID NO: 204961 - DNA, 201 bp, Homo sapiens
actattgaagaatattatacagttttaccttgtattgaatggaatattaagaatattattgttcttacacttttttaaattttcagtggtatgcaatctgycttagtgatgttggagattatgaaggcatcaaggctaaaattgcaaatgcatatatcatcaaggagcattttgaggtactgatgaattattcaaattcat

SEQ ID NO: 204962 - DNA, 201 bp, Homo sapiens
agctcgcagtgacctccccaaaggatggctccgtctccattttgggttctgataatgccactacttgtcacattggggtcctgttgcacacaggttatggsgccacctgcttgacacattgtgatggaaccgacaccaaagctggggtccccttgatcatgaactccataaagtctttttccgactgcgctcaatgtggaa

SEQ ID NO: 204963 - DNA, 201 bp, Homo sapiens
tacttcatacaatttgcaatatccatgcatttgcaaataagttgtagcaaataagttgtagctcttcctttccagcaggagtgtgatttttagatgagcgrcgactccaggggatatctttttctcaataagatacgctttgagatagttttactaaagattttgatgaagtaatttttaagcttccagtattatgatcga

SEQ ID NO: 204964 - DNA, 201 bp, Homo sapiens
ttgtatatatattgttagaacatactaaatttgattatgaccatgttaaacattgttattcaggtcatttagaaacatgtacagactgaaaagactattcytatttaccatgctaaatgaaattagattaatgtaactatagtaaaacagtagaatgccccaagagggtctttgtatcttcaaagtgtgtcagatacagtc

SEQ ID NO: 204965 - DNA, 201 bp, Homo sapiens
tgtaatttttgcttggggtagcagtaccttcaaattttcaaagtttgtaactcttaacataattgtttccataggtaatgggaaacccaggaactttcaamagaggccttttactctcagctttgtcgtatttgggttttgaaacttaccaggttatctctcaggctgctgtggttcatgccacagccaaaggtaagcata

SEQ ID NO: 204966 - DNA, 201 bp, Homo sapiens
atttaagatttcactatacagttttaggtgaattaacatgtcatttcatcttagaatatttgcttattaagttgaaaataatttacattaaaagtttagtstgttttatagaatatggtctctatgttagtaatgtaacttagttgtaaatattttcaagatagtataaaatgttaggttagaaaacaactgatttgcgga

SEQ ID NO: 204967 - DNA, 201 bp, Homo sapiens
taatagcaatgtctaaagcagttgtttattctgttatacttatttttgtgctagatactgtaaaacaatttttaaagtctttattcagtaaagatcacctgaatgagaaataggctgctattgaacttagagctgcagttctggaatgtctatcatttgatgtaattctgcttcctttgtgagagcagtctctgacatggt

SEQ ID NO: 204968 - DNA, 201 bp, Homo sapiens
atcttgccagaggagtattcttgtcttgacactgctcacatggctagagtacagtcagctagaaaagtaaaaaatcaaagtttactaacatatatgtaggrggtcacatcattggcatttctttaaaaaattctaattattatgatcttgcacatatctattttaggttacatttaagatttcactatacagttttaggtg

SEQ ID NO: 204969 - DNA, 201 bp, Homo sapiens
ataatagcaatgtctaaagcagttgtttattctgttatacttatttttgtgctagatactgtaaaacaatttttaaagtctttattcagtaaagatcacctgaatgagaaataggctgctattgaacttagagctgcagttctggaatgtctatcatttgatgtaattctgcttcctttgtgagagcagtctctgacatgg

SEQ ID NO: 204970 - DNA, 201 bp, Homo sapiens
cagcatgcaccactacatgcagcaaattaaaaaacaaaaacaaaaacaaaaaacaaacaacaacaagaaaaacatgtttttgtagagacagagtctcactrtgttgcccaggctggtctcaaacatcctgggctcaagctgttctcccgatttggcctcccaaaatattgggattacaggtgtgagccactacgcccagcc

SEQ ID NO: 204971 - DNA, 201 bp, Homo sapiens
tgggctcaaatgatcctcccagctcatcctcctgagtagctgggactacagcatgcaccactacatgcagcaaattaaaaaacaaaaacaaaaacaaaaaacaaacaacaacaagaaaaacatgtttttgtagagacagagtctcactgtgttgcccaggctggtctcaaacatcctgggctcaagctgttctcccgattt

SEQ ID NO: 204972 - DNA, 201 bp, Homo sapiens
ttgggctcaaatgatcctcccagctcatcctcctgagtagctgggactacagcatgcaccactacatgcagcaaattaaaaaacaaaaacaaaaacaaaaaacaaacaacaacaagaaaaacatgtttttgtagagacagagtctcactgtgttgcccaggctggtctcaaacatcctgggctcaagctgttctcccgatt

SEQ ID NO: 204973 - DNA, 201 bp, Homo sapiens
tataatagcaatgtctaaagcagttgtttattctgttatacttatttttgtgctagatactgtaaaacaatttttaaagtctttattcagtaaagatcacctgaatgagaaataggctgctattgaacttagagctgcagttctggaatgtctatcatttgatgtaattctgcttcctttgtgagagcagtctctgacatg

SEQ ID NO: 204974 - DNA, 201 bp, Homo sapiens
ctataatagcaatgtctaaagcagttgtttattctgttatacttatttttgtgctagatactgtaaaacaatttttaaagtctttattcagtaaagatcacctgaatgagaaataggctgctattgaacttagagctgcagttctggaatgtctatcatttgatgtaattctgcttcctttgtgagagcagtctctgacat

SEQ ID NO: 204975 - DNA, 201 bp, Homo sapiens
atttacttcctgacttaaatataatatagcagtagatctttgagacaatgcttttttaatattgtcttctttaatcttttttattatgtttgggctctttktttttgacaggccttaggctactttcacagggcagaacaaggtaaggtatttttgattacacatattaatatagttaaaattgtatgaatgctgaatata

SEQ ID NO: 204976 - DNA, 201 bp, Homo sapiens
  misc_feature (1)...(201): n = A,T,C or G
taataatttaattcatattagcatattgtgttaaagtttactctcctttttctcattttcaatttctgctttagagtgactttattttttttccctagggrtgtaattttatgttgagttaccagcaatactaggtcatcaaatgggaagaaagggtctgggttannnnnnnnnnnnnnnnnnnntcatagattcacaaag

SEQ ID NO: 204977 - DNA, 201 bp, Homo sapiens
ttatctgacagagcttagagtgctaaatccattaactagcccttgtatatatattgttagaacatactaaatttgattatgaccatgttaaacattgttaytcaggtcatttagaaacatgtacagactgaaaagactattcttatttaccatgctaaatgaaattagattaatgtaactatagtaaaacagtagaatgcc

SEQ ID NO: 204978 - DNA, 201 bp, Homo sapiens
aaagagagactgtgtgtgtaggtggatttttcccaaaggatttgggaattgtaatgttacaatgaactgtatggatatgtttgtcatgtacattttcaaamaaaaaggaaaactgaaagtagtgatctttgtatacccatctcttagattcagtgattttgctatataggttgtgtatcccttatctgaaatacttgggac

SEQ ID NO: 204979 - DNA, 201 bp, Homo sapiens
aaaaaaaacactggtaagctgctttccctggaagacaaacaactaaactgatctaacagatagaattgtgttgcttaactgatctaacagacagaattgtrttgggcctgtgagctattccctgggccatttactggtggtgggggtgggggagtcaccaaaatgaagtagcaatataaacctgtctctgagcctccctct

SEQ ID NO: 204980 - DNA, 201 bp, Homo sapiens; identical to SEQ ID NO: 36039

SEQ ID NO: 204981 - DNA, 201 bp, Homo sapiens
tctacggctttttaaatgttgtgaccatttaaccgtgtaaatataaaatattctaggcttcttcacaaataatagggtaaaataaataatcgccataagastggtagaaataaatctccatggctcaggcaaagagattattttgcatcctggataccagcaatgcaaaatggtatgagatttctaaggattgatcacatt

SEQ ID NO: 204982 - DNA, 201 bp, Homo sapiens; identical to SEQ ID NO: 36041

SEQ ID NO: 204983 - DNA, 201 bp, Homo sapiens
acataacttccaaagggaataatgaagaactgtagaaaatacacaaatgtatactttccatttttttaaaaaacagtgaaggttatagattataaaaaacwatgttttatataagctttcaaatgtacatgtttatattttaaatggcaatatttagtatttacatataaaaaagatcatttatactgcttacatttcaaa

SEQ ID NO: 204984 - DNA, 201 bp, Homo sapiens
tacatacataggctatatctctccattatagatgtttccttccttccttttgaggatatgagtagaatactgattttggaaaatggccatgattctataaraacctaaaagctctcaatttcttgatggccaagttatctcaactgagtttttaatcatgggctgtgtactagctgtgggtgttgtaaaaatggcttctct

SEQ ID NO: 204985 - DNA, 201 bp, Homo sapiens
ggaagccgaggcggaaggattgcttgagtccaggggtttgaaaccagcctgggcaacacagtgagaccctgtctctacaaaaaaatttaaaagttagccaygtacatttttatatgtagtaattactatatatgataatcttgtctgtaagattcatttttattatgtgttggtgtctcatattttacttcatacaatttg

SEQ ID NO: 204986 - DNA, 201 bp, Homo sapiens
ggggtttcactgtgttagccaggatggtcttgatctcctgacctcgtgatctgcccgctttggcctcccaaagtgctgggattacaggcgtgagccaccgygcccgaacttctttaattttcttttcttttttttttaaagacggtgtctcactctgttgcctggactggagtgcagtggtgtgatcaccgctccctgcaa

SEQ ID NO: 204987 - DNA, 201 bp, Homo sapiens
gatcctcatatttctaccttcactctttcagtcacatttttaattacctcatcctgtcttatagcttttttttttctttttctttttttttttttgagagacaggttcttgctgtcacccagccaggctgggatgcagtggtgcgaatacgattcaccacagcttcaacctctcaggctttagcctgaggcgatcctccca

SEQ ID NO: 204988 - DNA, 201 bp, Homo sapiens
tgatcctcatatttctaccttcactctttcagtcacatttttaattacctcatcctgtcttatagcttttttttttctttttctttttttttttttgagagacaggttcttgctgtcacccagccaggctgggatgcagtggtgcgaatacgattcaccacagcttcaacctctcaggctttagcctgaggcgatcctccc

SEQ ID NO: 204989 - DNA, 201 bp, Homo sapiens
gcttcccaaagtgctgagattacaggtgtgagccaccgtgcctggcctcttaagttcatttaaattgataagaaaaaaaaaaacacccaatagaaaaatgrgtgaaggttttttttaattacagaagaaatggaaagggtatcaaatgaagaaacacagacattcttaagtaaaaactttactcttaatccaagaaatgca

SEQ ID NO: 204990 - DNA, 201 bp, Homo sapiens
ataacatgtatttttccattttagatacagacagaagctgctcagttgcttacaagtttcagtgagaagaattgagaacttttcagagaagatttatgaartagctaataaacattgccttttcttttaattctaaacttaatatatgaactataactgttctacggctttttaaatgttgtgaccatttaaccgtgtaaa

SEQ ID NO: 204991 - DNA, 201 bp, Homo sapiens
ataggaattaccaaagaaagcagaaccttcttggcctgacagagaccattggtggggccagcaagaatccaaatttggaacctacatccattgggtcttargtcttctccttccttcctcagtgtttttcaaatgactttcaaaataaaaccttattttggcaaaggcaaaaaaaaaaaaaaaaaaggaaaattaattaaa

SEQ ID NO: 204992 - DNA, 201 bp, Homo sapiens
caccacagatagcttgggaagtactcatctagaatctcatcattgagctcttcctctgtaccggtgctactcaaaatgcggtcctggcctgacactttgtmaactgtttgtctgcacaagataatgaggttacactaggatgtaaatcagttttacgctcactgcttacttaaatggacagttttaagtttcagttttaag

SEQ ID NO: 204993 - DNA, 201 bp, Homo sapiens
ttatttttcttataattcatttttatcctatttacacagtgtagacctcttttagaaataaaaattggcctttcaccacagatagcttgggaagtactcayctagaatctcatcattgagctcttcctctgtaccggtgctactcaaaatgcggtcctggcctgacactttgtcaactgtttgtctgcacaagataatgag

SEQ ID NO: 204994 - DNA, 201 bp, Homo sapiens
tttttatgttccacccagcttttcccattattccctctcagttggttaactagtatattatatgcctccattgttaatttctcataggactaagcttctgyaacttgctgtttgaccttaattttaagcatatgcttcgtcaggatactgcccagaacattgctactgaaagtcagttcatagactcattctggtcctata

SEQ ID NO: 204995 - DNA, 201 bp, Homo sapiens
taatctggttttatggattttccataatgtgctgttttagcagcaaatagaggggtaaactcatagataatagctaaatactgttagaaattaactttccrttatagctaaatgttaccagaatttttactccggttatgtatacagctttgattttataacatcctgctaatttttgttcttacagaaatacactttcgg

SEQ ID NO: 204996 - DNA, 201 bp, Homo sapiens
atcatcgcaaaactattgcatgttaaaacagtatgatgaactttttcagttaaataaaatgaaattaatttcacttttttttttttttttttacatttttwatgtggctactatatggcttacatatctgttggacagagctagtttagataatcacaagttgacttatctggttatttttcctatttgcttttattctga

SEQ ID NO: 204997 - DNA, 201 bp, Homo sapiens; identical to SEQ ID NO: 36045

SEQ ID NO: 204998 - DNA, 201 bp, Homo sapiens
ttgttttattttaaactttgttctcataccaaccctattaggaatttatgagaattacataactggacaaaggtttaaatctgacctaccttagggccacytgatatgatttttcagtcaataatagctaacatttattgggcatttattttaagcaaagggtaatttacacacattgtctcctttaaataaccacctttt

SEQ ID NO: 204999 - DNA, 201 bp, Homo sapiens
ccacagatagcttgggaagtactcatctagaatctcatcattgagctcttcctctgtaccggtgctactcaaaatgcggtcctggcctgacactttgtcarctgtttgtctgcacaagataatgaggttacactaggatgtaaatcagttttacgctcactgcttacttaaatggacagttttaagtttcagttttaagct

SEQ ID NO: 205000 - DNA, 201 bp, Homo sapiens
aaaccaataaatcagagtgtcagttcacattaggatgagtttgctttcctttggctaaatcactaatagagggataaatagggactttgaaattaggacartgctttcttcagtataatttattaatatttggattttacatctatgtaaataaccttttaaaatgttttgtttaatagatgagaacacagacattgctga

SEQ ID NO: 205001 - DNA, 201 bp, Homo sapiens
acctaatttcaagaaaggtttcattaatcatcgcaaaactattgcatgttaaaacagtatgatgaactttttcagttaaataaaatgaaattaatttcacttttttttttttttttttacatttttaatgtggctactatatggcttacatatctgttggacagagctagtttagataatcacaagttgacttatctggtt

SEQ ID NO: 205002 - DNA, 201 bp, Homo sapiens
cctaatttcaagaaaggtttcattaatcatcgcaaaactattgcatgttaaaacagtatgatgaactttttcagttaaataaaatgaaattaatttcacttttttttttttttttttacatttttaatgtggctactatatggcttacatatctgttggacagagctagtttagataatcacaagttgacttatctggtta

SEQ ID NO: 205003 - DNA, 201 bp, Homo sapiens
cccactccaccttcttagtaatagacttttcaccagagaagttgcagtgagtcttaatatggtagatttaaaatatatgtgtaattgtttacatatatatmtctctctacatgaaaaattgacttttctgtaggtcagaaatggtcaaatatgatctactttattcagttttatttacattattctatctgaaacatatta

SEQ ID NO: 205004 - DNA, 201 bp, Homo sapiens; identical to SEQ ID NO: 36048

SEQ ID NO: 205005 - DNA, 201 bp, Homo sapiens; identical to SEQ ID NO: 36051

SEQ ID NO: 205006 - DNA, 201 bp, Homo sapiens
aataaaatacacacctaatttcaagaaaggtttcattaatcatcgcaaaactattgcatgttaaaacagtatgatgaactttttcagttaaataaaatgaaattaatttcacttttttttttttttttttacatttttaatgtggctactatatggcttacatatctgttggacagagctagtttagataatcacaagttg

SEQ ID NO: 205007 - DNA, 201 bp, Homo sapiens
ggccctgcaaattaataatctacatgaagtatattattagagggaaactaatcttactgctaagcagtgtgttgtactacatagtgaatgttcgtgttttkgaatttaaaaattatttaaggtaatggtgttacgaatggtttaaaaatgtctggtgacttgcttatttttaagtgatcaccattaagtcagaaaaatgta

SEQ ID NO: 205008 - DNA, 201 bp, Homo sapiens
ataaaatacacacctaatttcaagaaaggtttcattaatcatcgcaaaactattgcatgttaaaacagtatgatgaactttttcagttaaataaaatgaaattaatttcacttttttttttttttttttacatttttaatgtggctactatatggcttacatatctgttggacagagctagtttagataatcacaagttga

SEQ ID NO: 205009 - DNA, 201 bp, Homo sapiens
caatgctttcttcagtataatttattaatatttggattttacatctatgtaaataaccttttaaaatgttttgtttaatagatgagaacacagacattgcygaaaacctctatcagaaagttagaattctttgctgggttatgaccggccctcaaaacctagagaaaaaggccaaacacgtcaaagctacttgggcccagc

SEQ ID NO: 205010 - DNA, 201 bp, Homo sapiens
ttattagagggaaactaatcttactgctaagcagtgtgttgtactacatagtgaatgttcgtgttttggaatttaaaaattatttaaggtaatggtgttaygaatggtttaaaaatgtctggtgacttgcttatttttaagtgatcaccattaagtcagaaaaatgtatttttaaatgtttcttgaagtgccttttgaaca

SEQ ID NO: 205011 - DNA, 201 bp, Homo sapiens
taaaatacacacctaatttcaagaaaggtttcattaatcatcgcaaaactattgcatgttaaaacagtatgatgaactttttcagttaaataaaatgaaattaatttcacttttttttttttttttttacatttttaatgtggctactatatggcttacatatctgttggacagagctagtttagataatcacaagttgac

SEQ ID NO: 205012 - DNA, 201 bp, Homo sapiens
aaaatacacacctaatttcaagaaaggtttcattaatcatcgcaaaactattgcatgttaaaacagtatgatgaactttttcagttaaataaaatgaaattaatttcacttttttttttttttttttacatttttaatgtggctactatatggcttacatatctgttggacagagctagtttagataatcacaagttgact

SEQ ID NO: 205013 - DNA, 201 bp, Homo sapiens
caacacattctgagtgtgctgatactctgggggagaagagtaagagagtatgacaggcatcagacagcatcacaaaacattttaaagttaaaaacaattaygtaacaccaagaagtcagttttccttacattcactccaggatagatgccttgcttaaaaagtgcctcttcagctaagaaaaactgtgtccataagtactt

SEQ ID NO: 205014 - DNA, 201 bp, Homo sapiens
gtggctagtccaaattgagatatgctgtaaataaaatacacacctaatttcaagaaaggtttcattaatcatcgcaaaactattgcatgttaaaacagtakgatgaactttttcagttaaataaaatgaaattaatttcacttttttttttttttttttacatttttaatgtggctactatatggcttacatatctgttgg

SEQ ID NO: 205015 - DNA, 201 bp, Homo sapiens
atgttatattttgaaagagtagatacttaatttataaataacagtctgaaggttgatgctattttgggataattgttttgctaatggataattctaacaaygcagaatacctagtcaagactgtcatcaaaaacattcacaaatgtttcattctatttttagtgactctgtttaaagagtttctgaaaggaaagaaatttt

SEQ ID NO: 205016 - DNA, 201 bp, Homo sapiens; identical to SEQ ID NO: 36043

SEQ ID NO: 205017 - DNA, 201 bp, Homo sapiens
caacaacaaggactcttccttagtctttttaaatagagtggcagtataacaaaatagatgagaacagggacatcagcaatcagcagtagtcacttagcaartagctattgatgctgttatatgccaggcactgagaatgtagaagtaaatcacagccaatttccagttctcgtgaaccttacattctggatgaggagatat

SEQ ID NO: 205018 - DNA, 201 bp, Homo sapiens; identical to SEQ ID NO: 36050

SEQ ID NO: 205019 - DNA, 201 bp, Homo sapiens
accatttaattaaaggttatctacctagaacgttttggtactggaattacaactattatcctcctgtagaggtaagtttagaaattttattactatgtcartacttggactgactgaattttgttgataaaaacatgttaatatgtgtatgtttctttagtaccaacaacaaggactcttccttagtctttttaaatagag

SEQ ID NO: 205020 - DNA, 201 bp, Homo sapiens
ctatttaaggcagcatttagcatgcctatgaagcaccaggagaacttattaaaatgctgattctgagtcagtaggtctgggcctaagattatgcatttctwacaggctcccaggtgatgctgctgcttttaatcagtaaactacagtttgagacgaatttagattataatgtcaactcttactagctccagtgatgtccta

SEQ ID NO: 205021 - DNA, 201 bp, Homo sapiens
aaaatactttccacagtttcacttggtttcaccaatttcaattggttttaaatcattaggatgtctaagtaaactattgatttcttccacaggtctagtayattaggttcctctgctttaccttgccatctttaatgtttgtattcttttaaaattagctggtcctttataagtatgtaaatattgtagctagcaatgtgc

SEQ ID NO: 205022 - DNA, 201 bp, Homo sapiens
tctgcaggtgtctttcttatcctagtttgagaaccaatacccaacaacctacgtgattttggtgcaagtagtgtttgaaacacactgaagattactgcccwattactaagacatttttcaaaaagcatgttttaaatcagtgtagtccaggatcacactatattaaatataaagataacttaaaggatcattggatcattc

SEQ ID NO: 205023 - DNA, 201 bp, Homo sapiens
tgttacttgttttggtcatagcttttgcttaagtcttgttttcctagagaaacttgaggtgtatgtaagtttcgatttatatttttataattagttaatakaactaatcttttttttcctcaagaggcacaaagaacaaggaagttaaaaaccaaggatgcgttctaaagacttcattttctcctagcctcctacctctaa

SEQ ID NO: 205024 - DNA, 201 bp, Homo sapiens
cctgtagtttaaagagcactgctctagaccatcttggaattcccatgtctaccattgttctcttctgtttttgattggtggatttacattttggaatgagktatgtgactatcagaaagtaatctcaactcctgtgctttgaccttttaccacctcagggtacttgtagaaattcttaatagtggattattgtgaacttca

SEQ ID NO: 205025 - DNA, 201 bp, Homo sapiens
tatgatttttcagtcaataatagctaacatttattgggcatttattttaagcaaagggtaatttacacacattgtctcctttaaataaccaccttttacaratgtggaaattaaagcttatagagattaaataacttactcaaggtcgtatactagcccacaaaatttgggttcaaacccaagtctaggttgagagctttg

SEQ ID NO: 205026 - DNA, 201 bp, Homo sapiens
taatgtgttgctttctgttctggtataagctccttatttctttgcaaacctgtagtttaaagagcactgctctagaccatcttggaattcccatgtctacsattgttctcttctgtttttgattggtggatttacattttggaatgaggtatgtgactatcagaaagtaatctcaactcctgtgctttgaccttttaccac

SEQ ID NO: 205027 - DNA, 201 bp, Homo sapiens
gtattgttgttgttttattttaaactttgttctcataccaaccctattaggaatttatgagaattacataactggacaaaggtttaaatctgacctacctkagggccacctgatatgatttttcagtcaataatagctaacatttattgggcatttattttaagcaaagggtaatttacacacattgtctcctttaaataa

SEQ ID NO: 205028 - DNA, 201 bp, Homo sapiens
atatgctggcttccatgcagcctgggggaaggtctggatcccatgaagtcacttgatgtcatggagcagatacctagtctgttcccattttccatgagagrggacagggaggtaagttctgcaggtgtccacattccttcccggctccatgaccacgcctgcgggctccagtggtgatgcatatggactctgaggtcaaat

SEQ ID NO: 205029 - DNA, 201 bp, Homo sapiens
tattgttatgatcatcatgattattagacacgttgcccaagttttgagaagtttgctccattgtaaaatggagctactgctgcctattttaggggggttgwgaggattaggtggatagcgtatataaaataggtaggatacaccaaacatggttattattgtagctgttgttttatttctcagtttgaaattttggggttc

SEQ ID NO: 205030 - DNA, 201 bp, Homo sapiens
tgaacatacataacttaaatttttgctaggaaccacaagtgtgtaagaattgaaatgtcacagcttggtaggaaactagcaaggggtggacatgcctttcyctctgcatttctagcgaagaatatagaaacttctttccaaggaactccagttactgcgcacctgctatgcaccaggcactgcatgtaccatacccacaac

SEQ ID NO: 205031 - DNA, 201 bp, Homo sapiens
tagaccattgttaaatgctcccatttggcagattagaaaaccaaggctcagtgagcctgaggaacttgctaaaaatcaaacggcaagaaagtggcaaggakcagagagaaactactgtaaacacctctctgaaaacagctttccttgtagccgtgtcttggctttcctacttaaattgcatttacttttaagattcaatct

SEQ ID NO: 205032 - DNA, 201 bp, Homo sapiens
tcccaggagaccaaacagtgcttgcacagtcttagagttatgaaagaacacagaacatttagaaaacttcaagtaattccaaagattgagtaggcagtgcygggtcacaaacaaccttgcatgccttgccaaggggtaaggacattgtccttcagatgatggagagccgctgaaggtactgagtcaaagggtgacatggtc

SEQ ID NO: 205033 - DNA, 201 bp, Homo sapiens
ccatctgcatccatattgcagcaaaggacatgattttgttcttttgatggctgcacagtgttccatggtgtgtatgtaccgcatcttccttatccagttcrccattaacgggcacctatatcgatcccatgtctttactattgttaatagtgcttcagtgaacatacaagtgcatgtgctttgactgcatttgaatcaggg

SEQ ID NO: 205034 - DNA, 201 bp, Homo sapiens
cagaggaggcactgaagctgcacaatgggcccctccgcaatgcctacatggagcagagcttccagagcctaaaccccgtcctcagcctgcccatcaacccygcccaggtggaacaggcacggaggaacgcagcctccacgggcacagcgctggagggatggctggactcgttggtgggcgggatgtggactgccatggaca

SEQ ID NO: 205035 - DNA, 201 bp, Homo sapiens
gctctgtccttacgggctcagttttctcagctgtgaaatgggactgctaaaagaacttcctcatgagattgtcatgtgaattaaatgaggcgatgcatggyacccagtgcagcaccaggcacagggtaagtatgaataggcatcctattggtggctcttctgatcctgaaattgttccctttggctttcagaggaggcact

SEQ ID NO: 205036 - DNA, 201 bp, Homo sapiens
caatatctgtgaattgacattatgtatgggaagaggcatggaaagtagtcatttcactttctttgttgtactttcctacagtcagcatgtttttcattcayaatcagcagaagaaaaaagtattcatagtcattgagatcatagatacagaggacgcaaggaaaacagtaggcattgtgcacaatggggactgctttagga

SEQ ID NO: 205037 - DNA, 201 bp, Homo sapiens
ggccttttgatccttcagactgagtccagatgccagatcttctgcttacaagctgtgcaaccttgagcaggtgacttagttggagcctcagtttcttcatstgtaaaatgggtatatgaaagctaacaaaggggatcctagacctttctgagacctagccccctagttcaggcccagtgacttcagaattcactcccctgt

SEQ ID NO: 205038 - DNA, 201 bp, Homo sapiens
ctgcatctcccctccaccactcataagacctggcacaagctgtgaaggctcttccagtcctagtttattcatccgcaaatgagtacctcctggatgtgtaytgtaaaattaaggaggacgagcacttaacacttggtgagcaacaaagggaaatctttctgcaattgttattatgaagcattttctcatgagtaccctgac

SEQ ID NO: 205039 - DNA, 201 bp, Homo sapiens
ttagcaccttctatgtgtcaggtcctggaggaacagatgggaattggactcaatgcctgctcatcccaggactacagccatggtcctgaaaagcactgtcygaggtgctgccccatagtccagatgctggttctgttggcagacagatgatcaccagctgcagcagctgctccaggcatgggagaggatggttctgccctg

SEQ ID NO: 205040 - DNA, 201 bp, Homo sapiens
aaaccaaaatagaatctctttaaagcataaatctcacaggtcctgcaaaacaacacaatgaaacaaaccaaggtattcaggcaacaaatagtatgatgaayagaatagtacctcacatctcaatactaatgttgaatgtaaatggcctaaaagcttcacttaaaagatacagaacggataagaattcaccaaccaagtgtc

SEQ ID NO: 205041 - DNA, 201 bp, Homo sapiens
cagctttctccctcccaggttcattcggaagcagggcctggatcggctcttcctggagtgcgacgctcacatgtggcgcctgggagatcggcggatcccasagggcattgccgtggatggcggttcggactggttcctgctgaaccggaggtttgtagaatatgtgaccttctccacagacgatctggtgaccaagatgaa

SEQ ID NO: 205042 - DNA, 201 bp, Homo sapiens
ccaggcacaggaggcccggtggtttaataaaaggaccacaggccttttgatccttcagactgagtccagatgccagatcttctgcttacaagctgtgcaamcttgagcaggtgacttagttggagcctcagtttcttcatctgtaaaatgggtatatgaaagctaacaaaggggatcctagacctttctgagacctagccc

SEQ ID NO: 205043 - DNA, 201 bp, Homo sapiens
atatctttatttttagatctctatagagatatattgagcacctactctatgttcagcactgtttcagacactagagacatattggtgagcatgccatatayagtccctgccctcttggagttgacggtctagatctggagagagagagacctgtaaattaaaagatgcagtactgtgggggtcaggagaaaagctatgatg

SEQ ID NO: 205044 - DNA, 201 bp, Homo sapiens
tgaatgaattcatgaatggaaggcaatatgtagcacagtggatgagaatgcagcctctggggttggacttcatgggttcccatgctggctctgcctcctcygaccatagcgagttatctcacttctctgagactcagtttccacatctgtaaagtaaagataatgacaagggtctcccctttatggatttgggagtatcaa

SEQ ID NO: 205045 - DNA, 201 bp, Homo sapiens
agaaaatgtggcacatatacaccatggaatactatgcagccataaaaaaggatgagttcatgtcctttgtagggacatggatgaaggtggaaaccatcatycttggcaaactatcgcaaggacaaaaaaccgaacaccacatgttctcactcataggtgggaactgaacaatgagaacacttggacacagggtggggaaca

SEQ ID NO: 205046 - DNA, 201 bp, Homo sapiens
ggttgtgtacccagcacgtggatgaaagtggaaaatggatactttcaaactctgaggccctgctagatcttgaatcctcgaaaggtatgatggttttattygtatgttctatttaccgaggcaaggaattatacctggcctactttagattggctgcaggaagagatgaagccaatagcactttgccctgtttcttggctt

SEQ ID NO: 205047 - DNA, 201 bp, Homo sapiens
tttttttgagctacactccagagctattgactcagtaggtcctttttctctgagacagagtcttgttctgtcacccaggctggagtgcagcggcagtctcrgctcactgcaacctccacctcctaggttcaagtgattctcctgtctcagcctcctgagcagctgggactacaggtgtgtgcctggcctggaatctgaatt

SEQ ID NO: 205048 - DNA, 201 bp, Homo sapiens
ttaaccaaagcatgcgtttgcagcatatcagtttttgaatgtgataaatacagcaacccatctcccaatcccatgaatatttcattttggagatgactgcrtaaatattgtatttgaatattatggtccgggacatcacattaaaattgcaagacgatgctattatcccatataatggaacatgaaattaaaaactggaaa

SEQ ID NO: 205049 - DNA, 201 bp, Homo sapiens
ctgtgactccagaaacttttctgagacctagggaattggttgtctccatttactcttagttaaccaaagcatgcgtttgcagcatatcagtttttgaatgygataaatacagcaacccatctcccaatcccatgaatatttcattttggagatgactgcataaatattgtatttgaatattatggtccgggacatcacatt

SEQ ID NO: 205050 - DNA, 201 bp, Homo sapiens
ccccgtcagcaagcaagcaatcagttctgcagcagacaccagctgggtgtcccccaattcagttccaacactctccaccccagaggtagcatcagacaccrcagagtgagggctcagtgccataagaccacccccttctgcccgctaatcacaagtctgggcctttggaacttctgaccaaatggtttcaaactggggttc

SEQ ID NO: 205051 - DNA, 201 bp, Homo sapiens
aaaaatagatgagtcgctgcgtttttccatggcagtatttattgagcctgcgagtcccttcaagagaggagaaacgagggcagagatgaaaatgtcaagckacaggaaggctcgtaggagaacttgcacacagcagcctctgggtcaagagggcagggagtacagatagagcaggctttctggacacacgaagcacagagt

SEQ ID NO: 205052 - DNA, 201 bp, Homo sapiens
gcataggaaataaggccgaagggaaatccatcaatatgagtgttcacacaccattttcactgcccggtaccaagcaccagaggactcaatatctgtgaatkgacattatgtatgggaagaggcatggaaagtagtcatttcactttctttgttgtactttcctacagtcagcatgtttttcattcacaatcagcagaagaa

SEQ ID NO: 205053 - DNA, 201 bp, Homo sapiens
tttattaagcaccagttgtatggtaggcactgatgtaagcagtagggatacagcagtgaacaaaaataggcaaaaatctctgccatcttgcagcttacatytagtgagtggaaatagacaacagactaaataaatatcttgtatattgtgttagaaagtgaaaagtcctgtggagaaatacaaagcatgaaaggaggattg

SEQ ID NO: 205054 - DNA, 201 bp, Homo sapiens
ggaaaacccatcagattaacagcagatttctcacagcagaaacactacaagccagaagggtcctgtctttagcctccttaaacaaaacagttaccagccaygcatcgtgtatccagtgaaactaagcttcataaatgaaagatacagttttttcagaaaaatgctaagataattcaccactaccaagccagcactacaaga

SEQ ID NO: 205055 - DNA, 201 bp, Homo sapiens
ttcaagatagattgatagacaggtgatacatagattgattaacagacagacagatgggtggatacgttaataggcaaacagatggatagatgattaatggwtacaatagagttgacagattaatgtgacagattggtagagatagatgataaacacacataagtagatgatcaatctgtatagatcattgatcgatcaata

SEQ ID NO: 205056 - DNA, 201 bp, Homo sapiens
ttcaattaagactcccagtggatttgctggatgtgagcagccaagggagcccattccataaattactggcatcagggggcaattagatactgccccagttsgattctgtgctaggggcctgagcagccaattgacaacattaatgtcccattaaagagatgaatgcctggtgtctgggctctccctgtttatcagcctgct

SEQ ID NO: 205057 - DNA, 201 bp, Homo sapiens
aagctgagagtgtttagagactctaggtgctcctgctctgctgttgacatgacatcctggtccacgtaggctccagctggagctggttgtgtacccagcaygtggatgaaagtggaaaatggatactttcaaactctgaggccctgctagatcttgaatcctcgaaaggtatgatggttttattcgtatgttctatttacc

SEQ ID NO: 205058 - DNA, 201 bp, Homo sapiens
agctttgtttttgatcattctgatctaaatccaaatgatacaccttcagagaaaccttccccggcacccacttaagctgctgcaatagctacattctccayccaacccttccctattttaatactttttcttagcatttactatctaaaattatcttgttgctttatctggtcactcattgattgttcacaagagagctgg

SEQ ID NO: 205059 - DNA, 201 bp, Homo sapiens
ccaattcacttgtggacatgaagaatattcctgaacttggcatacgcaagctgagagtgtttagagactctaggtgctcctgctctgctgttgacatgacrtcctggtccacgtaggctccagctggagctggttgtgtacccagcacgtggatgaaagtggaaaatggatactttcaaactctgaggccctgctagatct

SEQ ID NO: 205060 - DNA, 201 bp, Homo sapiens
catgaggctgaggcatgagactcacttgaactcgggaggcagaggctgcaatgagccgagatcgtaccaccgcgctccagcctgggtgacagactgagackctgtctaaaaaaaaaaaaaaaaaaaaaaagggtgggaaaagcaaagatagacgtgagactgtttcaagaaaaacagaatagatccaattcacttgtggac

SEQ ID NO: 205061 - DNA, 201 bp, Homo sapiens
actgggagaatgtctacgatgagcctgacggcatccacagcctgagcgacgtgacactcaccttgtaccactcctttgcccgcctgggtcttcgacgggcygagacgtccctgcacacggatggggagaacagctgccggtgagccctatatgggatgcagagaggagagctgagaagcaggaggggaggctcagggtaca

SEQ ID NO: 205062 - DNA, 201 bp, Homo sapiens
acagaggacgcaaggaaaacagtaggcattgtgcacaatggggactgctttaggaacaaaactagcttggtgggtggggagcctcactgtgatcctacacmccttgggccctaatgcatgagcgcctgtgttttcagatactacccaatgggccacccagcatctgtgcacctctacttccttgctgaccgcttccagggc

SEQ ID NO: 205063 - DNA, 201 bp, Homo sapiens
gggctatttaggatctccttggtgttagcactatcccagggccttgtatagtgcctggctcacagcaggtggctgaacagctcagatacgtttctccaatmcatgggaatctcatgctgttgacttggaaataaaagatgctcattctttctgcaggtagtcaccaagtgcctacagtgtgccaggttcaggagggattgt

SEQ ID NO: 205064 - DNA, 201 bp, Homo sapiens
aaatgagaagagtaatactcatcatttttgtatcataaggtgttgtgaagtgtaaaggagataatcatcaaaaactacctgatgagttagttatacagtgytcttttgagacagagtcttactctgttgcccaagctggagtgcagtgatgtgatctctgcaacctccacctcccaggttcaagcgattcttctgcctcag

SEQ ID NO: 205065 - DNA, 201 bp, Homo sapiens
caaggaccacctcctctatgacacttattaagatagctcaccccacacccaccgtctcccaagctgaaagtagttcagggacttcaccttcagtatgtgcrgtatcttggctcaaggtcaccagggagtctctctcccccccactgctagtctggaagcagaatccctgcatgtatccccagtagacagtgcagtgcctgc

SEQ ID NO: 205066 - DNA, 201 bp, Homo sapiens
tccccacaatgattttccagtccaaaatgtccatggtgccgtggccaagcatggtgggagacctgggcatctgcttctctccatggggcaagttcacattyggtatggacacattggcatccacagtctcactcctgggtgtgaaaagcctccccctcacccctctgactttctcagcccttgatgaccctttgcgtcctg

SEQ ID NO: 205067 - DNA, 201 bp, Homo sapiens
tttttcagtaaatatttattaagcaccagttgtatggtaggcactgatgtaagcagtagggatacagcagtgaacaaaaataggcaaaaatctctgccatyttgcagcttacatctagtgagtggaaatagacaacagactaaataaatatcttgtatattgtgttagaaagtgaaaagtcctgtggagaaatacaaagca

SEQ ID NO: 205068 - DNA, 201 bp, Homo sapiens
tgcaggaaggaaggggaagcatgatcaagcctggtgcgtgttattcacacaaaactgcagcacctggtttctgccttcctcacatccctaagtgctaaggwcgtgatttgtcacaatggttctgactgctggattagggaccaagagtctgattgtagactatggtacatcttgaggggctaagagtatgttggggagagg

SEQ ID NO: 205069 - DNA, 201 bp, Homo sapiens
tattcattttttcagtaaatatttattaagcaccagttgtatggtaggcactgatgtaagcagtagggatacagcagtgaacaaaaataggcaaaaatctytgccatcttgcagcttacatctagtgagtggaaatagacaacagactaaataaatatcttgtatattgtgttagaaagtgaaaagtcctgtggagaaata

SEQ ID NO: 205070 - DNA, 201 bp, Homo sapiens
taataacaatgattaagtaatagagagtgatgtatgtgattaaaaggctagggatggttgcccttagaacctgggtttggactaaagctgttacttggagsacactcaaggtgcaaatttaccaacacgtcagattttctgtaaacagatgcaggcactaggcaaacgttttttaagccagaaagctatatcaagagagac

SEQ ID NO: 205071 - DNA, 201 bp, Homo sapiens
ttatgttgccctaaatcagaatcgagctgagccacaaagcgcaaattaatagctcacctccaagtgtggcatggatagagtgagaaacctttcagaggaastgggaggctgccaagagccagtccccggtgatatttgcagcgaccaaagtgaaaagatggtgagaaggcagggaaaggagaattctcctcacgattttta

SEQ ID NO: 205072 - DNA, 201 bp, Homo sapiens
gtgttcttccacctgcaggctcgctctctctctctctctctctctctctctctctctctctcaagttgcaagggagaagaaggcagggcattattgggaarccaggggtgctgatgctgtcagtgcttaagagcctggggtggtggaggcagaccacgtggatctgaatcccaggtgtcccgtgcacaagctgtaggactt

SEQ ID NO: 205073 - DNA, 201 bp, Homo sapiens
agctcacctccaagtgtggcatggatagagtgagaaacctttcagaggaactgggaggctgccaagagccagtccccggtgatatttgcagcgaccaaagbgaaaagatggtgagaaggcagggaaaggagaattctcctcacgatttttaataacttgcccaaataatgcagaaaggatgcttgttaaaatctaattcct

SEQ ID NO: 205074 - DNA, 201 bp, Homo sapiens
ttgttcagtgctaattatcttattactatcctcatcattaaagaaagcattatttccttctggaaagctcaggccactgaggctggttcaggcttggtccygaagagcttgaaaaaggttagttctcattctcacatttcaaccagcagcaagaccttccaattctacatcctgaatatcactgctgggtccatttctctc

SEQ ID NO: 205075 - DNA, 201 bp, Homo sapiens
tcagaatcgcctttgtcctggtggtccacggccgtgcctctcggcagttgcagcgcatgttcaaggccatctaccacaaagaccacttctactacatccaygtggacaaggtgagaggcctctgtgatcaccccttgctgggctttcttcggggtctgtccgtccctccctgataccctccttctgcattgctagtccaga

SEQ ID NO: 205076 - DNA, 201 bp, Homo sapiens
  misc_feature (1)...(201): n = A,T,C or G
aggcagagaaaggagtttgttctgcccctagatgggttcctggtaacaaggggctggtgataataatcaaagagcagcctacactatgtgctagacactangctagtaacccattttaaggatgctgaggcccagagagtttgagtaacttgacctgcacagctagacggtagccaaatgaggatttgaattcaggtggtc

SEQ ID NO: 205077 - DNA, 201 bp, Homo sapiens
agctgtacaggaagccgcccagcttctgatgagatgccacattcttttaaacaaccagttcttacatgaactcagagcaagggttcaccatttcccacccmagttcatctgtgggaggctgggagaggtctcaggctgggtccctctctcccctgcagtccttcttccatacggtcctggagaacagcccccactgcgaca

SEQ ID NO: 205078 - DNA, 201 bp, Homo sapiens
cccatggagactgggattaaagatcaggaaacagttgacgtttcagaacatgatgagaatttcagagacacagaccaattataaatagagagagagagagwgtgtgtgtgtgtgtgtgtgtgtgtaaaataagaattggtggcttacgaggtcacacaggacaaaatgtctaatcagatgactcttcctggaagactaata

SEQ ID NO: 205079 - DNA, 201 bp, Homo sapiens
ttttagtagcaaatgaacagaaaggcaaggaagaactacaggaccactctgtgggctatttaggatctccttggtgttagcactatcccagggccttgtayagtgcctggctcacagcaggtggctgaacagctcagatacgtttctccaatccatgggaatctcatgctgttgacttggaaataaaagatgctcattctt

SEQ ID NO: 205080 - DNA, 201 bp, Homo sapiens
gaccactctgtgggctatttaggatctccttggtgttagcactatcccagggccttgtatagtgcctggctcacagcaggtggctgaacagctcagatacrtttctccaatccatgggaatctcatgctgttgacttggaaataaaagatgctcattctttctgcaggtagtcaccaagtgcctacagtgtgccaggttca

SEQ ID NO: 205081 - DNA, 201 bp, Homo sapiens
caagtgcctacagtgtgccaggttcaggagggattgtggtgaaccaaacaaaccaggcccctgtggtcatggaattgcattccaatgagacagccagccartgagtgagcaaatagataaacaaaaacaaacagctcagctaatgacaggtattctagagaaaacttcattcatgtgattgctggggactcaggacattga

SEQ ID NO: 205082 - DNA, 201 bp, Homo sapiens
tcctgagtgcaggagcttctgtccccatggcattggggtgcccaccctcccaacaggtggatgaatctgtccccatggcattggggtgcaccaccctcccrgcaggtggatgagtctgtccccatggcatagggatgcccaccctcctagcaggtggatgaatctgtccccatggcattggggtgcaccaccctcctggca

SEQ ID NO: 205083 - DNA, 201 bp, Homo sapiens
aaactagcttaagggtaaagaacattaccagatcaggtaactaaaacattagggctgacttcaggtatggctaaatcaagctgtgcaaattatatcatcargcccagactctctattagttctgtttttctgtgtgtatgtttaattttctggcactgggtggggattattggcaatatattagcctccttttatagataa

SEQ ID NO: 205084 - DNA, 201 bp, Homo sapiens
  misc_feature (1)...(201): n = A,T,C or G
ttctcacatttcaaccagcagcaagaccttccaattctacatcctgaatatcactgctgggtccatttctctctctgtctcttctgcaacatccctgtcangtagattgtggcaatacattcctaacttacctgctcacatctgcgtctcatacccgctccctgcctctcccaagtgaatcttcattctgcatctagagtg

SEQ ID NO: 205085 - DNA, 201 bp, Homo sapiens
agcccattctaacccagtatgaactcatcttaatttaactaattatatctgcagagactgtatttctaaataagatcacattctgagattctgagtggacrtgattttggagggatgccgtttaacccagtacactcacatacagcttatttttttacaaatgtgaatttgtaaccattttaaaattgggataatgcccat

SEQ ID NO: 205086 - DNA, 201 bp, Homo sapiens
agtgagaaacctttcagaggaactgggaggctgccaagagccagtccccggtgatatttgcagcgaccaaagtgaaaagatggtgagaaggcagggaaagragaattctcctcacgatttttaataacttgcccaaataatgcagaaaggatgcttgttaaaatctaattcctcaagtcaaggctgtatacattctcatta

SEQ ID NO: 205087 - DNA, 201 bp, Homo sapiens
gtcaacagatgcttgttggaaacctactgtgtgccagacatttgccaggacctggggttacagacaccaatagaaccattaacatcgctgcctttgaggartatacagattaagccatcaaataatgacatcttcatgacattgtcaggaaagaaatttgcatgcatataatgcaggaaacagacatgcatatcacccctt

SEQ ID NO: 205088 - DNA, 201 bp, Homo sapiens; identical to SEQ ID NO: 36065

SEQ ID NO: 205089 - DNA, 201 bp, Homo sapiens
attacattgtatcccccaaaataggttgaattcctaagccccaggacttgtgaatgtggccttatttggaaatagggtctttgcaaattatcaagttaaartgaggtcattagagcgtgccctaatccaacatgactgtgtccgtataaaaagaggacgttcagacccacagatagacatgcacactagaagaatgccaag

SEQ ID NO: 205090 - DNA, 201 bp, Homo sapiens
gattacattgtatcccccaaaataggttgaattcctaagccccaggacttgtgaatgtggccttatttggaaatagggtctttgcaaattatcaagttaargtgaggtcattagagcgtgccctaatccaacatgactgtgtccgtataaaaagaggacgttcagacccacagatagacatgcacactagaagaatgccaa

SEQ ID NO: 205091 - DNA, 201 bp, Homo sapiens
atcttttaaatccccaaacaagactcacctgaacattgttctttacgttactttctgcgttgaacagccacctaaatgccaattatacctaaatcaagccyctcttcagaatttcagaatcctatactcaattgctaagtagatattatggattacattgtatcccccaaaataggttgaattcctaagccccaggacttg

SEQ ID NO: 205092 - DNA, 201 bp, Homo sapiens
ttgctgagtcctaaagtgcccaacattgtaagaaaagactgtaagaagggttacaggagttctgagccaagaaccgtggacaaaaaccactatcatggcckggtgcagtggctcacgcctgaaatcccagcactttgggaggctgaggtggacggattactcaaggtcaggagttcaagaccagcctggccaatgtggtga

SEQ ID NO: 205093 - DNA, 201 bp, Homo sapiens
tgtggtgaaaccctgtctctcctaaaagtacaaaaaattagccaggcatggtgacgggtgcctgaaatcccagctactcaggaggctgaggcatgagaatygcttgaacctgggaggtggaggttgcagtgagccaagatcacgccactgcactccagcctgggtgacagagcgagactctatcatctccaaaacaataaa

SEQ ID NO: 205094 - DNA, 201 bp, Homo sapiens
ggagagggacatggcccatggagactgggattaaagatcaggaaacagttgacgtttcagaacatgatgagaatttcagagacacagaccaattataaatrgagagagagagagtgtgtgtgtgtgtgtgtgtgtgtgtaaaataagaattggtggcttacgaggtcacacaggacaaaatgtctaatcagatgactcttc

SEQ ID NO: 205095 - DNA, 201 bp, Homo sapiens
gcatggtgacgggtgcctgaaatcccagctactcaggaggctgaggcatgagaatcgcttgaacctgggaggtggaggttgcagtgagccaagatcacgcyactgcactccagcctgggtgacagagcgagactctatcatctccaaaacaataaataaataggccagacacggtggctcacgcctgtaatcccagcactt

SEQ ID NO: 205096 - DNA, 201 bp, Homo sapiens
ctaagaaaaaatacccagtggccctgaattacttactcagtaagttcttgtcattaccctacagaagtcttaaaaatacagaaaagcaccaaaggaaagtaaaaaaaaaaaacaaaagtccgcactactcccctctccccacccctgagtttgctttttcgctttgttttgttgttcttgttgttgttgtttgtttttttg

SEQ ID NO: 205097 - DNA, 201 bp, Homo sapiens
taggtttgctgcaagaactcaatgagatgatatgtgtacagggcttggccgagtgaccagcgcaaagtaaatcctacccacatgagcttttataattattcctgtctgcattatgtgacgtgacagcattaatgtgacaaatgggaaacgatttggagaaatgtcccttttttaaaagaaggcacctgcagaacatattta

SEQ ID NO: 205098 - DNA, 201 bp, Homo sapiens
tatactaaactgtaaacttaaaaatgcttaaaataggccagatgtgtctcatgcctgtaatcccagcactttgggaggccaaggtgggctgatcacctgcrgtcaagagtttgagaccagcctggccaacatggcaaaaccccatctctactaaaaatacaaaaaaattagccgggcgtggtggtgggcacctgtagtctc

SEQ ID NO: 205099 - DNA, 201 bp, Homo sapiens
ttaaaataggccagatgtgtctcatgcctgtaatcccagcactttgggaggccaaggtgggctgatcacctgcggtcaagagtttgagaccagcctggccracatggcaaaaccccatctctactaaaaatacaaaaaaattagccgggcgtggtggtgggcacctgtagtctcagctcctcaggaggctgaggcaggaga

SEQ ID NO: 205100 - DNA, 201 bp, Homo sapiens
ccagcctcctgtccacctacctgcagagcatgcgggacctcctggagatgaccgactggccctgggacttcttcatcaacctgagtgcggccgactacccsatcaggtaaggcagccaagggccccaagccagtcttgtctgacgtcctgctctggctggtcatggctgggaactcacgaggcagaaggagactgatgcat

SEQ ID NO: 205101 - DNA, 201 bp, Homo sapiens
ggcgcatacttgtaatcccagctacttgggaagctgaggcaggagaattgcttgaacttgggtggtggaggttgcagtgagctgagatggcaccactttgytccagcccgggtgacggagcgagactctgtctaagtaaataaataaagcaagactccatctcaaaataaaataaaataagataaaattttaaaaatgtga

SEQ ID NO: 205102 - DNA, 201 bp, Homo sapiens
ctctattagctgatatgccagtgcactaaacagacggaaactccaacccgcgtggagctttatattagggttctctagagggacagaactaacaggatagrtgtatatataaagaggagtttattaaggagtattgactcacacaatcacaaggcgaggtctcacgatgggccgtctgcaagctgaggagcaaggaagcca

SEQ ID NO: 205103 - DNA, 201 bp, Homo sapiens
gatgctgtccaggtttgtagcctaggagcatataacctaggtatgtgctaagccaccccatgtaggtttgtgtaactgcgctctgtgatagtctcacagcracaaaatctcataacaatccactcctcggaatgtatcccatcgttgtgatgcatggctgtaccctcacttaaaggtaaggaaattgaggcttagagaaat

SEQ ID NO: 205104 - DNA, 201 bp, Homo sapiens
tttctactttatggacattaaagtttgagaagcaccaaacttcgtatattacacatccttagaatctttcatcttttaaatccccaaacaagactcacctsaacattgttctttacgttactttctgcgttgaacagccacctaaatgccaattatacctaaatcaagcccctcttcagaatttcagaatcctatactcaa

SEQ ID NO: 205105 - DNA, 201 bp, Homo sapiens
ggttctctagagggacagaactaacaggatagatgtatatataaagaggagtttattaaggagtattgactcacacaatcacaaggcgaggtctcacgatrggccgtctgcaagctgaggagcaaggaagccagtctgattctcaaaacctcaaaagtagggaagcccacagtgcagtcttcagtctgtggtcgaaggccc

SEQ ID NO: 205106 - DNA, 201 bp, Homo sapiens
gaggccagatcgtggtgatcctagaatttggctgttagtccaagcaagagggaagccactggcatgatactttgaatgatattctgaacggtatatatatmtatatatatatatatattttggagacagagtctcgctctgtcacccaggctggagtgcagtggtgtgatcttagctcgctgcagcctccacccaccaggt

SEQ ID NO: 205107 - DNA, 201 bp, Homo sapiens
tgctttctcagcatccaaaccacttttgttctttgggacgttcagagacacacactctgcttcctgagaccccaaagttcctgggttcgaaaccatccaayaaaacctccacccagataatgtgtgagtttgaaagggtgtatctgctcggactgttgttcacaaggagactggaaaaacatgccagtaattatgccgtta

SEQ ID NO: 205108 - DNA, 201 bp, Homo sapiens
gtatggtagccgttagccacaggtggccattgagagcttgaaacgtgccttgtgggactgaggaactaaattttcaatttgatatgattttaatttaaagttaaattaaaactgtgcgctcatgaaccttacatcgatgccatggggtacaaacacttccactagagagaattatactactgttaccagaagaaaagagag

SEQ ID NO: 205109 - DNA, 201 bp, Homo sapiens
tatggtagccgttagccacaggtggccattgagagcttgaaacgtgccttgtgggactgaggaactaaattttcaatttgatatgattttaatttaaagttaaattaaaactgtgcgctcatgaaccttacatcgatgccatggggtacaaacacttccactagagagaattatactactgttaccagaagaaaagagagt

SEQ ID NO: 205110 - DNA, 201 bp, Homo sapiens
gagccgagatcgtaccaccgcgctccagcctgggtgacagactgagacgctgtctaaaaaaaaaaaaaaaaaaaaaaagggtgggaaaagcaaagatagaygtgagactgtttcaagaaaaacagaatagatccaattcacttgtggacatgaagaatattcctgaacttggcatacgcaagctgagagtgtttagagact

SEQ ID NO: 205111 - DNA, 201 bp, Homo sapiens
atggtagccgttagccacaggtggccattgagagcttgaaacgtgccttgtgggactgaggaactaaattttcaatttgatatgattttaatttaaagttaaattaaaactgtgcgctcatgaaccttacatcgatgccatggggtacaaacacttccactagagagaattatactactgttaccagaagaaaagagagtc

SEQ ID NO: 205112 - DNA, 201 bp, Homo sapiens
tggtagccgttagccacaggtggccattgagagcttgaaacgtgccttgtgggactgaggaactaaattttcaatttgatatgattttaatttaaagttaaattaaaactgtgcgctcatgaaccttacatcgatgccatggggtacaaacacttccactagagagaattatactactgttaccagaagaaaagagagtcc

SEQ ID NO: 205113 - DNA, 201 bp, Homo sapiens
acaacctgcgcatcaccaactggaatcgcaagctgggctgcaagtgccagtacaagcacatcgtggactggtgcggctgctcccccaatgacttcaagccrcaggacttccaccgcttccaggtgagactttctcatggtctgccagcctcctaagtgatgccttcccaacaaacctctgcagaaatccaaggccagacct

SEQ ID NO: 205114 - DNA, 201 bp, Homo sapiens
gaatgaggatacaatctactctgcccaagggtgttttgggccaggtgtgtaaaatgccaggtatgaagtgggccctcagtaagtagcaatcatgtaaaaaygattgttgttcctattgtcagatgagttccagccaccagacagacagttgtcacacacaggtccggaggagcaaaatggatggagagaaggggagatgaa

SEQ ID NO: 205115 - DNA, 201 bp, Homo sapiens
ggtagccgttagccacaggtggccattgagagcttgaaacgtgccttgtgggactgaggaactaaattttcaatttgatatgattttaatttaaagttaaattaaaactgtgcgctcatgaaccttacatcgatgccatggggtacaaacacttccactagagagaattatactactgttaccagaagaaaagagagtcca

SEQ ID NO: 205116 - DNA, 201 bp, Homo sapiens; identical to SEQ ID NO: 36061

SEQ ID NO: 205117 - DNA, 201 bp, Homo sapiens
ctccttcctcttggcagcggctctctatgtgtctgtggatgggacgtttccaaccctggcatcttcctgcccagtgcattgagcatttttgcttattggcaaaaaaaaaaaaaaaaaaaagccgtcttttatgtgactttttctccggtggccaagagtatggacggtatccatgctgggatgctccaagtgcatcctggg

SEQ ID NO: 205118 - DNA, 201 bp, Homo sapiens
ggaaagatctagcaaccttaagccttcagggccacacatggccatgctgatctgttgatgaaaaaggcatctccagaccagcctgaccaatatggtgaaaycccgtctctactaaaaatacaaaaattagctgggtgtggtggcgcactcctgtagtcccagctactcgggaggctgaggcaggagaattgcttgaacccg

SEQ ID NO: 205119 - DNA, 201 bp, Homo sapiens
gtggatcacctgaggtcaggagttcgagaccagcctggccaacatggtgaaaacccgtctctactaaaaatacaaaaattagccgggcgtggtagcacacrcctgtaatcccagctactcaggaggctgaggcaggagaatcacttgaacctgggaggcggaggttacagtgagccaagatggcgccgttgcactccagcc

SEQ ID NO: 205120 - DNA, 201 bp, Homo sapiens
gcccatggagactgggattaaagatcaggaaacagttgacgtttcagaacatgatgagaatttcagagacacagaccaattataaatagagagagagagaktgtgtgtgtgtgtgtgtgtgtgtgtaaaataagaattggtggcttacgaggtcacacaggacaaaatgtctaatcagatgactcttcctggaagactaat

SEQ ID NO: 205121 - DNA, 201 bp, Homo sapiens
gggtcaacagatgcagctggaagggatccactgaggtgctgctcaatgtcaaggcataaagtcagagaatcaagccagctgcagaattggggaggaagggytttccgttccaccggcatcggtgcatccgggagccatgcaaggctttgcctggtgtcctcctgagaaggcaaatggtcaattcacccaactctcttgatg

SEQ ID NO: 205122 - DNA, 201 bp, Homo sapiens
cctcacgctctctgtcccctcaccccaccaccactcagggaaaatgtcgagtccagaagcccaggagatggtttgctttctgtgagacattccttgctctygggacttttctcctttactttccagagaaaagggatttagaaggaagccccagctccatcccttttcggtaacagctgttttcacgaggggaagagggat

SEQ ID NO: 205123 - DNA, 201 bp, Homo sapiens
caaacaagatactgtataggaccctcttaagatggaggagggctttcttgcgccacctgtgtctacccctcacgttgtctttggctctggtcttaccaggygtatgcagggagaaagtgacctctcttccctctccacttggctgggaatattccaactgcctctgcctacagataccaccagaaagcgggttctgcacct

SEQ ID NO: 205124 - DNA, 201 bp, Homo sapiens
tttgctttctgtgagacattccttgctcttgggacttttctcctttactttccagagaaaagggatttagaaggaagccccagctccatcccttttcggtracagctgttttcacgaggggaagagggattcctctggctgtccactggcaaccgtgcagagggagatgcagtgaggtgtggggaagggactctgctgcat

SEQ ID NO: 205125 - DNA, 201 bp, Homo sapiens
gctgcatcacccccagtgatggcctccgagaaatttgttttgagccacacaccctagggtctctggtcattcaactggaacccctagtgtttcagggcaaygaaccaggtcagattgaaagtcaaggacagcttgggcaatggggtttaattcctggctctgccgttactcatgacataaccctaaccgctcagtgactca

SEQ ID NO: 205126 - DNA, 201 bp, Homo sapiens
cacctgcgacccataggaggcaatctgtgccagctgccaggtgacacagctttttctgcctcattacattttgaacacctgcatgtcaggaagcgccctcygtgcagtggccctcacggccaccagcctctctgtgtcttgagttaaaatgtcccaagaaaggccctgctggctccttgcgttgctcctgcatttcttccc

SEQ ID NO: 205127 - DNA, 201 bp, Homo sapiens
agaggagttccccagctgaagttatctcttgcctgcggccatgtaggacgtgcctttcaccttctaccatacttgtgaggtcttccccgccacatggaacygtgagtccattaaacctctttttctttgtaaattacccagtctcgggtatgactctatcaacagtgtgaaagactaatactcctgctttggagagctccc

SEQ ID NO: 205128 - DNA, 201 bp, Homo sapiens
atgatactgccagctgcttaagggcagtctcttctacatccctcctgccctgggggcagtggggtaactacacagcgtgagtagccggcttctagaaagcrtagctgacagccgcagtggagggaaaatagaactggggatgtcacaagtggtcccaggtaaatacctcagtttccccatttgtcagccagagatactact

SEQ ID NO: 205129 - DNA, 201 bp, Homo sapiens
acatagggattgacaaactttctgtaaaaggctagataataaatagttcaggttttgcagagtagaaggtctctgtcctaactactcaactcaatgtgtasatagtgcataaatgaataggcatgtctgtgctctgataaaatgttgtttacaaaatggatggctgggtttggcccaagaccataattcgccaacccctgc

SEQ ID NO: 205130 - DNA, 201 bp, Homo sapiens
ggtatccagtaacagttcattggagttggacaaaactagtcccaaaggtcttccttgggcttgctggggaaaggcaagagactggcaaatccagagaacaycagaagacccattcattggtcagccaccacattcaaggctgtgctccaggacagggcctcacacacacagtttctataaagggccagatcataaatattt

SEQ ID NO: 205131 - DNA, 201 bp, Homo sapiens
agcgaggaataaaatagagcaagatgactctacttttttttttttcaggaagttttcccattttctcataatgagagatgattaaaataaccaggagacaratgacaccaaattaataaaaatgtagatcaaatgatcctccattacctattttgctcagttgcagttgaagaatgcattgattaaactgccgcagaccat

SEQ ID NO: 205132 - DNA, 201 bp, Homo sapiens
aagggaagtgatgaaaggtgctcagatgaccttggaagggcaggaccagggctgccaaaagagcagggtattccaaaaagaggaggcggcctccagctgtyggaagctctggaagaaaaacggagaatggatgaagacaagcctttggattttctcatcagcttcctttggaaaacaactccagttgactgacagacagca

SEQ ID NO: 205133 - DNA, 201 bp, Homo sapiens; identical to SEQ ID NO: 36064

SEQ ID NO: 205134 - DNA, 201 bp, Homo sapiens
cttcatctgtaaaatgggtatatgaaagctaacaaaggggatcctagacctttctgagacctagccccctagttcaggcccagtgacttcagaattcactyccctgtttcaggtcggcactgactgggatgccaaggagaggctattccgcaactttgggggtcttctggggcccatggatgagccggtgggtatgcagaa

SEQ ID NO: 205135 - DNA, 201 bp, Homo sapiens
taagcaatgggcagcctttgaaaagttttctattagaaaatgccatgatgagattggttcagtttataatcagttgcttggcagtgggaaaaagaaagttaaaaaaaaaaaaaaagtagaggactgtaccagcctgctggaggaggggaaacatgatagctagtattttttgctagtagatatgtacattatagctcaggt

SEQ ID NO: 205136 - DNA, 201 bp, Homo sapiens
aagcaatgggcagcctttgaaaagttttctattagaaaatgccatgatgagattggttcagtttataatcagttgcttggcagtgggaaaaagaaagttaaaaaaaaaaaaaaagtagaggactgtaccagcctgctggaggaggggaaacatgatagctagtattttttgctagtagatatgtacattatagctcaggta

SEQ ID NO: 205137 - DNA, 201 bp, Homo sapiens
agcaatgggcagcctttgaaaagttttctattagaaaatgccatgatgagattggttcagtttataatcagttgcttggcagtgggaaaaagaaagttaaaaaaaaaaaaaaagtagaggactgtaccagcctgctggaggaggggaaacatgatagctagtattttttgctagtagatatgtacattatagctcaggtaa

SEQ ID NO: 205138 - DNA, 201 bp, Homo sapiens
aataattcatcagcgagcaatgaacttgtgtcagcatcttcccggcagagtttatgtgatcagatcccagatgacatttgttactaatttggttttttttktttgtttgtttgtttgttagtaaagcactgtatcagtcaccataggagcgcagaaggagcaggactaaggtattgcccctgagtaaatacctctctggga

SEQ ID NO: 205139 - DNA, 201 bp, Homo sapiens
gtctgtggtcccagcactttggaggctgaggcaggcagatcacctgaggtcaggaccagcctggccaacatgacgaaaccccatctctactaaaaataccaaaaaaaaaaaaaaatagctggacattgtggtgcacgcctataattccagctactcaagaggctgaagcaggagaatctctcgaacccaggaggtggaggt

SEQ ID NO: 205140 - DNA, 201 bp, Homo sapiens
ctcggctcactgcaacctccgcctcccaggttcaagcaattctcatgcctcagcctccgagtagctgggattacaggcgcccactaccatgcctggctaatttttttttttttgtatttttagtagagaccaggtttcaccatgttggccaggatggtctcaatctcttgacctcatgatccgcctgccttggcctcccga

SEQ ID NO: 205141 - DNA, 201 bp, Homo sapiens
actgaaaaatggttaagatggtctacagacatatcaccctgaacacacccaacctcgtctgatctcagaaaaatggttaagatggcaagactctgtctccaaaaaaaaaaaaaatatttgtgacatcaaatatcacaaacattggtgcataagataaagctaaagtagaatttaaattaaatagacatatgaaataactta

SEQ ID NO: 205142 - DNA, 201 bp, Homo sapiens
tttgtccccaggttccagttctggttctgcactttactaaatggatgatttatctaagtctcggttgcccgtccgtaaaatgagagtgaagtgaaattccttttttttttttttttgagacagagtctcactctttcacccaggctggagtggagtggagcgatctgtgttcactgcaacctccacttcccaagttcaagc

SEQ ID NO: 205143 - DNA, 201 bp, Homo sapiens
ttgtccccaggttccagttctggttctgcactttactaaatggatgatttatctaagtctcggttgcccgtccgtaaaatgagagtgaagtgaaattccttttttttttttttttgagacagagtctcactctttcacccaggctggagtggagtggagcgatctgtgttcactgcaacctccacttcccaagttcaagca

SEQ ID NO: 205144 - DNA, 201 bp, Homo sapiens
aggcatggtgacgggtgcctgaaatcccagctactcaggaggctgaggcatgagaatcgcttgaacctgggaggtggaggttgcagtgagccaagatcacrccactgcactccagcctgggtgacagagcgagactctatcatctccaaaacaataaataaataggccagacacggtggctcacgcctgtaatcccagcac

SEQ ID NO: 205145 - DNA, 201 bp, Homo sapiens
acaagctgtgcaaccttgagcaggtgacttagttggagcctcagtttcttcatctgtaaaatgggtatatgaaagctaacaaaggggatcctagacctttytgagacctagccccctagttcaggcccagtgacttcagaattcactcccctgtttcaggtcggcactgactgggatgccaaggagaggctattccgcaac

SEQ ID NO: 205146 - DNA, 201 bp, Homo sapiens
gagagtgaatgaattcatgaatggaaggcaatatgtagcacagtggatgagaatgcagcctctggggttggacttcatgggttcccatgctggctctgccycctccgaccatagcgagttatctcacttctctgagactcagtttccacatctgtaaagtaaagataatgacaagggtctcccctttatggatttgggagt

SEQ ID NO: 205147 - DNA, 201 bp, Homo sapiens
attactatgtggcaggcactggattgagtcttccacacccatgatctcatcaaatctttgctcaacttagacaaggaaattgaggctcagaaggataaagraacctgcaaggtggtaccgcaaggattaaggagtagagatgatctttaaacctatttcaccttttgccgaatgatgattctgcagaacagcagcacgtca

SEQ ID NO: 205148 - DNA, 201 bp, Homo sapiens
gaaaaacagaggaatttcagcttctgtagatgtatatctttcttttgtgttttatttatttatttttttggccaccctctggagggccagccagggaacarccacagagaggttggtcttggtttggtctctaactcttgggttcgtcaacatcccaaggaccacagcttccctgagaaaacctttgatgactgcacattg

SEQ ID NO: 205149 - DNA, 201 bp, Homo sapiens
tggtttatgtgtgttgggtgaatgaatgactgagagagtgaatgaattcatgaatggaaggcaatatgtagcacagtggatgagaatgcagcctctggggytggacttcatgggttcccatgctggctctgcctcctccgaccatagcgagttatctcacttctctgagactcagtttccacatctgtaaagtaaagataa

SEQ ID NO: 205150 - DNA, 201 bp, Homo sapiens
ctcattcccctctgacccccaacccctggcaacccccggtctgctttctgtttctgtggatttgccaactctgaatatttcatataaatggaatcatacawcatgtgggtatttcacgtctggcttctttcacttagcattatgttttcaaggttcatctgcattgtagcttgtatcagtacttcatctctttctatggct

SEQ ID NO: 205151 - DNA, 201 bp, Homo sapiens
ggtatatgagcataatcactatctagttacaagcattttagttaccccagaaggaaaacctgtacccattaagcagtcactcctcattcccctctgacccycaacccctggcaacccccggtctgctttctgtttctgtggatttgccaactctgaatatttcatataaatggaatcatacatcatgtgggtatttcacgt

SEQ ID NO: 205152 - DNA, 201 bp, Homo sapiens
ttaggtggatagcgtatataaaataggtaggatacaccaaacatggttattattgtagctgttgttttatttctcagtttgaaattttggggttcaactgkcatatttttattgtggcataaaaataaaaacataaataataacattaaaatatgttggctggatgtggtggcacacacctgtaatcccagcaatttggga

SEQ ID NO: 205153 - DNA, 201 bp, Homo sapiens
gcaccattgcactccagcctggatgacagagcgagactccatctcaaaaaaaaaaaaaaaaaaaattcacatgtaaaattgcaacagcaattctggggagwtgcatagttgtgttttatagttgagctaagagatgaagggtggtgaaagttaactagaggaaaagctggagggggacattccaggtcaagggagtatcgt

SEQ ID NO: 205154 - DNA, 201 bp, Homo sapiens
aaaaaattcacatgtaaaattgcaacagcaattctggggagttgcatagttgtgttttatagttgagctaagagatgaagggtggtgaaagttaactagargaaaagctggagggggacattccaggtcaagggagtatcgtgtgcaaaggccctcgggtaggcagaggtgttgatagtttaaaacactcacaagaccaac

SEQ ID NO: 205155 - DNA, 201 bp, Homo sapiens
ttaggtcacaatttattaccccgtggaattgaattcaatttttaacaccatgtcagtcattctggtgttagagccttttaatggctgtgaaatttatacartgataaagtaatttaaaacatatgtaggaagaacatcagacaaattgatgtgtatagaaccctctggtaaaaattgaacaggagataaacacggaaaatg

SEQ ID NO: 205156 - DNA, 201 bp, Homo sapiens
acagaaaacttacccagaattacacatttcaccagtagcagagccaggctctgagctcagagactttggttccagtggcgtggcaaggggcttaaccactrcactttggtgtctataggagcagctgcattcaggctgaagcaagccctttgcagcttacatttgctccttgtgctcaatctgtctgttgcaatgagaccc

SEQ ID NO: 205157 - DNA, 201 bp, Homo sapiens
ggtgtctataggagcagctgcattcaggctgaagcaagccctttgcagcttacatttgctccttgtgctcaatctgtctgttgcaatgagacccacccacrcagtcagataattcacctgcttttggaggcgggggcgccaatcccatccaagacgctaaggacttgtgtttgaagtcagttcattgcctggggtgagaaa

SEQ ID NO: 205158 - DNA, 201 bp, Homo sapiens
ttttactatactaagtgactgttttctcagatctctcaaagatgtacataactagtaccattctggatacatcagagaaaagctaatttgctacctacaayggatgccccaggacattcgagcttaattctcttggggatcctgagttgagactggctgctacagagcatctgaagaatagaattggcaggtcaaacagct

SEQ ID NO: 205159 - DNA, 201 bp, Homo sapiens
gaccctatcgcatgctgcaacatggatgcacctgggggacttcacgctaagtgaaataagccagtcaccatagatcagatactgtgtgattcccccttacwcaaggtatctagagtaattaaattcctagagacaggagtaggatggtgagacctaggggcttgagggagagagaaacagggatttgttttttaatggccg

SEQ ID NO: 205160 - DNA, 201 bp, Homo sapiens
ccgtagaatttcaattctgcaaaatgaaaaagttgtggagattggttgcacaacaatatgaatatacttaacactattgtgcacttaaaatgattaagacrgtaaattttatgttgtgtgttttaccattttttaaaaatagctcttctgaaacatgcattgcctcatttaaatcttgctctaaattggtgaagtaggctt

SEQ ID NO: 205161 - DNA, 201 bp, Homo sapiens
gaagaggaggaattaactgggtgaaaaaaagggggcggtgaacattgcaagcagcaggggctgcatgcacaaaggcactgaggcaggagaaaacatggctyctgtggtaaatgaaaagaggcttatgtggacagagtgtggcaaggggataagccaatagaatgaggccagagaggcaggtgggggccagaccgtgtggga

SEQ ID NO: 205162 - DNA, 201 bp, Homo sapiens
gagaagtgcaggatgttcagaggggctgtgacagggaactcaaagaagggatgggggccaggcacagtagctcacacctataacaccagcactttgggagkctaaggaagggaggattgcttgagcccaggagtttgagaccagcctggacagcatagcaaggcactgtctctaccaaacatttcaaaattagcccacatg

SEQ ID NO: 205163 - DNA, 201 bp, Homo sapiens
ccatgaaagggaatttagagttttcccttattggggtccgacagcatcacaaaacctgatttctctaagacaggggtcctgggtccaaagacagctgccartctgcttttgtaaaaacactaccacgcccattcatttatgcatcatctgtggctactttccaacctcaagggcagagctgagtggttgcaacagaaactg

SEQ ID NO: 205164 - DNA, 201 bp, Homo sapiens
gcctgaccaatatggtgaaaccccgtctctactaaaaatacaaaaattagctgggtgtggtggcgcactcctgtagtcccagctactcgggaggctgaggyaggagaattgcttgaacccgggagatagaagttgcaatgagcagcagttgggccactgcaccccagcctgagctacagagcaagactctgtctcaataat

SEQ ID NO: 205165 - DNA, 201 bp, Homo sapiens
taaaggaactgcaaagaaagcatttgtcataattccccactcagtatcctgaatgcataatttctaccgtgactcagcgcgtctttggggactgagaaacwaacagtccctttcgtgcatacaagaaatactgagaggcattgagacggggcccttcgagtttgcagtctgccactgcctctttccagctgtgtgaccttt

SEQ ID NO: 205166 - DNA, 201 bp, Homo sapiens
taccgtgactcagcgcgtctttggggactgagaaactaacagtccctttcgtgcatacaagaaatactgagaggcattgagacggggcccttcgagtttgsagtctgccactgcctctttccagctgtgtgacctttggccaggttagctgacctctctgaaccccatttgtaaatggggatactggtacgtccttttgca

SEQ ID NO: 205167 - DNA, 201 bp, Homo sapiens
gggaaagccaaagctgtctcttcctaggaaacctatttgaacccctgtagatgacaggcaatgctgagggtctctagcttatgatagagcagctgtaaaamcatgatctctattcttgttcagaaccattgcaccaagtggaggtgtgtgatttagaaaaccaaggatggaattggaaacccgctgtacctgttgagtggc

SEQ ID NO: 205168 - DNA, 201 bp, Homo sapiens
ttccaggtcaagggagtatcgtgtgcaaaggccctcgggtaggcagaggtgttgatagtttaaaacactcacaagaccaacaggggagctcttcctataarcaaaaaggttaatctgctcgtaggccaagttgtaattcctaaaagtgctaggtttagaggatctgtgtctttgctttgagcaaggagaatggaggtagag

SEQ ID NO: 205169 - DNA, 201 bp, Homo sapiens
caatgcctgctcatcccaggactacagccatggtcctgaaaagcactgtccgaggtgctgccccatagtccagatgctggttctgttggcagacagatgakcaccagctgcagcagctgctccaggcatgggagaggatggttctgccctgaccccgttgcttgacagaaggtcctttccatctccatgtgagcctccttt

SEQ ID NO: 205170 - DNA, 201 bp, Homo sapiens
acagttcctagtctttggatatgctgaattcctttattcatttaatatttattgagaggctgctttgtgcctgacattggtttagatggtggggaaagacwtgccaggggcctgatcgtactcatctttgaatatctcgtgcttggcacatcataatcctcagtcttgccctcactgggaaagaagataacgtggttgctt

SEQ ID NO: 205171 - DNA, 201 bp, Homo sapiens
tgctgccccatagtccagatgctggttctgttggcagacagatgatcaccagctgcagcagctgctccaggcatgggagaggatggttctgccctgacccsgttgcttgacagaaggtcctttccatctccatgtgagcctcctttgttttccagggtccgctggtggttggtcctttggggaacccagaaggcccctgct

SEQ ID NO: 205172 - DNA, 201 bp, Homo sapiens
aacaaaacaaaacaaaagttagccaggtgtggtggcacatgtctgtaatcccggctactcaagaggctgaggcatgagaattgcttcaacccgggaggtcraggttgcagtgagctgagatcacaccactgcactccaacctgggtggcacagcaagactttatctcaaaacaaacaaacaaacaaacaaacaaaaaaact

SEQ ID NO: 205173 - DNA, 201 bp, Homo sapiens
cccacccatccatttagaagagattgtttgggagtttggctatttttaatcaagacgcccaccacgatactggtgaccaaagctccgtgtgtgtgctttcyctgcccctccctggccccagcacacacaagcacatatactccagggtctctgttcagtcccacctcctgcatctctgccttccctcccttctcccagacc

SEQ ID NO: 205174 - DNA, 201 bp, Homo sapiens
atttttttttttttgtatttttagtagagaccaggtttcaccatgttggccaggatggtctcaatctcttgacctcatgatccgcctgccttggcctcccraagtgctgagattacaggcatgagccaccatgcccagctggctacgcccattctataggatcctgtgcaaccgttaaaaggatgaagtctgcctgtacgt

SEQ ID NO: 205175 - DNA, 201 bp, Homo sapiens
cacatagtaggtctccaaaaaaaaaaaaaaaaaagatgataatgatgatgatttggctgttagtggttccaggccactttcaacacgtctcaacttgtgtrtgacttgaacagctttgtctgacttgtgtgagataagggagcttttccctctgaaatctagaactacatttaatcaggcatcagtaacctccattcccaa

SEQ ID NO: 205176 - DNA, 201 bp, Homo sapiens
atttaatcaggcatcagtaacctccattcccaaactgaactggaacaagctacttttcacactaaaacaaagcgaggaataaaatagagcaagatgactcyacttttttttttttcaggaagttttcccattttctcataatgagagatgattaaaataaccaggagacaaatgacaccaaattaataaaaatgtagatca

SEQ ID NO: 205177 - DNA, 201 bp, Homo sapiens
tatcctgtgccccttggatgcctttggcctcgacttactaggtgccggtagtacagggtcacccagttgtggcaatgaaaaatgtctccagatattgataratgtatctagggggctatatcacttccagttgagggccactgagttagcttatttaaagcatagagaagagaataggcctgaaatgcctacattgaaggg

SEQ ID NO: 205178 - DNA, 201 bp, Homo sapiens
attgtgactatcaaatgcaataaaatgtggcaaaagtctttccccatggcctagggcatggtgcacatttagtaaatggctgggacttgggagattattgkattactcatttttttattcatttcgaaaaagattctcatatggctcccagtaagtttattttaacatttatttcttacttatttcagcagagacttccca

SEQ ID NO: 205179 - DNA, 201 bp, Homo sapiens
ttctgagtggacatgattttggagggatgccgtttaacccagtacactcacatacagcttatttttttacaaatgtgaatttgtaaccattttaaaattgkgataatgcccataagaataagtatttctggagtcttctggaaaaccagaagactgagcaacttggaatgcattccccatggtaaaatgattggcgctgag

SEQ ID NO: 205180 - DNA, 201 bp, Homo sapiens
gggcctctttatggtttggagagaaacattgcttaaatttttttataggccgatttagtttccacctctcccagcgacttattaaagaggctctgtccccrcaaactacaggtaacagtgtcggaggcaccagtggactttaccttggcatgcacgatggggtttaaccacgcgggagatgcaccattgtagggacacgtg

SEQ ID NO: 205181 - DNA, 201 bp, Homo sapiens
gggcctagcccagcacttggagtagactccatactctctagtttcctcgtggtctgatagagatcagaggcatcacctcctctcagatgttgtttgtgatytaggtgtaactacagtcacattcatccggtccacataagcccacagctggggtcacatgcacaaggaggatggaggcaaaccagccctcacatggacatg

SEQ ID NO: 205182 - DNA, 201 bp, Homo sapiens
aacacctgacctcaggtgatctgcccgcctcagcctcccaaagtgctgggattacaggtgtgagccactgtgcctgctggaaacatttttaatggtcacarctaaagaaaggatgctcctggcatttagtggatcgagtccagagatgctcctgggcactgcacaatgcacaggacagcttgctgtcacctccaatagaga

SEQ ID NO: 205183 - DNA, 201 bp, Homo sapiens
ctctcccagcgacttattaaagaggctctgtccccacaaactacaggtaacagtgtcggaggcaccagtggactttaccttggcatgcacgatggggtttmaccacgcgggagatgcaccattgtagggacacgtggggttagccctttgcgagcatcccctgggttcacctctgtgcccatcagcaaggtttagctttcc

SEQ ID NO: 205184 - DNA, 201 bp, Homo sapiens
attggtgtttatttcagtaataggatgggacacgagcagcgctcattttcactgctgcctctcttaactgctttgtgccccctccgctggaattatgagtwggtcaacatgagtcatccaatgagagaacaggggcttggagtggcgagactgcagaggcgcagggaaatgaaggagggggtgagcagtaggggcagctca

SEQ ID NO: 205185 - DNA, 201 bp, Homo sapiens
ccagctactcgggaggctgaggcaggagaatcgcttgaacccaggaggcaggggttgcagtgagccgagattgcggcattgcactccagcctgggggacasagtgggactacgtctcaaaaacaaaaacaaaaagttaacacagacattgacctgagttccccaaatttatccagactgcctccaatcccggctacccact

SEQ ID NO: 205186 - DNA, 201 bp, Homo sapiens
attgtgctcatattttttttttaaatggcagtttcaacaaatcctacccactgatgcattgtttaaccaaatgtcatttctctgcctttctcatttaagtatcatctgttaggtttacacattggtacacccatgaaattaacattacatgtgtttccttttggagctgactaaatttaatttaatttaaattgttttcac

SEQ ID NO: 205187 - DNA, 201 bp, Homo sapiens; identical to SEQ ID NO: 36068

SEQ ID NO: 205188 - DNA, 201 bp, Homo sapiens
tgaggcaggagaatcgcttaagcttgggaggtggaggctgcagtgagctgagattgtgccattgcactccagcctaggcaacagggcgggactctgtcaamaaaaaattgtaaataaataaataaatgtaagtaagctagagaaaagaagttaagaaaatcataaggaggagaaagtatatttactgttcattaagtggaa

SEQ ID NO: 205189 - DNA, 201 bp, Homo sapiens
cctgaaattgttccctttggctttcagaggaggcactgaagctgcacaatgggcccctccgcaatgcctacatggagcagagcttccagagcctaaacccygtcctcagcctgcccatcaaccccgcccaggtggaacaggcacggaggaacgcagcctccacgggcacagcgctggagggatggctggactcgttggtgg

SEQ ID NO: 205190 - DNA, 201 bp, Homo sapiens
ctgtatccctttccataagcctgtccctcttggggaggcagaagggtcactttatctcacattgtcaagccccagaggtgttcttccacctgcaggctcgytctctctctctctctctctctctctctctctctctctcaagttgcaagggagaagaaggcagggcattattgggaaaccaggggtgctgatgctgtcagt

SEQ ID NO: 205191 - DNA, 201 bp, Homo sapiens
ggtaagaggccaggtcttgtcacatttcattgtattttgcatttccctcggccagattctactccactatctgacacttctagttggagatggaggagaaraggacttggagatccctaaagataagctaaccctgtgcccgaagaaggttctccggccccagtcactggcaccagcatcttaaacaggggaggatcaaac

SEQ ID NO: 205192 - DNA, 201 bp, Homo sapiens
taacatagtgtgatagagtcagtgatggtgacataaaaatggcgatataaagaggatgccttatcagcctgtgtgcaaatgatcagagaaggtgcttcaarcagactgacataattggtgaaacttgctttctgtgacaaagacagtacccacggtgtctggcctgactctccccttggtttgtttccacaggacaaatga

SEQ ID NO: 205193 - DNA, 201 bp, Homo sapiens
gtcaagactttcacattgtgtaccctttcttttgttctgaagcaatatgcattttggatatttacataattgcaacaagaattgggtatcctgttttcttyccttggcattatactattagcccccatttctccacgctgctcagtagcttccgcaatgataatgattccttttaatgcctctagtattccattgagcaga

SEQ ID NO: 205194 - DNA, 201 bp, Homo sapiens
taaggcatgagaattgctttagcccgggaggaggaggttgcagtgagctgagattgcaccattgcactccagcctggatgacagagcgagactccatctcaaaaaaaaaaaaaaaaaaaattcacatgtaaaattgcaacagcaattctggggagttgcatagttgtgttttatagttgagctaagagatgaagggtggtg

SEQ ID NO: 205195 - DNA, 201 bp, Homo sapiens
ctattattccctgaagaaaagggtgttggtttcataagtcatactccattaatccagagtattctaaaacagtcctagccccatctagaagtggggagggratccagttctgaaggattgtcactgacattcccttagctgcctgccggtcagagctgggttgagggattccagattcatcttcctgacctccaggttgat

SEQ ID NO: 205196 - DNA, 201 bp, Homo sapiens
attgtgtgtctgccacccagggtccccaagacagagacttagtgcaagaaggaaggagcccagacatggcccttgaatgaatgaatgagtgaatgagtgartgaataaatgaatgaatgaatgaaataagccctagagtgaaaagactagctatctctcctttctgcataagtcaacaaaactagctggccttttctcctc

SEQ ID NO: 205197 - DNA, 201 bp, Homo sapiens
tgtctgccacccagggtccccaagacagagacttagtgcaagaaggaaggagcccagacatggcccttgaatgaatgaatgagtgaatgagtgaatgaatraatgaatgaatgaatgaaataagccctagagtgaaaagactagctatctctcctttctgcataagtcaacaaaactagctggccttttctcctctctcaa

SEQ ID NO: 205198 - DNA, 201 bp, Homo sapiens
tggattacattgtatcccccaaaataggttgaattcctaagccccaggacttgtgaatgtggccttatttggaaatagggtctttgcaaattatcaagttaaagtgaggtcattagagcgtgccctaatccaacatgactgtgtccgtataaaaagaggacgttcagacccacagatagacatgcacactagaagaatgcc

SEQ ID NO: 205199 - DNA, 201 bp, Homo sapiens
tggggatactggtacgtccttttgcaggatgggtgggaggactggagagaagagctcacccagcaccatgctcagcacattcagcacatagtaggtctccaaaaaaaaaaaaaaaaaagatgataatgatgatgatttggctgttagtggttccaggccactttcaacacgtctcaacttgtgtatgacttgaacagcttt

SEQ ID NO: 205200 - DNA, 201 bp, Homo sapiens
ggggatactggtacgtccttttgcaggatgggtgggaggactggagagaagagctcacccagcaccatgctcagcacattcagcacatagtaggtctccaaaaaaaaaaaaaaaaaagatgataatgatgatgatttggctgttagtggttccaggccactttcaacacgtctcaacttgtgtatgacttgaacagctttg

SEQ ID NO: 205201 - DNA, 201 bp, Homo sapiens
acaaaaggccatatattgtatgactgcctttatatgaaatatctagaattggtaaatccatagaggcagaagacagactgatggttatcaggggctagcaygaatggggagtggctgtgtaatgtgtatggggttttcttttgggggctgatgaaatgttttgaagccaggcagaggtgacagttggacaacattgttaat

SEQ ID NO: 205202 - DNA, 201 bp, Homo sapiens
tgcccctactgtgtgccctttaaatccacccagttgtccattcagtatatatgcatgatgggcctactaggtgctgggcatgtttaattttcaacctaggygcattcagagaaagctgccattcagtgaggttaaatgacatccttggacacacagctgactcagtcatggagctgggatctgtccccagatctttctgtt

SEQ ID NO: 205203 - DNA, 201 bp, Homo sapiens
tgtgattacactgctagtgctgagattgatggggataaatttgggataacaatgctggcaacgatgtcactcgtttgtattggacttcatattttttaaasctctctcaatcagtagccccgtggttatcgaggacttggtatccgtccattcattgatgcattcattgctcaaagtgcatttgaaggagtcagtttgaac

SEQ ID NO: 205204 - DNA, 201 bp, Homo sapiens
ggtactactttaggttaagtggtcagaaaaggtctctctaaagaggtggtatttgaaaggacacctgatgacaaagccaagccagcaatactgggagaaayttcccaggcaagcaaatgcaaaggtcctgaggttgctgtgcatttagctttgggctgacttgctgtttgccaagcccagtgccaggcactggagattccc

SEQ ID NO: 205205 - DNA, 201 bp, Homo sapiens
catgtcctcctcactccctcactggtgtccaacacatcagcaggggtgggaggcacccagaaccccaacccagatccctcacacctctctcgcttaaaatsaacaatgtcaaaaaaatagcatctctacagttcagcactgagctgagcccaagtctccatgatggtccatcaactggaagggatacagtattgagcgccc

SEQ ID NO: 205206 - DNA, 201 bp, Homo sapiens
gtgtgttgggtgaatgaatgactgagagagtgaatgaattcatgaatggaaggcaatatgtagcacagtggatgagaatgcagcctctggggttggacttyatgggttcccatgctggctctgcctcctccgaccatagcgagttatctcacttctctgagactcagtttccacatctgtaaagtaaagataatgacaagg

SEQ ID NO: 205207 - DNA, 201 bp, Homo sapiens
tccaacacatcagcaggggtgggaggcacccagaaccccaacccagatccctcacacctctctcgcttaaaatgaacaatgtcaaaaaaatagcatctctrcagttcagcactgagctgagcccaagtctccatgatggtccatcaactggaagggatacagtattgagcgccccctgtaggtgacatcacgtgatgggat

SEQ ID NO: 205208 - DNA, 201 bp, Homo sapiens
ctcatctaacgccaccctcctagcgtgcgtggcatttccaatccaagctgtgctttactttctcagataccagatatcctatgtacccaatgattttactsattcttcatgctacatatatatactttagaaggaagctttttgtcaccatatcatatgtagcatttgtcttaagtggaaggtacaaaactttttttgatg

SEQ ID NO: 205209 - DNA, 201 bp, Homo sapiens
tgggttcaagtgattctcctgcctcagcctcctgagtagctgggattacaggtgcctaccaccatgcctggctaatttttgtatttttaatagagacaagkttttaccatattggccaggctggtcttcaactcctgacttcaagtgacccacccacttcggcctcccaaagtgctgggattacaggcatgagccgccaca

SEQ ID NO: 205210 - DNA, 201 bp, Homo sapiens
agcaggggtgggaggcacccagaaccccaacccagatccctcacacctctctcgcttaaaatgaacaatgtcaaaaaaatagcatctctacagttcagcaytgagctgagcccaagtctccatgatggtccatcaactggaagggatacagtattgagcgccccctgtaggtgacatcacgtgatgggattcctcattcca

SEQ ID NO: 205211 - DNA, 201 bp, Homo sapiens
aaagtgctgggattacaggcatgagccgccacactcggcccaacttcatttaactttaatcacctccttaaaggccacatctccaatacggtcacaggagrggctaggccttcaacatattaattttcgggggacacgattcagtcctagcaaatcctgtctttggaaaaggaaaggatacctcagcatcgagaaacagaa

SEQ ID NO: 205212 - DNA, 201 bp, Homo sapiens
gtatgtgcggtatcttggctcaaggtcaccagggagtctctctcccccccactgctagtctggaagcagaatccctgcatgtatccccagtagacagtgcrgtgcctgccacttggaaggcaaatgtcgttccataataattacagttgcaggcttcctagaatgtataaggtaaatgatcttacaggaaattccaaaaga

SEQ ID NO: 205213 - DNA, 201 bp, Homo sapiens
cagcatcgagaaacagaagcagaggtttcgtgagattaaacaacattttggcttcacagaaagggtgattggaggagcatagagggaaatgaggttggaargaggagaagagaaaatgtagtcatttgcaaatcattatttaaggcaacaataatgatggccaccatttcattttctgcataccacatactggtcctggag

SEQ ID NO: 205214 - DNA, 201 bp, Homo sapiens
cctaaagataagctaaccctgtgcccgaagaaggttctccggccccagtcactggcaccagcatcttaaacaggggaggatcaaaccaactggaacacagwtgtattttttagggtagaatttctgctcctctgaatttttccagtgatgactcctaaaccaatgtcagtaatattagtcccattttaccgaatggagaac

SEQ ID NO: 205215 - DNA, 201 bp, Homo sapiens
ctactaaaaatacaaaaaattagccgggcatgggggtgggcacctgtaatcccaggtactcgggaggctgagacaggagaatcgcttgaacccaggaggcrgaggttgcagtgagcagagacctcactactgcactccagcctgggcgacagtgcgagactcagtctcaaaaaaaaaagaaaagaaaagaaaggttgttcc

SEQ ID NO: 205216 - DNA, 201 bp, Homo sapiens
tgcttctgaggaggccccaggaaacttacaattgtggtggaaggtaaagggggatgtaggtatgtcttacagggccggaacaagagcaagacaggggaggygccacacacttttaaacacgcagatctctagagaacagcatcaaaggaatggtgctaaaccattcatgaaggatccacccccatgatccagtcacctccc

SEQ ID NO: 205217 - DNA, 201 bp, Homo sapiens
atctgaaggtccattaagtctgtgcctgaattttctcatggcagttatttcctggatcttaggtcgctcggtccttgcctgtccccgttccccaacctggmccccgaccacatctctgtttgtaatctctgctttaaatcttcactgctgttgttggtgggagtgtcattttggctggctctgtgacagtttacccagtta

SEQ ID NO: 205218 - DNA, 201 bp, Homo sapiens
ctggaggatgcggggaaaggtagaccggtccagagaacaggcggatcatggccagaagatcaagaggaaacacagagcccttcaggatgaggtgctgggartaacccagggtggcctggagcaaggagcaagtggaagggagggagagggatagagatgacagaagtgaagccggagccagaccagaaaggtctccaggac

SEQ ID NO: 205219 - DNA, 201 bp, Homo sapiens
gataagagcttgcaggccacagcgcagcgttttcacagatgatatgttacaggccaagtgactgggacccagtgaattgcagtgaaatgtaccatacaccrtcaatatctatcccaccagtttccatttattgagcagtatatcattagaatatcccagggctctgaacaataaaatcaataagacggttcagtcatgggc

SEQ ID NO: 205220 - DNA, 201 bp, Homo sapiens
ctaagaccttgaagcttgaactgaatcctgttgatcattcatttattccttcaataaatagtatccttttaattcctactgtgttccgggcactatgctasgcactggtgggtcccagaaggtgctggtccctgctgatccacagggtagtagaaaaataccaagatttcataagtctgggagggatggcagcccccacag

SEQ ID NO: 205221 - DNA, 201 bp, Homo sapiens
gtgaccttgggcaagttcctcaccctctctgagcctgggatgattatctataaatggggataattttcatttgcagcattgttacaagaggtaaaagcctsatgagtgaaagaaccacatgaatgttaagtactcaacaaattagagtaagaatcaaaaggacagtgtttctccacagacttctgtctctctagcagggag

SEQ ID NO: 205222 - DNA, 201 bp, Homo sapiens
ttgaagcttgaactgaatcctgttgatcattcatttattccttcaataaatagtatccttttaattcctactgtgttccgggcactatgctaggcactggwgggtcccagaaggtgctggtccctgctgatccacagggtagtagaaaaataccaagatttcataagtctgggagggatggcagcccccacaggaacatca

SEQ ID NO: 205223 - DNA, 201 bp, Homo sapiens
ggccgttgactgattcctcccagcggggcttggtgctgctgagcaagggtccacagaccacccaaaagcctcaaggaaaagtgggggtgcctagcctccakccagtttgctggatgagaggagacagccatgggcaacctctcaggcctgagtcttcaactttgccccctcatccccaccaccgggaccctgtatgtggat

SEQ ID NO: 205224 - DNA, 201 bp, Homo sapiens
actacctctgttactctcaggatgctttcttagtcctaatctttagtctctggcctgatgaaaactgaaagcaagacacatgccagtgagtgtacacagayggcagccacccctggtaggcagtagggatttggtttatgtgtgttgggtgaatgaatgactgagagagtgaatgaattcatgaatggaaggcaatatgta

SEQ ID NO: 205225 - DNA, 201 bp, Homo sapiens
cagacctgcagccagacggcctggagctccttcagccctgaccccaagtcggagctgggggcagtcaaacctgatggccggctcaggtagcactgggcacraggagtgggccacagcaggatctcaacgggaaagcagccagaggggttgtggggcctgaaccccggcctcccaccctgggggaggccctctgtgaatggg

SEQ ID NO: 205226 - DNA, 201 bp, Homo sapiens
gggatactggtacgtccttttgcaggatgggtgggaggactggagagaagagctcacccagcaccatgctcagcacattcagcacatagtaggtctccaaaaaaaaaaaaaaaaaagatgataatgatgatgatttggctgttagtggttccaggccactttcaacacgtctcaacttgtgtatgacttgaacagctttgt

SEQ ID NO: 205227 - DNA, 201 bp, Homo sapiens
aataatcaacattactgagaacataccataaagccctttgcaagttttatctaatttgagattcagaactttttgacatgggcaatatatatatatatatrtatatatatatatatatacacacacacacacacacacacacagacacagacacgcagacacagtcatgcactgtatgtttcagtgtttcagtcaacggtg

SEQ ID NO: 205228 - DNA, 201 bp, Homo sapiens
taatcaacattactgagaacataccataaagccctttgcaagttttatctaatttgagattcagaactttttgacatgggcaatatatatatatatatgtrtatatatatatatatacacacacacacacacacacacacagacacagacacgcagacacagtcatgcactgtatgtttcagtgtttcagtcaacggtgga

SEQ ID NO: 205229 - DNA, 201 bp, Homo sapiens
aacataccataaagccctttgcaagttttatctaatttgagattcagaactttttgacatgggcaatatatatatatatatgtatatatatatatatatayacacacacacacacacacacacagacacagacacgcagacacagtcatgcactgtatgtttcagtgtttcagtcaacggtggactgcatatacaatggtg

SEQ ID NO: 205230 - DNA, 201 bp, Homo sapiens
tttgagattcagaactttttgacatgggcaatatatatatatatatgtatatatatatatatatacacacacacacacacacacacacagacacagacacrcagacacagtcatgcactgtatgtttcagtgtttcagtcaacggtggactgcatatacaatggtggtcccataagagtataatatctattatagatatag

SEQ ID NO: 205231 - DNA, 201 bp, Homo sapiens
aagtgggctctgtccttacgggctcagttttctcagctgtgaaatgggactgctaaaagaacttcctcatgagattgtcatgtgaattaaatgaggcgatrcatggcacccagtgcagcaccaggcacagggtaagtatgaataggcatcctattggtggctcttctgatcctgaaattgttccctttggctttcagagga

SEQ ID NO: 205232 - DNA, 201 bp, Homo sapiens
atgagtaagaagaatcatggccactgtgtattgtgttcctactaagtgggccctttttgtataggatccatatttgttttcacagccactcaatgcagctrtaagaattattctccccatttgtcaagcttctggagtttacctgatttttctgaagatcacacagctggttaaatgctagaatttgaacccaagtttttc

SEQ ID NO: 205233 - DNA, 201 bp, Homo sapiens
tccaatgcactggtgactttgaggcagctactctgcttctcttgacttcattttctccctttgaaaaacaagggggttgcatgagaaagtctccaaattcycttcccattctggtatttcatgtgtccagaccagccctggtaaaagaggaggtgacagaggcagagatcttgaaagacagagagatggggatgaacaaag

SEQ ID NO: 205234 - DNA, 201 bp, Homo sapiens
gtgttcactgtttctccttgctttcctccaaaagtaaagtcactagatacattgcaagacaggtagcacaattgtcattttcccaggcagcctcagcaggkcttgcagaagcaggtggccgcatgtttactctcagcctgaataatcaggtatttggaaacatccctacaagtccctggccttggctcagggagcatcaga

SEQ ID NO: 205235 - DNA, 201 bp, Homo sapiens
gccagctcttctataccacagccatgggatgtcagcaaatggcttcgacaggccatgcctctgtttctccatctttataaaattcaaataatgatcatggkattggggagatggagcatcctcactggccacaggaaggccccacgctgggcgcattccaggacattttctcatttcaccttcatttagcaggtgttaccc

SEQ ID NO: 205236 - DNA, 201 bp, Homo sapiens
gtagaactctggagctgggcctgttggttaaatcctgatcatcgtggatgagcagccacatagaaatgatggctatgacagtataatttattgaggatttrctagatgccaggcactgtgctctctcttctggatgtgaatgtccatgtggggtggattctgtgattatacatacccattttacagatcagaatactaagg

SEQ ID NO: 205237 - DNA, 201 bp, Homo sapiens
gggcgcattccaggacattttctcatttcaccttcatttagcaggtgttaccccatttcagaaatgaatacagctgaggtttgagagtcgctttaccttastcaaggccctacagctagtgaacgacagagctgagatggaacctggttccgtctgactttaaggcctgtgttcttttattactccatagtgactgcattt

SEQ ID NO: 205238 - DNA, 201 bp, Homo sapiens
tgtggctatggagaatcagcattcccattggccaggcctaagctgtaggtccacccctgaaattgatgatgaagttaggtcttccccacccatatggactragaatagaggagaggaggatgatgccacaaaaggtattggatgatgaagtttcagtcatgcaggacaagtaaatttaaagatcctgctgtacaacattgt

SEQ ID NO: 205239 - DNA, 201 bp, Homo sapiens
ggggcctcttgtataggatgctacataaagcacatagcatagcagttaagaatccaggctctggagccagactgtcaagattcacgggccaactctaatayccactcacagtgtgtgaccttgggtaagttacgtgagttacctgtgtatcagttttctcatctgtaagatgggaatgaggataatcataccaatcccata

SEQ ID NO: 205240 - DNA, 201 bp, Homo sapiens
cgcatgttcaaggccatctaccacaaagaccacttctactacatccacgtggacaaggtgagaggcctctgtgatcaccccttgctgggctttcttcgggrtctgtccgtccctccctgataccctccttctgcattgctagtccagactgcctgctttcagaaaaggcttggaagctgaccagctgcctctccacagagc

SEQ ID NO: 205241 - DNA, 201 bp, Homo sapiens
ggaggccgggatggcatctgagctgcctccctagctccccttttctgacattgaactaatcatcatccttgaatgtcaaacctaagtcagctttctccacmcagggcagcaataataactggtacatgtgccactgattatcctaagcaccttacagatattcactctttctacaacaaccccatgacataaatgcgatca

SEQ ID NO: 205242 - DNA, 201 bp, Homo sapiens
catgttggccaggatggtctcgatctcttgacctcgtgatctgcccgcctcagcctcccaaagtgctgggattacaggtgtgagccaccgtgcccggcccmtaaatgctgtttcttacctctcccctctacccaatgccctctgcctgcctctcacatactttgtgggaatagcttacctttattagtccattttcatgct

SEQ ID NO: 205243 - DNA, 201 bp, Homo sapiens
caaactcttgagctcaagtgatccgcctgcctcggcctcccaaagtgctgggattacaggcgtgagccaccacgcccagcctgaagtcagggtgcttaacyaccatgctgcactgactccctaagggtgctgactgcggagtttccctccatatccaagccacgtggacttgtgggtggtatgtcccttccaccaatcaga

SEQ ID NO: 205244 - DNA, 201 bp, Homo sapiens
cgtgatctgcccgcctcagcctcccaaagtgctgggattacaggtgtgagccaccgtgcccggcccctaaatgctgtttcttacctctcccctctacccartgccctctgcctgcctctcacatactttgtgggaatagcttacctttattagtccattttcatgctgctaataaagacatacctgagactgagtaattta

SEQ ID NO: 205245 - DNA, 201 bp, Homo sapiens
ggagggaagcccaccagagaggattgctgtgggtcacagctgcacacacccccagctggctggcaggaaggaaggatcgcaggatgactctcatgcttacrgtccagatctaggtgccttgggaaagccaaagctgtctcttcctaggaaacctatttgaacccctgtagatgacaggcaatgctgagggtctctagctta

SEQ ID NO: 205246 - DNA, 201 bp, Homo sapiens
ggacttccctgtagcttcctttggcagccacagggcccttgcactttcaattttctgtcactcataaaggccttccccataactccttagaggactgattycttctctttgagcttgcatgccacctgctcctcagtgaagccttccccaatgatctccactaattaagtccctgtctctttattttctatcattaccccc

SEQ ID NO: 205247 - DNA, 201 bp, Homo sapiens
ccccatgcagctgtcatgtatatgaatgcaaagttggccaggtgcagtggctcatgcctgtaatcccagcactttgggagaccaaggtgggcggatcaccygaggtcaggagttccagaccagcctgtccaacatggtgaagccccatctctactaaaatacaagacttagctgggcgtggtggcgcatacttgtaatccc

SEQ ID NO: 205248 - DNA, 201 bp, Homo sapiens
gcatttaaattcaagacttctggctgtgtgaccttgggaaagttacataacttttctgagcttcaattttcttttctgttaaatgtgtgttagaaggatcyaatacctagttaacgaaagtctgtgactgcctgattgcccaacaggtgtggctgttacccttctttttattcattttttcagtaaatatttattaagcac

SEQ ID NO: 205249 - DNA, 201 bp, Homo sapiens
ttttttaaagtactcatgttcagaatttataaagaaatgctattcatcagaagttggccaatccagcccactacctgtttttgtaaataaagttttattgraacacagtcaccatgctcattcatgtacatgttgcctgcttctgctttagagctacagtggcagaactgaatagttgtgacagagactgcatggcccaca

SEQ ID NO: 205250 - DNA, 201 bp, Homo sapiens
tgactgtcatcaccctttctctcctgggaaaagcgctctaattacctgcatcggcaagtgctccaggtctccaggcagtacagcaatgtccgcgtcacccyctggagaatggccaccatctggggaggagccagcctcctgtccacctacctgcagagcatgcgggacctcctggagatgaccgactggccctgggacttc

SEQ ID NO: 205251 - DNA, 201 bp, Homo sapiens
tcatgtacatgttgcctgcttctgctttagagctacagtggcagaactgaatagttgtgacagagactgcatggcccacaaagccaaagatactatctggytctttacaaaaaaaaagaccaccaaccctgctataaaagagaggaaaaaaatggaggagagaacatgaatggcccctcacacacgcaaaaacatgttcag

SEQ ID NO: 205252 - DNA, 201 bp, Homo sapiens
gactgatgcatagtctccacaggatcgctcaggataggattctgattggacctgagaatcattgattcattcactcattcattcatgcattcaacagatasagactgagcacgtggttttcccagctctattagctgatatgccagtgcactaaacagacggaaactccaacccgcgtggagctttatattagggttctct

SEQ ID NO: 205253 - DNA, 201 bp, Homo sapiens
ttgtaaaaatgtaagcacagtgtagtggaatcttccaatttggaagggaagccggaaatccagatttaatggaaaaaatctgatttttcaacgtcgggttktttgtttgtttgtttttgttttttttaacagatagtgggcaaagaaaaattccactgttccacgtgtacactgccagcaacctctgctctctggagaggt

SEQ ID NO: 205254 - DNA, 201 bp, Homo sapiens
ctctgtccttacgggctcagttttctcagctgtgaaatgggactgctaaaagaacttcctcatgagattgtcatgtgaattaaatgaggcgatgcatggcrcccagtgcagcaccaggcacagggtaagtatgaataggcatcctattggtggctcttctgatcctgaaattgttccctttggctttcagaggaggcactg

SEQ ID NO: 205255 - DNA, 201 bp, Homo sapiens
gggagacttactgccgccacaagttagggctgctgatgcctgagaaggtgactcggttctgccccctcgagggtaagttccaaccccgctggctcagagasggatctcctggccacttcctcctcctgcccagccccattctgctcaccttctcagaccttctgagaaaggccaccctgttttccaaaccccagatgagca

SEQ ID NO: 205256 - DNA, 201 bp, Homo sapiens
gacgggctgtgaatttgtcatgccaatcgctgtcctctctgtgcactgcaagagaagggtgctaaggagtgggattgtgtagttgaagcaatttggatccwcaagtcacctcttggaggacggccctgtaggagagctgctcaagctgcataggagcaggaaataagcctttgttgggttcaagccactgcgattttggga

SEQ ID NO: 205257 - DNA, 201 bp, Homo sapiens
tccgcggagtcacaccacatgaactcctccacaatcaggctgtatggctttattttgcctcatttatagctgtgcttacagcatcacttagaggtgagttytctttgacagatgaggaaactgaggcatgagaggcaaagtgacctcctaataaatggtagggctgggatgcagacccaggctaaccccttctgtggaata

SEQ ID NO: 205258 - DNA, 201 bp, Homo sapiens
tatttcttctctgtctgtctctcatggttagtctggtaaccatgtaagtttgaatacaaattatctaaaattgaaagtttcaagcatggttaagtgcatcractggacatttttgtataattagcactagccagagtcaaggcagggttttattttcctaaactcaggggcttcctttgatgacccagttagagctcagtt

SEQ ID NO: 205259 - DNA, 201 bp, Homo sapiens
acacaactgtaatcccaggactttgggaggccaaggcaggtggatcacttgaggttaggggttcgagaccagcctggccaacatgatgaaaccccgactcwactaaaaatacaaaaattagccaggcatggttgtgcatacctgtaaccccagctactcatgaggctgaggcatgagactcacttgaactcgggaggcaga

SEQ ID NO: 205260 - DNA, 201 bp, Homo sapiens
cacacactacaagccccctttgaacttgcccctgaggcctggggtctggacagtgaaaattctccaccactgggtgccagttgcagagaccaaattcctcrttgcgcctctgaccttctcgaacaggcagcccatcaaacctggtaagtactcccagtgtctatgtgggagaaatactccttccctggggaccttgagggt

SEQ ID NO: 205261 - DNA, 201 bp, Homo sapiens
cattcaagtgttagatgatgatgatgttgctattgctggtatttcagtctttatcttgctgtgatctaagctttcataatgattttaaaggcataggaaarggttacaataggccctgccattatcttgttttctatacattgggttgatcacaggagggtgagatttttgcctctgtggagtgtgcacttctcctgtggt

SEQ ID NO: 205262 - DNA, 201 bp, Homo sapiens
atggaacatgaaattaaaaactggaaagaaaaattttgctagtcctctcacctgtatttcttctctgtctgtctctcatggttagtctggtaaccatgtamgtttgaatacaaattatctaaaattgaaagtttcaagcatggttaagtgcatcgactggacatttttgtataattagcactagccagagtcaaggcaggg

SEQ ID NO: 205263 - DNA, 201 bp, Homo sapiens
ggacaacattgttaatgaactaattccactaaactgtacaccttaaatgcttaattttaaaccactgctgttacagcagagcccctgatccccctccagtstgcatggagcctgcatggagtaggcactcggtgctgcctgtagcaatccacacagcgcctttgtggaaaatagaaaaggcagctcttcctcgagacactt

SEQ ID NO: 205264 - DNA, 201 bp, Homo sapiens
caggctcatgcctgtaatcccagcactttgggaggccgaggcgggcagatcatgaggtcaggagtttgagaccagcctgaccagcatggtaaaaccctgtmtctactaaaaatacaaaaattagccaggtgtggtggcacatgcctgtaattccagctactcaggaggctgagacaggagaatcacttgaacctgggaggc

SEQ ID NO: 205265 - DNA, 201 bp, Homo sapiens
aaaataccattaaaggccaggctcatgcctgtaatcccagcactttgggaggccgaggcgggcagatcatgaggtcaggagtttgagaccagcctgaccarcatggtaaaaccctgtctctactaaaaatacaaaaattagccaggtgtggtggcacatgcctgtaattccagctactcaggaggctgagacaggagaatc

SEQ ID NO: 205266 - DNA, 201 bp, Homo sapiens
tagaaaataccattaaaggccaggctcatgcctgtaatcccagcactttgggaggccgaggcgggcagatcatgaggtcaggagtttgagaccagcctgaycagcatggtaaaaccctgtctctactaaaaatacaaaaattagccaggtgtggtggcacatgcctgtaattccagctactcaggaggctgagacaggaga

SEQ ID NO: 205267 - DNA, 201 bp, Homo sapiens
cttcaggctgctaaaagcctaaaacaaaaaaacaaaacagaacaaccaaataaggcagggttggacaagcttgtttacatcgttttgacaacaactctgamgtatgcactcttgatatccccatttttcagatgaataaactgaggcacagagatgttaagaaacttgaccccaaggctacagccagtaaactgtagaatc

SEQ ID NO: 205268 - DNA, 201 bp, Homo sapiens
tctctgtgcagtaattccttcctccagggagtgtgtcagggccctctctggaatgagagtcctatcacccacaatctgattagactctggcattaggcagsagaagggggacaggaggaggccagagcgagagagagattctatttgctgagtcctaaagtgcccaacattgtaagaaaagactgtaagaagggttacagg

SEQ ID NO: 205269 - DNA, 201 bp, Homo sapiens
ctgtttggccatggggggttgtagatctgagcatattggcctgatggcctttcccattcacaccggatcttctctacccatgctagcccctggacctcagytgaacgggaaagaaacttcagtgattctcattgtccggggaagattcaggttgaagatggaaatgtggaggagtagagtgtgaggtccaagcttcccttt

SEQ ID NO: 205270 - DNA, 201 bp, Homo sapiens
aaagaaacttcagtgattctcattgtccggggaagattcaggttgaagatggaaatgtggaggagtagagtgtgaggtccaagcttccctttttcccttcytccttctctcaacaccaagccccttctgatgacaatcttggggtgctttgaggaggaaagtgcttaggtcagcccagtgaagatacttctctactcccac

SEQ ID NO: 205271 - DNA, 201 bp, Homo sapiens
atggcagagagaatagggacataggtccagatatgccttctactaaatcttgggacttcatcatttaaccataacagcctccaaggataatagttctcagwgtaagccgtctcccccattctgtccatcctggaggggtccccttcaaacccactacctcatgcaaatttccagcagctgaaatgaatacatgcagatttt

SEQ ID NO: 205272 - DNA, 201 bp, Homo sapiens
gagactccgtctcaaaaaaagaatcaatcaatcctctatcataggagtctcgaagtaaacgctcagcttctgctgtctttgtgcagagcaagcagaaagayagagacctcatgttttcttgagctggaagcctgctccttcttccccatgaaccaggcaaaagacagcccctccagagctgaccaggcccaatcccacccc

SEQ ID NO: 205273 - DNA, 201 bp, Homo sapiens
ctgctcacctccttcctcccacttgtgcccatccaaaccacagaacccaacccttttgcttcctggggcattgggaattgaaggagtggcgatcttgtctstgttagtcaaggcaaattttgaattcatctactattctcactgcttttagaagggttagcatatggtctttcttccttcttcttgcctgctctggacact

SEQ ID NO: 205274 - DNA, 201 bp, Homo sapiens
ctcccccattcaacttccagaaggcctagatcatactgaagacaagatgggaaataaacccaggcaggtattaaggatcagcaaatcttgtttactatttwaaaaaaatcaaaacaggaaattctgttcatcaaaaatatgatacactaggtggaaaagatgaaccacataatagtagaagatatttgctacattttttta

SEQ ID NO: 205275 - DNA, 201 bp, Homo sapiens
attctagaagataaaattggaaaaacccttctagacactggcttaggcaaagacttaatgaccaagaacccaaaagcaaatgcaacaaaaacaaagataartagataggacttaattttaaaagtttctgcaaggcaaaagaaataatcagcagagtaaacagacaacccagagagtgggagaaaatctttgcaatctgta

SEQ ID NO: 205276 - DNA, 201 bp, Homo sapiens
ttactgatcttcaacaaggcacacaaaaacaaagtgggaaaagaacaccctattcaacaaatggtgcagaaataattggcaagccacgtgtagaagaatgraaccgaatcctcatctctcaccttatacaataatcaactgaggatggatcaaagacttaaatctaagacatgaaaccatacaaattctagaagataaaat

SEQ ID NO: 205277 - DNA, 201 bp, Homo sapiens
caccagaacagcatggtactggtataaaaacaggcatatagaacagtggaacagaatagagaacccagaaataaaggcaaatacttactgatcttcaacamggcacacaaaaacaaagtgggaaaagaacaccctattcaacaaatggtgcagaaataattggcaagccacgtgtagaagaatgaaaccgaatcctcatct

SEQ ID NO: 205278 - DNA, 201 bp, Homo sapiens
taaagtatactataaggccatagtcaccagaacagcatggtactggtataaaaacaggcatatagaacagtggaacagaatagagaacccagaaataaagscaaatacttactgatcttcaacaaggcacacaaaaacaaagtgggaaaagaacaccctattcaacaaatggtgcagaaataattggcaagccacgtgtag

SEQ ID NO: 205279 - DNA, 201 bp, Homo sapiens
tgggcacttgagatgtcctgttgggtcactaaagcctcagtctgtgagcggtgaggttttaggggagagtgacaatatttgccacattgagagatcgtacyggctgccgtgggagaatagttgggagtggggcccaaatgggagtggggaggccagatcacaagcagttgcttctactgaccccagagccacatccacaga

SEQ ID NO: 205280 - DNA, 201 bp, Homo sapiens
gagccccctattctccaaacctccaggcagaagcaggtgtcctagaaggaagccataaggagcttcctgaacccaagcagccatgaagtcttttagtcacwcagagccaggcagccaccttctgtttggggaccaggaccccacacctgtgcaaaacagcctcgttcaggagactcagaggatttcaacaggagctggagc

SEQ ID NO: 205281 - DNA, 201 bp, Homo sapiens
gcctgctccttcttccccatgaaccaggcaaaagacagcccctccagagctgaccaggcccaatcccacccccttagaggtcttaggttccttcttgatcwagttcacatctttaccatctctaacgatgtctaatgccagacatggaggagaggggagtaaatggctgtgtcttcgctgcttcaggtacacctgttggac

SEQ ID NO: 205282 - DNA, 201 bp, Homo sapiens
cctgggggccattcatggggtcctgatttttccagtgttttcttctagagtttctaaggaaggcagggctctccctacacatgcccaggatgacccaggartcattttacccccaccgagagcagccctcctgtccttggtaattgtatttgttagcgatgttccaatgaatgacagtgaacacaaaggtgggagcaatgc

SEQ ID NO: 205283 - DNA, 201 bp, Homo sapiens
gcatcgcaagctaatattgtaatagcgtttcccacattaacctcatttctcataagggtttttttgcatcaaccacaatatttggctcccagcgttcgcakgtttgttagctgctcttttccctttgaatgtcctgccttttgtcagtttcggtatctcctcattctccactttctcactctgcagaatagaggcactaag

SEQ ID NO: 205284 - DNA, 201 bp, Homo sapiens
ggtgtgaccatctcccctgcattctgctttctcagcatccaaaccacttttgttctttgggacgttcagagacacacactctgcttcctgagaccccaaarttcctgggttcgaaaccatccaataaaacctccacccagataatgtgtgagtttgaaagggtgtatctgctcggactgttgttcacaaggagactggaaa

SEQ ID NO: 205285 - DNA, 201 bp, Homo sapiens
caaccacaatatttggctcccagcgttcgcaggtttgttagctgctcttttccctttgaatgtcctgccttttgtcagtttcggtatctcctcattctccrctttctcactctgcagaatagaggcactaaggggctctgatagagaaattagggcccgcaccaaagacagcaggctctgttctcctggcaggtggggctg

SEQ ID NO: 205286 - DNA, 201 bp, Homo sapiens
aatgtcctgccttttgtcagtttcggtatctcctcattctccactttctcactctgcagaatagaggcactaaggggctctgatagagaaattagggcccrcaccaaagacagcaggctctgttctcctggcaggtggggctgaagctgcccaccctaccctgtattagagaaagatgggttaggaccagacttccaaaca

SEQ ID NO: 205287 - DNA, 201 bp, Homo sapiens
cagtttcggtatctcctcattctccactttctcactctgcagaatagaggcactaaggggctctgatagagaaattagggcccgcaccaaagacagcaggstctgttctcctggcaggtggggctgaagctgcccaccctaccctgtattagagaaagatgggttaggaccagacttccaaacactgtggctcctaactac

SEQ ID NO: 205288 - DNA, 201 bp, Homo sapiens
taaatagtacagaaataaatgtggtctctgtcctctgccaatttgatattctcaccagatcccagcttgaccacacaatgaattttgcaatgtattttctyccgaatccctccctctccagatctcacaattctccttcctcttggcagcggctctctatgtgtctgtggatgggacgtttccaaccctggcatcttcctg

SEQ ID NO: 205289 - DNA, 201 bp, Homo sapiens
caaaaactcatcatgattcaattacttcccaccaggtccctcccacaacacgtggggattctgggagctacaattcaaggtgagatttgggtggggacacrgccaaaccatatcactagctaagcttttcccagcacttagtatatgccaggtgtcatttgtaaatactttatatgagtcagcacacttaagcctcacaaa

SEQ ID NO: 205290 - DNA, 201 bp, Homo sapiens
ggtctctgtcctctgccaatttgatattctcaccagatcccagcttgaccacacaatgaattttgcaatgtattttcttccgaatccctccctctccagayctcacaattctccttcctcttggcagcggctctctatgtgtctgtggatgggacgtttccaaccctggcatcttcctgcccagtgcattgagcatttttg

SEQ ID NO: 205291 - DNA, 201 bp, Homo sapiens
tgtctcacaactggtgggggttggagccaggatttaaatgcatgcttctttcatcacggggagtaggggcagagaggaaaggacctgagttttttgccaaygggtcataatttcacctgctggatagttctggggtaaagctctctcactcatttcttccccatctaaatccttggtttctgtatctggatgagaatccag

SEQ ID NO: 205292 - DNA, 201 bp, Homo sapiens
attgacaggcactttggactttccagtctccagaactgtgagtaaataaatctccattgtttaacccacccagttatggtgtcttgttatagcagcctgtrcagaccaaggtacctgtcctcatcccctgtatgagagctatatgctctcaagcaacaaatccaacctttgtgagtctcctttttctcacctgtgagaggg

SEQ ID NO: 205293 - DNA, 201 bp, Homo sapiens
gactaagcaaaaagaacaaatctggaggcattgcattacccaaccttaaagtatactataaggccatagtcaccagaacagcatggtactggtataaaaamaggcatatagaacagtggaacagaatagagaacccagaaataaaggcaaatacttactgatcttcaacaaggcacacaaaaacaaagtgggaaaagaaca

SEQ ID NO: 205294 - DNA, 201 bp, Homo sapiens
aacacagtaatattggcacagttcatcaagacagaaagtcaataaagaaacaatggacttatgctataccctacaacaaatggacttaacaggtacttacrgaacattttacccaacgactgcagaatatacatgctgttcatcagcacatggaacattctccaagatagaccatatgataggccacaaaacaagtctcaa

SEQ ID NO: 205295 - DNA, 201 bp, Homo sapiens
agtcaccaagtgcctacagtgtgccaggttcaggagggattgtggtgaaccaaacaaaccaggcccctgtggtcatggaattgcattccaatgagacagccagccaatgagtgagcaaatagataaacaaaaacaaacagctcagctaatgacaggtattctagagaaaacttcattcatgtgattgctggggactcagga

SEQ ID NO: 205296 - DNA, 201 bp, Homo sapiens
caggaaagagtgttctagaagatgagggggaggtaggaaaataattcaacataatcccttctcctctcatctctttccctaagccagtcaagactttcacrttgtgtaccctttcttttgttctgaagcaatatgcattttggatatttacataattgcaacaagaattgggtatcctgttttcttcccttggcattatac

SEQ ID NO: 205297 - DNA, 201 bp, Homo sapiens
accttccgcctcctcccggatcagtttgaagtcaatcccagacatcctatcatttcagccatcaatattttaataatgtatctctgaaaaataactcttttaaaaacattcaccataatgtcatcacacctaaaaatatcacaaagaaaattaataggcagaactattgttgaaacttctcaaccaccccttacaattgtc

SEQ ID NO: 205298 - DNA, 201 bp, Homo sapiens
caccttccgcctcctcccggatcagtttgaagtcaatcccagacatcctatcatttcagccatcaatattttaataatgtatctctgaaaaataactcttttaaaaacattcaccataatgtcatcacacctaaaaatatcacaaagaaaattaataggcagaactattgttgaaacttctcaaccaccccttacaattgt

SEQ ID NO: 205299 - DNA, 201 bp, Homo sapiens
ctgagatccatcccagctattaccatctaaaattatttagtttatttaacagacatctaaatgatgcttactaagaaatgatgcttactaagtgcctatchttgctttagatgttctgcacagattaactcacacccttattataacccattttacagatgttgaaactgagaacacagaggtgcaaaaagtatcggagct

SEQ ID NO: 205300 - DNA, 201 bp, Homo sapiens
ccaaagaggcaatagggcatggtggagactgcagtgagcagaagaacctaggtgctgtctaaaggaacagccactacccttcagctttaaccagttgttascatgtggagtgtgggcctggggttgccagatctattgctgtttaaagagaagccaaaagaatttccgtgaactctttcatgttttaaatatggctagcta

SEQ ID NO: 205301 - DNA, 201 bp, Homo sapiens
ttgattaaactgccgcagaccattatggtcgtattcattactatagcataatctgttttattatgataggataataactaacacagtcttgcagacagacrtttctctgtgggctaagtaatcatttactgtggatgtgcaccaaggaatgctgggttcactttgctcagggtagacttgaaccttagggttgcagagaag

SEQ ID NO: 205302 - DNA, 201 bp, Homo sapiens
tgtgagtctgcaagttggctgaaataccaaagaggcaatagggcatggtggagactgcagtgagcagaagaacctaggtgctgtctaaaggaacagccacyacccttcagctttaaccagttgttagcatgtggagtgtgggcctggggttgccagatctattgctgtttaaagagaagccaaaagaatttccgtgaactc

SEQ ID NO: 205303 - DNA, 201 bp, Homo sapiens
acccaaaaacaacaaatgacctttcattattattccattttagggatatgaaaactgtgaggcacagaaaggttaaaaaaaactttccaaaggccatactyatatcatcttctctttattcccttttcatcagaatctcccaaaatatttgttacatttgtacccaggaatatgcttttaagtatatatctagggctgagc

SEQ ID NO: 205304 - DNA, 201 bp, Homo sapiens
gaggaaggtagttgccttgagctgagccttctttgcctgtagttgggcccccatattccctccctgctgcaaggctgtttgaagacagccctagtgtttaytggccttctctaccccaatgaggtgaaacaacatattccatttctcaagtccatttctccacttactttgaaaaatcaagtgcatttctccagttacttt

SEQ ID NO: 205305 - DNA, 201 bp, Homo sapiens
tacctgaaatttcaagtgggaaacttccttccaattcccagcctcaccaaccctcaccccatccccatgctcaagtggcctgcctctgaccctcccctggkggccccaggcaatatcagaaagtgatttggacatctgggcaggtcagcttcctaggaaatcatcatggaacagaagccaacgcagagagcaaagtcttca

SEQ ID NO: 205306 - DNA, 201 bp, Homo sapiens
cctctcttccctctccacttggctgggaatattccaactgcctctgcctacagataccaccagaaagcgggttctgcaccttgtcatccccctccctaacrtcatctactccatccctcatgttcctccaacttgcttctcccatccctccttcaaaaacaaaacaaaacaaaacaaaagccttaggtttctcctttttga

SEQ ID NO: 205307 - DNA, 201 bp, Homo sapiens
tgcagtatgtaagatgatttaaagagaaatgcaggcgagtctttgaaaatgtccatgtttatctatattaacacatagaagggaataggaacatgttcagyccagattttggaagctgaagtttccttaaaaataaaaagtaaataaataaataaaatgaaagttgatttaaatgagaaaatattaacaaggcaacaatac

SEQ ID NO: 205308 - DNA, 201 bp, Homo sapiens
catttggcaagtacttattgagtgcctggtatactccagccattttgctgggggttgggaatatggcagtaaagaaagcaagcactgttgtgcatcctccrtgctcattagagaaagagacagtagataagtgagcgggtcatatatcaggtagaaatgagtaccaggaaaactattgcatggaaagaggatagggtgggt

SEQ ID NO: 205309 - DNA, 201 bp, Homo sapiens
cccagaaggtgctggtccctgctgatccacagggtagtagaaaaataccaagatttcataagtctgggagggatggcagcccccacaggaacatcagagcrgtaactacctctgttactctcaggatgctttcttagtcctaatctttagtctctggcctgatgaaaactgaaagcaagacacatgccagtgagtgtacac

SEQ ID NO: 205310 - DNA, 201 bp, Homo sapiens
tcttggaagtctgtctcaggttgcaatgttaattcaggaagagagagatttttaaccaaggtggtgtccgcaaaatacattttaatgaactatcagctgtwgggcctcactgtgaatttgttcattcattcatacattctagtcagtcaacagatgcttgttggaaacctactgtgtgccagacatttgccaggacctggg

SEQ ID NO: 205311 - DNA, 201 bp, Homo sapiens
gagcttcagcccagtggtccttttatttctttgctaaatgaggagatggagacaggggtggagggaaatttaatatatgagtaaatattcatatacatatragcatacacacagatggatgccctgtgtttctcattttgctttacgcaacatcacctaaacttcagccaagagtgtgctggaagttgaatataattaagg

SEQ ID NO: 205312 - DNA, 201 bp, Homo sapiens
taagccaatagaatgaggccagagaggcaggtgggggccagaccgtgtgggacctttagagccaggttaaggagtccaagcttatcctataagcaatgggmagcctttgaaaagttttctattagaaaatgccatgatgagattggttcagtttataatcagttgcttggcagtgggaaaaagaaagttaaaaaaaaaaaa

SEQ ID NO: 205313 - DNA, 201 bp, Homo sapiens; identical to SEQ ID NO: 36062

SEQ ID NO: 205314 - DNA, 201 bp, Homo sapiens
cttaatgtcttttcacctagagacgttttcagatttcaccaccatgaaaacagaaaacattccaaagagctggagagtttatttcaaaaggacagtgagcygtggtaggtactcatgaatcctaaggttggctcagctgcttctccacataaagtggaggtgcctgcacagatatcaaggatctgtgtctgggagcctggc

SEQ ID NO: 205315 - DNA, 201 bp, Homo sapiens
gccctcaagcccaagagccatcccaggcctgttcaggcctcagctaagcctctcttcatctggaagaagaggcaagggggcaggagaccaggctctagctytgggccctccttcagcccccatcatgggaataaattaattttctcaatgtacatatttgagttattatatggaaggagtgcaggtttgcaaggaactctg

SEQ ID NO: 205316 - DNA, 201 bp, Homo sapiens
atgagcctgagaatagccctcactgcttgtcgttggccaggcaccccagctaccatgtcccagatagccaaggatgtgtgcaccttcctgcgctgggcatytgagccagagcacgaccatcgaaaacgcatggggctcaaggtaaaagggttgggaggccatggtgggtatcagagaagggctgggagctgggcagggctc

SEQ ID NO: 205317 - DNA, 201 bp, Homo sapiens
gtgaccctgtccagtgtctgcttgccatcctgccagaacaggccctcaagcccaagagccatcccaggcctgttcaggcctcagctaagcctctcttcatytggaagaagaggcaagggggcaggagaccaggctctagctctgggccctccttcagcccccatcatgggaataaattaattttctcaatgtacatatttg

SEQ ID NO: 205318 - DNA, 201 bp, Homo sapiens
atgtccggtggagggtactgcccctttgatgccttgggtaggggcagtgtctgcttcacagagggggggcatgatcccaggttggacatgagcctgagaayagccctcactgcttgtcgttggccaggcaccccagctaccatgtcccagatagccaaggatgtgtgcaccttcctgcgctgggcatctgagccagagcac

SEQ ID NO: 205319 - DNA, 201 bp, Homo sapiens
ccccacccccatcgaggactgacctggggcttctcgaggagctgacagcaagtagaggaaagcagggtccccatcctgccgaaccccgtaagaggcaaggstgcgctcaggcacacacaggcaccgtccgatgacccagcgttgcacggctggcgggaaaccgagctctgagaacacctgtggccagagcatcagggcagg

SEQ ID NO: 205320 - DNA, 201 bp, Homo sapiens
gctcaggactgtggggctgcaccccacctcccacaccccacccccatcgaggactgacctggggcttctcgaggagctgacagcaagtagaggaaagcagrgtccccatcctgccgaaccccgtaagaggcaaggctgcgctcaggcacacacaggcaccgtccgatgacccagcgttgcacggctggcgggaaaccgagc

SEQ ID NO: 205321 - DNA, 201 bp, Homo sapiens
ggggcgtcttctgtgcatgtctcaggaggcttttgggctccttcagttttgcgtatgtccggtggagggtactgcccctttgatgccttgggtaggggcartgtctgcttcacagagggggggcatgatcccaggttggacatgagcctgagaatagccctcactgcttgtcgttggccaggcaccccagctaccatgtcc

SEQ ID NO: 205322 - DNA, 201 bp, Homo sapiens
taacatacccgacatcacaacaaaagactgtatcagggccatggatgaaaacctctctctctctctgtctctctctctctctcgctctctctctctctatmtatatatatcttgtattagtttgttttcacactgctgataaagacataaccgagactgggtaatttataaagaaaaagaagtttaatggacttatggttc

SEQ ID NO: 205323 - DNA, 201 bp, Homo sapiens
taatatgtggtctttgatgtctggcttcttttttatttatttatttttttgagacagagtctcgctctgtcgctgggctggagtgcagtggcacgatttcrgatcactgcaacctccgcctcccaggttcaaccgattctcctgcctcagcctcctgaatagctgggactacaggcatgtgccaccacgcccagctaattt

SEQ ID NO: 205324 - DNA, 201 bp, Homo sapiens
tccgttgagacttcagcaggcccaagccaggacgtagagtgtgactgtcagagagtgtcaggaggtgtcccaagtagcagattggtgtaggaagtccaggygaaggtttgctggcagggagccgagggggctggtgaaagagcaattctggacatcagccacagaatctaagctgggtagggaaggaagagaagccaggat

SEQ ID NO: 205325 - DNA, 201 bp, Homo sapiens
cagccttgccaatatttattattttttgacttctgaataatagtcattctgactggtgtgagatggtatctcattgtggttttgatttgcattgctctgakgttcagtgatgttgagcattttttcatgttggttggccgcttataggtcttgttttgagaagtgtttgttcatatcctttgcccgctttttaatggggct

SEQ ID NO: 205326 - DNA, 201 bp, Homo sapiens
agattttgctgaagttgcttatcagtttaaggagagtttgggctgagacaatggggttttctaaatatacaatcatgtcgtctgcaaacagggacaatttracttcctcttttcctaattgaataccctttatttctttctcctgcctgattgccctggccagaacttccaacactatgttgaataggagtggtgagagag

SEQ ID NO: 205327 - DNA, 201 bp, Homo sapiens
ggaagagaagccaggatgggccagtcaactgggagaagtaggagggtagtaggactggaatgctgaccgactgtgtcagggagcaggctgactgcagtgarggccttaggaggtaggatggtgggaagtgcagggggagcagtcccagggcaagggatgccctggggtggagcctagaacatgggcagcccaagccatcga

SEQ ID NO: 205328 - DNA, 201 bp, Homo sapiens
gtgaggtctagttggtttgagtgctgttcaagacttctctttccatgttgattttccacctagttgtttcatccattactgaaagtcgactattgaagtcycaatattattgttgaattgtctatgtctcccttcagttctgtccgtttttgcttcatgtagttttgagctctgttgttaggttctcatgtgtttataatt

SEQ ID NO: 205329 - DNA, 201 bp, Homo sapiens
ttttgctgaagttgcttatcagtttaaggagagtttgggctgagacaatggggttttctaaatatacaatcatgtcgtctgcaaacagggacaatttgacktcctcttttcctaattgaataccctttatttctttctcctgcctgattgccctggccagaacttccaacactatgttgaataggagtggtgagagagggc

SEQ ID NO: 205330 - DNA, 201 bp, Homo sapiens
gtggaaggggcttcattgaccatgaaatggagattctactggccccactggagtgccatgggaaaggtggaaggatggacaggggatgggatttatttaayttgggacgtagctccacaccaaatgttcagaagtgcggtccggctattgttgacaattacaatgtgaggaaggaggagggggcagggcatgtggagaaca

SEQ ID NO: 205331 - DNA, 201 bp, Homo sapiens
acaattacaatgtgaggaaggaggagggggcagggcatgtggagaacaacaacaaacctggtcattctttatctagagtcttgagaaatatataaaagggmaaatagttgagtaaattaaatcgggaacgtagtcactaaattccaaggcatttagaaaagaaaatttctttatttcgtatgaaagtgcgataagggatag

SEQ ID NO: 205332 - DNA, 201 bp, Homo sapiens
gtgctgggattataggcgtgagccaccgtgcccagcctacttggtaagtttatgcagcttacagctggcagagttgggatttgaattcaaggagttttgaygacaaagtattttttgctgtcacccattacaccattttatgccacctctgaatgttgctgcttcagaagctagctttaattaaatttacttatatacagt

SEQ ID NO: 205333 - DNA, 201 bp, Homo sapiens
tgagaaatatataaaagggcaaatagttgagtaaattaaatcgggaacgtagtcactaaattccaaggcatttagaaaagaaaatttctttatttcgtatraaagtgcgataagggataggactctggagtagacagatgagaaaagagaattctaacatatttctttaattctgtctgcaaaactatatggaacatataa

SEQ ID NO: 205334 - DNA, 201 bp, Homo sapiens
tttgtactaatcaatttgtcaacaactgattgaatcccaattatatgtcatacctgactctggttcactgatagaagctacaattgagtcacatcagtgtraccacaggctcctaatcttttgtttagaagtagttagtggccgtgctttcacttacttttattttattattgtttttaagagcaatagatcttgaattgt

SEQ ID NO: 205335 - DNA, 201 bp, Homo sapiens
aacaaattctggtttaattcgagataagaagttttaatacaagaaaatctgtcatcgcaatagaaagtgtgtttaccattcaaacataataaatataattktagactattggatgctttcctcaaattttgaaattaaggttatactggtttcataaaatgagttggagagattttcatctttttctcttacttataataa

SEQ ID NO: 205336 - DNA, 201 bp, Homo sapiens
gaggagagagagaagtggggagacagactgagggagaaatggaattcatcattggctgtgagtccaaaatatttaaaaatcaagtaagcatgagaggcatytcatagcaagtaggaaaggatgcctccttaaaccttgacatccaaatcccaaagactgaaggttagaacaagctcttctaggattatggtgaataaagaa

SEQ ID NO: 205337 - DNA, 201 bp, Homo sapiens
cgaaagaggacactgaagctcacataagttgaataatttgctaaatgatgggtctggttttgattccaaatttgttggactctacgcttctcatttttgamtgctaggtcataccatgtctctcactgtaggaaaagatgttacaggacactgggttttgtttgtttggttggttggtttcctttttttgagatggagtct

SEQ ID NO: 205338 - DNA, 201 bp, Homo sapiens
tcaccctgagcatttatgttgttggtgatagttgatctctttacacatctgcaagtacttttctatcaccctgagaacttaatgtcttggccactgtagaratcttggttcaaagtcctttttcctctttaatttgtaaattttattctaccgtctcctacctcccactactatagatgagaagtctgatgctaggctgat

SEQ ID NO: 205339 - DNA, 201 bp, Homo sapiens
cccaaagtgttgggattacaggtgtgagccaccacacccggcctttgtttatgaaatttctattatgttctactcatgtatcagtcttctcttgtgtcaayatctgttgttttatctcagtgatttaatgataaatttcaatatctggtatagtaagttcctctttattttccttcttttcaaatgattgttcatgtgagt

SEQ ID NO: 205340 - DNA, 201 bp, Homo sapiens
atgaatgaggtatgagatttctttttttttttttgagacggagtcttgctctgtcgcccaggctggagtgcagtggcacgatcttggttcactgcaagctstgcctcctgggtccatgccattctcctgcctcagcctcccaagtagctgggactacaggcgcccgccaccatgcctggctaattttttgtatttttagta

SEQ ID NO: 205341 - DNA, 201 bp, Homo sapiens
acaatggaagcaagtagagaatcctgaaacagattcatgcatatatagacacttgaaggtcccactgctgagcagtgggcaaaggagtcttttcaataaaygatgctgggccaaatggatatccctataaaaatagaaacagcctatatgtaataaagatatttgtgttttgaaaaattacatatattaggaggaaaagaa

SEQ ID NO: 205342 - DNA, 201 bp, Homo sapiens
ccaaggcgggcagatcccgaggtcaggagttcgagaccagcctgaccaacatggtgaagccccgtctctaccaaaaatacaaaaatcagccgggtgtggtsgtgcccacctgtaatcccagctactcaagaggctgaggcaggagaattgcttgaacccaggaggcggaggttgcagcgagccaggatcgcaccattgcac

SEQ ID NO: 205343 - DNA, 201 bp, Homo sapiens
aaattatgtataagtactacccctttctgatttaataaaatgcttttgtataattgaatagcacctacctgtgcacaaaatgatggattaataatgacttytagcaactaaatttttaaagaactctggcctaggaatattgattcctttgttcattcattcgttcatttagcattatccaacatctgcaatgtgaaaggc

SEQ ID NO: 205344 - DNA, 201 bp, Homo sapiens
caggcacaaaccaccacatctggctaatttttgtatttttggtagagacggggtttcaccatgttggccaggctggtctgaactcctgaccttgtgatccrcccgccttggcctcccaaagtgctgggattacaggcataagccaccacgccaggcctactatagctttttttaataaagttttgaaattgggaagtatga

SEQ ID NO: 205345 - DNA, 201 bp, Homo sapiens
tggaagtaggcgttatcaacaatcaaatcatttaaatcccatttttttttaggtatggcttcacgaaagaaattttgcataaatataaggtaagacatgctttttttttttttttagtattcactttgctgtttctatagagaaatttaaaaagagccaagaaagaccagattgatgctttaggaaaggtaataggccaac

SEQ ID NO: 205346 - DNA, 201 bp, Homo sapiens
gagtcttactcttgtagcccaggctggagtgcaatggcacaatctcagctcactgcaacctccgcctcccaggttcaagtgactctcctgcctcagcctcyggagtagctgggattacaggcacaaaccaccacatctggctaatttttgtatttttggtagagacggggtttcaccatgttggccaggctggtctgaact

SEQ ID NO: 205347 - DNA, 201 bp, Homo sapiens
aatagttgagtgtctctctccatgtgatggcatttgtagcttatactccttttctccctttaacattatctttctaagtgttttttttggttttttttttgtttgttttttttcatttgttttttgtttttttgagacggagtctcgctctgcagcccaggctggagtgcagtggcgtgatctcagctccctgcaacctct

SEQ ID NO: 205348 - DNA, 201 bp, Homo sapiens
ttgagtgtctctctccatgtgatggcatttgtagcttatactccttttctccctttaacattatctttctaagtgttttttttggttttttttttgtttgttttttttcatttgttttttgtttttttgagacggagtctcgctctgcagcccaggctggagtgcagtggcgtgatctcagctccctgcaacctctgcctc

SEQ ID NO: 205349 - DNA, 201 bp, Homo sapiens
aatactgatttttcatttgcactgcaggtgatttgcatgggaaactggatgatctttttttgatcttctacaaggtaaatgatgattttgctaaatattarcatttttcttgggggagggcagtcttagggcagataacaatattagttttactagagatatgtactaatacagatataatgttactgtttttaaccagga

SEQ ID NO: 205350 - DNA, 201 bp, Homo sapiens
ttttttttttgagacagggtctcactttgttgcccaggcaaaggcgatcatggctcactgcagccttggcctgcggggctcaattgatcctcctgcctcarcctctgaagtagctggggctacaggcacaagccagcacacttggctaatttttgtatttttgatgaaacgggatttcaccatgttgcccaggctgatctt

SEQ ID NO: 205351 - DNA, 201 bp, Homo sapiens
tttttacagtttgaggtcttacatttattaataagtctaatccatcttgagttaatttttgcatatggtgataggtagaggtccagtttcattcttctgcrtatgaatagccagttatccccgtgtcatttattgaatagggagtcctttccccattgtttatttgtcctgtgttaatatggtatattacattggttgatt

SEQ ID NO: 205352 - DNA, 201 bp, Homo sapiens
ctggtatcacggacccattagaaccagtcccacgtgactaagagcagccacgtgagtgaagagagtcatttatagcttactcattagtatcaacaaaatgkaaatagttccagacaccaagtggtgaatgcacccatatttgaaaccaaaaggagcaattttaaattcatacatctttttagatggataaagcagtcagcc

SEQ ID NO: 205353 - DNA, 201 bp, Homo sapiens
gccatatctttttttttttttaacacacatctcataaatttttaaaaaattgtactttgggtcttcattctacattattgttgtctgtgtatccattaggrtttgtaccggattgtatttattgtctttatcgcatcataaatgtctagatggtacaggatggggagggatgcagtctgttttattttaattttgttcagg

SEQ ID NO: 205354 - DNA, 201 bp, Homo sapiens
agtcttttttcttttttttcttggacattctaaaagtttgacaatttagtttcaaagaaccaatttttagttttgttgatttttctttattatctttccattctctatttcatttcttactgctctattctttattatttccttttatctgcttatgttgggttcagtttactcttttttccaattttttattttatttat

SEQ ID NO: 205355 - DNA, 201 bp, Homo sapiens
ctaattatgcatgagtggagttgcttatgataaggaataagttccagcatgctctcttttctcccctgattcgccatccatgggctcagttgttcttccartgctgtgcctcctcttcatttattgcatttggcttgtgagagccagcacagagggcacaagactgcttggccagcatggattttctctgcatctctttga

SEQ ID NO: 205356 - DNA, 201 bp, Homo sapiens
ggatcagtacttccttcctatttttagctgagtaatgttactttgtatggatatagcacattgtatttaagggattatatgtttatacatgcatttttgtrttcatctgtggttatattgatttttgtatgcttgcaaacacatagaatatttctgggaaagatacgatacttttaacagtggctgtttctaggggtaggg

SEQ ID NO: 205357 - DNA, 201 bp, Homo sapiens
tttcatttcttactgctctattctttattatttccttttatctgcttatgttgggttcagtttactcttttttccaattttttattttatttatttatttwttttttttttgagatggagttttgctcttgttgcccaggctggagtgcaatggcgtgatctcggttcactgcaacctctgcctcccaggttcaagtgatt

SEQ ID NO: 205358 - DNA, 201 bp, Homo sapiens
ttattctatatacacatcacttattcagtatatatatatatatatatatatatattttttttttttttttttttgagacagggtctcactttgttgcccargcaaaggcgatcatggctcactgcagccttggcctgcggggctcaattgatcctcctgcctcagcctctgaagtagctggggctacaggcacaagccagc

SEQ ID NO: 205359 - DNA, 201 bp, Homo sapiens
tttaaaaattgtcctcttctactgaattgcaatacctctgtattatatatattattcccatacatagtttgatatatttatgaatttttttttttgagacrgagtctggctctattgcccaggctggagtgcaatggtgcaatctcagctcactgcaacctccgcctcctgggttcaagcaattctcctgcctcagcctcc

SEQ ID NO: 205360 - DNA, 201 bp, Homo sapiens
ccgcctcctgggttcaagcaattctcctgcctcagcctcccaagtagctgggactacaggcacgtgccaccatgcccagctaatttttgtatttttagtaragacggggtttcacaattttggccaggatggtttcgatctcttgactttgtcatccacccgcctcggcctcccaaagtgttgggattacaggtgtgagcc

SEQ ID NO: 205361 - DNA, 201 bp, Homo sapiens
attttattctaccgtctcctacctcccactactatagatgagaagtctgatgctaggctgattcttttccttttgtaacttgttctttctctctggcctcktctaatctttttaccaggtggtagggattttgtccccatcaattgtgtgtagaagtcgtgtttcaagcttcaaattgaagtcttttttttaaccatagaa

SEQ ID NO: 205362 - DNA, 201 bp, Homo sapiens
gctcactgcagcctcgacttcccagggtcaagcaatcttcccacctcagtcagcctcctgagtagctaggatcacaggtgcgcaccaccaaacctggcaattttttttttttttttttttgagatggagtcttgctctgtcacccaggctggagtgcagtggtgcaatctcagctcactgcaacctccacctcccgggttc

SEQ ID NO: 205363 - DNA, 201 bp, Homo sapiens
aaaagaaaaaagaaaaagcttccacaagcaagtccacatcaaatactggatttttttttgtaagtgctgtctagcagaaggggagatatgacatccatgcyttttgtttgttttttgaggtggagtctcgctctgttgcccaggctggagtgcagtggtgcagtctcggctcactgcaacctctgcctgccacgctcaagt

SEQ ID NO: 205364 - DNA, 201 bp, Homo sapiens
tgcttttatccagtttcacaatctctgccttttgattatttaatccattctcatatgatgttattattgatatgcctggatttacatctatcattttgccrgtgtgtgtgtgtgtgtgtgtgtgtgtgtgtgtgtgtgtacatgcacaaaaaatacaaagaggaacaaaacagtaattatatgtatgtgtgtgactgtttt

SEQ ID NO: 205365 - DNA, 201 bp, Homo sapiens
tgtgatgatttgcagggtttatgaaccttctttgatttttgctttttaagaattgagctatttctgaccttattgaatgaccttttgagaactaatgttaygtgaacctgaccctctttttctttaaccaggtggtgactatattttctgcttctaattattatgaagaaggcagcaatcgaggagcttacatcaaactat

SEQ ID NO: 205366 - DNA, 201 bp, Homo sapiens
catctatttcctctgcttcccgctcacagatacttcatgcccattatgtcttagaggtgctatttgaaaccaagaaagtcctgaagcaaatgccgaatttyactcacatacaaacttctccctccaaagaggtaacaatctgtggtaagtttcagagcagagttgtccaattaatatttaggagcctcttggtcctacatc

SEQ ID NO: 205367 - DNA, 201 bp, Homo sapiens
tgtggaaagaggagagaggttgggatgagggggaatgatgaattcagttttgggtaagctgatttgaggtactattgagtaggcagttgagtgtacatacrtgtccagagatcagaaatgaagtgtggcctggaacatcatcctgtggtattaacactagataaaaactgaaagcccgggcagggatgagattcccaaagg

SEQ ID NO: 205368 - DNA, 201 bp, Homo sapiens
gaacatcatcctgtggtattaacactagataaaaactgaaagcccgggcagggatgagattcccaaaggagaaagtgaggggagaagagagcctaggatgkaatctgaaggaactaccacatttaaggtgaggtagaggagagcttgcaaaagaggctcagaagagccaggaggaaaaccaagagagtttatggtcacaga

SEQ ID NO: 205369 - DNA, 201 bp, Homo sapiens
gtactaatacagatataatgttactgtttttaaccaggaggctcaaagatttgtagagccatatctttttttttttttaacacacatctcataaatttttraaaaattgtactttgggtcttcattctacattattgttgtctgtgtatccattagggtttgtaccggattgtatttattgtctttatcgcatcataaatg

SEQ ID NO: 205370 - DNA, 201 bp, Homo sapiens
tttccatattaacagggatgttatgtacacggcctgactttaaaagtatattcttttaattccttgttttttcccttctcctccttccacagaatggtctyccctcagagaggaacccgtatgtttttaatggtgactttgtagatcgaggaaagaattccatagagatcctaatgatcctgtgtgtgagttttcttgtct

SEQ ID NO: 205371 - DNA, 201 bp, Homo sapiens
gatttgtcactttcagggcctttgcaggagatgcctgccgtggaagagtaaaactggctcaagcgagagagcagatttttcccggtggaagaacctgactsagcctcttttttccatattaacagggatgttatgtacacggcctgactttaaaagtatattcttttaattccttgttttttcccttctcctccttccaca

SEQ ID NO: 205372 - DNA, 201 bp, Homo sapiens
ttcatgattaggcagtttagtgagtttctaactggggctatttaatcagtgtgggttccccaacccttgccttaggtgggtcttaaaatgaacactcacarccttctcctatattcttttaggcctgatctccgtggaagaatttcgtgccatgtggaaactttttagttctcactacaatgttcacattgatgattccca

SEQ ID NO: 205373 - DNA, 201 bp, Homo sapiens
ggtcattctcccttcacaggtaggttctccaataaggagctactgaacagctggtggagtataaatgtcttatgacccagtggctgctccctcaaacccayacctttctagaaccaaggaaaaatgtttagtttttccacttctcttaattgtaccaggttaatgtaacgttttctaaaaattatcctcagtttacctaaa

SEQ ID NO: 205374 - DNA, 201 bp, Homo sapiens
tgtaaatcagttgccatcagttgaagaagacgtacagatgacttggcaatctgaaggattgtggcctatttcaaatgaacttgatatttggaaaatctccrcagtcacttggattgagagccagaaaatgagggaaggggtcctttgagaaacccttctaggtcccctcagggagtattctccaaactccactgcacacct

SEQ ID NO: 205375 - DNA, 201 bp, Homo sapiens; identical to SEQ ID NO: 36079

SEQ ID NO: 205376 - DNA, 201 bp, Homo sapiens
gggagtatagccgtgagaatgaccagaggtcactcttgttgccatctcggttttggtgggttttagctggcttctttactgcaactgttttattaggttgstgcaaaagtaattgcggtttctgcgtgctctggttcaaacacctctaacattattgttcctggaccaaactgagggttgggctgctatttctcatggccc

SEQ ID NO: 205377 - DNA, 201 bp, Homo sapiens
aaaataaaatataatccattatttgctcaaaaaaggcatatttctcccttttagcaagctattttcaacttggaaaactaacaacaaccctgaattaaactttttttttttttttttgagacagagtcttgttctgttgcccaggctggagtgcagtggcgtgacctcagctcactatgacctccacctcctgggtttaag

SEQ ID NO: 205378 - DNA, 201 bp, Homo sapiens
aggctgaggcaggcggatacctagagaccagtctgaacaacgtggcaaaacccactccctacaaaaaatacaaaaattagccgggcatggtggcatgtacytgtgatcccaactacttgggaggctgaggtggaaggatagcttgagcccagaaagttgaagttgcagtgagctgtgattgtgtcactgtgctccagcctg

SEQ ID NO: 205379 - DNA, 201 bp, Homo sapiens
gctaagaccattggaaaagtgcagtattagagtgggagtgtcctgattttccaggtaccatctgtcacggcttcccttggctaggaaagggaattccccgwccccttgcccttcctgggtgaggcgatgcccagccctgcttctgctcacactccgtgggctgcacccactgtccaataagcccgagtgagatgaacccgg

SEQ ID NO: 205380 - DNA, 201 bp, Homo sapiens
acttccaagaacaacacaatgtcaccgaataatgtcataaaatttgtgttttaaaatgcagtaggaggagagagttggagaggggcaagagtgaatacacrctcgtcaattaggaagtagttgaaggttaaagggatagataatgggttctcatttagactagggtagtggtgatagagatgcaaagaaatagattcaaga

SEQ ID NO: 205381 - DNA, 201 bp, Homo sapiens
acggcttcccttggctaggaaagggaattccccgaccccttgcccttcctgggtgaggcgatgcccagccctgcttctgctcacactccgtgggctgcacycactgtccaataagcccgagtgagatgaacccggtgcctcagttggaaatacagaaatcacctgtcttctgcgtcgctgacgctgggagctgtagactgg

SEQ ID NO: 205382 - DNA, 201 bp, Homo sapiens
cgtgcccttggatggttattttcagcttttctatgtacagtgataggtgggctgcagcaatggcactaaaaacaagtagatggatgagttagagtatttgrtaactggaaagaatcttagagatcacacaatccaaagttctcattgtttacatgagaaactgaggacctcggagtttcgttgatttgcctgaggttactt

SEQ ID NO: 205383 - DNA, 201 bp, Homo sapiens
aatttcatttttgaaaaataaaggtaagatttcctacacactctagtttgtaaaagaaactaagtgcttggccgggtgcagtggctcacgcctgtaatccsagcactttgggaggccaaggcgggcggatcacgaggtcaggagatcaagaccatcctggctaacacggtgaaaccccgtctcttctaaaaaatagaaaaa

SEQ ID NO: 205384 - DNA, 201 bp, Homo sapiens
ccttggccttccaaagtgctgggattacaggcgtgagccacccggccctaaacctctattctgatagtatgctagactagatgttctggagggccttcttrttaacaaacagctagattttggaggatgtagaatgttaatgcatttaccagcctcacagtaacgtgaatcttccagctgcatcttcactttccgtgaaag

SEQ ID NO: 205385 - DNA, 201 bp, Homo sapiens
ccagtgatcctcaattaagggatccacccttcagggatgagaaccatattggattcttggggggaatctgtgggagtgtattgtttgaaaaagcgtatttktgtgtgtgtgtatgttggagatacaaagtgaatacacttggattgagccctataattaatatggtttgacaccttcattggtaagatggggccttgctta

SEQ ID NO: 205386 - DNA, 201 bp, Homo sapiens
catgtggatatccagttgtctcagcactgtttgttgaaaagattgttctttccccattgaatcctcttagcaccattgtcaaaaatcaattgaccataaakgtttatttctgggctctcaattctattccagtgatctgtatgtctttcttatgccagtaccagtgtctggattactatagctttttttttttttttttga

SEQ ID NO: 205387 - DNA, 201 bp, Homo sapiens
tactctttgatttatgatgagtttatctggacttaattctatcatgtcaaggagctcattgaatgcttgttgcttttgcaccattgtgaagttgaaaatcrttaagtcagggaccatttgtagacaggaggatgggtgtggattatatgcaaatactacgccattttatacgagggacttgagcatccacagattttagta

SEQ ID NO: 205388 - DNA, 201 bp, Homo sapiens
tcactgggacagccgcacattctggcagatggcagatatagaaaatctgtaaacaaaaataacagtaatgaagactgtggtcctaggccagagttcagccrtatcctcttctcatcatgctttgaacagctgaggttatagatgcttctcctcttcgcttaaagccttttgctattagaggattcattttctttccagttc

SEQ ID NO: 205389 - DNA, 201 bp, Homo sapiens
attatggaaaccagtcatttactaaatgtattgcggaaactgagaatgtacttaccatcgaggggggaaaagtgaaggagatgctttaggagacaccctcrgataaacaggtttccacatttgtgttgggaaacagcaagggcttcctcaggctatgtgctcaacaggacaaaaacctggcccagagccacagcaggagac

SEQ ID NO: 205390 - DNA, 201 bp, Homo sapiens
taaaagatatttggtttatttccctgatcttccctaatcccagaaacagaaattcttttttttttttgagatggagtctcactctgccacccaggttggastgcagtggtgtgatctcagctcactgcaacctccgcctcccgggttcaagtgattctcgtgcctcagccacccaagtagctgggattacaggtgtgcgcc

SEQ ID NO: 205391 - DNA, 201 bp, Homo sapiens
cctgaccctctttttctttaaccaggtggtgactatattttctgcttctaattattatgaagaaggcagcaatcgaggagcttacatcaaactatgttctrgtacaactcctcgatttttccagtaccaagtaactaaagcaacgtgctttcagcctcttcgccaaaggtgtgtatactataccgagagtgctgagcactg

SEQ ID NO: 205392 - DNA, 201 bp, Homo sapiens
gagaggaacccgtatgtttttaatggtgactttgtagatcgaggaaagaattccatagagatcctaatgatcctgtgtgtgagttttcttgtctaccccartgacctgcacttgaacagagggaaccacgaagattttatgatgaatctgaggtaacccaggcctttagattttctcttttaaaagtttcgcactctggaa

SEQ ID NO: 205393 - DNA, 201 bp, Homo sapiens
gtgagtgaagagagtcatttatagcttactcattagtatcaacaaaatgtaaatagttccagacaccaagtggtgaatgcacccatatttgaaaccaaaargagcaattttaaattcatacatctttttagatggataaagcagtcagccctcagaaacgtaactgaatgtaaagaaaagaagatccccacacccactcag

SEQ ID NO: 205394 - DNA, 201 bp, Homo sapiens
acagctctatctggtcttgcccctttctcttctctatccagaagtgtatgtgacaaatagttgagtgtctctctccatgtgatggcatttgtagcttataytccttttctccctttaacattatctttctaagtgttttttttggttttttttttgtttgttttttttcatttgttttttgtttttttgagacggagtctc

SEQ ID NO: 205395 - DNA, 201 bp, Homo sapiens
gcttccttgaatctggcctggaggaactggagggaacaaaaggtaaactcactgtcagttcagtggtacttcaaactctgatctgtttccttcatctgccrtctgttatttacttttcagagtcctcatgttacttgtttattgctgtgggacagattaccaaaaaatctagtggcttaaaacaacacatgtttatgatct

SEQ ID NO: 205396 - DNA, 201 bp, Homo sapiens
cgggaggcggagcttgcagtgagccgagatcgcgccactgcactccagcctgggggacagagcaagactctgtctcaaaaaaaaaaaaaaaaaaaaaaaarggaaactaagtgcctaccacagagaatttgtctatcactgaaccacggccaccagtataacagaagtattgtttaatattgttttgtttaaagacatggt

SEQ ID NO: 205397 - DNA, 201 bp, Homo sapiens
gtgacattggaacaactgtatctagacatagccataatttaatggctgaggattgaataggcatttggttgggagagccagctgtatagctacattgtccrctattttttttggagcctgagtaattatgctatcatttacaatttgtgtagcagcctcatcaggtcctactcttggcgtccccaccatggaaacctgagt

SEQ ID NO: 205398 - DNA, 201 bp, Homo sapiens
agccaccttgccagttatttttcaagtaactccatccgattaaatggcaaactaggtaaccactttactagatctcccgtggctctcaattgcagaaaggwatcgagctaaagagcagcttgggtggggttatgaaatgtttatggctggagtcctgtaaattttagctggcaaagcctaagaccagtaagcttgaaaaca

SEQ ID NO: 205399 - DNA, 201 bp, Homo sapiens
acctacctgtgcacaaaatgatggattaataatgacttttagcaactaaatttttaaagaactctggcctaggaatattgattcctttgttcattcattcrttcatttagcattatccaacatctgcaatgtgaaaggcaccatgtaggtgccagagattcaagggctactttggaagttgcccgtggggctaatagtcta

SEQ ID NO: 205400 - DNA, 201 bp, Homo sapiens
cctcgggtgatttgcctgcctcggccttccaaagtgctgggattacacacatgagccactgtgcccagtcctgagtctggcttcttttgatcatcattacrtttgtaagaatcatccttgtaatttggtcatttttattgctgaataatattccattttactaatataccataattgatccattcgattgtgtatgggcat

SEQ ID NO: 205401 - DNA, 201 bp, Homo sapiens
ttcttttttaaattaaaaaacatacctttttttttttttttttaaagtcaggatttcactctgtcacccaggctggagtgcagtggtgtgatcacggctcrctgcatccttgacctcccagcctcaggtgatcctcccacctcagcctcctgaggagctgggactacagatgtgcaccaccatgcctggctaattttttgt

SEQ ID NO: 205402 - DNA, 201 bp, Homo sapiens
tggtgcacgcctgtaatcccatctactcaggagactgaggcacaagaatcgcttgaacctgggaggcggaggttgcagtgagccaaaatcgtgctactgcmctccagcctgggtgacatagtgagactccatctcagaaaaaaaaaaaaaaatttggttacctctctttttctcacgcagcctttctgtccattaggctat

SEQ ID NO: 205403 - DNA, 201 bp, Homo sapiens
atacctttttttttttttttttaaagtcaggatttcactctgtcacccaggctggagtgcagtggtgtgatcacggctcactgcatccttgacctcccagsctcaggtgatcctcccacctcagcctcctgaggagctgggactacagatgtgcaccaccatgcctggctaattttttgtattttttggtagagatggggt

SEQ ID NO: 205404 - DNA, 201 bp, Homo sapiens
acctggaaatcatatttaatgccattgacactgatcactcaggtaaataaatgaacttggatgagtccatttaaaaagtgtatgtgtgtgtgtatgttggrgatacaaaatgagtacactttgattgagccctataattaatatggtttgacaccttcattggtaagatggaggccttgcttatgcatactgttaaatgaa

SEQ ID NO: 205405 - DNA, 201 bp, Homo sapiens
ggcactcttgtcaaaaatcagttgaccataatataagggtttgtttctggcctttaaattgtattctatttgtctatgtctatgtctatcctaatgctagkaccacactgtcctaattattgtaactttacaaacttactacagttttaaaactggtaaatgtgagttgaacgttgcacttctttttaaagattgttttgg

SEQ ID NO: 205406 - DNA, 201 bp, Homo sapiens
agacagggtctcactctgtcacccagactagagcacagtaacatgatcatggctcactgcagcctcgacctcctgggctcagatgatcctcctacctcagsctcccgagtagctgggactagaggcacgcaccaccatgcccagctaatttttttgcattttttgtaggggttttgccatgttgcccaggcttgtctcgaa

SEQ ID NO: 205407 - DNA, 201 bp, Homo sapiens
gcaccaccatgcctggctaattttgtatttttagtagatacggggtttcttccatgctggtcaggctggtctcaaactcccgacctcaggtgatccaccckcctcggcctcccaaagtgctgggattacaggcgtgagccattgcgcccggcctaaataggatatttttaggaaccagaaggttatttaacatttccagat

SEQ ID NO: 205408 - DNA, 201 bp, Homo sapiens
ttaacctgtggcctctgtctgtttagttgtttagcccaactcttgtggtctttatgttttatgtatgaagtttgttaaaagctttaatatatatgtatagrgtgaaactgggtcaccttgatgtgctggtcactgagtcacaggactgtgactttggggaggccacctaacttctctgggcgtggtttcctctcctataaa

SEQ ID NO: 205409 - DNA, 201 bp, Homo sapiens
aggctggtctcaaactcccgacctcaggtgatccacccgcctcggcctcccaaagtgctgggattacaggcgtgagccattgcgcccggcctaaataggawatttttaggaaccagaaggttatttaacatttccagatatcggggccaccagattaatggtcttaactctggggcatggagtatcttgagacacgttggg

SEQ ID NO: 205410 - DNA, 201 bp, Homo sapiens
gtctgtctgccacagtcctcaaatagctgtttcatggattctgtccaggttttatagctttgtcccatgagagagaaagagtagagtgggtaaaatgtccyttttccatcttacccagaccagaaccttctgtgaagctttttgatttgatttatgaacattcagggttaatttaaggaatttctttaaactcaagccatc

SEQ ID NO: 205411 - DNA, 201 bp, Homo sapiens
tccaaagaagagaaagcaagggtagtccagggagagggaagagtgggaacaataaagacagagtgctgggctgggagaggaaagcatcgccagtgtggggsagatgcaaggtcccggggtgacatcttagatcggaggagtgtctaactatgtttaattgtgttacagagtctgaagagaggatcatgctggagatacagg

SEQ ID NO: 205412 - DNA, 201 bp, Homo sapiens
tgagaggttctttgggtatttctgcctgtgatttgtcctttaactttatctgctttgttaccaagaaagaatgaaaatcatgtcagaaagtttatttttawgtaaagagaaaaacaaatccgttacagctaaatagaatcctctgaagtgtttaacaggggaaaaattgaatgttgcagttaaattttctgtaggttctga

SEQ ID NO: 205413 - DNA, 201 bp, Homo sapiens
tctgtgccagtaccacactgtcttgattgctgtagctttgtagtaagttttgaaatagggaagtgtgagtccttcaactttgttcttttgcagtgttgaarttgttcttcattattgttttggctatttggggtcccttgcaatgaatttgaagatcaaattttccatttctgcaaaaaagcctattgggattttgatagg

SEQ ID NO: 205414 - DNA, 201 bp, Homo sapiens
ggcatgaatcttctctcagggatttagaagggaatacatacctcttcatttattattttgaattgatttgtgttttagtggttgtaactctaaaaagattrtagattttattagagtatataaaagtataaattttaagaaaaatctatgactgcatgataaagaactaagtgggtaacttctatatatggaaaaaaattt

SEQ ID NO: 205415 - DNA, 201 bp, Homo sapiens
tctggcaggtagaagtgaatttgacaatctaattaaactatttgcatttctagcgtctgatagtggtggcagggacttgatgtagcagtgcctacctcatsacatgccctgactcaggtttttgaagagtctctaatggttcatttccagcctcatcaggcatcacgtctctgactggcagatgattcatctcagcagtgg

SEQ ID NO: 205416 - DNA, 201 bp, Homo sapiens
ttctatttttaacagctcattgaacttcaaaaatttcatgattatttataataaaatttaaaattggggccataacttcaaaaccatcttccgtttaagayggtgttaggaaagggggagagattgtgatgaaaatttgctattattttaattgtgagatgcatttttttacatgtacatctaaatatgccccgtagtttt

SEQ ID NO: 205417 - DNA, 201 bp, Homo sapiens
gcggagcttgcagtgagccgagatcgcgccactgcactccagcctgggggacagagcaagactctgtctcaaaaaaaaaaaaaaaaaaaaaaaaaggaaaytaagtgcctaccacagagaatttgtctatcactgaaccacggccaccagtataacagaagtattgtttaatattgttttgtttaaagacatggtgctaca

SEQ ID NO: 205418 - DNA, 201 bp, Homo sapiens
atttttgtatttttagtagagatggggtttcgtcacgttggccaggctagtctcaaactcctgacctcaagtgatctgcccgcctcatcctcccaaggtgmtgggattaaaggtatgaaccaccatgcctggcgaaggtaacctttttgaaggaggacatgcatttttatatatgagtagttaaatttgtctctgtgtaat

SEQ ID NO: 205419 - DNA, 201 bp, Homo sapiens
tgcaggctctaactgcatgcacctcagttggccgggctcttcttgctctaggctgttgtgttcggagatggtagcctgtttgtccacagtaatttgtgaattttttttttttttgtgacggagtctcgctctgtcgcccaggctagagtgcagtggtgtgatctcggctcacggcaacctccgtctcccaggttcaagcaa

SEQ ID NO: 205420 - DNA, 201 bp, Homo sapiens
tcaaaatattttgagtatttcatgcagcagatctaggggaaaatggcaaattaaacacagttggccccgttgtgtctgttttctgtcctctctctctctcttttttttttttttgagacagagtctcgctctgtttcccaggctgcagtgcagtggcacggtctcggctcactgcaacctctgcctcccggattcaggtga

SEQ ID NO: 205421 - DNA, 201 bp, Homo sapiens
ttacaaggcaagaaaataggggatttatccccttggaaaaagaatttgcaaaatcaaacattaaagaggattctgagatttggcactaaaattgtacccgrgaatgcagggccatgcgctgaggacattggctgagtggccaggagttagtgctgctggggacactgggtagtagccttgttttcctccgatgcagtcata

SEQ ID NO: 205422 - DNA, 201 bp, Homo sapiens
ccttgttttcctccgatgcagtcatagaaatcacatcagactgtgatgatttgcagggtttatgaaccttctttgatttttgctttttaagaattgagctrtttctgaccttattgaatgaccttttgagaactaatgttacgtgaacctgaccctctttttctttaaccaggtggtgactatattttctgcttctaatta

SEQ ID NO: 205423 - DNA, 201 bp, Homo sapiens
tactgagacagttgttatggaggcctgcgttagtgagacctggcctgccacattttgatgaccaatcagttccactctttgaggctgtgagagcttgagtragccatacaacctccatgaactgcaattttttttttcagctgcaatattatcttgagcttccaccccataagaggttgtattctggataaaataagtatc

SEQ ID NO: 205424 - DNA, 201 bp, Homo sapiens
ccatctctacataaaatacaaaaattagctggacgtgatggcgcacacctgtaatcccagctactctggaggctgaggcaggagaatcacttgagcctggraggtcaaggctgcagtgggccaagactgcaccactgcactccaggttgggcaataaagtgagaccctgtctcaaaaaaaaaaaaaatccactgaagggaa

SEQ ID NO: 205425 - DNA, 201 bp, Homo sapiens
atagaaacagagagtagtatggtggttgccaggggctgagaggtggaggatatctggagatacaggtatatcaaatcatcacattgtataccttaaatatrtacaattttatttgccagttataaatatgttatagttttatgtcaataaagctggaaaaaatcctctgtgtgtgtgtgtgtgtgtgtgtgtgtgtgtgtg

SEQ ID NO: 205426 - DNA, 201 bp, Homo sapiens
ggactacaggcatgcgccaccatgcccagctaatttgtgtatgtttagtagagatgaggtttctccatgttggccaggctggtctcaaactcctgacctcrggtgatttgcccgcctcggcctcccaaagtgctgggattacaggtgtgagccaccgcgcccagcttgatctctcttttttcttattgttctcttagtggt

SEQ ID NO: 205427 - DNA, 201 bp, Homo sapiens
cgggtggatcacgaggtcaggagatcaagaccagcctggccaatatggtgaaaccctgtctctactaaaaatacaaaaattagctgggtgtgatggcacaygcctgtagtcccagctactcaggaggctgaggcagaagaatggcttgaacccgggaggcggaggttgcagtgagccaacatcacgccactgcactccagc

SEQ ID NO: 205428 - DNA, 201 bp, Homo sapiens
ggtgtatatgtattgcattttcattatccaatccaccattgatggacacctaggttgattccgtgtttttgctattaggaatagttctatgatgaacatamaactgcatgtgtttttggtacaatgatttattttcctttgggtatatacctagtaatgggattgctgggtccaaatgggagttccatttttagctctttg

SEQ ID NO: 205429 - DNA, 201 bp, Homo sapiens
tctatgcctggctcccaatcggtacaatcgttgacaatgaaatcctggtcatccatggtgggatatcagagaccacagacttgaatttactccaccgtgtrgagaggaacaaggtaagaagtaatgttggcatgaatcttctctcagggatttagaagggaatacatacctcttcatttattattttgaattgatttgtgt

SEQ ID NO: 205430 - DNA, 201 bp, Homo sapiens
gaaattgaaatatgtcaatcagtccaatcagtgtttatggcctactaaatgctcaattctttttttcccctgttttcttttttaaattaaaaaacatacctttttttttttttttttaaagtcaggatttcactctgtcacccaggctggagtgcagtggtgtgatcacggctcactgcatccttgacctcccagcctcag

SEQ ID NO: 205431 - DNA, 201 bp, Homo sapiens
attattttttgacttctgaataatagtcattctgactggtgtgagatggtatctcattgtggttttgatttgcattgctctgatgttcagtgatgttgagyattttttcatgttggttggccgcttataggtcttgttttgagaagtgtttgttcatatcctttgcccgctttttaatggggctatttgttttttgcttgt

SEQ ID NO: 205432 - DNA, 201 bp, Homo sapiens; identical to SEQ ID NO: 36081

SEQ ID NO: 205433 - DNA, 201 bp, Homo sapiens
ttgtggaataatatttcattgtatgaatatgccacattgtatttatccattcatcaattgatagacatttggattgtttcagctttgttttttgttttttkttttttttgagacagtcttgctctgtcacccaggctggagtgcagtggggcgatctcggctcgctgcaacctccgcctcccaggttcaagcgattctcct

SEQ ID NO: 205434 - DNA, 201 bp, Homo sapiens
cacccactctgagcctcatactgggtatcttcactgtacatgtgaataagccccaaatgctttggtgtctgagttccttgatctcctgagccccagaaacyccctcatctcctcaacttcagctgctcactcccatttactggcccccatggtcacctggaaaagccccacctctggaatcttcatgattatcatcctatt

SEQ ID NO: 205435 - DNA, 201 bp, Homo sapiens
ggctgcagggcctgggaggataaattatgagggagagcagctggccccatgctgccctggctctcccaaggaggttgcattctttaaaatcatattttaayaaatcatttgggctttgttattgttgttgttaggaaaactttctgtgagccagtgggctttttgcatggagaacattttggggctgaacttaccatggag

SEQ ID NO: 205436 - DNA, 201 bp, Homo sapiens
ccctaaggcacagatcgctcatgctgttgtttgtggcttaagaatgcctttcagcggttttccgccctgggcgggccaggtgttccttgccttcattcccrtaaacccacaaccttccagcgtgggcgttatggccatcatgaacatgtcacagtgctgcagagattttgtttatggctagttttggggccagtttatggc

SEQ ID NO: 205437 - DNA, 201 bp, Homo sapiens
tgtgtgtgtatatatgtgtgtgtgtgtatgtgtgtgtatatatacgtatatatgtatgtatgtgtgtgcatatatatatgtatatatatgtgtgtgtgtgwgtatatatatatatatgcatgccatggaatactactcagccataaaaaagaatgaaatcatgtcttttgcagcaacatggatggaacaagaagccattat

SEQ ID NO: 205438 - DNA, 201 bp, Homo sapiens
ctatgtacagtgataggtgggctgcagcaatggcactaaaaacaagtagatggatgagttagagtatttggtaactggaaagaatcttagagatcacacartccaaagttctcattgtttacatgagaaactgaggacctcggagtttcgttgatttgcctgaggttacttagctggcaactgggtaagtcagggcccaaa

SEQ ID NO: 205439 - DNA, 201 bp, Homo sapiens
gtgtgtgtatatatgtgtgtgtgtgtatgtgtgtgtatatatacgtatatatgtatgtatgtgtgtgcatatatatatgtatatatatgtgtgtgtgtgtrtatatatatatatatgcatgccatggaatactactcagccataaaaaagaatgaaatcatgtcttttgcagcaacatggatggaacaagaagccattatc

SEQ ID NO: 205440 - DNA, 201 bp, Homo sapiens
catttgttcaacaaatatttattcctgctatgttccagagactattccaggctcaggaaatacagcagctaactcaacagatcaaaatcccagctcttatrgagattacattctagtggaaagacacagacaatgacaaagaagtaaatatcacatggtgataagtgctatggagaaaaaataaggaaggagataggcgat

SEQ ID NO: 205441 - DNA, 201 bp, Homo sapiens
aaatttcatgattatttataataaaatttaaaattggggccataacttcaaaaccatcttccgtttaagacggtgttaggaaagggggagagattgtgatkaaaatttgctattattttaattgtgagatgcatttttttacatgtacatctaaatatgccccgtagttttcagcatgcatgaaatataagaggattttta

SEQ ID NO: 205442 - DNA, 201 bp, Homo sapiens
catctcctcaacttcagctgctcactcccatttactggcccccatggtcacctggaaaagccccacctctggaatcttcatgattatcatcctattctctsattgcttggtcttctttgaaacctctgagccttagatacttcacatgtgtctctatctcccagcctccagttttatatagattttgggaatacaggtgca

SEQ ID NO: 205443 - DNA, 201 bp, Homo sapiens
attctagtggaaagacacagacaatgacaaagaagtaaatatcacatggtgataagtgctatggagaaaaaataaggaaggagataggcgatgaggggagrggagaccatgtaagaaggggtggtcaggaaaggcctcccgcaaaggtgatgtctgagcaaaagctgcaggctctaactgcatgcacctcagttggccggg

SEQ ID NO: 205444 - DNA, 201 bp, Homo sapiens
cctttcttccccatccatcttccctccatcttttgttggctgtcacttgaaccagttaacagatcatacaccttagtcatattttaggcagttaaaaaaaytaatgtgtgaaatgtttagtgttcccaaaccaattgctagcaaactttggctacaattccttgatggaaaagccagagatattagtaacttgtatttttc

SEQ ID NO: 205445 - DNA, 201 bp, Homo sapiens
cccagtctccaactaagttataattccttgaagatgaagtctatctaataatcatccttgcatctctagatgcctaacgtagtagtcagtgctcaagtagygtttacattaattcagctgtgtatctttaaatttcaatggtggattatattgtttgtggccaggatcaactgcctgtagtcaccagtaaagtgtacaatg

SEQ ID NO: 205446 - DNA, 201 bp, Homo sapiens
ctgcagtgagggagagagagtggactcagttctgacttcaacaaggctgagtggggatttataaccaaggagcagagtggggatcagtgaatggaaaattmccaggaggaaaaacatcaaaggtaagaggtttctggctattaccaggaggaaaaacatcaaaggtaagacgtttctggctataccaacttgataggatta

SEQ ID NO: 205447 - DNA, 201 bp, Homo sapiens
tatttttggaagtctttttaaaaatttattttattattttattttattttttattttgagacagtctcgccctgtcacccaggctggactgcagtggcgcwatctcggctcactgcaaactccgcctcccgggttcacgccattctcctgcctcagcctcccgagtagctgggactacaggcgcccgccaccatgcctggc

SEQ ID NO: 205448 - DNA, 201 bp, Homo sapiens
ttgaccatactactactttcttctggatcttttgtctaccatttcttagttgtgaacataaatatgtcatggaattataatgacaactatgttgggaagaracaaccaccaaaagataactcacccctttcaccttaacgtatcaactgtttcaccttattatcccagctttgggttttattcagttgtaacatattggta

SEQ ID NO: 205449 - DNA, 201 bp, Homo sapiens
ctcttcctgtttttcttctattcttttttcttcttctactcttaattaggtaggtatgttccccatggagcaaaagctgaactttggatttgaatgtaaawaaaagtgtatgtttctaattggaaaattgattgagaagagagaatggacactaacttctaaccaagcagcacaattttataaaacaaagagctggtaaag

SEQ ID NO: 205450 - DNA, 201 bp, Homo sapiens
gtgtttctttttccaggtgtatatcatagcacatgttccagtggggtatctgccatcttcacagaacatcacagcaatgagagaatactataatgagaaaytgatagatatttttcaaaaatacagtgatgtcattgcaggacaattttatggacacactcacagagacagcattatggttctttcagataaaaaaggtaa

SEQ ID NO: 205451 - DNA, 201 bp, Homo sapiens
ctaacgtagtagtcagtgctcaagtagtgtttacattaattcagctgtgtatctttaaatttcaatggtggattatattgtttgtggccaggatcaactgyctgtagtcaccagtaaagtgtacaatgcagtagcaaacctctggaaaccatggctagatgaagaagctattagtactttaaggaaaggtaagtgaaagac

SEQ ID NO: 205452 - DNA, 201 bp, Homo sapiens
gtgctcaccaccatgcctgggtaatttttgtgtttgtagtagagatggggtttcaccatattggccagacacttcttgaacttctgacctcaagtgatccrcctgccttggcctcccaaagtgctgggattataggcatgagccactgcacctggcccttggctacacttgattgttcttgcttctaggctccccggacct

SEQ ID NO: 205453 - DNA, 201 bp, Homo sapiens
catttgctttgatgcccttttgttaagttgataaagtccttatttaaggcctggcttaaatagtctcttcactctctaattccctgggctacacctttttktttgtttgtttgtttgtttttttgttttttgagccagagcctcactcagttgcccaggctgaagtgcagtggtgcgatcttggctcactgcaaccttcgc

SEQ ID NO: 205454 - DNA, 201 bp, Homo sapiens
gccttatatcatcaacagtgtacaaatatagtgaccctaatagttttataatttcatctctttttcttataaatagaagagatgatatatttgctttctawattttaattaatatactttcaatcttgggtatccaaatgtcatttagttatgatgaatgtgcagaaagattctcatgaggcctttttgtgtttctttttc

SEQ ID NO: 205455 - DNA, 201 bp, Homo sapiens
ttatcccccagtctccaactaagttataattccttgaagatgaagtctatctaataatcatccttgcatctctagatgcctaacgtagtagtcagtgctcmagtagtgtttacattaattcagctgtgtatctttaaatttcaatggtggattatattgtttgtggccaggatcaactgcctgtagtcaccagtaaagtgt

SEQ ID NO: 205456 - DNA, 201 bp, Homo sapiens
ttattggtaagttggcagatttcagagctgaccccatatttatgcatatctttgcagttttcattaatttagttgaatttttctcaggacagtcatgtgaratgtattttatgttgaaatctcctggcatccttcttcttttttatacttgcaatgttatcaggacttactaagtgtgagctgatgaagttagtctttgga

SEQ ID NO: 205457 - DNA, 201 bp, Homo sapiens
ttttagcctcttataaatcttcagtcaggtagtgaaataggctgggatttccagcttattttttgtattatattttgttaattttcttttataggattatytgtagggtagaggtaagtgaagagtagtctatcaactctttagctgtaatctgctgttttaaaatggaagtctgcagtgataggtatagcaacgcatcat

SEQ ID NO: 205458 - DNA, 201 bp, Homo sapiens
gtaaattctttgtttgtggctcctgctgttacaccagtgaagagtgttttagaaaaacagaccaacaatcctggtatcagactgtttcagtatgatcctcrtgattataaattattggtaagttggcagatttcagagctgaccccatatttatgcatatctttgcagttttcattaatttagttgaatttttctcaggac

SEQ ID NO: 205459 - DNA, 201 bp, Homo sapiens
ggtgtcccatcaccagttcagaggcgtgggtggaatgatgcctttaaacctcctctcccctgagattgtagcagctgtggtttgtctgacctttttttccragtagtctctagcaagatccatatgtgttaccattttttggattttatatttcacaatgtctctcatcttaagcccctaatcataaaagtagaagttgat

SEQ ID NO: 205460 - DNA, 201 bp, Homo sapiens
tatttattgagacaaagtcttgctctgtcacccaggctggagtgcagtggcgcaatctcgcaatcccggctcaccgcaacctccgcctcccgggttcaagsgattcttctgccccagcctcctgagtagctgggattacaggcacccaccactatgcccagctaattttttttttcttttttgtatttttggtagagatgg

SEQ ID NO: 205461 - DNA, 201 bp, Homo sapiens
aggccctaagaaaaagccatatgagtttcataatgatatccattccaatgatagccctcaaagatccagttaaacactggagtataatattaagttaaaartcatagaagccatcctgagaaagtcttaaaggcaaaagtgatttggggcagagatgtcttgcttgaggggcctcaaactttgtcatcccagaggccctag

SEQ ID NO: 205462 - DNA, 201 bp, Homo sapiens
atccagttaaacactggagtataatattaagttaaaagtcatagaagccatcctgagaaagtcttaaaggcaaaagtgatttggggcagagatgtcttgcwtgaggggcctcaaactttgtcatcccagaggccctagtgagacctgttgtcattttctactacttggacatgaaaggcagcttctcaaaaataacttctg

SEQ ID NO: 205463 - DNA, 201 bp, Homo sapiens
aaagtcatagaagccatcctgagaaagtcttaaaggcaaaagtgatttggggcagagatgtcttgcttgaggggcctcaaactttgtcatcccagaggccmtagtgagacctgttgtcattttctactacttggacatgaaaggcagcttctcaaaaataacttctgacaaattcaaacccaactgacctgctagtaccat

SEQ ID NO: 205464 - DNA, 201 bp, Homo sapiens
ctctttatagtttggattacatgctattatgttctttcatcatttttaaaattgaaaaagtgatacaggttttttattgagcctcccttcctccctccctyccttccttccttccttccttccttccttccttccttccccccctcctcccccctccctccctctccttctttcttatttatttattgagacaaagtcttg

SEQ ID NO: 205465 - DNA, 201 bp, Homo sapiens; identical to SEQ ID NO: 36097

SEQ ID NO: 205466 - DNA, 201 bp, Homo sapiens
ttctactacttggacatgaaaggcagcttctcaaaaataacttctgacaaattcaaacccaactgacctgctagtaccataataaaaataataaggtgttrtgactacaagaaagaatagagaaaattaaaggggcagtgatccatcatgattgaaagctagggaaagccgtgcatagtgagtaggctcagggcaaagaaa

SEQ ID NO: 205467 - DNA, 201 bp, Homo sapiens; identical to SEQ ID NO: 36098

SEQ ID NO: 205468 - DNA, 201 bp, Homo sapiens
aaagccgtgcatagtgagtaggctcagggcaaagaaagctgggccagatcttagtgcccagctctgaaagtgccattgcaacagacccttgggtgtcccaycaccagttcagaggcgtgggtggaatgatgcctttaaacctcctctcccctgagattgtagcagctgtggtttgtctgacctttttttccaagtagtctc

SEQ ID NO: 205469 - DNA, 201 bp, Homo sapiens
tctaggctccccggacctctgggtagtgcccagcacattgtcttatagttaattggttacattttatcccccagtctccaactaagttataattccttgargatgaagtctatctaataatcatccttgcatctctagatgcctaacgtagtagtcagtgctcaagtagtgtttacattaattcagctgtgtatctttaaa

SEQ ID NO: 205470 - DNA, 201 bp, Homo sapiens
gatactttatgataataaaaatgttttgtacttaaaatgtgttatttaaaaaatcaaaatattttgatataatttatgctgccctaaagagacttctccaratcaaaagcatgtggttgtaaatctttattcaaagagttaagaagcttataatagtttgaacagttcagaagactttgttaaattctaaaacatgatgtt

SEQ ID NO: 205471 - DNA, 201 bp, Homo sapiens
ctcggggtagactccagtatcaataaaagtattataatttgaagattttttttgcataaacactttacaactcatggattttctttcttttttttttttttaaatttcgagatggagtcttactctgttgcccaggctggagtgcaatggcgtggtctcggctcactgcaacctctacctcctaggctgaagcgattctcc

SEQ ID NO: 205472 - DNA, 201 bp, Homo sapiens
caaatcatagtatatatgaatttgagacatgatagcttagaattagactatggttctgattaatctagggaactatatctagtctttttttttttttttttattaagatggagttccactcttgttgcccaggctggagtgcaatggcatggtcttggctcacagcaacctctgcctcctggtttcaagcgattctcctgc

SEQ ID NO: 205473 - DNA, 201 bp, Homo sapiens
gtatcagtgtggacatcctggagaattcttcctgttgccacccaaggaagggtccccatttactcctacactggcaagactggtgccaccgaatttgtggrtaggtcactttccattaggcttcatttctcagcagtggttatgtcacagccaaaaaggactgggaaggaaacatggtgcaatagacaattgactgtgaga

SEQ ID NO: 205474 - DNA, 201 bp, Homo sapiens
tcacgcctctctgtgtccacatttttctctttgcttagaatatcttccatctcatgtcaaatgaatgctgaacgggggttttgattatttttagttaatcraacctgaatacagtaattttgatgagttgtattctagaataagcttaagtttccagtgacttcttgtccctggcctactatcttgagatgagtaatatgt

SEQ ID NO: 205475 - DNA, 201 bp, Homo sapiens
gatttggggcagagatgtcttgcttgaggggcctcaaactttgtcatcccagaggccctagtgagacctgttgtcattttctactacttggacatgaaaggcagcttctcaaaaataacttctgacaaattcaaacccaactgacctgctagtaccataataaaaataataaggtgttatgactacaagaaagaatagaga

SEQ ID NO: 205476 - DNA, 201 bp, Homo sapiens
tcctgacctcgtgatctgcccatctcagcctcccaaagtgctgggattacaggcatgagccaccgcgcccgacttggaaatctttttaaagatagtctgcagaacaggaaaacgtgctgtagtaaacagaactttggactttgaactaggaaacatggattggagtgtgggctctgccacaggccaggccttggaaacaca

SEQ ID NO: 205477 - DNA, 201 bp, Homo sapiens
tctgaagtgttcactcagcagtttcacaattctccttgtttgtaatattttgcgtattttccacttgatgtgacaactctcctgcctcctctcagccccamatgcttggacttcctttcagcatccaccctgcctggctactgctttcttgttttgtgtttttgcgtttaaattcccagtcttagttttctgccctgtcaa

SEQ ID NO: 205478 - DNA, 201 bp, Homo sapiens
aacacacacacatatttttggaagtctttttaaaaatttattttattattttattttattttttattttgagacagtctcgccctgtcacccaggctggastgcagtggcgcaatctcggctcactgcaaactccgcctcccgggttcacgccattctcctgcctcagcctcccgagtagctgggactacaggcgcccgcc

SEQ ID NO: 205479 - DNA, 201 bp, Homo sapiens
aaaatgtttctccagacaactaaactgagttggataaagtcaatgagagtgcaaatggagtgctgtgcataaagacactcaaaatttcggggtggtggagyggggcggggagaagaaagggaaggtgattgagttgaccaaaccaaattaaatacttgtttgtatctggctggggtctgaatttgtgaaatacaaacaaac

SEQ ID NO: 205480 - DNA, 201 bp, Homo sapiens
ttaattatgtgaccggttagggttttgaaataaaatgtctcacgttgcttgaggccacacaatggcaaattcacctgtgttttaaagaggcctgaatgagsgctttctggggactctgtgagtcttcacacctcctgtttgggaaactgcaaggttgaatcccctcctactaaaggggaaggaagaggggttactggagtt

SEQ ID NO: 205481 - DNA, 201 bp, Homo sapiens
gaagttataaaatattttggattaaaagattttctggtataattttgagagtttttctagatttgctgaacacacacacatatttttggaagtctttttawaaatttattttattattttattttattttttattttgagacagtctcgccctgtcacccaggctggactgcagtggcgcaatctcggctcactgcaaact

SEQ ID NO: 205482 - DNA, 201 bp, Homo sapiens
tgggtacttcagtttgggtaacttcccctttctacaaacataatttgaaaataattcacttcaattaaagccattattggtataactgctttttttttttstggatgaatttaaataggagatggttctgttattccccagaataacagggaggaggtatggtggcagaaatctggttttattcataaatatttgattaaa

SEQ ID NO: 205483 - DNA, 201 bp, Homo sapiens
agaagttataaaatattttggattaaaagattttctggtataattttgagagtttttctagatttgctgaacacacacacatatttttggaagtctttttwaaaatttattttattattttattttattttttattttgagacagtctcgccctgtcacccaggctggactgcagtggcgcaatctcggctcactgcaaac

SEQ ID NO: 205484 - DNA, 201 bp, Homo sapiens
atttttggaagtctttttaaaaatttattttattattttattttattttttattttgagacagtctcgccctgtcacccaggctggactgcagtggcgcartctcggctcactgcaaactccgcctcccgggttcacgccattctcctgcctcagcctcccgagtagctgggactacaggcgcccgccaccatgcctggct

SEQ ID NO: 205485 - DNA, 201 bp, Homo sapiens
ctttctacaaacataatttgaaaataattcacttcaattaaagccattattggtataactgctttttttttttctggatgaatttaaataggagatggttstgttattccccagaataacagggaggaggtatggtggcagaaatctggttttattcataaatatttgattaaatgggaaaatgaaacaattgtgtgataa

SEQ ID NO: 205486 - DNA, 201 bp, Homo sapiens
gtccgagtggagctgcgggacagcccgaacctccaggtcagccccgcggccctccatggcgctggtgcgcgcactcgtctgctgcctgctgactgcctggyactgccgctccggcctcgggctgcccgtggcgcccgcaggcggcaggaatcctcctccggcgataggtgagttgtccgcgacccttctcttcccagccgg

SEQ ID NO: 205487 - DNA, 201 bp, Homo sapiens
atgggtacttcagtttgggtaacttcccctttctacaaacataatttgaaaataattcacttcaattaaagccattattggtataactgctttttttttttctggatgaatttaaataggagatggttctgttattccccagaataacagggaggaggtatggtggcagaaatctggttttattcataaatatttgattaa

SEQ ID NO: 205488 - DNA, 201 bp, Homo sapiens
cactaaaaatacaaaaaagttagctcggcgtggcggcgggtgcctgtagtcccagctactcgggaggctgaggcaggagaatggcgtgaacctgggaggcrgagcttgcagtgagccgagattgcgccactgcactccagcctgggcgacagagcgagactccgtctcaaaataaaataaaataaagggaaaaaaattgaa

SEQ ID NO: 205489 - DNA, 201 bp, Homo sapiens
aatcgagaccatattggctgacacggtgaaaccccgtctccactaaaaatacaaaaaagttagctcggcgtggcggcgggtgcctgtagtcccagctactygggaggctgaggcaggagaatggcgtgaacctgggaggcagagcttgcagtgagccgagattgcgccactgcactccagcctgggcgacagagcgagact

SEQ ID NO: 205490 - DNA, 201 bp, Homo sapiens
caaaccttaggatcatcagtctaaacacaaacttgtactacggcccaaatataatgacactgaacaagactgacccagccaaccagtttgaatggctagamagtacattgaacaactctcagcagaataaggagaaggtagatcccatagaccaaaaccatctgggaataaacggaaggcaaaatttgtatgtttattaaa

SEQ ID NO: 205491 - DNA, 201 bp, Homo sapiens
tacatccacacacacacgtatatatccatctatatatgtgtttatgtatctaatacacagcatctgaggttcagactccaatgtatatttacgtgtgtacrtatgtactgatgtaggaagattctcctgatatagcactaaataatttctaaaaatataaaaataatttcttatataatttctaaataatttcttaaaaca

SEQ ID NO: 205492 - DNA, 201 bp, Homo sapiens
gagatccacctgcctcagcctcccaaagtgctgggattacaggcatgagccaccgtgcccggcctatgcctagtcttacacttcacatcctacaagacacrtggagagcttatgcaggttgaagggagagccataaagaatgatcaagatccctaaagaaatgctctgccttctaaggagactcagcataaagcaggggag

SEQ ID NO: 205493 - DNA, 201 bp, Homo sapiens
ggcgggggaaatgccctcgccggtgggggcgctccaagggcgcgtcggccggatttcgccagcctggcttttgtttacatcctgcatctcagttgttttgytccttggggaaggaaggaaaagctgcgggactcaagggaagaggaagctgggagtccgatgtccagcacagcaagaggcccctaatcggtcctgaatgga

SEQ ID NO: 205494 - DNA, 201 bp, Homo sapiens
tttcggctaagtttgagactcactggtccagaatagatacattttggtgggagattgtacaatgccatccgagcctccagttccaaaaatcaaggtgcccycacctcctcaactccctttaaaaataattgcactgttaagaggaaaaacaaaattagagaagtggggttctgttttcttttaggggagagttgtccctga

SEQ ID NO: 205495 - DNA, 201 bp, Homo sapiens
ttacctcagatctgtgttcgcttaaaccaacatccttttgcacatcccttgccttgcctgattaacatactcaatatttcccaaacatatctactttcacrcctctctgtgtccacatttttctctttgcttagaatatcttccatctcatgtcaaatgaatgctgaacgggggttttgattatttttagttaatcgaacc

SEQ ID NO: 205496 - DNA, 201 bp, Homo sapiens
ttagcagagacggggttttaccatgttggccaggttggtcttgaactactgacctaggtgatccacccacctcggccttccaaagtgctgggattacaggygtgagccactatgcctggccaactcattttagttttaaatttttttttttttcagagacaggggtctcactctgttgcccaggctagagtgcagtggtgt

SEQ ID NO: 205497 - DNA, 201 bp, Homo sapiens
ttgaggtacatgagaaaaatcagtttgattcataaaaggctaagatcataatttctttcaaatggcttcgtctgacttcaaactgcttcctcagatttgcmaaaagggctcttttcccattgatacaacttaagtggggacaggattgtgaagtggagctggtggggctttggcaataagggcaggtgttagaacagctga

SEQ ID NO: 205498 - DNA, 201 bp, Homo sapiens
cttgaggtacatgagaaaaatcagtttgattcataaaaggctaagatcataatttctttcaaatggcttcgtctgacttcaaactgcttcctcagatttgycaaaagggctcttttcccattgatacaacttaagtggggacaggattgtgaagtggagctggtggggctttggcaataagggcaggtgttagaacagctg

SEQ ID NO: 205499 - DNA, 201 bp, Homo sapiens
gctgccttatagaaatgatttttgcctagggttaagtatgcttttcattaaacaagaggccttgcctaacagagacttactttgaaattgaaagtagaagktctgaaaaataaatcatatttagaacgccattggtagcttaaaaatggttttaaacctgaatttgaagaaaatgttgagaccacgatgtaaccaaaaaga

SEQ ID NO: 205500 - DNA, 201 bp, Homo sapiens
caagaagtaacgttgcttctttggaaccttcatcaaatacatgatatataaggtccttttgtgcaaatatttttactgtgatttatagcttgtattgattrtgatcatgtggtggccttagctatttagttcttgttctgataaagcttactaagtagttaataataatactagattttaatctcacgaaattgccactgt

SEQ ID NO: 205501 - DNA, 201 bp, Homo sapiens
gtaacgttgcttctttggaaccttcatcaaatacatgatatataaggtccttttgtgcaaatatttttactgtgatttatagcttgtattgattatgatcrtgtggtggccttagctatttagttcttgttctgataaagcttactaagtagttaataataatactagattttaatctcacgaaattgccactgttgttat

SEQ ID NO: 205502 - DNA, 201 bp, Homo sapiens
agaaggttcagctgatcttgactagacttggtcatgccagctggtatgtgtcccttggctgtgattccttgtctctactccacatccttcatactccagcragccagcacaggcttgtccacatggtggtggtaacggggcatcgagggtgcaagtggaagtgtacaaagacttttgaggccctggagtcaacagtgttat

SEQ ID NO: 205503 - DNA, 201 bp, Homo sapiens
tggctcactacaacctctacttcctgggcacaagcgattctcctgtctcagcctcctccgagtagctgggactacaggcacgcgccaccacacccagctarttttttttttttttttttgagacggagtctcgctctgttgccaggctggagtacagtggcgttatctcggctcactgcaacctccgccttcctggttcaa

SEQ ID NO: 205504 - DNA, 201 bp, Homo sapiens
ctttaacattttctcttcctaaattatttctcttagaatatactaggtacttatggaaaaagaataaaacactaggttttttttcagtttcgatttttggrattattcttaaatgttcagagactaatttccttactaagataaaataattgtgatatgtctataaagattgggagctatttgtggaattagtcaagtttt

SEQ ID NO: 205505 - DNA, 201 bp, Homo sapiens
atttatttttgagacggagtttcgctcttattgcccaggctggagtgcagtggcgccatcttggctcacctcccaggttgattctcctgccttagcctcgrgagtagctgggattacagacatgcgccaccacgcccagctaattttgtatttttagtagagatggggtttctccgtgttggtcagactggtcttgaactt

SEQ ID NO: 205506 - DNA, 201 bp, Homo sapiens
tggctacctcacttagaatgatagtaatgcactttcagaggacttggcaataaaacaaagtaacttattaagttaaaaaagtgttaaaaataaaccgattktaggccctaagtctttgatttactaaacttaacttttttttgtcttttactttttttctttttccattttcccttccaggtatgaataaacttaaatttc

SEQ ID NO: 205507 - DNA, 201 bp, Homo sapiens
gaaacctacagttggattttggtgagtctaagtttgtagtaagtgagattgtttttagtgagctgtcagcgggggttgatgaaaggcagaagaccatggtygtttttaatgaggttgtgtgaaaatccaatgaagtggtcagtgaaaattctacctcgagataaactgtgcagactggctctaacagtagattattttctt

SEQ ID NO: 205508 - DNA, 201 bp, Homo sapiens
gctaacgatcatctgagcttttagtgagttgtgatctcactgaaggtggaggattttgccttggtgctgacagctgctgactgatcagggtggtggcagcygaaggttaaggtggctgtggcaatttcttaacatcaacaacagtggaatttgtcacatcagttgactctttctttcaagaaagatttctttgtagcatga

SEQ ID NO: 205509 - DNA, 201 bp, Homo sapiens
atgaagatgatgatcttgtgtcaccccctaacacagaaggaaaccagtggtatgactttcttcaaaatagcagccaccttaaaggtacttcatgaaccaascagattttggccatttttgtttttatttaagactaggtcttgaatagttctgctaacagttttgctgaaaacttgctgaacacttacctaagtttattag

SEQ ID NO: 205510 - DNA, 201 bp, Homo sapiens
tgtctaaaaaaattaagcatgtaacttaattaaaatatactttattgctaaaaaatgctaacgatcatctgagcttttagtgagttgtgatctcactgaargtggaggattttgccttggtgctgacagctgctgactgatcagggtggtggcagccgaaggttaaggtggctgtggcaatttcttaacatcaacaacagt

SEQ ID NO: 205511 - DNA, 201 bp, Homo sapiens
tgggcttggttccagaccactgcaataaagtgaacattgcaataaaagcaagtcatttgaatttctttgtttctcagtgcatgtaaaagttatgtttataytatgctatagtacatttaaatgtgcaatgacatcatgtctaaaaaaattaagcatgtaacttaattaaaatatactttattgctaaaaaatgctaacgat

SEQ ID NO: 205512 - DNA, 201 bp, Homo sapiens
ctacgtgagaaagtagtagatctcctataaagtttgagcacttgaaaataagcttagttaatgtaactacaatatatgcaaatatttctttttttagtttytaaaatattgaaggatgtttaggtcaaaaattgccatgatgaagatgcacttaaaagagtaaaactgggcaataagggaaatacccatttatttttctca

SEQ ID NO: 205513 - DNA, 201 bp, Homo sapiens
tgtgtaggttaggagatcctaaggctatgtgctgtttccaaaccgttctgctcaaagagggcacaattctgacatagtctttctgatacgtagtttgaccyacactctaaattacagactttgcagcaagtgcatctgatgatgactcactttactcttttgattttacagcttgaaactaatctgttgtactctttctta

SEQ ID NO: 205514 - DNA, 201 bp, Homo sapiens
aatttaattgaagtctatagcaattacttttttaaaactgttgaactaattatgtttataaacatagtcaataaaccagacttttgtttgtgtgtcttatmatctataaaagaaaataataactgccactcacagctctcttgaaaaggaaggttttgggtttaaatttaagatatttttcttcgtgagttgacttaagaa

SEQ ID NO: 205515 - DNA, 201 bp, Homo sapiens
tactctttcttacctgaagtaactcggatggccagaaagtttactcatatttcagctctgttacaggtatttatttagagcttgttttatgtgaatatttrttatcggcttctaaagttctgtaaataaaaagcttcaaaattttgttttgtaaagctttctgaagtagaggtatctagtctgatagatgatcttataagg

SEQ ID NO: 205516 - DNA, 201 bp, Homo sapiens
ctagggaggataagatccccttttcattcctgagttggtttttttccctctttaggctagatgaacagtgtagtgctattcccacccgtaccatgcatttygagaagcactggagattactggaaagtatgaaagcacagtatgttgctgggaatggttttcgaaaagtgtcctgtgtggtaagtgtttagagatcgttca

SEQ ID NO: 205517 - DNA, 201 bp, Homo sapiens
ttgcacctgtagtcccagctactcaggaggctggggcaggatgatggctttagctcagaaggtgaaggctgcagtgaaccatgatcacaccactgcactcyggcctgggtgagaccctgtctcataaataaaagatagtgctactcttagtagtcatatgtttggtgtgagttcttaaatgagagttaagaaatcataaat

SEQ ID NO: 205518 - DNA, 201 bp, Homo sapiens
agaaacctacagttggattttggtgagtctaagtttgtagtaagtgagattgtttttagtgagctgtcagcgggggttgatgaaaggcagaagaccatggycgtttttaatgaggttgtgtgaaaatccaatgaagtggtcagtgaaaattctacctcgagataaactgtgcagactggctctaacagtagattattttct

SEQ ID NO: 205519 - DNA, 201 bp, Homo sapiens; identical to SEQ ID NO: 36116

SEQ ID NO: 205520 - DNA, 201 bp, Homo sapiens
cttagaatatactaggtacttatggaaaaagaataaaacactaggttttttttcagtttcgatttttggaattattcttaaatgttcagagactaatttcyttactaagataaaataattgtgatatgtctataaagattgggagctatttgtggaattagtcaagtttttttttctttttctttaacagaaagattagta

SEQ ID NO: 205521 - DNA, 201 bp, Homo sapiens
tggtggactttttaatttaatttaatttaattttattttattttagacacgatcttgctctgttacccaggcttcaggctaaagtgtagtggcataaacayggctcactgcagacttgatctcctgggctcaagcaatcctcccgagtagctcagattaacagcacatgccaccacgcctggctaattttttttttttttt

SEQ ID NO: 205522 - DNA, 201 bp, Homo sapiens
tcagtttttatttctgaaaatttagaaatattcaggcaagttagtcacttgatgatcgtcatgatactaatttatttctgctctgtttggatagtggctcrgagtctttattataccatttgagtgaattgaaaggaatggcttcatggaagcaaaaatatgaacctcttggactagatgctgcaggaatcgaaggtagtg

SEQ ID NO: 205523 - DNA, 201 bp, Homo sapiens
atgttcttttaagcctttagattattgactatccaggttgttccacagagtctctttttttcccccttctttcttgaagatctgtgagtaatggactaatwgctattaaatttgggagctttacatatgccacaacagaaaaagtcagaagaaggtaagtcttgaatcttgtttggatgaaatgtagatacatgtgatatg

SEQ ID NO: 205524 - DNA, 201 bp, Homo sapiens
ataaatcacaaaagtgtgcgttaaaatgtttataagtagttgtattattcattttttaaaagtctcatgtttttggacagtaaaatgtgttttttgttagataatgatcatttcaagttttaaattgtttttaagtaagaaggctgggattggttcacatctggcaaagttgcatgtgatggtgatatgcagtgaaactca

SEQ ID NO: 205525 - DNA, 201 bp, Homo sapiens
taaatcacaaaagtgtgcgttaaaatgtttataagtagttgtattattcattttttaaaagtctcatgtttttggacagtaaaatgtgttttttgttagataatgatcatttcaagttttaaattgtttttaagtaagaaggctgggattggttcacatctggcaaagttgcatgtgatggtgatatgcagtgaaactcac

SEQ ID NO: 205526 - DNA, 201 bp, Homo sapiens
aaatcacaaaagtgtgcgttaaaatgtttataagtagttgtattattcattttttaaaagtctcatgtttttggacagtaaaatgtgttttttgttagataatgatcatttcaagttttaaattgtttttaagtaagaaggctgggattggttcacatctggcaaagttgcatgtgatggtgatatgcagtgaaactcact

SEQ ID NO: 205527 - DNA, 201 bp, Homo sapiens
atcttgatttttctttttgttccttttgttgatagatgactcagaaagatatcacatttgttgctgaatttcttactgaacatttcaatgaggtaagaagwtgatatttctgtaatgcagtttaaaaaaaaattacagtaaacctggataatgacaagacataattaaatttaacccaatttaattgaagtctatagcaat

SEQ ID NO: 205528 - DNA, 201 bp, Homo sapiens
gctgttctaaagacttaaatgtcacccagataggataaaatagaacagtaaggattatgatatttcctgacagttgagtaggatgtatgaatcccccacayactaatcttatttctgattttttgtttttatctctttagagttatagatagtagtatgaaaaacttcaaagcattttttcggtggctttatgtgggtaag

SEQ ID NO: 205529 - DNA, 201 bp, Homo sapiens
taaaatattgaaggatgtttaggtcaaaaattgccatgatgaagatgcacttaaaagagtaaaactgggcaataagggaaatacccatttatttttctcarttgttacactaatttattctgattgttttttcttgttttagttttggcctttgctcttgctgataccaagaaaattgttttgtgtgatgtagaaaaacct

SEQ ID NO: 205530 - DNA, 201 bp, Homo sapiens
taaggttttataatacatgtaagacagcatccttgtattccttactttgacttccttaaattttaaatgcttcttattttccttggaaatcaggtgcttaratattagtccctgtgttgatgtctggtaagcaacagtttctttctaaagaaaggaaggaaggattcctgtaaggactgtgacaaccagtgatggaatctt

SEQ ID NO: 205531 - DNA, 201 bp, Homo sapiens
gttctctgaacctcattgtcccagtgtatttatggcggtttcattatgtagacatgattgatgaagtcattggccattggtgattgaactcaacctccaarcccctctctcttccttggaggctggcgggtggagctgaagtttccaaacttctaatcaaggcttggtctttttggtggccagcccctatcctaaagctat

SEQ ID NO: 205532 - DNA, 201 bp, Homo sapiens
atcaggattgtccttactacacattctaactgtagtaagaatctaactgtagtaagaatccttactacatatcctaactgtagtaagaatccttactacayattctaactgtagtaagaatcagaactgtagcactgtggtactcttattcaggattaggagagaaatggcttaccgctcggtccttctcattagggcagg

SEQ ID NO: 205533 - DNA, 201 bp, Homo sapiens
cttactacacattctaactgtagtaagaatcaggattgtccttactacacattctaactgtagtaagaatctaactgtagtaagaatccttactacatatyctaactgtagtaagaatccttactacatattctaactgtagtaagaatcagaactgtagcactgtggtactcttattcaggattaggagagaaatggctt

SEQ ID NO: 205534 - DNA, 201 bp, Homo sapiens; identical to SEQ ID NO: 36120

SEQ ID NO: 205535 - DNA, 201 bp, Homo sapiens
gtagtttggttttacttataattattggaggtaatttaggcagtgtctatccttactacacattctaactgtagtaagaatcaggattgtccttactacayattctaactgtagtaagaatctaactgtagtaagaatccttactacatatcctaactgtagtaagaatccttactacatattctaactgtagtaagaatc

SEQ ID NO: 205536 - DNA, 201 bp, Homo sapiens
ttgttttgtaaagctttctgaagtagaggtatctagtctgatagatgatcttataaggtccattaaagcaggaaaaggacatttaattgagaacctacttycaccgcaccctattttccacctccaaaagagtttaaatcttttaaaatactcccataaataaaataccatttacattataaagtattgtgggaaaaacag

SEQ ID NO: 205537 - DNA, 201 bp, Homo sapiens
aaaactgaatgagaccttagaagactttttttttgcagaggtagtttggttttacttataattattggaggtaatttaggcagtgtctatccttactacayattctaactgtagtaagaatcaggattgtccttactacacattctaactgtagtaagaatctaactgtagtaagaatccttactacatatcctaactgta

SEQ ID NO: 205538 - DNA, 201 bp, Homo sapiens
cacctccaaaagagtttaaatcttttaaaatactcccataaataaaataccatttacattataaagtattgtgggaaaaacagtcttcacatgagtttacrtttgttcataataaacccaccccaaattacctcccaattctgtaggttggtgatttaggctcagcttagccaagatgtttgggtgacctggagaaggttc

SEQ ID NO: 205539 - DNA, 201 bp, Homo sapiens
tgaggaaccagagagcttatcaggctggcctgtttaagatccatgttgttaattggaataaattacaatattaaaactgaatgagaccttagaagactttytttttgcagaggtagtttggttttacttataattattggaggtaatttaggcagtgtctatccttactacacattctaactgtagtaagaatcaggattg

SEQ ID NO: 205540 - DNA, 201 bp, Homo sapiens
catgttgcagggacaagggcactatagctgaagcagattgaatgagagtaaggtaggaggtggattgacaggtgatagaggatggccaggttgcatagagyctgtgggcagttgttaggactttggcctttactctggatgtaaagagaagcccttggggatttgggagtagtggagaggatatgatttaggcttcagaaa

SEQ ID NO: 205541 - DNA, 201 bp, Homo sapiens
attcagaaacagttttatcaaaatgaagatgacttccatttataacacttaattttgggggtacatttgtgtaaagccaagggaaattcaacttttgagayctcaattgttaggataaaaaatcagcttccaaaaataatggtccattgatatcagaggtaatgacagcacaaatttgtaataatggttttctgttgaagt

SEQ ID NO: 205542 - DNA, 201 bp, Homo sapiens
aaggaaggttttgggtttaaatttaagatatttttcttcgtgagttgacttaagaattaaactatgtttatttttttccaggctccagacctttataatcraaaaggaaaatactttaacgttgaaagagttggtcaggtatgggctttgaactcattttaaaaccttagcagtgttcatctttgttatccaaagtctctg

SEQ ID NO: 205543 - DNA, 201 bp, Homo sapiens
ggtattcatgagatttttattttttgaaatggaaacttaggagtatctgagtattgggtgtatgtgcgttgtatttaaattttggtttcagtttatcaagrtgaaattttttaatgctttcttagattttttttttccttccgataaacatctataggcatacctcagagatattgtgggcttggttccagaccactgcaa

SEQ ID NO: 205544 - DNA, 201 bp, Homo sapiens
ttgcatatgttaaattaaaatatgctcatgaaaaagaaacacaatttaagttcgatttgtgatctctacatctacaacataataatcttttaatactttgyggtttgtttagttgcttgactaaacaaactaccaactgttcagcagtttctttaatttttaagatagtagctagctaacatttatggagggcttaattct

SEQ ID NO: 205545 - DNA, 201 bp, Homo sapiens
cattaaaacaaaagatggtagtcctagcactttgggagggtgaggtgggcggatcacttgagatcaggagttcgagacctgaccaacatagtgaaaccctrtctctactaaaaattagctgggtgtggtggtgtgcacctgtagtcctgttactcgggacactgaggcaggagaatcgcttgaatccgggaggcagagttt

SEQ ID NO: 205546 - DNA, 201 bp, Homo sapiens
aggctccttcccagctgccctctccgtgcactgcgtggcacagggcctacgctcttaagccacatcagtcacttttgctgttgagctgcatcagtcttccktcacttttgacatttctgaaatttaatttcttttctattgttctttttgtttttgtgagtttctaacacatgtacccctctccatccacagccattttaa

SEQ ID NO: 205547 - DNA, 201 bp, Homo sapiens
ccatccctgaggcttcgcaagggaaagaagtgactaatcataggctgatctttttctcacttttttcctcacataaaataagtttttttatgataaagtcyttggagttgctgtgcctatttttcatgtgtagtatcttatttttatttctcagtctagtcaactctgctgaatgtgtatataaggtgtcattcatagaat

SEQ ID NO: 205548 - DNA, 201 bp, Homo sapiens
tggtctggtcgcccaagcgggatctcattgctttggccaacacagctggcgaggtgagtgagccggcgggagcccgcctgtgctgggtctgctcccggggkgcccaagaacaccgagcccgagcctgttcattcgggccacaggcggccggagcctcagtttccccttctgcagacatggctggccacctgctaccccttc

SEQ ID NO: 205549 - DNA, 201 bp, Homo sapiens
cagaaaaagtcagaagaaggtaagtcttgaatcttgtttggatgaaatgtagatacatgtgatatgtgtatatgtttaggaataggatcagactcagttayggtggtaatataggtaaaagggctttgccacttcccacatcaagggcaggattctttgtgtatttatacatagagaatgatttgacttgtgattgaatag

SEQ ID NO: 205550 - DNA, 201 bp, Homo sapiens
tgaaaataaagttaataatttaatgacttcattaaagataaatgaaactatgagtatgtggcagaaaaagaatacagtgactgctggtatgatttgggacyactaccttgactcttggctgagacacttacagctttccccaccatcagtacaaatgttagcatagtgtaaagggcaggtgacagctacattattataaaa

SEQ ID NO: 205551 - DNA, 201 bp, Homo sapiens
ttgcttcttttttaacagtaattatttatttgaaaagtagtttatagtcatagtatgtgatttttttaattgatacataatattttaattgatacataatrtgttacatacttacggggtatatgtgatgttacatgcgtagaattttttgtggggctatttctttattttgtttcttgtttgtgcttcgaaatttaaaag

SEQ ID NO: 205552 - DNA, 201 bp, Homo sapiens
gtttgcctgcagcccttaactaagggtgacacatcttatctggggtccagttctcatttccaaaggagggacctcagcacatgtggtcttagcacaaggcytgaaataataaacaaccttaggccataaagagttctgtagctattggattaactgattggaagatgagttcacatgtttaattacattctcggaacccca

SEQ ID NO: 205553 - DNA, 201 bp, Homo sapiens
tcccatggagagagttaaagaatgcatgatgtatgtctttaccttgaggtacatgagaaaaatcagtttgattcataaaaggctaagatcataatttcttwcaaatggcttcgtctgacttcaaactgcttcctcagatttgccaaaagggctcttttcccattgatacaacttaagtggggacaggattgtgaagtggag

SEQ ID NO: 205554 - DNA, 201 bp, Homo sapiens
tgcattttcacagtgttcacattgtcctgcttgaactcagctgtgctggtcattttggtactcttattcagttattagttaacaggatgtcaggatgtagrcgttagatcccttaagcaccacctttttaaaaaagaaatttgcatgttttgtgtattgtttcatctcatagaatacctttattatgactatctaaattta

SEQ ID NO: 205555 - DNA, 201 bp, Homo sapiens
tccagcgagccagcacaggcttgtccacatggtggtggtaacggggcatcgagggtgcaagtggaagtgtacaaagacttttgaggccctggagtcaacartgttatttctgctgcattccgttagtcaaagcgagactcaagggctgaagaaatggactctgcatctgactggaggggctacaaaagattgtggccatgt

SEQ ID NO: 205556 - DNA, 201 bp, Homo sapiens
ttgagaatgacagaagaccatgtgcttcccgagctgaataaggtagtatgtactagtgcattttcacagtgttcacattgtcctgcttgaactcagctgtrctggtcattttggtactcttattcagttattagttaacaggatgtcaggatgtagacgttagatcccttaagcaccacctttttaaaaaagaaatttgca

SEQ ID NO: 205557 - DNA, 201 bp, Homo sapiens
gttgagaatgacagaagaccatgtgcttcccgagctgaataaggtagtatgtactagtgcattttcacagtgttcacattgtcctgcttgaactcagctgygctggtcattttggtactcttattcagttattagttaacaggatgtcaggatgtagacgttagatcccttaagcaccacctttttaaaaaagaaatttgc

SEQ ID NO: 205558 - DNA, 201 bp, Homo sapiens
aatcaggtgcttagatattagtccctgtgttgatgtctggtaagcaacagtttctttctaaagaaaggaaggaaggattcctgtaaggactgtgacaaccrgtgatggaatcttcttccagggaagtcttacggaatagggcagaatttccacttgattcttgcagctcactcttcttcacccctgctgaaactgttgata

SEQ ID NO: 205559 - DNA, 201 bp, Homo sapiens
gaaatcattatcagtggtcacagaagtctctaccaatggtgcttcagaagtttcatactttcaggtgagtattggaacttgataacggtagagagtaaatrtgtatttaacaggttttatataggtttttatccacatctcactgtattgtaatgatcattaaaataatgcaaaaaaatcgacttggaatttctacatcct

SEQ ID NO: 205560 - DNA, 201 bp, Homo sapiens
tcaacctaacataattgcttttgtttaaaaactgaatgtgatctgcctatgttgatacttgaaattttttgatatttctgaaaactgtaccaatactaacmagaatgaggaaccagagagcttatcaggctggcctgtttaagatccatgttgttaattggaataaattacaatattaaaactgaatgagaccttagaaga

SEQ ID NO: 205561 - DNA, 201 bp, Homo sapiens
gatattagtccctgtgttgatgtctggtaagcaacagtttctttctaaagaaaggaaggaaggattcctgtaaggactgtgacaaccagtgatggaatctycttccagggaagtcttacggaatagggcagaatttccacttgattcttgcagctcactcttcttcacccctgctgaaactgttgataggttaggtagttt

SEQ ID NO: 205562 - DNA, 201 bp, Homo sapiens
tgtataaatatagttgttattaaaataatgtattcttattttactgtaagctgatttttttttaggctagaggaaatttgtgttctttgaaaaaaggaatragcctgatgtgactgaatattgagtgttagtggatttgatgtctcacttccctctgcaggggagctttagcatgtagattatatgaaagcagtaataatt

SEQ ID NO: 205563 - DNA, 201 bp, Homo sapiens
aaattcctacttttcaatttcctatttgggactgttaaactgactacaactgtatagtatttgtgtcatctatttacttgataatgttgtaaaactgggtrtcttttttaaaaattagcatttttaatggcaagagaagtaaaatctttggtgtttttataatgcttttattttttcctttttagtgttctcacatcattt

SEQ ID NO: 205564 - DNA, 201 bp, Homo sapiens
gtgtattgatgctccagctaaatagaatgcagaccacttacagcctgtctttgtgtcttcacaatgtctttgcatttgggcaggtagttagtaagtatttrctgacttgatattaaatgttttgtattcactctgcagtatatgcatattttatttaggtccatttatattgctatttttgtgaactctcaatatccttaa

SEQ ID NO: 205565 - DNA, 201 bp, Homo sapiens
gaatttccacttgattcttgcagctcactcttcttcacccctgctgaaactgttgataggttaggtagttttgagcctgaaaaaatggacagcattaaaaytagcctcatgagctagatgagaaagggttcctccactttctacaactcgtttgctaagtcgatcttttgcactgtgggtgactggccttgcaaaccagga

SEQ ID NO: 205566 - DNA, 201 bp, Homo sapiens
tgctaagttgagcattctgtctaatgctggacaggttttttctttgtccatggtcctgataatttccttgtttcataaaaataattctgcattagtgtgtrtagtcaagtaatacaccagggttgtagtgaagaaggccggaggaatcagtgggtttggctaatactgaaaacaaaaattgtttttcttttttggggaaat

SEQ ID NO: 205567 - DNA, 201 bp, Homo sapiens
acaaaaaaaatatgtttttattttcacaaagagtattctgtaaagcccattttcagaaaggatttattgttcttagtatacataagaattataaatatcastttgggaactttttaaaaaaaatgccttaaaatatttttatagaactcagattaattctgctatcttgtttcttggcaaagatatctcttaaataaaatc

SEQ ID NO: 205568 - DNA, 201 bp, Homo sapiens
tagctacctttttagtggtgtttgtgttcttttatttcttttttggttgtcaccttggacagccgccttctttataaaaggtaagtctcccgttgacataraagattaggtacagggttaaattagaccttgtttcacccatttattttaaaataccttgtgttcattcagacactgttgtctttttctattcttctgata

SEQ ID NO: 205569 - DNA, 201 bp, Homo sapiens
cctgcatgtagctgccacacaggatatatttaagaacctggcttctcttgtccacgttttatagtacgggttggataaccaccctccactaaaaatacctytaaattggacaaggaaggcatgcattggattccagacagaacgtgcatgggtgttatcagcatttcttgttcacataaaacttcatcgagtataaaccag

SEQ ID NO: 205570 - DNA, 201 bp, Homo sapiens; identical to SEQ ID NO: 36115

SEQ ID NO: 205571 - DNA, 201 bp, Homo sapiens
tgttttttgttagataatgatcatttcaagttttaaattgtttttaagtaagaaggctgggattggttcacatctggcaaagttgcatgtgatggtgataygcagtgaaactcactgccctctttttggaaattcttaaattcttaaattgcacgttaggaagaaataatgacttgtgtggagaaaccatactagaaaatt

SEQ ID NO: 205572 - DNA, 201 bp, Homo sapiens
tgatgaatcagttaacagtaaaggtgcagttaatgtatctatgtattcaaatggctatgaacacattcttaattttttttttcgagtggcatataatatcytgattgtatgctaaatatattttccttttttaattagggcttgaaaaagcttggccagtctatagagtcatcatactccagtatacaaaaattggtcata

SEQ ID NO: 205573 - DNA, 201 bp, Homo sapiens
aggttgcagtgagccaagattgcatcactgcactccagcctgggtgacagagggagactcagtctcaaaagaaaaagaagaagaaaaaaaagaatataccyattactattacatgttaatataaatatttttagtgaaaaataatgaaattttacaatataatttagttaagagtggtaacgtttcatattgcaaacctct

SEQ ID NO: 205574 - DNA, 201 bp, Homo sapiens
ataaaggtacaggagacgctacttatttactgtatttaatcaggatgcccagggaataaggcaggatgtctggagagggtcagtggcagtgcgtcaagagyagtggcacctggaccctgttgctattttggctattattgatccagggaactttgccaggctaaaaataggtcctgtcctcttttatttgccccacatctt

SEQ ID NO: 205575 - DNA, 201 bp, Homo sapiens
ctggaccctgttgctattttggctattattgatccagggaactttgccaggctaaaaataggtcctgtcctcttttatttgccccacatcttacgtgtttrtaagaaaggcctgatcttagctacagacctaatggaactcactattgagttccataatgaattctagtgaggaaatatcagtgaaactgttttcttacac

SEQ ID NO: 205576 - DNA, 201 bp, Homo sapiens
agaatcgcttgaatccgggaggcagagtttgcaatgagctgagactgcaccactgcactccaacctgggcaacagaatgagactctgtctttaaaaaaagaaaaaaaaaaatgttcctgtcacctttatcactcaggaaattccaagggttttggaagctctgttctaggaactagaaacaaagatcaatgtttttctgtg

SEQ ID NO: 205577 - DNA, 201 bp, Homo sapiens
ttcacactgggcaattgcctaaacctgttaagcttcattttttttttcatctgtaaattggagaatatggtgtttacttcatatggctattgtaagcaataaaaaaaaaaggtattttaaacacctagcatagcaggtgttagtgctaaattatatattactttctcctgataaagtaaccttttaaaaagtaaagagctt

SEQ ID NO: 205578 - DNA, 201 bp, Homo sapiens
aaatttagaaatattcaggcaagttagtcacttgatgatcgtcatgatactaatttatttctgctctgtttggatagtggctcggagtctttattataccrtttgagtgaattgaaaggaatggcttcatggaagcaaaaatatgaacctcttggactagatgctgcaggaatcgaaggtagtgatttaatttctcagtga

SEQ ID NO: 205579 - DNA, 201 bp, Homo sapiens
agattttggccatttttgtttttatttaagactaggtcttgaatagttctgctaacagttttgctgaaaacttgctgaacacttacctaagtttattagayttatatttatttgattataggaacagcaaaataaccaatagtgtatgacatcaccatgatagatagaagacactctgaagttaactacgctgtaggaaga

SEQ ID NO: 205580 - DNA, 201 bp, Homo sapiens
gcccaagtacctatagaagaaatcgtgtgtgagcccacactctttttttatattttagagacggagtctggctctgttgcccaggctggagtgcagtggcrcaatctcggctcactgcaagctccgcctcactgcaagccccgcctcactgcaagctccgcctcactgcaagctccgcctcccgggttcacgccattctcc

SEQ ID NO: 205581 - DNA, 201 bp, Homo sapiens
ggccagtgtatgagcaggtgggagataggggacgttcccttcaaggtgcttttattatcctaacaagacatctgtcatcagctgagagtaaggatggggakgcggtgttggaggtttaagaatacaaggagagctgtgaagcagctgtctagtccagcaggagatcgagtgcactaatggaacaggagggctctgggagtg

SEQ ID NO: 205582 - DNA, 201 bp, Homo sapiens
aggccagtgtatgagcaggtgggagataggggacgttcccttcaaggtgcttttattatcctaacaagacatctgtcatcagctgagagtaaggatggggmggcggtgttggaggtttaagaatacaaggagagctgtgaagcagctgtctagtccagcaggagatcgagtgcactaatggaacaggagggctctgggagt

SEQ ID NO: 205583 - DNA, 201 bp, Homo sapiens
tgggacctagtgcagaagggaaagggttggaaaagcagaggtaggagctcatcagttgtaggaggaaaggctgagagaggagggtcacagaggccagtgtrtgagcaggtgggagataggggacgttcccttcaaggtgcttttattatcctaacaagacatctgtcatcagctgagagtaaggatggggaggcggtgttg

SEQ ID NO: 205584 - DNA, 201 bp, Homo sapiens
aagggaatggccagtagatggaagcagaattgctggggttttttcttctttttatcttgggaagaactggagcatgtttatgtatggatggaatgatctaraaggtaaaaaattgagatgagagaggagaggctataaagagtgtgagagaggtgggacctagtgcagaagggaaagggttggaaaagcagaggtaggagc

SEQ ID NO: 205585 - DNA, 201 bp, Homo sapiens
cactgggacttattctacaaggtaactagtaacattgtctttctgatattacagttaaatgtttttttaatgcacattataaattccaaccttttaggtaygctagataatggttatttcgttactagagataaccacagaggtagctgagcagaaatgctccaatttttcattcaaaatatgctggccttaatagctttt

SEQ ID NO: 205586 - DNA, 201 bp, Homo sapiens
gaatgcatgatgtatgtctttaccttgaggtacatgagaaaaatcagtttgattcataaaaggctaagatcataatttctttcaaatggcttcgtctgacttcaaactgcttcctcagatttgccaaaagggctcttttcccattgatacaacttaagtggggacaggattgtgaagtggagctggtggggctttggcaat

SEQ ID NO: 205587 - DNA, 201 bp, Homo sapiens
gattgtggccatgtttttcattctaccacagtcattaatttatttgatattaaaggtttctagagatcagtatctttttaaaattgaataattgaccaaamcagtattttgacagttagtgtagataagacatatcttatataaaaagcttggagatatttgtttcaccagataaaaatttaagaatgttttattatgaaa

SEQ ID NO: 205588 - DNA, 201 bp, Homo sapiens
ctgcatctgactggaggggctacaaaagattgtggccatgtttttcattctaccacagtcattaatttatttgatattaaaggtttctagagatcagtatmtttttaaaattgaataattgaccaaaccagtattttgacagttagtgtagataagacatatcttatataaaaagcttggagatatttgtttcaccagata

SEQ ID NO: 205589 - DNA, 201 bp, Homo sapiens
gctgcttctgtgaatgaatgaatgaatgaatgaatgaatgagggagagaattctttgatgccaagaactttgcatatagtccaaattctttttcaaggcaraacctattatgtattgccagagagtcttgaggtcagtaaggagatgcattggtgcaagttggctattgaatggagggaggataaaggtacaggagacgct

SEQ ID NO: 205590 - DNA, 201 bp, Homo sapiens
aatgtgtgtgatgtcttccaacattctctttgtattcagagcatcagagaactcttggtttactgttcactatggtaatggttgttcatatttgctcatcwtcttaaggttatgtgaaactatgatcaccaggattgcatttggattataataaaatgattcactactactgtgaagttggtaacagatcatttttaatga

SEQ ID NO: 205591 - DNA, 201 bp, Homo sapiens
acattgtctttctgatattacagttaaatgtttttttaatgcacattataaattccaaccttttaggtacgctagataatggttatttcgttactagagakaaccacagaggtagctgagcagaaatgctccaatttttcattcaaaatatgctggccttaatagctttttttgtccctttgctttactagtaaatcagga

SEQ ID NO: 205592 - DNA, 201 bp, Homo sapiens
atactttcaggtgagtattggaacttgataacggtagagagtaaatatgtatttaacaggttttatataggtttttatccacatctcactgtattgtaatratcattaaaataatgcaaaaaaatcgacttggaatttctacatcctaatatactgagtgttattatagtgaataccatattattcttcccatgctccaat

SEQ ID NO: 205593 - DNA, 201 bp, Homo sapiens
aatgtaaatcttcagaagcattcttaagtccagtactgactgtactatagttgctacgtctcagtcttctccatagctttttcatcagactcttacactcrcaaaaggggtagaaaatattgtaggctctgtggaatatgttggttctgcagcacttgatttgagacttgggtaggggtgagggaaccaggttatttttgt

SEQ ID NO: 205594 - DNA, 201 bp, Homo sapiens
ttctgtaggttggtgatttaggctcagcttagccaagatgtttgggtgacctggagaaggttcagctgatcttgactagacttggtcatgccagctggtaygtgtcccttggctgtgattccttgtctctactccacatccttcatactccagcgagccagcacaggcttgtccacatggtggtggtaacggggcatcgag

SEQ ID NO: 205595 - DNA, 201 bp, Homo sapiens
ttgtataagaatgactttatatacttgtttagccctgtacagattagaagctcgttgatggcagtgcctgtggacatcattgtgtttgcttactaggcacrtgccttttctacggcgatagagatgaccagccgcatcacctgtgacctcagttaatgggaagcaggcagccaggctaacacatttcttcaccatctaggt

SEQ ID NO: 205596 - DNA, 201 bp, Homo sapiens
tattggaactgttgtacacatacaatcagcacagtaaaatgctgtaaaccctacagcttaaagttcatttgtatcattggtactttaagaaaaaagtgaaytgtttttgtaaaatatgtgttgttctttgcttaatttttctgtagataaatataaagtatttaaaaattttattggtgctttaagaaaaaaagtgaattg

SEQ ID NO: 205597 - DNA, 201 bp, Homo sapiens
cctaagcccaaatataaaaacagactcttcttgcaagctctaatatgtatctatggctactactatatataagaccagagttgtgttttattagatgtttrtgacagagaatcctgtaataatgttgattttttcttatttttatatcctagaatacctctgttgggatataaagcagccttccctcccagaaagacacag

SEQ ID NO: 205598 - DNA, 201 bp, Homo sapiens
ctaatgtgtggaatgtgcagatttaggttactttagtgtatgttctagttaataagttaaaattctggacacattattaaaggcagaaacttctttcaaarcaaacaccgctacactttgtatgacctttacaattatcagtgtctctttttatgagcacacaattttctagaacactgtatgtgctcagttatgcaaaag

SEQ ID NO: 205599 - DNA, 201 bp, Homo sapiens; identical to SEQ ID NO: 36141

SEQ ID NO: 205600 - DNA, 201 bp, Homo sapiens
atatcctagaatacctctgttgggatataaagcagccttccctcccagaaagacacagaatgatcagagatggtgcccttgactttatagtggcacaaacrcttcagagacacacaattataagagacttatcttttagcataaatacttatggctcaaaatccactgacgatcattctcctaaactgaacacatgactag

SEQ ID NO: 205601 - DNA, 201 bp, Homo sapiens; identical to SEQ ID NO: 36143

SEQ ID NO: 205602 - DNA, 201 bp, Homo sapiens; identical to SEQ ID NO: 36144

SEQ ID NO: 205603 - DNA, 201 bp, Homo sapiens
actatatataagaccagagttgtgttttattagatgtttgtgacagagaatcctgtaataatgttgattttttcttatttttatatcctagaatacctctrttgggatataaagcagccttccctcccagaaagacacagaatgatcagagatggtgcccttgactttatagtggcacaaacgcttcagagacacacaatt

SEQ ID NO: 205604 - DNA, 201 bp, Homo sapiens; identical to SEQ ID NO: 36146

SEQ ID NO: 205605 - DNA, 201 bp, Homo sapiens; identical to SEQ ID NO: 36147

SEQ ID NO: 205606 - DNA, 201 bp, Homo sapiens; identical to SEQ ID NO: 36148

SEQ ID NO: 205607 - DNA, 201 bp, Homo sapiens; identical to SEQ ID NO: 36149

SEQ ID NO: 205608 - DNA, 201 bp, Homo sapiens; identical to SEQ ID NO: 36150

SEQ ID NO: 205609 - DNA, 201 bp, Homo sapiens; identical to SEQ ID NO: 36151

SEQ ID NO: 205610 - DNA, 201 bp, Homo sapiens; identical to SEQ ID NO: 36152

SEQ ID NO: 205611 - DNA, 201 bp, Homo sapiens
acaagagatgaaggcaatgagactgaagccaacagcatgaacacattaagaaggacaaggaagaaagtcactaaaccatatgtttgttcaactgaagtggragaaacggatatgtccaattcaaatggtatctaactactctgagtcctcaaaaatggtgtggtcagaggcaatctccatttggtctttcttttcataaaa

SEQ ID NO: 205612 - DNA, 201 bp, Homo sapiens
agtgtatttattcatgtacaataagaagtgtaagccactgcacagatttctccctgttcagcctgtaggtaatctagagcaattttattatctagcacaastttagcaagagaatttaaagaagtctgctgcacagccacaggttttgcagtaaaatctgctgtacagactactgtaagggatacatttctaatcattacc

SEQ ID NO: 205613 - DNA, 201 bp, Homo sapiens
atgaataatgaagaggaccttctgcaggaggtatgaagctaatcattaaaatgtttttaaccaaaatattgacagtaaatctttttaaaaaatgtcaattrtttgaatgccagtaagaataagggcagcataattatacttgttatatgtccactcaggagaagtttatgaagaattgcccttctgtactacacagtgaat

SEQ ID NO: 205614 - DNA, 201 bp, Homo sapiens; identical to SEQ ID NO: 36169

SEQ ID NO: 205615 - DNA, 201 bp, Homo sapiens
cttcatttttttccttctttaggagaaagtgagccatggtgtttgcatgccccgaggttatcttgaagtgataccaaatccaaaggacaatgaaatgaatmacataagagccacatgttttaatagcgacatagtcctaatgccagagttatcaacctttagagttttgccatgggctgacagaactgcaagagtgatatg

SEQ ID NO: 205616 - DNA, 201 bp, Homo sapiens
atagagacagtggagaagtccaacagtttgtgtttttttattgatcctgcaatttctgccattagaacttcttcaggttttctgcttctagaaactcctgwgtaaacaccatttgattagcttgatggggatcaaaagaacaacaacaataaaaacaaaaacaaaaaagagcaaggtgaagttgtcatgctttttagccat

SEQ ID NO: 205617 - DNA, 201 bp, Homo sapiens
ttatttaaaagactttaggcaaattaaatttaacagagtttgattgagcaaagaatgatttgagaattgggcctccctgagaaccaaaataggttcagagmgactctggagctgccacattgttggataacatttatggacagaacaagaaaagtgatgtacagaagacaataatgagtcacagaaacagctgaattagtt

SEQ ID NO: 205618 - DNA, 201 bp, Homo sapiens
tggatctgtgtatcttaagcagaacataaataattttttttgtagacctaatgctgaaaaaagctatttggaaagcttctttatggctcgaaaagggtgcyttataaatagctttacaaaaattgctttcttattttcatttactataattgttctaatcaaagcttaggggaaaaatgtgattactgaatttaaagttgg

SEQ ID NO: 205619 - DNA, 201 bp, Homo sapiens
gttgtcaacatataacatttctcctcacttcttaatgtgtgtgtacccaaccttcactcttgtatttctgactgaccattctgaaagactgaagtgcagayttggaggcaagctgtggtaaaatttgggaggatgtgagttatctttagtaggttaagaaaatataatgcaagaagcatacctactatgtgaagagtgcag

SEQ ID NO: 205620 - DNA, 201 bp, Homo sapiens
taaatcagcagtttgaaatgggtgactctttttgagaagagattaaacaatgttgaagatgaaggctgaagtggcagatcatccacatcaatttgccctarttgttcatgccttgattgaagacggctggcgattaacagcagaaacaatagccaacaccatagacatctcagttagttaagtttacacaattctgactga

SEQ ID NO: 205621 - DNA, 201 bp, Homo sapiens
tataggaatgagccattgctcctttccctatttctgaatttaacgcagctttaagattttaagtttctgaaaataattttgaaaaaataacgtaggtattytccctaatgtcctgagtggcacctaggatggctaggaaggccagggcccatctgggtccctaatttacacaccaggtgtagagtcaaggactgaggacag

SEQ ID NO: 205622 - DNA, 201 bp, Homo sapiens
taaagggtagagcaccttcccctctcacatttaaagtatttttatattcatatttgcagtatttttatatgctgcagcagcccattagctgatatcttcaygaacagttccataacattcttggatcttttttcatactatattacagagcccattatcataaatatatattatatatacatgaatatttaaattttttct

SEQ ID NO: 205623 - DNA, 201 bp, Homo sapiens
ttttgacccttatggtcaatgcttgctggacacctccagatgacacaatcaccttagattccatatgcccaaaacagaactcataatttcctttctcaagyctttgctttttgggtttcctagtcagaaatgtggttgtcatttttcattcctctgtctctgacacttcctatatccagctagttaccaagctgcgaaatc

SEQ ID NO: 205624 - DNA, 201 bp, Homo sapiens
gaatagtatgtgatgatgaaaaatatctatgatgagtgaatgaatattattattatttatttatttatttatttatttatttatttatttatttttttgaratggagtctcactctgtcacccaggctggagtacaatggcaccatctcagctccttggtggagctgcaacttccacctcccaggctcaagagattctcct

SEQ ID NO: 205625 - DNA, 201 bp, Homo sapiens
tgaatagtatgtgatgatgaaaaatatctatgatgagtgaatgaatattattattatttatttatttatttatttatttatttatttatttatttttttgagatggagtctcactctgtcacccaggctggagtacaatggcaccatctcagctccttggtggagctgcaacttccacctcccaggctcaagagattctcc

SEQ ID NO: 205626 - DNA, 201 bp, Homo sapiens
atatcattgtttgaataatctgttatttggctttttgtttattaattatcaacaggactcaacaagagatgaaggcaatgagactgaagccaacagcatgwacacattaagaaggacaaggaagaaagtcactaaaccatatgtttgttcaactgaagtgggagaaacggatatgtccaattcaaatggtatctaactact

SEQ ID NO: 205627 - DNA, 201 bp, Homo sapiens; identical to SEQ ID NO: 36166

SEQ ID NO: 205628 - DNA, 201 bp, Homo sapiens
ttaaggtttaagtcttacaaccaacttatattatctctgttctatcaatcaaaagggcagatttttatttaaattatatgcaataatgtaggctttttctrtatctgatctagccaaattatgatatattgctacaggactcataactaattcttggcttatttcaaaagatgacctttactatggtccaagtttcatttg

SEQ ID NO: 205629 - DNA, 201 bp, Homo sapiens
aaaaatgtgcccatacaaattcagatagtcaaaacacaaacgcatggggatctccataatctgagagacaacttacccatgatccccagttgattcgagasagcaacagatacaatggagctggtgtaccttgcttaatcactcagtgctcctgggggttgctggaagctctacttcaaatcccacttctgaggccatctg

SEQ ID NO: 205630 - DNA, 201 bp, Homo sapiens
taaaaacagaattccatttaagtcaattatcaagctatggtgatgtaggaagcacctcaaataaaatacttagatttgaattcctattcttcctcagataygaccttgaacaaattacctaacccctgtgggttatttctgctttggaaaaaatgtaggtgataataaatattccctgtatgttgtgggtattagatgaaa

SEQ ID NO: 205631 - DNA, 201 bp, Homo sapiens
agtcatttgcccaccttggcctcccaaagtgctgagattacaggtgtaagccactgtgcctggctgtcttagcatttaaatatatgcaagtcttctctacytaaaagcaacgtaaacttttcttgaacctctatgtactcccctggtagacatattttctgtcttctttacttcatacttttgagttgtatttcatatttt

SEQ ID NO: 205632 - DNA, 201 bp, Homo sapiens
tggcatgttttgaaaatttgtaaaactggcaacacgagggccacgttttaatatggcaacaattgtctggactcctgtgttggctccttcctgggaagggstatcaactactgcgttcgccctccagcccattgtgtttttttgtaatctgtctgctatttgagtttgctctccttgaactaggctaacctgagcatatct

SEQ ID NO: 205633 - DNA, 201 bp, Homo sapiens
gacaagcccagaatgtaattcaaatgagtctctttcaatcataaggaaaagtaactggcactttaactacttgccagagctcaatgtaaaactgtttgctrttcagtttttgtcaaattttaatcatttattttactaatggcacctaaaagtccatatataggacattactctagtttctcagtggaatccttttacaaa

SEQ ID NO: 205634 - DNA, 201 bp, Homo sapiens
gttgtgggtattagatgaaatataaaatattgtctggatatggcaatgcttttaaaatgttaatatttttataggtattattttaaagactttatttttttgttgttgagacagagtctcactctgttgcccaggctggagtgcagtggtgcgatcttggctcactgtaacctccacctcctgggtttaagcgattcttat

SEQ ID NO: 205635 - DNA, 201 bp, Homo sapiens
gaatcatgttttatgttttgtttatttttatgtctttgattttgccttatccatagtaggttacaacttcactcttgggactaatgaaggttaaactggtrgtgatgtgaattaagatgggttttgcttttatacagaaaagagttataaaaatacaattgaaaaagaatatataattgaagaagttgaacaagttttatg

SEQ ID NO: 205636 - DNA, 201 bp, Homo sapiens
tgaaggctgtagcctcatgacctaatcacctctcgaaggctctacctcctaacatcatcgcattaggtgttagggtttactgtatggtttgtgggggacayaaacatgccgttcttaactctgctctttcttctaacgatctaccccttttccttcctctgatagaggaaaatgtattaaagttaattcctttatttcaat

SEQ ID NO: 205637 - DNA, 201 bp, Homo sapiens
ggtaaggattctggaacaaactggtatgtggttctagccactaaccctaagtctgtatttgaattagagagaatgtaatgttggttgaggaatactagccygggagtcagaacacttacaaagatttttatacctatcttttataaaatactttgtagttttctttaccctttaggctgttcatctggaaaatagaggggt

SEQ ID NO: 205638 - DNA, 201 bp, Homo sapiens
cagttgcctcactgaaatatatatctatatatttatatagatatatagagagtgagagcatgcatacacacacacacacacacacacacacacacacacasagagagagagagagaacattttagctattcttcagaaaagcaagagaaataatgttttctcagtatcttaagtggggtaatcataaccgtggtgaaaagg

SEQ ID NO: 205639 - DNA, 201 bp, Homo sapiens; identical to SEQ ID NO: 36162

SEQ ID NO: 205640 - DNA, 201 bp, Homo sapiens; identical to SEQ ID NO: 36163

SEQ ID NO: 205641 - DNA, 201 bp, Homo sapiens
atgtattcattcattcactcactcacttatttaaaaaatatttgttgagtgactatgagatgcctatactgctacaagtaccaagaaaacagcagcaggtdaaactaagccttggcgctcaaggagctgataggcaatggagaatgacaggaacatgtgagtatacagtgtggcaggtgccaatttggacactgaagaaaa

SEQ ID NO: 205642 - DNA, 201 bp, Homo sapiens
agccaccatgcctgacccaaatttccatattttaaaatgcctatacattttgttttaaggagcattcttcatcttgggctgaacacccaatatttcagtgyaggttgggaatacagcaaggttaatttagcatgaaatactttaattgctacagtttaattgtttgttttaaatggaaggtagttataaagcctccggagt

SEQ ID NO: 205643 - DNA, 201 bp, Homo sapiens
tctcatttaatgatcatagagtatctatatttttttaagaagccactttaaatttatttttgaaacttgtgaaggtataaataatgagtattagcacaatkaatatttgtaatttaagagaaaataatttattttggaaaatttgctgtgaatagacattaaaaataggtttaagaggccgggcacagtggctcatgcctg

SEQ ID NO: 205644 - DNA, 201 bp, Homo sapiens
tatttgaatgccagtaagaataagggcagcataattatacttgttatatgtccactcaggagaagtttatgaagaattgcccttctgtactacacagtgartttataaagataataaaaactaaacaattcaaaatattcatctaggaaagctcatttggtttgaataatcatttaagttcaataggcactgagtttcaga

SEQ ID NO: 205645 - DNA, 201 bp, Homo sapiens
aaagttgcctttgggggttttattttaaaatgtttaacatttatctgatatcaagttagtgttaaccaacaagtgttaaacatatatatatatatttattwtatatatatatatatatatatatattttcattagcaaggctttcccgccgccccccgacccttttgtttgttttcaaaacctaatttcttcatttttttc

SEQ ID NO: 205646 - DNA, 201 bp, Homo sapiens
acatttggctaatctccccacaaatgtgcttggagatgagaaactcaacactttgacaaataacccattccattttgggcttattatattaagtaaaattytgattcattgcaaattccaagcaatttatctggattttccttctgtgctttgttttacttcaaaagatagagatactattgaactctcacttgaaatgtg

SEQ ID NO: 205647 - DNA, 201 bp, Homo sapiens
tctttgctttctgtctttctcctcctaatagtcctcttcctcctcattttttctcttccttccttgtctcagtcagtttgggctaatataacaaattgccrtaggttggctggcttaaattacaaacatttatttctcacagttctggaggctgtaagtccaagttaaagcctctggcagatctagcatgtagtgaggcct

SEQ ID NO: 205648 - DNA, 201 bp, Homo sapiens; identical to SEQ ID NO: 36170

SEQ ID NO: 205649 - DNA, 201 bp, Homo sapiens
gtattctgtggcactctccttctaaaaatagcttgggctgttttggaataatttttaacttattatatgtgattgcaagctccttatgtgccttggaattyagaatttcatgcttccactttcacaactgacttcatttaactttatgaagcttgtgctaaatatataaatgcttaaggatatgtgaaaatcattgaaaat

SEQ ID NO: 205650 - DNA, 201 bp, Homo sapiens
tatatatatatatatattttcattagcaaggctttcccgccgccccccgacccttttgtttgttttcaaaacctaatttcttcatttttttccttctttargagaaagtgagccatggtgtttgcatgccccgaggttatcttgaagtgataccaaatccaaaggacaatgaaatgaataacataagagccacatgtttta

SEQ ID NO: 205651 - DNA, 201 bp, Homo sapiens
tcaaaaaataaaaaataaaaaaaagattcatctgtgcaaagtaacctaaatatcgtgtgtgtgtgtgtgtaccttattccatctcaaaaaaaaaaaaaaaagattcatttgtgcaaagtaacctaaacattgcatgtgtgtgtggtgttttaaggtttaagtcttacaaccaacttatattatctctgttctatcaatcaa

SEQ ID NO: 205652 - DNA, 201 bp, Homo sapiens
gaattgtgaaaagctgctctggtgaaaatatcaaaagaatgaaaatcaacctgttgtagcagaaatttgggattgtccaaattaagcatgaattaaatgtrtatatttatgccatgcaatcaaaatgaaactgcatatctgtacttacgctcatgattcttccagcctggtttacctcactccctatcttcagctgaaatg

SEQ ID NO: 205653 - DNA, 201 bp, Homo sapiens
cgttcagtatgaatagtatgtgatgatgaaaaatatctatgatgagtgaatgaatattattattatttatttatttatttatttatttatttatttatttwtttttttgagatggagtctcactctgtcacccaggctggagtacaatggcaccatctcagctccttggtggagctgcaacttccacctcccaggctcaag

SEQ ID NO: 205654 - DNA, 201 bp, Homo sapiens
ggtagggctctttctggctgattcctaggtacacgttcagtatgaatagtatgtgatgatgaaaaatatctatgatgagtgaatgaatattattattatttatttatttatttatttatttatttatttatttatttttttgagatggagtctcactctgtcacccaggctggagtacaatggcaccatctcagctccttg

SEQ ID NO: 205655 - DNA, 201 bp, Homo sapiens
gggtagggctctttctggctgattcctaggtacacgttcagtatgaatagtatgtgatgatgaaaaatatctatgatgagtgaatgaatattattattatttatttatttatttatttatttatttatttatttatttttttgagatggagtctcactctgtcacccaggctggagtacaatggcaccatctcagctcctt

SEQ ID NO: 205656 - DNA, 201 bp, Homo sapiens
gagggtagggctctttctggctgattcctaggtacacgttcagtatgaatagtatgtgatgatgaaaaatatctatgatgagtgaatgaatattattattatttatttatttatttatttatttatttatttatttatttttttgagatggagtctcactctgtcacccaggctggagtacaatggcaccatctcagctcc

SEQ ID NO: 205657 - DNA, 201 bp, Homo sapiens
ttatataggggtcaaaaaaagttttttttttttgtattgacattaaaaaggtaactgttagagaaaattaaaactaaatcaataaaatcattgatatttaraacctaaataactcattattatattggaaagaaatttattaggtcaaattagggtctacatttaatgcttggcagtattcctttaggttaagcgtttttt

SEQ ID NO: 205658 - DNA, 201 bp, Homo sapiens
tctctatatataactgatatatgtcctcattgtcactgaacacaaacaaaatttctccaaggcctcctagttgctatagagctttaaggttttttttttttaatattttcttattttttccctaaacattcacagcattaaaacatcttctataaaaacacattgatttaatttattaatcctctgagggaatagaaaaga

SEQ ID NO: 205659 - DNA, 201 bp, Homo sapiens
gttggtcaaagaatacaaaattacagttaaataggaataataaattcaagacatctaatacacagcattgtggctatagctaataatataccttcttgaawattctaagaaagcagatgttaagtgttctcatcaccaagtgataagtatgtgaaataatgcatatttaattagctagatgtaaccattccataatgtata

SEQ ID NO: 205660 - DNA, 201 bp, Homo sapiens; identical to SEQ ID NO: 36168

SEQ ID NO: 205661 - DNA, 201 bp, Homo sapiens
ctggtcttgaactggcccaggctggtcttgaactcctggccccaagtgatctgcccacctcactcctgctggtattacaggagtgagccaccatgcctgayccaaatttccatattttaaaatgcctatacattttgttttaaggagcattcttcatcttgggctgaacacccaatatttcagtgtaggttgggaatacag

SEQ ID NO: 205662 - DNA, 201 bp, Homo sapiens
tgttttttgagatgctcaaggcattttgcttgttgactctctagagggccaaagaatgagacctacttattaggaaagtgttttgagaaagttagccaacrctttagcagaaaaatgcccaggaaaccttcactagagagttctacttcaccacgatgatgctcctgctcatgccttgcatcgaacaagggtaattttgtg

SEQ ID NO: 205663 - DNA, 201 bp, Homo sapiens
gcctgctgggtgtagatcctgggctaaacaactcacattccttttcaactcactggatctagctgctgctcacatgcttccaccgtgactgtccttaccawggcctccagtgacttgggttgcaaaatacaaagggcaagtattaataacaatcttatttatcatttcagcagcatggtccattggtacttcctttttatg

SEQ ID NO: 205664 - DNA, 201 bp, Homo sapiens
ctccacagtttgtggtcattgttttatatattctagttttagctacaaaagagagagggatttaccatttctttgtcttaagccagaaatctggagaaagwtcttgtatcatgagctctctttgcactgtcaattgtgacttacagcatgggtaccattactaactcaacttctttagctcagaagctccctttttggctc

SEQ ID NO: 205665 - DNA, 201 bp, Homo sapiens
tgtcttcccttccctgggagtgagatccaaagtctttgcttgacccacagggtcctgtacctggtggcccactgtgtccctcccccgtaccctcactctcygcctcccatcccactacgccttggcctcttgggactccagagcgagccgtgccttagagccctgggctgctgccccttcccccagctctctcctggctcc

SEQ ID NO: 205666 - DNA, 201 bp, Homo sapiens
gctggaggaggagaggggaagagaagggcaaagggactcagcccaggctgggagagtggcgggcagttctgcaggcaggaagcagagatctcctatcagargaagactttgtgccttgcagaaagctttctcatccacctcttccacagcaggggtgaggggggaaaccttaaatcagcagacctggagccctgctcccag

SEQ ID NO: 205667 - DNA, 201 bp, Homo sapiens
atgctccgtttgggtttctgctggttgactgtgagacctgactcctttccccaacaatgcagacttcagccaaacctttccctgatctgggcctctacatstcaaaagcccacccctgtgactgggggatgggattattttcttcacacctgtcaccactctaccttctaacactgggttctgggcaacattgtggatggt

SEQ ID NO: 205668 - DNA, 201 bp, Homo sapiens
taaaatcaaagtaccttaaatagtcacgccccaagatcctcggcaggctactgggtgggactcactgccagcctccctttctcccaggagaaggatatcaygcccgacccaaagctgctggagaaggtgagtgagtgtgacaagagcctagccgtggcgaggcatcaggagcacctgctggcccacctctcgcccgagctg

SEQ ID NO: 205669 - DNA, 201 bp, Homo sapiens
aggagctcagcaccaggtgagcaccgtcatcccagcatgactggaaggcctgccaccctctgtcctgcctccctctcccggccacctgccaccctaccccmtgtacacctaggctctacctgaagagaccggctggacgtcaacccgttccccttcccctaagttgtgcgaccttagaaagctccttacgttctctgagat

SEQ ID NO: 205670 - DNA, 201 bp, Homo sapiens
tttgaattttgccaccatctaccgaggctttttgactgtgcgacagtcaggaggcaaggggacaaaagatgaaaggcagaaaaggcaaggggaggctggcrcctgcgttctaaactagaatttaacaagggaaaagctgcctttctgctcagaaactaagggaggaccacttgatctctaacactggtgcttgcggcaaga

SEQ ID NO: 205671 - DNA, 201 bp, Homo sapiens
tttttttttctctttccctaaaggtccaaagacatttttttggtatccaaattcccatttatgcattatattctgaaatctatgaaccaccccactgaaartaaaggaagcaagtctcttgacttttaaaccccagcaattgaaaaaccacaaatgccaagaacatttaagtactctgtgtttcaattagtttttttgtaa

SEQ ID NO: 205672 - DNA, 201 bp, Homo sapiens
agagggtctattaagagatgcgcagtggtccacgcggctggccggctccataagtatctccttctccggcctcttgacaggcccctgctgctttgactcarcaccatgcctgtgcttgaagttctgattaaacggttgttctgataagtaatcctcatgaatggtctccattttgctcatccacggtgaaacaagctgtcc

SEQ ID NO: 205673 - DNA, 201 bp, Homo sapiens
agggtcccttttattacaaatacactgaggctccagacccctcttacactgtgcacagagagagcaccttttctccagcaaggctgtctactgagtgagckctaaagcatgacacgttcacacccaaaagccgtgcctctgctcacaccatcacccccacctgtagtgatggaagaggcactaagtggcctgtggctgtgg

SEQ ID NO: 205674 - DNA, 201 bp, Homo sapiens
gtcttcctctatgtggctaccaatggccctgtggtccatggaactctgcctttagggtcccttttattacaaatacactgaggctccagacccctcttacrctgtgcacagagagagcaccttttctccagcaaggctgtctactgagtgagctctaaagcatgacacgttcacacccaaaagccgtgcctctgctcacac

SEQ ID NO: 205675 - DNA, 201 bp, Homo sapiens
aagctgggtagcagctgcacaaaaggagctcagcagtgttctggatgtgtttgatgcagtggcaccgtgttgtattaagttccatgttgaagctctttccygcagttcacctctgtgatgccgttcttcctggttgcgttagaaagcataggtgtttatcaggcccctctcttggtaggttttatagtagacagaatagtg

SEQ ID NO: 205676 - DNA, 201 bp, Homo sapiens
gacacccctggagactttgggcgaagggtccacggggatgcctgtgaagacaggaggccgaagtgtagggaggccgaaggcctcgggggtcaccaggtggrctggtagaggaaaacacggagccatgggatgtgaggcctcaagactgcaggcgctgtgggccttcatttgcagttgatgctccgtttgggtttctgctgg

SEQ ID NO: 205677 - DNA, 201 bp, Homo sapiens
acgcaccaccgcacccggctaatttttgtatttttagtagagacagagtttcaccgtgttggtcaggctggtctcaaactcctgacctcataatctgcccrcctcggtctctcaaagtgctgggattacaggcgtgagccaccacacccggccaaatattctttttaaaacacctgtttattatcaaaattttcagcctat

SEQ ID NO: 205678 - DNA, 201 bp, Homo sapiens
cacacacatacatgcacacacacatacatgtgcacacacagacacacatatataaagaagacttttgctggttttgtttagtatctaggggttctagcaayttggaattattatactccatttttcacattgagatttttctgggccactcagttgactctaagctgggtagcagctgcacaaaaggagctcagcagtgtt

SEQ ID NO: 205679 - DNA, 201 bp, Homo sapiens
aaaaaaagtagaggcttaaaatggcaggggacactcctctcttcagcatctagggcagccgatggtttcctaggagcctctggaactttgccaggggggggtccctcaaatccacacaggggaattaaatagaagagagaaaattggcgtgtggcttcctagctctgcaaactctccatacttctcatccaatgctcaggg

SEQ ID NO: 205680 - DNA, 201 bp, Homo sapiens
ttgaggccttgtatttcatatatatatacacacactcacacacatacatgcacacacacatacatgtgcacacacagacacacatatataaagaagacttytgctggttttgtttagtatctaggggttctagcaatttggaattattatactccatttttcacattgagatttttctgggccactcagttgactctaagc

SEQ ID NO: 205681 - DNA, 201 bp, Homo sapiens
caaggactccagtacagttctaaatggaagtggtgatatcatacattctttccctgatacaatgtgtaaagggaaaaatttgaacattgtaccattatatrtgatattttattaggatattggtgaatagcccttacaaactaatgattcttttattcgtagcctgctaagagaaagtattatgaataaatgttgaatcaa

SEQ ID NO: 205682 - DNA, 201 bp, Homo sapiens
ctggtaagttggcccctgggtgcagtttttcttaccagctggatccggggacctacagatccaggaccccactgtctttcaggcctactatgactcgaacrtggacctgtttacctgggggacccctattgtgacaatcgcgctgctcactttcctgctccacctgggcattgaaaccaaaacctgggtaagagccgcctg

SEQ ID NO: 205683 - DNA, 201 bp, Homo sapiens
tggggattctaagtaatagaatattggcttcttgaaattgttttacaacttaccaatcctctcttttgattcttttttctcttagtatttccgtttggatrgttttggttactatttttcaagttcactatatttttcttttgtaagttctaagcagctgttgatctcattcagtttattttttgtctcagatattgtagc

SEQ ID NO: 205684 - DNA, 201 bp, Homo sapiens
atctttgttcccaacgtagtgccccagagctatgctttgtacataactggtttggtggatcttgaattagaggatttaaaaaaagtagaggcttaaaatgrcaggggacactcctctcttcagcatctagggcagccgatggtttcctaggagcctctggaactttgccaggggggggtccctcaaatccacacaggggaa

SEQ ID NO: 205685 - DNA, 201 bp, Homo sapiens
gtcttgcttgcattgtttgtaatgaaatatctgctcttatccttatttgtgttcctttgtacataacacagctgcttgcaagttttttttttaattactasttttaagcaaattgatcatgatatgctttgtaattttcttcataatttgggggtttgagattcttggatctgtaggtttatagttttcattaagtttgga

SEQ ID NO: 205686 - DNA, 201 bp, Homo sapiens
agtcaccatgcctggcctccaccgtttctcaagcttagtgatattttatctcagaccacattagtctctgcactgcataattttaaagggaaaaatggaaraacttttttgcttagcactttatagtcttcatgagatattcctcctttaggctaccagatcagatgtgctttcaaaaccaaatctctctaaggcttccca

SEQ ID NO: 205687 - DNA, 201 bp, Homo sapiens
tagttacagcataaccttatataacatatttgcatcttgtatttaaagtgcatttttttagacagcaagaaattgagtcttttgctaatttttttaaaaaygagtctgccttttaattgaaatgtgtaaagctttgcatttaatgtgattaatgacatggttagatttaagcctatcatcttgctagttgttttcccatct

SEQ ID NO: 205688 - DNA, 201 bp, Homo sapiens
tttgctggcaacatatttttttacatgagtaaaaacctcaaaagcagaacacacacaaaaagaactgctgtcactaagtctcactaataccatcagccatyatttcataaaagaaggaccacatttcacactccaccccgtcccccccaaaaaattaccaaggatatcccagaaaactggatgcctttcaattgaatgaat

SEQ ID NO: 205689 - DNA, 201 bp, Homo sapiens
ctctgccttggagtcagcaaagaatccaattcatggacacagtttgagttctaggaagcttcttctgaaaatcgattcttgtttacatccacacaaaagamaaacataaatagggcaattatctgagtgatttcattctacagcaaaaaaaaatctctctgtcttattccacagccttgggttcaagacaacataaggggt

SEQ ID NO: 205690 - DNA, 201 bp, Homo sapiens
caggaagatcacttgagcccgggagtttgagaccagcctgggcaacatagtgagtccccatctctacaaaaaataaaaaaaattagctgtgtgtggtggcrcacacctgcagtctcagctacttgagaggctgaggtgggaggctcacctgagcccaggaggtcaaggctgcagtgaaccgtgatcacaccactacactcc

SEQ ID NO: 205691 - DNA, 201 bp, Homo sapiens
gtccccatcacagagctgtgacctccaaaaggcagctgagctaaatctgcaaatgtgtctctgagaggagtttggatgaccttccatgatgatgaccaccrcggggcgagatcttccctttctcccactgcagtggctctgccttggagtcagcaaagaatccaattcatggacacagtttgagttctaggaagcttcttc

SEQ ID NO: 205692 - DNA, 201 bp, Homo sapiens
agcctaaaggttctcagctcccgaaggagtggagggatgaatgggggtgggcagggaagaatccaagccccctttctatcacttgttagctgtgggttctygagcaagttaattcctgctttggatttttttttttttttttttaaagacagggtctgattctgttgcccaggttggagtgcagtggcgccactctagctt

SEQ ID NO: 205693 - DNA, 201 bp, Homo sapiens
aaatctgtgctctgagaccccagtggggaagcgaggtcattgttcctccaagtgcctggagcatcctgtgggaaccagggtggggcctctgggggacatakcagttccctcacctgccttctgaccatttctcttgcaggtgagggtgaggtttgagctgaagtccccggtgaagacgatagaagacttcctgcggaggtt

SEQ ID NO: 205694 - DNA, 201 bp, Homo sapiens
ggacacggttcagcccatgacaacggagctgacggctcacgttcttgtgtgtgtctttgtggagttgagcctcgtgcctgtgtgcttctgggcctgtgtcrccctcggccgggcctctctctctcagaagcccaaggcagcctctagcccaggtaccaggcacctgatggtgatgtcgttctccagcctcccctttgtgtt

SEQ ID NO: 205695 - DNA, 201 bp, Homo sapiens
ccaaggcagcctctagcccaggtaccaggcacctgatggtgatgtcgttctccagcctcccctttgtgttgtgggctgttcacgcaggagtacgttcccawcccctcgcattcgctcttccttctggcatggacctgtataggtcgatgcacctgtgtaaggtgccaagttgccgtctggcttggactcatcagaaatcac

SEQ ID NO: 205696 - DNA, 201 bp, Homo sapiens
atggacctgtataggtcgatgcacctgtgtaaggtgccaagttgccgtctggcttggactcatcagaaatcacagtagttgctcaaaagtcagtgtcacarttaagaacatttaatgtagaacatttttcttgtttctataaagtttatcgtttgtccttaataagcataacctgaacttggagactatttgttattttct

SEQ ID NO: 205697 - DNA, 201 bp, Homo sapiens
caatattctctgctttgaaacttactttgtctgatagcaatatagccattttagctttcttttgactagttacagcataaccttatataacatatttgcawcttgtatttaaagtgcatttttttagacagcaagaaattgagtcttttgctaatttttttaaaaacgagtctgccttttaattgaaatgtgtaaagcttt

SEQ ID NO: 205698 - DNA, 201 bp, Homo sapiens
ggacctgtataggtcgatgcacctgtgtaaggtgccaagttgccgtctggcttggactcatcagaaatcacagtagttgctcaaaagtcagtgtcacaatkaagaacatttaatgtagaacatttttcttgtttctataaagtttatcgtttgtccttaataagcataacctgaacttggagactatttgttattttctac

SEQ ID NO: 205699 - DNA, 201 bp, Homo sapiens
tttatgccattttttctaggaattattgtaaagggctactgaacctctgaacataatgcagatatgtgtatttctctttgcagatctatcagttttgcttmatttactttgaagctttgttgtcaggggcattttggcccttttataaatccctggcaatattctctgctttgaaacttactttgtctgatagcaatatag

SEQ ID NO: 205700 - DNA, 201 bp, Homo sapiens
actgctgggggagggtgggatgggccagtccactttcttggcagctgaagcccagcccctcacctcatgctggacagagtcatgtgtccaggttctgtgcrtccttgcttccggtgcactgggctgatgccacccgagagctggggaggcatttgcggggcatctgctcctggaattaggatctccctgagttggaatcct

SEQ ID NO: 205701 - DNA, 201 bp, Homo sapiens
attttttataatgtgagttatggtaaacttgttgacacttcttttaggacctaaaatatggtctatcttgctaaatgctctatgtgcttttgagaataacrtgcattctgctgtttttaggtggagtattttatagatgtcaaacaggtaacactggttgatgatgttattcaagtcttctgtgttcttgctaattttatg

SEQ ID NO: 205702 - DNA, 201 bp, Homo sapiens; identical to SEQ ID NO: 36181

SEQ ID NO: 205703 - DNA, 201 bp, Homo sapiens
tttctaaataaatgcaaattttgttctagcctcgagttaggactgtagctggtgtttgattaacgtacttcagttcccaggagtacccagttagtctgtgygtgatattctgagtctgtaaacattagttcaatactgttactctacaaaaacaaatgagtaagcaaacattaatttcgaggagaattgttcttaaattat

SEQ ID NO: 205704 - DNA, 201 bp, Homo sapiens
ctggagtcccctcgaagttacccacctgtgaccgcctgcccttatgcacagatcattcgccttttacttggggagcggtggaggggtgtggataggtgcasactcattgcagagggctcactgtgcctgggaatcgctctgcctgtgtaaatcaacttactacctgtgtgtaggtgacaaactgaggagggcacagaggtg

SEQ ID NO: 205705 - DNA, 201 bp, Homo sapiens
tattaccaaacttgtgtatttttgtttttgttgcctgtcctttcggggtcaaatcaaaaaaattattacccagacaaatgggaaatattttttataatgtragttatggtaaacttgttgacacttcttttaggacctaaaatatggtctatcttgctaaatgctctatgtgcttttgagaataacgtgcattctgctgtt

SEQ ID NO: 205706 - DNA, 201 bp, Homo sapiens
tgtaacatcactgattgtttttgtgtcccaggaataccggccacgaacgttctggtttaacatggccgacgccgccttccagagcctggtttgcttttccrttccttacctggtaagttggcccctgggtgcagtttttcttaccagctggatccggggacctacagatccaggaccccactgtctttcaggcctactatg

SEQ ID NO: 205707 - DNA, 201 bp, Homo sapiens
tccatttttattctaactgctttcacagaggatgccaatgcttcactgtaacatcactgattgtttttgtgtcccaggaataccggccacgaacgttctgstttaacatggccgacgccgccttccagagcctggtttgcttttccattccttacctggtaagttggcccctgggtgcagtttttcttaccagctggatcc

SEQ ID NO: 205708 - DNA, 201 bp, Homo sapiens
agtgactccatttttattctaactgctttcacagaggatgccaatgcttcactgtaacatcactgattgtttttgtgtcccaggaataccggccacgaacsttctggtttaacatggccgacgccgccttccagagcctggtttgcttttccattccttacctggtaagttggcccctgggtgcagtttttcttaccagct

SEQ ID NO: 205709 - DNA, 201 bp, Homo sapiens
tcaacctccccaggttgcagctgactgaggatgttctccgtgccttgctattagagagcaagggtggtgaatcctgtggggctgccctgccggaagcctcrcggaacctaaaacacactgaatggtttctttccgctccgcccagccttcccccatgatgcctcaccctgcgccctctccccgcagcgcagcgtctggcca

SEQ ID NO: 205710 - DNA, 201 bp, Homo sapiens
tgaagtccttaggtttgaaacagtgattcccaggagcaggtaagtgctgaaagcctcatcaggtggcacgtttactaaagccacttgtttcttttgaaacrggtttaatatagaccatcttaaaatgtcatgacctcatgggacaatgcagggggacagaaataagttgtcacctctgagtttgggactgaagatcccaga

SEQ ID NO: 205711 - DNA, 201 bp, Homo sapiens; identical to SEQ ID NO: 36191

SEQ ID NO: 205712 - DNA, 201 bp, Homo sapiens
ttcttgcaaacagactggagttgtgtgtctgttaccccctcctttctcgcacatgttccagcgttatgcatgatgtggagcaaagctttattaataaggttgccaggaatcaccagccatagaaatgcctacctttttgagtgaacaattccatttctataaatctatcctgggaagataatctttgatgcagtcaaagat

SEQ ID NO: 205713 - DNA, 201 bp, Homo sapiens
ccacatagcctagaaatatcgaaaaaattaaagcgggccaggcatggtggttcacacctgtaatttcagtactttggaaggacaagacaggaggatcaccrgaggccaggagtttgagaccagcggggcaatgtggtgaaaccccatctctactaaaaatgcaaaaaccccagcgtggtggcccatgcctgtagtcccagc

SEQ ID NO: 205714 - DNA, 201 bp, Homo sapiens
taccaaaggaatgcatgtctgggctttattgatacaaagttcagcctggtttctcctgacatactgtccaagtcatcaaagaactttctcgtgaggtcccmtgtgcttccacagtggagccagggcagtggtccatttagcactgaccacctcaggatcattgcaggcactgaggacttctttatccagttggatttgtct

SEQ ID NO: 205715 - DNA, 201 bp, Homo sapiens
caggtaggtgggtttcaagtggctccgcttccttcccctggggtggtccatgtttatcgtggcccccttggcagacactcacattcctggcagctgctgtkagaaggacctcaccctccgcattcgggtttaggatgtgcatgttattgccttggaagaggtaaagtttgctggaatttcttagtaccaaaggaatgcatg

SEQ ID NO: 205716 - DNA, 201 bp, Homo sapiens
ccagctaattttttctattttgtagagacagggtgtcgctatgttgcccaggctggtgtcaaactcctggcctcaagctatcgtcccatctctgcctcccmaagtgtggtattataggcatgaaccaccatgtccagtcttcttttaaatcttaaaaaaacaaagcaaagcctgtgagttgagccagctgatccctaattc

SEQ ID NO: 205717 - DNA, 201 bp, Homo sapiens
ctttcctgttctgctgagctgggtagctgtagctatgaggatcagagatgatgcctctccctctccccccagcagaggtccccgtggacaatcaggtcacygcagcgatgttgatgaggtcattggctttgctattgtgcttttgtgtgtcctcccctcagtgggagtcagtcactgtccactgcacctcctcagagagta

SEQ ID NO: 205718 - DNA, 201 bp, Homo sapiens
ctcaaggtcatggctgtctttggcagaaatcgctgccaatacatttaatcttgactgtgaaactctgcaggcctgtcagctccctcggatgagaatcctcrgcaatggctgaagactcgcctgttcctgttcttcctttcttgatttcagatgttcgtgggcctcctgttttggttccagtttttctgtggcttctctgca

SEQ ID NO: 205719 - DNA, 201 bp, Homo sapiens
tgtttgacttttgagtccctgaaacttaactgctgatagcttactgttgaccggaagcattaccaatcacataaacagtcgattaactcatattttgtacrttagatgcattatatactgtgttattacagtaaagtaagctagagaaaagaacatgttattaagaaaatcttggctgggtgcggtggctcacacctgtaa

SEQ ID NO: 205720 - DNA, 201 bp, Homo sapiens
aagtcagtgtcacaattaagaacatttaatgtagaacatttttcttgtttctataaagtttatcgtttgtccttaataagcataacctgaacttggagackatttgttattttctactgtcccagtgcaatggtgtctttgtctggctttcgctggagaagtccacgggagacacgtgatagggggtgtcctcactccaca

SEQ ID NO: 205721 - DNA, 201 bp, Homo sapiens
ctttcacagaggatgccaatgcttcactgtaacatcactgattgtttttgtgtcccaggaataccggccacgaacgttctggtttaacatggccgacgccrccttccagagcctggtttgcttttccattccttacctggtaagttggcccctgggtgcagtttttcttaccagctggatccggggacctacagatccagg

SEQ ID NO: 205722 - DNA, 201 bp, Homo sapiens
ttgttattttctactgtcccagtgcaatggtgtctttgtctggctttcgctggagaagtccacgggagacacgtgatagggggtgtcctcactccacaagygcagagcagggttttgtacctaaggatatctcatacctgccaggcttttgatgctgtggctggcaaagtggtttgccgtctcgaatctctctttaaagga

SEQ ID NO: 205723 - DNA, 201 bp, Homo sapiens
cagcctgatgctcgcacttccccggccatgctcatctccctcccgcctctttcccgcttccaccaccacattctctcctttccctcctgtcttgccctctygcccctgactccatctcacctcatgtgcatctcccagggcggtccatgggttctggaggcctcattgagccccaccggttacccgcgtcatagaccgcag

SEQ ID NO: 205724 - DNA, 201 bp, Homo sapiens
ggtgcggggctcccaacccaggctgaaccagaaagctgccctatccagaattgtttggagacaacacacacacacacacacacacacacacacacacacacgcttcagggattactgattttcaaggaagtataaagacgtggctgtcacagcagctcaggtgcctgaagcccagtgctatttatagaacaggcactggca

SEQ ID NO: 205725 - DNA, 201 bp, Homo sapiens; identical to SEQ ID NO: 36175

SEQ ID NO: 205726 - DNA, 201 bp, Homo sapiens
aagtggtttgccgtctcgaatctctctttaaaggaaaaccttactccgtcttggcattgccaagggagcagtagacacggcgttggctgaacggcccttgwgtggccccactgtgtctgctctggcgaagaacccttgctgttggtaaataactgacttgtggaaaatatatcctcccagcttgcatttcagccttgcctt

SEQ ID NO: 205727 - DNA, 201 bp, Homo sapiens
agcatgtgggcttgagagtgtggggaatgcgtgcggagagggggtgtgggtgtgaaaaggtagcctctcggaaggcactcccttggtggccctgcctggcrtgggttaggctgggcccctgctgttgttctggaaacctggaaccacagcaggcctgggttacagttccggttatgaggcctccccctgtgacctgtgctc

SEQ ID NO: 205728 - DNA, 201 bp, Homo sapiens
gtagcctctcggaaggcactcccttggtggccctgcctggcatgggttaggctgggcccctgctgttgttctggaaacctggaaccacagcaggcctgggytacagttccggttatgaggcctccccctgtgacctgtgctctggcccctggggccatatctgtcccagggcggtcctagcccaagactgcccagccagcc

SEQ ID NO: 205729 - DNA, 201 bp, Homo sapiens
cttggtattcccaccccaagaacaacaggcctctttaaaataattattctagaaaatttcacatacatagaaatgtgcacatgtgacaaactgccatgtascattgtccagtttcaacaattagcaactcatggctaacattattttatctgtattcccacctactcccttctcctctgtcattctgatgcaaactccaga

SEQ ID NO: 205730 - DNA, 201 bp, Homo sapiens
cacagttattaccttacttggtattcccaccccaagaacaacaggcctctttaaaataattattctagaaaatttcacatacatagaaatgtgcacatgtracaaactgccatgtaccattgtccagtttcaacaattagcaactcatggctaacattattttatctgtattcccacctactcccttctcctctgtcattc

SEQ ID NO: 205731 - DNA, 201 bp, Homo sapiens
cagatgaggaaactgaggcttcaagactcaatagcttgcctaaggtcacactgttaggagatggcagtaccgtgatttgagcccagatctaccctgctctsaccccgtgttcacagttattaccttacttggtattcccaccccaagaacaacaggcctctttaaaataattattctagaaaatttcacatacatagaaat

SEQ ID NO: 205732 - DNA, 201 bp, Homo sapiens
aaactcaacctaggccacgaatggagagccttggaacagagccctccatgcaagtcttctcagaaaggtgcttagtaggtgctttggaggcccgtgagctyttgcatagtagggaactttagatccgctcagagacctgccttatttctgtttcagcatcagatctgcctgttgtatagtaatctaggacttttctagaaa

SEQ ID NO: 205733 - DNA, 201 bp, Homo sapiens
cagtgccttgcggtgtctctcctcctccgcccagggtgaggcccaggactgcccggtctcttggggaccccatcgcaacaaagcctgccccgccgatgctygggcataggctgccttcctctgagagcaaactgtgactgagcattgggaaactttcttccaaagggacaggccctttcaaatggcttcgtgtcctctgca

SEQ ID NO: 205734 - DNA, 201 bp, Homo sapiens
caatgtggaaactttggaaattgaattctttttttctccccagggtttgttgttgctgtttgttgctattgttgtttatttattgacttttatgaaccagytctgtaaggtctgtattctttgtcctgtggtagccactgaagactgtgcttgattatcttagtggtcaaataatgatggacagagtctcctaatctttgc

SEQ ID NO: 205735 - DNA, 201 bp, Homo sapiens
tggcatttaaaataaaacaatgtggaaactttggaaattgaattctttttttctccccagggtttgttgttgctgtttgttgctattgttgtttatttatygacttttatgaaccagttctgtaaggtctgtattctttgtcctgtggtagccactgaagactgtgcttgattatcttagtggtcaaataatgatggacag

SEQ ID NO: 205736 - DNA, 201 bp, Homo sapiens
tggcttgaacccgggagggggaggttgcagcgagctgagatcgcaccactgcactccagcctgggtgagagagtgagattctgtttccaaaaaaaaaaaaagaaagaaagaaatgagtgggctccaggtgagcttggtgggctgcccccagacatgcaaacctagcactcaaaaattaaaaccccagtttttcactgactt

SEQ ID NO: 205737 - DNA, 201 bp, Homo sapiens
gcagagcaggacctccccagtgtgctggcccagggccctgtctctgggctccaccctgagcaggtacctttgcatgaagactcctctcagcgctgaagctratggtggcactgatccaacatactgtactaccatgccatgtggggttgacatgagaaaggacaagtagattaatggaacctaataagcccaaatcaaatg

SEQ ID NO: 205738 - DNA, 201 bp, Homo sapiens
tgtctctccacgaagccaccaggctgtgccaggcagacacaacacccccgccccgcccccctgtgttgtgctgacttcatcatgagggctccacagggctkctggtgctccccagagatccttcacctgaaacatcagggctgtttaaagtctaggcttcaaggagaaaatcgtctagaagcaagtcttgatgctgtttaa

SEQ ID NO: 205739 - DNA, 201 bp, Homo sapiens
tgaattttaacacgtgcatagatctgtatatgtatatacaccaccctatccacggtccaggagagttccatcatccccagaaagtctgccatgctaccccygtgcaattgtaacttccctccttttctaacctctggaagccaccaatctgttctccagaactacagttttgtcttttccagatgtcaagtaaacagaata

SEQ ID NO: 205740 - DNA, 201 bp, Homo sapiens
ctctttggcaaactgatttcaaatcttttgcataaatacccagaagtgagatgttggttcatatggtaattctatttttagttttgggggaacctccatayagttttccataacagctgccctaatttatatttccatcaacagcatatgagtgttccctttgttcacatcctcatcaacatttgatatcttttatctttt

SEQ ID NO: 205741 - DNA, 201 bp, Homo sapiens
aagctttttggtactataggaaaaaaaatctcaattatctgagtacttatcttctctttctcttgactgtatttgctaccgatgactcactaggccaagcytgcgggggtgagtgagcgagagccagccgtaggagtgaggaagggaagaaagtcaatgaataaaaaccaaatgttcgttttcagcatgtagggaaaggct

SEQ ID NO: 205742 - DNA, 201 bp, Homo sapiens
catccccattccacagatgaggaaactgaggcttcaagactcaatagcttgcctaaggtcacactgttaggagatggcagtaccgtgatttgagcccagayctaccctgctctgaccccgtgttcacagttattaccttacttggtattcccaccccaagaacaacaggcctctttaaaataattattctagaaaatttca

SEQ ID NO: 205743 - DNA, 201 bp, Homo sapiens
gtacagagaccacgtagcaaggccttccttggccggttgggagtttgcccttcctagtggtgatcagtcccggagtgaaaacaagtctatctgcaaaacamataaacaccaggctctagagctgcttctggatgcctagtgactggtgaacagcagttctgtctcagctcttgcagagacccacagggcgagccacccact

SEQ ID NO: 205744 - DNA, 201 bp, Homo sapiens
gcaaaagcagagacaccaggacaagacccaggagttaagaatgcgcagggaccacgccagttcttcttaagcagggttgacatccctgtaggtaggttagsgcactggacgcttgcggaatattatttccacattgccattcacatgtttgttggaaataatttttcggtacctgttacatatcatatattactgggctca

SEQ ID NO: 205745 - DNA, 201 bp, Homo sapiens
gatcttgcctccttagcctaagttcaggggaaatggatgcaaagctctgaaagtcactgatctgggtgctgtgaggtgacatcatcacaggtgacatcacyagccagccatggagaggtttgaacgaaccttccccctttctcccagacagatgtgaccaggctttatgaaaatttgtctgtaaagaggcacttttcacca

SEQ ID NO: 205746 - DNA, 201 bp, Homo sapiens
ccttcatgattttaaaaatacattggttctgtaaacatttacttaataatccattttccagaatctttgtcctgggtgttttaaagcagcatttctcaacygggagcgattttgcacccccaggaggcatttgacaatgtttggagctgttttaggttgtaacaacttgtagggagggagccctactggcatctataggag

SEQ ID NO: 205747 - DNA, 201 bp, Homo sapiens
ctgagcagatgagaaggtgagcttctcactcaacaaagtcctccttttgttttcttttctgccagggcttttgtttctcttgtctcccctctcctactccktctccgtgcctctttcccttcccttccaggtgagcctcatctcttcctctgtggcacccttggctctttcatggcatattccctccatccctccctctta

SEQ ID NO: 205748 - DNA, 201 bp, Homo sapiens
caggggtgaggggggaaaccttaaatcagcagacctggagccctgctcccagaaatggagtgtgccttgcaagggtgctgctggaggaggacctgggccaktgatttcatctgtcccccaaagcctgcctaggctattgttatcttttttttttctcccttttgcttctatgtactttgtgatgactcgaatataatctta

SEQ ID NO: 205749 - DNA, 201 bp, Homo sapiens
ataatacatttaaaagataataataaagttggaagcttaggctcccaggggcaggatcccaactaagattacagaaagattctgacagttgccaaatgctrccataaaaccagagggtttccttgcctcaagacacagggagcttcctggtgatgaatgaaaccacatacatctcagcagcgtgttttagagaagtgcctg

SEQ ID NO: 205750 - DNA, 201 bp, Homo sapiens
tcctgcagtgtctggggtgccaggcatccgcctaagcaatcaggcaagccacccgcaaggagctcactcccaaggcatccagtccccttgctctgccacascaagggacagagagatgtctctgttgtcatccatccattttctagtcataaaatcctcagaagggcactggctaattcatgtttcgttctcttccctgga

SEQ ID NO: 205751 - DNA, 201 bp, Homo sapiens
aggacgagggggcagtggggtcactaccaaccttcctgggaactgagtgaccagaggacattggctcagcctttgcctaggagggaacctttgctgtctcrtatatgtgcttcatacaacaggaaacagtcttatttaactgtctaaattagttttctaaataaatgcaaattttgttctagcctcgagttaggactgtag

SEQ ID NO: 205752 - DNA, 201 bp, Homo sapiens
tgctgatatgtctggcacggcccaggtaccagggcaggggaaataacagcagtgtccatcctccactgtgagccatgagccgcgagccaggcaccgcccgrtagctgcctgcctaattttcttcatcttaacctgcttcctgggggaaagaggctgtggggtgtttgtgagccctgccacgggcagtaccaggggtgaccc

SEQ ID NO: 205753 - DNA, 201 bp, Homo sapiens
gtggagaatattggattactatgctactggctgttaaacattgtctctccacgaagccaccaggctgtgccaggcagacacaacacccccgccccgccccmctgtgttgtgctgacttcatcatgagggctccacagggctgctggtgctccccagagatccttcacctgaaacatcagggctgtttaaagtctaggcttc

SEQ ID NO: 205754 - DNA, 201 bp, Homo sapiens
gcaggctgctggaggaaaggtgagaccggcaccaggagtgaagttatagagaaaagggtttgcgtctctgtgagaagaacttgatcatgaatacaatacckctgtctaatccacagagctggaagaattaaggtgaggctggagagtttgggtattagatgagaattggctgtccagggctgggagcttccagcccgagct

SEQ ID NO: 205755 - DNA, 201 bp, Homo sapiens
gcacctggcaggtggtgagtgctcagaagggtggctgccctcagcactgccctgctgctgctgtcattgaaaggcaggctgctggaggaaaggtgagaccrgcaccaggagtgaagttatagagaaaagggtttgcgtctctgtgagaagaacttgatcatgaatacaatacctctgtctaatccacagagctggaagaat

SEQ ID NO: 205756 - DNA, 201 bp, Homo sapiens
atgaaaggtgtgagggttaggttagacttcatctttccacatgtggctgcccagttcctccagtgccatttgttgaaagcgtcttcttttggttgaaagcrtctttgtcaaaaatcagttagttacatttgtgtgggtctgtttctagactttctgttctgttccattcatttgtttgtctatcccttcaccaatacgacg

SEQ ID NO: 205757 - DNA, 201 bp, Homo sapiens
gtttcagtccaaaaggggcagagcctgggagcagaacaggtggccctggggctctggggtcccaagagatgttactcagggccactggctgagtgcctgcgcgtgctgctcagtcagagcctcctgtgtccctttgatctttgatgtgtgtggatgagatcaagttgtttaaatatttctggcttttgagaaagtgtctaa

SEQ ID NO: 205758 - DNA, 201 bp, Homo sapiens
tctggcctgtcctttgcactgcacctggcaggtggtgagtgctcagaagggtggctgccctcagcactgccctgctgctgctgtcattgaaaggcaggctrctggaggaaaggtgagaccggcaccaggagtgaagttatagagaaaagggtttgcgtctctgtgagaagaacttgatcatgaatacaatacctctgtcta

SEQ ID NO: 205759 - DNA, 201 bp, Homo sapiens
gtctgtttaaatccccaagtctgtggcgagtagctacttcatatactgccctggtctgggctctgagtcctcgcagaagttcccactcaaaacttcttgcrccggctttcaggcttcttgaatggagcagggaactgtcttgctgtggctgatctgctcctccccagtgtggccaaagccaccacagcctctctggggctc

SEQ ID NO: 205760 - DNA, 201 bp, Homo sapiens
agcgaaaagactagagggcaatgctgaagcatggttttcacaaagtggatagaagctctgtatattttgtgcaattaaaattgtaagtaatttacaattayaaaatgacatatatgtatatgagagatgaagttctgtttacagcttataataaaatcaaagtaccttaaatagtcacgccccaagatcctcggcaggcta

SEQ ID NO: 205761 - DNA, 201 bp, Homo sapiens
aatcttgaaagagaagaatgaagttggaagattcacatatcttgactccaaaatgtactacaagactacaggaatcaaaacagtgtggtctacctgagatrttgtaccctttgaccatcatctccccatctctcccaactcccagcctctgtaaccacaattccactctctgcttctgagtttggttgctttagattccac

SEQ ID NO: 205762 - DNA, 201 bp, Homo sapiens
atgccactgggcttttcctcctctatcagacagtgccctcccccatcggcctcggcaccagcccatcgggcttccctggggcagtgggctctgctgtctgwggacctcagcgagggcactgtagggagtggggcggtgagcgattggctgggcagggttgtggggggctctagcatccctgtctccgctctagatgccccc

SEQ ID NO: 205763 - DNA, 201 bp, Homo sapiens
ctaactgctttcacagaggatgccaatgcttcactgtaacatcactgattgtttttgtgtcccaggaataccggccacgaacgttctggtttaacatggcygacgccgccttccagagcctggtttgcttttccattccttacctggtaagttggcccctgggtgcagtttttcttaccagctggatccggggacctacag

SEQ ID NO: 205764 - DNA, 201 bp, Homo sapiens
ttctgtggatatgatcatttttgttatcaggtatttatgcatgagaaccctcccttcatggcctttcccagctctactcctcagggtgggtttttgttgtkattgttgttgtttttaacacaagtgactccatttttattctaactgctttcacagaggatgccaatgcttcactgtaacatcactgattgtttttgtgtc

SEQ ID NO: 205765 - DNA, 201 bp, Homo sapiens
ggcgcccaccaccatgcctggctaatttttctatatgtttagtagagacggggtttcaccatgttaaccaggatggtctcgatctcctgacctcatgatcygcccacctgggcatcccaaagtgctgggattacaggcgtgagccaccgcacccagccagtttcatctttttactgtgaacctggagctactgaagctcgt

SEQ ID NO: 205766 - DNA, 201 bp, Homo sapiens
gtcagtgtcctccctgggagcacgaggacaacgtcagccctgaaaggccacagtacacagtaagacgtgaatgatgtttccctggcctggccagtgcctgsctcagccgcgtagccactggtgtctggtattcctgaagaagtggaaggaaatccttggcagattaaaaagaaaaggaaacacagaatggaatctcaaaag

SEQ ID NO: 205767 - DNA, 201 bp, Homo sapiens
ttttgtcttttccagatgtcaagtaaacagaatactccagtgtgtaactttcagagcctggcttctgtcactcagcataacacttttgagattcacctgarctgttgcatgaaccagtagtatatttctccttgatgctgagtaatatccactaacaccagattttgcatatccattcaatcagtgaagaacattttagtt

SEQ ID NO: 205768 - DNA, 201 bp, Homo sapiens
cccagttactgccatatcccaccccatgccctggaagcaaagctctccctctcctatccatctccacactttcgcacatcctggttggtgatttgctgcasccatgagtgtgtgtgcatcagctgtctgttccccctacggcagtaactgtgtcttttcagtcttcttttctctagtctggcttcattttctgaatacaaa

SEQ ID NO: 205769 - DNA, 201 bp, Homo sapiens
gtttgcttttaacattgggacacatccatcgtgtaattttaaaagtgaagactcactcttaagaaacattctaagggacccaccaccaagagaggcaaaamctggtcaaagtggaaggaatagaagggctcaaactgggggagaatgcccggaatttcaggtgctattcctacttcctacttgagagacatgttccctggg

SEQ ID NO: 205770 - DNA, 201 bp, Homo sapiens
catctatatcaaggttattttcatttctgcccatgggtatatagctgtttgcttttaacattgggacacatccatcgtgtaattttaaaagtgaagactcrctcttaagaaacattctaagggacccaccaccaagagaggcaaaacctggtcaaagtggaaggaatagaagggctcaaactgggggagaatgcccggaat

SEQ ID NO: 205771 - DNA, 201 bp, Homo sapiens
agagctccttccccagtgtgtgtttcctgcaggtcccgtgccagctgctctggtacttggcagggtcaaatacacatttggtcacccgggtaatagagacyattcatctatatcaaggttattttcatttctgcccatgggtatatagctgtttgcttttaacattgggacacatccatcgtgtaattttaaaagtgaaga

SEQ ID NO: 205772 - DNA, 201 bp, Homo sapiens
gctgtgagacgtgattatgattgcactactgcactccagcccaggtgacagagtgagactctatctcaaaaaaaaaaaaaaaaaaaaaaaaaaaaaaaaarggctgtagctgtttgaattagctaggaatatatggaatagctccaaattgcttagtgggatcatgaagaccccgtgacccgcaaagatcatgatacggtg

SEQ ID NO: 205773 - DNA, 201 bp, Homo sapiens; identical to SEQ ID NO: 36190

SEQ ID NO: 205774 - DNA, 201 bp, Homo sapiens; identical to SEQ ID NO: 36194

SEQ ID NO: 205775 - DNA, 201 bp, Homo sapiens
tgtgttcagaatggggattttccttccctgttgtgtaccttgcattttgagaagagaagacaaatctgacgccaggtcggcatcaccagtaacaggaatcmctctccctttgaaggcagtgatggccagcgactttgcagtgccgaaattccgatacctggagaggctcttgattcttcacgggcattggtgctactcccg

SEQ ID NO: 205776 - DNA, 201 bp, Homo sapiens
agatcctaagttgaaggtggtgcaaaaactgactttctagcagggttgcctgataattgtagggcacttagcacaatgcctggcatttggcaagcctcccmaaacttgtaattatgttgatggtgatgacgatcagaatggcagtgccctcacgaattactggcgagggagactttatgtacttgtactgaaaggtgccag

SEQ ID NO: 205777 - DNA, 201 bp, Homo sapiens
ctgggaatcgctctgcctgtgtaaatcaacttactacctgtgtgtaggtgacaaactgaggagggcacagaggtgtcccactccagacttaatctgatgcyctcttcagagggctcgaaacactttcaccagaagaggcccgagttggctgagcagatagtggatgtgactgtatgatatcagcaggatggggccatggct

SEQ ID NO: 205778 - DNA, 201 bp, Homo sapiens
gcctagcgtgggcctcacacattgataccatgcagtaatcagtatatgttttttgcatgatgagtacatgcatgtacaagcagggactgcacgttagtttrccattttaataagataactccttattggggaaatatcgcttgtaaagcttagaagaaatggaaatatcacttggagcaattttaaagcacgtggtaaaat

SEQ ID NO: 205779 - DNA, 201 bp, Homo sapiens
ctcttccagtctgccattcgcctggagaccaacctgcacttgttaggtaattaacttgagagtcgcatgcctaagggcagtgtggagtttgcagggacggycctggaggggtgagtgctcttgtcagcggctgctccgcaggctggccttggttagggagccacctggcaggacgctggcacagccgaggcgggagggtgc

SEQ ID NO: 205780 - DNA, 201 bp, Homo sapiens
cacagccgaggcgggagggtgcttgcctgaatcttctcctagtctcatttctgtgaggtgcacgtgctgccccccaggcaccccaagacagcagctgccaygcttccccttaacctggtttcccaccaaaaatagagccaaggagtgagatttctgacagttgggagttgaaaggattttcccctcgggaaacagggaaac

SEQ ID NO: 205781 - DNA, 201 bp, Homo sapiens
agttaaggtttgcatttaatagcataatgtacactaggcataacatatatctgcacacattttatatattgtttgcccacagaatcttataggaggccacrcattacttggaaagccccgggatccaggggcccagtggcaccatgagtggcagccctggatgtgaattaaatggaacacctgagaaatggctgtgcctgt

SEQ ID NO: 205782 - DNA, 201 bp, Homo sapiens
gggccttttttttttttaagtgacctctttctccaagaaagtttgcgaatttatactaaaggttgacctgatgacctggtcattgcttttatttatttatytataattagcatatagtaaaattggctctttttttggttatacacttacatgaattttaacacgtgcatagatctgtatatgtatatacaccaccctatc

SEQ ID NO: 205783 - DNA, 201 bp, Homo sapiens
agacgtgcccgcccagcctcattgaccaggcttgtttttaacccttcactgtggggcaccttccccagggagcagcttttcccctggacagcactaacttstcaaatggagtgaaattggccctccggtgccatttcacagtgcttgctggttccgccccctggagtaatgcagacagaatctcctcccttttccacatga

SEQ ID NO: 205784 - DNA, 201 bp, Homo sapiens
atctcctcccttttccacatgatgaaaccttgactatttggggacatggctgtgagtcccaggctgccccttctccatcttccctgctctcagagcccagragccctgactcagttgtccagccctgctctgccactgcaagctggtcatgcgggctggtcatgcaggctgatcggacagcctggggcaagtggctcaatc

SEQ ID NO: 205785 - DNA, 201 bp, Homo sapiens
ggggtgggcagggaagaatccaagccccctttctatcacttgttagctgtgggttcttgagcaagttaattcctgctttggatttttttttttttttttttaaagacagggtctgattctgttgcccaggttggagtgcagtggcgccactctagcttactgtatcctcaaactcctaggctcaagcaatccccctacctc

SEQ ID NO: 205786 - DNA, 201 bp, Homo sapiens
cagccctgctctgccactgcaagctggtcatgcgggctggtcatgcaggctgatcggacagcctggggcaagtggctcaatcctttttgcatccaagttcygctctgtggtaatcccagtgttttgggctcttgtgagggtgaaaggaagggatgacggggggcactgagcgtggcgcaggcacagggcctggcactgagc

SEQ ID NO: 205787 - DNA, 201 bp, Homo sapiens
tggtcatgcgggctggtcatgcaggctgatcggacagcctggggcaagtggctcaatcctttttgcatccaagttccgctctgtggtaatcccagtgtttygggctcttgtgagggtgaaaggaagggatgacggggggcactgagcgtggcgcaggcacagggcctggcactgagcggttgtgtggtgagtctcctggtt

SEQ ID NO: 205788 - DNA, 201 bp, Homo sapiens
aagtatatctcactttaaaaaatattcttaattttcctataagtcaattattactggcattctagatcttctaccctggaaatctttgatttaaaaatatytaagtaatttcttcttttcttaaaactttccaccctacacaattgtcagattaacccttagattattagcatagagttaggcaaaatttccttacatttg

SEQ ID NO: 205789 - DNA, 201 bp, Homo sapiens
cgtctcgaatctctctttaaaggaaaaccttactccgtcttggcattgccaagggagcagtagacacggcgttggctgaacggcccttgtgtggccccacygtgtctgctctggcgaagaacccttgctgttggtaaataactgacttgtggaaaatatatcctcccagcttgcatttcagccttgcctttactgtttagc

SEQ ID NO: 205790 - DNA, 201 bp, Homo sapiens
actctattctcccagggtggatgctctactcctttttcccccatcttccccaggacgctttcacaggactgagttcagcggggactcccaagaaaatctarcacattgatttgattctgtgctgtttctagaatcaaacaattcttcttgcctgtgctgtttctaggtgatggagccaatgatgtcagcatgatccaggtg

SEQ ID NO: 205791 - DNA, 201 bp, Homo sapiens
tatccacttaaaaatgtttaaattgtgtctcccatccaagtactgaccctgcttagcttccaagatcagtcaagattggatgcattcagggtggcatggcmgtaaatgaaattttttatcatggcaaaatatgcataacacagagtttactattgtaatcatttgtgagtgtacagttcagtggcattaagttcattcgca

SEQ ID NO: 205792 - DNA, 201 bp, Homo sapiens
gctccacaacgtgctgggctgaatttaacctccttcccttagtttagaaactgcccgggaagtgtggctgggagtagccttggctgcttggctggagtggytcagtaactaatgatgatgaagatgatgatagcatctttccttgtgccagacagcaggatgagggttttactggtgtaagagcggcactgcagagcaggc

SEQ ID NO: 205793 - DNA, 201 bp, Homo sapiens
tctgtaagacaacaacagaaactgtgagcactttctttcttgccggtgagatatttatttgaacatgttgctctgcagtgggcgaacccttcacggtgtckgcttccttttgtctgagatgctggggtgctgcagcagagatgcagagggcagtgcttcagcttgaggctggcatgtgtgggcagcacttttgcaggtgat

SEQ ID NO: 205794 - DNA, 201 bp, Homo sapiens
gactcaatccccgcacactgatgactttaaaaatggaaggaagccataagtcagggaatgtgactcaagaagctggaacaagcaaagagatgcattctctyctagagcctccaaaaggaacacagccctgccaactccttgactgtagctcagtgagacctgtttccaactttcgacttccaggactgcgagacaacaaat

SEQ ID NO: 205795 - DNA, 201 bp, Homo sapiens
ctgagtttgggtttgtagcaagaagacccaagtctgaatacaggctctttctcttccctgggaggtggccttaggaaagttattctgcctttctgagcccmggccttctcctaatcctggaggtatcatcgactgcctgtcaacctcacaggctgacatgagagtccagtgaaggaatgaaagtgaagtacaacatgaatt

SEQ ID NO: 205796 - DNA, 201 bp, Homo sapiens
accaaaaaacataaataaataaggggccgacttcctcttctgaagactgcactcctagctcattgtccttggtgtgacagggcggtgcctggcagtggagrcacagcagggacagatacgaaggcctgcagcctgctggatccacagagcctaggaaaggtgacggccctctgctggggtggacgagaggggcggggtctg

SEQ ID NO: 205797 - DNA, 201 bp, Homo sapiens
cctgggactgagttcaaaataatagacgaaaaagaataaataaaattggagacttcctcatcttctcagagcactgggaacccccttttcactcctcaagmcagagctagaaggtatctcctggagctctctctgtcattgccttggagcccacgtccaggttccctggtgccttgggctaagccaggggctaccagagtg

SEQ ID NO: 205798 - DNA, 201 bp, Homo sapiens
ttccattaatttgggttaaaatgcttgacttaatttaatgaaggcattctttacccatgatcaataagtaaggagctaaggagccggattagaggctatgwagaaatcattttgtattgctgccaggggaaaagagcccgcactttaaaaagaggaactatgcattctggaaccacagagacgcctcagcaggccctcttg

SEQ ID NO: 205799 - DNA, 201 bp, Homo sapiens
tctttttggccaagactgtctgtctctctgttcatttccagcatgttcaatcttacttcttggaacttttggataatggctgttttcgtctttctttgtcsataatgtcagtatctgtgtcatcttgacattggcttctgtggattgtctttttccacagagttaagattttcctggttctttgtatgctaagaagttttg

SEQ ID NO: 205800 - DNA, 201 bp, Homo sapiens
tttatttttcaaatgagttgaactttttaattcaaattaatgctttttatatagagacatgctttttgatttaatactatattatctaatattaatacaggcacgctagctttctttttgttactctttgccatttatatctttttcagcttttcacacttttctagtatctgcatgctttaggtctttcttctcgtcaat

SEQ ID NO: 205801 - DNA, 201 bp, Homo sapiens
gcagcagagatccatgaacacatttgcagtttcatatagtcacataaaccagaccttataaaggaatcgacctttaaggaaagcaagaactcgacttcagraaacactattgcctactgggatgtggatgaaactgggcttcctgacatctcagttgggtttagtgtcgaaattaattcagggctttttcaccattgctaa

SEQ ID NO: 205802 - DNA, 201 bp, Homo sapiens
ttctgcgaggacagactctgaggttgacatctccatctcggcccagtgagcctgcgtgggccacggaaacccctctcggggattttgagtgttgttttaargctaaaagtgggcagggaaaggttttgggtgcaaagtcgggttctgaagctgagatcagactgccgcaagcatcagagacgtcagggcctggtgggtggg

SEQ ID NO: 205803 - DNA, 201 bp, Homo sapiens
ggcccagtgagcctgcgtgggccacggaaacccctctcggggattttgagtgttgttttaaagctaaaagtgggcagggaaaggttttgggtgcaaagtcrggttctgaagctgagatcagactgccgcaagcatcagagacgtcagggcctggtgggtgggtgggggacgttcggaggagagagccctaccttttctgca

SEQ ID NO: 205804 - DNA, 201 bp, Homo sapiens
aacaaaactgttctcacacctgcaaaatgaggtaaactggagcatgtttctatgagagctgttgtgacttgtgttgaggtaatccttccttgctcttcctyatgtgaccattaatttatggccagctgcttaatctaaaattccctgcaggatagtaaacccatgatgagaccttgacaaaagacaaatgcaacaatgaga

SEQ ID NO: 205805 - DNA, 201 bp, Homo sapiens
gagctgtgccccttagcctcctgctcctgccccgacccagatgcagcctcagcgtcctgcagcacagagctctcgactgtccctgcccagcagggggcgcmgggcagcactggtcccactccctcaggtggtgtcactcctcacccgaggagctgagttccaggcacagaattcctcctgtcaccatagggagacaagaca

SEQ ID NO: 205806 - DNA, 201 bp, Homo sapiens
tttgcttattactacatggttattttaaaagctctaatgtcaagaatgaatttatgagaacattttggttgtgggcaatgttatgctatgaaaattttttrcttgccttatagaaattaaagatcaacaatagttgagttaattcaagtaatgcttttggtgctgtgaataaattgtaccgtaacttccttggaagacttc

SEQ ID NO: 205807 - DNA, 201 bp, Homo sapiens
tcctgagtagctgggaccacaggcgtgtgccaccaggcccagataaatttttacttttttttggtagagacagggtctcactcaggcttgtctcaaactcytggtttaacgtgatcctcctgcctcagtctgtctaagtgctgggattacaggcgtgtgcccctgcaccaggcccaggtgcttatcttaaatagcatcaga

SEQ ID NO: 205808 - DNA, 201 bp, Homo sapiens
gaaggtttgttttgaaaacataaaatgaagtaaattcattggcccatttaacgatgtctttgattgatttttgcttatcaacagttataacaataataatwaaaaaaaaaaacctaaagtaagtcttggttttcaaaaggaaactcaacctaggccacgaatggagagccttggaacagagccctccatgcaagtcttctc

SEQ ID NO: 205809 - DNA, 201 bp, Homo sapiens
tggggcgagggcaatctctggagaatgttcagtggtatccctggaataattttacagtgccaactccaccaaaaaacataaataaataaggggccgacttyctcttctgaagactgcactcctagctcattgtccttggtgtgacagggcggtgcctggcagtggagacacagcagggacagatacgaaggcctgcagcct

SEQ ID NO: 205810 - DNA, 201 bp, Homo sapiens
gatcacagcacattgtgagctcaaatttctgggctctagtgatcctcccgcctcagcctcctgagtagctgggaccacaggcgtgtgccaccaggcccagwtaaatttttacttttttttggtagagacagggtctcactcaggcttgtctcaaactcctggtttaacgtgatcctcctgcctcagtctgtctaagtgctg

SEQ ID NO: 205811 - DNA, 201 bp, Homo sapiens
ataacagtggatcaaaaggaattaggattttactatggggcagacttcgaaaatctgattagagtgtgtttcagtattggagcgcgtgtgcatgcatgtgygtgtgagagtcaaggcactaataagcaatgtcaggacagaaattctattaaacatttcccttagaaatagtgagggaaaacctttcaacccttaactaaa

SEQ ID NO: 205812 - DNA, 201 bp, Homo sapiens
cagagccatagttaacctggggtggtgtcaacagtgtttatgccatttctataatttttaaccaccttcactttttgtatgtgtcattaaagatagttcarttttttaccatgttatgacacttgctagattaagtagaatgccaggcctgaccagagagctgataaaaaagaaatccactaattgtgctcgtttatactg

SEQ ID NO: 205813 - DNA, 201 bp, Homo sapiens
ttccaactccagctgctcgggcattgctgcatgcatgcacacaggccataattagaccatggcagtgtgcattaaagaggccagtgccacactcatatttrtaagctctgaaacaaactacttttttttgagacagggtctcgctcttttgttcaggctgaagtgtagtggtgctattgtggctcactgcagcctcaacct

SEQ ID NO: 205814 - DNA, 201 bp, Homo sapiens
taacagtggatcaaaaggaattaggattttactatggggcagacttcgaaaatctgattagagtgtgtttcagtattggagcgcgtgtgcatgcatgtgtrtgtgagagtcaaggcactaataagcaatgtcaggacagaaattctattaaacatttcccttagaaatagtgagggaaaacctttcaacccttaactaaac

SEQ ID NO: 205815 - DNA, 201 bp, Homo sapiens
gttgcggcagagccatagttaacctggggtggtgtcaacagtgtttatgccatttctataatttttaaccaccttcactttttgtatgtgtcattaaagayagttcaattttttaccatgttatgacacttgctagattaagtagaatgccaggcctgaccagagagctgataaaaaagaaatccactaattgtgctcgtt

SEQ ID NO: 205816 - DNA, 201 bp, Homo sapiens
ttagtagattgaagtcagccaaggtgggagtatttataccacagaaatgagcaaatgcagtaaatcgaccttcctcccacagaccggttgttaaccacttrccatctcctgctacctgatatgtttatgtttcaaatgacgaggcctgagctggagagtatgggagccacccaccaccttagcgttcacatggctcaaacg

SEQ ID NO: 205817 - DNA, 201 bp, Homo sapiens
ttagctttcttttgactagttacagcataaccttatataacatatttgcatcttgtatttaaagtgcatttttttagacagcaagaaattgagtcttttgmtaatttttttaaaaacgagtctgccttttaattgaaatgtgtaaagctttgcatttaatgtgattaatgacatggttagatttaagcctatcatcttgct

SEQ ID NO: 205818 - DNA, 201 bp, Homo sapiens
gtaacactggttgatgatgttattcaagtcttctgtgttcttgctaattttatgccattttttctaggaattattgtaaagggctactgaacctctgaacrtaatgcagatatgtgtatttctctttgcagatctatcagttttgcttcatttactttgaagctttgttgtcaggggcattttggcccttttataaatccc

SEQ ID NO: 205819 - DNA, 201 bp, Homo sapiens
tcggggtcaaatcaaaaaaattattacccagacaaatgggaaatattttttataatgtgagttatggtaaacttgttgacacttcttttaggacctaaaayatggtctatcttgctaaatgctctatgtgcttttgagaataacgtgcattctgctgtttttaggtggagtattttatagatgtcaaacaggtaacactgg

SEQ ID NO: 205820 - DNA, 201 bp, Homo sapiens
taagacaagaagtttttcagatttctgatttttttttatttttgggatattatttgcattacacttaccagctgaacattcctaatccgaaaatctccagmgagcatttcctttgggtgtcatatgccaacacacaaaaagttttagatcttgaagcattttggattttggagtttccgagtagggatactcaacctatat

SEQ ID NO: 205821 - DNA, 201 bp, Homo sapiens
gaaactcaggaggttgaggtgggaggatggcttgagctcaggaggtccaggctgcagtgagctatgatcacaccactgcactccagcctggacaacagagygagaccctatctgaaacaaaacaaaatacagaactctatgaactttaaatgagtgaacattatagtatgtgaaatatatctccagctggcagaaaaatag

SEQ ID NO: 205822 - DNA, 201 bp, Homo sapiens
gggtggagcaggtggtcggaatgagttagggtggagcaggtgatcggaatgagttagggtggagcaggtggtcggaatgagttagggtggagcaggtggtmggaatgagttagggtggagcaggtggtcggaatgagttagggtggagcaggtggtcggaatgagttagggtggagcaggtgatcaaaaaaggttgcttta

SEQ ID NO: 205823 - DNA, 201 bp, Homo sapiens
aacaggaaagacagaaataaatgactttgacaatacaataactttatttagattaaatttttaattctaacaagtgtggatattcatagaaattcagttckgtaggtaatatgattatttgagacataccatgttttttcatattaactgtgtttatttcatggcaatataagtttggcccgaagaagattttttttttaa

SEQ ID NO: 205824 - DNA, 201 bp, Homo sapiens
tgtcattattgctattaagatcttttgatcaaaataaacttcctcagtttttttaaatttctaaaacagttttatttttagagatgaggtcttgcagtgtygcccatgctggtctcgaactcctggcctcaagcaatcatcccacctcagctcccaaaatactgagaccgcacctggcctgtccacattgctaagacactg

SEQ ID NO: 205825 - DNA, 201 bp, Homo sapiens
caattctcccacctcagcctcctgagtagctgggattacaggcacacaccaccacgcccggataatttttttttttttgtatttttagtagctatggggtstcaccatgttggccaggctgttcttgaactcctgacctcagataatctgcctatcttggcgtcccaaagtgctgggattacaggcatgagccactgtgcc

SEQ ID NO: 205826 - DNA, 201 bp, Homo sapiens
attgactaccctttcccaaaggccagtcaggccttcactgagaagcatgtttggaagaaccttttaaagacagggcttccccacgttttgggaaggttgaraaggggctgggtgactgttagactcctgctggtcacaacatggtgcttcagcttcttgttgaactcctgcagcaggggagcccactgtgcacatttgtac

SEQ ID NO: 205827 - DNA, 201 bp, Homo sapiens
tagggtggagcaggtggtcggaatgagttagggtggagcaggtgatcggaatgagttagggtggagcaggtggtcggaatgagttagggtggagcaggtgrtcggaatgagttagggtggagcaggtggtcggaatgagttagggtggagcaggtggtcggaatgagttagggtggagcaggtgatcaaaaaaggttgctt

SEQ ID NO: 205828 - DNA, 201 bp, Homo sapiens
acatatatcatatatataactatatatgatatatataacatatatgtgattatatagatagaaactgcagccctttatttatgctagccacaggtgggggmcaatgtacacttctgtccagccatattcttgggagcttgactcaaatgttttatggaactaagcacaagaagtcttgaaaaatggagcaaaaattacagc

SEQ ID NO: 205829 - DNA, 201 bp, Homo sapiens
tggtcggaatgagttagggtggagcaggtggtcggaatgagttagggtggagcaggtggtcggaatgagttagggtggagcaggtgatcggaatgagttagggtggagcaggtggtcggaatgagttagggtggagcaggtggtcggaatgagttagggtggagcaggtggtcggaatgagttagggtggagcaggtggtc

SEQ ID NO: 205830 - DNA, 201 bp, Homo sapiens
gtggtcggaatgagttagggtggagcaggtggtcggaatgagttagggtggagcaggtggtcggaatgagttagggtggagcaggtgatcggaatgagttagggtggagcaggtggtcggaatgagttagggtggagcaggtggtcggaatgagttagggtggagcaggtggtcggaatgagttagggtggagcaggtggt

SEQ ID NO: 205831 - DNA, 201 bp, Homo sapiens
ggtggtcggaatgagttagggtggagcaggtggtcggaatgagttagggtggagcaggtggtcggaatgagttagggtggagcaggtgatcggaatgagttagggtggagcaggtggtcggaatgagttagggtggagcaggtggtcggaatgagttagggtggagcaggtggtcggaatgagttagggtggagcaggtgg

SEQ ID NO: 205832 - DNA, 201 bp, Homo sapiens
cacctgtgaataccatggtaaagttagggaatggctctctagaccagaacaggcagaagggaatttgattgctgcccacacatctgactgtaatgtgctaygtagcggagcagccctcttcaaagaaattgctgatgccaagaaaccaggcagggcaaagtgtgtgtatgtgtatatgtctgcctgtgaatgtccatgtat

SEQ ID NO: 205833 - DNA, 201 bp, Homo sapiens
tctaaaatcagagttgtctaccgatcccctgttccacttcctctgattggagtcgggatcccggtcatcagcgtttctccaaactgattccaccacatccygctgtcatcctcaggtggattccttccctccaggtgcacgtgaggatggctctgagatgtgtcagcgatggaactcctgggttgcccacatgggtgccag

SEQ ID NO: 205834 - DNA, 201 bp, Homo sapiens
gagggaggggaagagagaagatagcagcttctggtgtgctgtgaggaatacatgaaataatgcagagagggtgggctacagtgccaggcaggcaggcaggkaagaatttgaaaagtttagttgcaactcattagtattcctgttacaactgctgtcattattgctattaagatcttttgatcaaaataaacttcctcagtt

SEQ ID NO: 205835 - DNA, 201 bp, Homo sapiens
attcttttttctcttagtatttccgtttggatagttttggttactatttttcaagttcactatatttttcttttgtaagttctaagcagctgttgatctcwttcagtttattttttgtctcagatattgtagctttcatctctagaagttcaattttggtctcttttttaccttccatgtccctacttaagtttttgatca

SEQ ID NO: 205836 - DNA, 201 bp, Homo sapiens
aagtccaagtccgaagtctcatttgagacaaagcaagtcccttctgcctatgagactataaaatcaaaagcaaattagttacctcctagatacaatggggkaacaggcactgggtaaatatagccattccaaatgggagaggttggctaaaacaaaggggctacaggccccatgcaagtccaaaatccatagggcagtcat

SEQ ID NO: 205837 - DNA, 201 bp, Homo sapiens
cttgttttgccttattataggataattgtccttcattcctgtgtctaaaaatcatttcttaacatgcatttcttacttatttgatgcagaagagtaaatcytgcactgcacttttattctatcttagtgagaagtagaggtttgtaatcactttcaaagtgaaatcacactttgtccttctaacaatcccactcagagatc

SEQ ID NO: 205838 - DNA, 201 bp, Homo sapiens
acagtcccccaaagtcttaattcattccagcattaacccaaaagtccaagtccgaagtctcatttgagacaaagcaagtcccttctgcctatgagactatraaatcaaaagcaaattagttacctcctagatacaatggggtaacaggcactgggtaaatatagccattccaaatgggagaggttggctaaaacaaagggg

SEQ ID NO: 205839 - DNA, 201 bp, Homo sapiens
ggacatttgttatagttcttacctttacttctctgtatatataaggtattaatatttttttctcagttttcaagatttttcctatcattgattttaagcartttgaatatggtgagcctgggtgtagttttcttcttgtttcctgtgcttggggtttactgagtgttttgaatctgtggctgtatggttttcagtaaatgt

SEQ ID NO: 205840 - DNA, 201 bp, Homo sapiens
gagaggggcggggtctggtgcaggagacgggaggagcattgtattgctcagccactgtctctagcagtgtggtgaggacaggagtctgggtggtgtctccrccccgcgctcagccccagcacctcactgcctcccacatgaggcccttgcctggctgtgtacccccaggcctggctgcactccccccgggtgccggggaag

SEQ ID NO: 205841 - DNA, 201 bp, Homo sapiens
gtgttgccagatttcacaaactgtatatatagaatgtccagttaaacttgaatttcagacaaacaaatccttttttaagtaaaagtatgtcctatgccatwtttagacatcgtttgttgtatctggcaatgctacttgtaaggatcctactcttctgaggatagaaagtgcacttcccattaagtaagaattttcattaac

SEQ ID NO: 205842 - DNA, 201 bp, Homo sapiens
gctgggttgctagacatcttgacctgaaacaatgattgtgaagggtggggcgagggcaatctctggagaatgttcagtggtatccctggaataattttacrgtgccaactccaccaaaaaacataaataaataaggggccgacttcctcttctgaagactgcactcctagctcattgtccttggtgtgacagggcggtgcc

SEQ ID NO: 205843 - DNA, 201 bp, Homo sapiens
ttcacacagacagagcaacttgggctcctcatttcagttctgtcactttgcaaagctcttggtagagggcgagttgtcctagccattcagtccttgtaccygagaagcaggagagaaaatgtcccagcacccaggggacatgtgacatgggcagtgcccaccctgtgccccactgtatccttagcacctggtgtgtgctca

SEQ ID NO: 205844 - DNA, 201 bp, Homo sapiens
agattactattgcaacccatttacttgttatgactcctttcagatttactatttcttctcaagtcagttgtgatagttgtatctttctaggaagttgtccrtttctttgagtcacataatttgttgtcatatgcacttggtatgcacttgtaatcctttctatttccatgaagtctgtagtaattattgtagtgtggtcta

SEQ ID NO: 205845 - DNA, 201 bp, Homo sapiens
ttttgtgaagatttggtattaatccttcattaaatccttggaagaattcaacatggaagacaacttcagtctgagcctgggcttttctttgtgcggagttktaaagattactattgcaacccatttacttgttatgactcctttcagatttactatttcttctcaagtcagttgtgatagttgtatctttctaggaagttg

SEQ ID NO: 205846 - DNA, 201 bp, Homo sapiens
tggaagattttgtgaagatttggtattaatccttcattaaatccttggaagaattcaacatggaagacaacttcagtctgagcctgggcttttctttgtgyggagttttaaagattactattgcaacccatttacttgttatgactcctttcagatttactatttcttctcaagtcagttgtgatagttgtatctttctag

SEQ ID NO: 205847 - DNA, 201 bp, Homo sapiens
caacctggtcctgcccttgacacgtggggattattacaattcaaggtgagatttgggtggggacagagagccaacccatatcagtaaccagttagctttcyaaaattcttaagctttttactttgaaatcattttagacttaacagagaagttgcaaaaatagtacagatgcataccccttacccaccttcttttaatttt

SEQ ID NO: 205848 - DNA, 201 bp, Homo sapiens
aggtggtcggaatgagttagggtggagcaggtggtcggaatgagttagggtggagcaggtggtcggaatgagttagggtggagcaggtgatcggaatgagttagggtggagcaggtggtcggaatgagttagggtggagcaggtggtcggaatgagttagggtggagcaggtggtcggaatgagttagggtggagcaggtg

SEQ ID NO: 205849 - DNA, 201 bp, Homo sapiens
tagggtggagcaggtggtcggaatgagttagggtggagcaggtggtcggaatgagttagggtggagcaggtggtcggaatgagttagggtggagcaggtgrtcggaatgagttagggtggagcaggtggtcggaatgagttagggtggagcaggtggtcggaatgagttagggtggagcaggtggtcggaatgagttaggg

SEQ ID NO: 205850 - DNA, 201 bp, Homo sapiens
tgcccatgggtatatagctgtttgcttttaacattgggacacatccatcgtgtaattttaaaagtgaagactcactcttaagaaacattctaagggacccmccaccaagagaggcaaaacctggtcaaagtggaaggaatagaagggctcaaactgggggagaatgcccggaatttcaggtgctattcctacttcctactt

SEQ ID NO: 205851 - DNA, 201 bp, Homo sapiens
tagggtggagcaggtggtcggaatgagttagggtggagcaggtggtcggaatgagttagggtggagcaggtgatcggaatgagttagggtggagcaggtgrtcggaatgagttagggtggagcaggtggtcggaatgagttagggtggagcaggtggtcggaatgagttagggtggagcaggtgatcggaatgagttaggg

SEQ ID NO: 205852 - DNA, 201 bp, Homo sapiens
tacttagactttgtttagaaaagagtaagatttttccacctccaagaaccagtgatcactcccttgagggctctgtcacccctgtggagaatgcagcacgrtcaggcatgtaaaagggtctcttaccgggtcctctttcaggtggtggacttagattagtagataatccttcctgggccacgggcctcatgactggtcagt

SEQ ID NO: 205853 - DNA, 201 bp, Homo sapiens
ctctgttgtcatccatccattttctagtcataaaatcctcagaagggcactggctaattcatgtttcgttctcttccctggaacagtgttcctgggaactrgaaagatgaatcgcctcactcccaattattgaagcggtccccactcccacctctcccttccttatctgtggctgcctccttccaacctggtgtctctggg

SEQ ID NO: 205854 - DNA, 201 bp, Homo sapiens
atgacgtttcacctgtaaatgtgtcagtatttgtctttagaaaagcatgactcttcttaaaactaaactataaataccattatcatacctaaaaaaaattrttattttttaagacagagtcttgccctgttgcctaggctggagtacagtggcatgatcacggttcactgcagcttccatctcttggcctcaagtgatcct

SEQ ID NO: 205855 - DNA, 201 bp, Homo sapiens; identical to SEQ ID NO: 36178

SEQ ID NO: 205856 - DNA, 201 bp, Homo sapiens
tggggaatttgctcagcagggcaacatcacagtcaagatcatcttggatggagtttcaaagctgagtccaaaccctagctgtaggggtccaagctgtgcartctgggagtgtgagcccccctgtgccatagcatttcatccagacaggagcagatggtggccaccgtccatgtgggcaaggagctcagcaccaggtgagca

SEQ ID NO: 205857 - DNA, 201 bp, Homo sapiens; identical to SEQ ID NO: 36179

SEQ ID NO: 205858 - DNA, 201 bp, Homo sapiens
ggtgacttcataatggattctttgcctttaatttatagtctattaaatcaccatgtacagagagtgcagcaccagcactctgatcttttttttttttttttctttttgagacggagttttgctcttgttgcccaggctggagtgcaatggcactatctcggctcactgcaacctctctgcctcccgggttcaagtgattct

SEQ ID NO: 205859 - DNA, 201 bp, Homo sapiens
tggtgacttcataatggattctttgcctttaatttatagtctattaaatcaccatgtacagagagtgcagcaccagcactctgatcttttttttttttttttctttttgagacggagttttgctcttgttgcccaggctggagtgcaatggcactatctcggctcactgcaacctctctgcctcccgggttcaagtgattc

SEQ ID NO: 205860 - DNA, 201 bp, Homo sapiens; identical to SEQ ID NO: 36182

SEQ ID NO: 205861 - DNA, 201 bp, Homo sapiens
ccggactgagagatggggaaagtgtggagcaggccaagccctggagaaacctggagggagtgggcagtgcggaacgggtacacacacacacacacacacamgcacgtatgcacacacacgcatgcacacacacacacaccccacctaaagaccagccatgggaccaatacgtggaggactcaggcctattcaccagtgatg

SEQ ID NO: 205862 - DNA, 201 bp, Homo sapiens
gttgagaacaggttctagggtacactggggtgaagcatcgacatgaagccctggctctcaggacctggcacccagacagcacagagcagccaaggaaatgmcttctgtgtcaggccaaggtctgtgcagtgcgtttggttgactgcagagaagatcagacgcacgactgtgaactgtctaggtctgttttgtgtggcgctt

SEQ ID NO: 205863 - DNA, 201 bp, Homo sapiens; identical to SEQ ID NO: 36183

SEQ ID NO: 205864 - DNA, 201 bp, Homo sapiens
tcccagcactttgggaggctgagacaggaggattgtttgaggccaggaattccagaccagcctgggcaacacagagaaaccccatctcaaaaaaaaaaaaagaaagaaagaaaaaaaattgccagatatcgtggtgtgcagctgtggtcctagctgctcaagggattgaatgggaaggatggtttgaaccagaagtttgag

SEQ ID NO: 205865 - DNA, 201 bp, Homo sapiens
atctcctgggcttaagtgaggctcttgcctcagcctgtcaagtagctgggactacaggctcgtgccaccatgcccaactaattttttttttaatttttttktagagatgggggtctcactatgttgtctaggctggtctgaaactcccagcctcaagcaatcctgctgcctcagcttcccaaagtgctgggattacaggtg

SEQ ID NO: 205866 - DNA, 201 bp, Homo sapiens
tgcagccttgatctcctgggcttaagtgaggctcttgcctcagcctgtcaagtagctgggactacaggctcgtgccaccatgcccaactaatttttttttwaatttttttttagagatgggggtctcactatgttgtctaggctggtctgaaactcccagcctcaagcaatcctgctgcctcagcttcccaaagtgctggg

SEQ ID NO: 205867 - DNA, 201 bp, Homo sapiens
gaggatttaaaaaaagtagaggcttaaaatggcaggggacactcctctcttcagcatctagggcagccgatggtttcctaggagcctctggaactttgccrggggggggtccctcaaatccacacaggggaattaaatagaagagagaaaattggcgtgtggcttcctagctctgcaaactctccatacttctcatccaat

SEQ ID NO: 205868 - DNA, 201 bp, Homo sapiens
gaggggctctgtgagaggcgaggtcttgcttggtgagtgtccacctcatcacacactttctcctggtgtttgggggggatttgtggagaaccactttctcygggtatttggtaggagtttatggaaaaccttttcattcatccctttgctatggcccttgttcaggcctgtgccccttggataaaatcagaagcacacagt

SEQ ID NO: 205869 - DNA, 201 bp, Homo sapiens
atcatgaggtcaggagattgagaccatcctggctaacacggtgaaaccccgtctctactaaaaatacaaaaaaaaaaaaaaaactagctgggcatggtggygggcgcctgtagtcccagctactcggaaggctgaggcaggagaatggagtgaacccaggaggcggagcttgcagtgagccgagatcacgccactgcactc

SEQ ID NO: 205870 - DNA, 201 bp, Homo sapiens
gtatgttttaataccgtgtgctttgtggccttgtatcattagtttctgaaattttgactccttcatgttcttggggtgacagtaaaatcaggtgatctctstattcgatttgtcttgaacacaggtatccactgtggtgggcgctgtctcagttttggcggtgggtgatagtgtcatttcagacaagcactctaaaacagc

SEQ ID NO: 205871 - DNA, 201 bp, Homo sapiens
agattttctgaatccactgttcagttccacaggccctgccggagtgcccactgtgggctgtcccggaagtgcaagcaggatgaccacaggccttggatccyggggaatgtatacgtgtgtagaacaagtgttagtgatggatacttgggagtaggacaggactggcccacttgaggctgcatctggggatgaagctgcccc

SEQ ID NO: 205872 - DNA, 201 bp, Homo sapiens
caggagaggtgatgggagtctgtgcctgggagggcagcagcggctcccggttacactcagagaagccgaggcccacggaggtttgcgagttgtccatcatrgtaaagactgggtgtcattctcagattttctgaatccactgttcagttccacaggccctgccggagtgcccactgtgggctgtcccggaagtgcaagcag

SEQ ID NO: 205873 - DNA, 201 bp, Homo sapiens
aagtggttaaagaaactgtgatccctccatacggtggaatactagtcagtagtaaaaaggaacagactgttgataaacacagcaacttgcatgggcctcarggagatttcggtgaatggaaaaagcctgggagctaaatgatgagaattatgaacagaaagaagggaacaacagacactggagtctacctgagggtggagg

SEQ ID NO: 205874 - DNA, 201 bp, Homo sapiens
gccaggagaggtgatgggagtctgtgcctgggagggcagcagcggctcccggttacactcagagaagccgaggcccacggaggtttgcgagttgtccatcrtggtaaagactgggtgtcattctcagattttctgaatccactgttcagttccacaggccctgccggagtgcccactgtgggctgtcccggaagtgcaagc

SEQ ID NO: 205875 - DNA, 201 bp, Homo sapiens
gggggacacaaacgctcagtccatagcagcatcccagcacagggcacagcatggtgtagcgcagtaaaggagcctcagtcagggctcgaacctagggaccrgggctgcagctcacttccagagtggggaagacagaaaccatctcaccaagatgtaaacagatcttaaaaaaaaaaaaaaaaatctgaggcaggcctaagc

SEQ ID NO: 205876 - DNA, 201 bp, Homo sapiens
aagaaactgtgatccctccatacggtggaatactagtcagtagtaaaaaggaacagactgttgataaacacagcaacttgcatgggcctcaaggagatttyggtgaatggaaaaagcctgggagctaaatgatgagaattatgaacagaaagaagggaacaacagacactggagtctacctgagggtggagggtgagagga

SEQ ID NO: 205877 - DNA, 201 bp, Homo sapiens
agggggatgagggacaagttagtgtttgccaggggttagggatgcaggagggggtgaacgtggccccagagaggtagcatgaggggtcttgtcccattggygccatcttgattgtgtgtgggtactatttcggttgtggttgagaaactgcacagatgcacatgcgcacacacacgcacacgaatgcacttaaagctagag

SEQ ID NO: 205878 - DNA, 201 bp, Homo sapiens
cttcctatgaatctgtaattattccgaaataaaaagcttaaaatatgaccattgagttattaatggtaaggagtcagcataagaagaagacatggaaattyggtgtgcccagtgcacatgttgcccaggtggggctcctgccaacggagtgcccagtggtgggaatgtgaggttttcaggacccagcatgctctgcagagc

SEQ ID NO: 205879 - DNA, 201 bp, Homo sapiens
tgtaattattccgaaataaaaagcttaaaatatgaccattgagttattaatggtaaggagtcagcataagaagaagacatggaaatttggtgtgcccagtrcacatgttgcccaggtggggctcctgccaacggagtgcccagtggtgggaatgtgaggttttcaggacccagcatgctctgcagagcgggagagaggacg

SEQ ID NO: 205880 - DNA, 201 bp, Homo sapiens
aatgctatgaactcaaaattattagaaactatatacttgtcagagtttttttcattctttccattctttccatgaactgccctgaagacataacacttgamgattgtaagtgcttgcaagtaactttcagaaaggcattggaataaagcaattgctatgaacaccaaggcttaaaatggctatggcaatgcagttgacaag

SEQ ID NO: 205881 - DNA, 201 bp, Homo sapiens
tatcacctcgcagttctggagcctggaagtcagacaccgaggtgtgggcaggatgggtcctcctgaggcccctcccctcgccatgttctccctgtccttayagctgtgtgcgcacgcctctgctgcctttctcttataaggaccccagccacattgcatttgggcctagccttatggcctcattctaactttaatcctctt

SEQ ID NO: 205882 - DNA, 201 bp, Homo sapiens
agagaggacgagcctgccgccttgctaaggagggctagtgtagatttaccctctttccagcagagatgaagatcttggtcaacggcatctctcacgggtayggagataagcattaagatttatgagtaacttgagggagagtgggagaatgttgctttttttcccccagacctggcctctaaggagacttggctgtctagt

SEQ ID NO: 205883 - DNA, 201 bp, Homo sapiens; identical to SEQ ID NO: 36195

SEQ ID NO: 205884 - DNA, 201 bp, Homo sapiens
agaggacgagcctgccgccttgctaaggagggctagtgtagatttaccctctttccagcagagatgaagatcttggtcaacggcatctctcacgggtacgragataagcattaagatttatgagtaacttgagggagagtgggagaatgttgctttttttcccccagacctggcctctaaggagacttggctgtctagtta

SEQ ID NO: 205885 - DNA, 201 bp, Homo sapiens
tggcctttgtaggggaggtccacttctgaagaacagttctgtcgttcaaaagactacatggtcttgctacagctgggcatgaaatgtgcttgagtgatgcrcaagaggactgtctgccttcatggatgtgccactggaagttactgtctccaaaaatggagtaaaactgcggtggtgacgggcacacattcgagatgtcct

SEQ ID NO: 205886 - DNA, 201 bp, Homo sapiens
agacttggctgtctagttataaagggtacataaaatgctctggaagatgagattacattaactcctggaaataccaaaagtactttattttaatgtacttkttcttgtagttatgagcaatttggataattacagttggcagggatgcgccgacgcacatacgctggagttacatattatcccagccttgatcctgggaat

SEQ ID NO: 205887 - DNA, 201 bp, Homo sapiens
ggagtttaaactggagctaaggtgtagccagtgtcttctaaacagaatgggtattggatacaagcccgctgttaagtcattgctgtcacctaggtaaacaygcctttgtaacacagttatgagaaatggacaccaaagagaaataaatactatactgctatgggatattcctgaatgacccagcttgtggttagacgcatt

SEQ ID NO: 205888 - DNA, 201 bp, Homo sapiens
ggcacggccgcccgccctgttcctgcagtgtctggggtgccaggcatccgcctaagcaatcaggcaagccacccgcaaggagctcactcccaaggcatccrgtccccttgctctgccacagcaagggacagagagatgtctctgttgtcatccatccattttctagtcataaaatcctcagaagggcactggctaattcat

SEQ ID NO: 205889 - DNA, 201 bp, Homo sapiens
aaaagagtggcagccagaggagtcccagctctgaccttggtgacagagaaggatctgcgtgctgtggagctgggctgcccttcttggatggctgtcccccsaggaggggcccaaggatccactgagccccctccagacctgcagcactggcacctggagcccagagcgtgtcatgtctccgtatgtagagagtctgtaatt

SEQ ID NO: 205890 - DNA, 201 bp, Homo sapiens
taactgtctaaattagttttctaaataaatgcaaattttgttctagcctcgagttaggactgtagctggtgtttgattaacgtacttcagttcccaggagwacccagttagtctgtgtgtgatattctgagtctgtaaacattagttcaatactgttactctacaaaaacaaatgagtaagcaaacattaatttcgaggag

SEQ ID NO: 205891 - DNA, 201 bp, Homo sapiens
gacaggcatgagccactgcacccggtctagtcctttgctttgaacaaaactatagccttctttcagatcccactagtccttccataaatgtgctttttctyctccaggatttagttgaggttatccacattgcatttatctgcacttgctattgttactattattattaattcgcatgcttccctgacacctcccagtcaa

SEQ ID NO: 205892 - DNA, 201 bp, Homo sapiens
tccgccttccacctcctgagctctgccctccacgttcactcttccaaagtgccagtcccccagcctcccttcagatggacaccctggacaaactgaaattmtagaattcaccattctagaggatggagaaaaagggctgccctctgcttggctgcagtgcatcaagtgttgtaagcgaaactgtcccccctccaagagtct

SEQ ID NO: 205893 - DNA, 201 bp, Homo sapiens
ataaagacgtggctgtcacagcagctcaggtgcctgaagcccagtgctatttatagaacaggcactggcacggccgcccgccctgttcctgcagtgtctgsggtgccaggcatccgcctaagcaatcaggcaagccacccgcaaggagctcactcccaaggcatccagtccccttgctctgccacagcaagggacagagag

SEQ ID NO: 205894 - DNA, 201 bp, Homo sapiens
tggtgtcgctagcttattctgaatgcttaactctattctcccagggtggatgctctactcctttttcccccatcttccccaggacgctttcacaggactgmgttcagcggggactcccaagaaaatctaacacattgatttgattctgtgctgtttctagaatcaaacaattcttcttgcctgtgctgtttctaggtgatg

SEQ ID NO: 205895 - DNA, 201 bp, Homo sapiens
cagtgggcgcaatgccctacttctgtttattgttccctgggaaggcaggtcaaattcttccagtcccagaaaggctggaagaggtggtgccaggccctggraatagaaggaggaggaggctggtttcacccagagtttactgtagggacagatggcaccatagggcatgtctaccaggtgaagtcctgggtggggctccca

SEQ ID NO: 205896 - DNA, 201 bp, Homo sapiens
tgaaactttagcttccatttggactacacccatctacgttcccctccccttccactctgcccttgactccagatatcttaactctccctcagactctgtcytcttccttactgaaggaactgtcagcatttttcattcacttcccagctgccttgaggacagtgggcgcaatgccctacttctgtttattgttccctggga

SEQ ID NO: 205897 - DNA, 201 bp, Homo sapiens
gcctgagtcccaaacaagggaactaacgataccactcaccaccatacaccgtaggcgatcacctatagctctccagggactctggtgagtcctctaaatgyactgggtcgcttcacgctcacagcagctgcattggctgagtatcattggtatgcccatgtcatgagcaaggaaagcgagactgaggagttcatgctctgt

SEQ ID NO: 205898 - DNA, 201 bp, Homo sapiens
cgagacgggcagatcatgaggtcaggagattgagaccatcctggctaacacggtgaaaccccgtctctactaaaaatacaaaaaaaaaaaaaaaactagcygggcatggtggtgggcgcctgtagtcccagctactcggaaggctgaggcaggagaatggagtgaacccaggaggcggagcttgcagtgagccgagatcac

SEQ ID NO: 205899 - DNA, 201 bp, Homo sapiens
atgaccttgtaaggcttcatgggactttgaaactttagcttccatttggactacacccatctacgttcccctccccttccactctgcccttgactccagayatcttaactctccctcagactctgtcttcttccttactgaaggaactgtcagcatttttcattcacttcccagctgccttgaggacagtgggcgcaatgc

SEQ ID NO: 205900 - DNA, 201 bp, Homo sapiens
ggaggccgagacgggcagatcatgaggtcaggagattgagaccatcctggctaacacggtgaaaccccgtctctactaaaaatacaaaaaaaaaaaaaaaactagctgggcatggtggtgggcgcctgtagtcccagctactcggaaggctgaggcaggagaatggagtgaacccaggaggcggagcttgcagtgagccga

SEQ ID NO: 205901 - DNA, 201 bp, Homo sapiens
aggtctgggggcctccagtggaaaagaggtcaactgtgcatgcaaaggcgactggatgccctggttccccaggctgattttcccttgcttctgagggaggwttgggggaagttatgtgcccacaactcttgggaggccacttcaccttttctaagaaagggatctgccatcactttagaaagctgacccaagcatgctatg

SEQ ID NO: 205902 - DNA, 201 bp, Homo sapiens
tatgaccttgtaaggcttcatgggactttgaaactttagcttccatttggactacacccatctacgttcccctccccttccactctgcccttgactccagrtatcttaactctccctcagactctgtcttcttccttactgaaggaactgtcagcatttttcattcacttcccagctgccttgaggacagtgggcgcaatg

SEQ ID NO: 205903 - DNA, 201 bp, Homo sapiens
tcagtaagagtctttcaaaaaaccaaaagtttgggaaaatgtgtgtcacttgaaaaaaaaacattgttaattatcggttgaaaactttagctgccctttcrttttttaaacagccttattgaggtctgactgacataaaataaaccacacatatttaaaatgtataatttggccaggctcatgcctgtaatcccaaagttt

SEQ ID NO: 205904 - DNA, 201 bp, Homo sapiens
aaccccctcttcatcctgataatgggaatggcacaccttccagggacactgccaagactgactggtgacaatgaccctgcaatggcctttgtggaatccaygtgtgtggcctccagagaagatgaccatctgcatggcccttctcactgtattttacccaaggaggaaaactcagtttgtagttagttctgcgtttcagcc

SEQ ID NO: 205905 - DNA, 201 bp, Homo sapiens
tttgaatccattatgtcattcgatccttatagtaactatcacacccatcttgccgatgaggaaactgaggttgggatctaaaagctattctcttgtctctrtgaccttgtaaggcttcatgggactttgaaactttagcttccatttggactacacccatctacgttcccctccccttccactctgcccttgactccagat

SEQ ID NO: 205906 - DNA, 201 bp, Homo sapiens
agtctgtttctatagtgactagtaataagcattgttgagactggacattctgaatttcattcaccagaagctttctatgggatgggcaatttttaagactrtatttttatccctccgaatatcgtcattcccaacaccttcccatacgctttgccttcaggttatctgtaaagttacaagttagaaagaagttgaggtact

SEQ ID NO: 205907 - DNA, 201 bp, Homo sapiens
ctgtgattgtgccactgcagtaagctagattgtgccactgcactccagcacgggcagcagagtgaaaccctgactctaactaaataaatcagaagaagaakaaaaaaagaaagactgaaggggaaacatgcagagttaattcacagaggagcctgccaagtggtctgggtggcagggagatgcacattaaaagaaaagtag

SEQ ID NO: 205908 - DNA, 201 bp, Homo sapiens
aaatactctaaaattgggaggtatgagccagttgagttttgggccttccttagagctgctgttccgacctccagctgtgagtctttggacgttgactcaaycccctcttcatcctgataatgggaatggcacaccttccagggacactgccaagactgactggtgacaatgaccctgcaatggcctttgtggaatccacgt

SEQ ID NO: 205909 - DNA, 201 bp, Homo sapiens
aggcccaggcaacaggggctgtaccagtgcctgccttcggtgtatctggtgcatgacatttgcaccccagaaggattggggggcacgtgagaagcgggttsgctcacactgctgtgcatttgaccaggtgccactgggattgaagaccgcctgcaggacggagtccctgaaactatttctaaattgcgtcaagcgggcctg

SEQ ID NO: 205910 - DNA, 201 bp, Homo sapiens
gaacctgggaggtggaggttgcggtgagtcaggatcgcaccactgcactccagcctggggaacgagagcaaaactccatctcaaaaaaaaaaaaaaaaaaagattgaaaaggagcaactttttgtaacagatattggaactggggctgcaggtgaagttgtgcaggtaaagatggtctcagtgatgagagccctgccctag

SEQ ID NO: 205911 - DNA, 201 bp, Homo sapiens
tgaacctgggaggtggaggttgcggtgagtcaggatcgcaccactgcactccagcctggggaacgagagcaaaactccatctcaaaaaaaaaaaaaaaaaaagattgaaaaggagcaactttttgtaacagatattggaactggggctgcaggtgaagttgtgcaggtaaagatggtctcagtgatgagagccctgcccta

SEQ ID NO: 205912 - DNA, 201 bp, Homo sapiens
ttgaacctgggaggtggaggttgcggtgagtcaggatcgcaccactgcactccagcctggggaacgagagcaaaactccatctcaaaaaaaaaaaaaaaaaaagattgaaaaggagcaactttttgtaacagatattggaactggggctgcaggtgaagttgtgcaggtaaagatggtctcagtgatgagagccctgccct

SEQ ID NO: 205913 - DNA, 201 bp, Homo sapiens
cttgaacctgggaggtggaggttgcggtgagtcaggatcgcaccactgcactccagcctggggaacgagagcaaaactccatctcaaaaaaaaaaaaaaaaaaagattgaaaaggagcaactttttgtaacagatattggaactggggctgcaggtgaagttgtgcaggtaaagatggtctcagtgatgagagccctgccc

SEQ ID NO: 205914 - DNA, 201 bp, Homo sapiens
gcttgaacctgggaggtggaggttgcggtgagtcaggatcgcaccactgcactccagcctggggaacgagagcaaaactccatctcaaaaaaaaaaaaaaaaaaagattgaaaaggagcaactttttgtaacagatattggaactggggctgcaggtgaagttgtgcaggtaaagatggtctcagtgatgagagccctgcc

SEQ ID NO: 205915 - DNA, 201 bp, Homo sapiens
gcaggtatgattgcagtgctcattctcccaagagctgcatgcatttctatctggaggcttctcttggaattgaataaaatggccttaacatttatgatgcytccaaatgagccaagacagtcttaaaaataagattgaggccaggtgcagtggctcatgcctgtaatcccagcactttgggaggccgaggtgggtggatca

SEQ ID NO: 205916 - DNA, 201 bp, Homo sapiens
cttgaactcctgacctcaagtgatccacccacctcggtctcccaaagtgctaggatgacaggcatgagccactgcacccggtctagtcctttgctttgaayaaaactatagccttctttcagatcccactagtccttccataaatgtgctttttcttctccaggatttagttgaggttatccacattgcatttatctgcac

SEQ ID NO: 205917 - DNA, 201 bp, Homo sapiens
ccctgcgccgggagcctcctttctactctgtccgtgtgtttgagattgtttgttagcgtgagatcacacagcatctctgtgtctggcttatttcacttcargtccctcaggttcatccacatcgttgcaaatggcaggatttccttcttttaaaaggctgcatagtattgaattgtgtgtatatacaattttctttatcca

SEQ ID NO: 205918 - DNA, 201 bp, Homo sapiens
ttccataaatgtgctttttcttctccaggatttagttgaggttatccacattgcatttatctgcacttgctattgttactattattattaattcgcatgcytccctgacacctcccagtcaatgcctggctatctatgcccagaaaggtctgtgaaagagtggggagggtcccagagtccagaggacgagggggcagtggg

SEQ ID NO: 205919 - DNA, 201 bp, Homo sapiens
gccaatagctgcaaaggattcaggatggctcctggcacatggttggcactgtgtgtgtgtttgctagaggtagggacaaagctgcctgagggaacagggargctgctcagctctggccgcgctgcctggaagacacccttcagaaggtgctgggcctgtccagccttgatgttcacttgggtagacaggagtttgatgaaa

SEQ ID NO: 205920 - DNA, 201 bp, Homo sapiens
acctgccagggcagggctctcattgctgagactgcctatgtcagtgaagctgaggagctccttaactccagtgatgggagtagctggctgaatgcaacccrgggcctccctccctcttccagttaactaggccggattccagatttgtgaccctgacgaattttgcaagggttatatttttaagaagcttaaaatgaagtc

SEQ ID NO: 205921 - DNA, 201 bp, Homo sapiens
tcagtgatgagagccctgccctagcaggggagatggaactcaaagcaacaaaattgacactccaaacaagtctcctggaggtgaattaacactctggaggwgcctggtgcagtgcgtgcttcgtgctctaagatctgaattctaaacgcgggcctcaccctcaccaggccagtgcttggggggttggggttggacatccac

SEQ ID NO: 205922 - DNA, 201 bp, Homo sapiens
atagcatgaagcgcacactgcaccaggtgcctccagagtgttgattcgcctccaggagacttgtttggagttttgatattgttgctttggggtccatctcmcctgccagggcagggctctcattgctgagactgcctatgtcagtgaagctgaggagctccttaactccagtgatgggagtagctggctgaatgcaacccg

SEQ ID NO: 205923 - DNA, 201 bp, Homo sapiens
gaactggggctgcaggtgaagttgtgcaggtaaagatggtctcagtgatgagagccctgccctagcaggggagatggaactcaaagcaacaaaattgacaytccaaacaagtctcctggaggtgaattaacactctggaggagcctggtgcagtgcgtgcttcgtgctctaagatctgaattctaaacgcgggcctcaccc

SEQ ID NO: 205924 - DNA, 201 bp, Homo sapiens
cctgaagctatatgtactttgggtttgttgaattttacttctatttatttattttgagacagggtcctgctctgtcacttaggctggggtgcagtgacgtratcacagctcactgcagccgcgacctcctgggctcaagcgatcctccacctcagcctcccgagtagctgggaccacaggcgtgcacttccatgcctgtct

SEQ ID NO: 205925 - DNA, 201 bp, Homo sapiens
aagattgaaaaggagcaactttttgtaacagatattggaactggggctgcaggtgaagttgtgcaggtaaagatggtctcagtgatgagagccctgccctrgcaggggagatggaactcaaagcaacaaaattgacactccaaacaagtctcctggaggtgaattaacactctggaggagcctggtgcagtgcgtgcttcg

SEQ ID NO: 205926 - DNA, 201 bp, Homo sapiens
caaaaaaaaaaaaaaaaaaagattgaaaaggagcaactttttgtaacagatattggaactggggctgcaggtgaagttgtgcaggtaaagatggtctcagygatgagagccctgccctagcaggggagatggaactcaaagcaacaaaattgacactccaaacaagtctcctggaggtgaattaacactctggaggagcct

SEQ ID NO: 205927 - DNA, 201 bp, Homo sapiens
atgcccagtcccagtgaaaataatttatttcaagaattccatgggcaagcaatttaggcacgtaaaataacacccttattctcagcaggttaattttgctygagaatgaattgagtgcaggtggaggagcaattattttcttacaaaaataagcttccctttccctaagttgaaaatagccttggataagtcagatgacag

SEQ ID NO: 205928 - DNA, 201 bp, Homo sapiens
actctctcttctcagcaggtggcagggaaagcccaaggtcgccattcattagatgttaaacatcggactggaggtgccaagttggcgcaggccctccctcygtgggcctgtgtcttagtcacgtggacggtggtgtcctgtgggctgggctgtgtggctgtgggctgtgtggctgagaaggtggggatgccctggctgatt

SEQ ID NO: 205929 - DNA, 201 bp, Homo sapiens
tctgccattagcaggccggagcttttagctcatggcactcctaaacccgaaggtagagcgtctgcggtttctagcatcataggctgagtgataaccctttrtatttcaggtgatgggaagaagtgaaggatagctcagattgttggaaagggaatatcttggtctgttcctaatactgtaatgaaatgaccacagactggg

SEQ ID NO: 205930 - DNA, 201 bp, Homo sapiens
aagcactgggattacaggcatgaaccacagcacctggcctagtggctggttttaaaggctaccttggagctgcagtgaggagagtaggaaatacggaaacrtaaaacgctacaaagctcactgttcttactgagtttcagccatttttcttgaataaatgtttttggattgttgctaatatttgattaattttcagagacc

SEQ ID NO: 205931 - DNA, 201 bp, Homo sapiens
ccatgttggccaggctggtcttgaactcctgacctcaagtgatccacccacctcggtctcccaaagtgctaggatgacaggcatgagccactgcacccggyctagtcctttgctttgaacaaaactatagccttctttcagatcccactagtccttccataaatgtgctttttcttctccaggatttagttgaggttatcc

SEQ ID NO: 205932 - DNA, 201 bp, Homo sapiens
ccatttttcttgaataaatgtttttggattgttgctaatatttgattaattttcagagacctgaaaaaagttgattttgacggtattttgccattgttctytctcactgcttttatgaaggagataatttttggaggtccttcactccaccatcttcactgacttcactgacataggatattaaatgtgtttcgttaaaat

SEQ ID NO: 205933 - DNA, 201 bp, Homo sapiens
gctaatatgacaagacatgcattcttcaaaagaaggcatgtgaagtataaagatagtgggttgaaagtaaaaggatgcaaaaggatttaatatataaacamtatgtaaaagaaaggagacataattatattaatatcagacaacatagacttcaggccataaagagggacctgaaaatgataaaaaggccttctcaggaca

SEQ ID NO: 205934 - DNA, 201 bp, Homo sapiens
acagcacagtgaccatagttaatagcaatgtgtatttcaaaattgctaacaagtagattttaaatgttctcatcagaaaaaaagatcggtatgtgagatgwtaatggtttgatttaaccataccacagtgtatacatgtatcaaaacatgacattgtgcctcatactatatacaattattatttggcaattaaaatttaaa

SEQ ID NO: 205935 - DNA, 201 bp, Homo sapiens
tcaattttatcctctattaaatgggtgtaatataactcttctgaaaacattgtatgaattaaatgaggttgtgtgtgaatattcctcatgatctataagarttgaacaattgtctgtactattactatcatcgatactgttgttaatgtgtaatcaagatgcagaagaggtttttttctgttgctaatgccattagccata

SEQ ID NO: 205936 - DNA, 201 bp, Homo sapiens
ggatctgttgtacagcacagtgaccatagttaatagcaatgtgtatttcaaaattgctaacaagtagattttaaatgttctcatcagaaaaaaagatcggyatgtgagatgttaatggtttgatttaaccataccacagtgtatacatgtatcaaaacatgacattgtgcctcatactatatacaattattatttggcaat

SEQ ID NO: 205937 - DNA, 201 bp, Homo sapiens
accattttcagaggttgggcagactgtttttaagggctttcttggaaatctttgagacagccccttttctagtgtcctggttgtttgcacaagtggcaacrattttttggaaactgttgttttcggagtcacctattagaaagtgctccagggcagtcccaaaactgttctgggttgttggttgccatggagctgaaacac

SEQ ID NO: 205938 - DNA, 201 bp, Homo sapiens
gaaaacattgtatgaattaaatgaggttgtgtgtgaatattcctcatgatctataagagttgaacaattgtctgtactattactatcatcgatactgttgytaatgtgtaatcaagatgcagaagaggtttttttctgttgctaatgccattagccataccattgaagccagattctttaaaatattaaaccctccattaa

SEQ ID NO: 205939 - DNA, 201 bp, Homo sapiens
caaaactgttctgggttgttggttgccatggagctgaaacactttgggaatggctttcaaaagctcatttgtgctgtttcagcattgcctggcccataagyagtccactgagactagtcaggttcctatcattctcaaaaaatagcagtgtgcccctttcattcatttttgggcctccccaggtcccaccaacctgtgtat

SEQ ID NO: 205940 - DNA, 201 bp, Homo sapiens
gagttgaacaattgtctgtactattactatcatcgatactgttgttaatgtgtaatcaagatgcagaagaggtttttttctgttgctaatgccattagccrtaccattgaagccagattctttaaaatattaaaccctccattaatttaaaaacactgtgtgctttccaagcccaaaccccagtttctgtttcactcttga

SEQ ID NO: 205941 - DNA, 201 bp, Homo sapiens
ttgctaatgccattagccataccattgaagccagattctttaaaatattaaaccctccattaatttaaaaacactgtgtgctttccaagcccaaaccccartttctgtttcactcttgagatttttttcaaaaacaataaaagtttaatttaaaaaatgttgcttctttgaatagttaatttctgaaagtttgtacattgc

SEQ ID NO: 205942 - DNA, 201 bp, Homo sapiens
agcttgtttttattttaggttgaaattagcaattctatttggctaaaactttgacttactgcagttaaacattgattcaacggtgaattgatgatatactrctttgtataaggtataaaaggtgaggggaaatagttatctctaaggtaattttctctaataattattttctaagcagcaggttctgtatgtgtgtgagag

SEQ ID NO: 205943 - DNA, 201 bp, Homo sapiens
tttttattttaggttgaaattagcaattctatttggctaaaactttgacttactgcagttaaacattgattcaacggtgaattgatgatatactactttgyataaggtataaaaggtgaggggaaatagttatctctaaggtaattttctctaataattattttctaagcagcaggttctgtatgtgtgtgagagagagag

SEQ ID NO: 205944 - DNA, 201 bp, Homo sapiens
ttacttgcctcatgtagccttattgtgcgataggcaaaggtgtgtcaggaccctggggcctgcctgccactctgatcattaggccagcagaaatgggaggrcaaagcataggtcagatcaataaaattcacacctgtcccaaagttacatatccagtctagaatgttaatgaaatgctgaaaaaacataggttattattta

SEQ ID NO: 205945 - DNA, 201 bp, Homo sapiens
actattttcacatgttgtccctgttcgttttgtgttgctataaaggaatatttgaggctggataatttacaaagaaaagagatttatttggctcacggttytgcaggctgtacaggaagcatggcaccagcatctgcatctggtgagagcctcagctgcttcctctcataggggaagggagaggggagcagaatcacaggg

SEQ ID NO: 205946 - DNA, 201 bp, Homo sapiens
tcacatcacaaacacctcacatcacacactaagcacaattacacctcacacacacaccgcacactcacaggcatgcaccacacacacacacacacacaccatgcacgtagacacaccacacatatggacacacacacagatgcacacacacaccatgctgcgtactgacaaacacagcctcacatcacaaacacctcacat

SEQ ID NO: 205947 - DNA, 201 bp, Homo sapiens
ctcacatcacaaacacctcacatcacacactaagcacaattacacctcacacacacaccgcacactcacaggcatgcaccacacacacacacacacacaccatgcacgtagacacaccacacatatggacacacacacagatgcacacacacaccatgctgcgtactgacaaacacagcctcacatcacaaacacctcaca

SEQ ID NO: 205948 - DNA, 201 bp, Homo sapiens
cctcacatcacaaacacctcacatcacacactaagcacaattacacctcacacacacaccgcacactcacaggcatgcaccacacacacacacacacacaccatgcacgtagacacaccacacatatggacacacacacagatgcacacacacaccatgctgcgtactgacaaacacagcctcacatcacaaacacctcac

SEQ ID NO: 205949 - DNA, 201 bp, Homo sapiens
gcctcacatcacaaacacctcacatcacacactaagcacaattacacctcacacacacaccgcacactcacaggcatgcaccacacacacacacacacacaccatgcacgtagacacaccacacatatggacacacacacagatgcacacacacaccatgctgcgtactgacaaacacagcctcacatcacaaacacctca

SEQ ID NO: 205950 - DNA, 201 bp, Homo sapiens
agcctcacatcacaaacacctcacatcacacactaagcacaattacacctcacacacacaccgcacactcacaggcatgcaccacacacacacacacacacaccatgcacgtagacacaccacacatatggacacacacacagatgcacacacacaccatgctgcgtactgacaaacacagcctcacatcacaaacacctc

SEQ ID NO: 205951 - DNA, 201 bp, Homo sapiens
tacagcctcacatcacaaacacctcacatcacacactaagcacaattacacctcacacacacaccgcacactcacaggcatgcaccacacacacacacacacacaccatgcacgtagacacaccacacatatggacacacacacagatgcacacacacaccatgctgcgtactgacaaacacagcctcacatcacaaacac

SEQ ID NO: 205952 - DNA, 201 bp, Homo sapiens
cttcttatttgttgccttcgtatatgaattttaaattaatttttctgttcagaaattcctgctggagcttttatttgaattttgttaaatttataaatcartttgggaagcattgatatttttattatgttgatcttccactctgtaaacatggtatatctctacattttttaggtcttcttttatttcttttatcagcat

SEQ ID NO: 205953 - DNA, 201 bp, Homo sapiens
agatcgagaccatcctggctaacaccgtgaaaccccgtctctactaaaaatacaaaaaattagctgggcgtggtggcaggtgcctatagtcccagctattygggaggctgaggcaggagaatggcgtgaacctgggaggcagagcttgcagtgagcagagatcgtgccactgcactccagcctgggcgacagagcaagact

SEQ ID NO: 205954 - DNA, 201 bp, Homo sapiens
caccaagtctgggctctggtttgggaaaatctatcatcctgtctatacagaggcacagttcagccagattcttggtgaatttatgatgctccccactcccygtttaaatcacatctgtctctctccacttgcactgaggagtttccttccatctctgaactttgacatatgtggagctgtgctcctgggagcctctgcaca

SEQ ID NO: 205955 - DNA, 201 bp, Homo sapiens
tcaaaaatgagccaaagcagacaagaaagggcatgcaaggccttctctgggtgacagtgacgaagggtgagtccttcagaacgctctactctggaagcccrgcccactgcagagtgacatctccgtcacttggaagggcaacgtcgtcccccagctgtcgggtccagttcatgcttgtgaaagtcctatgtgtgtggccac

SEQ ID NO: 205956 - DNA, 201 bp, Homo sapiens
gggcggatcacgaggtcaggagatcgagaccatcctggctaacaccgtgaaaccccgtctctactaaaaatacaaaaaattagctgggcgtggtggcaggygcctatagtcccagctatttgggaggctgaggcaggagaatggcgtgaacctgggaggcagagcttgcagtgagcagagatcgtgccactgcactccagc

SEQ ID NO: 205957 - DNA, 201 bp, Homo sapiens
ctcgctgtccgggatgtggcgcagcctccatccatcctctgcttcctggtgacagcagccttgcatggcacccccttcaccgtctcaggggtgccacagcrtgtccacccatctcctctctgcaggaagccctacgttctgctgcagcacctgccagaatgatgcaccaaaattgcagttctaaccttggcactctcaggc

SEQ ID NO: 205958 - DNA, 201 bp, Homo sapiens
tgcaaagaaaaaaaaatagtttgttgttctcaggacttctgggcatggcagtctcaaaaatgagccaaagcagacaagaaagggcatgcaaggccttctcwgggtgacagtgacgaagggtgagtccttcagaacgctctactctggaagcccggcccactgcagagtgacatctccgtcacttggaagggcaacgtcgtc

SEQ ID NO: 205959 - DNA, 201 bp, Homo sapiens
tgggctctgccctctcggatgaccagggacagggaacgttaggggatcttaagccaggcccttgggctttctgacagcagatcttattagaaggtctgggrggaaatgaggagcatgagaatggttttcctgctctagccccgcatccatcatctccccaacacgtccccactgtgggtcactgggagtgatcaggaagtg

SEQ ID NO: 205960 - DNA, 201 bp, Homo sapiens
tgcagccagtcagaggaggggctgtgctgcaaacccaacattgggctccagatcctgttcttacagcactccccaaccccatgcctctctgcctgagcccyggttcatccaggtctcccagcagactcgctgtccgggatgtggcgcagcctccatccatcctctgcttcctggtgacagcagccttgcatggcaccccct

SEQ ID NO: 205961 - DNA, 201 bp, Homo sapiens
gtgagattccgtttctataaaatgtatacatacataaatagccagttgtggtgatgtgcatctgtagtcccagcgacttgggaggctgaggtgggaggacygcttgagcccaggagttcaaggttgcagtgagctatgattgtgccactgaactgtgagtgacagagtgaaattctatctcaaaaaaaaaaagtctgcttg

SEQ ID NO: 205962 - DNA, 201 bp, Homo sapiens; identical to SEQ ID NO: 36192

SEQ ID NO: 205963 - DNA, 201 bp, Homo sapiens
acaagaggcttaggagcttcatgaagaaagtggcgatatctttttaaagggtgtaagcgtgcatgaggcactgcagcatctcccagggccctgggtgggaygggaagagcaggtatgattgcagtgctcattctcccaagagctgcatgcatttctatctggaggcttctcttggaattgaataaaatggccttaacattt

SEQ ID NO: 205964 - DNA, 201 bp, Homo sapiens
gggatatagccagttgtaacctacacagttttcccaaagaaaaaacaattgtttttcctaaataaagataggagagaaccactgtgatttagcaatgcccrtttctcagcacttcctatctcccaaatactctaaaattgggaggtatgagccagttgagttttgggccttccttagagctgctgttccgacctccagctg

SEQ ID NO: 205965 - DNA, 201 bp, Homo sapiens
ctacaaaaataggaacaaaaactgcacagtactcagaaacttaacaagaggcttaggagcttcatgaagaaagtggcgatatctttttaaagggtgtaagygtgcatgaggcactgcagcatctcccagggccctgggtgggacgggaagagcaggtatgattgcagtgctcattctcccaagagctgcatgcatttctat

SEQ ID NO: 205966 - DNA, 201 bp, Homo sapiens
attgatttcatttctaagttcattccaaaagcctacttaatatggtatcgatcctttaaacttactgagttttgttctatggcttagcttatggtctgtamtacaggacacgccacgtgcacttaagaagaaagtttattctactgttgctgggcagagtattctacagttgtctgtcaggtctagttcatttataatatt

SEQ ID NO: 205967 - DNA, 201 bp, Homo sapiens
cacaatgagcacttagaaggggaagtggggaaggtggtctacaaaaataggaacaaaaactgcacagtactcagaaacttaacaagaggcttaggagcttyatgaagaaagtggcgatatctttttaaagggtgtaagcgtgcatgaggcactgcagcatctcccagggccctgggtgggacgggaagagcaggtatgatt

SEQ ID NO: 205968 - DNA, 201 bp, Homo sapiens
actttgggaggccaaggtgggaagatagcttgaggccagaagtttgagaccagcctggtcaacaaagtgagacccctcatcaaaaaaaaacaaagcaaaayaaaacaaaacccagagaagcaacataagatctttcatttcacttataataatttttattgttctcgaagttctgtttaccaacttaaaatattttaaatt

SEQ ID NO: 205969 - DNA, 201 bp, Homo sapiens
ccagcccagggtgagatcgggtagcatggctgtgctggcacgtggagggtaaaggcagagctgaaggtctctctccccaccctcaccccccagggcggcaktctcctggtgatgtgcctgccccaaaagagtggcagccagaggagtcccagctctgaccttggtgacagagaaggatctgcgtgctgtggagctgggctg

SEQ ID NO: 205970 - DNA, 201 bp, Homo sapiens
gtgcagactcattgcagagggctcactgtgcctgggaatcgctctgcctgtgtaaatcaacttactacctgtgtgtaggtgacaaactgaggagggcacasaggtgtcccactccagacttaatctgatgccctcttcagagggctcgaaacactttcaccagaagaggcccgagttggctgagcagatagtggatgtgac

SEQ ID NO: 205971 - DNA, 201 bp, Homo sapiens
acacacatgtgtcttggggtgaagcaatacacaggcagaccagcagcagcacgtgcgtgccaggagaggtgatgggagtctgtgcctgggagggcagcagyggctcccggttacactcagagaagccgaggcccacggaggtttgcgagttgtccatcatggtaaagactgggtgtcattctcagattttctgaatccact

SEQ ID NO: 205972 - DNA, 201 bp, Homo sapiens
gagggctcactgtgcctgggaatcgctctgcctgtgtaaatcaacttactacctgtgtgtaggtgacaaactgaggagggcacagaggtgtcccactccasacttaatctgatgccctcttcagagggctcgaaacactttcaccagaagaggcccgagttggctgagcagatagtggatgtgactgtatgatatcagcag

SEQ ID NO: 205973 - DNA, 201 bp, Homo sapiens
tgacaaacacagcctcacatcacaaacacctcacatcacacactaagcacaattacacacacacactcatgtgaatacctcacacacatgtgtcttggggygaagcaatacacaggcagaccagcagcagcacgtgcgtgccaggagaggtgatgggagtctgtgcctgggagggcagcagcggctcccggttacactcag

SEQ ID NO: 205974 - DNA, 201 bp, Homo sapiens
caaggataatcactctgcctcctgaaatgagaaattcattagttttaggaataaggtggcctttctttccaataaaaagcagagaagaaaggtttccatarcaacagtggtttgggaagaaagctttttggtactataggaaaaaaaatctcaattatctgagtacttatcttctctttctcttgactgtatttgctaccg

SEQ ID NO: 205975 - DNA, 201 bp, Homo sapiens
acatcgagaccgccaacctggatggagagaccaacctgaagcggcggcaggtggtccgcggcttctcggagcttgtaagtgacccacgtttccagggcctygcaggcattacagccacacagtgtccccatgacagccttctggggctcagagcacctgcattttcctgtctgtcagaccaggctgtttttcctagtagac

SEQ ID NO: 205976 - DNA, 201 bp, Homo sapiens
ttatttcttttgctgtgcagaagcttttttagtttaagtcccatttctctatttttgttttcgttgcttgtgcttttgaggtcttcgtcatgaattctttrcctagaccaacgtccagcagtcttccctcgggtttcttctaatacttttatagtttcaggtcttagagttaagtctttaatctatcttgatttgtgtata

SEQ ID NO: 205977 - DNA, 201 bp, Homo sapiens
agccctcagagatcaggaagaccctacaaggaaatgggcctggcccgagccttctcctcccaagcctccttctcccagccctgctctggcctagacagcargtctgagtcggcctgccctgaagggtggggaagccggcctctggttcacagggaggatgccactgggcttttcctcctctatcagacagtgccctccccc

SEQ ID NO: 205978 - DNA, 201 bp, Homo sapiens
tcaggagatcgagaccatcctggctaacaccgtgaaaccccgtctctactaaaaatacaaaaaattagctgggcgtggtggcaggtgcctatagtcccagstatttgggaggctgaggcaggagaatggcgtgaacctgggaggcagagcttgcagtgagcagagatcgtgccactgcactccagcctgggcgacagagca

SEQ ID NO: 205979 - DNA, 201 bp, Homo sapiens
atgaatacaactttgtatattctctttaaaggaatgtacattgcaaacagaattttatcatcatcatattattacatgtaatctttcaaattctttaaacygtttcatcttcacaagagccccgtgttgtattgttcccattttagagacaagaaatctgaccccaggaaaggttaaataatgtgtagaggtggatatcca

SEQ ID NO: 205980 - DNA, 201 bp, Homo sapiens
tgcactttctacagcattttcacttaacaccctcccctgaacgacctctacctggaagccttcatttaacccaaaattcagggcctcaatcccctgtgcgrcccgagttccacaggacaggtgggagctcagatgtttatcatagacaaagaacaaatctctgggttggccacgcccagatgtcctagctcagcacacata

SEQ ID NO: 205981 - DNA, 201 bp, Homo sapiens
aagccgggagggatgcccgggtgtgcagtttccacatggggaagtcattggaaggcttctagcatgttccatgccatttgttttgtctcctcatccttacytcttgttcctttttttgtttcctcctctcctttcttctcccagctctgccttatgtctttggggatccttcactcccttgatggcctagaactgggcaga

SEQ ID NO: 205982 - DNA, 201 bp, Homo sapiens
ttcacttaacaccctcccctgaacgacctctacctggaagccttcatttaacccaaaattcagggcctcaatcccctgtgcgacccgagttccacaggacrggtgggagctcagatgtttatcatagacaaagaacaaatctctgggttggccacgcccagatgtcctagctcagcacacatactcaggcacatctgccat

SEQ ID NO: 205983 - DNA, 201 bp, Homo sapiens
aggctgttcatgggctttaatcaatgcaaggaagtaaaattcctgccaagctgcccttaaggtcatctgggggagaccccgccatgtaacatgatcctccsgcctccttccagccccagcttcattatatgtaaagctaggcttctgctgactctcagatcagaccgtcctggctttgtgtgcctttataaggctgtggtt

SEQ ID NO: 205984 - DNA, 201 bp, Homo sapiens
ggaagccttcatttaacccaaaattcagggcctcaatcccctgtgcgacccgagttccacaggacaggtgggagctcagatgtttatcatagacaaagaasaaatctctgggttggccacgcccagatgtcctagctcagcacacatactcaggcacatctgccatgcagagtcatcctcagggcaggcttgaggtattgc

SEQ ID NO: 205985 - DNA, 201 bp, Homo sapiens
aacatgatcctccggcctccttccagccccagcttcattatatgtaaagctaggcttctgctgactctcagatcagaccgtcctggctttgtgtgcctttrtaaggctgtggttacacctgaggatctcggctgccctcctcttagctgtcagacgtagttgatggtgcttgggtcttggctgcacctcaccttcctggct

SEQ ID NO: 205986 - DNA, 201 bp, Homo sapiens
tgcagcacctgccagaatgatgcaccaaaattgcagttctaaccttggcactctcaggctgaaaggcctgcagcggtgagtgtcacctgtgaataccatgrtaaagttagggaatggctctctagaccagaacaggcagaagggaatttgattgctgcccacacatctgactgtaatgtgctacgtagcggagcagccctc

SEQ ID NO: 205987 - DNA, 201 bp, Homo sapiens
gaggccaaggtgggagggccacataaacccaggagtttgagaccaacctgagcaacaaattgagaccctattgctaccaaaaaaaaaaaaaaaaaaaaaaattagcccagctacttgggcaggtgaggtgggaggattgcttgagcctgggaagttaaggttgcagtaagcctagattgtgccattgcaccccagcctgaa

SEQ ID NO: 205988 - DNA, 201 bp, Homo sapiens
tagttgctaggtgatgagcctaatgtgtaagactaggttccactatggacgttccgtcattttttttttttttgtaatgaccttcttcccgtttggatggytcaccatgcatgtcccagattttctggaagtgcttgtagctctccagcttgggcgacttggaacctgtgactaccagggcaggccacttcttcatgggtg

SEQ ID NO: 205989 - DNA, 201 bp, Homo sapiens
ccatgggtatatagctgtttgcttttaacattgggacacatccatcgtgtaattttaaaagtgaagactcactcttaagaaacattctaagggacccaccmccaagagaggcaaaacctggtcaaagtggaaggaatagaagggctcaaactgggggagaatgcccggaatttcaggtgctattcctacttcctacttgag

SEQ ID NO: 205990 - DNA, 201 bp, Homo sapiens
cccagattttctggaagtgcttgtagctctccagcttgggcgacttggaacctgtgactaccagggcaggccacttcttcatgggtgacccaggcagcagyggtccaaggtggaactgaaaatgaaggttgtgggaaacaggactaggtgtctccagtcccttcctcacctgtcatgtgttttaggatcttcccatgctta

SEQ ID NO: 205991 - DNA, 201 bp, Homo sapiens
tttttttttaaaaaaaggaaaaaaaattaaggaaaacgtaggtgtgtcatgaatatgtgaaatacatgtagattccattgtgcgtgtttatcaactgtttrtgtgatcagtaaggcttcccatcaaccgtaggctattagtagttaagttttgagggagtcagaaattgtatgtggattttcgactgttcgggggaacccc

SEQ ID NO: 205992 - DNA, 201 bp, Homo sapiens
cagcagtggtccaaggtggaactgaaaatgaaggttgtgggaaacaggactaggtgtctccagtcccttcctcacctgtcatgtgttttaggatcttcccrtgcttaagttacagtatgttgctggagaccagagattaaatgcaggagtggggttgtcttcctgcttcccagcccgtctgtggggaacagcactgttctc

SEQ ID NO: 205993 - DNA, 201 bp, Homo sapiens
aaggttgtgggaaacaggactaggtgtctccagtcccttcctcacctgtcatgtgttttaggatcttcccatgcttaagttacagtatgttgctggagacsagagattaaatgcaggagtggggttgtcttcctgcttcccagcccgtctgtggggaacagcactgttctcaggcacgtagtacatatatggaaccatgag

SEQ ID NO: 205994 - DNA, 201 bp, Homo sapiens
tctgctgtcgtttgggatgagtcggactcactggttgctgatattcaagaccaacagatgagcggatgttaaattagtgatctagaattaaaaggatgccyagtcccagtgaaaataatttatttcaagaattccatgggcaagcaatttaggcacgtaaaataacacccttattctcagcaggttaattttgctcgagaa

SEQ ID NO: 205995 - DNA, 201 bp, Homo sapiens
ctttttttcagctccgagaacagagtttattgaggatcactggttggcatctcgacacccccatgaaatagactgcccatgcactgtatagatgctatttytaaagtgtcgggaatagactcttgaggcagatagggagctaccgttcatcctttacacagtgagaagtctgtgcacatataaaatgagaaaacaggctta

SEQ ID NO: 205996 - DNA, 201 bp, Homo sapiens
ttttattatttagggaccgtcagaaaggaaaaagtttttcatttggttttccatatttttccacttttaattttaaaagctgaactagaaaagcagctggrtgtggtggcttacatctgtaatcccagcactttgggaggccaaggtgggaagatagcttgaggccagaagtttgagaccagcctggtcaacaaagtgaga

SEQ ID NO: 205997 - DNA, 201 bp, Homo sapiens
tccattccattggtctgtgtgtctatttttgtaccaatattgtgctgttttgattactaaaggcttcacatataatttgaagtcagataatgtgatgcccyggctttgttctttttgcttaggactgttttggctattcaggctcacttttgggttcatatgaattttaggatggtttttttctaattttgtgaaaagtga

SEQ ID NO: 205998 - DNA, 201 bp, Homo sapiens
accattgaagccagattctttaaaatattaaaccctccattaatttaaaaacactgtgtgctttccaagcccaaaccccagtttctgtttcactcttgagrtttttttcaaaaacaataaaagtttaatttaaaaaatgttgcttctttgaatagttaatttctgaaagtttgtacattgcagaagcatcaatagttctta

SEQ ID NO: 205999 - DNA, 201 bp, Homo sapiens
aaattgctgatgccaagaaaccaggcagggcaaagtgtgtgtatgtgtatatgtctgcctgtgaatgtccatgtattaagttatatggggcccattaaagkttttttttttttttttttagaaacagttccactagtttaaagtatggacaaaaccccgattagagtatttttcgggagttttttgggactggtgccttct

SEQ ID NO: 206000 - DNA, 201 bp, Homo sapiens
tatttggctcacggttctgcaggctgtacaggaagcatggcaccagcatctgcatctggtgagagcctcagctgcttcctctcataggggaagggagaggsgagcagaatcacaggggtgaggaggggggtgccaggctctttttaacaaccagctctcacaggaactaatagagccagaactctcgcacatcccctacac

SEQ ID NO: 206001 - DNA, 201 bp, Homo sapiens
acatggtgaaaacccgtctttactaaaaatgcaaaaatcacccacttgtggtaatgtccgcctctaatcccagctacttgggaggctgaggcacaagaatyacttgaagccaggaggcggaggttgcagtgagccgagatcacaccactgcactccaacctgggcaacagagtgagactctgtctcaaaaaaaaaaaaaaa

SEQ ID NO: 206002 - DNA, 201 bp, Homo sapiens
cttgacctttggaaaaggaagtaggcacatggctagatatgtcagtgtctcagtcatcatagcttcctgtctgtgctcagaaggggtccgactggccttcrtaagctggacggcctggggatgggggccactgccatgcctcctctcagacctcgggctggggcctgaggaacgagcctctgcatggccagaggaccccat

SEQ ID NO: 206003 - DNA, 201 bp, Homo sapiens
ctgttcgttttgtgttgctataaaggaatatttgaggctggataatttacaaagaaaagagatttatttggctcacggttctgcaggctgtacaggaagcrtggcaccagcatctgcatctggtgagagcctcagctgcttcctctcataggggaagggagaggggagcagaatcacaggggtgaggaggggggtgccagg

SEQ ID NO: 206004 - DNA, 201 bp, Homo sapiens
ctaaaaatacacaaaattagccggccgtggtggcaggcacctgtggtcccagctactcgggaggctgaggcgggagaatggcgtgagccccggaggcagakctggcagtgagccgagattgcaccactgcactctagccttggcgacagagtgagactccgtctcaaaaataaatagataaataaataaaataaaaaatta

SEQ ID NO: 206005 - DNA, 201 bp, Homo sapiens
cacggggcttgagaaagctggaaagtgtgtttttcctgaagcgaagctgtcccacaccggattaaaccactgtaacatgcttagcaaattgaagtctcagygtagtggccattggctgcccaagagttgaccaggagtgagcatcgcacctgcccccaggactctcgtccgccctcattctcagtgctctgcctgacgcag

SEQ ID NO: 206006 - DNA, 201 bp, Homo sapiens; identical to SEQ ID NO: 36189

SEQ ID NO: 206007 - DNA, 201 bp, Homo sapiens
tatttaagagtggattgtttaatgtccacgtatgtatgtctttctcaaatttgcttcagttattgatttcatttctaagttcattccaaaagcctacttartatggtatcgatcctttaaacttactgagttttgttctatggcttagcttatggtctgtaatacaggacacgccacgtgcacttaagaagaaagtttatt

SEQ ID NO: 206008 - DNA, 201 bp, Homo sapiens
gctgtgggcatggcatgattttcccagatagctcagatgggagtttccctgtggcagccgtgcgtctgtctttctacaggggaccagttttccttgaatayccccaaaggaccttttctactctggatgcctggataaactctgagtagatggagtctgggagggatgtttataagaagctgtattcactcataggtgtct

SEQ ID NO: 206009 - DNA, 201 bp, Homo sapiens
agatcctcggctctggaacacagggaggtgtggagccttctgtagggtgcaggtggccagctgttcaccgcctggatctgttatccatgtaacaagtcagyaactggggaggtttagggacatggggcttttgtatgctgtcagatacatccattggggttcagagactggcacgggggccttccagcaggtgggctgtga

SEQ ID NO: 206010 - DNA, 201 bp, Homo sapiens
ggttcttgagcaagttaattcctgctttggatttttttttttttttttttaaagacagggtctgattctgttgcccaggttggagtgcagtggcgccactmtagcttactgtatcctcaaactcctaggctcaagcaatccccctacctcagcctcctgagtagctgggactacaggccaccatgcccagctaattttttc

SEQ ID NO: 206011 - DNA, 201 bp, Homo sapiens
aggctcagtgtgtatgttggtggaggtggccgggccttatcacagttaacttcggccatcacccaggtggcctgacacacacacacacacacacacacacmcacacaaacacacaaacggtccgtgctgatttcctgattttgaaggcttcacttggtcttcttggccttttgttgaatatgtcactgccaccttcgttaa

SEQ ID NO: 206012 - DNA, 201 bp, Homo sapiens
gttgatgagatcctcggctctggaacacagggaggtgtggagccttctgtagggtgcaggtggccagctgttcaccgcctggatctgttatccatgtaacragtcagtaactggggaggtttagggacatggggcttttgtatgctgtcagatacatccattggggttcagagactggcacgggggccttccagcaggtgg

SEQ ID NO: 206013 - DNA, 201 bp, Homo sapiens
ataattatgaggctagcagtttgcacaggggcacacagctggtaaaccttcaaggctgcgttcaccccaggccacccagtcctgctcccaggctcctaacsactctgtccataggtttctcaggagcatgctgctgaaatatccccaaacaggagtcctctaatcagcattttctctagagtagacggaaaatccaatgat

SEQ ID NO: 206014 - DNA, 201 bp, Homo sapiens
ttcagtccaaaaggggcagagcctgggagcagaacaggtggccctggggctctggggtcccaagagatgttactcagggccactggctgagtgcctgcgcstgctgctcagtcagagcctcctgtgtccctttgatctttgatgtgtgtggatgagatcaagttgtttaaatatttctggcttttgagaaagtgtctaaca

SEQ ID NO: 206015 - DNA, 201 bp, Homo sapiens
cctcaaggtttgcaaggactgaagctgggtgccacagcctcgggctgagattccgacgttgagaacagctcggtctgtgctgcggcgcaggcacacgcacrtgtttccacggtgcactctgcccaatttctgttctgttctaagaagaaaagcgtccagacggagagttcccaaatagagttttggcccaaaagcaacatt

SEQ ID NO: 206016 - DNA, 201 bp, Homo sapiens
ctgctccatcctccttcgcctgtgtaattgtcccctgtcctgggctggctctgcactctgtaggctcagagtctaattcaggggcatgagagcagctgcawctctagggagaggtggtggaaacaggtggataacactagcaagtccactgatggctgcagagtgagaaggggcataattatgaggctagcagtttgcaca

SEQ ID NO: 206017 - DNA, 201 bp, Homo sapiens
aaaggggaagtcaggagcttctcagtgacctcgagatagattctcctggatcatctgggtgggcccagtgtaatcacaaggtccttaaggtggaagaaagwgtcagatgagggaaccagagtgccggtggcccagtgcgcaagacttgccaccattgctggctttcaagacagagaaggcggccggccgtgagctgaggca

SEQ ID NO: 206018 - DNA, 201 bp, Homo sapiens
accagttagatgttaaaggcaggttggcattctgtttagaataaccttctgttgataagcagaaatctagcttttcctgccactttgtttgatttttttttccaaagacatttattgtacagtgggtttcaaattattctggggacaaaaggtatcattttgatggtgttttccagcctagttggcttcactgcgtaagca

SEQ ID NO: 206019 - DNA, 201 bp, Homo sapiens
ctggtgttggccacaccctcatatgtaaaatgcagtttcacctaaattctgttcatgatttgttttaggcagattaatgacccccacagatgtgtacatcygaatcctcggaactgatggatgttttaggttgtagggcaaaggggaagtcaggagcttctcagtgacctcgagatagattctcctggatcatctgggtgg

SEQ ID NO: 206020 - DNA, 201 bp, Homo sapiens
agcctgggaggttgagcctgaagtgaactatgattgcaccactgcactcaagcttgggcaatacaatgagacccagtctctctttttttttttttttttttaaaaaaaggaaaaaaaattaaggaaaacgtaggtgtgtcatgaatatgtgaaatacatgtagattccattgtgcgtgtttatcaactgtttatgtgatca

SEQ ID NO: 206021 - DNA, 201 bp, Homo sapiens
ataacttgggcatgacctcaaagctggtttggaatgagtcaggggtagacatgagtggatggagggataaatcaatgtatttcctaaatggggagtgttgctgtgttgcctgttgttagaaataagcaatgtaaacaggattttcctcatccagaaggtgtgctctggatatgaaatgctttttaaatgagaaactcaaag

SEQ ID NO: 206022 - DNA, 201 bp, Homo sapiens
cccaggctggtcttgaactcctgggttcaaatgatcctcctacttcagcctcccaaagtgctgggattacagatgtgagtcaccatgcctggcctccaccrtttctcaagcttagtgatattttatctcagaccacattagtctctgcactgcataattttaaagggaaaaatggaagaacttttttgcttagcactttat

SEQ ID NO: 206023 - DNA, 201 bp, Homo sapiens
ctccctcctcgcaggtgccgagattgctacatcccggggtgagatgtggctgtgtcctcgtgacccggatttgccaggaattatctcacctcacaaagacwcagcccttggccataagagcacctggaggaaactaggttctaggcaaaacccctaaaacagcagccctactggtgttggccacaccctcatatgtaaaat

SEQ ID NO: 206024 - DNA, 201 bp, Homo sapiens
tatagtttcaggtcttagagttaagtctttaatctatcttgatttgtgtatagagtgagagataggggtcccagatcattcttctgcatgtagcaatccartttccccagcaccatttattgaaaagggtgtcctttttcctggtgttacgtttttgtcgactttgtgagatcagttgaatgtatcagtgttctcttccat

SEQ ID NO: 206025 - DNA, 201 bp, Homo sapiens
gagccatagcagtctctccgtgatgcttctgcaccagctggggctggagcgctttgcccactggcagcttccagccgtgtgcctcggtttcctctggcatyggggtgggtgtgagctgtgttggcccttgcagagtggagagcagtccatgcaggtgcagccagcttggacaggtgcgtgatgggaggacaagcccacatc

SEQ ID NO: 206026 - DNA, 201 bp, Homo sapiens
gagaaagggaaggagttatagtttgaagtaagtcaacatttatggtggagaggaagagaagtaaatgtacagctgacttttgaaaatgcttaagggtgttracctttaactccctgcacagccgaaaacctgtgtttgacttttgagtccctgaaacttaactgctgatagcttactgttgaccggaagcattaccaatca

SEQ ID NO: 206027 - DNA, 201 bp, Homo sapiens
tgctctgttattgctcctccaaagctgctctttccagcccggtggatgcccctgcgtttgatggaaacacacgtgtgagtggaagcgtaagctgaggtcasaatggtgtgatctccacatactagagaaaaatacattcccttcagtttctggagaaagggaaggagttatagtttgaagtaagtcaacatttatggtgga

SEQ ID NO: 206028 - DNA, 201 bp, Homo sapiens
tttagtagagacagggtttcaccatgttggccagggtggtcttgaactcctgacctcatgatccatccgcctcagcctcccaaagtgctgggattacaggygtaagccaccatgcccagcctatatgcatgtaaaagtaaaagctctgtggataacagtggatcaaaaggaattaggattttactatggggcagacttcga

SEQ ID NO: 206029 - DNA, 201 bp, Homo sapiens
aaattcagggcctcaatcccctgtgcgacccgagttccacaggacaggtgggagctcagatgtttatcatagacaaagaacaaatctctgggttggccacgcccagatgtcctagctcagcacacatactcaggcacatctgccatgcagagtcatcctcagggcaggcttgaggtattgctgtcaggtgcatttgccctg

SEQ ID NO: 206030 - DNA, 201 bp, Homo sapiens
ttacctgggggacccctattgtgacaatcgcgctgctcactttcctgctccacctgggcattgaaaccaaaacctgggtaagagccgcctgcatggccacktctcagaagagcactgatgccgtggaccccacacttccctgcagattcatgaggtctgggaggtcgttttgagtagacaggagactgcaaagctgacctc

SEQ ID NO: 206031 - DNA, 201 bp, Homo sapiens
aggagagtggatgacattggagcagatgcttgaaaaacgtaaggatgccaccaggggagaaaagagtgaaggatgttttcctcatctcacagccatcacarccattccttaaaagccatgaacttctcactcctcgtgcttgtgctctgttattgctcctccaaagctgctctttccagcccggtggatgcccctgcgttt

SEQ ID NO: 206032 - DNA, 201 bp, Homo sapiens
tgacgcctgtcgctgcactgctgcccaggtgggtgtcggagcgggatagtgcctctgagccccgagtgagcccagacgacattggcattgcttctgctctrtgtgggtctctggaagctcaaagacaccaccgacaggaatatctaactttttgttttaatgtactttttctagattgtttttcagatccctccaggggag

SEQ ID NO: 206033 - DNA, 201 bp, Homo sapiens
ataagcatgtcttcccatgtcacaagtctatttttgtgaaataagtggttcagagagaggcaaggtgagtcatcgccttctgtctggctttcgatggctcrgtcccagcaggcactttttactgtccgtgaacacggagcaataccatttgaaaaaatgcctttgatgtaggtggagcctggcgtcactgtacaggtggaa

SEQ ID NO: 206034 - DNA, 201 bp, Homo sapiens
agtaaatatgacagatttaactttaaatattctttcatgattgcttattgttttttttttcctactggtatgttctactgtggtcttcctcaaagaaatcrttcaattgaccttcacctccactacaaaacagctgcagaattcataaggaagttatttcagagccccggttgtcaccaatacatgttgggtttttttttt

SEQ ID NO: 206035 - DNA, 201 bp, Homo sapiens
ccttcctcacctgtcatgtgttttaggatcttcccatgcttaagttacagtatgttgctggagaccagagattaaatgcaggagtggggttgtcttcctgcttcccagcccgtctgtggggaacagcactgttctcaggcacgtagtacatatatggaaccatgagtgagtttgagattttctcaagaagaaaaggaaaat

SEQ ID NO: 206036 - DNA, 201 bp, Homo sapiens
aggctgaggaagcagaatagcttgaacccaggaggcggagattgcagtgagccgagattgtgccattgcactccagtctgggaaacaagagcaaaactcttatctcaaaaaacaaaacaaaactgttctcacacctgcaaaatgaggtaaactggagcatgtttctatgagagctgttgtgacttgtgttgaggtaatcct

SEQ ID NO: 206037 - DNA, 201 bp, Homo sapiens
atcagagtaaaatgcatgttctccattcctccaccatgcagtaagccgtgtctgaaggtttggggagtgcatgcctgggtcatgtctcaccccgcccgacrtatgctcctctctcccatctcatgggctcttcatgtgacatcctgcagggcccaccccaccccatactcagttgggctctttctggtggtggcttcatcc

SEQ ID NO: 206038 - DNA, 201 bp, Homo sapiens
agtgcatgcctgggtcatgtctcaccccgcccgacatatgctcctctctcccatctcatgggctcttcatgtgacatcctgcagggcccaccccaccccayactcagttgggctctttctggtggtggcttcatcccatctgcggccactggggagccctgacccacagtgtagactcttccatccttcaggaagcatctg

SEQ ID NO: 206039 - DNA, 201 bp, Homo sapiens
gccactggggagccctgacccacagtgtagactcttccatccttcaggaagcatctgcagggctcaggtttcagggacacaagagggacattctcacttargcatcatgtcccctctcccaaccctgtggcccctcttccattagacccttactgcctgtacctggcttctccacatgccccaccttcatctcgtggccac

SEQ ID NO: 206040 - DNA, 201 bp, Homo sapiens
gaataacagcatcagcctcactcggtgccttgaagaaatgcagagtcccaggccctgcccagatccactgaggcaaggatctgcattttgacaagatcctrggggattcatgtgcccattggagactgagaagccctgcattgcatgggtgtcacctggacataatgaggcatattcttctctaattgttgtccttggttt

SEQ ID NO: 206041 - DNA, 201 bp, Homo sapiens
gtggaataacagcatcagcctcactcggtgccttgaagaaatgcagagtcccaggccctgcccagatccactgaggcaaggatctgcattttgacaagatsctaggggattcatgtgcccattggagactgagaagccctgcattgcatgggtgtcacctggacataatgaggcatattcttctctaattgttgtccttgg

SEQ ID NO: 206042 - DNA, 201 bp, Homo sapiens
ggggactcaaacctgccatctgtagcagggaacatcctgagtcctggaagcccgcgctgcacggtgcaccttaggttggaaagctctttgcccaggattcytcattttcgtaagtctttgtcgggtcagtggaataacagcatcagcctcactcggtgccttgaagaaatgcagagtcccaggccctgcccagatccactg

SEQ ID NO: 206043 - DNA, 201 bp, Homo sapiens
gacatccctgaactagcgtgttgggtgagattgcctcttttgtaacggaaggagatgctgagggagacgacagcgatggagaccctggccggccacgctcrcactgtgttcagaatggggattttccttccctgttgtgtaccttgcattttgagaagagaagacaaatctgacgccaggtcggcatcaccagtaacagga

SEQ ID NO: 206044 - DNA, 201 bp, Homo sapiens
attactaactacttccctgataaaaaccacagtttattacctgggcatagtggcatgcctgtagtcccagctacttggagggctgagatgggagaaccacytgagcccacgaggtcgaggctgcagtgagctgtaattgctccactgcactccagcctgggtgacaaagctagatcttgtctcaaaaaaaacctcacaaag

SEQ ID NO: 206045 - DNA, 201 bp, Homo sapiens
gcatctttccttgtgccagacagcaggatgagggttttactggtgtaagagcggcactgcagagcaggcgccatgtaccaggtggctcagctccagcccgmtttccgaaacatctcctggtgtcgctagcttattctgaatgcttaactctattctcccagggtggatgctctactcctttttcccccatcttccccagga

SEQ ID NO: 206046 - DNA, 201 bp, Homo sapiens
ttaagaaaagtgaagccagccacttatatttttactattccaaagccaaatcttttcatgaaggtgcttttttttgttttttttttttgttttttttttttgctttgagacagagtctcactctgtcacctgggctggagtgcaatggtgcgatcacagcacattgtgagctcaaatttctgggctctagtgatcctcccg

SEQ ID NO: 206047 - DNA, 201 bp, Homo sapiens
ctcctcagcttcattaagaaaagtgaagccagccacttatatttttactattccaaagccaaatcttttcatgaaggtgcttttttttgttttttttttttgttttttttttttgctttgagacagagtctcactctgtcacctgggctggagtgcaatggtgcgatcacagcacattgtgagctcaaatttctgggctct

SEQ ID NO: 206048 - DNA, 201 bp, Homo sapiens
actgtgttccagctcctcagcttcattaagaaaagtgaagccagccacttatatttttactattccaaagccaaatcttttcatgaaggtgcttttttttgttttttttttttgttttttttttttgctttgagacagagtctcactctgtcacctgggctggagtgcaatggtgcgatcacagcacattgtgagctcaaa

SEQ ID NO: 206049 - DNA, 201 bp, Homo sapiens
tagataaattaaagggctttgatatcatcagcaaagcattcttaccagctcaggaacaaatgcaagtgttcttggaaaaggtttgtgggtgtatttagggmgtccttgttattttccctcgctttgaatgaaaaaagaaacttatttatttttatagtaatgtttcctcaaagtgattgtgtagcaaccatagaacataac

SEQ ID NO: 206050 - DNA, 201 bp, Homo sapiens
cactgtgttccagctcctcagcttcattaagaaaagtgaagccagccacttatatttttactattccaaagccaaatcttttcatgaaggtgcttttttttgttttttttttttgttttttttttttgctttgagacagagtctcactctgtcacctgggctggagtgcaatggtgcgatcacagcacattgtgagctcaa

SEQ ID NO: 206051 - DNA, 201 bp, Homo sapiens
gggactccagggatcacaatgaagtgggcatattccagagcgattttgaagaaacagaggaagatgaggttcctgtcatcacggatggtactgaggaaaakggcaaatgggatttggattccagtcccaatcacgttggtctgcagacatcattggtggaaccaggcagaggggcatctttgccatttctggtgactttca

SEQ ID NO: 206052 - DNA, 201 bp, Homo sapiens
tctgaaaatcgattcttgtttacatccacacaaaagaaaaacataaatagggcaattatctgagtgatttcattctacagcaaaaaaaaatctctctgtcttattccacagccttgggttcaagacaacataaggggtcctgggcttcagatttcacagcatgacgggtgatgtctaaggggaaggcatggagtggccctg

SEQ ID NO: 206053 - DNA, 201 bp, Homo sapiens
aaccgcctccatgattcagttacctcaacctggtcctgcccttgacacgtggggattattacaattcaaggtgagatttgggtggggacagagagccaacycatatcagtaaccagttagctttctaaaattcttaagctttttactttgaaatcattttagacttaacagagaagttgcaaaaatagtacagatgcatac

SEQ ID NO: 206054 - DNA, 201 bp, Homo sapiens
ttctgaaaatcgattcttgtttacatccacacaaaagaaaaacataaatagggcaattatctgagtgatttcattctacagcaaaaaaaaatctctctgtcttattccacagccttgggttcaagacaacataaggggtcctgggcttcagatttcacagcatgacgggtgatgtctaaggggaaggcatggagtggccct

SEQ ID NO: 206055 - DNA, 201 bp, Homo sapiens
tcttgtattttttggagagatggggtctcactatgttgcccaggctggtcttgaactcctgggttcaaatgatcctcctacttcagcctcccaaagtgctrggattacagatgtgagtcaccatgcctggcctccaccgtttctcaagcttagtgatattttatctcagaccacattagtctctgcactgcataattttaa

SEQ ID NO: 206056 - DNA, 201 bp, Homo sapiens
cttctgaaaatcgattcttgtttacatccacacaaaagaaaaacataaatagggcaattatctgagtgatttcattctacagcaaaaaaaaatctctctgtcttattccacagccttgggttcaagacaacataaggggtcctgggcttcagatttcacagcatgacgggtgatgtctaaggggaaggcatggagtggccc

SEQ ID NO: 206057 - DNA, 201 bp, Homo sapiens
tttatatcatatgtagaaccaattttattatttagggaccgtcagaaaggaaaaagtttttcatttggttttccatatttttccacttttaattttaaaarctgaactagaaaagcagctgggtgtggtggcttacatctgtaatcccagcactttgggaggccaaggtgggaagatagcttgaggccagaagtttgagac

SEQ ID NO: 206058 - DNA, 201 bp, Homo sapiens
tcttctgaaaatcgattcttgtttacatccacacaaaagaaaaacataaatagggcaattatctgagtgatttcattctacagcaaaaaaaaatctctctgtcttattccacagccttgggttcaagacaacataaggggtcctgggcttcagatttcacagcatgacgggtgatgtctaaggggaaggcatggagtggcc

SEQ ID NO: 206059 - DNA, 201 bp, Homo sapiens
tttttaaggaggtatgaatggaatggcagtacttgtgaaaatattttttaaaaagctctctaaaaattgcacagaattctgtatttcatatttttactgtrcccatcacttaacacaaacttgaatttatatcatatgtagaaccaattttattatttagggaccgtcagaaaggaaaaagtttttcatttggttttccat

SEQ ID NO: 206060 - DNA, 201 bp, Homo sapiens
tctcagaattgaatagcattatcaccgacattgcaaggttagggaaagaagtacacaaatctttcgcatggtggattgttactttttaaggaggtatgaawggaatggcagtacttgtgaaaatattttttaaaaagctctctaaaaattgcacagaattctgtatttcatatttttactgtgcccatcacttaacacaaa

SEQ ID NO: 206061 - DNA, 201 bp, Homo sapiens
agtgcttgttctccctacattttaaaagctcacaggaaaatggagagtttttcctgaaagaaaacaatttcaattatttggtttacttttgattacctggrcaattaatatccctttattttaaaatatgacatcataaaatcaaatggactaggaacatggtgataaaatagaaaaatatctcttaaacttcctcagttt

SEQ ID NO: 206062 - DNA, 201 bp, Homo sapiens
tgtgggtctctggaagctcaaagacaccaccgacaggaatatctaactttttgttttaatgtactttttctagattgtttttcagatccctccaggggagsgttttccccacacaacttcagctggcacgtcagttgaccaggaagtcccccaggagatgcagtgctcccaaagagacctttgctcagggacgcctcccga

SEQ ID NO: 206063 - DNA, 201 bp, Homo sapiens
catagatccaggtcagccacccaatgggggaaaagagtggggtaaaaatacctgagttgggaatcagtagttacttataaaactgttctcagccaggcacygtggctcacgcttgtaatcccagaacttggggagtccgaggcgggtggatcacctgaggttgggagttcgagaccatcctgaccaacatggagaaacccc

SEQ ID NO: 206064 - DNA, 201 bp, Homo sapiens
ctccacatgccccaccttcatctcgtggccacacagtgagagcatcacaccctcccaactacgtccagtcttccctcaaagcctggggaaccttgctctartgttaatgcctgtccaccttccccaccctctaatcctaaactcaaatcccacctcactcaaggagctgctccaggttccctcaaagaatgtatggcattt

SEQ ID NO: 206065 - DNA, 201 bp, Homo sapiens
gcatcatgtcccctctcccaaccctgtggcccctcttccattagacccttactgcctgtacctggcttctccacatgccccaccttcatctcgtggccacrcagtgagagcatcacaccctcccaactacgtccagtcttccctcaaagcctggggaaccttgctctaatgttaatgcctgtccaccttccccaccctcta

SEQ ID NO: 206066 - DNA, 201 bp, Homo sapiens
gggacacaagagggacattctcacttaggcatcatgtcccctctcccaaccctgtggcccctcttccattagacccttactgcctgtacctggcttctccmcatgccccaccttcatctcgtggccacacagtgagagcatcacaccctcccaactacgtccagtcttccctcaaagcctggggaaccttgctctaatgtt

SEQ ID NO: 206067 - DNA, 201 bp, Homo sapiens; identical to SEQ ID NO: 36180

SEQ ID NO: 206068 - DNA, 201 bp, Homo sapiens
cctcagcaatggctgaagactcgcctgttcctgttcttcctttcttgatttcagatgttcgtgggcctcctgttttggttccagtttttctgtggcttctstgcatctaccatgattgaccagtggtatctaatcttctttaatctgctcttctcgtcacttcccccgctcgtgactggggtgctggacagggatgtgcca

SEQ ID NO: 206069 - DNA, 201 bp, Homo sapiens
ttctattgtaattcctgtggattggtaggagggtctgcacacttcctcagtgtttcatcaggctcaggtttgaatttttgttgttgttgttgttgttgtcrttgttttggtctccacattcctaggtggtgttctgcacttccattaggagacacgtgtgcttacttgtctttttgtgatgttgacagccattgatgatca

SEQ ID NO: 206070 - DNA, 201 bp, Homo sapiens
tttttggtctgctgcagtaaggaggggcctgtcccgctgttccttcataaggggctcctgaatctgagtcttccagggtctgtccctggtagggattcccrtggactgcagggccttttctttttcttttttttttttttgacacggggtctcgctccgtcacccaggctggagtgcagtggcgcgatctcggctcactgc

SEQ ID NO: 206071 - DNA, 201 bp, Homo sapiens
ctgggctctgcccccagcattaaaaacccttctggtgtatatccctgcaggaagtgccccttttctgggctagaccctgactgacagatgttaaatgaagrgtgagagatggcagcgtcattgaggcttgtgctgaaggttacacggcttgagttccacctagggaacagcctatcaatcacccacactcaggctgcaggt

SEQ ID NO: 206072 - DNA, 201 bp, Homo sapiens
attagctataaatgaggcctactcagcaggtggctgataaatcttttaagtcacttttagtctatagattttcccccagaaaactctattctctttctttytttcccttgcaatttattttgaagaaattgggttatttgtcctatggggttttccagggcctgaatactgctgattacttctgtgtggtttcaggtaaca

SEQ ID NO: 206073 - DNA, 201 bp, Homo sapiens
attactgggctcatgaggtcaagttgcagtggaaaaagaacgtttcttttcctaaaaccttggttgtcatccaaaggcaggcttgttcatgaggcagttcyttttttacttgttaatatgagccaaatgttctatatgcacaattccattttatcctcccaacgatcatatcatttccacatccccattccacagatgagg

SEQ ID NO: 206074 - DNA, 201 bp, Homo sapiens
gggtgcggggctcccaacccaggctgaaccagaaagctgccctatccagaattgtttggagacaacacacacacacacacacacacacacacacacacacacgcttcagggattactgattttcaaggaagtataaagacgtggctgtcacagcagctcaggtgcctgaagcccagtgctatttatagaacaggcactggc

SEQ ID NO: 206075 - DNA, 201 bp, Homo sapiens
ggggtgcggggctcccaacccaggctgaaccagaaagctgccctatccagaattgtttggagacaacacacacacacacacacacacacacacacacacacacgcttcagggattactgattttcaaggaagtataaagacgtggctgtcacagcagctcaggtgcctgaagcccagtgctatttatagaacaggcactgg

SEQ ID NO: 206076 - DNA, 201 bp, Homo sapiens
gggggtgcggggctcccaacccaggctgaaccagaaagctgccctatccagaattgtttggagacaacacacacacacacacacacacacacacacacacacacgcttcagggattactgattttcaaggaagtataaagacgtggctgtcacagcagctcaggtgcctgaagcccagtgctatttatagaacaggcactg

SEQ ID NO: 206077 - DNA, 201 bp, Homo sapiens
gaaaagggcaaatgggatttggattccagtcccaatcacgttggtctgcagacatcattggtggaaccaggcagaggggcatctttgccatttctggtgastttcattccttgtgtacacgcagattttgtctggcatcattttccttctgcctgaaggacttcgttgaacatttgccatggtacaggtctgcccatgatg

SEQ ID NO: 206078 - DNA, 201 bp, Homo sapiens
tgtagaatattctcatgatgcaaatggtgagtctgggggtgcggggctcccaacccaggctgaaccagaaagctgccctatccagaattgtttggagacaacacacacacacacacacacacacacacacacacacacgcttcagggattactgattttcaaggaagtataaagacgtggctgtcacagcagctcaggtgc

SEQ ID NO: 206079 - DNA, 201 bp, Homo sapiens
atatcataccgtctcagaattgaatagcattatcaccgacattgcaaggttagggaaagaagtacacaaatctttcgcatggtggattgttactttttaargaggtatgaatggaatggcagtacttgtgaaaatattttttaaaaagctctctaaaaattgcacagaattctgtatttcatatttttactgtgcccatca

SEQ ID NO: 206080 - DNA, 201 bp, Homo sapiens
ggagataatttttggaggtccttcactccaccatcttcactgacttcactgacataggatattaaatgtgtttcgttaaaatgcaaaaaaaaaaaccacamaaaaagtgagaatgttaaaaatgtaaggaagaggaatgagttgagaaatgttttttcttttttctattttttttttttttgagacagggtcttgctccct

SEQ ID NO: 206081 - DNA, 201 bp, Homo sapiens
gaaccttgttatttcttttgaaccatggtggtgatcagtgtcctcccagctataatcagagtagactagagatttgggggaaaggaaagaataatttgtgygcatttgagcagttgttttctgcacttctgtaaattattttatcaatcttatttagaccctttcataggattaaatatgctaagtgaagttgtatttccc

SEQ ID NO: 206082 - DNA, 201 bp, Homo sapiens
aatctgaccccaggaaaggttaaataatgtgtagaggtggatatccatgtattgagctgaactgacaattgaaccttgttatttcttttgaaccatggtgrtgatcagtgtcctcccagctataatcagagtagactagagatttgggggaaaggaaagaataatttgtgcgcatttgagcagttgttttctgcacttctg

SEQ ID NO: 206083 - DNA, 201 bp, Homo sapiens
aatgggtgagttccaagtcaggttaaataaacacagacttgtgaatgggattttccagggaaaagcagcctggtcaactaatgatagttctctggtatggrctttgaaggagctccaacctcgtattttgcccttcggtagctggtttcttgttttgttttgttttgtttttcccagagtgaaggtgtcgttctatcacct

SEQ ID NO: 206084 - DNA, 201 bp, Homo sapiens
aaatagatatttgcttgtgtgccatttttatctccttgtcatttattttatcactttgggggttattttcttagtaatcaccttgtgggttttaattagcrtctaaatttccagcaatgtaggtcagattaataccaccttaattacagtgccatgaaaactttgttcatatgtagccccaccatcctccctccactgggc

SEQ ID NO: 206085 - DNA, 201 bp, Homo sapiens
agttatacatggaatgtagttaacataaactgaacagagacagtgccttgcggtgtctctcctcctccgcccagggtgaggcccaggactgcccggtctcytggggaccccatcgcaacaaagcctgccccgccgatgctcgggcataggctgccttcctctgagagcaaactgtgactgagcattgggaaactttcttcc

SEQ ID NO: 206086 - DNA, 201 bp, Homo sapiens
tctgttcctccattactgccgccttttttgtcaaatagatatttgcttgtgtgccatttttatctccttgtcatttattttatcactttgggggttatttycttagtaatcaccttgtgggttttaattagcgtctaaatttccagcaatgtaggtcagattaataccaccttaattacagtgccatgaaaactttgttca

SEQ ID NO: 206087 - DNA, 201 bp, Homo sapiens
tgcccaggctggtcttgaactcctgggttcaaatgatcctcctacttcagcctcccaaagtgctgggattacagatgtgagtcaccatgcctggcctccaycgtttctcaagcttagtgatattttatctcagaccacattagtctctgcactgcataattttaaagggaaaaatggaagaacttttttgcttagcacttt

SEQ ID NO: 206088 - DNA, 201 bp, Homo sapiens
caaatattattgatagtaaataagcaagtatatctcactttaaaaaatattcttaattttcctataagtcaattattactggcattctagatcttctaccstggaaatctttgatttaaaaatatttaagtaatttcttcttttcttaaaactttccaccctacacaattgtcagattaacccttagattattagcataga

SEQ ID NO: 206089 - DNA, 201 bp, Homo sapiens
atagattatatgcaaacactatgccattttagatcagaaacttccgcatctgtgaattttggtatgggggactcctagaaccagtttcccacaggattccrtactggagggttgactgaattttcataattctaaaaggtacacagtatttcctgtagatcatttggaccctagagtaatgtggaagaaaacagccatcat

SEQ ID NO: 206090 - DNA, 201 bp, Homo sapiens
agaagagtaaatcttgcactgcacttttattctatcttagtgagaagtagaggtttgtaatcactttcaaagtgaaatcacactttgtccttctaacaatsccactcagagatcaatagtgtgcttggccacccttccacagccaagagagaataatcatgcagtgcttcagaatactgtattcccctgcgttcagagaaa

SEQ ID NO: 206091 - DNA, 201 bp, Homo sapiens
atgtggaagaaaacagccatcatttgcaggattctttgccattcagagctgttaccaatttggcatagctgtagttttgtgtcccatgtttgtcccaacartattatgtttcctacgccatgaaatattctgcaaaaatatgatttctaaagactacaatgtttctgctctaaagagtgtgaccattgacttcattatttg

SEQ ID NO: 206092 - DNA, 201 bp, Homo sapiens
cgtcattctctaaacaatacaatataataactatttacgtggcatttccattgtattaggtattataagcatctagagatgattgaaagtctgtgggaggrtgtgtatagattatatgcaaacactatgccattttagatcagaaacttccgcatctgtgaattttggtatgggggactcctagaaccagtttcccacagg

SEQ ID NO: 206093 - DNA, 201 bp, Homo sapiens
cctccgtatccatgggttctgcatccctggattcagatctaaaagtattaaagacaaaaatcactgggtctatactgaacacatacagacctttttttctkgtcgtcattctctaaacaatacaatataataactatttacgtggcatttccattgtattaggtattataagcatctagagatgattgaaagtctgtggga

SEQ ID NO: 206094 - DNA, 201 bp, Homo sapiens
agcatgaaatcctttcctgctttgccctcagtcatgtcgtgttgtctcctcgtgtactccacccatcgtccaaccctggtagcccccttgtggcctgggcrcaggcaccatctgggccagtgtgcgcccagccaattcaggcctctccacacctgacgctctttaacgataattcgccatctccaccagccggggtgttct

SEQ ID NO: 206095 - DNA, 201 bp, Homo sapiens
tgtctccaccccgcgctcagccccagcacctcactgcctcccacatgaggcccttgcctggctgtgtacccccaggcctggctgcactccccccgggtgcyggggaagatgcctcttgagtgggtgtcatctgcctgcagccagccagccaggcccaccggggcttctccagcctgtgccgccaacaggcgttcctcgtgt

SEQ ID NO: 206096 - DNA, 201 bp, Homo sapiens
ggggcggggtctggtgcaggagacgggaggagcattgtattgctcagccactgtctctagcagtgtggtgaggacaggagtctgggtggtgtctccacccygcgctcagccccagcacctcactgcctcccacatgaggcccttgcctggctgtgtacccccaggcctggctgcactccccccgggtgccggggaagatgc

SEQ ID NO: 206097 - DNA, 201 bp, Homo sapiens
gcgtctaaatttccagcaatgtaggtcagattaataccaccttaattacagtgccatgaaaactttgttcatatgtagccccaccatcctccctccactgkgctggtgttgtcaagtcctgtcaattacatcttgtataccttgtatgcccatcaacatagatttgtaaatgttgctttatgtcttttaaatcaaggggaa

SEQ ID NO: 206098 - DNA, 201 bp, Homo sapiens
tggattgacctttttttcattataaaatgtctttcttgatttgtactatcatttttttgttttaaagtctattttttgttctaatactaacatagccaatycagctcttttggttactttttgcacagtgtaacttttttcatccttttactttcaacctatttgtattttttaatctaaagtgtgtctcttacagatcac

SEQ ID NO: 206099 - DNA, 201 bp, Homo sapiens
gttctgtcattttctgcttcatttgttttgggaacttacagttagctttatttttgcttataattgttatggccttctgatggattgacctttttttcatyataaaatgtctttcttgatttgtactatcatttttttgttttaaagtctattttttgttctaatactaacatagccaatccagctcttttggttactttt

SEQ ID NO: 206100 - DNA, 201 bp, Homo sapiens
aagtggggcactggattctctgttattgttaaattgtctatttcatccttcagttctgtcattttctgcttcatttgttttgggaacttacagttagcttyatttttgcttataattgttatggccttctgatggattgacctttttttcattataaaatgtctttcttgatttgtactatcatttttttgttttaaagtc

SEQ ID NO: 206101 - DNA, 201 bp, Homo sapiens
tccttcacatagcatgtttgcaggctcattcatattgtagcctgtatcagtacttgatttttgttcattgttaaatggtatcccattgtatggatgtaccrcatcttgtttatccatttgtcattgatggacatttgggctgtttctacttttggctactatgaataatgctgctgtgaacatttgtgtacaagttagtgt

SEQ ID NO: 206102 - DNA, 201 bp, Homo sapiens
ccccattctgcaggttgtctctttgcttccttgattatgccctttgaagcacagactttttaaattattatttttaattgacaaaaaattgtgtatatttwtggtgtaaaacatgatgttttgaaatatatatacattgtggagtaatgaatagttaataacacacatagttagtagttaatagcatataatagcataata

SEQ ID NO: 206103 - DNA, 201 bp, Homo sapiens
tctatttggttctctgaaatatcttccttctttttggccaagactgtctgtctctctgttcatttccagcatgttcaatcttacttcttggaacttttggwtaatggctgttttcgtctttctttgtcgataatgtcagtatctgtgtcatcttgacattggcttctgtggattgtctttttccacagagttaagattttc

SEQ ID NO: 206104 - DNA, 201 bp, Homo sapiens
gacacagcagggacagatacgaaggcctgcagcctgctggatccacagagcctaggaaaggtgacggccctctgctggggtggacgagaggggcggggtcyggtgcaggagacgggaggagcattgtattgctcagccactgtctctagcagtgtggtgaggacaggagtctgggtggtgtctccaccccgcgctcagccc

SEQ ID NO: 206105 - DNA, 201 bp, Homo sapiens
ctgaattcttccgaaggaagtcactgtgcacagctcacagttaaggagtgtggagttatagttttctccttgagggcagagtatctacatagatgatttaraatccagtgagctttttatttcagttaatgtatttctgtcacaaatttctatttggttctctgaaatatcttccttctttttggccaagactgtctgtct

SEQ ID NO: 206106 - DNA, 201 bp, Homo sapiens
ctgtgaggaggaggtaccgcttttcctcccgctagcaggccccgggtaggtgatgggtgtgacaagagatgtgtagctgaccacacatggccccgttaacrtggaagcaggagtaggccgggtggagtttcatggatatatgcttccactcagtcactgaacacgtatttattgatacctgttacatgctgggtgcattca

SEQ ID NO: 206107 - DNA, 201 bp, Homo sapiens
gtgacccgcccgccacggcctcccgaagtgctgggattacaggcgtgagccaccgcgcccgaccccagtgcctctttttataaggacactgatcccatcgmgggagccccatcctcatgacctcatctgaacttaattacctcctgcaggccccacatcctaatactaccacactggggattagtgctccctcctatggat

SEQ ID NO: 206108 - DNA, 201 bp, Homo sapiens
tctcttaaaggtacagtatagtccctactttcttgcggttgtagtcatttgttatttaaatagatttgagtaattccccagctccctggtcctcacggtcrttcatcctgtgtgccttgtctcttccaggttttgatcccaatttccttatacgtttccattgaaattgttaaagcatgccaagtgtacttcattaaccag

SEQ ID NO: 206109 - DNA, 201 bp, Homo sapiens
aactgttatttattatacagtggagaaggcggtgctttggctttccagagagattcataggcagagttcttcccccgtgaaatgtgcctgccgcggatgcragacagaaaagcgagtgccttttagaacggcgcagcctgagcccggatttctctaatgtctacgtgctgttattttaggtctccgaattcaatcctttga

SEQ ID NO: 206110 - DNA, 201 bp, Homo sapiens
caaatctttcacccatttttaaattcagccttttattatttagttgcagtttttagtagatacaagttccagtcagataataggacttgcaaaaacttttycccattctgcaggttgtctctttgcttccttgattatgccctttgaagcacagactttttaaattattatttttaattgacaaaaaattgtgtatattta

SEQ ID NO: 206111 - DNA, 201 bp, Homo sapiens
agtaacgaacagacgtggggtaaatctcggagtgtctgaagaccattccacaggcgccagttcttacccatgtttctgcttattctccaacctagttgacrccagagggaggcatcaaaaaaagattcggagcaaaactcagaattacctcaacgtgtatgcggcggaaggcctgcgcaccttgtgcatcgccaagagagt

SEQ ID NO: 206112 - DNA, 201 bp, Homo sapiens
gcttaccgatgagatcaacgtctacaccaagggggccgactcagtggtcatggatctcctgcagccctgctcttcaggtactcccacccctgcccagctgyaccccagctcgggggaggaggtcctgagaaatatccccacccaattccttctcttgagtaaagtgattttcattaatccttttccaacagaaatgcccat

SEQ ID NO: 206113 - DNA, 201 bp, Homo sapiens
tcatttctgctcacttactaaccagtaaccagtaccggtcccccaattgtcactcgttataaaatgattaactgttatttattatacagtggagaaggcgktgctttggctttccagagagattcataggcagagttcttcccccgtgaaatgtgcctgccgcggatgcaagacagaaaagcgagtgccttttagaacggc

SEQ ID NO: 206114 - DNA, 201 bp, Homo sapiens
acaatcagagataatgtttatgactgagacctaaaagactgttgacatattcattctattcatcctagtatgaaaatcatttggctcctatagaaatatcmcccaaaatacaaggaaatgaaacccagtgttttattttctaggcagtgcactgaaacacggtagaaaactttaaaaacaggggcttctggttttagaaca

SEQ ID NO: 206115 - DNA, 201 bp, Homo sapiens
atgcaaatgtagaaagaattgccatatgagccccacgtgcccatcacccagatccagccacgaccaatgtctcgtgagttttgttaatcaaaatctgtttyctagggaagaaaagaaatacgtgaaccgattctggaaagaaatccacgtgggagactttgtgcgtcttcgctgcaacgaaatcttccctgcggacattct

SEQ ID NO: 206116 - DNA, 201 bp, Homo sapiens
gaagttgttggctcactcattggctatgtaaatctttttcatcaaagatccatgaagatcatgtagtgtacgttgaaaaaatagaatttattataagctcctgttttccaggtggaatttgcttccctaagtctgtagaaatgggcaagtgccgtgtgtcttaaaaaactcattcatccctttgcttcattgatggcctcc

SEQ ID NO: 206117 - DNA, 201 bp, Homo sapiens
taatgtttatgactgagacctaaaagactgttgacatattcattctattcatcctagtatgaaaatcatttggctcctatagaaatatcccccaaaatacraggaaatgaaacccagtgttttattttctaggcagtgcactgaaacacggtagaaaactttaaaaacaggggcttctggttttagaacaagatggcgtag

SEQ ID NO: 206118 - DNA, 201 bp, Homo sapiens
ctttgtgttatgattggcatgtccttgtttatgggtggccagcaaacaatgtcctcatgagtgatcccggggggcatgttgtgctgcacccctgttaacckcagtggggaaggcacaagtccaagaggccgaagaagagacccagagccagcacttgcaacacggggtttgattaggggcttacacagaggggagagagtc

SEQ ID NO: 206119 - DNA, 201 bp, Homo sapiens
gtctctagagatccctccagttctaaaaatcctccaaatcctccccagttccagaaggatgcagaggaagccagccgtcccgtgcctgggacctcccctgygcacactccccagggcatgggattgttggtagaacattacaaacacagctctgaagtcccagagacagaatgtcctactgtttctgagccatgtccatga

SEQ ID NO: 206120 - DNA, 201 bp, Homo sapiens
taacattgcagtagtaccctggagtaaagcccgtcctttccccattttctcaggggaaataagtactaaggaagtgccacatgcgatattatcatcaagcrccacaactctcaaagggctgcttctcttaaaaagccccgagggactctgttgcatagtgagtttaaagatgcagaaaatcaaaacttcatctgcacttga

SEQ ID NO: 206121 - DNA, 201 bp, Homo sapiens
aataaagcaaaaccaaaaggctctgtcaggccaaaggggaagctcagtgagacctagtgggagcccaaggcccgctccacacccaagccaccagtggacarcctgatgctgctgtgtggaccactccctatccggtggctccaggagacccagacccaggggcttttgcccatccacccacaccacagcaacaggtggccc

SEQ ID NO: 206122 - DNA, 201 bp, Homo sapiens
agccacctcagagctacagcgcacaaggagcgtttcggtcctcatgatttcccagggagggaaacagacactcaaatacctgcaaaccaaattctgtcttwgctatagcgatatatttctcctttccatgaagaaagaacagaaaaaagaaaaagaatttatttaggagaggaaggaaaggcagtaatgatgatggtggaa

SEQ ID NO: 206123 - DNA, 201 bp, Homo sapiens
ttacatcagacaaagtcaatgtgtgaagagaaaaagcacagagtcaattatgcagacatctctgggtgggtggagggaggagtcttgtctttgttctgtasctgggaagataagcctctagtggacattattaatgtggaatccaacagactttagttttagaagctagacttagatcgcagacctaatgtttttcttttt

SEQ ID NO: 206124 - DNA, 201 bp, Homo sapiens
catctgtagaactgcttcctcttccctagctggatatctgctttttaagaagaatggagttagtgtgcccagagcagaagggtggatcgggggcctctacytttgtccatgctccagggggcaggttgacaagtctgactgatggataacttgggcatgacctcaaagctggtttggaatgagtcaggggtagacatgagt

SEQ ID NO: 206125 - DNA, 201 bp, Homo sapiens
aggcccgctccacacccaagccaccagtggacagcctgatgctgctgtgtggaccactccctatccggtggctccaggagacccagacccaggggcttttscccatccacccacaccacagcaacaggtggcccagggaactgccttccactcctttatacagagcatttacaaaaaacctacaaccaatttcacagttga

SEQ ID NO: 206126 - DNA, 201 bp, Homo sapiens
aatgggtgctgggagggatggtagccgaggaggtcagcgcagtgaccctgagcagagctttgctgttgcacgggatgaggattgcattctgtagggcagcrgctgtctccaaggctttgttaaggtggaaaacttctgtgatcagacggggatcattcagtccagggacaaacaggcccatagcaggtggcgagaccaaag

SEQ ID NO: 206127 - DNA, 201 bp, Homo sapiens
agaaattccagacgagagagaatatttgcaaatcacatacccaacaaagcactaatatctagaatacgtaaagaactctcaaaattgaacattaacaaaamaatgaatcctgtttaaaaatgggcaagacatgagacattcactgaagaaggtatgcagatggcaagtaagcacatgaaaagatgttcaacatctttacaa

SEQ ID NO: 206128 - DNA, 201 bp, Homo sapiens
agaaacctggagggagtgggcagtgcggaacgggtacacacacacacacacacacacgcacgtatgcacacacacgcatgcacacacacacacaccccacstaaagaccagccatgggaccaatacgtggaggactcaggcctattcaccagtgatgcccagtatggagcagtgagatgagtccagggggcttttgttagg

SEQ ID NO: 206129 - DNA, 201 bp, Homo sapiens
cctgacaatacagtcttggcagtgaaaaagtaaattcactcattcgttcagtattgggatcgggccatctgccctcctttgaatttccacagcactgaccrtcaagtggtaaatacaaattagattgaaatacaaaataataataatagtaataataaagaaagtacaaaacaaaagagttggggtaattattccattaat

SEQ ID NO: 206130 - DNA, 201 bp, Homo sapiens
agggaaatgcaaattaaagccactcagagataccactgcgcatctatcagaatggcacaaataaaaagagtgataccaccaaacgctgctgagggtgtgasaaatgggatctctcctacgttgctgtgggaatgtaaaacatacccactctggaaaatagtcccttcacaaaactaaaaatagaattgtcatataatccac

SEQ ID NO: 206131 - DNA, 201 bp, Homo sapiens
ccttaaataatacaatcacagccgctattatagattacattgctgtctaaatgggtttcatgctcatttctattcagtatttgtcacggggcattaacccmtagagtaacactgaatctgtggaacttggagaaattatcactttgagttaagtttccttgtacgttcggtgtttcttgccaccagacgctttcacttggg

SEQ ID NO: 206132 - DNA, 201 bp, Homo sapiens
ttgccaccattgctggctttcaagacagagaaggcggccggccgtgagctgaggcatgcaggtagcctgcagaaaccaggagaggcagggaagcatactcyccgctgagactccaggaaggagcgtggccctgccgacaccttagctgagtgggccctgtgttggaattctgacctacagaacgataacatcataaacgtg

SEQ ID NO: 206133 - DNA, 201 bp, Homo sapiens
gaatgctgcttaatgtgacgaggttggtaaaatcctttgtgcaacactcttactccctgaatgttttgctgtgctgggacctgtgcatgccaggcaaggcsaagatggctcaaagagcaaccagccacctctgcagcctgccacctcctgctggcaagatttgtttttgcatcctgtgaagagccaaggaggcaccagggc

SEQ ID NO: 206134 - DNA, 201 bp, Homo sapiens
aggaatagtgattctgaggacacactgtgacatgattatgtcattacatgtatggtagtgatggggatgatagaaggaagaacttatggcatattttcacycccacaaaaatcagttaaatattgggacactaaccatccaggtctagaaaagtcacatgccatagccatggtattgcacatcattcatcttgcattcttt

SEQ ID NO: 206135 - DNA, 201 bp, Homo sapiens
gcttgctattaccatatggacagctttctcagaaagcctttccaaacctagccccacccctccccttcctggcacccagacagagctagatgcttcttttstattcctccagagcatattgtactggcctctagcagaatactcaggcaaaatattgtaatcatgaattgtccacatgtcccaccagactgccagttcttt

SEQ ID NO: 206136 - DNA, 201 bp, Homo sapiens
gaacattttagtaaatgcttgctattaccatatggacagctttctcagaaagcctttccaaacctagccccacccctccccttcctggcacccagacagarctagatgcttcttttgtattcctccagagcatattgtactggcctctagcagaatactcaggcaaaatattgtaatcatgaattgtccacatgtcccacc

SEQ ID NO: 206137 - DNA, 201 bp, Homo sapiens
cactcttattgtatcagttggaaaaagtctctcagtttctccctgtagatgaatttttttatctgtcagtgagaataataattattctattctagggagcycttgggagaacgtagtgagataaagtgcttagtacagtggttagaacagtgaacattttagtaaatgcttgctattaccatatggacagctttctcagaa

SEQ ID NO: 206138 - DNA, 201 bp, Homo sapiens
catgctcacatagatgttatatgctgatatgcgtcccaccatttagtagactccactcttattgtatcagttggaaaaagtctctcagtttctccctgtaratgaatttttttatctgtcagtgagaataataattattctattctagggagctcttgggagaacgtagtgagataaagtgcttagtacagtggttagaac

SEQ ID NO: 206139 - DNA, 201 bp, Homo sapiens
actcctgtatttattaaatagacattattcttggtgctgaggatatatcactaaacagaaatccatgctcacatagatgttatatgctgatatgcgtcccrccatttagtagactccactcttattgtatcagttggaaaaagtctctcagtttctccctgtagatgaatttttttatctgtcagtgagaataataattat

SEQ ID NO: 206140 - DNA, 201 bp, Homo sapiens
tcagcaagtgatcattcacgcaaaaagaaaagcaactgagactctgtcactagggtttttcaaataggtaaagaatcttaaatatccagtaatgatgacarcctcacttactgggagcttactcgtggggctaaggaggatgcatgatgatcccgtttttattgtcgcagctaccgaaggaagataccctcatcaacccaa

SEQ ID NO: 206141 - DNA, 201 bp, Homo sapiens
cactcctgtatttattaaatagacattattcttggtgctgaggatatatcactaaacagaaatccatgctcacatagatgttatatgctgatatgcgtccyaccatttagtagactccactcttattgtatcagttggaaaaagtctctcagtttctccctgtagatgaatttttttatctgtcagtgagaataataatta

SEQ ID NO: 206142 - DNA, 201 bp, Homo sapiens
aaagtcttgggctttgagatctaatagacttggattcaaatcatagctcattcactcactcctgtatttattaaatagacattattcttggtgctgaggayatatcactaaacagaaatccatgctcacatagatgttatatgctgatatgcgtcccaccatttagtagactccactcttattgtatcagttggaaaaagt

SEQ ID NO: 206143 - DNA, 201 bp, Homo sapiens
tcatttatggcttcatatttccctcaagtgccactttggctgtatcccacacattttgttgtataatgtttatgttatcattactctctaatccttcaacrtttttcatttgaatttcttctttgacctatgaggatgtagagtgcagtttccaattgccaaattacattttctacatgtgcatgagtttctccttgtccc

SEQ ID NO: 206144 - DNA, 201 bp, Homo sapiens
cgcccagcctattgactctttattatgctgctttcttttctattgcatagatgtattgccttatctcttttttccccttcctcctgctttctttgattatrtttttcttctctttaacttagaaatatagcccatgaatatttggcttgtctaatacatcatttatggcttcatatttccctcaagtgccactttggctgt

SEQ ID NO: 206145 - DNA, 201 bp, Homo sapiens
ataggcatgagccaccgcgcccagcctattgactctttattatgctgctttcttttctattgcatagatgtattgccttatctcttttttccccttcctcytgctttctttgattatgtttttcttctctttaacttagaaatatagcccatgaatatttggcttgtctaatacatcatttatggcttcatatttccctca

SEQ ID NO: 206146 - DNA, 201 bp, Homo sapiens
tacaaatggagaaatagaagttaagggaagaatctgaagtagtctcaaaggcagtgacaggaaggatgtggagaaagctgagtgtcaaagtcagtattcargaccggctttactgctacttagagatgaatgaagaaatcagagggaacgcagtgtgctgatgctaaagcagctgtcaccactcagctgtgtgacatagga

SEQ ID NO: 206147 - DNA, 201 bp, Homo sapiens
tttcccccaggtttccaggtcttggcaacctttgaaattccaattccatttgagagagctttgacgaggccatatgctgatttcaccaccagcaacttcasaacccagtactggaatgccatcagccagcaggcccctgccatcatctatgacttctatctgtggctcactggaaggaaacccaggtgagaagctgagtca

SEQ ID NO: 206148 - DNA, 201 bp, Homo sapiens
ttactctcttttttcccccaggtttccaggtcttggcaacctttgaaattccaattccatttgagagagctttgacgaggccatatgctgatttcaccacmagcaacttcagaacccagtactggaatgccatcagccagcaggcccctgccatcatctatgacttctatctgtggctcactggaaggaaacccaggtgag

SEQ ID NO: 206149 - DNA, 201 bp, Homo sapiens
tagcacttactctcttttttcccccaggtttccaggtcttggcaacctttgaaattccaattccatttgagagagctttgacgaggccatatgctgatttyaccaccagcaacttcagaacccagtactggaatgccatcagccagcaggcccctgccatcatctatgacttctatctgtggctcactggaaggaaaccca

SEQ ID NO: 206150 - DNA, 201 bp, Homo sapiens
atattctcctattctcctctagcacttactctcttttttcccccaggtttccaggtcttggcaacctttgaaattccaattccatttgagagagctttgasgaggccatatgctgatttcaccaccagcaacttcagaacccagtactggaatgccatcagccagcaggcccctgccatcatctatgacttctatctgtgg

SEQ ID NO: 206151 - DNA, 201 bp, Homo sapiens
attctgaggacacactgtgacatgattatgtcattacatgtatggtagtgatggggatgatagaaggaagaacttatggcatattttcacccccacaaaartcagttaaatattgggacactaaccatccaggtctagaaaagtcacatgccatagccatggtattgcacatcattcatcttgcattctttgagaataaga

SEQ ID NO: 206152 - DNA, 201 bp, Homo sapiens
accttccactatgatgggcttatattctcctattctcctctagcacttactctcttttttcccccaggtttccaggtcttggcaacctttgaaattccaaytccatttgagagagctttgacgaggccatatgctgatttcaccaccagcaacttcagaacccagtactggaatgccatcagccagcaggcccctgccatc

SEQ ID NO: 206153 - DNA, 201 bp, Homo sapiens
agcaaatccttcgtctttattgctgtgacccattataaataccttccactatgatgggcttatattctcctattctcctctagcacttactctcttttttyccccaggtttccaggtcttggcaacctttgaaattccaattccatttgagagagctttgacgaggccatatgctgatttcaccaccagcaacttcagaac

SEQ ID NO: 206154 - DNA, 201 bp, Homo sapiens
cgttgttctcagaaattgattcttgactctacacagcaaatccttcgtctttattgctgtgacccattataaataccttccactatgatgggcttatattytcctattctcctctagcacttactctcttttttcccccaggtttccaggtcttggcaacctttgaaattccaattccatttgagagagctttgacgaggc

SEQ ID NO: 206155 - DNA, 201 bp, Homo sapiens
atgctccagcataataaaggaaggtaaatgttaaagcgcctgcttggtgaattcagcaagtgatcattcacgcaaaaagaaaagcaactgagactctgtcrctagggtttttcaaataggtaaagaatcttaaatatccagtaatgatgacaacctcacttactgggagcttactcgtggggctaaggaggatgcatgatg

SEQ ID NO: 206156 - DNA, 201 bp, Homo sapiens
ataaaaatctttacgttgttctcagaaattgattcttgactctacacagcaaatccttcgtctttattgctgtgacccattataaataccttccactatgwtgggcttatattctcctattctcctctagcacttactctcttttttcccccaggtttccaggtcttggcaacctttgaaattccaattccatttgagaga

SEQ ID NO: 206157 - DNA, 201 bp, Homo sapiens
agattaccttcaggttatgtgtatgtggctaagtgtgtatgaagcataagtgaattttgtgtttagacatggctcccattcccaagatacctcattgcatwgaagcaaatattccaaaatctgaaaacagttgaaacccaacacacttctgacccaagcatttcagataaaggatactcaacctgtataagttttgaacaa

SEQ ID NO: 206158 - DNA, 201 bp, Homo sapiens
cataaaaatctttacgttgttctcagaaattgattcttgactctacacagcaaatccttcgtctttattgctgtgacccattataaataccttccactatratgggcttatattctcctattctcctctagcacttactctcttttttcccccaggtttccaggtcttggcaacctttgaaattccaattccatttgagag

SEQ ID NO: 206159 - DNA, 201 bp, Homo sapiens
agagtggtgggcagagagagtgaggatgcagagagtgcaagcccttgcagaccatggctttgcctctaaatgagaagagattccgctgaagggctctgaawggggacgttcctgtaatacactctgagttacattttacaagaatccctctggctgctacatggaggtccgactagggttacaggggtagtggcagagacc

SEQ ID NO: 206160 - DNA, 201 bp, Homo sapiens
cattcacattgtctcattttgcagataaccacttgcctagcataaaaatctttacgttgttctcagaaattgattcttgactctacacagcaaatccttcrtctttattgctgtgacccattataaataccttccactatgatgggcttatattctcctattctcctctagcacttactctcttttttcccccaggtttcc

SEQ ID NO: 206161 - DNA, 201 bp, Homo sapiens
tataagattaccttcaggttatgtgtatgtggctaagtgtgtatgaagcataagtgaattttgtgtttagacatggctcccattcccaagatacctcattrcattgaagcaaatattccaaaatctgaaaacagttgaaacccaacacacttctgacccaagcatttcagataaaggatactcaacctgtataagttttga

SEQ ID NO: 206162 - DNA, 201 bp, Homo sapiens
cttaatgtgacgaggttggtaaaatcctttgtgcaacactcttactccctgaatgttttgctgtgctgggacctgtgcatgccaggcaaggccaagatggstcaaagagcaaccagccacctctgcagcctgccacctcctgctggcaagatttgtttttgcatcctgtgaagagccaaggaggcaccagggcataagtct

SEQ ID NO: 206163 - DNA, 201 bp, Homo sapiens
agaagccacagaagcctcctacattaaaaatgctccagcataataaaggaaggtaaatgttaaagcgcctgcttggtgaattcagcaagtgatcattcacrcaaaaagaaaagcaactgagactctgtcactagggtttttcaaataggtaaagaatcttaaatatccagtaatgatgacaacctcacttactgggagctt

SEQ ID NO: 206164 - DNA, 201 bp, Homo sapiens
gctgcttaatgtgacgaggttggtaaaatcctttgtgcaacactcttactccctgaatgttttgctgtgctgggacctgtgcatgccaggcaaggccaagmtggctcaaagagcaaccagccacctctgcagcctgccacctcctgctggcaagatttgtttttgcatcctgtgaagagccaaggaggcaccagggcataa

SEQ ID NO: 206165 - DNA, 201 bp, Homo sapiens
aatccttgaatgctgcttaatgtgacgaggttggtaaaatcctttgtgcaacactcttactccctgaatgttttgctgtgctgggacctgtgcatgccagrcaaggccaagatggctcaaagagcaaccagccacctctgcagcctgccacctcctgctggcaagatttgtttttgcatcctgtgaagagccaaggaggca

SEQ ID NO: 206166 - DNA, 201 bp, Homo sapiens
gtcagcaaatccttgaatgctgcttaatgtgacgaggttggtaaaatcctttgtgcaacactcttactccctgaatgttttgctgtgctgggacctgtgcrtgccaggcaaggccaagatggctcaaagagcaaccagccacctctgcagcctgccacctcctgctggcaagatttgtttttgcatcctgtgaagagccaa

SEQ ID NO: 206167 - DNA, 201 bp, Homo sapiens
ttctcctccttgagcatgtatatgtttttggctcttggaacttgagatgatggtgcaagtaagtaccagcacattttccagataagtcatgtgaagtgatwtatgtttcataatatgatcatttctgattgatcttatctattatgaccacccatagagatggctgtaaagaattaagaacatcaaacaatgtcaagttgt

SEQ ID NO: 206168 - DNA, 201 bp, Homo sapiens
tataggcatgagccaccgcgcccagcctattgactctttattatgctgctttcttttctattgcatagatgtattgccttatctcttttttccccttcctyctgctttctttgattatgtttttcttctctttaacttagaaatatagcccatgaatatttggcttgtctaatacatcatttatggcttcatatttccctc

SEQ ID NO: 206169 - DNA, 201 bp, Homo sapiens
aatttcttagtacctactaactaacgcaccccttctatccctgttacataggtaccactagctcttcatattccaatggtaagccatggtaccacactgaragttctattgcagggcagctggacactgtggctcatttatatattgtgggtttgaattgaaaaatgcttttccacaatgaaaaatacctggcctgcatgt

SEQ ID NO: 206170 - DNA, 201 bp, Homo sapiens
aaatactcctccctgctggggcagtgggtcctatacacaccccttcccttcttgatatgtcactgagaatgcgacgtgatcaatgaccaatgagatttagraaagtcgggtgatattattccttccttattgagtgtgtaatagtgatcactaatttatgcaacttgtttctcttgggtgtgcattaactactctactagt

SEQ ID NO: 206171 - DNA, 201 bp, Homo sapiens
agtttcctggtacaaaggaaaaaaaaacaggttgttcatacatttggctgtgttagtatgtggtaaacagaattaaatttttttatgtgaactcgtacatmtgtgcttcataatatgtcactcctatttaacatctctttcacacacacacatccccccacctccgcacacacccttttgctagtcttcttccattttgct

SEQ ID NO: 206172 - DNA, 201 bp, Homo sapiens
atttcataaactcaacaaattattaacataaataagtccaaactcttgtatctatataacatcagtgatctgtgaggtgaaatgagattctgaagaaaaastaaataataaggccatttttctaagccaaaaaagtttttgtcattaattgtggaatttcacaaattaatttttgttcaaataaaactttcttaaactttt

SEQ ID NO: 206173 - DNA, 201 bp, Homo sapiens
agtaacataagaaagtgctaatcatttcaaattaaagtgggaaacatgcaaagcagaaagaatgaatttcataaactcaacaaattattaacataaataaktccaaactcttgtatctatataacatcagtgatctgtgaggtgaaatgagattctgaagaaaaagtaaataataaggccatttttctaagccaaaaaagt

SEQ ID NO: 206174 - DNA, 201 bp, Homo sapiens
ttgagtaacataagaaagtgctaatcatttcaaattaaagtgggaaacatgcaaagcagaaagaatgaatttcataaactcaacaaattattaacataaayaagtccaaactcttgtatctatataacatcagtgatctgtgaggtgaaatgagattctgaagaaaaagtaaataataaggccatttttctaagccaaaaa

SEQ ID NO: 206175 - DNA, 201 bp, Homo sapiens
caaaagaaggggagctagttataagaaaagagaattgagtaacataagaaagtgctaatcatttcaaattaaagtgggaaacatgcaaagcagaaagaatsaatttcataaactcaacaaattattaacataaataagtccaaactcttgtatctatataacatcagtgatctgtgaggtgaaatgagattctgaagaaaa

SEQ ID NO: 206176 - DNA, 201 bp, Homo sapiens
ttcagttggggtgaagtttggtgacttagaacatcattattttaacgtgatcccaaagcggttttcattatatgcaaagctgtatatttatttacattttwaaaaatgttctaaattggtttcttatgtccaaaagaaggggagctagttataagaaaagagaattgagtaacataagaaagtgctaatcatttcaaatta

SEQ ID NO: 206177 - DNA, 201 bp, Homo sapiens
agactctgtctctattcctaccagagctgggttcaacatgaattcaaatagaaatatgagacaatgaattatggtagtgacaaagaccttccttcgaattycggatttttctagcagcccctttctttctgcttcccacctgccttcaactctttctcctaaaaaagttcagttggggtgaagtttggtgacttagaacat

SEQ ID NO: 206178 - DNA, 201 bp, Homo sapiens
gatttatgtttttctgaacagtacccccttttattgactacatgtttccccaagaatttgttttagagtagatgtttcaaataaagggtccaattcttaayccattcacattgtctcattttgcagataaccacttgcctagcataaaaatctttacgttgttctcagaaattgattcttgactctacacagcaaatcctt

SEQ ID NO: 206179 - DNA, 201 bp, Homo sapiens
tagactagataaccttagaattaaatgtggatttatgtttttctgaacagtacccccttttattgactacatgtttccccaagaatttgttttagagtagrtgtttcaaataaagggtccaattcttaacccattcacattgtctcattttgcagataaccacttgcctagcataaaaatctttacgttgttctcagaaat

SEQ ID NO: 206180 - DNA, 201 bp, Homo sapiens
aaataaagcaaaagttggcagttataaagaatctcagtgataaaatactgaaatactcctccctgctggggcagtgggtcctatacacaccccttcccttsttgatatgtcactgagaatgcgacgtgatcaatgaccaatgagatttaggaaagtcgggtgatattattccttccttattgagtgtgtaatagtgatcac

SEQ ID NO: 206181 - DNA, 201 bp, Homo sapiens
ctttcagaatagactagataaccttagaattaaatgtggatttatgtttttctgaacagtacccccttttattgactacatgtttccccaagaatttgttktagagtagatgtttcaaataaagggtccaattcttaacccattcacattgtctcattttgcagataaccacttgcctagcataaaaatctttacgttgtt

SEQ ID NO: 206182 - DNA, 201 bp, Homo sapiens
ggtccagccagggaaataaagtttctagcctctttcttggggctttcagaatagactagataaccttagaattaaatgtggatttatgtttttctgaacaktacccccttttattgactacatgtttccccaagaatttgttttagagtagatgtttcaaataaagggtccaattcttaacccattcacattgtctcattt

SEQ ID NO: 206183 - DNA, 201 bp, Homo sapiens
ataaaatattaagaaactttctaaatggttctgacagtaatggtccagccagggaaataaagtttctagcctctttcttggggctttcagaatagactagrtaaccttagaattaaatgtggatttatgtttttctgaacagtacccccttttattgactacatgtttccccaagaatttgttttagagtagatgtttcaa

SEQ ID NO: 206184 - DNA, 201 bp, Homo sapiens
tggtattgcacatcattcatcttgcattctttgagaataagaagatcagtaaatagttcagaagtgggaagctttgtccaggcctgtgtgtgaacccaatrttttgtttagaaatagaacaagtaagttcattgctatagcataacacaaaatttgcataagtggtggtcagcaaatccttgaatgctgcttaatgtgacg

SEQ ID NO: 206185 - DNA, 201 bp, Homo sapiens
agaaaatcttgcctttagaatttttaagttaaacttttaataaagattcaaataaaatattaagaaactttctaaatggttctgacagtaatggtccagcyagggaaataaagtttctagcctctttcttggggctttcagaatagactagataaccttagaattaaatgtggatttatgtttttctgaacagtaccccct

SEQ ID NO: 206186 - DNA, 201 bp, Homo sapiens
ccctggataccagagtggacagttgagtcttacatattcccagagaaatatttaaagtaagctaacacaagaaaatcttgcctttagaatttttaagttamacttttaataaagattcaaataaaatattaagaaactttctaaatggttctgacagtaatggtccagccagggaaataaagtttctagcctctttcttgg

SEQ ID NO: 206187 - DNA, 201 bp, Homo sapiens
tggataaaaccctggataccagagtggacagttgagtcttacatattcccagagaaatatttaaagtaagctaacacaagaaaatcttgcctttagaattyttaagttaaacttttaataaagattcaaataaaatattaagaaactttctaaatggttctgacagtaatggtccagccagggaaataaagtttctagcct

SEQ ID NO: 206188 - DNA, 201 bp, Homo sapiens
agtcaaaacacattcaaaactttgtttcatgcataaaattatttaaaatattgtataagattaccttcaggttatgtgtatgtggctaagtgtgtatgaarcataagtgaattttgtgtttagacatggctcccattcccaagatacctcattgcattgaagcaaatattccaaaatctgaaaacagttgaaacccaacac

SEQ ID NO: 206189 - DNA, 201 bp, Homo sapiens
aagtattaatataaaaacactactatggataaaaccctggataccagagtggacagttgagtcttacatattcccagagaaatatttaaagtaagctaacmcaagaaaatcttgcctttagaatttttaagttaaacttttaataaagattcaaataaaatattaagaaactttctaaatggttctgacagtaatggtcca

SEQ ID NO: 206190 - DNA, 201 bp, Homo sapiens
gtccgactagggttacaggggtagtggcagagaccacttaggacagtattgcaacattccaggctacagtagtggtttggatcagagagatagcaggtggwaattatgattctgggtatttttcaaacagagctgatagattttgttcaattgtgtgtgggttgttaaagaaagagaagaatcaaggataaccccaaagtt

SEQ ID NO: 206191 - DNA, 201 bp, Homo sapiens
aatctaagtattaatataaaaacactactatggataaaaccctggataccagagtggacagttgagtcttacatattcccagagaaatatttaaagtaagstaacacaagaaaatcttgcctttagaatttttaagttaaacttttaataaagattcaaataaaatattaagaaactttctaaatggttctgacagtaatg

SEQ ID NO: 206192 - DNA, 201 bp, Homo sapiens
ggtaaggggtgaagtcagagtggtgggcagagagagtgaggatgcagagagtgcaagcccttgcagaccatggctttgcctctaaatgagaagagattccrctgaagggctctgaatggggacgttcctgtaatacactctgagttacattttacaagaatccctctggctgctacatggaggtccgactagggttacagg

SEQ ID NO: 206193 - DNA, 201 bp, Homo sapiens
gtggtggtcagcaaatccttgaatgctgcttaatgtgacgaggttggtaaaatcctttgtgcaacactcttactccctgaatgttttgctgtgctgggacytgtgcatgccaggcaaggccaagatggctcaaagagcaaccagccacctctgcagcctgccacctcctgctggcaagatttgtttttgcatcctgtgaag

SEQ ID NO: 206194 - DNA, 201 bp, Homo sapiens
aagtggtggtcagcaaatccttgaatgctgcttaatgtgacgaggttggtaaaatcctttgtgcaacactcttactccctgaatgttttgctgtgctgggrcctgtgcatgccaggcaaggccaagatggctcaaagagcaaccagccacctctgcagcctgccacctcctgctggcaagatttgtttttgcatcctgtga

SEQ ID NO: 206195 - DNA, 201 bp, Homo sapiens
taagtggtggtcagcaaatccttgaatgctgcttaatgtgacgaggttggtaaaatcctttgtgcaacactcttactccctgaatgttttgctgtgctggracctgtgcatgccaggcaaggccaagatggctcaaagagcaaccagccacctctgcagcctgccacctcctgctggcaagatttgtttttgcatcctgtg

SEQ ID NO: 206196 - DNA, 201 bp, Homo sapiens
aaaacccagttgaaactggtttaaaacacaaatgtggtgtattgatgtacaatggaaaaaatccagcactagagtggtgagcagctgtgattcaactagarctctggctgccttggtctttgtgagtctcaactctgccactttgttctggttttatcttcatgatgaataagatgtttgctgtagcttcaagctttacac

SEQ ID NO: 206197 - DNA, 201 bp, Homo sapiens
ttgctatagcataacacaaaatttgcataagtggtggtcagcaaatccttgaatgctgcttaatgtgacgaggttggtaaaatcctttgtgcaacactctwactccctgaatgttttgctgtgctgggacctgtgcatgccaggcaaggccaagatggctcaaagagcaaccagccacctctgcagcctgccacctcctgc

SEQ ID NO: 206198 - DNA, 201 bp, Homo sapiens
tcagaagtgggaagctttgtccaggcctgtgtgtgaacccaatattttgtttagaaatagaacaagtaagttcattgctatagcataacacaaaatttgcwtaagtggtggtcagcaaatccttgaatgctgcttaatgtgacgaggttggtaaaatcctttgtgcaacactcttactccctgaatgttttgctgtgctgg

SEQ ID NO: 206199 - DNA, 201 bp, Homo sapiens
tcagtgatctaaatgagtttaaatcttattagggattcagactgcccttcagactctgtctctattcctaccagagctgggttcaacatgaattcaaatasaaatatgagacaatgaattatggtagtgacaaagaccttccttcgaattccggatttttctagcagcccctttctttctgcttcccacctgccttcaact

SEQ ID NO: 206200 - DNA, 201 bp, Homo sapiens
gactctgtctctattcctaccagagctgggttcaacatgaattcaaatagaaatatgagacaatgaattatggtagtgacaaagaccttccttcgaattcyggatttttctagcagcccctttctttctgcttcccacctgccttcaactctttctcctaaaaaagttcagttggggtgaagtttggtgacttagaacatc

SEQ ID NO: 206201 - DNA, 201 bp, Homo sapiens
tcacactgaggcattcagggcctaaaccccactttactcttttgtacaatgaatgggaaatcagtgatctaaatgagtttaaatcttattagggattcagmctgcccttcagactctgtctctattcctaccagagctgggttcaacatgaattcaaatagaaatatgagacaatgaattatggtagtgacaaagaccttc

SEQ ID NO: 206202 - DNA, 201 bp, Homo sapiens
aggacgccgcgggcgactgggggtgccaggcccagggctgtggcggcggcggccaccgcctaagaaactaaagacaggggcgtggaggggcggagctgggyggggggcgcctcatgaaggccgggctgggtgtcccaaaccagggccacggaagggcagcgggaaggaggcgtgcgggccgtaggggctgaggggcaggtg

SEQ ID NO: 206203 - DNA, 201 bp, Homo sapiens
gtgcctgcaggggagaattcttgctgtaggtctggccgtagccacataggtatgcctggtgttgcagttcccaggccaggagcagctgccatgcttgggcktggcctccagcagctccagcggggacgccggtgccaccacaaggacgccgcgggcgactgggggtgccaggcccagggctgtggcggcggcggccaccgc

SEQ ID NO: 206204 - DNA, 201 bp, Homo sapiens
ggagaaatagaagttaagggaagaatctgaagtagtctcaaaggcagtgacaggaaggatgtggagaaagctgagtgtcaaagtcagtattcaggaccggmtttactgctacttagagatgaatgaagaaatcagagggaacgcagtgtgctgatgctaaagcagctgtcaccactcagctgtgtgacataggacatcttc

SEQ ID NO: 206205 - DNA, 201 bp, Homo sapiens
tgcgcagatgtgcctgcaggggagaattcttgctgtaggtctggccgtagccacataggtatgcctggtgttgcagttcccaggccaggagcagctgccaygcttgggcgtggcctccagcagctccagcggggacgccggtgccaccacaaggacgccgcgggcgactgggggtgccaggcccagggctgtggcggcggc

SEQ ID NO: 206206 - DNA, 201 bp, Homo sapiens
aacagttcttagttcagcttaatctaagtattaatataaaaacactactatggataaaaccctggataccagagtggacagttgagtcttacatattcccrgagaaatatttaaagtaagctaacacaagaaaatcttgcctttagaatttttaagttaaacttttaataaagattcaaataaaatattaagaaactttct

SEQ ID NO: 206207 - DNA, 201 bp, Homo sapiens
attgggaggggggtggttagcagtgggtgtatcaggaggcccattttagagctgttaaatgtgaatgtctcttacacctccaggtggaaatgttgaataaktatatggatatatagatcagaacatcagtgttgagatcagaatctcttatgctatcaacctgtacataactttcttatttaccaccatctttttaaagta

SEQ ID NO: 206208 - DNA, 201 bp, Homo sapiens
tgtgtgtgaacccaatattttgtttagaaatagaacaagtaagttcattgctatagcataacacaaaatttgcataagtggtggtcagcaaatccttgaaygctgcttaatgtgacgaggttggtaaaatcctttgtgcaacactcttactccctgaatgttttgctgtgctgggacctgtgcatgccaggcaaggccaag

SEQ ID NO: 206209 - DNA, 201 bp, Homo sapiens
atcagagagatagcaggtggtaattatgattctgggtatttttcaaacagagctgatagattttgttcaattgtgtgtgggttgttaaagaaagagaagamtcaaggataaccccaaagtttttggctgaactactaaacaaattgaattagcatttggttagaggtagaagactggtgaaatagcaagtttgtgtatgta

SEQ ID NO: 206210 - DNA, 201 bp, Homo sapiens
aagcccttgcagaccatggctttgcctctaaatgagaagagattccgctgaagggctctgaatggggacgttcctgtaatacactctgagttacattttayaagaatccctctggctgctacatggaggtccgactagggttacaggggtagtggcagagaccacttaggacagtattgcaacattccaggctacagtagt

SEQ ID NO: 206211 - DNA, 201 bp, Homo sapiens
tggtgggcagagagagtgaggatgcagagagtgcaagcccttgcagaccatggctttgcctctaaatgagaagagattccgctgaagggctctgaatgggracgttcctgtaatacactctgagttacattttacaagaatccctctggctgctacatggaggtccgactagggttacaggggtagtggcagagaccactt

SEQ ID NO: 206212 - DNA, 201 bp, Homo sapiens
gaagttctttaatcatattcaaggacagcaaggaggccagtatggctgcagcagaagcaccgagagggagagcggtaaggggtgaagtcagagtggtgggyagagagagtgaggatgcagagagtgcaagcccttgcagaccatggctttgcctctaaatgagaagagattccgctgaagggctctgaatggggacgttcc

SEQ ID NO: 206213 - DNA, 201 bp, Homo sapiens
agagggcaaatcagagggacacatggatgaaatattccaagttgaagaaatagcaagtgctgaagttctttaatcatattcaaggacagcaaggaggccartatggctgcagcagaagcaccgagagggagagcggtaaggggtgaagtcagagtggtgggcagagagagtgaggatgcagagagtgcaagcccttgcaga

SEQ ID NO: 206214 - DNA, 201 bp, Homo sapiens
gatggtgcaagtaagtaccagcacattttccagataagtcatgtgaagtgatttatgtttcataatatgatcatttctgattgatcttatctattatgacyacccatagagatggctgtaaagaattaagaacatcaaacaatgtcaagttgttcattgcatgtatttcagaacattgccaagataaagccaggtggagtc

SEQ ID NO: 206215 - DNA, 201 bp, Homo sapiens
ggctgctatttaatatgtgatggccaaagaaagtctctctgataaggtgtcatcttagtagagacctgaaagaagtgagagggcaaatcagagggacacayggatgaaatattccaagttgaagaaatagcaagtgctgaagttctttaatcatattcaaggacagcaaggaggccagtatggctgcagcagaagcaccga

SEQ ID NO: 206216 - DNA, 201 bp, Homo sapiens
acatcagatatggttgagtgattgcagaaaaataaaacagattaaagaagtaaacagtattgtgggaaggctgctatttaatatgtgatggccaaagaaastctctctgataaggtgtcatcttagtagagacctgaaagaagtgagagggcaaatcagagggacacatggatgaaatattccaagttgaagaaatagcaa

SEQ ID NO: 206217 - DNA, 201 bp, Homo sapiens
tgcctggcaagtgttaaatgctaaataaatatatttgaaatgactaaaggaaggattgatacagatttaggaaaaggaaagtaagtgtatgttgctgagayatttattgattcgttcagtcaaaaaatgtttattaggcactgattacctgtcagccacttttcaaggtactgtataggttcaaacaaaacaggcaaaatt

SEQ ID NO: 206218 - DNA, 201 bp, Homo sapiens
ctctgcagcctgccacctcctgctggcaagatttgtttttgcatcctgtgaagagccaaggaggcaccagggcataagtctactcacttatatctgtctgraacataacgcttgtttgtttttacaacaaataaaattgatcttgaataaaaactgagtggtcattgtcattaatctttgaagccagattaaccttttggt

SEQ ID NO: 206219 - DNA, 201 bp, Homo sapiens
aggacacactgtgacatgattatgtcattacatgtatggtagtgatggggatgatagaaggaagaacttatggcatattttcacccccacaaaaatcagtkaaatattgggacactaaccatccaggtctagaaaagtcacatgccatagccatggtattgcacatcattcatcttgcattctttgagaataagaagatca

SEQ ID NO: 206220 - DNA, 201 bp, Homo sapiens
cacatgccatagccatggtattgcacatcattcatcttgcattctttgagaataagaagatcagtaaatagttcagaagtgggaagctttgtccaggcctstgtgtgaacccaatattttgtttagaaatagaacaagtaagttcattgctatagcataacacaaaatttgcataagtggtggtcagcaaatccttgaatg

SEQ ID NO: 206221 - DNA, 201 bp, Homo sapiens
ctgaatgttttgctgtgctgggacctgtgcatgccaggcaaggccaagatggctcaaagagcaaccagccacctctgcagcctgccacctcctgctggcargatttgtttttgcatcctgtgaagagccaaggaggcaccagggcataagtctactcacttatatctgtctggaacataacgcttgtttgtttttacaaca

SEQ ID NO: 206222 - DNA, 201 bp, Homo sapiens
acatgtatggtagtgatggggatgatagaaggaagaacttatggcatattttcacccccacaaaaatcagttaaatattgggacactaaccatccaggtcwagaaaagtcacatgccatagccatggtattgcacatcattcatcttgcattctttgagaataagaagatcagtaaatagttcagaagtgggaagctttgt

SEQ ID NO: 206223 - DNA, 201 bp, Homo sapiens
ctcaaagagcaaccagccacctctgcagcctgccacctcctgctggcaagatttgtttttgcatcctgtgaagagccaaggaggcaccagggcataagtcyactcacttatatctgtctggaacataacgcttgtttgtttttacaacaaataaaattgatcttgaataaaaactgagtggtcattgtcattaatctttga

SEQ ID NO: 206224 - DNA, 201 bp, Homo sapiens
atagtgattctgaggacacactgtgacatgattatgtcattacatgtatggtagtgatggggatgatagaaggaagaacttatggcatattttcacccccmcaaaaatcagttaaatattgggacactaaccatccaggtctagaaaagtcacatgccatagccatggtattgcacatcattcatcttgcattctttgaga

SEQ ID NO: 206225 - DNA, 201 bp, Homo sapiens
tttagaggagacacagacacaatgaactgacctagatagaaagccttagtatactcagctaggaatagtgattctgaggacacactgtgacatgattatgycattacatgtatggtagtgatggggatgatagaaggaagaacttatggcatattttcacccccacaaaaatcagttaaatattgggacactaaccatcca

SEQ ID NO: 206226 - DNA, 201 bp, Homo sapiens
agaccacttaggacagtattgcaacattccaggctacagtagtggtttggatcagagagatagcaggtggtaattatgattctgggtatttttcaaacagrgctgatagattttgttcaattgtgtgtgggttgttaaagaaagagaagaatcaaggataaccccaaagtttttggctgaactactaaacaaattgaatta

SEQ ID NO: 206227 - DNA, 201 bp, Homo sapiens
agtgcagtctgaattagcacaatgcaaatagaaaaccgaccttttattttcctcacaaaattatatctaatataaaccttatgtaaataaagaatttttargtgcttgtaaattagtaagaaaatcatacaaaatgtcagtggagtagaatagttaaggattttatatcacagtaaaatgcatttctaaattgacagtatt

SEQ ID NO: 206228 - DNA, 201 bp, Homo sapiens
ttctgcttcccacctgccttcaactctttctcctaaaaaagttcagttggggtgaagtttggtgacttagaacatcattattttaacgtgatcccaaagcrgttttcattatatgcaaagctgtatatttatttacattttaaaaaatgttctaaattggtttcttatgtccaaaagaaggggagctagttataagaaaag

SEQ ID NO: 206229 - DNA, 201 bp, Homo sapiens
caggtggggaggcctctgggctgcatgtgccgcttcctgtgcagggcaaggtgggcagagcgcaagaaggcgtggtggcaccaatggccctgaaatggccrgtggcccctgtgcttgtggtggtggagcgttagcttgtctgagtgagcacacttccagctgcttccatcccagtggcagtggtcgggcttgtcacttgtg

SEQ ID NO: 206230 - DNA, 201 bp, Homo sapiens
aaatagttcagaagtgggaagctttgtccaggcctgtgtgtgaacccaatattttgtttagaaatagaacaagtaagttcattgctatagcataacacaamatttgcataagtggtggtcagcaaatccttgaatgctgcttaatgtgacgaggttggtaaaatcctttgtgcaacactcttactccctgaatgttttgct

SEQ ID NO: 206231 - DNA, 201 bp, Homo sapiens
aaaaatcagttaaatattgggacactaaccatccaggtctagaaaagtcacatgccatagccatggtattgcacatcattcatcttgcattctttgagaayaagaagatcagtaaatagttcagaagtgggaagctttgtccaggcctgtgtgtgaacccaatattttgtttagaaatagaacaagtaagttcattgctat

SEQ ID NO: 206232 - DNA, 201 bp, Homo sapiens
tgttgtatggtatgtattttagcaataatctttatggcagagaaagctaaaatcccttagcttgcatgaatgatcacttgctaaattcctcaaggtaggcrtgatgaaggagggtttagaggagacacagacacaatgaactgacctagatagaaagccttagtatactcagctaggaatagtgattctgaggacacactg

SEQ ID NO: 206233 - DNA, 201 bp, Homo sapiens
gctaaaggttataaaatatatcaggattggaagaagccatggataaagaacaaagttcagttaggaaagagaaacacagaaggaagagacacaataaaagycatgtattctgtgagaagtcagacagatttgtggggaatggattggtttgttgtatggtatgtattttagcaataatctttatggcagagaaagctaaaa

SEQ ID NO: 206234 - DNA, 201 bp, Homo sapiens
aacgcagtgtgctgatgctaaagcagctgtcaccactcagctgtgtgacataggacatcttcctctgtctcacttgaataatatgatgtgtcagaggagayatgattgtaattgcctaaagcaatttttgtgatcaagaatcagaaacatgaacagtattgctgtctgtgttagcccctttataagggaggaagtcatctt

SEQ ID NO: 206235 - DNA, 201 bp, Homo sapiens
atggagaaatagaagttaagggaagaatctgaagtagtctcaaaggcagtgacaggaaggatgtggagaaagctgagtgtcaaagtcagtattcaggaccrgctttactgctacttagagatgaatgaagaaatcagagggaacgcagtgtgctgatgctaaagcagctgtcaccactcagctgtgtgacataggacatct

SEQ ID NO: 206236 - DNA, 201 bp, Homo sapiens
aaaatgctccagcataataaaggaaggtaaatgttaaagcgcctgcttggtgaattcagcaagtgatcattcacgcaaaaagaaaagcaactgagactctktcactagggtttttcaaataggtaaagaatcttaaatatccagtaatgatgacaacctcacttactgggagcttactcgtggggctaaggaggatgcatg

SEQ ID NO: 206237 - DNA, 201 bp, Homo sapiens
cagataaaggatactcaacctgtataagttttgaacaaacaaagcagtcatagtgagaagccacagaagcctcctacattaaaaatgctccagcataatamaggaaggtaaatgttaaagcgcctgcttggtgaattcagcaagtgatcattcacgcaaaaagaaaagcaactgagactctgtcactagggtttttcaaat

SEQ ID NO: 206238 - DNA, 201 bp, Homo sapiens
gccaaagattaaaggagacaactgaatctgacccatatatacagattgaacacacctactctgaaaatccaaaatctgaaattctccaaaatccaaaagtyttgagtgctgacatgatgccacaagtggaaaattccgcacatcttacctcatgtgatgggtcacagtcaaaacacattcaaaactttgtttcatgcataa

SEQ ID NO: 206239 - DNA, 201 bp, Homo sapiens
ggtaggcatgatgaaggagggtttagaggagacacagacacaatgaactgacctagatagaaagccttagtatactcagctaggaatagtgattctgaggrcacactgtgacatgattatgtcattacatgtatggtagtgatggggatgatagaaggaagaacttatggcatattttcacccccacaaaaatcagttaaa

SEQ ID NO: 206240 - DNA, 201 bp, Homo sapiens
tttcaccaccagcaacttcagaacccagtactggaatgccatcagccagcaggcccctgccatcatctatgacttctatctgtggctcactggaaggaaasccaggtgagaagctgagtcaatggctttgagaatgtcactgcatatgggagattgaggccccaaagtctttagggcttccttcagccaaagattaaagga

SEQ ID NO: 206241 - DNA, 201 bp, Homo sapiens
ggattggtttgttgtatggtatgtattttagcaataatctttatggcagagaaagctaaaatcccttagcttgcatgaatgatcacttgctaaattcctcraggtaggcatgatgaaggagggtttagaggagacacagacacaatgaactgacctagatagaaagccttagtatactcagctaggaatagtgattctgag

SEQ ID NO: 206242 - DNA, 201 bp, Homo sapiens
ttgtgcaacactcttactccctgaatgttttgctgtgctgggacctgtgcatgccaggcaaggccaagatggctcaaagagcaaccagccacctctgcagyctgccacctcctgctggcaagatttgtttttgcatcctgtgaagagccaaggaggcaccagggcataagtctactcacttatatctgtctggaacataac

SEQ ID NO: 206243 - DNA, 201 bp, Homo sapiens
aatggattggtttgttgtatggtatgtattttagcaataatctttatggcagagaaagctaaaatcccttagcttgcatgaatgatcacttgctaaattcytcaaggtaggcatgatgaaggagggtttagaggagacacagacacaatgaactgacctagatagaaagccttagtatactcagctaggaatagtgattct

SEQ ID NO: 206244 - DNA, 201 bp, Homo sapiens
tagtgattctgaggacacactgtgacatgattatgtcattacatgtatggtagtgatggggatgatagaaggaagaacttatggcatattttcacccccamaaaaatcagttaaatattgggacactaaccatccaggtctagaaaagtcacatgccatagccatggtattgcacatcattcatcttgcattctttgagaa

SEQ ID NO: 206245 - DNA, 201 bp, Homo sapiens
tttgtgcaacactcttactccctgaatgttttgctgtgctgggacctgtgcatgccaggcaaggccaagatggctcaaagagcaaccagccacctctgcarcctgccacctcctgctggcaagatttgtttttgcatcctgtgaagagccaaggaggcaccagggcataagtctactcacttatatctgtctggaacataa

SEQ ID NO: 206246 - DNA, 201 bp, Homo sapiens
atgagccaccgcgcccagcctattgactctttattatgctgctttcttttctattgcatagatgtattgccttatctcttttttccccttcctcctgcttyctttgattatgtttttcttctctttaacttagaaatatagcccatgaatatttggcttgtctaatacatcatttatggcttcatatttccctcaagtgcc

SEQ ID NO: 206247 - DNA, 201 bp, Homo sapiens
aggttggtaaaatcctttgtgcaacactcttactccctgaatgttttgctgtgctgggacctgtgcatgccaggcaaggccaagatggctcaaagagcaaycagccacctctgcagcctgccacctcctgctggcaagatttgtttttgcatcctgtgaagagccaaggaggcaccagggcataagtctactcacttatat

SEQ ID NO: 206248 - DNA, 201 bp, Homo sapiens
taatgtgacgaggttggtaaaatcctttgtgcaacactcttactccctgaatgttttgctgtgctgggacctgtgcatgccaggcaaggccaagatggctsaaagagcaaccagccacctctgcagcctgccacctcctgctggcaagatttgtttttgcatcctgtgaagagccaaggaggcaccagggcataagtctac

SEQ ID NO: 206249 - DNA, 201 bp, Homo sapiens
aggcacttagaacagagcctaacagatggaaggaactccaggcagttttgttgttgttgttgttgttgtttttgagatgggagttttgctcttgtcgcccmggctggagtgcagtggtgtgatcttggctcactgcaacctccacctcctgggttcaagcgattcttcgcctcagcctcccaagtagctgggattacaggc

SEQ ID NO: 206250 - DNA, 201 bp, Homo sapiens
gagtgaagtggcaccacctccgctcactgcaacctccacctctcgggttcaagcaatcctcccgcctcagcctccctagtagctgggactacaggcgcccrccaccatgcctggctaatttttgtatttttaatggcgaccgggtttcaccatgttggccaggctggtcttaaattcctgacctcaggtgatccacccacc

SEQ ID NO: 206251 - DNA, 201 bp, Homo sapiens
ataatctcagggtgcaacgaataaacaaggggtgatgccgaagaaggcaaggggagctcgggggtacccccgagggaaagtagagaaaatccaacaccagrtaccccctctccctgcatccccagcaactctccctggtgggccacagccagtctcagatggtggcttcggcttcagagaacaacgccaagaaccgctaca

SEQ ID NO: 206252 - DNA, 201 bp, Homo sapiens
tccccgatggcccagacccacagaactccacctacggggttgagtacactggagatggtggcagagcagggactcgaagcacagcacacaccaacatcacygtggatagacttgaacccgggtgtttgtatgtgttttccgtgtgggtggggaagaatggaatcaacagctcccgggagactcgaaatgccaccacaggtg

SEQ ID NO: 206253 - DNA, 201 bp, Homo sapiens; identical to SEQ ID NO: 36237

SEQ ID NO: 206254 - DNA, 201 bp, Homo sapiens
gtggagccaaccccagctccctaagctctgctcctgccatgctcccccttctctcctcgacccaggaaagacggtcgaggtcgtgacagcccagcctaacrccggcccctccttcccatgcaagggtgactcatggggcggggaccagccgctcctcccagcccctcggcctcactgggcggaggagtggttgagaggctg

SEQ ID NO: 206255 - DNA, 201 bp, Homo sapiens; identical to SEQ ID NO: 36238

SEQ ID NO: 206256 - DNA, 201 bp, Homo sapiens
cagaactcgacctactgcgttcagtgcactggagatggtggcagaacagagactcgaaacacaacagacaccagagtcaccgtggatggccttggacccgrgtcattgtatacgtgttctgtgtgggtggagaaagacggagtaaatagctctgtggagattgtcactagtgccacaggtaagaggcagccgctgttttat

SEQ ID NO: 206257 - DNA, 201 bp, Homo sapiens
gcgggacctcaggatcccagtcgggctattggggggttcccaggcaccggtgggccccggagcgagcctgccccgccgggactccgcgtctgtgcgtcagycccgcccgttgtcctggcaacaacccgttgcccgggcaaccagctttgctctcaccccgcttgagaggagcccggctgttgctctgggcaacgcggtctg

SEQ ID NO: 206258 - DNA, 201 bp, Homo sapiens; identical to SEQ ID NO: 36244

SEQ ID NO: 206259 - DNA, 201 bp, Homo sapiens
tcccaagtagcagggactacaggcgtgggccaccatgcctgactaatttattttttttagagatgaggtcttgctgtgtggtccaggctggtctctaactsctggcctcaagcaatctccctacctcagccccacaaattgctgagattacaggcatgtaatctcacatgaaatgtgaaactgtgctgggccattgggcct

SEQ ID NO: 206260 - DNA, 201 bp, Homo sapiens
ggacgagggaccctggggctccacgcagctcagacctggggggacgcctctcactcccgtgcctgcttcccaggctcagtacgtattcctgcatcagtgcrtcctgcggttcctccaacagtcagcccaggccccagccgagaaggaagtcccgtatgaggatgtcgaaaacctcatctacgagaacgtggccgccatcca

SEQ ID NO: 206261 - DNA, 201 bp, Homo sapiens
tttttgtttgttttgagacggagtctcgctgtgtcgcccaggctggagtgcagtggcgcgatctcggctcactgcaagctccgcctcccgggttcacgccrttctcctgcctcagcctcccgagtagctgggactacaggcaccagccaccacgcccggctaattttttgtatttttagtagagacaggtttcaccgtgtt

SEQ ID NO: 206262 - DNA, 201 bp, Homo sapiens
ctcccccaaaacccgtagctccccaggggacatcccagctgaagacttcgctgaccacgtcaggaagaatgagagggacagcaactgtggttttgcagacragtaccaggtggggagaggacagaggggctgagctcagtctccctccggtggcccagacccccaccccccaccccctggccagacctcacggctttcggg

SEQ ID NO: 206263 - DNA, 201 bp, Homo sapiens
agtggtgtgatcttggctcactgcaacctccacctcctgggttcaagcgattcttcgcctcagcctcccaagtagctgggattacaggcatgcgccaccayacccggctaatttttgcatttttagaagagacggttttgccaggttggccaggctggtctggaactcctgaccttgggtgatccaccggcctcagcctcc

SEQ ID NO: 206264 - DNA, 201 bp, Homo sapiens
ccctcactgcagccactggtgagacacagtcggttctgaacccagccctattaggatgggggaaggaaaaagatgaaaggactttgggagctccttgggaratgaagagtacccatgggcctctccagcctcaccggccggagcttaaacctgtaggtcccgttcctagtgggtgtcgtttcttagcagacagggctttcc

SEQ ID NO: 206265 - DNA, 201 bp, Homo sapiens
gcatgcgccaccacacccggctaatttttgcatttttagaagagacggttttgccaggttggccaggctggtctggaactcctgaccttgggtgatccacyggcctcagcctcccaaagtgctgggattacaggtgtgagcaggcatagttattgtcatcattcaaacacagatccctccaatcagccatgaccccggacc

SEQ ID NO: 206266 - DNA, 201 bp, Homo sapiens
tttggcgaggaagggatgggctcgtctcagaaaactgggggtaggggtggagggggtggaaagccaccttggatggcactgctgacctcttgcttccttcrcccagacccagacacagtcaccatcacttcctgtgtcagcacctcagcgggctatggagtcaacttgatctggtcctgcccccagggaggctacgaggcc

SEQ ID NO: 206267 - DNA, 201 bp, Homo sapiens
ccgcccgttgtcctggcaacaacccgttgcccgggcaaccagctttgctctcaccccgcttgagaggagcccggctgttgctctgggcaacgcggtctgcyggttcccacgtctgccttcgcccgcttccggttcagaccctgcggaggggcgaggacgaggcagaagtcagcgggatgcctgtggggccgtggaggaaga

SEQ ID NO: 206268 - DNA, 201 bp, Homo sapiens
gaccgcctggagggtgggggctggagaagaaggaggaggaccgctggttgcagcctcaccccctgagcctctcatcctaacgtccttttcccaggaataakaagaagcagcagaaaccagaactcagggatctggtctttaggtgagcagaaggtctggggggtgcattggaaagaatctggtcaaatcaaggggtgtttg

SEQ ID NO: 206269 - DNA, 201 bp, Homo sapiens
aattaagtctctcagtgcagagtgcagtggttgcctgggagccagacagccctaggtttccaaccaagaaggaccatttcctggttgtgtgaccttggagmactcactgtccctctctgagcctcaagtctgtggtcactaacttggtatttcccctccttccttctcaataaggagctgttcaattagcatccgtaaagg

SEQ ID NO: 206270 - DNA, 201 bp, Homo sapiens
cctccagggcctgtgcagctggacaggggccagggcgcctggtgagtgacccctgcctgaactcactgcccactcgaagaggtgggaccgcaactgccgtragcctctggggggtccccgtggggtccagtggtccatggtaggggtttatgagcgccgttgtttctggacttggggcgtgagctcaggggttgggaggga

SEQ ID NO: 206271 - DNA, 201 bp, Homo sapiens
catgacttttgtccatgggtcttggtcttgtctctgtgcctctctgggtctctctgcctgtggtcttgtctctgtgcctctctgggtctctctgcctgtggtcttgtctctgtgcctctctgggtctctctgcctggctaatgctggcctcttctcctagatgactggtcccgggtgcccctgaagcccatccatgaggag

SEQ ID NO: 206272 - DNA, 201 bp, Homo sapiens
ggcatgacttttgtccatgggtcttggtcttgtctctgtgcctctctgggtctctctgcctgtggtcttgtctctgtgcctctctgggtctctctgcctgtggtcttgtctctgtgcctctctgggtctctctgcctggctaatgctggcctcttctcctagatgactggtcccgggtgcccctgaagcccatccatgagg

SEQ ID NO: 206273 - DNA, 201 bp, Homo sapiens
cccttcccttgttctgcctagtgctggcgtgggtcgcacaggaaccctcattgccctggacgtcctgctccggcagctgcagtccgagggtctccttgggsccttcagctttgtaaggaagatgagagagagtcggccgttgatggtgcagactgaggtgaggcagtccctcagcaacacaggacgggaggcagtgggacg

SEQ ID NO: 206274 - DNA, 201 bp, Homo sapiens
aggtgcccgccacctcgcccggctaattttttgtatttttggtagagacagggtttcaccgtgttagccaggatggtctcgatctcctgaccttgtgatcygcccgcctcggcctcccaaagtgctgggattacgggcgtgagccactgcgcccggccccccaccttttttttttctttgagacagagtcttgctgtcacc

SEQ ID NO: 206275 - DNA, 201 bp, Homo sapiens
ggactacaggtgcccgccacctcgcccggctaattttttgtatttttggtagagacagggtttcaccgtgttagccaggatggtctcgatctcctgacctygtgatctgcccgcctcggcctcccaaagtgctgggattacgggcgtgagccactgcgcccggccccccaccttttttttttctttgagacagagtcttgc

SEQ ID NO: 206276 - DNA, 201 bp, Homo sapiens; identical to SEQ ID NO: 36255

SEQ ID NO: 206277 - DNA, 201 bp, Homo sapiens
gccctggaacccgggacgttgtacaatttcaccgtgtgggcagagaggaatgacgtagccagttccacgcagagcctctgtgcgtccacatgtgagaatcmccttcctgccttcaagtggtgaactgggcttagctcacagtccttgcgagctgagagatgaatggaatacaaattccatcaggccacaggccatgacttc

SEQ ID NO: 206278 - DNA, 201 bp, Homo sapiens
ctcctgacctcaggtgatccacccgcctcggcctcccaaagtgctgggattacaggcgtgagccaccatgcccagccctcaaaagtgcaagattaaaagargttacggtcttttctccctgctcccccaaaacccgtagctccccaggggacatcccagctgaagacttcgctgaccacgtcaggaagaatgagagggaca

SEQ ID NO: 206279 - DNA, 201 bp, Homo sapiens; identical to SEQ ID NO: 36258

SEQ ID NO: 206280 - DNA, 201 bp, Homo sapiens
cctcagcctcctgagtagctgggattataggcgcctcctaccacgcccagctaacttttatacttttaatagagatggggttttgctatgttggccaggcyggtctcaaactcctgacctccggtgatccacccgcctcggcctcctgaagtgcagggattacaggcatgagccaccatgcccagctaatttttaaatttt

SEQ ID NO: 206281 - DNA, 201 bp, Homo sapiens
cgagccaattaaaactcttttctttataaattacccagtctcaggtatttctttatagcaatgaaagactggcccaatatagatgggggaatttctagggkcttccatttcttcttcccaccatcaaagctttcacactacagatcagggaagccaaagcattgtgtctgccattttatgagaatgtcgatttcaacttca

SEQ ID NO: 206282 - DNA, 201 bp, Homo sapiens; identical to SEQ ID NO: 36260

SEQ ID NO: 206283 - DNA, 201 bp, Homo sapiens
tttccggctagatccttctttgttgtgggggggccgtcctgcgcattgtaggatattgagctgcacctctgcttcccacccactatgtgccagcagcactyccacttccaagctgtgacaaccaaaagcgtctccagacattgcccggtgtctctttgggagcaaaatcacccttgttgagaaccactagtctaagctaag

SEQ ID NO: 206284 - DNA, 201 bp, Homo sapiens
aaggaaggcaagaatcacttttttgttttgtttcgttttgttcttttttgagacagggtctcactctgttgcccaggctggagtgcagtgatacgatcatgcccaccacagcctccacctcccaggctcaagtgatcctcctgcctcagtcccctgagtagctgggactacaggcatgtactaccatgcccagctattttg

SEQ ID NO: 206285 - DNA, 201 bp, Homo sapiens
ctcccggtttagcttcccaaaatgctgggattacaggcctgagccactgtgccctgccaggaagtgtttctggatgagctgggctgcacaaggacagggcrtatcactgtgttctggactcttgaggactaggggatgtggaaatcctgactctgctccctctcccagtccccaacgcagtgacaagcctcagcaagcagg

SEQ ID NO: 206286 - DNA, 201 bp, Homo sapiens
ggtctcatgggtcagggaaggcatgactgaccccaggacccaaagcacctcaggtactgacatcaccctaaaggaactggaagctggcagcctgtaccacytcaccgtctgggccgagaggaatgaggtcagaggctataacagcaccctcactgcagccactggtgagacacagtcggttctgaacccagccctattagg

SEQ ID NO: 206287 - DNA, 201 bp, Homo sapiens
agtcgtgcaatctcagctcactgcagcctccacctcccgggttcaagtgactcttatgctcagcctcctgagtagttgggatgacaggtgtgcaccaccayacccagctaacttttgtttttttagtagagactgggttttgttatgttgcccaggctggtctcaaactcctgggctcaagtgatccacccacctcagcct

SEQ ID NO: 206288 - DNA, 201 bp, Homo sapiens
ttggggggttcccaggcaccggtgggccccggagcgagcctgccccgccgggactccgcgtctgtgcgtcagccccgcccgttgtcctggcaacaacccgwtgcccgggcaaccagctttgctctcaccccgcttgagaggagcccggctgttgctctgggcaacgcggtctgctggttcccacgtctgccttcgcccgct

SEQ ID NO: 206289 - DNA, 201 bp, Homo sapiens
agtagagactgggttttgttatgttgcccaggctggtctcaaactcctgggctcaagtgatccacccacctcagcctcccaaagtgttgggattacagggktgagccaccatgcctggccaggagtcactcttcagcaaccaggtcacctgtgaaaatgatggatagttgacccttgaacaattgtcccctacacagtaga

SEQ ID NO: 206290 - DNA, 201 bp, Homo sapiens
ccttacccctggctccttaaggtgcagccagaagtagaggagctggagccagcaccatccgggccagggcagcaggtggcagacaagcatgagctaggacractgcagtactccctggattatgacttccagagtggccaggtgggtgtggaggaaggggaagctttggagggaggatcccgggggttccaaccccttctg

SEQ ID NO: 206291 - DNA, 201 bp, Homo sapiens
cccacctcagcctcccaaagtgttgggattacaggggtgagccaccatgcctggccaggagtcactcttcagcaaccaggtcacctgtgaaaatgatggayagttgacccttgaacaattgtcccctacacagtagaaaatctgcatataacagccgggcatggtggctcatgcctataatcccagcactttgggaggctg

SEQ ID NO: 206292 - DNA, 201 bp, Homo sapiens
atcgagactccgtctcaaaaaaataatagtaataaaaaattaaaaaagatcataaaaaatatgatataaactttcagacagggccaggcatggtggctcaygcctgtaatcccagctacgcaggtggctggggcaggagaatcacttgaacccgggagcagaggttgcagtgagctgagattgcaccattgcactccagcc

SEQ ID NO: 206293 - DNA, 201 bp, Homo sapiens
aagacttcacccacccttacccctggctccttaaggtgcagccagaagtagaggagctggagccagcaccatccgggccagggcagcaggtggcagacaarcatgagctaggacgactgcagtactccctggattatgacttccagagtggccaggtgggtgtggaggaaggggaagctttggagggaggatcccgggggt

SEQ ID NO: 206294 - DNA, 201 bp, Homo sapiens
tgcgtggggctcaaaggacgtctggggtgggaatgggggactagggtgcttgagtgtctctgcagaaaagactccaggaccccgccaccatgttcccggakcccccaaccccggggcctccatcgcccgacacgcctcccgactccagtcgcatcagccacggcccaggtgagcaagacccgggggtggggggccgagcag

SEQ ID NO: 206295 - DNA, 201 bp, Homo sapiens
gaggtgaggcagtccctcagcaacacaggacgggaggcagtgggacgagggaccctggggctccacgcagctcagacctggggggacgcctctcactcccrtgcctgcttcccaggctcagtacgtattcctgcatcagtgcatcctgcggttcctccaacagtcagcccaggccccagccgagaaggaagtcccgtatga

SEQ ID NO: 206296 - DNA, 201 bp, Homo sapiens
cccgagtagctgggactacaggtgcccgccacctcgcccggctaattttttgtatttttggtagagacagggtttcaccgtgttagccaggatggtctcgrtctcctgaccttgtgatctgcccgcctcggcctcccaaagtgctgggattacgggcgtgagccactgcgcccggccccccaccttttttttttctttgag

SEQ ID NO: 206297 - DNA, 201 bp, Homo sapiens
ccaccggcctcagcctcccaaagtgctgggattacaggtgtgagcaggcatagttattgtcatcattcaaacacagatccctccaatcagccatgaccccrgaccctcacactcctgccccttggtctgacccttcccttgttctgcctagtgctggcgtgggtcgcacaggaaccctcattgccctggacgtcctgctcc

SEQ ID NO: 206298 - DNA, 201 bp, Homo sapiens
tcccgagtagctgggactacaggtgcccgccacctcgcccggctaattttttgtatttttggtagagacagggtttcaccgtgttagccaggatggtctcratctcctgaccttgtgatctgcccgcctcggcctcccaaagtgctgggattacgggcgtgagccactgcgcccggccccccaccttttttttttctttga

SEQ ID NO: 206299 - DNA, 201 bp, Homo sapiens
ctcatgggagttggagttctttgttgtgcgtggggctcaaaggacgtctggggtgggaatgggggactagggtgcttgagtgtctctgcagaaaagactcyaggaccccgccaccatgttcccggagcccccaaccccggggcctccatcgcccgacacgcctcccgactccagtcgcatcagccacggcccaggtgagca

SEQ ID NO: 206300 - DNA, 201 bp, Homo sapiens
gttctctgacccctcctcctcccccaggtgaagtgtgagcattactggcctctggactcgcagccctgcacccatgggcacctgcgggtaaccctggtagrtgaggaagtgatggagaactggacggtgcgggaactgctgctcctccaggtgcgtgtgtccagccccgtcctggccctcagccttcccctgtgacatatg

SEQ ID NO: 206301 - DNA, 201 bp, Homo sapiens
aagggtagaggaatattgtgatattctttttttttttttttgaggtggagtcttgctctgtcacccaggctgaagtgcagtggcatgatctcggctcaccrcaacctccgcctcccgggttcaagcaattctactgcctcagcctcccgagtagctgggaatacaggcatgcaccaccacgcccagctaatttttgtattt

SEQ ID NO: 206302 - DNA, 201 bp, Homo sapiens
atatataatatattatatgttatatatataatatattatatattatatatattatacaatataaaatatacattatatataatataatatataaattatawaatatataatatataaatttataatatataaaatatataaataaacttggagacaaggcaaaaggaggggataggaagggtagaggaatattgtgatatt

SEQ ID NO: 206303 - DNA, 201 bp, Homo sapiens
gtgggccacagccagtctcagatggtggcttcggcttcagagaacaacgccaagaaccgctacagaaatgtgctgccctgtgagtctcgggttcctgctgyttttgtcccagccctgatctagtcggcaccccaccccagtccccttctcctacccgctttgagaaacaagtcctgccccctaccgtgggtctcctttttt

SEQ ID NO: 206304 - DNA, 201 bp, Homo sapiens
ataatatataatatattatatgttatatatataatatattatatattatatatattatacaatataaaatatacattatatataatataatatataaattwtataatatataatatataaatttataatatataaaatatataaataaacttggagacaaggcaaaaggaggggataggaagggtagaggaatattgtgat

SEQ ID NO: 206305 - DNA, 201 bp, Homo sapiens
actgtattctttttgtttgtttgtttgtttttgagacagagtcttgctctgttacccaggctggagtgcagtagtgtgatctgggctcactgcaagctccrcctcccgggttcacgccattctcctgcctcagcctcccgagtagctgggactacaggcgcccaccaccacgccctgctaattttttgtatttttagtgga

SEQ ID NO: 206306 - DNA, 201 bp, Homo sapiens
tggtgtgatcttggctcactgcaacctccacctcctgggttcaagcgattcttcgcctcagcctcccaagtagctgggattacaggcatgcgccaccacasccggctaatttttgcatttttagaagagacggttttgccaggttggccaggctggtctggaactcctgaccttgggtgatccaccggcctcagcctccca

SEQ ID NO: 206307 - DNA, 201 bp, Homo sapiens
cataaaggcttcacctttatgacctaatcttgcaagggccctacctcttaatgctattccattggagatttttattttgttttttttgtttgttttttttktttgttttgagacggagtctcgctgtgtcgcccaggctggagtgcagtggcgcgatctcggctcactgcaagctccgcctcccgggttcacgccattctc

SEQ ID NO: 206308 - DNA, 201 bp, Homo sapiens
actggcctctggactcgcagccctgcacccatgggcacctgcgggtaaccctggtaggtgaggaagtgatggagaactggacggtgcgggaactgctgctyctccaggtgcgtgtgtccagccccgtcctggccctcagccttcccctgtgacatatgccatgcatccaggaccctccaccaactccaaccttccacccac

SEQ ID NO: 206309 - DNA, 201 bp, Homo sapiens
ggaactgctgctcctccaggtgcgtgtgtccagccccgtcctggccctcagccttcccctgtgacatatgccatgcatccaggaccctccaccaactccarccttccacccactcctctgaggagctgcagtgtgccccagggaacccgctcctggtgctagaagccaggtcctccctacattcatctccagagcctgtga

SEQ ID NO: 206310 - DNA, 201 bp, Homo sapiens
gcagtaaccccaggcataaaggcttcacctttatgacctaatcttgcaagggccctacctcttaatgctattccattggagatttttattttgttttttttgtttgttttttttgtttgttttgagacggagtctcgctgtgtcgcccaggctggagtgcagtggcgcgatctcggctcactgcaagctccgcctcccggg

SEQ ID NO: 206311 - DNA, 201 bp, Homo sapiens
gacctgttccccactctccccccagcccatctgctggttcacatttggggcctaaagcagaccccacagacctgggtaagaggagttgtgttctctgaccyctcctcctcccccaggtgaagtgtgagcattactggcctctggactcgcagccctgcacccatgggcacctgcgggtaaccctggtaggtgaggaagtga

SEQ ID NO: 206312 - DNA, 201 bp, Homo sapiens
acatccccggagggggcaagatccccaagcgaattgggtcaaccagaccagcaggaccaatgagacgtggtacaaagtggaggccctggaacccgggacgytgtacaatttcaccgtgtgggcagagaggaatgacgtagccagttccacgcagagcctctgtgcgtccacatgtgagaatccccttcctgccttcaagtg

SEQ ID NO: 206313 - DNA, 201 bp, Homo sapiens
accccctgagcctctcatcctaacgtccttttcccaggaataagaagaagcagcagaaaccagaactcagggatctggtctttaggtgagcagaaggtctkgggggtgcattggaaagaatctggtcaaatcaaggggtgtttgctggctgccagctaggtcagagggtggatcaatgcatttacccacaaaggtctcaga

SEQ ID NO: 206314 - DNA, 201 bp, Homo sapiens
agtgggccagcaagggacatccccggagggggcaagatccccaagcgaattgggtcaaccagaccagcaggaccaatgagacgtggtacaaagtggaggcyctggaacccgggacgttgtacaatttcaccgtgtgggcagagaggaatgacgtagccagttccacgcagagcctctgtgcgtccacatgtgagaatcccc

SEQ ID NO: 206315 - DNA, 201 bp, Homo sapiens
tttccctcctgtgctggttttcagctcccaacccagtgagaaacctgacagtggaggctcagaccaacagctccatcgccctgacctgggaggtccccgayggcccagacccacagaactccacctacggggttgagtacactggagatggtggcagagcagggactcgaagcacagcacacaccaacatcaccgtggata

SEQ ID NO: 206316 - DNA, 201 bp, Homo sapiens
acactcacgtggaactcgtggctgccacactggacagtgcagaactgggcctccctgcctccacctgctggatgcaatggttaaggaagggctggaaagtytgagggccagaaactacaactgattttccctcctgtgctggttttcagctcccaacccagtgagaaacctgacagtggaggctcagaccaacagctccat

SEQ ID NO: 206317 - DNA, 201 bp, Homo sapiens
aatttttgtatttttaatggcgaccgggtttcaccatgttggccaggctggtcttaaattcctgacctcaggtgatccacccacctcagcctcccaaagtkctgggattacaggtgtgagtcactgcacccggctgtgggtccctttgagagtcctcctggcctgctccctgcagctgaggtccctccgcccctctcagtc

SEQ ID NO: 206318 - DNA, 201 bp, Homo sapiens
gtactgacatcaccctaaaggaactggaagctggcagcctgtaccacctcaccgtctgggccgagaggaatgaggtcagaggctataacagcaccctcacygcagccactggtgagacacagtcggttctgaacccagccctattaggatgggggaaggaaaaagatgaaaggactttgggagctccttgggagatgaaga

SEQ ID NO: 206319 - DNA, 201 bp, Homo sapiens
tcgccatgttggccaggctggtcttgagctcctgacctcaggtgatccgcctacctcagcctcccaaagtgctgggattacaggtgtgagccactgcgccyggcagatacaaaatattatcattttgacatgtaatcaatataaggaaaggatcattaaatatacacactgagtatatacccacaaaatatatatatatat

SEQ ID NO: 206320 - DNA, 201 bp, Homo sapiens
gtggtgcgatctcggttcaccacaacctctgcctcacgggttcaagagattcttctgcctcagcctcccgagtagttgggactacaggcgtgcaacaccaygcccggctaatttttgtagttctagtagagatggggtttcaccatgttggccaggctggtctcgaactcctgacctcaggtgatccacccgcctcggcct

SEQ ID NO: 206321 - DNA, 201 bp, Homo sapiens
accacgcccggctaatttttgtagttctagtagagatggggtttcaccatgttggccaggctggtctcgaactcctgacctcaggtgatccacccgcctcrgcctcccaaagtgctgggattacaggcgtgagccaccatgcccagccctcaaaagtgcaagattaaaagaagttacggtcttttctccctgctcccccaa

SEQ ID NO: 206322 - DNA, 201 bp, Homo sapiens
tgggccaaaccctgtaagaagtgtgcgtccagcaagaaaagtggcttggggttggacactggggaacagttaccttttaagacggacagaggaggaggggyctgcccaggaaatgaacaagcagcagctgggtaggtgggggccaagccagggctgggtgttccggaacagtgcagatccaggagaaaaggcaggcacagg

SEQ ID NO: 206323 - DNA, 201 bp, Homo sapiens
gacactggggaacagttaccttttaagacggacagaggaggaggggcctgcccaggaaatgaacaagcagcagctgggtaggtgggggccaagccagggcygggtgttccggaacagtgcagatccaggagaaaaggcaggcacaggcagtggtgctaaatgctgctgagcagtcaggccggtgggggctgaaacgtggcc

SEQ ID NO: 206324 - DNA, 201 bp, Homo sapiens
ctcaggtatagcccaagggacctgtgagcctcccttggcttctgagcctgatggatactgctatcaggggaagacttcacccacccttacccctggctccytaaggtgcagccagaagtagaggagctggagccagcaccatccgggccagggcagcaggtggcagacaagcatgagctaggacgactgcagtactccctg

SEQ ID NO: 206325 - DNA, 201 bp, Homo sapiens
tttattattttttattttattttattttatttcttattttttgagacggagtctcgccctttcacccaggctggagtgcagtggtgcgatctcggttcacyacaacctctgcctcacgggttcaagagattcttctgcctcagcctcccgagtagttgggactacaggcgtgcaacaccacgcccggctaatttttgtagt

SEQ ID NO: 206326 - DNA, 201 bp, Homo sapiens
ggccagggcagcaggtggcagacaagcatgagctaggacgactgcagtactccctggattatgacttccagagtggccaggtgggtgtggaggaaggggawgctttggagggaggatcccgggggttccaaccccttctgaaaggagccatggaagggaggctaagactagtgttccccacctcccccactgtgcctgggc

SEQ ID NO: 206327 - DNA, 201 bp, Homo sapiens
ggctggagtgcagtggtgcgatctcggttcaccacaacctctgcctcacgggttcaagagattcttctgcctcagcctcccgagtagttgggactacaggygtgcaacaccacgcccggctaatttttgtagttctagtagagatggggtttcaccatgttggccaggctggtctcgaactcctgacctcaggtgatccac

SEQ ID NO: 206328 - DNA, 201 bp, Homo sapiens
gattaaaagaagttacggtcttttctccctgctcccccaaaacccgtagctccccaggggacatcccagctgaagacttcgctgaccacgtcaggaagaaygagagggacagcaactgtggttttgcagacgagtaccaggtggggagaggacagaggggctgagctcagtctccctccggtggcccagacccccaccccc

SEQ ID NO: 206329 - DNA, 201 bp, Homo sapiens
agtcccatggttccctaaatcctccccagtgccccacagggcaggtggcacacacatctattctgtttttgtgggtgccatataatctcagggtgcaacgrataaacaaggggtgatgccgaagaaggcaaggggagctcgggggtacccccgagggaaagtagagaaaatccaacaccaggtaccccctctccctgcatc

SEQ ID NO: 206330 - DNA, 201 bp, Homo sapiens
atatatatgtgtgtgtgtgtgtgtgtataggatcaatcagatagttgacattcttaattcttaatttcatacgaactcttcgaaagccggtgtggatcttmcactaacggctcatctcatttcacaaaagccacctcacggtgctcaacactcacgtggaactcgtggctgccacactggacagtgcagaactgggcctcc

SEQ ID NO: 206331 - DNA, 201 bp, Homo sapiens
accgccacacctggctaattttttgtatttttagtagagacgggtttcaccgtgttagccaggatggtctcgatctcctgaccttgtgatccacccgcctyggcctcccaaagtgctgggattacaggcgtgagccaccgtgcccagcccttttttttttttgggacagagtctctgtctcccaggctgaaatgtagtggc

SEQ ID NO: 206332 - DNA, 201 bp, Homo sapiens; identical to SEQ ID NO: 36249

SEQ ID NO: 206333 - DNA, 201 bp, Homo sapiens
agtcctgggtgctgactgggtgcaggaccccgccccgaacactcatccaatgtagaccccacacccagaccttacggattcctccagggtaaccccaggcrtcttcagtgtagacctgttccccactctccccccagcccatctgctggttcacatttggggcctaaagcagaccccacagacctgggtaagaggagttgt

SEQ ID NO: 206334 - DNA, 201 bp, Homo sapiens
ggaagaggaaaggctgggcagggttggagacagatgagcagctcagacctgcgctctgagggttcccgatgcctcctccccacaggggtcattgccggagmctttgtgggcatcctcctgtttctcatcctcgtgggcctgctgattttcttcctgaagaggaggtgagactcagcacagggctgaccgcctggagggtgg

SEQ ID NO: 206335 - DNA, 201 bp, Homo sapiens
caagtatatactcacacacacacaaatatatataaaggatcaatgagacagttgacattcttaatttcatacgaactcttcgaaagccggtgtggatcttmcactaacggctcatctcatttcacaaaagccacctcacggtgctcaacactcacgtggaactcgtggctgccacactggacagtgcagagctgggcctcc

SEQ ID NO: 206336 - DNA, 201 bp, Homo sapiens
ccagggtcccctgccacagacagtgggtgacttctggcgcctggtgtgggaacagcagagccacaccctggtcatgctgaccaactgcatggaggccggcygggtgagagatctgagtcctgggtgctgactgggtgcaggaccccgccccgaacactcatccaatgtagaccccacacccagaccttacggattcctcca

SEQ ID NO: 206337 - DNA, 201 bp, Homo sapiens
ccagcccctcctccctcagactcaggagtccaggcccccaacctctcctccctcaaaccagaggtcgagacccccagcccctcctccctcagacccaggartccagacccccagcccctcctccctcagactcaggagtccaggcccccaacctctcctccctcaaaccagaggtcgagacccccagcccctcctccctca

SEQ ID NO: 206338 - DNA, 201 bp, Homo sapiens
agctcggggatcaactaaaggcccccctgacccgcctgccttcctcaaccagggtctctggagcccccaggagttcattgcaacccagggtcccctgccayagacagtgggtgacttctggcgcctggtgtgggaacagcagagccacaccctggtcatgctgaccaactgcatggaggccggccgggtgagagatctgag

SEQ ID NO: 206339 - DNA, 201 bp, Homo sapiens
aacatacaccctgcatctgctggcaccagcagttgaacaagagctaagatggttgagggcagtgaggggcccactcctgccccgttctgttctgtatctcygacaacataggatcttcttcctactttctcagcccccaacccagtgagaaacctccatatggagactcagaccaacagctccatcgccctatgctgggaa

SEQ ID NO: 206340 - DNA, 201 bp, Homo sapiens
gacatccccggagggggcaagatccccaagcgaattgggtcaaccagaccagcaggaccaatgagacgtggtacaaagtggaggccctggaacccgggacrttgtacaatttcaccgtgtgggcagagaggaatgacgtagccagttccacgcagagcctctgtgcgtccacatgtgagaatccccttcctgccttcaagt

SEQ ID NO: 206341 - DNA, 201 bp, Homo sapiens
tgtgggggagaggcagacaggctggggtaggagggtcttcgaggatacccccttaggcctctgttctcacttctcagctcccaatgaggtcacagatctcmagaatgaaactcagactaagaactcagtcatgctgtggtggaaggcccctggagacccccactctcagttgtacgtatactgggtccagtgggccagcaa

SEQ ID NO: 206342 - DNA, 201 bp, Homo sapiens; identical to SEQ ID NO: 36257

SEQ ID NO: 206343 - DNA, 201 bp, Homo sapiens
cctccctagtagctgggactacaggcgcccgccaccatgcctggctaatttttgtatttttaatggcgaccgggtttcaccatgttggccaggctggtctyaaattcctgacctcaggtgatccacccacctcagcctcccaaagttctgggattacaggtgtgagtcactgcacccggctgtgggtccctttgagagtcc

SEQ ID NO: 206344 - DNA, 201 bp, Homo sapiens
cttgaacccgggtgtttgtatgtgttttccgtgtgggtggggaagaatggaatcaacagctcccgggagactcgaaatgccaccacaggtgagaggcagtygccatttgtttgatctcttatttgtttaagggacagtaagcagtagaatgtagacgattgtctattccatagtccctctgggccatattgagccaggtac

SEQ ID NO: 206345 - DNA, 201 bp, Homo sapiens
cttgaacccgggtgtttgtatgcgttttccatgtgggtgggaaagaatggaatcaacagctcccgggagactcgaaatgccaccacaggtgagaggcagtygccatttgttttgctcttacttgtttaaggggcagtaggcaggagaacgtagcggatttctattccatagtccctctgggccacattgagccaggtactc

SEQ ID NO: 206346 - DNA, 201 bp, Homo sapiens
ctgggccctgcagctgctggtgggcattctgcaagcaatgggattggcagccttggatcttggtggctcctcggacccctatgtgcgggtctacctgctgmcggacaaacggaggcggtacgagaccaaggtgcatcggcagacgctgaaccctcactttggggagaccttcgccttcaaggtgagctcctgccttcaggc

SEQ ID NO: 206347 - DNA, 201 bp, Homo sapiens; identical to SEQ ID NO: 36259

SEQ ID NO: 206348 - DNA, 201 bp, Homo sapiens
gccaccagccacacatggctattaaatttaagctcgttaaagttgcatgaaactgcaaattcagtttcacatttcatatgtttgaaagccctgttgaaggrcttccatttccttctctgttctcctaccatactggaaggtgggagagcatttccatcgttgcagaagctcagttggaaagcgctggctcaggtctttgtt

SEQ ID NO: 206349 - DNA, 201 bp, Homo sapiens
ggcatatgccaccatacctggctaacttttgtatttttagtagagacggggtttcgccatgttggccaggctggtcttgagctcctgacctcaggtgatcygcctacctcagcctcccaaagtgctgggattacaggtgtgagccactgcgcctggcagatacaaaatattatcattttgacatgtaatcaatataaggaa

SEQ ID NO: 206350 - DNA, 201 bp, Homo sapiens
atcaggggaagacttcacccacccttacccctggctccttaaggtgcagccagaagtagaggagctggagccagcaccatccgggccagggcagcaggtgrcagacaagcatgagctaggacgactgcagtactccctggattatgacttccagagtggccaggtgggtgtggaggaaggggaagctttggagggaggatc

SEQ ID NO: 206351 - DNA, 201 bp, Homo sapiens
agaaggcaaggggagctcgggggtacccccgagggaaagtagagaaaatccaacaccaggtaccccctctccctgcatccccagcaactctccctggtggrccacagccagtctcagatggtggcttcggcttcagagaacaacgccaagaaccgctacagaaatgtgctgccctgtgagtctcgggttcctgctgctttt

SEQ ID NO: 206352 - DNA, 201 bp, Homo sapiens; identical to SEQ ID NO: 36263

SEQ ID NO: 206353 - DNA, 201 bp, Homo sapiens
atagttgacattcttaattcttaatttcatacgaactcttcgaaagccggtgtggatcttacactaacggctcatctcatttcacaaaagccacctcacgrtgctcaacactcacgtggaactcgtggctgccacactggacagtgcagaactgggcctccctgcctccacctgctggatgcaatggttaaggaagggctg

SEQ ID NO: 206354 - DNA, 201 bp, Homo sapiens; identical to SEQ ID NO: 36264

SEQ ID NO: 206355 - DNA, 201 bp, Homo sapiens
tgtggatcttacactaacggctcatctcatttcacaaaagccacctcacggtgctcaacactcacgtggaactcgtggctgccacactggacagtgcagarctgggcctccctgcctccacctgctggatgcaatggttaaggaagggctggaaagtttgagggccagaaactacaactgattttccctcctgtgctggtt

SEQ ID NO: 206356 - DNA, 201 bp, Homo sapiens
tctcgctatgtcacccaggctggagtgcaacggtgcgatctccgctcactgcaacctccacctcccaagttcaagcaattctcctgcctcagcctcttgartagctgggaatacaggtgcctgccaccccgcctggctaattttggtatttttagtggagatgaggtttcttcatgttggccaggctggtctccaacgcct

SEQ ID NO: 206357 - DNA, 201 bp, Homo sapiens; identical to SEQ ID NO: 36265

SEQ ID NO: 206358 - DNA, 201 bp, Homo sapiens
gtgtcctccccattttattttattttattttatttatttatttgtttgtttattttggaggcagagtttcgctcttgttgcccaggctggagtgcagtggyatgatctcggctcactgcaacctctgcctcctgggttcaagcaattctcctgcctcagcctcctgagtagctgggattacaggcatgtgccaccacgccc

SEQ ID NO: 206359 - DNA, 201 bp, Homo sapiens
tgcctgaagaagtcccatggttccctaaatcctccccagtgccccacagggcaggtggcacacacatctattctgtttttgtgggtgccatataatctcarggtgcaacgaataaacaaggggtgatgccgaagaaggcaaggggagctcgggggtacccccgagggaaagtagagaaaatccaacaccaggtaccccctc

SEQ ID NO: 206360 - DNA, 201 bp, Homo sapiens
taactattagggagatgaggaagagtaacagcccctgagactggggctctggtttcagtcacagtgaacatttacacagttctactgctcctcatgacagyctcatggcaaaagggtgtcctccccattttattttattttattttatttatttatttgtttgtttattttggaggcagagtttcgctcttgttgcccagg

SEQ ID NO: 206361 - DNA, 201 bp, Homo sapiens
ttcttgcctgcctgaagaagtcccatggttccctaaatcctccccagtgccccacagggcaggtggcacacacatctattctgtttttgtgggtgccatakaatctcagggtgcaacgaataaacaaggggtgatgccgaagaaggcaaggggagctcgggggtacccccgagggaaagtagagaaaatccaacaccaggt

SEQ ID NO: 206362 - DNA, 201 bp, Homo sapiens
ggtcagatttcacctaacggtaactattagggagatgaggaagagtaacagcccctgagactggggctctggtttcagtcacagtgaacatttacacagtyctactgctcctcatgacagtctcatggcaaaagggtgtcctccccattttattttattttattttatttatttatttgtttgtttattttggaggcagag

SEQ ID NO: 206363 - DNA, 201 bp, Homo sapiens
ggccagacctcacggctttcgggattaagcaaaagtagcatcacatatgtcattggattgtgcagagattcccagccatgttatctttccactcactgaartcttaaaataatggtgggtcagtcctaaagtaactctctctgcccccacccagtgagtcctttctcccctgacacctgctttcttgcctgcctgaagaag

SEQ ID NO: 206364 - DNA, 201 bp, Homo sapiens
aaatgattggctggagagttcctcttcctgtatttgaaccccggctctgccacttattagctgagtggcctggggaatgggacttcacctcactcagcctycatttccccatttgtacaatggagctagtacatccgacttcttaggtttgggaggagtgaagaaggcccatcaggcacttagaacagagcctaacagatg

SEQ ID NO: 206365 - DNA, 201 bp, Homo sapiens
atattttccaaatattgaccctgctaaaatagaatatagcatcttccatatggtaggaaccaacaaggaaactttgctttaactccctttttacgatttayggtaggtagcaggggggaaaaatgcatttatagatcatttctaggcaaaattgtgaatctcacaaccaacctgtatgcggtctctttattttactagaaa

SEQ ID NO: 206366 - DNA, 201 bp, Homo sapiens; identical to SEQ ID NO: 36267

SEQ ID NO: 206367 - DNA, 201 bp, Homo sapiens
atcccaacaagcagcgttgtttgagagaagatgatctgggaaggcagaccgtacaggttacctagtcccctggttttcactgttctcagagtgctgggccrctgctgctgcctctgcctctgccccactcccccagtgattgtgtatttcactgtcgctagagatacaatgtggcaccggcagttgatggtgtattagtta

SEQ ID NO: 206368 - DNA, 201 bp, Homo sapiens
agtacgtgcactgcctgctggtgagtggaaggcaggaagtcctcttgcccaccccttagggtcggcccatggtcctgccggcctagggcagggaggggagygtgtcagagagcgtggggatcacgtcagaacagccgggccatggacatccgctttaatccaacaagtcaggagtggcttttaatatcgtgaactcagggt

SEQ ID NO: 206369 - DNA, 201 bp, Homo sapiens
tgctcagcctctgtggggcctgatgatcaccagagtggcctggtcagaggcagcaggaaatgagagttagccaggagctttgcatactcacccctgccacycactggcccccaggtgctgtctgaggtctgtgggcaggacatcaccaccaagcacatgctacccacggttctgcgcatggctggggacccggttgccaat

SEQ ID NO: 206370 - DNA, 201 bp, Homo sapiens
aggctgaccttaaaggtggaagtactttctagaacctcagatgtcactgagtcctgtcattcacagggttttggggttggagtgggggctgctgagagcargggtcattgaactcttaagtaggtggtactcataaggaatagtgatttcccctgtaccctaagccatcccctgctctatgaatgagaggggcagaagcag

SEQ ID NO: 206371 - DNA, 201 bp, Homo sapiens
gaccaaagaaacgcgagcttagccctgggtagcgcggccaatggccgtggagcagcccctgtaaactggctcgggcgcccccacgcccgcccttccttctyctcccagcattgccccccccacgtttcagcacagcgctggccgcagtctgacaggaaagggacggagccaagatggcggcggccgacggcgacgactcgc

SEQ ID NO: 206372 - DNA, 201 bp, Homo sapiens
catcgtctgtgatcgcagagatattcttcaactcctggaccggagaacccaactcacgcaagatcttagtcacttgtagacctcgtctcagttatgtaggrcctcagaacagaacaggctaagggagctcctgctcctcaacctcgccctgtccctacctgttctgcctctatccaggaagaaaggtcccccgtgggacca

SEQ ID NO: 206373 - DNA, 201 bp, Homo sapiens
ctcgtggtgatgaagaaatgaggggagagtttcacagtctgtcctgccatcagagcagctggctttggatcccacactccctcggtgcttgctttggtagstgtctttacctctctgatcgtcactttccaaagtggtgaaaagaggatattagccatgcttttcttttaggatctggaggatcaaatgaggtcccaacat

SEQ ID NO: 206374 - DNA, 201 bp, Homo sapiens
cacgcctcccagaacagccaacattaaaaaagactcagtggtgcaaatggtgaagacatagaagagctggaactctcatccattgcacgtggggctgtacmtttagggtttgatcactctgaaaacgggagtggatctggagtggaatttggtgaagcttgttatacaaacagcctgtgaaacagcccttccactcctggg

SEQ ID NO: 206375 - DNA, 201 bp, Homo sapiens
gtacagaaacagtcccacatgtgtttaacagtaggcatctctgcagttcagtggagaaatgtatgttttttaaaaaacatagctgagtcaatttgatatcyatttaggaataaaagaaggctcgcctcaatgcataaacaaattaatttgagatgacagaccagaaccagaaagattttaaaaataaaggacctagaagaa

SEQ ID NO: 206376 - DNA, 201 bp, Homo sapiens
cctgctggtgagtggaaggcaggaagtcctcttgcccaccccttagggtcggcccatggtcctgccggcctagggcagggaggggagcgtgtcagagagcrtggggatcacgtcagaacagccgggccatggacatccgctttaatccaacaagtcaggagtggcttttaatatcgtgaactcagggtgcagttatcatcc

SEQ ID NO: 206377 - DNA, 201 bp, Homo sapiens
cttggcccttggggttgaaaggacccgaagtgagcttctgcctttccttacaggtaacaaaggggacccctggggcccagatgtggggactcttgggaggyggttttcactatataagagaagacttgtggatttaacatattgtttgtgaatatctgccctgtgttagacactatggagtgggaaaagggattcagagaa

SEQ ID NO: 206378 - DNA, 201 bp, Homo sapiens
ccccttagggtcggcccatggtcctgccggcctagggcagggaggggagcgtgtcagagagcgtggggatcacgtcagaacagccgggccatggacatccrctttaatccaacaagtcaggagtggcttttaatatcgtgaactcagggtgcagttatcatcctttctgtttagtggtcaggtaggtgcccagtgccaggc

SEQ ID NO: 206379 - DNA, 201 bp, Homo sapiens
ctgcgtaacaaattattgggtgcttgctctatgttaggtacagtacagaggaatatcactgacgatcttactgaattctcacaatcactctttgaagtagrtcctgtccttgtccacattttccagatgaggaaactgaagcaccataaataacatggccaaagctgtgcagctgagaaatgaaggagccaggaaaggaag

SEQ ID NO: 206380 - DNA, 201 bp, Homo sapiens
cgcactttgtgccgctagtgaagcggctggcgggcggcgactggttcacctcccgcacctcggcctgcggcctcttctccgtctgctacccccgagtgtcyagtgctgtgaaggcggaacttcgacagtgagtctctgcctccttggaagctccaagctcccatctcagctccaaccttctctaaagcctcagactccttt

SEQ ID NO: 206381 - DNA, 201 bp, Homo sapiens
agatcccacagattgatagctcagtccccaggactgtccccagccctgaccaccagtcgctggtcctgtggaacttctgattgatcagcttcaagttgggrttcccacgaccccctctttgggtttgattaggctcatagaactcagggaaacacttatgtttactggtttattataaaggattttgcaaaggatacagat

SEQ ID NO: 206382 - DNA, 201 bp, Homo sapiens
gggtttttttccccaaactaagcagtggacagcagctggttgtcctctaattcagttctgacacgtctgcccagagacaggttcagatcccacagattgayagctcagtccccaggactgtccccagccctgaccaccagtcgctggtcctgtggaacttctgattgatcagcttcaagttgggattcccacgaccccctc

SEQ ID NO: 206383 - DNA, 201 bp, Homo sapiens
gcctgcagtgcacatcccaagagccttacacagttgtatactgatgttagctgtattgcccagatgaggaaactgaggcacaggcagatttaagtgaattktccgagctgggaagaggcagagtccagattcgatcccaggcccctaattcttagccactcctatgtgctatcctcagagggctcctggttgctttcagag

SEQ ID NO: 206384 - DNA, 201 bp, Homo sapiens
tgaagtcaagcccatcctagagaagctgacccaggaccaggatgtggacgtcaaatactttgcccaggaggctctgactggtaagacctagaaagcacggmgccctagcaggagggtggactttgaggacaggcactgggcctgtgggcagcagcttctgggagggggaggtaccttggcattgtgggcagagagagggct

SEQ ID NO: 206385 - DNA, 201 bp, Homo sapiens
tgtcaactgtgccgtttttattttattccttttattttcccccttttcacagagaaataaaggtctagaagtagttggtcctctggccttagtcatcagcwtggaggagggggcaccaccccagagccacaacatctgcgcttttctctggagaagatcttgttacaggacccattatacccctatgtcccgaaagaatac

SEQ ID NO: 206386 - DNA, 201 bp, Homo sapiens
atcagcttcaagttgggattcccacgaccccctctttgggtttgattaggctcatagaactcagggaaacacttatgtttactggtttattataaaggatwttgcaaaggatacagatgaagagatacagagaatgaggtgtgggggaaagggcctggagcttccgtgccctccctgagcccaccaccctcaagaacctct

SEQ ID NO: 206387 - DNA, 201 bp, Homo sapiens
gaaatgaggggagagtttcacagtctgtcctgccatcagagcagctggctttggatcccacactccctcggtgcttgctttggtaggtgtctttacctctytgatcgtcactttccaaagtggtgaaaagaggatattagccatgcttttcttttaggatctggaggatcaaatgaggtcccaacatgtaaatgcttgttg

SEQ ID NO: 206388 - DNA, 201 bp, Homo sapiens
ggtctcttggtgggtgtttgccaaattactcttgagcatcttcacatgtaaccaagcaaggcttccaggggctgactgggttgagagctgtcagaactcaygcgtgtctgggatttctaacattctcccctcctcttcttgttctctcattagcttcgcctcaacagcatcaagaagctgtccaccatcgccttggccctt

SEQ ID NO: 206389 - DNA, 201 bp, Homo sapiens
aggggagagtttcacagtctgtcctgccatcagagcagctggctttggatcccacactccctcggtgcttgctttggtaggtgtctttacctctctgatcstcactttccaaagtggtgaaaagaggatattagccatgcttttcttttaggatctggaggatcaaatgaggtcccaacatgtaaatgcttgttgtgagat

SEQ ID NO: 206390 - DNA, 201 bp, Homo sapiens
gcctggcttgtggatcatggtgagtaccttcacaggagcagcaagaggagatgggagctccagaaaggcaggatggattggctggggctgtggcgggcagyggaggaggctagagtcactccccacgccgctggatgctcgtatggaccagctcgcatgcttgttagagtcctagagaagtgttgagtgggaggaggacga

SEQ ID NO: 206391 - DNA, 201 bp, Homo sapiens
gattgggtgtcggcccagtggagggcgggggccagcgctagcctcgagggtcccgggcctgccctgtgcgcgcggcggtccgcggtcctgggaggttgtgsccagggctggggtctgcggactgggtctgggagagaggaggactccgtgattggcggcggcctctgaatggcctcttggggatgtggggcgcgcatgact

SEQ ID NO: 206392 - DNA, 201 bp, Homo sapiens
attgaccgtcaagcccgggtttgagcctgactcactccagaactctggtttatggctgtacacttgcttagatacttacactggcccccaccgcctttgaycgaagcaattgctgctgaaaaataaagcctttctgtggctctagacctgcctcttagttaagcagttttttgtttgtttgttttttgagataggatctcg

SEQ ID NO: 206393 - DNA, 201 bp, Homo sapiens
tttccctattagtgggtgattaactgtactggttttaatcagttaattacgtcagttgctaaaagtctgaatcttcattagtgttcatgacaaattttatracttaagtaatttatctgagttatgcttcacatgcacatagtttttataattttatagatattaatacaatttatatttgtttttgatgctttaatgggc

SEQ ID NO: 206394 - DNA, 201 bp, Homo sapiens
gtcactatatcatttgaatgtttttgaatcaggtaacagaaaacttaacctcagtagcctgaataatatggaaatgtgttatttttaatgctgacaacacygtgaggtaggtgccctcgcagtcctcatttttctttggaagcaaaagaggctcagcgaggtgaagagccttgccccggggccagtcttggcactcgaatt

SEQ ID NO: 206395 - DNA, 201 bp, Homo sapiens
ctttttgtttttccctattagtgggtgattaactgtactggttttaatcagttaattacgtcagttgctaaaagtctgaatcttcattagtgttcatgacraattttatgacttaagtaatttatctgagttatgcttcacatgcacatagtttttataattttatagatattaatacaatttatatttgtttttgatgct

SEQ ID NO: 206396 - DNA, 201 bp, Homo sapiens
taatgctgacaacaccgtgaggtaggtgccctcgcagtcctcatttttctttggaagcaaaagaggctcagcgaggtgaagagccttgccccggggccagwcttggcactcgaattagattttagcactgcttccaaggcccacgctctgtcccctaattctggtgccttcactttgattttggcttccttagcccagagt

SEQ ID NO: 206397 - DNA, 201 bp, Homo sapiens
atttttttgttctttttgtttttccctattagtgggtgattaactgtactggttttaatcagttaattacgtcagttgctaaaagtctgaatcttcattartgttcatgacaaattttatgacttaagtaatttatctgagttatgcttcacatgcacatagtttttataattttatagatattaatacaatttatatttg

SEQ ID NO: 206398 - DNA, 201 bp, Homo sapiens
gcagggtgggatcggagagagggcagggtgggatcagagaggccttgagtgccactccaccctgaggcgccctttgcctttaattatgctggttcccactrgcatttgcgggaaggactcagagcttcagaatagcgtaccatcaccacagttagggaaggttcttcccatccttgtctcctgagctgcataaactgtgtc

SEQ ID NO: 206399 - DNA, 201 bp, Homo sapiens
ctgcttccaaggcccacgctctgtcccctaattctggtgccttcactttgattttggcttccttagcccagagtaaactgccagcccctctcactctcccsctcctccttcctgtctgcagctccagaaagcagtggggcctgagatcaccaagacagacctggtccctgccttccagaacctgatgaaagactgtgaggc

SEQ ID NO: 206400 - DNA, 201 bp, Homo sapiens
gggacatggtgttaggatggtgttagtggagttgggagattcactccactaactgagtcacccgtattgctcagcctctgtggggcctgatgatcaccagrgtggcctggtcagaggcagcaggaaatgagagttagccaggagctttgcatactcacccctgccactcactggcccccaggtgctgtctgaggtctgtgg

SEQ ID NO: 206401 - DNA, 201 bp, Homo sapiens
tccacagggatccagattgcctcatcccacaaacatgtttgctgagcaccagctatttgctgggccagtgaattcggatcattcctggccttcatggagcyaggcagtctgaaggggaagactgacttaggggaaatttgattataaagtgtcacaggtgtgggacagacagacagatgtggggccttggaagcattgagg

SEQ ID NO: 206402 - DNA, 201 bp, Homo sapiens
gtgagatcatccccatgttctccaacctggcctctgacgagcaggtgagttttgcttcctggccctctgctctcccgtccttctggtggttcctgcccatraaagagaatcccagagctcagcaaggcctctgctgccctcccactgttcctctcctctccctaggactcggtgcggctgctggcggtggaggcgtgcgtg

SEQ ID NO: 206403 - DNA, 201 bp, Homo sapiens
attcagtcaccagagctgtgtgtaactgttcatgggaagcttaggtcaggttttcgatcctgacctgtagctattactagcttgggcaagccaggctgtayctcagttttctcttcttttttttttttttttttttctttttgagacggagtctcgctgtgttgcccaggctggagtgcagtggtgcgatctcggcttact

SEQ ID NO: 206404 - DNA, 201 bp, Homo sapiens
ctgcagccttgacctcctgggctcaggtgatcctcccacttcagccttctgagtagctaggacgataggtgcctgcccccacacccggctaattgttttgttttttttgtagagtcagggtttcactgtgttgcccgggctggtcttgttctctgggactcaagcgatctgtccacctcagcttcccaaagtgctgggatt

SEQ ID NO: 206405 - DNA, 201 bp, Homo sapiens
catacgtgctgcaagtgcgctaggactggagcattttttgctccagtttcaccttcagcaagcgctatatggtaatcgtgtgctggcagccagcctgtctyagggcagcttctcttagaagaaaagaaccagcatggttttcttggtgtgaggaattcatctgacttatatttgagatttccattttagatttataaactt

SEQ ID NO: 206406 - DNA, 201 bp, Homo sapiens
aaatgctatttttaaacatttgtttttattcttagttttactgtaaaaatatacatagaatgtgctattttaattattttaaagtgtgtagctctgtggcrgtaggtttattcacattgtgcagccattatcaccctccatctccagaatttttcacctcctcaaactgaaattccaaacccattggacatgagctccccc

SEQ ID NO: 206407 - DNA, 201 bp, Homo sapiens
ccagattcgatcccaggcccctaattcttagccactcctatgtgctatcctcagagggctcctggttgctttcagagctgtaaacaagggaggcagggggrtccttaaacccagggaaggcgcctaacctgcttaggtgggatgggaagttgtcagggaaggcttcctggaggaggtggctgttaacctggattttgacag

SEQ ID NO: 206408 - DNA, 201 bp, Homo sapiens
gccacagcaaatcaccatgaactgggtagcttaacacaacgaatttattctctcacagttctggaggccggaagtctgaaatcaaggtctcggcagggttsgttccttttggaggctctgagggagacccattccatgcctctctggaagttaggacttctggtggctccagcaattccttgtgttcctgggcttgtggat

SEQ ID NO: 206409 - DNA, 201 bp, Homo sapiens
aaactccttcaaggacccctaaataagaacctttgtggaaggcacgctgacagagaccttctgctggctggcataatattacgtttttcctttgagtcatwcattgcaaccatttttaaaggctattttaatgaaggtcgggatgggtaatagggaagttttctctgaggagatgagcccatgatggggtgcaggatgggg

SEQ ID NO: 206410 - DNA, 201 bp, Homo sapiens
cgggggacttggggaagacgcggaggggtacctgggggcacgggcggccctcgcggagaagactcagcgttcgctgggagtggcggaagggggcgacggcyaatcagcgtgcgtctcttatctccccggttgcccggactccttgagacggcgctcccgattgggtgtcggcccagtggagggcgggggccagcgctagcc

SEQ ID NO: 206411 - DNA, 201 bp, Homo sapiens
gccctgggtagcgcggccaatggccgtggagcagcccctgtaaactggctcgggcgcccccacgcccgcccttccttcttctcccagcattgccccccccrcgtttcagcacagcgctggccgcagtctgacaggaaagggacggagccaagatggcggcggccgacggcgacgactcgctgtaccccatcgcggtgctca

SEQ ID NO: 206412 - DNA, 201 bp, Homo sapiens
acctgatgaaagactgtgaggccgaggtgagggccgcagcctcccacaaggtcaaaggttggtgctggcagccggaacacagcaagtggggtgggtatccraggggctggaggtggaactagcacatcaggtctcacttccctttgcctccctctccctgcccacagagttctgtgaaaacctctcagctgactgtcggga

SEQ ID NO: 206413 - DNA, 201 bp, Homo sapiens
tggcactcgaattagattttagcactgcttccaaggcccacgctctgtcccctaattctggtgccttcactttgattttggcttccttagcccagagtaarctgccagcccctctcactctccccctcctccttcctgtctgcagctccagaaagcagtggggcctgagatcaccaagacagacctggtccctgccttcca

SEQ ID NO: 206414 - DNA, 201 bp, Homo sapiens
tggctcaccctctctctccctgtctcctttcgctttccagcaccttgcagagtgaagtcaagcccatcctagagaagctgacccaggaccaggatgtggaygtcaaatactttgcccaggaggctctgactggtaagacctagaaagcacggagccctagcaggagggtggactttgaggacaggcactgggcctgtgggc

SEQ ID NO: 206415 - DNA, 201 bp, Homo sapiens
gctctaggtcagacctagttttaaattctggtactgccatatattagctatggaccttggatagttacctaaccgatgctttggtcttctcatttgtaaakaattcatactgtaaagaattcatactggtaatcacagcctggtgagcgtgaagattaatcaggttatacacgcacagggcttagaacagttatgctacag

SEQ ID NO: 206416 - DNA, 201 bp, Homo sapiens
ctgggattcttggtctgtccatttgactgtctgccaggtccccaccccactgcctgcctgtgtgtcccgtgctaggtgatggccaaggacacaaagatggkccagatcccaacaagcagcgttgtttgagagaagatgatctgggaaggcagaccgtacaggttacctagtcccctggttttcactgttctcagagtgctg

SEQ ID NO: 206417 - DNA, 201 bp, Homo sapiens
tctcctgcctcagcctcctgagtggctaggattagaggcgcccaccaccacatccagctaatttttgtatttttagtagagagtgggtttcaccatgttgrccaggctggtctcaaactccctgcccgcctctgcctcccaaagtgctgggattacaggcatgagccaccacccctggccaattctagcactttggaaggc

SEQ ID NO: 206418 - DNA, 201 bp, Homo sapiens
aatagaaaatggctttgtgtagtttcttcattccacaaacattgagcaaggtctctaggctatggaaacccagagatgtgtcagacccactcccggccctygctctcagcagtggtgaaatggaattaattacagagactcctgtagctgcagtgtaaggattgtttttttgtttgttttgtttttttcccgagatggagt

SEQ ID NO: 206419 - DNA, 201 bp, Homo sapiens
ataaaatattaaactctgcatgggtagatttctaggaccattcactgcagtttttttatagcactggattcccaatgccaaggatacaacaatgtcaacartagccacttactcaaatttgggtataatatatcttgtgtcgttctctctggtagttccatatgtatgtctgcgtgtgtgcatgcaaagaaagacaataca

SEQ ID NO: 206420 - DNA, 201 bp, Homo sapiens
tgggactacaggggcccgccaccactcccagctaattttttgtacttttagtagagatggggtttcaccctgttggccaggctgctcttgaactcttgacytcaagtgatctgtccgcctcagactcccaaagtgctgggattgcaggcctgagccatcaagctgggccttcaagtgtttgcatttttaaaccctcatttt

SEQ ID NO: 206421 - DNA, 201 bp, Homo sapiens
tattttaaataacactcaggtgatactgaataataagatgctacaataattatcattctccaacaatttgaataactattcttcaaaaatttgttattctyaaaagtttataggttttgcattattccagagcgggcatggcaaaggaatacagtgctttattggggtttagaggtcccaatcagttgatataaatgttac

SEQ ID NO: 206422 - DNA, 201 bp, Homo sapiens
taacactcaggtgatactgaataataagatgctacaataattatcattctccaacaatttgaataactattcttcaaaaatttgttattctcaaaagtttrtaggttttgcattattccagagcgggcatggcaaaggaatacagtgctttattggggtttagaggtcccaatcagttgatataaatgttacagggtagta

SEQ ID NO: 206423 - DNA, 201 bp, Homo sapiens; identical to SEQ ID NO: 36274

SEQ ID NO: 206424 - DNA, 201 bp, Homo sapiens
agatcctggtagaaggtaaagtataccctagtttgtcctaccttaagaaaaagacagatgagtctttgtacttccatgctaaatagccattggctacaggwtgccctgaggtaggggatgtaaaactcccaggagcttgagtccagataggctttgtggccccagtacccaagggcagccttctaaaggcttcaggagaaa

SEQ ID NO: 206425 - DNA, 201 bp, Homo sapiens
ggtgtatatgtgccacattttcttaatccagtctatcattgttgtacatttgggttggttccaagtctttgctattgtgaatagtgccgcaataaacataygtgtgcgtctttatagcagcatgatttataatcctttgggtatatacccagtaatgggatggctgagtcaaatggtatttctagttctagatccctgagg

SEQ ID NO: 206426 - DNA, 201 bp, Homo sapiens
gccatgttggtgtgtgctgcacccattaactcatcatttaccttaggtatatctcctaatgctatcccttccccttacccctaccccatgacaggccccgstgtgtaatgttccccaccctgtgtccaagcgttctcattgttcagttcccacctatgagtgagaacatgcggtgtttggttttttgtccttgtgatagtt

SEQ ID NO: 206427 - DNA, 201 bp, Homo sapiens
tccactcattttactcaaaaggtaacttttttctcatatatatatatatatatatttttatactttaagttctagggtacatgtgcacaacatgcaggttkgttacatatgtatacatgtgccatgttggtgtgtgctgcacccattaactcatcatttaccttaggtatatctcctaatgctatcccttccccttacccc

SEQ ID NO: 206428 - DNA, 201 bp, Homo sapiens
ctaattctgagggaatcagaaactcagtagtttggtgtaccctgactccgagagaggcagaaggttttgaaagatgattgccagaccaggaaaacctttcygggcctgttttaattaatcccccagatttaccaccttgataaccacattggtattctgatcaggcaataatcctgataataacaataagaattcctatgt

SEQ ID NO: 206429 - DNA, 201 bp, Homo sapiens
tattccatattgggactggcgggatgcagaaaagtgtgacatttgcacagatgagtacatgggaggtcagcaccccacaaatcctaacttactcagcccarcatcattcttctcctcttggcaggtaagatatgctagatatacgatgtcagagtagggaggaaccttaacaatcacttcttcaggcagggtataaacttc

SEQ ID NO: 206430 - DNA, 201 bp, Homo sapiens
agatatgctagatatacgatgtcagagtagggaggaaccttaacaatcacttcttcaggcagggtataaacttctcacctgaacactcattgcagcccccwtcaaggacagaaatggtgccctgttaagaactctcaatgtatcttgtatttttcctttatagcacactttagatatttgtgtaattatttgtttaatgac

SEQ ID NO: 206431 - DNA, 201 bp, Homo sapiens
caattggtccttgtttttgtcctagtaagctatacgtcattttaaaaatgtaatttctcttcatataacagcacttataaagctgatattatgcttccttctctagaaccttaactttttttctgcagcccttcagctctttttgtttcaatgtcactatcaaacacttcactaggaactatttcaccacttcacatgcaa

SEQ ID NO: 206432 - DNA, 201 bp, Homo sapiens
acaattggtccttgtttttgtcctagtaagctatacgtcattttaaaaatgtaatttctcttcatataacagcacttataaagctgatattatgcttccttctctagaaccttaactttttttctgcagcccttcagctctttttgtttcaatgtcactatcaaacacttcactaggaactatttcaccacttcacatgca

SEQ ID NO: 206433 - DNA, 201 bp, Homo sapiens; identical to SEQ ID NO: 36282

SEQ ID NO: 206434 - DNA, 201 bp, Homo sapiens
aacaattggtccttgtttttgtcctagtaagctatacgtcattttaaaaatgtaatttctcttcatataacagcacttataaagctgatattatgcttccttctctagaaccttaactttttttctgcagcccttcagctctttttgtttcaatgtcactatcaaacacttcactaggaactatttcaccacttcacatgc

SEQ ID NO: 206435 - DNA, 201 bp, Homo sapiens
cctgagtttgacccaatatgaatctggttccatggataaagctgccaatttcagctttagaaatacactggaaggtaatctctttcttttcacttttaatyttttttctgaattcatatttacagtctcttatccaaagtcctaggaggtatttgagaattcagaattttctgagttgaccaagaatatgtgttgtatata

SEQ ID NO: 206436 - DNA, 201 bp, Homo sapiens
taacaattggtccttgtttttgtcctagtaagctatacgtcattttaaaaatgtaatttctcttcatataacagcacttataaagctgatattatgcttccttctctagaaccttaactttttttctgcagcccttcagctctttttgtttcaatgtcactatcaaacacttcactaggaactatttcaccacttcacatg

SEQ ID NO: 206437 - DNA, 201 bp, Homo sapiens
gaaggccagaaaacaaaggattggcatattcaaagtgctgaaagaaaatattgtgaccccagatttctatatctggcaatgttattcttcaaatatgaaaragaaataaagaaatttcccaataaatgaaaaactgagagattgcattgctggtagacttcctccaaccatgctaaaggaagcagttcaagctgaaaagaa

SEQ ID NO: 206438 - DNA, 201 bp, Homo sapiens
taatgatataacggtgttctattgataatcggaatagttacaacatcctttcacagaaaaagatggaaaaatcacagctaacatttaattgagtacacackatataccaggccctgaatcacttacggatgttatctataaaattcaaacgttccaacaagaggggtattattttcccatttttctgatgaagaaactgag

SEQ ID NO: 206439 - DNA, 201 bp, Homo sapiens
gaaagcttttatttgttcaaagtaacaagtggtattgatgaaaaaaaaacacacacaccaaaaaaacccaactctcccaatactacttttaaaatgaacatatcaaaactgattttcattagaatgtagttatttttccacactagttaattaaaagccaagacccagatatatatatcacaatgcaaacaattaagcttc

SEQ ID NO: 206440 - DNA, 201 bp, Homo sapiens
agtgagaaaaagagcaccaaagaacggggaccacaggagtagtcctctttaacccctgaatctgcagcacctatcactatgcctagcataagatagtcaaygaatagccgtttgatactattgtttggaatacaattttatgactggtggttctgtgaagaatgagtagattttttacttgtgacatttgtgtgtaaaaac

SEQ ID NO: 206441 - DNA, 201 bp, Homo sapiens
caaatgggataatcacataggttttcagtcattaaagtaaacatatttttttcatttttttttaatgaacaggatttgctagtccacttactgggatagcrgatgcctctcaaagcagcatgcacaatgccttgcacatctatatgaatggaacaatgtcccaggtacagggatctgccaacgatcctatcttccttcttc

SEQ ID NO: 206442 - DNA, 201 bp, Homo sapiens
gctattggggggagtcatggatgagagcttgatctaaagtagtgagaatgaggatgaagatgagttggttagtatacagaatcagaagctctcggtgactractgtaaggcagcaaggaaagcaacaagttcaggatgattctgacacatctgtgattgatttctaacaattggtccttgtttttgtcctagtaagctata

SEQ ID NO: 206443 - DNA, 201 bp, Homo sapiens
tttcaggacaagtttcaaaaatgaggtgacagcaggaacaaaggtatcttctgttacccaaaagggaaaaaggagacaggaacaaggaacaacttcttggygtttaatggtgtgtttccaattctgagcacagtggctgcctatagtaggtgctcattaagtattggctgacagactgataaatcaataaataaaagaaaa

SEQ ID NO: 206444 - DNA, 201 bp, Homo sapiens
aacaaagtaagtttacagtgagtcctgagaaaatatattataatggcctacatttagtggaaaaataagggaaaggggaggatggaaaattcatgaagatwgaaccaaaaataaataatgtttctggagacagataggatttcaggacaagtttcaaaaatgaggtgacagcaggaacaaaggtatcttctgttacccaaa

SEQ ID NO: 206445 - DNA, 201 bp, Homo sapiens
cattaaaacagaaattttctctcatgaaactctctatccattatgtcctgtatttcagagtttacaagagattttttgtttactttttcttttatttatttttttaatagcactgttggagaatgggacatggggactgaaatttcaatgaattggttaaaagtaatcaaactgactaggtttacatcctagctcaaccac

SEQ ID NO: 206446 - DNA, 201 bp, Homo sapiens
acattaaaacagaaattttctctcatgaaactctctatccattatgtcctgtatttcagagtttacaagagattttttgtttactttttcttttatttatttttttaatagcactgttggagaatgggacatggggactgaaatttcaatgaattggttaaaagtaatcaaactgactaggtttacatcctagctcaacca

SEQ ID NO: 206447 - DNA, 201 bp, Homo sapiens
tattgaatacacactgggtatccagaatgtaaagagtctcaatacggaatgaattttatttttgattttatattttgaaacagtcttcaagttatagttayaaatcaaatgggataatcacataggttttcagtcattaaagtaaacatatttttttcatttttttttaatgaacaggatttgctagtccacttactggga

SEQ ID NO: 206448 - DNA, 201 bp, Homo sapiens
cacattaaaacagaaattttctctcatgaaactctctatccattatgtcctgtatttcagagtttacaagagattttttgtttactttttcttttatttatttttttaatagcactgttggagaatgggacatggggactgaaatttcaatgaattggttaaaagtaatcaaactgactaggtttacatcctagctcaacc

SEQ ID NO: 206449 - DNA, 201 bp, Homo sapiens
acaatgtcccaggtacagggatctgccaacgatcctatcttccttcttcaccatgcatttgttgacaggttggttaatatttctttataaataacgtgctyattggatttaaatagagggtgcctatcaaatgtgatttaagttattaaataaaagctaagaagttatggtagtctattgtctgtgatcaggttgtcacca

SEQ ID NO: 206450 - DNA, 201 bp, Homo sapiens
tcacattaaaacagaaattttctctcatgaaactctctatccattatgtcctgtatttcagagtttacaagagattttttgtttactttttcttttatttatttttttaatagcactgttggagaatgggacatggggactgaaatttcaatgaattggttaaaagtaatcaaactgactaggtttacatcctagctcaac

SEQ ID NO: 206451 - DNA, 201 bp, Homo sapiens
  misc_feature (1)...(201): n = A,T,C or G
gggatctgccaacgatcctatcttccttcttcaccatgcatttgttgacaggttggttaatatttctttataaataacgtgctcattggatttaaataganggtgcctatcaaatgtgatttaagttattaaataaaagctaagaagttatggtagtctattgtctgtgatcaggttgtcaccaaaacagaccttaggcta

SEQ ID NO: 206452 - DNA, 201 bp, Homo sapiens
ttgaacccaggaggcagaggctgcagtgagcctagatcatgccactgcactccagcctgagtgagactcttcccataaataaataaataaataaataaaaataaaataaaaacctcatgtttctagataaagcaaagaaaaataagtctgtattataagaagttttctgattaggttaaataggggaccctgtgcagtgtc

SEQ ID NO: 206453 - DNA, 201 bp, Homo sapiens
cttgaacccaggaggcagaggctgcagtgagcctagatcatgccactgcactccagcctgagtgagactcttcccataaataaataaataaataaataaaaataaaataaaaacctcatgtttctagataaagcaaagaaaaataagtctgtattataagaagttttctgattaggttaaataggggaccctgtgcagtgt

SEQ ID NO: 206454 - DNA, 201 bp, Homo sapiens
cagaatgaacaggagggaacacaaattggctcaacctcttttacctggttaagctctccattgtacccaaatttaggccatttaattccacaaatatttaytgaatacacactgggtatccagaatgtaaagagtctcaatacggaatgaattttatttttgattttatattttgaaacagtcttcaagttatagttataa

SEQ ID NO: 206455 - DNA, 201 bp, Homo sapiens
gcttgaacccaggaggcagaggctgcagtgagcctagatcatgccactgcactccagcctgagtgagactcttcccataaataaataaataaataaataaaaataaaataaaaacctcatgtttctagataaagcaaagaaaaataagtctgtattataagaagttttctgattaggttaaataggggaccctgtgcagtg

SEQ ID NO: 206456 - DNA, 201 bp, Homo sapiens
tttaacatgagggtgttttgtacagattgtctgtagccgattggaggagtacaacagccatcagtctttatgcaatggaacgcccgagggacctttacggmgtaatcctggaaaccatgacaaatccagaaccccaaggctcccctcttcagctgatgtagaattttgcctgagtttgacccaatatgaatctggttccat

SEQ ID NO: 206457 - DNA, 201 bp, Homo sapiens
aacgcccgagggacctttacggcgtaatcctggaaaccatgacaaatccagaaccccaaggctcccctcttcagctgatgtagaattttgcctgagtttgrcccaatatgaatctggttccatggataaagctgccaatttcagctttagaaatacactggaaggtaatctctttcttttcacttttaattttttttctga

SEQ ID NO: 206458 - DNA, 201 bp, Homo sapiens
caaatgttcttttatgataaaggaagcaactacagaaagcttttatttgttcaaagtaacaagtggtattgatgaaaaaaaaacacacacaccaaaaaaamccaactctcccaatactacttttaaaatgaacatatcaaaactgattttcattagaatgtagttatttttccacactagttaattaaaagccaagaccca

SEQ ID NO: 206459 - DNA, 201 bp, Homo sapiens
acccatgatttttgtttggtgaatgtttaaaaacaacacaaaaagccatttatgtacacattttatgcatacacacacacacacacacacacacacacacaacccagaatggtccttaggataaacgcaagttctgattgagtaatgactatggaaattttccccgacatttagaaatgctgttctctaatgcagaggaaa

SEQ ID NO: 206460 - DNA, 201 bp, Homo sapiens
tacccatgatttttgtttggtgaatgtttaaaaacaacacaaaaagccatttatgtacacattttatgcatacacacacacacacacacacacacacacacaacccagaatggtccttaggataaacgcaagttctgattgagtaatgactatggaaattttccccgacatttagaaatgctgttctctaatgcagaggaa

SEQ ID NO: 206461 - DNA, 201 bp, Homo sapiens; identical to SEQ ID NO: 36272

SEQ ID NO: 206462 - DNA, 201 bp, Homo sapiens
atctcaaaaacatgggcttacccatgatttttgtttggtgaatgtttaaaaacaacacaaaaagccatttatgtacacattttatgcatacacacacacayacacacacacacacacacaacccagaatggtccttaggataaacgcaagttctgattgagtaatgactatggaaattttccccgacatttagaaatgctg

SEQ ID NO: 206463 - DNA, 201 bp, Homo sapiens
ctgtttataccaaattttaaaaggaactgtaaatactacctcataacatagtgaaatatgagtaatttataaattttttccctgggtgacatccttttgtrtatgtctgcccttctcattccacagctgccattcagggacattccttcaccatatcttctgggtccaataacacattcagtcattcagtaaacatgttta

SEQ ID NO: 206464 - DNA, 201 bp, Homo sapiens
tttctattggaattaagactttttttttcattttaaagcacccatcactgtttataccaaattttaaaaggaactgtaaatactacctcataacatagtgmaatatgagtaatttataaattttttccctgggtgacatccttttgtatatgtctgcccttctcattccacagctgccattcagggacattccttcaccat

SEQ ID NO: 206465 - DNA, 201 bp, Homo sapiens
cgtttgttttcctgcattacttttctattggaattaagactttttttttcattttaaagcacccatcactgtttataccaaattttaaaaggaactgtaamtactacctcataacatagtgaaatatgagtaatttataaattttttccctgggtgacatccttttgtatatgtctgcccttctcattccacagctgccat

SEQ ID NO: 206466 - DNA, 201 bp, Homo sapiens
tttacagttcaaccaaatagtatgctatgattacgtttgttttcctgcattacttttctattggaattaagactttttttttcattttaaagcacccatcmctgtttataccaaattttaaaaggaactgtaaatactacctcataacatagtgaaatatgagtaatttataaattttttccctgggtgacatccttttgt

SEQ ID NO: 206467 - DNA, 201 bp, Homo sapiens
tccatgatggctcaccaacaacctgtctgtattctagctagtcagaaaggaaaaggtaaatggttaaagatatattcttttctttttaagggaacttcccycaaagttatacatatatttttgctctagacttgagtcacatagccatgacttgctgcaaggtaagcccaggatgcactctcttctttctgctatgtcaaa

SEQ ID NO: 206468 - DNA, 201 bp, Homo sapiens
tatattaaaaacagtaactttcaaggtctagggtttaccctgggttatatagtccatgatggctcaccaacaacctgtctgtattctagctagtcagaaargaaaaggtaaatggttaaagatatattcttttctttttaagggaacttcccccaaagttatacatatatttttgctctagacttgagtcacatagccatg

SEQ ID NO: 206469 - DNA, 201 bp, Homo sapiens
tctcctactgactcagtggtggtgacaatttgtttaacatgagggtgttttgtacagattgtctgtagccgattggaggagtacaacagccatcagtcttyatgcaatggaacgcccgagggacctttacggcgtaatcctggaaaccatgacaaatccagaaccccaaggctcccctcttcagctgatgtagaattttgc

SEQ ID NO: 206470 - DNA, 201 bp, Homo sapiens
agtaaacatatttttttcatttttttttaatgaacaggatttgctagtccacttactgggatagcggatgcctctcaaagcagcatgcacaatgccttgcrcatctatatgaatggaacaatgtcccaggtacagggatctgccaacgatcctatcttccttcttcaccatgcatttgttgacaggttggttaatatttct

SEQ ID NO: 206471 - DNA, 201 bp, Homo sapiens; identical to SEQ ID NO: 36292

SEQ ID NO: 206472 - DNA, 201 bp, Homo sapiens; identical to SEQ ID NO: 36294

SEQ ID NO: 206473 - DNA, 201 bp, Homo sapiens
ttgaaggatgttgagaaataaaagtatctcaaagacagtcccttggtgacagtaaaaattgagaccacttggaatgaattaaagtggagcaatagtaagaraagctggagaacaggactgacatagaaatagtatttaaaagctgtgaaagcacttcagccaagcctttaacaaaaaagaaaatatttattatgtagcctc

SEQ ID NO: 206474 - DNA, 201 bp, Homo sapiens
tatatgctcagagtctaattcattcttttactcagtgggacagtcttctggggtgcattccctgacttcacagagatgtaggaagtcttttctccatgatscctttctatcttcatcagaacaacattactctcgaaatgatttgtttacctgccaggtgctgagggtgaaaaggtaaatgagacagagtgccccccaact

SEQ ID NO: 206475 - DNA, 201 bp, Homo sapiens
aaactctgttgagagcttccttctccccatacattacaaaagacctggaaatttggtttcaaaaatgagaaggggaaacactgttcacagtaactgcagtrccccattctgccaatggaatttgatgacacttctatcattcatgaatttgttcaatagctctgtttggctgtgtatacctgtgtgcatgctgttcttttc

SEQ ID NO: 206476 - DNA, 201 bp, Homo sapiens
actacaaagctagtaagtgtcaaatactgaatccaaaacttcatcactccatcactgcacagagaagagggttccctttaacccctacattgtcttctacrcatatgctccacctctttgttccttccctagtgtcccaatggatactttttactacaaaggcaacaaaatttcctggatgagccaggggagaagaggctc

SEQ ID NO: 206477 - DNA, 201 bp, Homo sapiens
  misc_feature (1)...(201): n = A,T,C or G
aaagccagtgaaaatgctattataagagtctgaggaagaggtaaaggtagtttaagttgcagtggtggtggcaggaagggagacagaaagcatgattaatntgatattattttgaaggcaaaatttacagaacttggaaaattatttatatatcagatgaaggagattaggaatggctttacgctttctggcctgtgaaaa

SEQ ID NO: 206478 - DNA, 201 bp, Homo sapiens
gattattgcagcttcagtatgcagaaaaattttagtagttggaaagcacatgcagaaagccagtgaaaatgctattataagagtctgaggaagaggtaaakgtagtttaagttgcagtggtggtggcaggaagggagacagaaagcatgattaatttgatattattttgaaggcaaaatttacagaacttggaaaattatt

SEQ ID NO: 206479 - DNA, 201 bp, Homo sapiens
agagtcagagagacctcgactgagatatgagtcagttaaccactcaatcacggagcctctgctctatataatggatatcacataattccacctttgtcagsgtgttggaagtattttaaataacactcaggtgatactgaataataagatgctacaataattatcattctccaacaatttgaataactattcttcaaaaat

SEQ ID NO: 206480 - DNA, 201 bp, Homo sapiens
cccatacataagagagaaaagcatagtgctggaataaaatgttatcagaaaagataaattgaacgctttttaaataatcatttttatatcactttttggtrtaaattttttgccatttttaatatctagaactacccagtgaactctaaagatttaagtatgaccactcttgccacctccattcaatatagtattaaaagg

SEQ ID NO: 206481 - DNA, 201 bp, Homo sapiens
caataccaacatcacaaccacctatacccatacataagagagaaaagcatagtgctggaataaaatgttatcagaaaagataaattgaacgctttttaaakaatcatttttatatcactttttggtataaattttttgccatttttaatatctagaactacccagtgaactctaaagatttaagtatgaccactcttgcca

SEQ ID NO: 206482 - DNA, 201 bp, Homo sapiens
gtccatattgaaacagaaattataggcagaatgaacaggagggaacacaaattggctcaacctcttttacctggttaagctctccattgtacccaaatttrggccatttaattccacaaatatttattgaatacacactgggtatccagaatgtaaagagtctcaatacggaatgaattttatttttgattttatattttg

SEQ ID NO: 206483 - DNA, 201 bp, Homo sapiens
tgtattttttttactacccattaaatgttatatttgcactcagccagcatttcagctggccaacgctctctacctatcaaatgactcaaactttctttccyagagaatttgaattctgagtgattttcacctttctttggttactgtagtcttccattaaattattgaacacagaaatgctaaaaattcctcaaagaaggc

SEQ ID NO: 206484 - DNA, 201 bp, Homo sapiens; identical to SEQ ID NO: 36316

SEQ ID NO: 206485 - DNA, 201 bp, Homo sapiens
tcttgctatttccatgatatctgcagttatctccaccactgataccctgatcccctcaaagtcatctattaggattggaatcaacttcttccatactcctrttaacgttaatattttgttctccttccatgaatcagaaatgttcttaatggcatctagaatggtgactcctttccaaaaggttttcaatttattatgccc

SEQ ID NO: 206486 - DNA, 201 bp, Homo sapiens
ttttgtctactgaagttatttaagtaaactcagctttcctcttagatttcattgctgaaatagtgaagatgtgtaatttgtgaattgtgtaagagagaccwcatggccgggtgtggtggctcacgcctgtaaacccagcaatttggaagtccaaggcaggtggatcacctgaggtcaggagcttgagaccagcctggccaa

SEQ ID NO: 206487 - DNA, 201 bp, Homo sapiens
gatatatattttaaaacactataagtattctatcacaccaggtttttttttatgtgtctgtactgagttgtttattctttacacacacatttattgaataygtactttgaataacacattgccttagatactatggatacaatggtaaacaacatagtctctatcttcacaaagtttaccatggaagagaaagatcttaac

SEQ ID NO: 206488 - DNA, 201 bp, Homo sapiens
tactctggtcacttttggatatatattttaaaacactataagtattctatcacaccaggtttttttttatgtgtctgtactgagttgtttattctttacayacacatttattgaatacgtactttgaataacacattgccttagatactatggatacaatggtaaacaacatagtctctatcttcacaaagtttaccatgg

SEQ ID NO: 206489 - DNA, 201 bp, Homo sapiens
gtaaaagagtcataaagaaaatcccacagcagtgctgaagagaaagccatgacttttgaagggttcaacctaaaaagagaaaacaaggccttgagaatgartaagcaggtggcagatagaaaagggcaggggatatgctaggcaaagagaatagcaagaacagtagaggtggaaaatgtacagcatatttatgaaatgctg

SEQ ID NO: 206490 - DNA, 201 bp, Homo sapiens
tacatggcaaccatgtgaagagcagtagaatcagaagaagaaaaaaaaaggttttgagacatgactctatcaactgactgtaaggtgacctgggaaattcrctctacatccctgaatctcagtttattcacctgaaatactgggaccagaacacattaaagaattatttagaatgatacattaatgagcctagtacagtgt

SEQ ID NO: 206491 - DNA, 201 bp, Homo sapiens
gagcagtggctccgaaggcaccgtcctcttcaagaagtttatccagaagccaatgcacccattggacataaccgggaatcctacatggttccttttatacyactgtacagaaatggtgatttctttatttcatccaaagatctgggctatgactatagctatctacaagattcaggtaaagtttactttctttcagaggaa

SEQ ID NO: 206492 - DNA, 201 bp, Homo sapiens
tgagcagtggctccgaaggcaccgtcctcttcaagaagtttatccagaagccaatgcacccattggacataaccgggaatcctacatggttccttttatamcactgtacagaaatggtgatttctttatttcatccaaagatctgggctatgactatagctatctacaagattcaggtaaagtttactttctttcagagga

SEQ ID NO: 206493 - DNA, 201 bp, Homo sapiens
aataaccttttcctctgcagtatttttgagcagtggctccgaaggcaccgtcctcttcaagaagtttatccagaagccaatgcacccattggacataaccrggaatcctacatggttccttttataccactgtacagaaatggtgatttctttatttcatccaaagatctgggctatgactatagctatctacaagattca

SEQ ID NO: 206494 - DNA, 201 bp, Homo sapiens
ggattgtagaataatttcttttttaaaaataagggcatctgggaagaccttattaatttcaaatacaattctgcattttcaggatgaaatgtcaaagaatkttgatatctaaaggcacatttgcgaaatccaaaaagacatggtggctaacaacgtacattatcaggcctttcctctagagattttggttcagtaggtctg

SEQ ID NO: 206495 - DNA, 201 bp, Homo sapiens
ctgaaagagtttcagggacttcaaggggtctgttggccccattttgttaagcaataaaatattgggattgtagaataatttcttttttaaaaataagggcrtctgggaagaccttattaatttcaaatacaattctgcattttcaggatgaaatgtcaaagaatgttgatatctaaaggcacatttgcgaaatccaaaaag

SEQ ID NO: 206496 - DNA, 201 bp, Homo sapiens
tttaaattaaaaaaatcagtttgggacctactttaaaaagtgtgagagtatacactttaaaaagtgtgagagttttaaatttttcatttggtgctactcaragataaaatcttgaaaacaacttctatgaagaacattgtcctcagtgacatgatttattgctacatagcaaaggaagtaaaccattgtatttaggagcat

SEQ ID NO: 206497 - DNA, 201 bp, Homo sapiens
gccaccacacctggcctaacttcaaggtatcaaagacaaattaacaatgtctgatgcatacataggactgctttgtaatcttctacactaatgatttgtastattttggtttcagaatccatttataactcttacaatatatgaaaaatttctgccagcttttatttatgtgggttatatttatgactacttctcatttgt

SEQ ID NO: 206498 - DNA, 201 bp, Homo sapiens
gtaatattatatgttcatttttaaattgacactatttgcaatatccttttattatatcctctgaaactatttatgattatgattaaaacaatttgatagtrcagtaggaaaattatagttaacaacaatttattctattgtatatttttaaatagctagaatagaagatttgtaagattcccaacacaaagaaaagataaa

SEQ ID NO: 206499 - DNA, 201 bp, Homo sapiens
cttccttgggataagtcttgggaaaaatatcactacacattagcaatacatattgcaaataaaatttataactctattttatgcatttattaaacaaataygagttaaaagacttcaggagttttggtctgtagcccaggctggaatgcaacggtgcaatcttggctcactgaaacctctgcctcccgggttcaaaggatt

SEQ ID NO: 206500 - DNA, 201 bp, Homo sapiens
cctgaattcattctcaatacagtctgctcccagaatgggaaaaacttccagagtgtttaacaagtggggaatccgaaacattggtgctagtgttgccaacrtgtataactttaattactaggcaacaaacttcttacaagttgggtagtttataaataaattcatcatttgtgaaattgcttttatcaaataattcttgct

SEQ ID NO: 206501 - DNA, 201 bp, Homo sapiens
agggagatgcgtgatgctagggtggtacctaatggttgcagcaaaagagatacttttgcattgagagtgcaccatattcttggttagcagcaactatttaycacatgcaacatgattatagaaatactagttactactcaggaagtattcactttgcaccagatctgtactaggtgcttttatacctgctatcaaaattaa

SEQ ID NO: 206502 - DNA, 201 bp, Homo sapiens
aagtagccctgagattcaaatgagattatttacatgaaagatatttgaaaagctggatatatatgggcactattttggggtacttagaatttcctctttgrcttattcttccaaaacagagtcaaatctcagccagagaagctaccgatgttggagtaattatttctattttttttcaagttgacttcaccaaccaagaaa

SEQ ID NO: 206503 - DNA, 201 bp, Homo sapiens
tatatgagatgatttatgtgccaatgcctagccagtgactgttacatagtagttgctcaatttcttaaatcataattttcaaaggaacatggaacagttaycaggaagaaaatatgtcaaggcataagtttatagtgtaagattttaaaggcagaaggatttttggactgtcagaatatagaaggtgaaaatttcatatca

SEQ ID NO: 206504 - DNA, 201 bp, Homo sapiens
cacaccttttcatatttcagactcttagcaggtatgattaaagtgcaacatctgtaactcatcttcctcaaaggaaagatacggaattatatgagatgatwtatgtgccaatgcctagccagtgactgttacatagtagttgctcaatttcttaaatcataattttcaaaggaacatggaacagttaccaggaagaaaata

SEQ ID NO: 206505 - DNA, 201 bp, Homo sapiens
aatgtacattttctatcttctttttatttcctcttctccaattccatctctgaaacactatgaaatgttaaaataggttaaaaatgcacttaaatgaaatkcaataaattaaatgtgctctattcttctgaagatttaactacacaccttttcatatttcagactcttagcaggtatgattaaagtgcaacatctgtaact

SEQ ID NO: 206506 - DNA, 201 bp, Homo sapiens; identical to SEQ ID NO: 36284

SEQ ID NO: 206507 - DNA, 201 bp, Homo sapiens; identical to SEQ ID NO: 36288

SEQ ID NO: 206508 - DNA, 201 bp, Homo sapiens
ttagcagcaggatcacacaggatgtgagcacatggagaatggttgcctgactcgagatattttttggaggtagaattgccaatataaaagcagtgccatcrcacaatgctccatgctcagaagcagaccctacatttgaggtttaatgatctgtggtcttggtgttgaaattcttattaatcttatctttgggtttgtgct

SEQ ID NO: 206509 - DNA, 201 bp, Homo sapiens
atttatgtaccactaagaaaaataaaaaaatatatttatcttaaaagccctttttggcttacgtagtcacatatttttatcatagtttattcttctgcctmcatataaatgaaactacaagaaaaataatttggtgaaggattcctgaaatgtttttacattcagagtcagccccttttgagttacttttaaagtcagagt

SEQ ID NO: 206510 - DNA, 201 bp, Homo sapiens; identical to SEQ ID NO: 36297

SEQ ID NO: 206511 - DNA, 201 bp, Homo sapiens; identical to SEQ ID NO: 36301

SEQ ID NO: 206512 - DNA, 201 bp, Homo sapiens
tcttagtctgaataaccttttcctctgcagtatttttgagcagtggctccgaaggcaccgtcctcttcaagaagtttatccagaagccaatgcacccattrgacataaccgggaatcctacatggttccttttataccactgtacagaaatggtgatttctttatttcatccaaagatctgggctatgactatagctatct

SEQ ID NO: 206513 - DNA, 201 bp, Homo sapiens
cttattttactttaaaaattttcaaatgtttcttttatacacaatatgtttcttagtctgaataaccttttcctctgcagtatttttgagcagtggctccraaggcaccgtcctcttcaagaagtttatccagaagccaatgcacccattggacataaccgggaatcctacatggttccttttataccactgtacagaaat

SEQ ID NO: 206514 - DNA, 201 bp, Homo sapiens
aattcaactaacattaagtaccctttatgtgtcatgtgttatattagaccatggggatgaagtgattactaaatactattattctccaactagtttcctcsagggcagatatgtcaacaactaagtaatgtaaagcaaaacgtaactctgcagtaatagtggctcaataggacaggatatttggaagtgagaaaaagagca

SEQ ID NO: 206515 - DNA, 201 bp, Homo sapiens
gcaggttcagaaataggtgagaataagcaagaagggcatcagctaagacggctgccaaaaccatgctatagaacacagggcacttgctgggcaatggattyctttgctggtacatctggctttgctgcccctgaaaactaaatattgttatatcaactgccactgcccatttctaggatggtttctgattgtccctgctta

SEQ ID NO: 206516 - DNA, 201 bp, Homo sapiens
aagcacagaaaaactcatcttcttaaatcttctaatttctcatttttgcctatcagaatactaaccatcactaaaggcactgctcacatatgcaaggcttkggcatttctaaaacagcatatgttatgtctcatcaattttaaagtttttccagtatagtcataatacttaggagggggaagaagagaagagaggagctgt

SEQ ID NO: 206517 - DNA, 201 bp, Homo sapiens
cagtgcattggggcttcacaatacagctttttcttcttttgcctctgcccctctatttgcttccctggttgcagtatttctatttatttccttgaaactcygacccctgtggcttatatttacttccccttaggtgagacaggaagactgaaagaggctggactgaaaggaattctcttcctgaaactgggataaggctct

SEQ ID NO: 206518 - DNA, 201 bp, Homo sapiens
acaacaacaaaaaaaaaggtcacacagattcaaaaaataaattcatttgacactaattgtataaactagatagccaaggagatagttaacatggagtgacrcattctagtaattggaaggctaaactatttccctagtatcttcctcactaattctgagggaatcagaaactcagtagtttggtgtaccctgactccgaga

SEQ ID NO: 206519 - DNA, 201 bp, Homo sapiens
tcactgtgtgcatctcatacttagtgagtggggagttatatatagtaccttcaagacagagtatctacataattatttgaattcttttacatgatagattyatatatttctctccatttattaatttgtatatttatagattatatctgtacagactcctctatatttattttatacaactttattttgtggctcaaactc

SEQ ID NO: 206520 - DNA, 201 bp, Homo sapiens
aacaacaacaaaaaaaaaggtcacacagattcaaaaaataaattcatttgacactaattgtataaactagatagccaaggagatagttaacatggagtgaygcattctagtaattggaaggctaaactatttccctagtatcttcctcactaattctgagggaatcagaaactcagtagtttggtgtaccctgactccgag

SEQ ID NO: 206521 - DNA, 201 bp, Homo sapiens
aggatactatattacatttaatcattctgtctccttaggttcctcttgcctgtgatagtttttcagactttctttgtttttttgatgaccttcacaacttygaggagtactgctcaggtattttgtaaaatgtcccacagttgatatttgtctgatttttttctcatgattaaactgggatatgtgttttgggatggacaa

SEQ ID NO: 206522 - DNA, 201 bp, Homo sapiens
acaagtttcaaaaatgaggtgacagcaggaacaaaggtatcttctgttacccaaaagggaaaaaggagacaggaacaaggaacaacttcttggcgtttaayggtgtgtttccaattctgagcacagtggctgcctatagtaggtgctcattaagtattggctgacagactgataaatcaataaataaaagaaaactacctt

SEQ ID NO: 206523 - DNA, 201 bp, Homo sapiens
gaacagttttcaacttcagtaaactctatattgatataatgcttttatcaaatctactgtatatcagtttttaaaattagatataataatatcctcagtawttttcctctccaaaatagaatctagtctaggatcaaatagcatttagttttcatggttctttagtctgaaatatttccataaccttgtacatatgtgtct

SEQ ID NO: 206524 - DNA, 201 bp, Homo sapiens
tgaaaaaaataaataataataaaagaaaaaaaatttaggaatgcactggccttgctattatacaactgcaattcaataaattttgagtgactagaaattcrtgtggctggaggcatcgcaagctgcagttctcaaagagagtgtgattgtcacgtcatctgtcctggcctttcagaaagatgatatccaagaaaaataact

SEQ ID NO: 206525 - DNA, 201 bp, Homo sapiens
ggagcattttgctgttttttcagccataagtgacaaagcatatattttattattaagaagcatgggttagttgcagaaataaggcaggggaacatcactcrtctagggtctcaagtcaaagaaaaaaagtggctcaagatgtgtcaactcagccagtggttttcaagtgagagtctaatacacacaggtgaggagggaaca

SEQ ID NO: 206526 - DNA, 201 bp, Homo sapiens
cctaaatatttctcctacaaatgttttcatcttgcttgcattttgcattcaaacatcgattcattcttttctgcttatagctgactcagtcatgaaacccwtttcactcacataaatttgcattaggaaaacaaaatcacaaacaaacacaacaaaacaaaaacaaacaaaaaaaaactcaatcaagtcacaaatttacca

SEQ ID NO: 206527 - DNA, 201 bp, Homo sapiens
cgttttagtgttttagttttctcctgtttaaaatattctaggcagtgggttctttgaggtaagttcattcatttaactgtaataaggacacagcacatagstaaagcctccctctcattatcccttaagttttctgttcttcatcagagattacatctcatgatcttctctaactcctaaatatttctcctacaaatgttt

SEQ ID NO: 206528 - DNA, 201 bp, Homo sapiens
agaatgagagcagctgttttcaaaccttatttgcattagaatcacctgtagaactggttaacacacacgatgggtccccacctgactttctgttcagtgaytcactgttagggttagaggatttgtgtttgtaacaagtttacaggtgatgctgctaactctgggaccacatttttgaaaaacacaaaatatgtggagtgt

SEQ ID NO: 206529 - DNA, 201 bp, Homo sapiens
tgcacatcaaaaaaaaaagggacaataataggatattttatgaacaaaaagcacaaaatgaaactatttctagtccttgacattctgaatataatatagaytaatgtttttaaagctactgtttattgagtgttttctgttggtcatgccatgtgctatgggctttatatacagtaagatgcctatctctattgttaccaa

SEQ ID NO: 206530 - DNA, 201 bp, Homo sapiens
aaaacacaaacaccgaggttaacaagtagagaagcccacttaaaataataaacactttaataacacaaaaacctttcttgaatttatggaaatgacttatmattcattgtgatttgtcattgtctttgtgcaaacaatgaaaagaatgagagcagctgttttcaaaccttatttgcattagaatcacctgtagaactggtt

SEQ ID NO: 206531 - DNA, 201 bp, Homo sapiens
taatatcttctttacagagttactacgaagatagccgggcgtggcgggtgcctgtaatcccagctactcagaaggctgaggcagaaaaatcgcttgaaccygggaggcggaggttgcagtgagcggagatcacaccactgcactccagcgcctgggcaacaagagcgaaactccgtctcaaaaaaacaaaactcaaaacaa

SEQ ID NO: 206532 - DNA, 201 bp, Homo sapiens
tcagaaaatacaaaaagtggagaaagaaacaaaataacaaaattaatgatatttcctttttgtgaaatttctatttacttcctttgctattttatattacrttttggttttattattgcattgtataggttgttcacaatttttaaaaattagttctttttgtcataaacattataaatattttttggttattatctttta

SEQ ID NO: 206533 - DNA, 201 bp, Homo sapiens
tccttatttgtgaagcgaaatgtattgttttgtgatgtaaatgaaacaatgcatgtgccgtgttttcttaaaaagttttgcttatagaaaggtgagaaatwcttatttttaagacggtatttctacaatgaaaatcaccttggttctagctaaaggatcagagaaatttcttttcttaaaaaacaatcaaccacgagtatt

SEQ ID NO: 206534 - DNA, 201 bp, Homo sapiens
agtggtcaactgtgcctaatgctatcttaacatggggacttgcagggataattggattttataatatggagtctttgaaggttcataacaaactcattggycaagagatgacaggggaagatgactagagtgcctttatgtgggaatgggtagccaggaaatggaattttcatttaagatacttgctaagatttaagcttt

SEQ ID NO: 206535 - DNA, 201 bp, Homo sapiens
aagcttggaagtttggcagataattggccaaaattctgaccctgccacttatctgcttgtggtaggccgttctcacattgctttaaagaaatctcagactrggtaattaaaaaaaaaatggttttatttactcacagttctgtaggccgtacaggaagcacagtgctgacatctgcctggcttctggggaggctgaaactt

SEQ ID NO: 206536 - DNA, 201 bp, Homo sapiens
acaatctagtaaaaaaattaaatttgataagaacaaaaattggccataagtatgtgggtattgggtcttatacaatatcttggtgacactaccaaaaattyttgccttctctgatccagttgactatgtgccctggagtcctgtgataggaagctgatgaagttttcatccagagagtaagaaccagcatgatagggcctt

SEQ ID NO: 206537 - DNA, 201 bp, Homo sapiens
accaaaatctaattccattcgacttaaatagagccatccatgaacctggtattatggtatactatggaagtacaaaaaaatacaaagatgacttacacagyttatcttactgaaaagctcaccatcaagtgaagaaactccacgtaaatacataaaatggtaattgatataaaatgaggtaggaacccagatacaccagaa

SEQ ID NO: 206538 - DNA, 201 bp, Homo sapiens
aacgtgttgatgttgataatgtttcatggccaaaactagaatatattttcataatacacacacacacacacacacacacacacacacacacacacacactstatagctggatcctaggaaactttaattttagtaaatgcctcagatgatttttatgatcaggcatacagggcagctctgctctatagctggttactatat

SEQ ID NO: 206539 - DNA, 201 bp, Homo sapiens
aattttctagccctatatagaagccaaattccaaacaatagactaggacttgagactcaaactggacaaaaattgtttcaggaaaatattagtcctaaatyaaacttatatccaaagtgtaaagagcagcagaatgacagagtgactttttttttttttttttggagacagagtcccactctattgcccaggctggagtgc

SEQ ID NO: 206540 - DNA, 201 bp, Homo sapiens
ctttaattttagtaaatgcctcagatgatttttatgatcaggcatacagggcagctctgctctatagctggttactatattcacatttcttttcttaagaygtaataattaatggagggggagcagattttataatcaactgtagaaatatggttataaaaactcgctatttcatggcttatacttctcttcattgcaagc

SEQ ID NO: 206541 - DNA, 201 bp, Homo sapiens
gcctgaggtccctcacttacaaagtgataataatcacaatacctacctcatatgctattgtgaagattacataagtcagtatttgtaaattacttagaacyatccttttattgcaataatgaaagttccttaaagttactgtcttgcatgctgatgcacacactgtaattttctagccctatatagaagccaaattccaaa

SEQ ID NO: 206542 - DNA, 201 bp, Homo sapiens
ccactgcactccagcctgagtgagactcttcccataaataaataaataaataaataaaaataaaataaaaacctcatgtttctagataaagcaaagaaaartaagtctgtattataagaagttttctgattaggttaaataggggaccctgtgcagtgtcagttgtcacattaaaacagaaattttctctcatgaaactct

SEQ ID NO: 206543 - DNA, 201 bp, Homo sapiens
gctggttactatattcacatttcttttcttaagacgtaataattaatggagggggagcagattttataatcaactgtagaaatatggttataaaaactcgytatttcatggcttatacttctcttcattgcaagctcctcttacctcaaggacagaaaaaaatgatgctgtttctatgaaaagatttttctgtttagtaaa

SEQ ID NO: 206544 - DNA, 201 bp, Homo sapiens
attgcaagctcctcttacctcaaggacagaaaaaaatgatgctgtttctatgaaaagatttttctgtttagtaaaatctctagtgtaaaaggagtggcctrttttcaatttgcaagtctgatcattagcctttgattcatataacataaatagacttctttgatatctaaaaagcttggctatattaaagtaagaaagtaa

SEQ ID NO: 206545 - DNA, 201 bp, Homo sapiens
tgagaatcaaccaggaatttaacaaattaacataaattctatacaatctgttccagaatgtagaagggaacatttctgagtcattttataaatccagtatyaccttaatattgaaaccagataaaaggatgccaagaaaatgagacagatcaatatccctcatgtacatatatgtaaaaattcttaaaatattgacgaata

SEQ ID NO: 206546 - DNA, 201 bp, Homo sapiens
ttgaaacaaatgaaaaaaatagaatgacttcgcaagaaaatggaagatatcacaaagaacaaaacaaaattagaactaaaaaatacagttaccaaagtaamagtctcaatactaggttcaacagcagaatggagaggaaagaagaaagaataagtgaactggaagatagaaaaatagaaattaccaaatctgaaaaacaga

SEQ ID NO: 206547 - DNA, 201 bp, Homo sapiens
atttttttttaatgaacaggatttgctagtccacttactgggatagcggatgcctctcaaagcagcatgcacaatgccttgcacatctatatgaatggaamaatgtcccaggtacagggatctgccaacgatcctatcttccttcttcaccatgcatttgttgacaggttggttaatatttctttataaataacgtgctca

SEQ ID NO: 206548 - DNA, 201 bp, Homo sapiens
ttaccaaatctgaaaaacagaaaacacactggaaaaaaaattaaaaaggctcaaagagttgaataactacatgaaaatgattgaacttttgtgttattagygtcctagaaagaggggagaaaaatcagttctaagaactcaatgaaatagtgactgaaaacttcccaaatttagcaaaagaaactacaaattaaagaatct

SEQ ID NO: 206549 - DNA, 201 bp, Homo sapiens
cgtcctagaaagaggggagaaaaatcagttctaagaactcaatgaaatagtgactgaaaacttcccaaatttagcaaaagaaactacaaattaaagaatcwgagttaaacccaatttaataaatcccatagcaatccacatcaaaatatatcactattaaacttctaaaaactaaaacaaatattcaaagtagtgagaaat

SEQ ID NO: 206550 - DNA, 201 bp, Homo sapiens
ttaatgagtcaatccagtaagaagacatcacaatcctaaatgtgtatgcaccaaacaagcttaaaatttgtgaagcaaaagctggtagagctaaaaggaakaaatagacaaattcacaattacagttggagaattcaatactgctgtttaaccaacaggactaggcaaaacatctgcagtgataaagaacttaacaccatc

SEQ ID NO: 206551 - DNA, 201 bp, Homo sapiens
catctattttcctggacatcattttctcactgatttctttatccccctgatgcgtgcatatccaccaactcctactcttcctcagtcccttctctgcaacraaatctgtgtggtcttttacaaatgataatctgttcgtgttatcattcaccttcccagatacaaacagtgactttctgttaggaaaaaaacacaaatctc

SEQ ID NO: 206552 - DNA, 201 bp, Homo sapiens
ttaacatgagggtgttttgtacagattgtctgtagccgattggaggagtacaacagccatcagtctttatgcaatggaacgcccgagggacctttacggcrtaatcctggaaaccatgacaaatccagaaccccaaggctcccctcttcagctgatgtagaattttgcctgagtttgacccaatatgaatctggttccatg

SEQ ID NO: 206553 - DNA, 201 bp, Homo sapiens
gcctctgtaaaatgaggggtttggaagggaagaaaacaaattactgctttttcagaactaagccaatcatttatattgtctcattttatccttaactattrttacttgacatttcacttccttattttatttttgttctcataaatacattaaaatagatagtaccatcccttttctataaatgagcacactgaggcttag

SEQ ID NO: 206554 - DNA, 201 bp, Homo sapiens
aactgcagaaacacccctgtcatcctgtgtaaacacacagagaacagggtacttactattattagtaacagagtggtagccaagaccccttgattccaatrttggttgtaccgttaactgtgacctttggattcaaattttattttgcctctgtaaaatgaggggtttggaagggaagaaaacaaattactgctttttcag

SEQ ID NO: 206555 - DNA, 201 bp, Homo sapiens
actaaagtgtcagagaaagaagcagaagaactgggttctcatcttaactcagtcccttaccaactttgttcactactttctctctctctgcctttttttttaaagtatgatttcacattatctccttcgttgtatttcttatgctaatacatatcctttcctgatcttgtaatgtattcattgctgcttcttgagtataaa

SEQ ID NO: 206556 - DNA, 201 bp, Homo sapiens
aaatattaagcaagatattgttcaaaggaaaactttagccaaattaaatttaaaagagtttaattgagcaaagaacaatttatgaaccaggtagcttcctsagctagagtaggctcagattctctagcacagccacatggtggaagaagattaatgtacagaaaaagaaaaataacgttaaaaaaatggaagtgaggtaca

SEQ ID NO: 206557 - DNA, 201 bp, Homo sapiens
atgccttgtataagcctttgtgcttgtggaaattggactttcccctcttttgtgttcatctggcaggttcttcctacgttcataacaagatatattgtacrgctttccccaattcccctcactttcactgcctgttgtcaatgtgagctgtttaggtccctttcagcactcttaaagtcacctcccaagtactctgtggcc

SEQ ID NO: 206558 - DNA, 201 bp, Homo sapiens; identical to SEQ ID NO: 36275

SEQ ID NO: 206559 - DNA, 201 bp, Homo sapiens
caggaatttgaaacaagttttcttatgaggaggttttgtatttctgacttctcttcttgctgccacatcccaaggccaaagttaggatgccttgtataagyctttgtgcttgtggaaattggactttcccctcttttgtgttcatctggcaggttcttcctacgttcataacaagatatattgtacggctttccccaattc

SEQ ID NO: 206560 - DNA, 201 bp, Homo sapiens; identical to SEQ ID NO: 36277

SEQ ID NO: 206561 - DNA, 201 bp, Homo sapiens
aaaaatttgcctatgtctataccataggcataccaatttcttgaaagaaaagcagggtctagtctggttagtacttggatgagagaccaaatagcaaatayttaaaatgtcttttctaaggaaattaaattggctcctatattaagctgtagaactaatggcttctgctctgtgcaagtataatggccacaactaacctca

SEQ ID NO: 206562 - DNA, 201 bp, Homo sapiens
cattgagttctttctagctaagaaagtcctagatggcatcttccaatagaaggcaatttgtctaccttgaaatttgtttgtttagtgtaatggctttcatytcttatcttaacaagatcttctggttaattttctgcagcttttccatcagaacttattgcttcacctggcacttttattttatgaagatgggctcttttc

SEQ ID NO: 206563 - DNA, 201 bp, Homo sapiens
gtaggttgttcagggctttctctctattcacttaattattccatcaggagactattgagagaggcctataacataaaaacataagggttaaattcaaagcyatcgtcaatcttactcaaagacataaaccttagaacattataggaatcttcaaaaaagttagcttaattgattttaaaattatgccagcaactaaagcta

SEQ ID NO: 206564 - DNA, 201 bp, Homo sapiens
ctagaaataccatttcacccagcgatcccattactgggtatacccaaaggattatatatcatgctattgtaaagacacatgcacgtgtatgtttattgcgraactatttacaatagcaaagacttggaaccaacccaaatgtccatcaataatggacaggataaagcaaatatggcacatatacaccatggaatactatgc

SEQ ID NO: 206565 - DNA, 201 bp, Homo sapiens
aataatctagaaaatctagaagaaatggataaattcctcaacacatacaccctcccaagactaaaccaggaagaagttgaatctctgaatagaccaataayaggtgctgaaattgaggcaataattaatagcctaccaactaaaaaaagtccaggatcagatggattcacagccgaattccaccagaggtacaaagaggag

SEQ ID NO: 206566 - DNA, 201 bp, Homo sapiens
actcccatacaataatagtgggagactttaacaccccactgtcaatattagacagatcaatgagacagaaaattagcaaggttatccgggaattgaactcrgctctggaccaaatggacctaatagacatctacagaactctccaccccaaatcaacagaatatacgttcttctcggcaccacatcacactgtaaaattga

SEQ ID NO: 206567 - DNA, 201 bp, Homo sapiens
atctgaacaaaaggcatcagacagcttatgcagaattaaacgtccttgtctgacagctctgaagagagcagtggctcttggagcacagcgttcgagctccrataatggacagacggcctcctcaagtgggtccctgaccccgtgtagcctgactgggagacactacccagtagaggccgacagctgcctcatacaggcagg

SEQ ID NO: 206568 - DNA, 201 bp, Homo sapiens
tctaatgatctttgtaatcattcttcttagacgtatttactttgtttttatttatccaccagcattagcaattgcttatttttgttgcttactttataaaraaagattttccatatcaatcaatttttatggccactatttatgttattgtaaagtaagaacaaaggtaagaccttttgctcaactttcagttgagtttaa

SEQ ID NO: 206569 - DNA, 201 bp, Homo sapiens
tatgcatcataattttaatcactaacatatacccaaatccctaattttgtaagtacttctaaaacatatctaatgatctttgtaatcattcttcttagacrtatttactttgtttttatttatccaccagcattagcaattgcttatttttgttgcttactttataaagaaagattttccatatcaatcaatttttatggc

SEQ ID NO: 206570 - DNA, 201 bp, Homo sapiens
ggtggtgacaatttgtttaacatgagggtgttttgtacagattgtctgtagccgattggaggagtacaacagccatcagtctttatgcaatggaacgcccragggacctttacggcgtaatcctggaaaccatgacaaatccagaaccccaaggctcccctcttcagctgatgtagaattttgcctgagtttgacccaata

SEQ ID NO: 206571 - DNA, 201 bp, Homo sapiens; identical to SEQ ID NO: 36305

SEQ ID NO: 206572 - DNA, 201 bp, Homo sapiens; identical to SEQ ID NO: 36306

SEQ ID NO: 206573 - DNA, 201 bp, Homo sapiens
gaatgaaatctttttttttttttgaaggagtgggtctcaacagtggacttgaaatattcagtaaatcatggtataaacagatgtgctgtcacctaaacatygttctatttacagagcacaggcagggtagatttagtgtttttgatggcctttggacttttggaatggcttcaactgaataagcactggcttcaacttaaa

SEQ ID NO: 206574 - DNA, 201 bp, Homo sapiens; identical to SEQ ID NO: 36307

SEQ ID NO: 206575 - DNA, 201 bp, Homo sapiens
tgcaatttcccccacatctgcagtaactttctccactgaagtcttgaaccccctcaaagtcatccatgtggtttggattcaccttcttccacactctatgmatgttgatattttggccacctcccatgaaaattaatgttcttaattgtatctaaatagttaatcccttccaaaaggttttctattcattttgctcaaatt

SEQ ID NO: 206576 - DNA, 201 bp, Homo sapiens; identical to SEQ ID NO: 36309

SEQ ID NO: 206577 - DNA, 201 bp, Homo sapiens
caacccctcattcgttcaaattttattatgggattgaataatttgtttccatcttcagggtctacttgtactccagttctggtgcaatttcccccacatcwgcagtaactttctccactgaagtcttgaaccccctcaaagtcatccatgtggtttggattcaccttcttccacactctatgcatgttgatattttggcca

SEQ ID NO: 206578 - DNA, 201 bp, Homo sapiens; identical to SEQ ID NO: 36310

SEQ ID NO: 206579 - DNA, 201 bp, Homo sapiens
tcttaaaacaagaaaaaaatagagtttgctacattgattgactcttcctttcaaaaaatatattcatgtagcatgtgatgctgtttgatagcattttgccyacagtagaacttcttgcaaatatggagtcaatcctctcaaaccctactggtactttattagataagtttatagaatattctaagtactttgttgtcagtt

SEQ ID NO: 206580 - DNA, 201 bp, Homo sapiens
atttaaaaaatttaatcttaaataatttaatcttgaacaatttgaaaaaattttggactctctagggaaaaatatacaattcctatgtattttatatatgrtttatgagactttataaatatactaatatgaattcagtctcctggttgaattcatattgtttttaactggcaggcactgtaatggacacaggacatataa

SEQ ID NO: 206581 - DNA, 201 bp, Homo sapiens
gtactgtgctgaattattgaccagattttagctctttgtaagacaagcacctttcctcatttggctttctacttccagcactcggtgcaatgcttattacrtgccaggcactgtcctaactgatgggggttaatgaatggtacaatctaccaagattcaacccaaagtcatcaacatttcttagatcctttcttctccaag

SEQ ID NO: 206582 - DNA, 201 bp, Homo sapiens
gacaccactcaaccctcatccaagtggatactaactcctctttctcttttttcccaaggcatgaagggcccttctctgctggcattcacactgtactgtgmtgaattattgaccagattttagctctttgtaagacaagcacctttcctcatttggctttctacttccagcactcggtgcaatgcttattacatgccaggc

SEQ ID NO: 206583 - DNA, 201 bp, Homo sapiens; identical to SEQ ID NO: 36312

SEQ ID NO: 206584 - DNA, 201 bp, Homo sapiens
catccaataaattgaaattattactgaagcaatcagtcattttttattattctaagagcctcagaagcatcactctagtgaagaatagtagaacaataatktatgttaaatgaagagaaattttggaagaaagagaggcagcatagccatcttaagaaaagtaatagctatttgtcatatgtagaagttgtcttagtcact

SEQ ID NO: 206585 - DNA, 201 bp, Homo sapiens
tttagtctataagcaccaaactaagcactaatttttctcattttctgaagcagaggtggaaacaaaccttgcctgttcatatgcagattatcatgtaggtwattacatgaagattatcatgtagattattacataaagaataattcctctggattcctaccaaaccatgtcaattactggggaggctacaagtgttagagt

SEQ ID NO: 206586 - DNA, 201 bp, Homo sapiens
aacaaaaaatgataaattggaccctcactgatgcttttaaaagtaaataagcaaatcataagaaatcagggatatgggagataaaaacaatgattctcackgtccaaggatatataagtgggtaggggaaagccttcaaacaaggagtttactcctttgacctttgataaaaggataagctttgtcagacgggcccaaaga

SEQ ID NO: 206587 - DNA, 201 bp, Homo sapiens
ctaaaatgctctctataaagagtagggagcatagtgtggtaatgaattaaagagtcagagagacctcgactgagatatgagtcagttaaccactcaatcayggagcctctgctctatataatggatatcacataattccacctttgtcagggtgttggaagtattttaaataacactcaggtgatactgaataataagatg

SEQ ID NO: 206588 - DNA, 201 bp, Homo sapiens
ttgttttctgccaatttgagatgaataattattgtgccagagaataaaataattgctcagtgagtatgcaattcatctgaatctatggatcatttacagasaatctccttaaaatatgcatcataattttaatcactaacatatacccaaatccctaattttgtaagtacttctaaaacatatctaatgatctttgtaatc

SEQ ID NO: 206589 - DNA, 201 bp, Homo sapiens
atttaagaacatactaagttccaggtcttgtgacagaaatttttcatatgttacttctacagatgtgacctgcctcaggaagaaatgtctgcctcatacamttaaatttaccctcgtatgtactcttgtctaccctgtggatcctcctcatgctgtactctgcttacttgcctgttttcttaacagtgttcaccattagtt

SEQ ID NO: 206590 - DNA, 201 bp, Homo sapiens
tttgggaaatattaataaaattgacgaattagcaagattgaaaagggaaaaagagaaaagacacaaattaccaatatcaagaatcaaaaaagggatatcamtacagatcttgcagacatcaaaagggtaataaaagcgtactatgagcactctatgtacataacatttgacaacttagatgaaatgaactaattcctaaaa

SEQ ID NO: 206591 - DNA, 201 bp, Homo sapiens
tctattaggattggaatcaacttcttccatactcctgttaacgttaatattttgttctccttccatgaatcagaaatgttcttaatggcatctagaatggygactcctttccaaaaggttttcaatttattatgcccagatccatcagaggaatcactatctatggaatatatagccttacaaaatatacttcttaaataa

SEQ ID NO: 206592 - DNA, 201 bp, Homo sapiens
cagacatactataaaattgtgctgagagggggaagtatagtactaaatgcacacatgtggaaagaggtaaagtctcaagtcagtaatacaaactcaaactmcagaacctagaaatagaagagcaaaataaaaccaaagcacagagaatgaaggaaataataaagataggagcagaaagcagtgaaattaaaaacaggaatc

SEQ ID NO: 206593 - DNA, 201 bp, Homo sapiens
ctgcaacctccacctcccagagtagctgggattcccctgcctcagtttcccgagtagctcagattgcaggtgcccaccaacaagcccggctaatttttttwatatttttagtagagacaggatttcactatgttggtctggctagctcccaactcctagcttcaagtgatccacccactttggcctcccaaagtactggga

SEQ ID NO: 206594 - DNA, 201 bp, Homo sapiens
aagtaaacatatttttttcatttttttttaatgaacaggatttgctagtccacttactgggatagcggatgcctctcaaagcagcatgcacaatgccttgyacatctatatgaatggaacaatgtcccaggtacagggatctgccaacgatcctatcttccttcttcaccatgcatttgttgacaggttggttaatatttc

SEQ ID NO: 206595 - DNA, 201 bp, Homo sapiens
aaagtaataatgcagtgtttcccttctgctggagctgagtcagagaaagccaggagattatacatttttttttttttgagatggagtctttgctgtgttgyccaggctggtgtaaagtagcgtgatctcagcccactgcaacctccacctcccagagtagctgggattcccctgcctcagtttcccgagtagctcagattg

SEQ ID NO: 206596 - DNA, 201 bp, Homo sapiens
aagacatggaatcaacctaaatgttcatcagtgatagactgaataaagaaaatgtggtacacatacaccgtggaatactatgcagccaaaaaaaaaaaaamaaacaaacaaacgagatcatgtcctttgcagggacatggatgagcagtgttctttcaagccctaatatttgtgaagtgtctaatatgttatttatatatc

SEQ ID NO: 206597 - DNA, 201 bp, Homo sapiens
tactgaaaaactgcccagcagcatataaaaatgtttatgtcaaagccaaattggatttatttgaggaatacaaaggtggctcaacatattaaaatcaataratttattataccacattaatataataaagagaaaataaaatcccatggtcatctcaataggtgcagaaaaagatagtacctttcatgatttaaaaaacaa

SEQ ID NO: 206598 - DNA, 201 bp, Homo sapiens
gaaaccagcccctggcaccaaaaaggttgggaacagctaggaattatgtattcaacacaaaagaaggcagtaatggaagaactgaggaacaataaagaaasacataacatgtatagaaaacaaatagaaaaatgtcaagaataatgacattttatcagccattacatgacatataagtagattaagttctgcaataaaagg

SEQ ID NO: 206599 - DNA, 201 bp, Homo sapiens
atagtctttcctgcactactatgtagcaacaccccaaaagtatcttgagaatatggatttttttaaaaaaatcatgttcttcataaaacttaacaatgtgmaattgtgttttggtgcaaagtcccaaaagattgtgctaattgattccacaacacttatttttatgcctttaaattcatgttgaaggtgtggcattatgac

SEQ ID NO: 206600 - DNA, 201 bp, Homo sapiens
aaaaattcctcaaagaaggccttgaatttcatgcatatagtctttcctgcactactatgtagcaacaccccaaaagtatcttgagaatatggatttttttwaaaaaatcatgttcttcataaaacttaacaatgtgcaattgtgttttggtgcaaagtcccaaaagattgtgctaattgattccacaacacttatttttat

SEQ ID NO: 206601 - DNA, 201 bp, Homo sapiens
ctctaaagagggaattataagattaaatatcgttgatcacacatatgaaataatgagacatgaaatgttaatatataaaaatactgtatatgtatacacayagacagacacaaattaggttatatgtgaaaacacagaaggaccaggaaagaaaagatgcgtagctgctgcagacctcattttatttatgtatttttttta

SEQ ID NO: 206602 - DNA, 201 bp, Homo sapiens
tggggaatacggcctaaagcatgttgaaacttcttaagaggaatgataatgctgattcttggtgtgctgataagaaagctagaagctagactctactgctmttcctagggtcaagaacagtcactgaaataaacaagaaggaacaagtcctttgctgttctagcctatatgtagtgtctatcaggggttcaactagcaaaa

SEQ ID NO: 206603 - DNA, 201 bp, Homo sapiens
tttatttagtagtgatatctcatatcacctgacattgaaggaggagcctcacagggcagtaattcaaactcctgagtaggaggctttagtcaactggtacygatagctcatgagtatactagtgctctacagaactagatctcagatttttgagcagagagggatgtaggggtgtgagggaatggggaatacggcctaaag

SEQ ID NO: 206604 - DNA, 201 bp, Homo sapiens
tttttcatttttttttaatgaacaggatttgctagtccacttactgggatagcggatgcctctcaaagcagcatgcacaatgccttgcacatctatatgamtggaacaatgtcccaggtacagggatctgccaacgatcctatcttccttcttcaccatgcatttgttgacaggttggttaatatttctttataaataacg

SEQ ID NO: 206605 - DNA, 201 bp, Homo sapiens
acccacattcgactagctataaagaactttgttttctatagttttatacaaaatgatagaggtatgtgtgtgtacttgtgtatatgtgtgtgtgtgtgtgkatatgtgtgtgttcatgtttcatattagtcaagattcaatgagaaaaaacagaaacaatgctagttgttttaataatgtcagttgtttatataataataa

SEQ ID NO: 206606 - DNA, 201 bp, Homo sapiens
gggttgaaagttctgtaagtatctcttaagcccatttgttctagggtatagtttaaatccattgttttttcattgactttctgtcttgatgacctgtctartgaaaaataaattaaataaataaaataaaataaaatgaatgttccttcctcttttagttttaggaagggtttgtatttaattggcaatattcctttctta

SEQ ID NO: 206607 - DNA, 201 bp, Homo sapiens; identical to SEQ ID NO: 36276

SEQ ID NO: 206608 - DNA, 201 bp, Homo sapiens; identical to SEQ ID NO: 36279

SEQ ID NO: 206609 - DNA, 201 bp, Homo sapiens; identical to SEQ ID NO: 36280

SEQ ID NO: 206610 - DNA, 201 bp, Homo sapiens
cataaactatgcccaggtcatgtctgtctataactatcactccaaaatctaattatgaataccatttcccaacttggcattcagtgacctcaggtcggtakcctgaaatcagccatggtgagagtatttacaccatgaaattggcaaatggtacacgtcagggcttttattccaaaagacctagttgttaaaataatggcc

SEQ ID NO: 206611 - DNA, 201 bp, Homo sapiens; identical to SEQ ID NO: 36289

SEQ ID NO: 206612 - DNA, 201 bp, Homo sapiens
acaagaaatccagaagctgacaggagatgaaaacttcactattccatattgggactggcgggatgcagaaaagtgtgacatttgcacagatgagtacatgrgaggtcagcaccccacaaatcctaacttactcagcccagcatcattcttctcctcttggcaggtaagatatgctagatatacgatgtcagagtagggagg

SEQ ID NO: 206613 - DNA, 201 bp, Homo sapiens
aatcacataggttttcagtcattaaagtaaacatatttttttcatttttttttaatgaacaggatttgctagtccacttactgggatagcggatgcctctyaaagcagcatgcacaatgccttgcacatctatatgaatggaacaatgtcccaggtacagggatctgccaacgatcctatcttccttcttcaccatgcatt

SEQ ID NO: 206614 - DNA, 201 bp, Homo sapiens; identical to SEQ ID NO: 36291

SEQ ID NO: 206615 - DNA, 201 bp, Homo sapiens; identical to SEQ ID NO: 36295

SEQ ID NO: 206616 - DNA, 201 bp, Homo sapiens
tcctactgactcagtggtggtgacaatttgtttaacatgagggtgttttgtacagattgtctgtagccgattggaggagtacaacagccatcagtctttabgcaatggaacgcccgagggacctttacggcgtaatcctggaaaccatgacaaatccagaaccccaaggctcccctcttcagctgatgtagaattttgcct

SEQ ID NO: 206617 - DNA, 201 bp, Homo sapiens; identical to SEQ ID NO: 36293

SEQ ID NO: 206618 - DNA, 201 bp, Homo sapiens; identical to SEQ ID NO: 36298

SEQ ID NO: 206619 - DNA, 201 bp, Homo sapiens
ttttttcatttttttttaatgaacaggatttgctagtccacttactgggatagcggatgcctctcaaagcagcatgcacaatgccttgcacatctatatgwatggaacaatgtcccaggtacagggatctgccaacgatcctatcttccttcttcaccatgcatttgttgacaggttggttaatatttctttataaataac

SEQ ID NO: 206620 - DNA, 201 bp, Homo sapiens
gactgtacaggagaataagatcggggacgtaatgaggctccttgaggatcattttaaggagtttcatgcttcaacatgaaaaggaaagcaacattcaggamatactcctttgttatgtcatttaattatagaaacagtctcatacagtcatttgtttttaaaataaataaatagagtattttgaaaaagtgcttctgaagt

SEQ ID NO: 206621 - DNA, 201 bp, Homo sapiens; identical to SEQ ID NO: 36302

SEQ ID NO: 206622 - DNA, 201 bp, Homo sapiens; identical to SEQ ID NO: 36299

SEQ ID NO: 206623 - DNA, 201 bp, Homo sapiens
aaaacctctgaaattaaaacaaactaagaatttcaaggaacagattgattagaataactggaccattgtaaactagggagactgtacaggagaataagatyggggacgtaatgaggctccttgaggatcattttaaggagtttcatgcttcaacatgaaaaggaaagcaacattcaggaaatactcctttgttatgtcatt

SEQ ID NO: 206624 - DNA, 201 bp, Homo sapiens
gaggagtacaacagccatcagtctttatgcaatggaacgcccgagggacctttacggcgtaatcctggaaaccatgacaaatccagaaccccaaggctccsctcttcagctgatgtagaattttgcctgagtttgacccaatatgaatctggttccatggataaagctgccaatttcagctttagaaatacactggaaggt

SEQ ID NO: 206625 - DNA, 201 bp, Homo sapiens
ttaatgaacaggatttgctagtccacttactgggatagcggatgcctctcaaagcagcatgcacaatgccttgcacatctatatgaatggaacaatgtccyaggtacagggatctgccaacgatcctatcttccttcttcaccatgcatttgttgacaggttggttaatatttctttataaataacgtgctcattggattt

SEQ ID NO: 206626 - DNA, 201 bp, Homo sapiens
agaaaaagcttcaagattcacatgatggggtattcttttaccaaaccaggaatcaattgctttggagaacggaaataacatttttgaaatcccttaacacyaatgatccctgttctgtgaggtgccttgatgctaatcagacagttgctcatatcagttaaatcattgaaatgtaattacctctagtactcagtgttgagg

SEQ ID NO: 206627 - DNA, 201 bp, Homo sapiens
aacaggatttgctagtccacttactgggatagcggatgcctctcaaagcagcatgcacaatgccttgcacatctatatgaatggaacaatgtcccaggtayagggatctgccaacgatcctatcttccttcttcaccatgcatttgttgacaggttggttaatatttctttataaataacgtgctcattggatttaaatag

SEQ ID NO: 206628 - DNA, 201 bp, Homo sapiens
aaatttctgcttgtcggattgccacagcagaaaacaaataataacatgcatggacaatacaaatgttatttttatcctaaagtaaagcatgcccaagatayatcttgttaagtacaaaatgtcacaacaatctagaataacaataaggataagaatctgttgaatactcaggaaagaaatattactaaattcaaaaagtca

SEQ ID NO: 206629 - DNA, 201 bp, Homo sapiens; identical to SEQ ID NO: 36308

SEQ ID NO: 206630 - DNA, 201 bp, Homo sapiens
attaattgactaaaattaggactttgactcacttctgtcttactttaaattccctgtgttttgattctgtcattatatcaattaggaagtaactgataatyatatcaaaaacattatttatagggtggtatattagttttctagggctaccataacaaaataccacagactaggtggcttaaaaaacataaatttattttc

SEQ ID NO: 206631 - DNA, 201 bp, Homo sapiens
atcaatggagtgaatgaggtcacagaaattgagtataaacacagaagaaaaggaagcagtctggcataccccatcattaaaaggatgagccgatacagatragtcagcaaaagcaaagaagacagagggtcattgaccagtgaggaagcaggaaaaaaaggacattaagccacaaaagccatgtagccaaaaaaaaaaaaa

SEQ ID NO: 206632 - DNA, 201 bp, Homo sapiens
tctatattctgacagctgtttttctttttgatgttattgttagatttagctcttataccactctgtgcttgttagactgattcatggtttgtccatctctmccactaaatcatgggttcgtggcagacagcatctatgtatcgatcatttttagcacctagcacagaacctagcacataggagacattcattacatactta

SEQ ID NO: 206633 - DNA, 201 bp, Homo sapiens; identical to SEQ ID NO: 36311

SEQ ID NO: 206634 - DNA, 201 bp, Homo sapiens
aggttttcagtcattaaagtaaacatatttttttcatttttttttaatgaacaggatttgctagtccacttactgggatagcggatgcctctcaaagcagmatgcacaatgccttgcacatctatatgaatggaacaatgtcccaggtacagggatctgccaacgatcctatcttccttcttcaccatgcatttgttgaca

SEQ ID NO: 206635 - DNA, 201 bp, Homo sapiens
attgtatcttttaagattgctgagagtagattttaaatgctcttaccacaataaaatgataaatatgtgaggtgattgccattttagcttgatttaatcaytccacaatatatacatatatcagcatcacattatgccccatacatacctgtaattattatttgtcaattaaaaataaaatttttaaaagtgtcaatttgt

SEQ ID NO: 206636 - DNA, 201 bp, Homo sapiens; identical to SEQ ID NO: 36313

SEQ ID NO: 206637 - DNA, 201 bp, Homo sapiens
atttgctagtccacttactgggatagcggatgcctctcaaagcagcatgcacaatgccttgcacatctatatgaatggaacaatgtcccaggtacagggayctgccaacgatcctatcttccttcttcaccatgcatttgttgacaggttggttaatatttctttataaataacgtgctcattggatttaaatagagggtg

SEQ ID NO: 206638 - DNA, 201 bp, Homo sapiens
ttctgattgagtaatgactatggaaattttccccgacatttagaaatgctgttctctaatgcagaggaaataatacatcattttatgaatacgttcatagragaataagatatcaaatgttcttttatgataaaggaagcaactacagaaagcttttatttgttcaaagtaacaagtggtattgatgaaaaaaaaacacac

SEQ ID NO: 206639 - DNA, 201 bp, Homo sapiens
tactttttcttttatttatttttttaatagcactgttggagaatgggacatggggactgaaatttcaatgaattggttaaaagtaatcaaactgactaggwttacatcctagctcaaccacttcctagatgtgtgaccttgggtatgttatttaacttctcatatgtaaaatgtggataacaataataatgtataagattc

SEQ ID NO: 206640 - DNA, 201 bp, Homo sapiens
aacaaagagcggttataccattatagtcatatttgtctatattctgacagctgtttttctttttgatgttattgttagatttagctcttataccactctgygcttgttagactgattcatggtttgtccatctctcccactaaatcatgggttcgtggcagacagcatctatgtatcgatcatttttagcacctagcacag

SEQ ID NO: 206641 - DNA, 201 bp, Homo sapiens
acaatacattccaggaatggccagcctgcctccctccttagctacagattaattacatcttctggagtgacattttggctgtattttccagtgaggcttcycttctactctactccccaagcctccccttggccatcctgctaagaagactgtcctaacccacatgccttcaaaccagacgccttgccaacttggcagccc

SEQ ID NO: 206642 - DNA, 201 bp, Homo sapiens
gatgtggctggggctcataggagtcaacctgactggacaggcactagcttaggaactgagaccgaggtataaaaggcaggacatgacatccaccactaaarctcacagtctagatactaaattctaactgtgaagaggaatcctgtagtggaaggatcatgaaacctggagtcagaagttccgtgattatgtcctgggtct

SEQ ID NO: 206643 - DNA, 201 bp, Homo sapiens
aaaattatactctgctctctcaataaatgcatatgaaatggaattgttacttttgattatacctcaaagttattgcttccttttctttcttggtctcgtgwgaagtgtataatgcacttcccatggaacaaaatattcatagtcattgctaggacaaaggaactgttttatttttgtctactgaagttatttaagtaaact

SEQ ID NO: 206644 - DNA, 201 bp, Homo sapiens
gtgaggacagtaggacttgagaggagagcaaatgtcaaaattatactctgctctctcaataaatgcatatgaaatggaattgttacttttgattatacctyaaagttattgcttccttttctttcttggtctcgtgagaagtgtataatgcacttcccatggaacaaaatattcatagtcattgctaggacaaaggaactg

SEQ ID NO: 206645 - DNA, 201 bp, Homo sapiens
ccgatgtggctggggctcataggagtcaacctgactggacaggcactagcttaggaactgagaccgaggtataaaaggcaggacatgacatccaccactaraactcacagtctagatactaaattctaactgtgaagaggaatcctgtagtggaaggatcatgaaacctggagtcagaagttccgtgattatgtcctgggt

SEQ ID NO: 206646 - DNA, 201 bp, Homo sapiens
gaatggagtgaacctggaggcggagcttgcaatgagccaagatcacgctactgcactccagcccgggcgacagagcaagactccatctcaaaaaaaaaaaacaaacaaacaaaaaaaacaaaacagaatctgaagaggaacaaacagtgggccaaaatttaagggtggggagatgtgccatttagcatgctcagaagcttg

SEQ ID NO: 206647 - DNA, 201 bp, Homo sapiens
aggagaatggagtgaacctggaggcggagcttgcaatgagccaagatcacgctactgcactccagcccgggcgacagagcaagactccatctcaaaaaaamaaaacaaacaaacaaaaaaaacaaaacagaatctgaagaggaacaaacagtgggccaaaatttaagggtggggagatgtgccatttagcatgctcagaag

SEQ ID NO: 206648 - DNA, 201 bp, Homo sapiens
taaccagtactaaatactgtttcataaagggtttagatggaggcttaatagaaggaaagtgtatattggatatagacaaagaaagtatactcttcctccamcaagggagcaggaactatcaggataagggattattttgaacactagtcaagcagtgcagttactgctgcaggaggcattccaagcaaagcaagttgataa

SEQ ID NO: 206649 - DNA, 201 bp, Homo sapiens
gtaaccagtactaaatactgtttcataaagggtttagatggaggcttaatagaaggaaagtgtatattggatatagacaaagaaagtatactcttcctccmacaagggagcaggaactatcaggataagggattattttgaacactagtcaagcagtgcagttactgctgcaggaggcattccaagcaaagcaagttgata

SEQ ID NO: 206650 - DNA, 201 bp, Homo sapiens
gtgcttactacacaccaaattctaagcgcatcacatgaattgactcattcaatcaatagttacagaagaatagactgaaattccgagaggttaagtaaccrgtactaaatactgtttcataaagggtttagatggaggcttaatagaaggaaagtgtatattggatatagacaaagaaagtatactcttcctccaacaagg

SEQ ID NO: 206651 - DNA, 201 bp, Homo sapiens
ctagcataagatagtcaatgaatagccgtttgatactattgtttggaatacaattttatgactggtggttctgtgaagaatgagtagattttttacttgtracatttgtgtgtaaaaacagtcaatatatagagaacaaaacaaaaaggtgtagaaatatgtggttgaaagaaacttcagaaaagtcaatagttacaacat

SEQ ID NO: 206652 - DNA, 201 bp, Homo sapiens
atagcaccaaatatcagagccaagggatgaacagagctctaaagtaaatcaaaagcccagaaatcaggagactaagaggcagtaaatcatgtgattaagawcatagattttagcatcaaacatgcctcattttgaatcccaaagctgctacatctagctacataatctttggcaagctgcttattcttccctaagccttct

SEQ ID NO: 206653 - DNA, 201 bp, Homo sapiens
ctaaaagcaactgtggctcagattattccttctgaggttctatctgccattcatttcatggaatattgtggaattagcctatttcaccttctattaaatgrggcccactttatggtatcataagaaaactcaaggctgaggtgcactgattgcctcagctctggagtttgacacgagcccaggcaacatggtgaaacccca

SEQ ID NO: 206654 - DNA, 201 bp, Homo sapiens
atcgcttgaacccaggaggcagaggctgcagtgagcctagatcatgccactgcactccagcctgagtgagactcttcccataaataaataaataaataaataaaaataaaataaaaacctcatgtttctagataaagcaaagaaaaataagtctgtattataagaagttttctgattaggttaaataggggaccctgtgca

SEQ ID NO: 206655 - DNA, 201 bp, Homo sapiens
tacttgggaggctgaggcaggagaatcgcttgaacccaggaggcagaggctgcagtgagcctagatcatgccactgcactccagcctgagtgagactcttyccataaataaataaataaataaataaaaataaaataaaaacctcatgtttctagataaagcaaagaaaaataagtctgtattataagaagttttctgatt

SEQ ID NO: 206656 - DNA, 201 bp, Homo sapiens
ggtaagcaaattattctagagcatcttgtacctacaatgctccaggcctgaaattagccatgactccaaggagtaatgttttctttcattgggaaggaaaytcaagatcaagattcggaagcaagttttcctcaccagagagacacattttatctcacatcatgaataggacagggatgtggggtgtcttggtctataagg

SEQ ID NO: 206657 - DNA, 201 bp, Homo sapiens
cttcctcctcatttttttaatagaacattcttcattttgagtgtatctaatatttcttcatgactagatccaggtaatgcactattagccaaaattccacrtaggtgattatgcatctttctgagatggtgtcacatctggaggcacatcatgaccatctgtctcacgttggtgatgttaatcacctactccagatgtggt

SEQ ID NO: 206658 - DNA, 201 bp, Homo sapiens
aaagttgcttaaacttgtgtttgtttccttttatctatttttattaaagtaattactggtgactcatattttacagaattatctctctcatagattgattsaataaagagatctactaggcagttgagctccaggttctgcatttttcctgacatactctgtatttctctctgtccagctccagcttctgaaatgccctct

SEQ ID NO: 206659 - DNA, 201 bp, Homo sapiens
ggatattttatcatttgcctatactcttaaagttgcttaaacttgtgtttgtttccttttatctatttttattaaagtaattactggtgactcatattttmcagaattatctctctcatagattgattcaataaagagatctactaggcagttgagctccaggttctgcatttttcctgacatactctgtatttctctctg

SEQ ID NO: 206660 - DNA, 201 bp, Homo sapiens
tttaaaaatattccatttcaaaagcatatgcatgtatattcaaacgcaaatatatctattaatagaggtgagaagggtataaaaatgttggtaatggaccyctggttggtagaattatgcataaattttatttcctttgtgttttacaaattttaaaacttttttgcaacagatatgtacatttttgcaataatatcaaaa

SEQ ID NO: 206661 - DNA, 201 bp, Homo sapiens
tccttattccctcacttacttacccaatgcaacttctagtcctgcaaggtccatttatggtaagtgtcctgtatatacaagtatgccatttaaaaaaaaawtttatactgtatttttactgtaccttttacatgtttagataggtttagatgtatagatacttgccattatcttacaattgcctatagtattcagtacagt

SEQ ID NO: 206662 - DNA, 201 bp, Homo sapiens
agtgtgttaactagcaaactggctaagaaatgtagttgaaatatactctctgctgtcatttctcaaagcattctataaatacatttagtgaactcttgcayacaatggaaaattcagtaaccattaaaattatgtgtatttataattgttgggttttaaaatatttattatttattattaaataaggaaggttatagaata

SEQ ID NO: 206663 - DNA, 201 bp, Homo sapiens
ctacaatgaaaatcaccttggttctagctaaaggatcagagaaatttcttttcttaaaaaacaatcaaccacgagtattgtactgcacatcaaaaaaaaaagggacaataataggatattttatgaacaaaaagcacaaaatgaaactatttctagtccttgacattctgaatataatatagattaatgtttttaaagcta

SEQ ID NO: 206664 - DNA, 201 bp, Homo sapiens
aattaataaagtgtaacaatgtccaactgcagtgtgttaactagcaaactggctaagaaatgtagttgaaatatactctctgctgtcatttctcaaagcaytctataaatacatttagtgaactcttgcatacaatggaaaattcagtaaccattaaaattatgtgtatttataattgttgggttttaaaatatttattat

SEQ ID NO: 206665 - DNA, 201 bp, Homo sapiens
atgaataacccaagcaggtatcaagggaaaacagtctacccagaaaaaataaccagtacaggaacatgttgcataagagtgattggtgagttttgggaagkgcaaagaggccagtgaagttatagaagagagggaaagggaaagatcagtaggaaataatatttgcatcagtctggatctcagtaggaaatagatacccaa

SEQ ID NO: 206666 - DNA, 201 bp, Homo sapiens
tgcaaccaacagatcagctagctacaaaaataaaaggggtatcaggaataggtgtcatcatgaacagaaacaaagaggaaaaaacatttcctagctgatasacatgagtgaattgtgaccagggaattcactcatcaggtgaaaagcacatcacatggaagcaaagagaagaaaaaaagtcacatttcagcagagagtcat

SEQ ID NO: 206667 - DNA, 201 bp, Homo sapiens
cacatctttgtatctgtagttttctgtgctcagggtaattcccagcacacaatgtttaatcgaattaataaagtgtaacaatgtccaactgcagtgtgttractagcaaactggctaagaaatgtagttgaaatatactctctgctgtcatttctcaaagcattctataaatacatttagtgaactcttgcatacaatgga

SEQ ID NO: 206668 - DNA, 201 bp, Homo sapiens
gtggtgacaatttgtttaacatgagggtgttttgtacagattgtctgtagccgattggaggagtacaacagccatcagtctttatgcaatggaacgcccgrgggacctttacggcgtaatcctggaaaccatgacaaatccagaaccccaaggctcccctcttcagctgatgtagaattttgcctgagtttgacccaatat

SEQ ID NO: 206669 - DNA, 201 bp, Homo sapiens
aggcaacatggtgaaaccccatctctactaaaaatacaaaaaattagccaggcatggtgatgcacccctgtagtctcagctactcagtaggctgaggctgsagaatcgcttgaacccaggaggcagaggtcgcagtgagccgagatcgcaccactgcactccagcctggatggagtttttccatctcaaaaaaaaaaaaaa

SEQ ID NO: 206670 - DNA, 201 bp, Homo sapiens
atagactaggacttgagactcaaactggacaaaaattgtttcaggaaaatattagtcctaaattaaacttatatccaaagtgtaaagagcagcagaatgayagagtgactttttttttttttttttggagacagagtcccactctattgcccaggctggagtgcagtggagcgatcttggctctctgcaacctgtgtctcc

SEQ ID NO: 206671 - DNA, 201 bp, Homo sapiens
attcagttttggacattgtgtgtttcttggaatttatctattttcttctagtttacccaattcgttgttcttagtagtctcttatgatttttatatttctrtggtatctgttgtaatgtctcctctttcatttctaattttatttatttgcatcttcttttttttcttattctggataaaggtatgtcaattttgtttacc

SEQ ID NO: 206672 - DNA, 201 bp, Homo sapiens
atccttcttaaaaatgcttttgctgcatcccataagttttagtagtttgtgtttccattttctcttctctaaaggttttaaatttcctttttaatgttttmattgacccatttgttgttcagaaacatatttttaagtttctatgtatttgtgaattttttgaaattctttctattgttgatttctagttgcataccattt

SEQ ID NO: 206673 - DNA, 201 bp, Homo sapiens
ttcatattaatataatagtgaaattgtctcactacaattatgtaacgtattgcagtccatttttatagatgagaagactgaagataaagaaaaaataattyacttttctttaaatggatactaaaagatgataccacgttttgaacccagattttttgagcaatttaaatcacattatactgtttccaaccatagattata

SEQ ID NO: 206674 - DNA, 201 bp, Homo sapiens
atctctctctgcatattgagttcttcaaacattgtagcctctttatggtctctgagaaataactaccttaaacccataatctttaatacttcctaaactttcttaataagagaagctctattcctgacactacctctcatttgcaaggtcaaatcatcattagttttgtagtctattaactgggtttgcttaggtcaggca

SEQ ID NO: 206675 - DNA, 201 bp, Homo sapiens
tccacctcccgggttcaagtgattcttcttccccagcctcctgagcagctgggattacaggcacccaccaccacgcccagctaatttgggcatttttttttagtagaggcagggtttcaccatttggctaggctggtctcaaactcctgacctcaggtgatcacccatctcggccttccaaagtgctgggattacaggcat

SEQ ID NO: 206676 - DNA, 201 bp, Homo sapiens
aaaatttcagaaggggcttctttggctctttattaactttgttttttgggttatctttgtttgtttgttatgttttttgagatggggtctttctctgttgyccaggctggagtgcagtggtgcaatctcagctcactgcaaactccacctcccgggttcaagtgattcttcttccccagcctcctgagcagctgggattac

SEQ ID NO: 206677 - DNA, 201 bp, Homo sapiens
taagacttgttttgtgtctaaccatatgatctatccttatgataaaccatgtgtgtgacaataatgcacattttctgttgctgttagaatgttctgtatayatctgtcgggtccatttgatctaaaatgtggtgtaagccctatgtttctctattgagtagggtggggtggagggagagcatcaggatgaatagctaatgg

SEQ ID NO: 206678 - DNA, 201 bp, Homo sapiens
attaattaaagtcacctttttaacattggcactgtttgtggtgtcccaaaacaattaccatggtcacgtcaaagatttctggtcacagatcagcataacayatacaataataatttaaaactttgtaatattgcaagaattaccaaaatgtgacagacataaagtgaacacatgttggaaaaatgggagtaacacacttgc

SEQ ID NO: 206679 - DNA, 201 bp, Homo sapiens
tttgaaagtccagattactctctgatccatgggctgcaacatagatatgtgttagcaggcatgaaaacagcattcatctcctagtatatcttcctcagagmttttgggtgaccaggtatattataaatgagcagtaatattttgaatggaattgtttttccagggagttggtctcagcaatgggcttaaagtattcagtaa

SEQ ID NO: 206680 - DNA, 201 bp, Homo sapiens
ggaggtctgttaggagacattttctagattcatcttgactactgtggccagtgtggcctggctcattttatttgagtgcaatttctgcctaatgcagtgtmtctcaatcctggatgcacattgaattattcatagcagggtgcctgatacttaatgatattaaatgttttttggaaaaggagagaaaaaaacaccgaaact

SEQ ID NO: 206681 - DNA, 201 bp, Homo sapiens
agccttacaaaatatacttcttaaataagatttgaaagtccagattactctctgatccatgggctgcaacatagatatgtgttagcaggcatgaaaacagyattcatctcctagtatatcttcctcagagattttgggtgaccaggtatattataaatgagcagtaatattttgaatggaattgtttttccagggagttgg

SEQ ID NO: 206682 - DNA, 201 bp, Homo sapiens
atgtttatcgtgttcagtatgtattcttgtattctggtataatgcctgacacatagacattttaaaacttcggtttgaaaagcagcaacaataaatcaatyattctatgagagttcttttgattacatagtttgttagaaggtgctaagtgcacagataaagcagaaattagtggtgtacagtaaatgtttaataacttgt

SEQ ID NO: 206683 - DNA, 201 bp, Homo sapiens
cttaaaagccctttttggcttacgtagtcacatatttttatcatagtttattcttctgcctacatataaatgaaactacaagaaaaataatttggtgaagkattcctgaaatgtttttacattcagagtcagccccttttgagttacttttaaagtcagagtcaacaatgcctgtttttactaattatttgctttggcctt

SEQ ID NO: 206684 - DNA, 201 bp, Homo sapiens
tagatagatacacattaatttttaattacatgagatgtgtaataccagatgctatccacaactgtatgagtattattttcctaattacttattaattgtcragcagaactttttcctttttctctcttcatgaatgtgttcaattttaatactctctagaaaaaaaaaaaagtgtgtcaagtcagtaagccctgaactgaa

SEQ ID NO: 206685 - DNA, 201 bp, Homo sapiens
gggacctttacggcgtaatcctggaaaccatgacaaatccagaaccccaaggctcccctcttcagctgatgtagaattttgcctgagtttgacccaatatsaatctggttccatggataaagctgccaatttcagctttagaaatacactggaaggtaatctctttcttttcacttttaattttttttctgaattcatatt

SEQ ID NO: 206686 - DNA, 201 bp, Homo sapiens
tcctcagtgacatgatttattgctacatagcaaaggaagtaaaccattgtatttaggagcataagttctacactaaaacaggcatctgctctaaccttaaygtccaatttgttattttaccttagacaagttctttgtcccctctaagccctttctttccatttctataataatgtaggtacttaattggtcagatccttc

SEQ ID NO: 206687 - DNA, 201 bp, Homo sapiens
ctctccagtattggcatcacctcactgattctcccttagcgtgtctcttaaatgtgtaggaatctagtttaggtgcaaacctgaaacaatacattccaggratggccagcctgcctccctccttagctacagattaattacatcttctggagtgacattttggctgtattttccagtgaggcttcccttctactctactcc

SEQ ID NO: 206688 - DNA, 201 bp, Homo sapiens
gaatcactatctatggaatatatagccttacaaaatatacttcttaaataagatttgaaagtccagattactctctgatccatgggctgcaacatagataygtgttagcaggcatgaaaacagcattcatctcctagtatatcttcctcagagattttgggtgaccaggtatattataaatgagcagtaatattttgaatg

SEQ ID NO: 206689 - DNA, 201 bp, Homo sapiens
tttccaaaaggttttcaatttattatgcccagatccatcagaggaatcactatctatggaatatatagccttacaaaatatacttcttaaataagatttgraagtccagattactctctgatccatgggctgcaacatagatatgtgttagcaggcatgaaaacagcattcatctcctagtatatcttcctcagagatttt

SEQ ID NO: 206690 - DNA, 201 bp, Homo sapiens
caatatacctttgtagctaacctacacatgtcccccgattctaaaataaaagttgaaaaaaaaaattaaaattaaaattatgtttatactttaatgtagaytattaagtgtacaatctcattatgcctaaaaagcaatttatataccttaatttaaaaatactttactgctagaaaatgctaacaatcgtctgagccttca

SEQ ID NO: 206691 - DNA, 201 bp, Homo sapiens
acccagtgaactctaaagatttaagtatgaccactcttgccacctccattcaatatagtattaaaaggtctacacaattagcaattaggcaaaacaaaaaraaaaagaaaaactatcaaaatatgaaaggaagaggatattgtttctgtttactgatgatctgcccttatacacagaaaagcctgagaattcactggaaaa

SEQ ID NO: 206692 - DNA, 201 bp, Homo sapiens
agaactacccagtgaactctaaagatttaagtatgaccactcttgccacctccattcaatatagtattaaaaggtctacacaattagcaattaggcaaaacaaaaaaaaaaagaaaaactatcaaaatatgaaaggaagaggatattgtttctgtttactgatgatctgcccttatacacagaaaagcctgagaattcact

SEQ ID NO: 206693 - DNA, 201 bp, Homo sapiens
gtttataaataaattcatcatttgtgaaattgcttttatcaaataattcttgcttgagttgtcagttgatggatcaaattgtaaaaactatttttttttttgctggattgtatcattattagcatatttagctcaaatgagttcaaaaagataagtaaaatttaaataaaaatttctttacccttatctagttatttatgg

SEQ ID NO: 206694 - DNA, 201 bp, Homo sapiens
agtttcaacacctgaaagttggttaaataatatcttctttacagagttactacgaagatagccgggcgtggcgggtgcctgtaatcccagctactcagaasgctgaggcagaaaaatcgcttgaacctgggaggcggaggttgcagtgagcggagatcacaccactgcactccagcgcctgggcaacaagagcgaaactcc

SEQ ID NO: 206695 - DNA, 201 bp, Homo sapiens
cagtgacatgatttattgctacatagcaaaggaagtaaaccattgtatttaggagcataagttctacactaaaacaggcatctgctctaaccttaacgtcyaatttgttattttaccttagacaagttctttgtcccctctaagccctttctttccatttctataataatgtaggtacttaattggtcagatccttctaaa

SEQ ID NO: 206696 - DNA, 201 bp, Homo sapiens
tggaaaactgttaaaactgataaattaagtaaacttgcaagatacaaatgcaacatacaaaaaattagtagtgtttctgtacactaacaatgaactatctsaaaaagaaactaagaaaacaaccccatgtacgacagcatcaaaaaataaaatacttaggagtaagtttatccaagaaaatgaaagatgtgtacactgaaa

SEQ ID NO: 206697 - DNA, 201 bp, Homo sapiens
attaagtaaacttgcaagatacaaatgcaacatacaaaaaattagtagtgtttctgtacactaacaatgaactatctcaaaaagaaactaagaaaacaacyccatgtacgacagcatcaaaaaataaaatacttaggagtaagtttatccaagaaaatgaaagatgtgtacactgaaactatacaatattgataaaagtaa

SEQ ID NO: 206698 - DNA, 201 bp, Homo sapiens
caattttgagcaaaaagaacaaagcatcatatttcctgatttcaaaatatactacaaaactatagtaattataatggcatggtaatggcataaaagaagayttattgttcattgaaacagaattgagagcccataagtcaatccaataatttacattcaattaacttttgacaaagatgccaaaaacaatggggaaaggac

SEQ ID NO: 206699 - DNA, 201 bp, Homo sapiens
agataattggccaaaattctgaccctgccacttatctgcttgtggtaggccgttctcacattgctttaaagaaatctcagactaggtaattaaaaaaaaaatggttttatttactcacagttctgtaggccgtacaggaagcacagtgctgacatctgcctggcttctggggaggctgaaacttacaattatggtagaagg

SEQ ID NO: 206700 - DNA, 201 bp, Homo sapiens
tggacaaaaattgtttcaggaaaatattagtcctaaattaaacttatatccaaagtgtaaagagcagcagaatgacagagtgactttttttttttttttttggagacagagtcccactctattgcccaggctggagtgcagtggagcgatcttggctctctgcaacctgtgtctcccaggttcaaacgattctcctgcctc

SEQ ID NO: 206701 - DNA, 201 bp, Homo sapiens
atttaacttcatacagctcatgttttttatttataaggtgaagataatatttctgttctatctgtttatgtaattatcaactaagataatgtttgttaaayatagaaaacctctgttactatattattataatgaagaaaataatttttaggatttatacaacatactaggattttggtatctttaatcaataattttaat

SEQ ID NO: 206702 - DNA, 201 bp, Homo sapiens
ggggaacatccctgtttgggggtggggggctgggggagggatagtgttaggagaaatatctaatttaaataacgagctgatgggtgcagcacaccaacacrgcacatgtacacctatgtaacaaacctgctcattgtgtacatctaccctagaacttaaagtataataatagtaataaaataaaataaaaattattgcttt

SEQ ID NO: 206703 - DNA, 201 bp, Homo sapiens
taaagcaaatatggcacatatacaccatggaatactatgcagccataaaaaatggatgaactcacaggtcagacccactgaaatagcaccaaatatcagakccaagggatgaacagagctctaaagtaaatcaaaagcccagaaatcaggagactaagaggcagtaaatcatgtgattaagaacatagattttagcatcaa

SEQ ID NO: 206704 - DNA, 201 bp, Homo sapiens
aacaacagatctttcacaaacctgacaaaaacaagtaatggagaaaggattccctatttaataaatggtgttgggaaaactggctagccatatgtagaaawctgaaactggatcccttccttacaccttacacaaaaattaactcaatatggattaaagacttaaatgttagacctaaaaccataaaaaccctggaagaaa

SEQ ID NO: 206705 - DNA, 201 bp, Homo sapiens
gataggaagaatcaatattgtgaaaatggtcatactgcccaaaataatttacagatccaatgctatccccatcaggctactactgactttcttcacagaaytggaaaaaactactttaaagatcatatggaaccaaaaagagcctgcatatccaagacaattaattctaagcaaaaaagatcaaagctggaggcatcatgc

SEQ ID NO: 206706 - DNA, 201 bp, Homo sapiens
aagtaggtatcattatttcttttgctttttcatagatgaggaaacagagtcataaagagtataaattgattttcccaggccacttacctagtatatggtayaatatatacacaatttggggctaacaggagaggctataggtcatcaaccttgttctgccctttgagggatgattaattgaaaagatatgggtttaattga

SEQ ID NO: 206707 - DNA, 201 bp, Homo sapiens
ccaatatccctgatgaacatcgatgcgaaaatcctcaataaaatactggcaaactgagtccaacagcacatcaaaaagcttatccaccacaatcaagttgrcttcatccccgggatgcaaggctggttcaacatacacaaatcaataaatgtaaatccatcacataaacagaaccaaccacaaaaaccacttgattatctc

SEQ ID NO: 206708 - DNA, 201 bp, Homo sapiens
caaccccatgtacgacagcatcaaaaaataaaatacttaggagtaagtttatccaagaaaatgaaagatgtgtacactgaaactatacaatattgataaargtaactgtagaacacaaaaataaataaaaagatatcctgtattcatagattagaaaaattaatgtcgttaaaattactatactacccaaagaaatctaca

SEQ ID NO: 206709 - DNA, 201 bp, Homo sapiens
  misc_feature (1)...(201): n = A,T,C or G
tgatcgtaacaatggtggtaacaataaaaacaatgggatgtctttttatttcagacccagactcttttcaagactacattaagtcctatttggaacaagcnagtcggatctggtcatggctccttggggcggcgatggtaggggccgtcctcactgccctgctggcagggcttgtgagcttgctgtgtcgtcacaagagaa

SEQ ID NO: 206710 - DNA, 201 bp, Homo sapiens
tcagatggattcacagccgaattccaccagaggtacaaagaggagctggtaccattccttctgaaaatattccaatcaatagaaaaacagggaatccttcttaattcattttatgaggccagcatcatcctcataccaaagcctggcagagatacaaccgaaaaaggagaattttaggccaatatccctgatgaacatcga

SEQ ID NO: 206711 - DNA, 201 bp, Homo sapiens
tgggatgtctttttatttcagacccagactcttttcaagactacattaagtcctatttggaacaagcgagtcggatctggtcatggctccttggggcggcsatggtaggggccgtcctcactgccctgctggcagggcttgtgagcttgctgtgtcgtcacaagagaaagcagcttcctgaagaaaagcagccactcctca

SEQ ID NO: 206712 - DNA, 201 bp, Homo sapiens
cagatggattcacagccgaattccaccagaggtacaaagaggagctggtaccattccttctgaaaatattccaatcaatagaaaaacagggaatccttcttaattcattttatgaggccagcatcatcctcataccaaagcctggcagagatacaaccgaaaaaggagaattttaggccaatatccctgatgaacatcgat

SEQ ID NO: 206713 - DNA, 201 bp, Homo sapiens; identical to SEQ ID NO: 36367
  misc_feature (1)...(201): n = A,T,C or G

SEQ ID NO: 206714 - DNA, 201 bp, Homo sapiens; identical to SEQ ID NO: 36283

SEQ ID NO: 206715 - DNA, 201 bp, Homo sapiens; identical to SEQ ID NO: 36368
  misc_feature (1)...(201): n = A,T,C or G

SEQ ID NO: 206716 - DNA, 201 bp, Homo sapiens; identical to SEQ ID NO: 36285

SEQ ID NO: 206717 - DNA, 201 bp, Homo sapiens
ccagaagctgacaggagatgaaaacttcactattccatattgggactggcgggatgcagaaaagtgtgacatttgcacagatgagtacatgggaggtcagyaccccacaaatcctaacttactcagcccagcatcattcttctcctcttggcaggtaagatatgctagatatacgatgtcagagtagggaggaaccttaac

SEQ ID NO: 206718 - DNA, 201 bp, Homo sapiens
ataacctgagaaatgccacttaccctctctgagtctcattttccttatttgtgaagcgaaatgtattgttttgtgatgtaaatgaaacaatgcatgtgccrtgttttcttaaaaagttttgcttatagaaaggtgagaaattcttatttttaagacggtatttctacaatgaaaatcaccttggttctagctaaaggatca

SEQ ID NO: 206719 - DNA, 201 bp, Homo sapiens
ccactgactctgttcattcatccaacaaattcttactgcacatcaacagggtgctagaaactgtactagattctgagagaaaagaaataaacaacaatgtraaaataaatgtgtcttcatgaaggatgcgtttttataagggacgtaacaatcattgtttattagagacgaaaatgagtaagtgtaagttgggtaaagaac

SEQ ID NO: 206720 - DNA, 201 bp, Homo sapiens; identical to SEQ ID NO: 36304

SEQ ID NO: 206721 - DNA, 201 bp, Homo sapiens
ttctctaccacacaatgcataaattcttaagttatgtcttagtgaccaaaaattaagagtaggttctctaagcatttcttatctaacacagtagcagccayctatggtggggggactgcccattcaattctatttgagatgactacatttgtttatacatgcttatagatagcaaattcagtgggataggaggaccaataa

SEQ ID NO: 206722 - DNA, 201 bp, Homo sapiens
atcagatggattcacagccgaattccaccagaggtacaaagaggagctggtaccattccttctgaaaatattccaatcaatagaaaaacagggaatccttcttaattcattttatgaggccagcatcatcctcataccaaagcctggcagagatacaaccgaaaaaggagaattttaggccaatatccctgatgaacatcg

SEQ ID NO: 206723 - DNA, 201 bp, Homo sapiens
gggtaaataacaaaatgaaggcagaaataaagttgttctttaaaaccaattataacaaagacacgacgtaccagaatctctgggacacatttaaagcagcrtgtcgggagaaatttatagcactaaatgcccacaagagaaagcaggaaatatctaaaattgacaccctgacatcacaagtaaaagaagtagagaagcaag

SEQ ID NO: 206724 - DNA, 201 bp, Homo sapiens
gcatttccaactgaggtatctgattcatctcattgggactggtcggacagtgggtgcagcccacagaaggtgaaccaaagcaggatggggggtcacctcayctgggaagcacaaggggttgggggatttccctttcctagcccaaggaagctgtgagtgactgtacctggaggaacagtacactcttgcccaaatactatg

SEQ ID NO: 206725 - DNA, 201 bp, Homo sapiens
cggtggctcacgcctgtaatcccagcactttgggaggccaaggcggggggatcacgaagtcaggagatcaagaccatcctggctaacacagtgaaatcccrtctctactaaaaatacaaaaaaaattagccagatgtggtggcgggcacctgtagtactagctactcgggaggctgaggcaggagaatggtgtgaatccag

SEQ ID NO: 206726 - DNA, 201 bp, Homo sapiens
atttttttcatttttttttaatgaacaggatttgctagtccacttactgggatagcggatgcctctcaaagcagcatgcacaatgccttgcacatctataygaatggaacaatgtcccaggtacagggatctgccaacgatcctatcttccttcttcaccatgcatttgttgacaggttggttaatatttctttataaata

SEQ ID NO: 206727 - DNA, 201 bp, Homo sapiens
taatagaagtttcttaagaagaaggcaaatgataaaataaactttcttaagcaaaaatatagggaattcaacagacttctgttgagttttctaaattgtgrtttaatggttgaaacaaaaataaaattttatgtcattcatctaaatgaacataagataaatatttaagacaaataaggttttacacttaatttgaactag

SEQ ID NO: 206728 - DNA, 201 bp, Homo sapiens
ctaacgtgttgatgttgataatgtttcatggccaaaactagaatatattttcataatacacacacacacacacacacacacacacacacacacacacacamtgtatagctggatcctaggaaactttaattttagtaaatgcctcagatgatttttatgatcaggcatacagggcagctctgctctatagctggttactat

SEQ ID NO: 206729 - DNA, 201 bp, Homo sapiens
atttgtactattttggtttcagaatccatttataactcttacaatatatgaaaaatttctgccagcttttatttatgtgggttatatttatgactacttctcatttgtaaaactgaaataaaaagatcttgcatatttgtattaatttatttaaaaaattaatttgttatgtgatagtataaataatataattttaatatt

SEQ ID NO: 206730 - DNA, 201 bp, Homo sapiens
gatttgtactattttggtttcagaatccatttataactcttacaatatatgaaaaatttctgccagcttttatttatgtgggttatatttatgactacttctcatttgtaaaactgaaataaaaagatcttgcatatttgtattaatttatttaaaaaattaatttgttatgtgatagtataaataatataattttaatat

SEQ ID NO: 206731 - DNA, 201 bp, Homo sapiens
tgatttgtactattttggtttcagaatccatttataactcttacaatatatgaaaaatttctgccagcttttatttatgtgggttatatttatgactacttctcatttgtaaaactgaaataaaaagatcttgcatatttgtattaatttatttaaaaaattaatttgttatgtgatagtataaataatataattttaata

SEQ ID NO: 206732 - DNA, 201 bp, Homo sapiens; identical to SEQ ID NO: 36315

SEQ ID NO: 206733 - DNA, 201 bp, Homo sapiens
tttcagtgctttggttttgactctaaatatcatatggccctaagacaagtcactcaacagttctagttctcaattatatatggataaaaggatttaggaaygttatgaggtataaggcaaactagaaactggcatttgttgaaacagaaattatttgttgaatagtttcttttcgtatattatgtcatagtacagtttaaa

SEQ ID NO: 206734 - DNA, 201 bp, Homo sapiens
ttggaccagttatttaaaatctttgacctttgttttttccaaagagaaaaaaaatgaggtagaattaccatctatacatgttttgtgtgtgtgctaatagraggattaaatggaatgggaaacagaataatgtagtggaaagagtatagtcttttcagtcacatcagcatgaatttgagtgaactttcatacttacttagc

SEQ ID NO: 206735 - DNA, 201 bp, Homo sapiens
tcactgcagtttttttatagcactggattcccaatgccaaggatacaacaatgtcaacagtagccacttactcaaatttgggtataatatatcttgtgtcrttctctctggtagttccatatgtatgtctgcgtgtgtgcatgcaaagaaagacaatacaagagagaagatgaagcaaggtgcaacatagctgagtgtgat

SEQ ID NO: 206736 - DNA, 201 bp, Homo sapiens
ggtgttgaatctgtagattgctttgaacggtatagtcattttaacaatattgattccatgagcaaggaatgtttttccatttgtgtcatctctgatttctkttggcagagttttgtagttctccttgtaaagatcattcacttcttggttagatgtattcctaggtattttatttatttatttatttccagctactgtaaa

SEQ ID NO: 206737 - DNA, 201 bp, Homo sapiens
tagaatagttttttctagttctgtgaaaaaataatgttggtagcttgatataggaatggtgttgaatctgtagattgctttgaacggtatagtcattttarcaatattgattccatgagcaaggaatgtttttccatttgtgtcatctctgatttcttttggcagagttttgtagttctccttgtaaagatcattcacttc

SEQ ID NO: 206738 - DNA, 201 bp, Homo sapiens
tattgagtagggagtccttttccgattgcttgttttgtctactttgtcaaagatcagatggctgttatgcagctttatttctggattctctgtcctgtccyattggtctatgtgtctgtttttgtaccagtatcatgccattttgattactgtagccttagagtatagtttgaagtcaagtcatgtgatgccaccagcttt

SEQ ID NO: 206739 - DNA, 201 bp, Homo sapiens
ttggttgtttttacctatgggaaattactctagaaatttttgcccagttcaatgtcctggatagtttccccaatattttcttgtagcagttttttagtatrgggtcttagatttaagtctttaatccattttcaattgatttttgtatggaaagagataggggtctagtttaattcttccataaatggatatctagttttt

SEQ ID NO: 206740 - DNA, 201 bp, Homo sapiens
gtttgttgaccaattgtatgtcttcttttgagaagcatctgttcatgtattttgcccatattttagtgggcaaaatatttagttcaattgcttaagttcawttcttttgagaagcatctgttcatgtattttgcccatattttagtgggcaaaatatttagttcaattgcttaagttccctatagattctggatattagaa

SEQ ID NO: 206741 - DNA, 201 bp, Homo sapiens
gctgattccatgtctgtgctattgtgagtagctgcaatgaacatacaagtgcgtgtgtctttttggtaaaataatttattttattttggatatgtacccartaatgagattgctgggttgaatggtatttgtaaattctttgagaaatatccaaactgctttccacatagctgaaaaaaattacattcccaccaacagcgt

SEQ ID NO: 206742 - DNA, 201 bp, Homo sapiens
ccactcataagtgaaaacatgcagtatttcattttctcttcctgtgttagactgcttggaatgatggcctccagctgcatccatgtagttgcaaaggacayggtttcattcttttttatgtttgtgtagtattccatggtgtgtatgaaccacattttcttcatccagtccaccatttatgggcatcttggttgaacccat

SEQ ID NO: 206743 - DNA, 201 bp, Homo sapiens
ggtaggcttccagcccatgctccactcaagtattctgcagtgtctgtttttcccatctttatgcccatgtttattcaacatttagcttccactcataagtraaaacatgcagtatttcattttctcttcctgtgttagactgcttggaatgatggcctccagctgcatccatgtagttgcaaaggacacggtttcattctt

SEQ ID NO: 206744 - DNA, 201 bp, Homo sapiens
aacaaattcctggtttcttctagtagagagtttatttcacacccacacacatacacactcacacacacacacacgtactctcttaacatggagcagagtamttggcaaataccaagataattaaaaattaaaagtaaactataggataatatcttaatgagcttcccccaaatattaacgtaattaatgatgcattgacct

SEQ ID NO: 206745 - DNA, 201 bp, Homo sapiens
tttggcacaagagacctagctttcagcctacctcagcttttgacatgtctgcctcactaagcttaatcatgtccagcttttgatttaaagtgacaggcatrtgacacttcctttcacttgaacacctaaaggccattgtagggttattgattggcttattttcaatgttgagtctcagggaacagggaggctggagaagtg

SEQ ID NO: 206746 - DNA, 201 bp, Homo sapiens
gagatttcacttaagagaaaccttcatcaaaacacagcctaaagtaacagaagaccatctgttcagcaatagtaaatgtagagattcacttagcataagcraagaggcaacaattcaagagacaaaaaacaataggtgtataaaattgaaagagctggctaggtatggtggctcatgcctgcaatcccagcactttgggag

SEQ ID NO: 206747 - DNA, 201 bp, Homo sapiens
gtgatattgctctccatcaaacattttactcagccttccaagctgtgttccacacctttgtttttagacacaagcaacttttaagcgtaaacctgaaagarggtttgagatgtcttcagtgcctacatttttaagggatagtgactaggcagctaaatcctctgaatatttgcctgccctcagtggttaacttatttgctg

SEQ ID NO: 206748 - DNA, 201 bp, Homo sapiens
acaagcgaccatgcctggctactttttgtatcattggtaaaaatggggtttcaccattttgctcaggctggtctcaaactcctgagctcatccaatccacmtgcctaggcctcccaaagtgctgggattaccctgcccggctgccaaattttattcttaaagaatactacttgaaagtcaaaattactccatgatccatgg

SEQ ID NO: 206749 - DNA, 201 bp, Homo sapiens
gtgctctcagcttgatttgataaatacatcatctttcctttttagtatgctattgagtcacaactacaacttcacggacttaacattgaagaaagtatgcrgatgataaagccaagagaggtatatgagaaagaaagaaatatttgtcatgctttgtttagtattgatttttttcttcattttcctcaaaagtttattaaa

SEQ ID NO: 206750 - DNA, 201 bp, Homo sapiens
aatattatctaaatttttaattgttaacaacatgattcatatattaaaatatttcagcatgcctttaacatgcacttctctgatttctaaagtgcccatcyctttaaaaatgcattagccattcaggttttccctttgggaattgcttattttaattccttggtcatttttctattgtgtcttctttcttcccgaggagct

SEQ ID NO: 206751 - DNA, 201 bp, Homo sapiens
gcttagcatgtagactacagtgatagacaaagatgtgctgggaaatcaggagccttactctgttcttgaacccacattagccgggcactcctgcctgtgtrggaaagagaccctgtccttaaatctgacctccctttctgcatcaggtacctgacctgccgatgacaaagggattcacaaaagtacccattaaatctatat

SEQ ID NO: 206752 - DNA, 201 bp, Homo sapiens
tcccacatctttgcgttttttcttgatctgtttgtgacaattcatagtactttctctgctacacagcaagatgatacatgtgcactgtgcatgaacaaggkacagaaggcagcattcccctttaggacagtgatgatgtggtgagggtctcccttcattcatgtcaccagcccccagcacaatgcttggcacattgttggc

SEQ ID NO: 206753 - DNA, 201 bp, Homo sapiens
aagagaccctgtccttaaatctgacctccctttctgcatcaggtacctgacctgccgatgacaaagggattcacaaaagtacccattaaatctatatgttyatattttcaaaactgtgacactttcatcatcattactctactctagcccttcctgcagggtttattacccaggttgtcaaaatattttgaaaaagacatc

SEQ ID NO: 206754 - DNA, 201 bp, Homo sapiens
acttcgggaggccaaggcaggtggaatgtttgagcctaggagtttgagactagcctgggcaacatagggagactcccatctctataaaataaaaatacaaraatcagacagatgtagtggcatgcgcctgtagtctcagcttctcaggaggctgaggtgggagattgcttgagcctgggaggtccaggctgcagtgagcca

SEQ ID NO: 206755 - DNA, 201 bp, Homo sapiens
ctgccgctttgccagctgaaaacctctgtggctggtactctgccccagctttgctcagtccctctgggcttgctccgcccgcttggcctggcaggctgttkttggctcactcccagattctgtgatcaccacagctctgcgcacagcccatagtgggaccgggtgtgcccaaagtggtttccacagctgggtgtgggcctt

SEQ ID NO: 206756 - DNA, 201 bp, Homo sapiens
aaaaaaaaagcattattcagaaaggaccaactagggaaacagtgggcgaacaggaatagaagttcttactctggttgtagactctatctggaatcagcagktcggttttcaggctttaaattgtctttgatttgaaggctgggtttcaccaggaacccaaccctgtcggcctaggaatttgtctgtctcctgccactatca

SEQ ID NO: 206757 - DNA, 201 bp, Homo sapiens
acagtgggcgaacaggaatagaagttcttactctggttgtagactctatctggaatcagcaggtcggttttcaggctttaaattgtctttgatttgaaggstgggtttcaccaggaacccaaccctgtcggcctaggaatttgtctgtctcctgccactatcaatgaccagttagactgagacatgcagcaggagggggaa

SEQ ID NO: 206758 - DNA, 201 bp, Homo sapiens
aagactcaaagagaagagggaaataacctaatggtgtccaattcaggtgtctaaaactacctaacagaaagagtggagctgatgaataaatataaagaacdctgtgtttgacatattgtgttttgggcagaggcagaactagagaatagggcttctgacttctaatcgaagacattctcctattacttgattaagatcttc

SEQ ID NO: 206759 - DNA, 201 bp, Homo sapiens
cattaatatagctcagttatctgttcaaattaacttaagatagctgtccaatcctgattctgatatttaatacaaaaacacttctttacagctggggggggtggctcacacctataatcccagcactttgggagaccaaggcaggggaatcacctgaggtcaggagtttaaggccagcctggccaagatggtgaaaccccg

SEQ ID NO: 206760 - DNA, 201 bp, Homo sapiens
ctcattaatatagctcagttatctgttcaaattaacttaagatagctgtccaatcctgattctgatatttaatacaaaaacacttctttacagctgggggkggtggctcacacctataatcccagcactttgggagaccaaggcaggggaatcacctgaggtcaggagtttaaggccagcctggccaagatggtgaaaccc

SEQ ID NO: 206761 - DNA, 201 bp, Homo sapiens
aagaacaaagaaaatgttggggtatttattttaaagaaatgttacatatccttttgaaagaaatctctctggcactagaaaagcttttggaagctggcatrtctctaactggtgagtgacagtggtaggtaaaactagtcttagttatagcaggtatttcagcagatactaagtgaaactgggcttcgggttacagcaggt

SEQ ID NO: 206762 - DNA, 201 bp, Homo sapiens
gttcatgttgatattttgacctcctcccaataatcatgaatgttcttagtggcatctagaatggtagatcctttccagaaggttttcaactgactttgcasagatccatcagagggatcactatctgtggcaacaatatcctcacaaaatgctttttttaattgtatttaattttttttttttttggaaaagcagtctcta

SEQ ID NO: 206763 - DNA, 201 bp, Homo sapiens
ttgggatggtgttacctgaatgctggagtggctgtggcaatttcttaaaataagatagcaatcacgtttgccatgttaattgagtcttcctttcatggaakaaatctctgtagcttgtgatgctatttgatagtattttactcacagtagaactttcaaaatttgaagcaatcctctgaaatcctgccactgctttatcaa

SEQ ID NO: 206764 - DNA, 201 bp, Homo sapiens
atttaaatggataaatttccaattgttctctaaacaaaacaagatttgtggaagttttgactctatgaaccctgattatttaatgaggaaaataagtaacrtacttcagattaggttatagaggatgctaggatgacagacattctaacttatcccaagttgttattacagactttgtttatttttagaataaacaatcat

SEQ ID NO: 206765 - DNA, 201 bp, Homo sapiens
aagtttggaaagagtgattgggtgtgcaaggccccagggatatggtgaggggaaaggagaggcaggagggcagagagaaggaagctaatctgcccctcccrtctgggaacttcccaacaccctgtgtaaagaagaaaggagagttccaataatgactcagagtaaattttcctcctaagaagtcacatgtgagctctgcgt

SEQ ID NO: 206766 - DNA, 201 bp, Homo sapiens
gatccgccctctggttcgctccccatatattagagcctggtaatcttccaaagtttttacagcatgaggcatacacagaatagatgcaaaaaaagtacacyttctgaaatttcctgaatggattcaaacttttactattctaagttaatcaattggtagtctacttactttataggattattgtaaggataggatcaatga

SEQ ID NO: 206767 - DNA, 201 bp, Homo sapiens
gtattgataatttaaaaaaatattacaaactatcttttatctttttataaaggacctaatgtcatttgagcttaaccataatcctttgaagaaagtaaaakttaactttaaataacattgacatacagagcagttaggtgatttgtctgagaccatatggtatgtatgtcccccgtcttgataaaattaacactaaatatg

SEQ ID NO: 206768 - DNA, 201 bp, Homo sapiens
aacatgattcaggcccccaggtagagttcagttcagtagggtagaacagcaactcagtccagctaccatcagtaatatgtttgtagtaagactaatctgakagtaaggcagaaaaacatctcatggaattttaggaatagccaagaagatgggtcccctggagacttgcacatagcatgttgcatgaaggattcagtgact

SEQ ID NO: 206769 - DNA, 201 bp, Homo sapiens
ctcagtccagctaccatcagtaatatgtttgtagtaagactaatctgatagtaaggcagaaaaacatctcatggaattttaggaatagccaagaagatggrtcccctggagacttgcacatagcatgttgcatgaaggattcagtgacttgcaagatgggcttgtcttgtcaccttttcaggagacatagctgttcaatcc

SEQ ID NO: 206770 - DNA, 201 bp, Homo sapiens
aatgtttttgatctttcctatccatacatatgtccaaataaatatagtacctggcagaatgtattattatcgtaagtaaagtacataagtgtgctcttaaktgttattggtgttcagaggaagacaggctacttttgcctgagacatcctaacaggcctcttgaaaaaagcattggagcattaggtctttgaaggttggct

SEQ ID NO: 206771 - DNA, 201 bp, Homo sapiens
ctcaaactcctggcttcaagcaatcccctgcctcggcctcccagtgctggggtaacaggtgtgaaccaccacaaccagcctgctaaactgaattccaattkccctcctcaaaatttttcttccccaggtatttttatttcatcatatttcacatatttgcccatatcccaaagctagaagaaagctcctttcctgtcctca

SEQ ID NO: 206772 - DNA, 201 bp, Homo sapiens
gctctacatggttcacatgaatgaactatgagaacatcatgccaagtgaaataatccagacgcaaaaagaaaaatactgtgtaattccaattataccaagyatctagattggtcaaattcataaaaaccaagtagaatggtagttgtcaggaacttggagagggagaaatgaggagttattgtttaatgggtataaaattt

SEQ ID NO: 206773 - DNA, 201 bp, Homo sapiens
caataatgtgaatgtacttaactgaattgtacacttaaaattgttaacagaataaattttaggtgcattttagcacagcattttaaatatttatcaaaaayaaaaacgttttccccttagagaaaagcagcattgtacatataatcacttctgttatacttaaaagttgacttagtatcctaattataggtataatattga

SEQ ID NO: 206774 - DNA, 201 bp, Homo sapiens
gtttaatagaaaataggtttaaaatgaaaatatgtatgtttccatatatagagagagatggaagaatatatattttcttttttaaactaatgccatagttyaattatttaagccagacagctaaaactgcttctttttgtccaagtatatggctcacccctgtaacccagtactctttggaaggctgaggcaggaggatgg

SEQ ID NO: 206775 - DNA, 201 bp, Homo sapiens
cttgagcccaggagttcaagaccagtctgggcaacatggtgaaactccgcctctgcaagaaatacagatatacaaaaattacccaggcatggtggtacatkcctgtagtcccagctattcgaaaggctgaggtgagagagttgctggaacctgggagtttgaggctacagtgagccatgatcatgctgctgcactacatcc

SEQ ID NO: 206776 - DNA, 201 bp, Homo sapiens
tgactagatctattaggtgattaataaatatttattggttgaatcaatttccaggaaaaaatatagaaaacatataattatgtagttcattctatgaaatratttgtagtaattgatttcataattttgtttttctagaactctatatttaaaaaaaaacatgagctatggaacattataattaatcttctaatgctacct

SEQ ID NO: 206777 - DNA, 201 bp, Homo sapiens
aagacaatctttttcagagtgtcaaactgccatcccagaaacaagttgtgcaaatttacatttcctccaacagtaaagacaattgcctcactaactttggrgatcagtaggattgtttttgtttctgttttttggagacagggtcttgctctgtcacccaggctggagtgcagtggcgtgatctcagctcactgcatcctt

SEQ ID NO: 206778 - DNA, 201 bp, Homo sapiens
ctatgccatttgtatttccaagattcagttgctacgaaggacattgaatttccctataatgcaagcatagcccaggggtgctatatttaaaactacattgrcatttctattaaaattccagcttttcaaaggtttatgccaaaaccataaaaattctatttgatagaaaggcagaattgaaagtcactgtggagattgttt

SEQ ID NO: 206779 - DNA, 201 bp, Homo sapiens
tacaagcagtgagaatcaggcagtgacaaagaagaaaagacaaataatgtgtgtgcactctcccttgagaaaggtttcagtttgcctcatgagttttaacrcatatatagacctaagcccctgggccagtgtttggtcatggccctgcctatctgcaaagaagactgagtctaaaacacaatttttgttcttggtggccac

SEQ ID NO: 206780 - DNA, 201 bp, Homo sapiens
tgtatttccaagattcagttgctacgaaggacattgaatttccctataatgcaagcatagcccaggggtgctatatttaaaactacattggcatttctatkaaaattccagcttttcaaaggtttatgccaaaaccataaaaattctatttgatagaaaggcagaattgaaagtcactgtggagattgtttcctttctttc

SEQ ID NO: 206781 - DNA, 201 bp, Homo sapiens
caggagagtttattattgatattgttaatatttaaatacacattccataaattggaatattttgttgtacagtctgagatttaacacatgtatagaattayattaacacaccttctctcagtatatagaacaatttcataacccccaaaagactcctttatgctagccctttgtaaccaatctctccactatacctctaat

SEQ ID NO: 206782 - DNA, 201 bp, Homo sapiens
acattccataaattggaatattttgttgtacagtctgagatttaacacatgtatagaattatattaacacaccttctctcagtatatagaacaatttcatracccccaaaagactcctttatgctagccctttgtaaccaatctctccactatacctctaatccctgataaccactaatctattttatatccccattgtct

SEQ ID NO: 206783 - DNA, 201 bp, Homo sapiens
tattataggtatatttttaactttataagaaactggcaaacttttccagagtggctgtaccattttgcattttgcattgccaccagtaatgtgtgggaatrtctgttgttccccatattcacccccagttggtattaccagttttttgttgttttgttttttagtcacatatgtttgtataagtatcttattttggtattt

SEQ ID NO: 206784 - DNA, 201 bp, Homo sapiens
ttcatttggttcctggcgtttttcagttctggggattatttgtctgctaataaaatgtagacctagttcctcagaggaccctggtcacagatttatggacwtaatcataaatcccacttaagcactgttccaaattgctgaaactcaattcaatattaccagcaactgtaacaacacaacaaataaatcacattagtacca

SEQ ID NO: 206785 - DNA, 201 bp, Homo sapiens
cactgttccaaattgctgaaactcaattcaatattaccagcaactgtaacaacacaacaaataaatcacattagtaccacaattattaagattgggaaagwtttataattagacagttgtcacccaacaaattcatattagatgcttatatttttcttggtaataccagagatccaaataatcaaagcacaaatgaaacaa

SEQ ID NO: 206786 - DNA, 201 bp, Homo sapiens
acccaaagggggttgccactccctgcttgaatgcctgagtttatatcccgatcattgtccccttgttgtgctctcaggcgatatatgatttgactgtttcyttacctcctgcttttagcctaatttgtgtttcagtgagccctctttactacccgattggtcaggtgtgagctgagttaccagccctgtgtttaaaggtgg

SEQ ID NO: 206787 - DNA, 201 bp, Homo sapiens
agtgaaccttctatttatcttcagatagtcctaattattttttaaaaacaattttgagtttattttagaacacaccattgagtgatcaagcctcaaatttstacagaaagcttggccgtgatgcttttagtcctgaaaattggaaatcaactgtcgtaatattataatagaataatatctctgtaatatctctattacagt

SEQ ID NO: 206788 - DNA, 201 bp, Homo sapiens
ttcctacccactactaaatcacagttaaattgttttgaagtcatgtctctttgtatgtaagtgtttgtaaaaagtgtttttagtatttatttgaaaaaaaagggcaacattcaacagtcacaatttgtgtttaaaatctttaaatagcacttctatttcattcagcaatcaagccatgtatttaaaaatgtgacaattgaa

SEQ ID NO: 206789 - DNA, 201 bp, Homo sapiens
gggccaggcacggtggctcacgcctgtaatcccagcacttgggaggctggagcagggggatcacgaggtcaggagtttgagaccagcctgacaaaaatggygaaaccccatctctactgaaaatacaaaaattagctgggcatggtggtgggcacctgtaatcccagctattcgggaggctgaggcagaagagtcacttga

SEQ ID NO: 206790 - DNA, 201 bp, Homo sapiens
aaccccatctctattaaaaatacaaaattagccagatgtggtggcacatgcctgtaatcccagctactcaggaggctgaggcaggagaatcacttgaaccygggaggtggaggttgtggtgagccaagatcgcaccattgcactccagcctgggcaacaagagtgaagctccgtctcaaaaaaaaaaaaaaattatgaaaa

SEQ ID NO: 206791 - DNA, 201 bp, Homo sapiens
aggctcacagactttgacatttaaaccctgcagcttgtgtaatttgtcactagtcgaatcatacagaataaattttaggtttcacataagatgctcccagrccgctagtcattgtttggacaattacttctttcaacccagaattactttgaataaattaaagatgtactctattcacttccatttgccaacatacaataa

SEQ ID NO: 206792 - DNA, 201 bp, Homo sapiens
tgagcctgggaggttgaggctgcagtgagcccaaatcgtgccactgttgttcagcctggacgacagggtgacaccctgtctcaaaaaaaaaaaaaaaaaamaaaaaacgaacaacactcaccttccttatcctcatagactgccagtaaaggaagatgcaaataaatccaaaattaatgtacatacataagtaaaatacaa

SEQ ID NO: 206793 - DNA, 201 bp, Homo sapiens
caggaaaccaaggcaggaggaacacttgagcccaggagtctgagaacagcctgggcaatatagtgagacctcgtctctataaagtaaataataaataaatwaattaattaattttaaaagtacattttatattttagttttggtgttagagaaactttatttctctatattattgctgtcttttactctagcccttgtaat

SEQ ID NO: 206794 - DNA, 201 bp, Homo sapiens
catggctaattgaaaaggtagtcctgacaaacacttaagatgttgagttaattaatgtctttaaaatactggagattataaaatgaaagtgtgacataaaatgaacaaatgtataaattgtgtattaatgctttctcaataaatccattttattgcagttatcattttttaagcctacgccaaaacgatataaaattcttc

SEQ ID NO: 206795 - DNA, 201 bp, Homo sapiens
aacatggctaattgaaaaggtagtcctgacaaacacttaagatgttgagttaattaatgtctttaaaatactggagattataaaatgaaagtgtgacatawaatgaacaaatgtataaattgtgtattaatgctttctcaataaatccattttattgcagttatcattttttaagcctacgccaaaacgatataaaattct

SEQ ID NO: 206796 - DNA, 201 bp, Homo sapiens
tatccctctggataaggtacacatctcatttttctcagtgacagtaaaggggcgtaatttctattacacaggtctaattgccttgaagaaacatcataaggactcaaaacatggaaggtattattattgttgtgattatgctttgaattcttaagtaaccaatgtattctctgtctctggatctgtttctagtgtcaaaac

SEQ ID NO: 206797 - DNA, 201 bp, Homo sapiens
aatgcctttaacagtacccaagtcacatcttgaatgctttgctgcttagaagtttcttctgccagataccctaaataatccctctcaagttcaaagttccrtaaatttctagggcaggggcagaatgtcgccagtctctttgctaaaacataacaagagtcacctttgctccagttcccaacaagttcctcatctccatct

SEQ ID NO: 206798 - DNA, 201 bp, Homo sapiens
ctcttaattgttattggtgttcagaggaagacaggctacttttgcctgagacatcctaacaggcctcttgaaaaaagcattggagcattaggtctttgaargttggctagaatccaaacaagttgaaggggagcaaaacattttaggcaaaggaaatggcatgagaaaaatcacagaaatagaaaatttcatgtggaggac

SEQ ID NO: 206799 - DNA, 201 bp, Homo sapiens
tttaagctctcccttcgctctgggaacacactcttgaagtgggttacacctgtcatcagtcttagtcctcaaatggtgactgtaagggacccaaaagtagrcacaccacttgaagaaaactcatctgtggaatcatgacatacaacctaaacctattttcatttagaaaccattttagatcaataatttttaaaggatttt

SEQ ID NO: 206800 - DNA, 201 bp, Homo sapiens
gaagaggtaattgaatatgtaacagaaccaagtgaagcactaatatttacagatgggtgggcaaatgagaagaaaaaaatgaaactgaattttatgatacwtcctaaaactactttctaaaatagcattaagtcagctaacttcgaacaaagcagaacaattgtgattagatgaatattttattaaactaggaattgatag

SEQ ID NO: 206801 - DNA, 201 bp, Homo sapiens
ggctgaagatcttgactaggggacttatgaacccatgcagccgtgcccaaatcctaccaaactgaccttactttcttgaagacagaattgtagtatggtcragctcatgctttttgtagtaggccatccaaattcgattgactggctaaaaaagattgttagtggaggctggaagaaacattttggctgatgatagatgaa

SEQ ID NO: 206802 - DNA, 201 bp, Homo sapiens
gcaggccccttccaagatagcggcaagcctcttgttctctgacctggggttcttggcctcaaaggttccaaagaatggaatcttgggccatgcagtgagtkttatagctctattagaagccatgggtcacggaagagaaccgtggaacccagtgactagtgttcagctccattaggatgaacctgggcacttagccgtgca

SEQ ID NO: 206803 - DNA, 201 bp, Homo sapiens
gcagaaagtctatacctattcataagaaaaagttagtatgtttaccgaacattatgaaagaattatgacattttcaaagttttaaaattttattttgtagrgacggggtctcattgtgttgcccacgctggtctgtttcttgaggatttactatagactgggctgtattcaaagcattggggatacaggcatgaatgagcc

SEQ ID NO: 206804 - DNA, 201 bp, Homo sapiens
gagtgttatagctctattagaagccatgggtcacggaagagaaccgtggaacccagtgactagtgttcagctccattaggatgaacctgggcacttagccrtgcaggaacaatggcaagcctttagcccgatcaggagtggcagcgggcgcctcgctggatcaggagcacagtgaacacactgctggatccagagaggtgg

SEQ ID NO: 206805 - DNA, 201 bp, Homo sapiens
accttcccagctaggcttaggaattcttagtcggcctaggaaatccagtcagtcctgtctctcagtctcccttctcaacaggaaaacccaagtgctgttgrgagattggccgatgattgctctaactgcttcctgctgaattggggtgtagtatgggctgttcagttgagatttcctctggagaggtgcctttgatgttat

SEQ ID NO: 206806 - DNA, 201 bp, Homo sapiens
tcacttctatacctatccctgggggagcaggaatttcaaaatagtctcttgcgtctttagaggatatagtatgaacctgggttttaaatggaggtgctatsacacacaggtccattctcctaacattcctacacaaagattatggcaccaatttggggcatgaagaaattctttacaaacctttggactgccccttagggc

SEQ ID NO: 206807 - DNA, 201 bp, Homo sapiens
tctggaagagacaaacttaacaaggatgttaaagatacagggattgcagcaggtggagcttgcagtgagccgagattgcaccactgcagtctggccttggygaaagagcgagactccatctcaaaaaaaaaaaaaaaaaagatacagggattgaaatgtatggcctgcagtgcagggggttatttttttgacacacttcac

SEQ ID NO: 206808 - DNA, 201 bp, Homo sapiens
ttcttactgtttcttcatagttcaaccctggtagatcatgtgcatccaggaatttattaatttcttctaggtttttcaacttgttgcatatagctgtttawatagtctgtaattatcctttgtatttctgtggtatcagttgtaatattcccttttcagtttgtgtttttatttatttgggtcttcttttttcttagtctg

SEQ ID NO: 206809 - DNA, 201 bp, Homo sapiens
tctgaggggaggaaactacgtccttgtgaggttccccgttctatttctcctgctgagtagcagcttgggttcccagaggggattaccccatactaggggtmcttctataagcatttttaatggagagttctgccttgtggctcttttagctttaatacccgcttggcagtttccttctatttttctttccttttctttctg

SEQ ID NO: 206810 - DNA, 201 bp, Homo sapiens
ttttttggtaatatatctgtttgttgcaatttagatttcagatatttatttcttatattaattttccaccagactaccatactaaagtatctgaatatttrtatcaaataaaaaaattatgtaacttgaaagtacagtagtaataatttacatcttctttcctatttttatatctgccaaatcttggtattaacgaaaatt

SEQ ID NO: 206811 - DNA, 201 bp, Homo sapiens
cataactgcccatgtcaaaagttatatacctaaattgggaggggcaccagggacaagattccctggtttcatagcctagatgcctaaggatgcagcatagygcttccttagatccctttggagatacaacctactctaatacttgggagagaaagtgaaagtctgaagcattagtatctaggaggcagggattggaggaag

SEQ ID NO: 206812 - DNA, 201 bp, Homo sapiens
tttccagttgatttaggactgaacacatgcatgtaactactcttttttctaaaacctcaccaaagaattctgaatggaatagaaaaaaaaattacaaagtytaaactgcagaggacaaaatagaatgccaaaggagatgataataatatctggggagttggctcgctgatagacaagtggtaattgcctttctcaaaaaaa

SEQ ID NO: 206813 - DNA, 201 bp, Homo sapiens
tacctaaattgggaggggcaccagggacaagattccctggtttcatagcctagatgcctaaggatgcagcatagcgcttccttagatccctttggagatayaacctactctaatacttgggagagaaagtgaaagtctgaagcattagtatctaggaggcagggattggaggaagtagattcagaggtaaggagaattttg

SEQ ID NO: 206814 - DNA, 201 bp, Homo sapiens
ggtgtccccaagttggaggttctccaaaatacaaaatgtttcctgcgacaaaggagaacagaagaaagcagctatctcagaaggggctctggaccaggcaygatgactcacgcctgtaatcccagcactttgggaggccgaggcgggtggatcacctgaggtcaggagttcgagagcagcctggccagtatgacatagctc

SEQ ID NO: 206815 - DNA, 201 bp, Homo sapiens
caggtccctcccacaacatgtgggaattcaagatgagattcgggtggggacacaaccaaaccatatcattccacctttggcccctcccaaatctcatgtcytcacatttcaaaaccagtcatgcctttccaacagtcccccaaagtcttaactcattccagcattaactcaaaagtccacagtccaaagtctcatctgaga

SEQ ID NO: 206816 - DNA, 201 bp, Homo sapiens
tccccttttttaaaccatcagatctcatgagacttatttactatcaggaggacagcacaggaaagacctgccctcttgattcaattacttcccaccaggtycctcccacaacatgtgggaattcaagatgagattcgggtggggacacaaccaaaccatatcattccacctttggcccctcccaaatctcatgtcctcaca

SEQ ID NO: 206817 - DNA, 201 bp, Homo sapiens
accctggtcactgcctggctcctatgctatgtactcctcttcctgggacctatgtccaccttgaacttctaagtttctttccttaaaccttatgagccaayctgtgctagtttcacacttttcttttacatcttcctcacctctgtcaggcttcaaagaattgaagagaattggggccttgctctggtttaggctttggct

SEQ ID NO: 206818 - DNA, 201 bp, Homo sapiens
aacataactggagctcttgatgtttccacattaattcaaaataattaggaaaaagtaaaggaatgaagaaaaacaacttgaataaactttggttaactttwaaaaaaaaaagattgttagtgaaatgatgatattgaaacatcttaggacaatattggtttcagaaatctaatttgaaccaaaaaagataggccaattagg

SEQ ID NO: 206819 - DNA, 201 bp, Homo sapiens
atttaccataaaaaattttaaaaagaagttaccaggaggataataaaaattattatgtgtacaaattgatagtgtggatagagaagagaaagaaataatawccatatttattcatagaagtagaaaaaattcaatttcagatgagaagaaaaactgttaatgaaacattttatagagagccaataattcttcaaaacatgg

SEQ ID NO: 206820 - DNA, 201 bp, Homo sapiens
taaggggatataaaaaagaagaaagaattacttaaatggcatttcttaaaggaatatgccaagtgatcttttcctttttattctcctcattagaatttttrtggaattggagttattgacttaacattttaaagcctgcctcattatcataaaattgttctttatctttcaacaatattttagccattataaacagtggta

SEQ ID NO: 206821 - DNA, 201 bp, Homo sapiens
agacaacgaacgggttaaagaaggcgattgagagaaagaggtagtggctgggaggcatggacagcagtctgctggattgaatgaggaaaaagaggtagggytgggaggagaaaggtgatctggatagcaagaatggaagagaaggatttgaacaggtaaacaagaattgtagaggtcgggctgtgatctgagtgcaaaaaa

SEQ ID NO: 206822 - DNA, 201 bp, Homo sapiens
aacatggaagtgaagagtagtgtggagctttgaaaggagtggagtttggcatgagggtaggactaagaaagtgagtgaaggaaaaggtgtatagggagcaraaaagtggaggggtggcttggggtttggagacttgtctattaatttctacaatagagacttgggagaactcagtgggtcctgaaaaattaggtaaagcag

SEQ ID NO: 206823 - DNA, 201 bp, Homo sapiens
agacaaaggttttatagtctcctgtaaacaggaagtgttctagtctgacataactgctgcgttgtacctggatggcctctttctcgatcttcagggttacrtgtcttccggccagggtagctgtctttcggtcggctctcttcctgcttctgatatcttgctggcgcacgccgctgacgtaagtagccttgcgccttcgta

SEQ ID NO: 206824 - DNA, 201 bp, Homo sapiens
tcacattggagattagggctttaacatatgaatttggggccaccaactcaattaataatatataccatagttgtaaggtttctgtatcggtttgaacccckagagcacgtcaatagacaacacgaggtggtgtggagcaacatgctgttttaatgagcgcctgggtgcaggcgggctgaggcctaaaatggcatcagcacc

SEQ ID NO: 206825 - DNA, 201 bp, Homo sapiens
gattagctcatgaaacacgcagttcaaatacatactcgtaatcattgtaaagcattcactaaaaacatagatgaaaattctaataatgttaaatacacttyaactagttataacctaactttttaaggattttatgactgaaaacaacataagacaacctactgcataaggaacattaagaaacatgtaaagatgtatcaa

SEQ ID NO: 206826 - DNA, 201 bp, Homo sapiens
attcactaaaaacatagatgaaaattctaataatgttaaatacactttaactagttataacctaactttttaaggattttatgactgaaaacaacataagrcaacctactgcataaggaacattaagaaacatgtaaagatgtatcaaaccatatctcagtttttttaattataaggtgagaattagctgtgatcagtgtt

SEQ ID NO: 206827 - DNA, 201 bp, Homo sapiens
tatatgtaccaaatgttagctcccatttaaaaatgagaacatatagtatgcagttctctgatcatgcattaattcatttaagataatggcctctggctgcwtccatgttgttgaaaatgacatgattgcattctttctatggctatgtagtatttcttggtgtatttgtaccacatgttctttatccaatccaccattgaa

SEQ ID NO: 206828 - DNA, 201 bp, Homo sapiens
aaaacatagatgaaaattctaataatgttaaatacactttaactagttataacctaactttttaaggattttatgactgaaaacaacataagacaacctamtgcataaggaacattaagaaacatgtaaagatgtatcaaaccatatctcagtttttttaattataaggtgagaattagctgtgatcagtgttttttaaac

SEQ ID NO: 206829 - DNA, 201 bp, Homo sapiens
catgacacctctcagtgtttactcagagtagatctggacagtatggattaagaggaagaaattgagacaccttaccccccttttcctccctctaataagawcaggctaaattcaatgcaggaagactttccagggaataagaagcaaaggcactaaaagaaagagttggaaaacaatacctacaagaagagtgaactgcgg

SEQ ID NO: 206830 - DNA, 201 bp, Homo sapiens
gtaatcttcttatacaattagataggctgatgtatttcctaattaaaaacatttgtttttaactcttttctaatgctttggcaattcatgattggaagtasttgctaatttagatttcctcatggagcacagtaaatatgagagatcctcataatagcctctataggtttaaattatattttaaatgtaaatgcaaaagtt

SEQ ID NO: 206831 - DNA, 201 bp, Homo sapiens
tttaagttcctctcatgtgttgacatctctaaaccacatgtaatcattttattttatttctttagtaactaacagaggagttaatattctgaagcttaatwtcttcatgattaggctaaattatcaacacttacttttatgataaccagaaatattttctaattatttgaaactgaaaaatcaatatgaagatgagccaaa

SEQ ID NO: 206832 - DNA, 201 bp, Homo sapiens
acaaaccccatcacgtgcagaacacactgttaaaaaaaaaaatcatgagccaaactaaatttaacggagtttaattgagcaaagaacaaatcatgagtcargcagcctctcaagccagagtaggttcacagactccagcacaggcatgtggttggaagatttgtggacagagaaagtaaagtgatgtacagaaaatggaag

SEQ ID NO: 206833 - DNA, 201 bp, Homo sapiens
gaggcagaggtgggcagatcacttgaggccaagagtttgagaccagcctggccaacgtggcgaaacctcacctctactaaaaaaatacaaaaattaggccrggaatggtggctcacgcctgtaatcccagcactttgggaagctgacatggatggatctcctaagctcaggagttcgagaccagtctgaccaacatggtga

SEQ ID NO: 206834 - DNA, 201 bp, Homo sapiens
attattttcaagactttaaagttgcatttcaggaaagcacctcatgctcttctattgttttgtcttttatatttcaccttgtgatgatggaaaatttcatmattttaattaaaccttcttactgagttttcattagacagatgattcagaaaggctgtatattttaatgcttcaggcaatgtacagtgaattaaagaagac

SEQ ID NO: 206835 - DNA, 201 bp, Homo sapiens
aaatagaatgccaaaggagatgataataatatctggggagttggctcgctgatagacaagtggtaattgcctttctcaaaaaaaaaaaaaaaaaaaaaaaagtaaaccaaatcctaatctcccaatggcaaaaaaataaaaagccagctgctttaccctgctaatcacctgaccatgaaaagagccaaattctgtaaaata

SEQ ID NO: 206836 - DNA, 201 bp, Homo sapiens
acgtctccctatgttgcccaggctggtctcaaacacctggtctcaagggatcaacccaccttggactcccaaaatgctgggattacaggcgtgagccaccrtccctggcctctcaacatctttattggctaatcatcaattggatcatggaaaaaaaattataatgtaatgaaggcagcccatgaaattgtaattatttac

SEQ ID NO: 206837 - DNA, 201 bp, Homo sapiens
tttttaattactttttatccttcttagagttgattgtattaattatttgtactggcttaacaataccatactgaaaaagcttttattttttttttttttttgacatttcttctgtttcagttgatttatcattagtgaataaagatgaaaatgccatctatttcttgggaaattctcttggccttcaaccaaaaatggtta

SEQ ID NO: 206838 - DNA, 201 bp, Homo sapiens
ttgatttatatgaataagaagtagatgtagaaaacaatctttgcctatacatgtgttagtactatgtgtacgtgtgtatggatatagaatgaaaaaaaccrcataaatccagtacatctacttaagttatgtaaataattatttgcattttttaaaaaaattgccatgtctacaacacaaattagtaccgtgttagtactt

SEQ ID NO: 206839 - DNA, 201 bp, Homo sapiens
gatataatcccaaaggcactaaacttggactcaagctataaggagattatcagtaatgtccaaaccattgatgtgataaccttttattaaaaaaaaaaaaattaaatagagatggagtctcactatgttgcccatgcttgtcttgaactcctgggctcaagtgatcctcccaattttgcctccaaaagtgccgggattaca

SEQ ID NO: 206840 - DNA, 201 bp, Homo sapiens
cttagtaaatcagataatgatatttgagttgtttttatagtatccattcagataaatattttgtttaaacattttaaaacaaaataaagtttctgcattcyttgcaagtttgtatcagcgagatgtgtgacaatatcagaagcaccaggacataccttaggaagagcttgtacctaaagtaatttcctctggtgcccatat

SEQ ID NO: 206841 - DNA, 201 bp, Homo sapiens
gggggcttgttacatgaagcaagtattcccagctcaaggaggatttactgaatgtggagacttggctgatagggggaactgatgaactcttttaacatgcycaatctgtgccagaatttgaagtgtgaccctaagacaaggctcaaaaatctctgccttctttttggaataaagtttttaggatcactgccacatttattt

SEQ ID NO: 206842 - DNA, 201 bp, Homo sapiens
ttctgactgtgctagagaccagttgtggggatatgtgagggcagccatgttgccaggcacatgtggggacaagaggaagacaagggaaatcaccatgtttrgtggacccagtttctaatggcctttatttgcatattaaagcttgcctgcaggctctaagagccggggctttcctgttagacaagaaacatttctggagct

SEQ ID NO: 206843 - DNA, 201 bp, Homo sapiens
gtaggtgcttagcactataagttttcctcataatactgtgtttgctgcatctcagagattttggcatgttggttgtgtctctgttttcatttatttcaaawttttttttgatatctgccttaattttattgtttaccccaaagtcattcaggagtaagttgcttaatttctatgtaatagtgtacttctgagagatcttct

SEQ ID NO: 206844 - DNA, 201 bp, Homo sapiens
cctcagcctcccaagtagctgggattacaggcatgtgccaccgcacccagctaattttgtatttttagtagagatggagtttctccatgttggtcaggctrgtctcgaactcccaacctcaggtgatccgcccacctcggcctcccaaagtgctgggattacaggcatgagccacagcacccagctgggatcttttgtatt

SEQ ID NO: 206845 - DNA, 201 bp, Homo sapiens
tcaatggggatattgacccgtaattttgttgttgttgttgttgttgttatttctttggcagattttggtatcgagtgatactggcttcctagaatgagtcrgggaggagtcaccccctccttaattttttgggatagtttcagcagtgttggtaccagctcttctttgtaagtctgatagaatttggctatgaattcatct

SEQ ID NO: 206846 - DNA, 201 bp, Homo sapiens
tcactgaagtttgaggagttcctttagaccttcaataaacttgtttgtagaggcctggagagtttcttcacaaccacagtaaaacttgtttaatcctgaatgggtcctgttaagaattccttcattattctgtcatgctttaaggcccagggaaagcctaggcaaaactcttgataggcttttgttcatcccagcctttgt

SEQ ID NO: 206847 - DNA, 201 bp, Homo sapiens
ccatcataagatatatttccttttgtgggtcatcatacatataatttagattagatggactagtttcatttcatttcttaagttctgcagttttgtaaackgtcttagattccatcaggctgtaacaacactgtgtcacattaaacactaatttccactggatttaaaactttcatcagtttaagcaaaaaattcatctct

SEQ ID NO: 206848 - DNA, 201 bp, Homo sapiens
taaacactaatttccactggatttaaaactttcatcagtttaagcaaaaaattcatctcttctaaaatccctgttctcccaatttgttattgtagagaatrtgaaggctggaggtatcctgcatgtgtcatgatgatttgagtataattttttctactctggcattcttttctaggaactgaaccaagtttgtgctgagac

SEQ ID NO: 206849 - DNA, 201 bp, Homo sapiens
tctcatagtgcagttaatgaaatgagttatttaagcttctatcttgagcctacttgtttttgccagatatcaaacctaacctaactgactggtaagccaaraaatgctgtcctatcaattctctaattttgtcacttctctctcctctccctaagtcctcctgcaaaaagattgtccatattccttcagccaaaagataag

SEQ ID NO: 206850 - DNA, 201 bp, Homo sapiens
ctttaaggcccagggaaagcctaggcaaaactcttgataggcttttgttcatcccagcctttgtataagggcactgacttttttagtttttaatatttaaygtaaccactcggtcagtactgaaacagttgtgatggaggcctgcattagtgaaacctggcctgccacaggtacatgatattaacttacattttcttcctt

SEQ ID NO: 206851 - DNA, 201 bp, Homo sapiens
ctatggaataagagatgaaggcatttgctttgggtttatgagtagtcttagcaaaattattttttccttattggtgcttgaagtaaattagaacattgttygacaaaaattcattccctctgatctacatatagggagtacatttctatgctccacagatgtggaacatagccatgcgatttcccttgatccatgggatat

SEQ ID NO: 206852 - DNA, 201 bp, Homo sapiens
aatggctggaatgggacctcccattctgtatttgtcccgattggctagtaacttagaactttttaaaagacgtaaaggtagagggtaacaaaggaaggagsaagtaacttgtggaatgctaagaaaggtaaaaacacttttaaataaggaagaggaacaggctgtgacctaatgctgcttggaccagtataagcatgccag

SEQ ID NO: 206853 - DNA, 201 bp, Homo sapiens
cgacaaaaattcattccctctgatctacatatagggagtacatttctatgctccacagatgtggaacatagccatgcgatttcccttgatccatgggataygagttaagtaacagcaataaagtagcaatcttatgccttagggggcatcacatatttccgccaatgccttgggaatattctgactgctaccagaaaaaac

SEQ ID NO: 206854 - DNA, 201 bp, Homo sapiens
tgtgtgtgtgtgtgtgtgtgtgtgtgtgtgtgtgtgtgtgtgtctgtgtgtgttctgtaagagaaaccacttgacctaacaatcctagagctaaaagtcascttcataggtcatttcattcatatttctgcctttgggagacattacaattacatgccactaaaagctgatgctctctctcattgacatggtttcataata

SEQ ID NO: 206855 - DNA, 201 bp, Homo sapiens
acatatagggagtacatttctatgctccacagatgtggaacatagccatgcgatttcccttgatccatgggatatgagttaagtaacagcaataaagtagyaatcttatgccttagggggcatcacatatttccgccaatgccttgggaatattctgactgctaccagaaaaaactcctgcttcaattggcttcttcctgt

SEQ ID NO: 206856 - DNA, 201 bp, Homo sapiens
gcggaggtttcagtgagccaagattgcgccactgcattccagcctgggcaacagagcgagactccatctcaaaaacaaaaacaaaaaaaaaaaacaaaaamaaaaaaaactgctgtttttaaaaccatcagatcttgtgagaactccttcactatcatgagaacggcatgcaggaaactgcccccatgatccattcacctc

SEQ ID NO: 206857 - DNA, 201 bp, Homo sapiens
taaacaaataaatcaacaatatagtgccatatgctattttaaataggttgatcagtgaagatctttggccttttgccatagtcgtcataaacactagcagrgtttgtttgtgttattgttgaaatatatgtataaaccaataatttcatatataagattagtccagaaaaaaatattcttttttttcattcagcaataatt

SEQ ID NO: 206858 - DNA, 201 bp, Homo sapiens
tgaacccgtgaggcggaggtttcagtgagccaagattgcgccactgcattccagcctgggcaacagagcgagactccatctcaaaaacaaaaacaaaaaamaaaaacaaaaaaaaaaaaaactgctgtttttaaaaccatcagatcttgtgagaactccttcactatcatgagaacggcatgcaggaaactgcccccatga

SEQ ID NO: 206859 - DNA, 201 bp, Homo sapiens
atgaatatctaatttattccttactctgcaaaataactttctctaattgcccatgacccatgtggccactttagccccagattcataggtattacataaarataactgataacattctccaattccaaattcttagtaaggggaatcttactaacttttactgagagcccaagctcaaaacttctctaggtcagtgattct

SEQ ID NO: 206860 - DNA, 201 bp, Homo sapiens
tcattagacagatgattcagaaaggctgtatattttaatgcttcaggcaatgtacagtgaattaaagaagacttctaagcaaatggacatctattccatcytcgctttgtttattttagtcttcttgttttaagctgtagtgactcagtcaacatcatggacccgcccataaatgtctgtggtgtttgggatgcctgatca

SEQ ID NO: 206861 - DNA, 201 bp, Homo sapiens
tggccactttagccccagattcataggtattacataaaaataactgataacattctccaattccaaattcttagtaaggggaatcttactaacttttactragagcccaagctcaaaacttctctaggtcagtgattctcaaagtgcaatttttgtaccggtaagagtagcaacacctgataatgtgttaaagatgcaaat

SEQ ID NO: 206862 - DNA, 201 bp, Homo sapiens
ttaagctgtagtgactcagtcaacatcatggacccgcccataaatgtctgtggtgtttgggatgcctgatcacctgcctctttttcctacctcacccatcrtttttgatcccaaaagtgtttgctcattattattttttacctcccaaatatttagcttaaaatcccacttctgatgttttccagctgaagttctgttggg

SEQ ID NO: 206863 - DNA, 201 bp, Homo sapiens
ttacaattctggaggctgggaagtccaagatcaaggtgctggctgacttagtgtctggtaaggtctgctctctgcttccaagatggtgcttcttgctgtawcctcatgtggcagaagaggcaaacacctgcctcccacctgttttacaagggtactaatcccattcatgagggctctgcccttatgactgaatcacctcct

SEQ ID NO: 206864 - DNA, 201 bp, Homo sapiens
taacaattgcccctctcttccatccttagttcttagcagcctatgtttattctcaaagaaagtcctcttccttcatcttagtttatatggtaatagaaatkttagtttaaaaattgtgttctacaccacatgctgatgaaggtagttttagcattagatttacattaggaaagaagactcagaaacagggtactatgtaac

SEQ ID NO: 206865 - DNA, 201 bp, Homo sapiens
tgatcacgagtttcaggtttttttctatcttttgggagactgtctttccctggcactggctgcaaccaattattattttagagagacagttaacaactgcytgaccatcacctgacattcctggtgatgggaaggagatgcctgccctgctcatgtctgcctgactacctactgtaacaccaggttgtctaaatgtgccat

SEQ ID NO: 206866 - DNA, 201 bp, Homo sapiens
cttcgtactgggcctgagaaggaaggagttattcatctccttaagctttcaggcctcagggagaatcgtacattcccgtctatttggttgtagataaaagrgataaggggcctctttctcaataactacttcacgtgtgatatagggggtggtgtgggcaccttggaaaaacaaaaccttaattttttgggtattcttgag

SEQ ID NO: 206867 - DNA, 201 bp, Homo sapiens
gacaaagactagaagatagcagagcggcatgtgagtgaggtttacttgccattcttgccttggtacctggccccaggcttggtcggtaggaaaaggtagcrgccagagggagccttggggtgacactgagtggcagatagagccagactgggtaatttctcagacatggctggaaaggtgaggacaagtgagaatagggtg

SEQ ID NO: 206868 - DNA, 201 bp, Homo sapiens
agcggcatgtgagtgaggtttacttgccattcttgccttggtacctggccccaggcttggtcggtaggaaaaggtagcggccagagggagccttggggtgrcactgagtggcagatagagccagactgggtaatttctcagacatggctggaaaggtgaggacaagtgagaatagggtggaaaagttgcaagagaggtttg

SEQ ID NO: 206869 - DNA, 201 bp, Homo sapiens
aagagagagatagtgtgggtgttgcagtgtttttgagaggggctacacaggagcagattattaacacattgaaggagagtggatggttttagggatagggwactgaggtcaagagcaagggcctgtccaaaaagatgggggctgtctctgaaaccttgaggtagtatgcaccaggtgagctgatgtgaaagtttggagttg

SEQ ID NO: 206870 - DNA, 201 bp, Homo sapiens
actaatgtgcatgcagaggggtgactggaggctgaggagtttcctttgtctggctgctgtggcctactctctggggtggaggggtaggcccaaggaggacrcagacttgagcccctcccaggttttggcaccagaacgtaaaatttttgtattggtttgaaacccaagagcgcaacagacaagatgaggtggtgtggagca

SEQ ID NO: 206871 - DNA, 201 bp, Homo sapiens
ccagtgattcaattatctcccaccgggtctctcccataacacgtggaaattataggaactacaattcaaaatgaggtttgggtgagaggacccagccaatycatatccctctcatatctcaaactctttttttttttcttctctgatagttttggttataactgtgcaaaacactattgatgaaaataggcattcttttat

SEQ ID NO: 206872 - DNA, 201 bp, Homo sapiens
ctgcagcttgtttttacaggctgctctttgttagataacaaaatgacttgggggctgcttttcattaaaaggaaaaccttacaatctgcctaaataatttyttcttaagtcctatatcataattttctgtcaataagtatcgttccattttaaaaataaacagtattttaaggattttaaaaattttccaacaaactgttt

SEQ ID NO: 206873 - DNA, 201 bp, Homo sapiens
aaacctacttgaatgtggtgaaataactttttcatgtgcttctggatttggtttgctagtattttgttgatgatttttgcttcaatggggatattgacccktaattttgttgttgttgttgttgttgttatttctttggcagattttggtatcgagtgatactggcttcctagaatgagtcggggaggagtcaccccctcc

SEQ ID NO: 206874 - DNA, 201 bp, Homo sapiens
tcccattctgtaggttgtctatttactctgctgatagtttcttttgctgtgcagaagctctttagtttaattaggtcccacttgtcagtttggggggtttytgcaattgttattgaggactcagtcacaaatcctttgtcaaagccactgtccaggatgatatttcctaggttttcttctaggaattttataattttaggt

SEQ ID NO: 206875 - DNA, 201 bp, Homo sapiens
gactacaggcctctgccaccaaacctggctaattttttgtatttttagtagagacggggtttcactgtgtttgccaggatggtctcaatctcctgacctcrtgatctgcccgcctctgcctctattctttgcccattttttaatggggttatttgtttctcgcttgtcgaattgcttaaattccttatagattctggatat

SEQ ID NO: 206876 - DNA, 201 bp, Homo sapiens
tttgactcaaacccaggcactggtatttgttcaagctcctgatgtgatagaccagtatctaagtcctaataaaatatgaaatgatcaatttttttttttttgagatggagtcttgctctgttgcccaggcttgagtgcagtggcacgatcttggctcactgcaagctctgcctcctaggttcacaccattctcctgcctca

SEQ ID NO: 206877 - DNA, 201 bp, Homo sapiens
tctgttttttttttattatttgttttgtttttaatgggtaaattaaatgccaggcctctgaagtgagttcatataaggaactggttgtgggatttttttttaaaaaaaatatgcctatattagagtcctacaccaaaaaaatttagagtttttgactcaaacccaggcactggtatttgttcaagctcctgatgtgataga

SEQ ID NO: 206878 - DNA, 201 bp, Homo sapiens
gcaaaagtggtctgatattactcactgctttggagaatccccatacgaggccaccaaatgttaccagcggatctttgttcttagagctcccaagatgatgrtgggctgctcccaagatggggcaggccactcccaagatggcagcaagccttttgttctctgacctgggcttcttggcctcacagattccaaggaatggaa

SEQ ID NO: 206879 - DNA, 201 bp, Homo sapiens
ctccaattctaaggtagaggacagaatagcaagcaaaagtggtctgatattactcactgctttggagaatccccatacgaggccaccaaatgttaccagcrgatctttgttcttagagctcccaagatgatggtgggctgctcccaagatggggcaggccactcccaagatggcagcaagccttttgttctctgacctggg

SEQ ID NO: 206880 - DNA, 201 bp, Homo sapiens
tttgggaaaaaaaggtaaatacaataaatgcttcagaaaggggaccctctcccacttcataagcattaaatactaaacaagatgtgcaacagaatccacaygacattgagttgtgcaagagtcagcagttggcactgaaggactgggaactatggatgaacccagagctcccatattctcaagggttgtgtagagaaagca

SEQ ID NO: 206881 - DNA, 201 bp, Homo sapiens
accaactctcccaacccagaagttgttagaaagccttttcccaggaagcctcacacctgagtctttagtccggtggccatgctaatcgtttttaaccagcygacaggtgcccggtattttcctccaattctaaggtagaggacagaatagcaagcaaaagtggtctgatattactcactgctttggagaatccccatacga

SEQ ID NO: 206882 - DNA, 201 bp, Homo sapiens
gcgtgaacccgtgaggcggaggtttcagtgagccaagattgcgccactgcattccagcctgggcaacagagcgagactccatctcaaaaacaaaaacaaamaaaaaaaacaaaaaaaaaaaaaactgctgtttttaaaaccatcagatcttgtgagaactccttcactatcatgagaacggcatgcaggaaactgccccca

SEQ ID NO: 206883 - DNA, 201 bp, Homo sapiens
ttctatctttctatttctttctctctctctcatctctgtctctctctctctcctctctgtctctttctctcccttttctctctctctgcctctttctctttctctcctctctgtctctctctctctctcatctctgtctctctctctgtctcctctctgtctctgtagatggattttggaaaacagcagaaggaagttcgc

SEQ ID NO: 206884 - DNA, 201 bp, Homo sapiens
cttctatctttctatttctttctctctctctcatctctgtctctctctctctcctctctgtctctttctctcccttttctctctctctgcctctttctctttctctcctctctgtctctctctctctctcatctctgtctctctctctgtctcctctctgtctctgtagatggattttggaaaacagcagaaggaagttcg

SEQ ID NO: 206885 - DNA, 201 bp, Homo sapiens
attccaaattcttagtaaggggaatcttactaacttttactgagagcccaagctcaaaacttctctaggtcagtgattctcaaagtgcaatttttgtacckgtaagagtagcaacacctgataatgtgttaaagatgcaaattcacaggcccagctccagacctactgaattggaacctccagggtggctgtcagaaatct

SEQ ID NO: 206886 - DNA, 201 bp, Homo sapiens
ttgtccaagctggcctgagataatattttatatatataggtgctctttgacttacaatggggttatttcctgataagcccatcataagctgaaaatatcataagtaaaaaatgcatttaatacacctaatctatagaacatcatagcttagcctagcctaccttaaaacacattcaaaacacttacatagcctagagttgg

SEQ ID NO: 206887 - DNA, 201 bp, Homo sapiens
atgttagtattaaattcataaagacagcaatgagatttaaagcattgcttgttcagaatattttccagtaaaataaaggtcttggtattagagtacatcawagtaggagaagagaaatttctggtgatttaataaccactatttactctgaagaagtaggaatcaaataaagtcctcatcatcataatgctgtcccaggca

SEQ ID NO: 206888 - DNA, 201 bp, Homo sapiens
gttgtccaagctggcctgagataatattttatatatataggtgctctttgacttacaatggggttatttcctgataagcccatcataagctgaaaatatcataagtaaaaaatgcatttaatacacctaatctatagaacatcatagcttagcctagcctaccttaaaacacattcaaaacacttacatagcctagagttg

SEQ ID NO: 206889 - DNA, 201 bp, Homo sapiens
gccttgatattcctggctcaagcaatcttctcgccttagcttcctaagtagctgggactagaggtgtgcaccaccatgactggatgatgatgatgatgctkattattattattattatttagtggagatgaggtcttgctatgttgtccaagctggcctgagataatattttatatatataggtgctctttgacttacaat

SEQ ID NO: 206890 - DNA, 201 bp, Homo sapiens
ttcctttcacaagagatttctctgtagcatatgatgctgcttgatagcattttacccacagtagagcttcttttaaaattgtttgctaactaagtttacaractattctaaatctattgacatttcaacactcttcacagcatcttgaccaggagtagattctgtctcaagaaatcactttctctgctcatccttaaataa

SEQ ID NO: 206891 - DNA, 201 bp, Homo sapiens
cagccttgatattcctggctcaagcaatcttctcgccttagcttcctaagtagctgggactagaggtgtgcaccaccatgactggatgatgatgatgatgmtgattattattattattatttagtggagatgaggtcttgctatgttgtccaagctggcctgagataatattttatatatataggtgctctttgacttaca

SEQ ID NO: 206892 - DNA, 201 bp, Homo sapiens
aaaaatggaaatactgagagaattactaaaatgtaacagagacatgaagtgagcacatgttgctggaaaatagcactcttaaacttgctcgacacagggtwgtcccaaaccttcatattgtaaaaaacacaatgtttgcaaagtacaataaagtgacatgcaataaaaagtgtaagaatgtatatgtgttagcataggcag

SEQ ID NO: 206893 - DNA, 201 bp, Homo sapiens
gaggttgtggtgagccaagattgctccattgcactccagcctgggcaacaagagcaaaactctgtctcaaacaaaacaaaacaaaacaaaacaaaacaaaaacaatatgaaagcaaccaatttcctttaaaagtatttttaaaactttcaacaattgtatgggctttttgggtacatttctctttagagattctattgtga

SEQ ID NO: 206894 - DNA, 201 bp, Homo sapiens
caaccttccaatctcatagtctcattatttaaaagaccaaggcaataaagtattgcttgtgtaataaaaatttgaaaaatgaaaataaaagtaaataaggsttaggaggcattttcagaaaagcagaagtttgaatcacaaactcaggctggactctaaatataatgcatggtatctcttcataccatgcattggaaatag

SEQ ID NO: 206895 - DNA, 201 bp, Homo sapiens
ggaggttgtggtgagccaagattgctccattgcactccagcctgggcaacaagagcaaaactctgtctcaaacaaaacaaaacaaaacaaaacaaaacaaaaacaatatgaaagcaaccaatttcctttaaaagtatttttaaaactttcaacaattgtatgggctttttgggtacatttctctttagagattctattgtg

SEQ ID NO: 206896 - DNA, 201 bp, Homo sapiens
acaagaatcgcttgaacccaagaggcagaggtggcagtgagctgagatcacgccactgcactccagcctaggcagcagagcaagactccatccaaaaaaamccccaaaaacctaatgtttttatttatattttagattagtgggatggtttggccatgaactcagcaccagatttaagatggataacagtaagtgtattta

SEQ ID NO: 206897 - DNA, 201 bp, Homo sapiens
cggaggttgtggtgagccaagattgctccattgcactccagcctgggcaacaagagcaaaactctgtctcaaacaaaacaaaacaaaacaaaacaaaacaaaaacaatatgaaagcaaccaatttcctttaaaagtatttttaaaactttcaacaattgtatgggctttttgggtacatttctctttagagattctattgt

SEQ ID NO: 206898 - DNA, 201 bp, Homo sapiens
tccataggatttgctgtaggatatcctatggatttcacggggatactttactccagagaatttagttatattagtacaaataagcaatttgaagttttagrgataagcatcaaggtctatattaatttaacttagggaacaaaaagaaaaactagaatatgtggaaattttattttgatcctaaaatgaatgtctttttaa

SEQ ID NO: 206899 - DNA, 201 bp, Homo sapiens
gcggaggttgtggtgagccaagattgctccattgcactccagcctgggcaacaagagcaaaactctgtctcaaacaaaacaaaacaaaacaaaacaaaacaaaaacaatatgaaagcaaccaatttcctttaaaagtatttttaaaactttcaacaattgtatgggctttttgggtacatttctctttagagattctattg

SEQ ID NO: 206900 - DNA, 201 bp, Homo sapiens
ggataagcatcaaggtctatattaatttaacttagggaacaaaaagaaaaactagaatatgtggaaattttattttgatcctaaaatgaatgtctttttawttaaaaaaaaaagctaatgcattaatataacattttggactttgattttaaggcttgaccataaatcataagaacttaagcagagcctcctgttgaatta

SEQ ID NO: 206901 - DNA, 201 bp, Homo sapiens
aagagaaagcatagttactttgatccctaagaatagttttacatgatcaaagaatgtcatgtaaaaagctgggtattggtaaatggtaaataataaggtayggaatagggaatatagggtactaggatgattggtataatagggtgaagagtaaatgagtgcgtgtgggtacctaacagtaagtctgaagaagtaaatgta

SEQ ID NO: 206902 - DNA, 201 bp, Homo sapiens
gaagcactctttggattagagcactggctcacactcatctcagaagtgatttaaatcttgacatttattgcagtgagtcatagatgatctgataaagtaamgatcctttcaaaacctgctaagctctccagaagcattttaaaaattttgccccaacataactggagctcttgatgtttccacattaattcaaaataatta

SEQ ID NO: 206903 - DNA, 201 bp, Homo sapiens
ttaatttaacttagggaacaaaaagaaaaactagaatatgtggaaattttattttgatcctaaaatgaatgtctttttaattaaaaaaaaaagctaatgcwttaatataacattttggactttgattttaaggcttgaccataaatcataagaacttaagcagagcctcctgttgaattagtgatacttgaatattctcac

SEQ ID NO: 206904 - DNA, 201 bp, Homo sapiens
ttacactatactgtagtctattaagtatgcaatagcattgcatctaaaaagcaatgtggataccttaattaaaaaaatactttattgctaaataatgctarcaatcatctgaaccttcagtgagctgtaatctttttgctgatgtgggttgtcttgcctctatattaatggctgctgaccaattgggatggtgttacctga

SEQ ID NO: 206905 - DNA, 201 bp, Homo sapiens
ataatcatgaatgttcttagtggcatctagaatggtagatcctttccagaaggttttcaactgactttgcacagatccatcagagggatcactatctgtgkcaacaatatcctcacaaaatgctttttttaattgtatttaattttttttttttttggaaaagcagtctctatcgctcaggctggagtgccgtggcacaat

SEQ ID NO: 206906 - DNA, 201 bp, Homo sapiens
caaatacttttggtagatataaaattagaaactgtgtgacctatttaatgaatataagcatccaggggcaacagatatagttaacaacccataatgagatktcctcttggttgtttttgccaagaagataaatttccagtaaaatgtcaaacaaggttaccatttaaatagcaatgctaataattacattctgagctctca

SEQ ID NO: 206907 - DNA, 201 bp, Homo sapiens
aatcatgaatgttcttagtggcatctagaatggtagatcctttccagaaggttttcaactgactttgcacagatccatcagagggatcactatctgtggcracaatatcctcacaaaatgctttttttaattgtatttaattttttttttttttggaaaagcagtctctatcgctcaggctggagtgccgtggcacaatct

SEQ ID NO: 206908 - DNA, 201 bp, Homo sapiens
gaagtgtaagtgccattattgttcatttttgtgttgcacaaagctatttttaagtgccaataagagcatgtggtagagtatgtggaattactgaaattacwcagctcttatttcataactgagctatgcatatgaattttgttcttaccagaatgatggaaatgtacattaattcaaatgtatttatttcatttggataca

SEQ ID NO: 206909 - DNA, 201 bp, Homo sapiens
ttagcaaacttgaaaagtttaatatccttgtacatctccatcagagctcttgggcgactatgtgcattgtcaataagcactaaatgttttgaaaatatttytttttctgagcattaggtctcaacagtgagcttaacatagtcagcaaaccatgctgtaaataggtgggctgttgtccaggctttgtcgtttcacttataa

SEQ ID NO: 206910 - DNA, 201 bp, Homo sapiens
gaacttaaagctatttatctctttgcattcaaagatgcccaaaaatgttgcaatcaagtaaatgagataatgagatagtatcctatatggagcctatattsaatagaggtctcagatttgtttaggttcttcagcaagaatcatattccagtcctgctttaagactgcatgcctcaatatttcttcacatgttattaatgg

SEQ ID NO: 206911 - DNA, 201 bp, Homo sapiens
tttctattgcagatgggatttcctcttcaagcttactgtactgtgtctttttaaaaaatagttgaagacatcggaataaaagctaatgtcccaaacagcgyttccctggatattgctgtttctttaaaagcctttttcccagctcttctgagatggtccatgacattgcctttcttgctcattaccttgatcccttgaatg

SEQ ID NO: 206912 - DNA, 201 bp, Homo sapiens
caatatgccctcataacaaacctgcacatgtacccccgagtctaaataaatatggaaattaaaaatactactaataaataaataataattgaagccacatrgtggcttatgcttataatcccagcaatttcagaggccaaaatgggaagattactgcttgaggccaggagttcgagactagcctaggaaatatagtgacag

SEQ ID NO: 206913 - DNA, 201 bp, Homo sapiens
attaacagtttcttaaaagacataaattactaaagttcacttcagaacaattagataacctgcatatttctatacccatacaatcactgccccacctaaamtgacactacatggtggcctggggatcatcccatcactgcctactacagccattacctgcatgtaccaccataggacctaaggaaaagaatgcctgagctg

SEQ ID NO: 206914 - DNA, 201 bp, Homo sapiens
tccagtccagtctacccctactggcactttagcactcctcccagaggccgtaggttggacccacccaccctgctattactactacagctggcacccaattscatgtactacctgcaggcctagaggagacttaaaatcccatcacagccatcaccaacaccagcaagcaccactcaagacccagtggtcactgccactgac

SEQ ID NO: 206915 - DNA, 201 bp, Homo sapiens
ccaattgcatgtactacctgcaggcctagaggagacttaaaatcccatcacagccatcaccaacaccagcaagcaccactcaagacccagtggtcactgcyactgacatcactcatgccacacctgcggtccaggggctgtaaagctgctcatccatctggcccatcactaccactaataccttctgagcaagccacctgg

SEQ ID NO: 206916 - DNA, 201 bp, Homo sapiens
cattttttcaccattcagtgtagtactagcagtgagtctgtcatatatgacttttattatgttgaggtatgttccttttatacacagattttttagggctyttatcctgaagagatgttgaattttaacaattgcttttttagcatcagttgaaataatgacatggtttttgtccttcattctattgatatgatgtatcac

SEQ ID NO: 206917 - DNA, 201 bp, Homo sapiens
ttaaggaggtattcaccagatatgctattttaggtatagttttttttttcttaatcgctttaagtatgtcatactggtctcccctggcctgtaagatttcygctgaaaagtctgctgccagatgtattggagattcattatgtgttctttgtttcctttctcttactgcttttagaatactttttttttaactttgggagt

SEQ ID NO: 206918 - DNA, 201 bp, Homo sapiens
gagctctttatcttcttgaccaaagaacttttatagtctggtaaactgagtttctttgctgttatttgagacaagcttcctttaccattttgattgagatagggggttcctttcatgtactgacataatagctgatcctaccactgtctttgtcttttttatgaattgaggaaaggcactccttccatttgggtacaggca

SEQ ID NO: 206919 - DNA, 201 bp, Homo sapiens
ctcctgccacccatcttttggtgccctactaagtgacaaaattctgataggggcagcacccagctgactccatgtagcagatatgatacttttgcttttaygatgccatctgcagagaaataaatcatcataaagttgactgagtgtgtcctatgttcatctgcttgaacaagttcgatgtaattgactgacaataataaa

SEQ ID NO: 206920 - DNA, 201 bp, Homo sapiens
tcactatcaattaatgaatacccattgtggtttttttctcaatcacccgagaggaagcatctatccttgtgtcccgaagggagttcctcctaggtctggtmggacctttgtatggtaattaagatttaaatcccctgttaggaaagctgctaggttaagggaattttcagtggttagtgttaaatcaccgttttctaatag

SEQ ID NO: 206921 - DNA, 201 bp, Homo sapiens
agtctcctttagcagtgagtatgctgtttacatcatgagatgtccacacagtaagatctcttccctgtattattttaactgctttacatactaagactgcwactgccgccactacccgtaaacaatgatgccaaccctttgccactacattaattttcttacttaggtatgccatggtttgcaagctggtcccttgaacct

SEQ ID NO: 206922 - DNA, 201 bp, Homo sapiens
gggattgcagcaggtggagcttgcagtgagccgagattgcaccactgcagtctggccttggcgaaagagcgagactccatctcaaaaaaaaaaaaaaaaaagatacagggattgaaatgtatggcctgcagtgcagggggttatttttttgacacacttcacaggccctgactatctgcttgttagttttgaaaaagcgtg

SEQ ID NO: 206923 - DNA, 201 bp, Homo sapiens
ggcggaggttgtggtgagccaagattgctccattgcactccagcctgggcaacaagagcaaaactctgtctcaaacaaaacaaaacaaaacaaaacaaaacaaaaacaatatgaaagcaaccaatttcctttaaaagtatttttaaaactttcaacaattgtatgggctttttgggtacatttctctttagagattctatt

SEQ ID NO: 206924 - DNA, 201 bp, Homo sapiens
actaaaactaaaatatttagggataattgatcagaagcaacatgatatttctctttctaaattttttatatttttctctaaattgttttatagtctttttyatgtaatatatacacacacgtatgtgattttccctatatattttgtattttatgtctggcttattttacattcttttttttttttttttttttgagatgg

SEQ ID NO: 206925 - DNA, 201 bp, Homo sapiens
ttaaatgacattgaattaagaccagacatatgtgtcaaagtaataaatatcaataggtttaattcacatattgaaagataaagtcatcagattgtactacraagcaaagacactcaattaaaataaataactcagaaaaaaattgaataaaaggatgagcaaaagtataaatagaaaatgtaaaataaagcaagatgcaat

SEQ ID NO: 206926 - DNA, 201 bp, Homo sapiens
gaaatcaatagtgtctcccaacagcaatcagccagtgaggataattccattacttatttatgggcaaccatcaaaatgccagacaaaaacttgcagaaaakgtagcagtggcttgtaggaaagcccagaaataattctggagagttcttttaaattcttagaaactatgagtaaagaaattgaattagacagtatttagta

SEQ ID NO: 206927 - DNA, 201 bp, Homo sapiens
caaaaaaaaagcaaatcatctcatgttgaaagactttttaaaaaagctttagaaatagaaaatatgacattaaatgacattgaattaagaccagacatatktgtcaaagtaataaatatcaataggtttaattcacatattgaaagataaagtcatcagattgtactacgaagcaaagacactcaattaaaataaataact

SEQ ID NO: 206928 - DNA, 201 bp, Homo sapiens
aatagcaacttttgaattaactatctagaaaagctcaaatatatagcatcaccccttaagtcagtgaagctatcttttcaggaaccagagatagtataacwgttttggaaaatacaaaaacagataaataagtccatctgtttctttgataatagaaaaataagtacaattaagtggaaactgtgagccaagtgtcttttt

SEQ ID NO: 206929 - DNA, 201 bp, Homo sapiens
agctgctaaatctataattgttcaaggaagagaactaatagaatgaagaaaaagaaaaatttaaaaccttaaatatcaaaataagtactaaataaaaaatragtaaattactcaaaaaaaaagcaaatcatctcatgttgaaagactttttaaaaaagctttagaaatagaaaatatgacattaaatgacattgaattaag

SEQ ID NO: 206930 - DNA, 201 bp, Homo sapiens
aggtttctttactgctatatgtttggctcttaggaagtgcctgagatacaagaagtttccaatgaatatttgtggtatgaatgaaaaaatgtggtgtttgmaaagagctttgagtaaaaaatctaagtacaatataaatgtaagaatgttgttaagaatgagaaagggaaggcatgaatcttagcctatattttcaaaggc

SEQ ID NO: 206931 - DNA, 201 bp, Homo sapiens
ttcaaattattgacaaaactatcaagtgataacagattaggtagaaggaagaggaaagctgctaaatctataattgttcaaggaagagaactaatagaatraagaaaaagaaaaatttaaaaccttaaatatcaaaataagtactaaataaaaaatgagtaaattactcaaaaaaaaagcaaatcatctcatgttgaaaga

SEQ ID NO: 206932 - DNA, 201 bp, Homo sapiens
tgtaatattcccttttcagtttgtgtttttatttatttgggtcttcttttttcttagtctggctaaaagtttgccaattttgtttatctttaaaaaaaccmcagcatttagttttgttgatcttttatatttgttttattctcaattttatttatttctattctgatctttattctatccttccttctactaattttgagt

SEQ ID NO: 206933 - DNA, 201 bp, Homo sapiens
tagtcatcttgtaactagtcatactaaacatgtttgaatatacaattcattcaaattaagctacagaacatcttcatagtcttacctacagataacatttrcatgtaataaatattaaatatatatttttaataaatggacaacagtattaagaacagaaaagccgttgttcacaaaaagacataaggcatacctagttat

SEQ ID NO: 206934 - DNA, 201 bp, Homo sapiens
ggtgcaatctcagctcactgcaatctccgcctcctgggttcaagtgattcccctgcctcagcctccttagctgggattacaggcatgcaccatcacgcccrgctaattttgtatttttagtagagacatggtttcaccatgttggccaggctggtttcaaactcctgacctcaggtgatccacctgacttggcctcccaaa

SEQ ID NO: 206935 - DNA, 201 bp, Homo sapiens
taaacatattaattgagccctgtaattttcctagtttgctgtcttcagagaaatttcaggccatggcacagaaaggaggaaacttggtataacatggagarctcactgaattgtggagacagagctaagaatctgaaaagaacgtaacagcaagatttcacagaacagagtgtctgaaaagtgagaatagcttcccagaca

SEQ ID NO: 206936 - DNA, 201 bp, Homo sapiens
tgcatgcctgtaatcccagctactcgggaggctgaggcaggagaatggcttgaacccaggaaatggaggttgcagtgagccaagatcatgccactgcactycagcctggatgacatagcatgactccatctccaaaaaacaaaaaaaaaaaaaaagaaagaaagaaaaagggactatggagtacaaaggcccatgtgtcat

SEQ ID NO: 206937 - DNA, 201 bp, Homo sapiens
atggaaatatacaatttaaagtttattattctataggtgaaactgataacatcagttgaagacagactgtgataagttatagatatgagctataaatcctraagtaactataaaataacgaaacaaaaaattatagccaataaattaccaaaggggataaagcagaatcttaaaaacaattatttcccaaaaagtgagaaa

SEQ ID NO: 206938 - DNA, 201 bp, Homo sapiens
caaagaccaaaagtagataaaaccacaaagatggggaaaaaacagaacagaaaaactggaaactctaaaacgcagagcgtctctcctcctccaaaggaackcagttcttcaccagcaacggaacaaagctggatggagaatgactttgacgagctgagagaagaaggcttcagacgatcaaattactctgagctatgggag

SEQ ID NO: 206939 - DNA, 201 bp, Homo sapiens
gaaactgataacatcagttgaagacagactgtgataagttatagatatgagctataaatcctgaagtaactataaaataacgaaacaaaaaattatagccrataaattaccaaaggggataaagcagaatcttaaaaacaattatttcccaaaaagtgagaaatggaaaaatacaggataaagaacacaagggacaaagtg

SEQ ID NO: 206940 - DNA, 201 bp, Homo sapiens
gatgttcatcagagatatgggcctgaaattttggtgtattttttgttgttgtatctcttctaggttttggtatccggataatgctggcttcataaaatcakttagggaggtgtccctccttttcaactgtttggaagagtttcagaagaaatagtaccagctcctctttgtacctctgataaaattgagctgtaaatccgt

SEQ ID NO: 206941 - DNA, 201 bp, Homo sapiens
acatatgtccaaataaatatagtacctggcagaatgtattattatcgtaagtaaagtacataagtgtgctcttaattgttattggtgttcagaggaagacrggctacttttgcctgagacatcctaacaggcctcttgaaaaaagcattggagcattaggtctttgaaggttggctagaatccaaacaagttgaaggggag

SEQ ID NO: 206942 - DNA, 201 bp, Homo sapiens
taacagaggtagaaggattgtttgaccttgggaggcagagtttgcagtgagctgtgatcatgcctctgtactccaacctgagtgacaaaataagacaaaaracaatgaagtgaagagcaatgaaacaaagtatgcctgtacactaaaaatcagtctgttgtagctatttgatgttaagaacactaaattctttagtgcctt

SEQ ID NO: 206943 - DNA, 201 bp, Homo sapiens
gggcaggatttatggtagcagcagttaaaatagaaatcttaaaggcattcccagaataagggttacccagaagtcaacatggcagattaacacccaatatrgagttgctttagcctccacaataatgtagggaaataaatataatgaagatggcagtattttttaaaccatatttcaaagaaatcttctctttgaaacatg

SEQ ID NO: 206944 - DNA, 201 bp, Homo sapiens
cttttataaaaggtgtattttaatttgatgttagaaacaacgaactttaaaaatgtaattggccttaatatctttttagattcctttgaagatatacttascacaaaaatatgctccttgggaatttgacaattgagctgataataggatatatcatttttagtttacaggcaaaagcaaatgcttcattattttgttgtt

SEQ ID NO: 206945 - DNA, 201 bp, Homo sapiens
attataattaaaacagaaactttgtaggattcctctatacaaggtcaatataaaaataaattgcatctttatataccagccatcaagaattagaaacttamattttaagaattatactgtttaccatacaattcaagatggacaagtctcctgcaaataaaactataaaatattagggattgaaattgaagaaaagatgaa

SEQ ID NO: 206946 - DNA, 201 bp, Homo sapiens
aaaacagtgatgtacaatgctagcaaagcactgacctttttggaaagacaattttctaatggcttcagcagagtgagttagtggatcagtatacttttgtrtattaatataggttaaaaaagacttggagtattaaatttttaaaaagaggtctagtaccttaaatgagttaatgtgtttaaagtacttcttacatcttac

SEQ ID NO: 206947 - DNA, 201 bp, Homo sapiens
ttactcatatgttcacgattatggcattaaaaatttatccttgaacttcgtcccatttaaagattcattcttcgtttcccagaatacctgtactctaatcygttcacatttctgattttctcctttccttctaacatttaggagccctcttgagaatagagatcctgagagaggattgaaactcctcatttttaaaacttt

SEQ ID NO: 206948 - DNA, 201 bp, Homo sapiens
atttttccaataataaataaatctaacagacaatgaattttcatatatgcaaatgtgttttattcattataatggttacatgaatgccactgtttgaatgwaccatagtaaatatagcctgtctgtcacagataggtatttagctttttccagatctttttgatgtcttctgcactgcaatggatattcttaggcattcac

SEQ ID NO: 206949 - DNA, 201 bp, Homo sapiens
taaatgttggcccattattatcaaaatattatttattagagattaaaaatatttcttgtgatttactaaaaaaagtcacattactttacttgatgatgagwtgtttattcttacttgataagaaatgtaatggtttcagacacaaacacaaataaaagtacaatgtaagtctgggcacagtggctcactcctgctatctca

SEQ ID NO: 206950 - DNA, 201 bp, Homo sapiens
ttcttgaaattacttggttaagtgatatttttaattttgatagatattgccatagttgtacattaaggtggaagcaatttaccttctcataagtcaaataygattttagcagttgtgtttcagaatgataattctatgtgaaatctggaagatggactatagcaagaaacaatgacatgtgagatactaatttaaacgcta

SEQ ID NO: 206951 - DNA, 201 bp, Homo sapiens
attttcttgcacatatttggagatataaactgtctttgtgttttcccctaagggaatgcacacaaatcaggcaaggatggggagagtggaagatagttgtsaagggactcaaccttccaatctcatagtctcattatttaaaagaccaaggcaataaagtattgcttgtgtaataaaaatttgaaaaatgaaaataaaagt

SEQ ID NO: 206952 - DNA, 201 bp, Homo sapiens
ctgctatctcaacacttcaggaaaccaaggcaggaggaacacttgagcccaggagtctgagaacagcctgggcaatatagtgagacctcgtctctataaartaaataataaataaataaattaattaattttaaaagtacattttatattttagttttggtgttagagaaactttatttctctatattattgctgtctttt

SEQ ID NO: 206953 - DNA, 201 bp, Homo sapiens
gttggagaatggtagggcagacagctaggttttttgaaaatttttattcaacatttttgctcagacctgtattccacttgagcatctcaatttggttcacytcttcccaagatgatataactagctaattatgacataaaaagaatttggaagatggaaaaagcagtgatccctggaagagcatgtgaaagccttaagcag

SEQ ID NO: 206954 - DNA, 201 bp, Homo sapiens
ggaaaaagcagtgatccctggaagagcatgtgaaagccttaagcagacatcttactagcaaagatgtctgtggattatgggtataccagacacttttattktaattaagattcaaacttcatgctaatatccctgaaatctaaagctagcataggcaaggttgaaagggtggtagagcaaataaataaaatctaaactaaa

SEQ ID NO: 206955 - DNA, 201 bp, Homo sapiens
aaataataaataaataaattaattaattttaaaagtacattttatattttagttttggtgttagagaaactttatttctctatattattgctgtcttttaytctagcccttgtaattttagggcaagtaattatgtcaaatggaataaaaccctaatatcttactaaaatggatcaaaatcctaatatctacaaaagattc

SEQ ID NO: 206956 - DNA, 201 bp, Homo sapiens
aaggttgaaagggtggtagagcaaataaataaaatctaaactaaacaaacctgttcttttaaagcagtcaggaaattttctgccttccaattgttagagaygattctactttcagagaggctgttttgttgttctaggaacaccacacactgaaaatgtgctttttaattttgaggatgtagatcagtggtgtgaccccaa

SEQ ID NO: 206957 - DNA, 201 bp, Homo sapiens
ttgttttgaagtcatgtctctttgtatgtaagtgtttgtaaaaagtgtttttagtatttatttgaaaaaaaagggcaacattcaacagtcacaatttgtgyttaaaatctttaaatagcacttctatttcattcagcaatcaagccatgtatttaaaaatgtgacaattgaattttattctgaacattaataagttatggg

SEQ ID NO: 206958 - DNA, 201 bp, Homo sapiens
gagacgattctactttcagagaggctgttttgttgttctaggaacaccacacactgaaaatgtgctttttaattttgaggatgtagatcagtggtgtgacyccaaggaatgcaattgctttgtaagataatataaagaggctggctttgttgcaagcagagttgcatttccgcagattgtacttcccttagaggaattttt

SEQ ID NO: 206959 - DNA, 201 bp, Homo sapiens
aatagagacctctaaggacttcaagaaagacctgaaagctcaattaactcgagcttggggaaaaaaaaaataaactgtacagtggaaataaattgggcttrgctaaacattaaactattagattagattgttgatttctcatgctattattattcaaggcaagtagtgtgtttttcaagagaggggctgatggaagactat

SEQ ID NO: 206960 - DNA, 201 bp, Homo sapiens
accacaactttgatgagctttcattcttagctatgtcttaggattctcctgaaatatgaagggtaggaagttgtattccctagttcaagggaaaaaaaaaatcaatttaaattcaatggtattaaaaacaatgaatatttacttcaaaaaattattataaagcaaaatatggtacaaactagtttttccttctaaactcaa

SEQ ID NO: 206961 - DNA, 201 bp, Homo sapiens
ccatccatgctctagagaaatgtctgctcaaatattttgactacttttttttaattggattttttgttttttaattgttgagttttgttttttggggattwtggagctttttgtttttttgttttttgtttttttaaagagacaaagtcttgtttcattagccaggctggagtgaagtggtacaatcatagctcactgcat

SEQ ID NO: 206962 - DNA, 201 bp, Homo sapiens
ttttgatagtctgataaatctctaactttcataagaaaacaattaagagtattccttagttaaaagtttaattttgtagacattgagacttttttttttttagatggggtctcactctgtcacccaggctggagtgtagtggtgcaattttgactcagagcaacctccaccccctgaactcaaagaatcctccctcctcag

SEQ ID NO: 206963 - DNA, 201 bp, Homo sapiens
cattgtcctaaagagcacagctgaaaaataaacaagcaaaagaaaggaggaagagagagagagaaggaaagaaaagaaagaagggaggaaaaaaggaagakataagaaagaaataaaaagaaaagcaagagaaatgcaaggcatacatgtggaaagatatctttctaaaatttttaaaataataaatattcctgtttgaaa

SEQ ID NO: 206964 - DNA, 201 bp, Homo sapiens
tatgataattaatataattctagtatttctatcaatatagagaaattaattcttcaattccttggctgctatgaaaaagtcaggaggttctgtagaaaaakccctacacttaattcaaattgatcatctttttagtttttttattgataagttgtgaaatttctgcatatataaagataatatttagagaatcaacttaga

SEQ ID NO: 206965 - DNA, 201 bp, Homo sapiens
aaaactcattattgatctattcagagattcaacttctacctggttcagtcttgggacagtgcatgtgtccaggaatttatccatttcttctagattgtctrgtttatttgcatagaggtgtttattgtattctctgatgattgtttgtatttctgtggggtcagtggtgatacaccctttatcatttgattgattgtgtcc

SEQ ID NO: 206966 - DNA, 201 bp, Homo sapiens
aatttataacagtgtatatacttgaactgattaaatatgcacatgatgtgggattaaatgctaaacaagaaaactattgactctttcatattactaggatrcacttaagcagcagttcagaaactttttagaaaaggaaaccttttacactcttaaaaaccactgagggtcttaggagatttgacattggctctatatctg

SEQ ID NO: 206967 - DNA, 201 bp, Homo sapiens
ccaggctagagtgcagtggtgcaatcatagctcactgcaacctcgagctcctgggttcaagcaatcttcctgtgtcagtctatcaagtagccaggactacwggtatgtgccagcatgcccagctaattttattttatatcttgtagagatggagtctcactgtgtttcccaggctagtcttgaactcctaacctcaagtga

SEQ ID NO: 206968 - DNA, 201 bp, Homo sapiens
agcaagtccttctcatagagatggcagagagcaagagggagcaagcttagtcactcaagtacttttctgagactatttttattacatgtgctaacattctkttggtctaaacaagtcacatggctgatcccagtggctgaaacttacaccttacccacagtggaggaactagaacttacatggcaaataacatgggcgcaa

SEQ ID NO: 206969 - DNA, 201 bp, Homo sapiens
tagagtgcagtggtgcaatcatagctcactgcaacctcgagctcctgggttcaagcaatcttcctgtgtcagtctatcaagtagccaggactacaggtatrtgccagcatgcccagctaattttattttatatcttgtagagatggagtctcactgtgtttcccaggctagtcttgaactcctaacctcaagtgatctgtc

SEQ ID NO: 206970 - DNA, 201 bp, Homo sapiens
agaccatatagggtaacttcctgatgttttcatggcatttgtaaactgtcctagcactggtgggagtgtcttttagcatgctaatgtattagcttataatkagcttataatgctaataattagcttataatgagcttataatgctaataattagcttataatgagcagtgaggatgaccagaggtcactcttgtcatcatc

SEQ ID NO: 206971 - DNA, 201 bp, Homo sapiens
agagggatgttgggagaaccttacaaagatgaaatgtaagctaactggagaaatcccctaactttcagtcagactgaaagggaacaggcagtaactgtgggtagccctcttgggcagggtgattttccacatgtgccagtcaggggccagaacattaagatccttatgttccaactaaggaattttgattttattttaaag

SEQ ID NO: 206972 - DNA, 201 bp, Homo sapiens
aataagccagacaaaaacataggcttactgtataattccacttacatagtgcaaaatgatggatttacagtgacagaaaagcagacagtggagagaacaakgtacagaggggcaggagggaagcattagacgtgtgcattagaaaacttttagggatgatggatttgtttattgcttggttatgattgtaacggtttcaca

SEQ ID NO: 206973 - DNA, 201 bp, Homo sapiens
ggcttactgtataattccacttacatagtgcaaaatgatggatttacagtgacagaaaagcagacagtggagagaacaaggtacagaggggcaggagggargcattagacgtgtgcattagaaaacttttagggatgatggatttgtttattgcttggttatgattgtaacggtttcacatgtgtatatgtaggtcaattt

SEQ ID NO: 206974 - DNA, 201 bp, Homo sapiens
aagaatgtttatcatagctttatttagaatgctaaaagctggaaacaaagtaaaatgtgaaagagtaaacaaatagtagtcatttatataatagcagactrttcagcaatataaatcaaaatgtgatcaaggcacacaacagcatggatgaatctcacaggaattatattgggcaaaagacactagatattcaaaatttca

SEQ ID NO: 206975 - DNA, 201 bp, Homo sapiens
gaaagagacattctgtgcatttctctgattaattttcaaaggatatactcacaaaacaagaaatttctgatttaaagaatatgggcatatttaaggcttartattgtaatcgtcaaagtattctaagactgaatgtgctgatttacaaataactggtatcatgcaagagtgccagtgttttgccatatcgtctcccatata

SEQ ID NO: 206976 - DNA, 201 bp, Homo sapiens
catcagactgaaaatcctcagtgtatttgaaggagggtattgtctcaaaaatccagagctcaaagtgaagaagaaaggcaaaatttggaatttagctctargacaaactcatcagttcaggggtcagagatttatatagttaaaggacaagtgtgtgtttacctgagtttaaagagcaaagttgcctctggaaagaagccc

SEQ ID NO: 206977 - DNA, 201 bp, Homo sapiens
cagttatgaactttttgtatacctgaaccacttttatatttatacacacattgtttttactaaattcaaataacttttcatatattattgcaagttttgaytgatggtttcaaatgaacaattaaaaaaacatgaaatgattctatttttatcaatatttaggccaaatttgctttgtgtatctctagctccttttacaca

SEQ ID NO: 206978 - DNA, 201 bp, Homo sapiens
tggaattgagagcctattttaaacttttgactaaaaagtttacccattaaatgtcatagattcaaccatcagactgaaaatcctcagtgtatttgaaggarggtattgtctcaaaaatccagagctcaaagtgaagaagaaaggcaaaatttggaatttagctctaggacaaactcatcagttcaggggtcagagatttat

SEQ ID NO: 206979 - DNA, 201 bp, Homo sapiens
ttttccttttctaaaaaaagcaaacaaacaaacaaccccccccccccccgccacttttttttttaattctgttttgaggcaagaggcttgggttgttgacrtggatatcaatgtaagtattcagttgggtattctatagtttttaatactgcccagctatttaggataactattttctatgtatctattttctttaatgac

SEQ ID NO: 206980 - DNA, 201 bp, Homo sapiens
tgggtaaaccttattagattgttttaagaataaagagttttggattgccaagttatcaattttacttacaattaatgacattcttttctttatataaagtrtacttcacttaataattcagatattttaataacaatcccattaatattgggatgccaatttttattgatgcccattttgtaaacaaattcctggtttctt

SEQ ID NO: 206981 - DNA, 201 bp, Homo sapiens
aagaggcttgggttgttgacatggatatcaatgtaagtattcagttgggtattctatagtttttaatactgcccagctatttaggataactattttctatktatctattttctttaatgacataataacactaaaagcacagcttattttattattttgtcaatttaatggaaaatgacacttccttttaattacaagaga

SEQ ID NO: 206982 - DNA, 201 bp, Homo sapiens
aaagggaggccaataaaaaatcatattttaaaatgttatgcaagtaatcagcagtccctgcttccttagtatacacgtatgtctcattaaccttcctagayatgagacagcaagatacagaagaaagaccatgggtttccatcacacaatctgaggttcaaatcttggctaggtcatttaattgttacacaatcttgagca

SEQ ID NO: 206983 - DNA, 201 bp, Homo sapiens
ctaaggacttcaagaaagacctgaaagctcaattaactcgagcttggggaaaaaaaaaataaactgtacagtggaaataaattgggcttggctaaacattraactattagattagattgttgatttctcatgctattattattcaaggcaagtagtgtgtttttcaagagaggggctgatggaagactattttgtcccaat

SEQ ID NO: 206984 - DNA, 201 bp, Homo sapiens
ccatcaagaaaaaaaaagtatttccaatactcagaatcctcaatcgtgtcttcttccaaatactacctgttaccttctgtctctgtccacttgggctgctrtaacaaaataccttaaactgggtaatttaaaaacaacataaatatattgctcacagttctggaggctgggaagtgcaagatcaagatgccagcagacttg

SEQ ID NO: 206985 - DNA, 201 bp, Homo sapiens
atggaagactattttgtcccaataggattgttctttagaataagttgggcaagatcatatgtgtgtggttggaagtgaaattgtccttaaacagaatagaratgtttatgaaaatcattcagggaagaggtcaaacttggaacagaaactgaattggtgagtctaagatagggaggaaagagaaaatctgtctttccattg

SEQ ID NO: 206986 - DNA, 201 bp, Homo sapiens
ataattcccctaacttctaaccacatagtcagctttgtccattttgaactttatataaatgcattattttgtctagttttgaactttatatgaaggtatayacaggttgaatattccttacctgaaatacttgggaccagaagtattttggatatttttggattttggaatatttgcattatacttactgcttgaacacac

SEQ ID NO: 206987 - DNA, 201 bp, Homo sapiens
attccttacctgaaatacttgggaccagaagtattttggatatttttggattttggaatatttgcattatacttactgcttgaacacaccaaatctggaamtctcaagtgctccaatgaaatttttattctttgagcattctgtcagtgttcaaaaagttttggattttggagcctttcagatttctgaatttgggatttt

SEQ ID NO: 206988 - DNA, 201 bp, Homo sapiens
aatatcattgactattgagtctctaaatcaatcattatctgaagacagtgctatctcaaatcttatggttatgtaaatcaaacaatttattttactatgtragacttttatttttttgacactgggtctcacactgttgccctggttagggagcagtggctcaattatagctcactgaagcctcaaactgttgtatttaag

SEQ ID NO: 206989 - DNA, 201 bp, Homo sapiens
tttttttttctatttcagtgtatttttacatagtatgaaatagatcacaggttttttccgttttatttagggtagatatttggattttattttcatttgaraactactaatataataatacatgctactctaaatattcacataaattttggggggtatacattcatatacatttctgttaagtatatacctagaattaga

SEQ ID NO: 206990 - DNA, 201 bp, Homo sapiens
gctatctcaaatcttatggttatgtaaatcaaacaatttattttactatgtaagacttttatttttttgacactgggtctcacactgttgccctggttagrgagcagtggctcaattatagctcactgaagcctcaaactgttgtatttaagcaatcctcctgcctcagtctccagagcagctgggactacagcaaacacc

SEQ ID NO: 206991 - DNA, 201 bp, Homo sapiens
tcctatatgtaccttgggatcaatatgctccaaagagatttgtgtcatccacaagatgtctctactgtatcatcatgtcaccatctttctggaccagtacrctcagcttttctgttcttgacctttttaacctatctcttattaatttcatcctttcagggtctgtctttcttttaatatttctgaatcaaagatgaatgt

SEQ ID NO: 206992 - DNA, 201 bp, Homo sapiens
ttgcaagcatctcataaatcctcctcattatatctctctaaaatagtcaggttataggtattattattcatatttaacataagacaagagcaatttaaaamtcttataattccatttatctaaaaagataaaactattcaccccagaaagactaaatataacttggcagtgagacatattggtcctgagttgctttaaagt

SEQ ID NO: 206993 - DNA, 201 bp, Homo sapiens
ttccatttttcatgcctcttgactaaccaaggaaggcagatttaagtctttgttaaactgaaaaatgaaagtgttccaatgtgaaatgtacacatcagttmtaatttattctaccctccataaaagtggaaaaggaaggctatgtctcatggcaataaaaatggaattccaaaagatctttgggcagaaaaaaaattccca

SEQ ID NO: 206994 - DNA, 201 bp, Homo sapiens
ctctgtctttaaagagatcagaatcagatgtgacatagaaatatgtaaagagaatattgctttagactgtgttaagtgcttgacaaagggagacaatagawtcactaaggtgtcttagaaaaaacaccctcgacatgttctaacaccacccaaagtatacttatgtatgctccaattcgtttagctttaaagttgcccaaa

SEQ ID NO: 206995 - DNA, 201 bp, Homo sapiens
ttcatttgggttgttattaagaagtacgtggggctgggtaatttataagaaaaaatgatttaattggctcacagtctgcaggctgtacaagaaggagaccrgcatctgcttcacttctgggaggcctcagggaacttttattcatggtggaaggtgaagggggagcagacacttcacatggcaaaagcaggagcaagaaag

SEQ ID NO: 206996 - DNA, 201 bp, Homo sapiens
caccatgttgaccaggctggtcccgaactcctgaccttgggtgatccacccactttggcctcccaaagtgctaggattacaggcataagccaccccacacytggccttttttccaaatttttaactttaatttttgtattttgttttttatttttattttttatttttgagacagagtcttgctctgtcacacaggctgga

SEQ ID NO: 206997 - DNA, 201 bp, Homo sapiens
tccttcacccggatacctgcaatgacaacattttacatagccaaagtataacaatcaaaaccaggaaattgacattggcttaatactattaactaaattayagacttcagacatatttcactaggtttttatggacacactttatgtgcgtgtgtgtgtgtgtgtatagttctatacgattgtttcacatgtgtagatttg

SEQ ID NO: 206998 - DNA, 201 bp, Homo sapiens
accacaaaaatcaggatatagtaatattctttcattccaaacaaaactgcccttgctacaatcttctagtcccagccttcccacagccttaacccttgacygccactgatgtgttccccaacactataattttattatttccagaatagtatacaagtggaatcataccaaatgcaagcttttgaaattcccttttacact

SEQ ID NO: 206999 - DNA, 201 bp, Homo sapiens
gtttacacattcacccatagaacatttaacagttaacttttgatcctattagagtgatatacattattaatatctatttttaaattatacaatatgtgctytcccagccagcaaggtgactagatctattaggtgattaataaatatttattggttgaatcaatttccaggaaaaaatatagaaaacatataattatgtag

SEQ ID NO: 207000 - DNA, 201 bp, Homo sapiens
gtattgtcttgtctatatatatatatgaatttgccatttatagtcaattatgtagactacagagacagaggccatatatatatatatatatatatagagakagagagagagagagagagagactgactacagagatgaggtctctctctacatatatatgtatgaatttgccatacatagccaattatgtagactatagag

SEQ ID NO: 207001 - DNA, 201 bp, Homo sapiens
cagtattgtcttgtctatatatatatatgaatttgccatttatagtcaattatgtagactacagagacagaggccatatatatatatatatatatatagakagagagagagagagagagagagactgactacagagatgaggtctctctctacatatatatgtatgaatttgccatacatagccaattatgtagactatag

SEQ ID NO: 207002 - DNA, 201 bp, Homo sapiens
cacagtattgtcttgtctatatatatatatgaatttgccatttatagtcaattatgtagactacagagacagaggccatatatatatatatatatatatakagagagagagagagagagagagagactgactacagagatgaggtctctctctacatatatatgtatgaatttgccatacatagccaattatgtagactat

SEQ ID NO: 207003 - DNA, 201 bp, Homo sapiens
ccacagtattgtcttgtctatatatatatatgaatttgccatttatagtcaattatgtagactacagagacagaggccatatatatatatatatatatatagagagagagagagagagagagagagactgactacagagatgaggtctctctctacatatatatgtatgaatttgccatacatagccaattatgtagacta

SEQ ID NO: 207004 - DNA, 201 bp, Homo sapiens
tccacagtattgtcttgtctatatatatatatgaatttgccatttatagtcaattatgtagactacagagacagaggccatatatatatatatatatatatagagagagagagagagagagagagagactgactacagagatgaggtctctctctacatatatatgtatgaatttgccatacatagccaattatgtagact

SEQ ID NO: 207005 - DNA, 201 bp, Homo sapiens
cctcctcttatctctcatctctggatttgacaatcttgccaatgtctactttaagcaagcagagatgaaacagtgaatctagtctctgaaataatgcttcrtaaaaatgtgaatgataatagctacagttgatggcctactgtgtttctggtacttgacatgtatttccaattttcctagcaaccctaacagtaagttttc

SEQ ID NO: 207006 - DNA, 201 bp, Homo sapiens
catgtttacccactgagcccaccattgaagccaagtcatcgctggtgaatatatctatatgaataccacaacattatgtgtgtgtgtgtgtgtgtgtgtgkattcatgcttatgatattcttacaatgaagtgtaaaataaagtatttcttgcaggcccaactcgtacattgcttgactgactcttgtagaaacctgcaaa

SEQ ID NO: 207007 - DNA, 201 bp, Homo sapiens
gttgacatggatatcaatgtaagtattcagttgggtattctatagtttttaatactgcccagctatttaggataactattttctatgtatctattttcttwaatgacataataacactaaaagcacagcttattttattattttgtcaatttaatggaaaatgacacttccttttaattacaagagaaattgaacatcttt

SEQ ID NO: 207008 - DNA, 201 bp, Homo sapiens
tgagacttgctttatctccaagcatatggtcaatcatagagtatgttctgttcacagacgagaagaatgtataatctgtggttgatgggtggaatgttttktagatgtctattaggtcccattggctaagtgttgaattgaagtctaaaatgtctttgttagttttctgacttgatgatctgtctaatgctctctttgggg

SEQ ID NO: 207009 - DNA, 201 bp, Homo sapiens
ccatgtttacccactgagcccaccattgaagccaagtcatcgctggtgaatatatctatatgaataccacaacattatgtgtgtgtgtgtgtgtgtgtgtgtattcatgcttatgatattcttacaatgaagtgtaaaataaagtatttcttgcaggcccaactcgtacattgcttgactgactcttgtagaaacctgcaa

SEQ ID NO: 207010 - DNA, 201 bp, Homo sapiens
aattgaacatctttttctacatttattaattgtatttcaacatttatgaactttttgtatacctcaaccacttttctatgtttacacacattgtttttacyaaattcaaataacttttcatatatcattgcaggttttgattaatagtttcaaattaacaattaaccatttttagtattgcccagctatttaggttaacta

SEQ ID NO: 207011 - DNA, 201 bp, Homo sapiens
tgggtgtgattgtgtgtgcctgtagtcccagctactcaggaggctgaggtgggagtatcacttgagctcaggaggtggaggctgcaatgaaccaagatcayaccattgcactccagcctgctggacagagtgagactctgtctctaaataaataaataaataaataaatatgctctgtcattatgatacagttcaaaagat

SEQ ID NO: 207012 - DNA, 201 bp, Homo sapiens
taataggtgactccttggctttttgctgtggctgttgtcactacatgcatgtctgcctcaccttctggcttcctctccaactgccgccccccaaaccatcrtttggaccattgcagctacaaacctgaaggcaaccgggagtggagtgatgggcatgagacaaatacaaccttcactttaccattttgacactggagtgaa

SEQ ID NO: 207013 - DNA, 201 bp, Homo sapiens
gcactttggaagcctgaagcaagtggattgcgtgagcctaggagttcgagaccagcctgagcaacatgttgaaacatcgcctatataaaaaattaaaatayagctgggtgtgattgtgtgtgcctgtagtcccagctactcaggaggctgaggtgggagtatcacttgagctcaggaggtggaggctgcaatgaaccaaga

SEQ ID NO: 207014 - DNA, 201 bp, Homo sapiens
gtatcctgaattctcatttcttgtcccagattctgtctttcctctaagtcatcctcaacaagaactcatttctgcagtataacaatacagtttaatgtagwttaacccaatctaaatctcttaaagaaaataaatatttctaccatctgtttcctcctgtcttctcaaccaggccaaaaacagcaacaatgtcagcagaga

SEQ ID NO: 207015 - DNA, 201 bp, Homo sapiens
accttttgaaaacagtattgatttccaggaacaaatagcaaagcatacatcatgtaaacaatgctgtccttatgcaataatcaatagtcaacaagagtagmctgccgcccttcctcacctgctacctgccctattttctatagcttcatccaccttctagcattcctatatatgtttcttatttactgcttttgctattta

SEQ ID NO: 207016 - DNA, 201 bp, Homo sapiens
agaccagcctgggcaacatagggagaatgcacctttaaaaaaataataaaaataaaaattagccaggcatggtggtgcatgcctacagtcccaagtattcrggaggctgaggcaggagaatccctggagcccaggagtttgaggctgcagtgagctatgatcctgcccagtctgggcaacagagtgagaccctgttaaata

SEQ ID NO: 207017 - DNA, 201 bp, Homo sapiens
gagtttttgaaaactcacatattaggcaatagagtgtattctggaattgagagcctattttaaacttttgactaaaaagtttacccattaaatgtcatagwttcaaccatcagactgaaaatcctcagtgtatttgaaggagggtattgtctcaaaaatccagagctcaaagtgaagaagaaaggcaaaatttggaattta

SEQ ID NO: 207018 - DNA, 201 bp, Homo sapiens
aggaaaactgtcatcattaattatactgaggactgcaatcggggttcctgagtttccagtggcagactcacaaagtgggtaatacaatttgtggatcaaaygcaattaagtgtaatatatagttaatgtctttctatttgcttctttaattgcaagatcaactctgagtctacatgatggtaactagtactcaactaattc

SEQ ID NO: 207019 - DNA, 201 bp, Homo sapiens
ttgcagacaaacagagtttacatttttagaaaatttttggctgagcaccgtgcctcacacctagaatcccagcactttgggaggccaaggcgggcagattstttgagctcaggagttcaagaccagcctggagagcatggagaaaccccatctcggcaaaacatgcaaaaattagccaggtgtggtggcatgcacctgtag

SEQ ID NO: 207020 - DNA, 201 bp, Homo sapiens
cataaatcaatgatcaaaaatgcacatacctctcacaaatgctttttctcactagaataaatttaaaatattttgcaaaatgtaaggtagctttttgtagraatcccaagtttaccttctaaaagttacatttataaaacactaagagatttctgcgattcttagaaacattcactatttacttctctcctctcattcaca

SEQ ID NO: 207021 - DNA, 201 bp, Homo sapiens
ctccaaacatcactctacttaagagtgttctaattgcatgacttgtgaagtactttagcttgtgtctgagtaaaactatttcaaaagttaaaaaaaaaaaaaaagagtaaaccttgggccaggcacggtggctcacgcctgtaatcccagcacttgggaggctggagcagggggatcacgaggtcaggagtttgagaccag

SEQ ID NO: 207022 - DNA, 201 bp, Homo sapiens
tatgctccaattcgtttagctttaaagttgcccaaaaccacaaactgaataacctcaaggagagcattcagatagttcagagcattcattcccatagtcawccaaaaagtatctgagacaagtctcactcagtttagaagtctattattccaaggataagtacatgcccagaagaaataaaaacggaatcacagaaactgt

SEQ ID NO: 207023 - DNA, 201 bp, Homo sapiens
acattcccaccagaagtatgtaagtattcccttttctctactacctcactattgttttcaactttttaataatagccattctgactggtgtgagatggtgyctcattgtggttttgatttgcatttctctaatgattagtgataatggacatttttttcatatattcgttggctgcctacatgtcttcttttgagaagcat

SEQ ID NO: 207024 - DNA, 201 bp, Homo sapiens
ctcccttattggatttcttatcttcaaaattaatgtcacaggtgcgactagctggggctcgtcatgggtggtaaaggaatttaccacgacagtcataggtraagaaaggcagatttattagagaaggtatgaagataccttgcaagaaagcaatgggcattacaacagagaagaggctgtctgcagagaggcaaggggtgg

SEQ ID NO: 207025 - DNA, 201 bp, Homo sapiens
gttcctattcggccatcttggctcctccccctcatccccacataatagttctatttaagttatttgagataccttcaaactgctttccacagtggctgaastaatttacattcccaccagaagtatgtaagtattcccttttctctactacctcactattgttttcaactttttaataatagccattctgactggtgtgag

SEQ ID NO: 207026 - DNA, 201 bp, Homo sapiens
aaaaatatataatctttttcttggtcctttattttcttggtaatctgagacctctgtctctgtagtctacgtaattgtctctcttgagaatattgaaaacycacaagttttactttgctcctaaatgtcaagaaggcatagcctaaatgtcaataagcatcaaaagtctttctgaatgagatagtgccagcattcatcact

SEQ ID NO: 207027 - DNA, 201 bp, Homo sapiens
gtcagggtacagcttgcttttatacattttagggagacataatacatcagtaaatacataccagatttacattggtttaatctggaagggaaagacaactsgaagctgaaagcctggggaggagagggctgggcttccaggtcataggtagatttgaaaatatttttggtaactggttgaaagagttattatcaatagaaa

SEQ ID NO: 207028 - DNA, 201 bp, Homo sapiens
tcacgcagatgaagcctccaagtagcaggcttcagagggaatagaatgtaaatatttcttatcagacttatggtctgtgttgatgttaatgttggaaagcrtaatgaagtatgtccatcccctcttccatcatggcttgaactagcttctcaggttaactctggaatgcccttggccaagaggaggggtccattcagatgg

SEQ ID NO: 207029 - DNA, 201 bp, Homo sapiens
aaaaggcaaagaatgtcttagcatgatgacaattgctttgatctggtgggccttctgaaagggtcctgggaattatggatcatactttgtgaaccattgcrtcaaagagcaaaccataatttatggtacagaagtttgtcaaatgttttcttaaaaatatttgtacttattatttctaatcatgaagcaaacttaaagctt

SEQ ID NO: 207030 - DNA, 201 bp, Homo sapiens
aaaataaaaccaattacaatttacttgctttaaaaatatatttttattattattacaatattttaggacaaaataatttaaatgtatgaatttcaaagccrgatctcattaaaactgctttctaccagctggagcaaaattgccccgtaaaagtaatagccatttattctcaacctaataatactattttttatttgtttt

SEQ ID NO: 207031 - DNA, 201 bp, Homo sapiens
ttcctgagtgaggcaatgcctcgccctgctttggctcgcgcacggtgcgcgcacccactgacctgcgcccactgtctggcactccctagttagatgaaccyggtacctcagatggaaatgcagaaatcacccgtcttctgcatcgctcacactgggagctgtagaccggagctgttcctattcggccatcttggctcctcc

SEQ ID NO: 207032 - DNA, 201 bp, Homo sapiens
acattgtatgaagagatcgtcttttgcacatttgttcaggggaacactgacttatatatttcacttccatatgcttttccaggcaacagttgagaatgccrtagcccaaaacttatctataatttaaatcctgttttagttttctaatgatgccttctgaattactacttatcaagtccctatctagtaccagaataaggc

SEQ ID NO: 207033 - DNA, 201 bp, Homo sapiens
tacttaggaagaaaagtttaagtcttgctcttttactctccagtactctagtatctttatggacacttttaaagttaccttctatgataatgacatgataytaatttctcagaactgcagttaatccctggggtctgtggattccgaatttcaaatcctcccattttgttggtctgttccttgcatgctagtttagaggta

SEQ ID NO: 207034 - DNA, 201 bp, Homo sapiens
ttcaaatgagatagaccagtaccaatagatttctcagtgagtttttatagaatccccagttgaaatatgacctcggccttctgaggcacctgttctgcttrtttagcctgtatttagccagtgttaatatggatgactttccagctacaacttcttggcttctcagccatatataattggctatctcctttgtctttaata

SEQ ID NO: 207035 - DNA, 201 bp, Homo sapiens
aactcacagatacgaatcttctgtaaaatggaatgcaatactaactaagtgaataaatttactttgttacattgaaaactaaaattgttgcctgtgagagrgattcatttcagaagttccataaatttaaggggatataaaaaagaagaaagaattacttaaatggcatttcttaaaggaatatgccaagtgatcttttcc

SEQ ID NO: 207036 - DNA, 201 bp, Homo sapiens
ataagactcaaagagaagagggaaataacctaatggtgtccaattcaggtgtctaaaactacctaacagaaagagtggagctgatgaataaatataaagavcgctgtgtttgacatattgtgttttgggcagaggcagaactagagaatagggcttctgacttctaatcgaagacattctcctattacttgattaagatct

SEQ ID NO: 207037 - DNA, 201 bp, Homo sapiens
ttggctaagtgttgaattgaagtctaaaatgtctttgttagttttctgacttgatgatctgtctaatgctctctttggggtgttgaaatccctactagtaytgttaaccatctaagtcttttcataggtctagaagtacttgttttatgaatctgggtgctccagtgtttgctatgtatatatttaggatagtttagtatt

SEQ ID NO: 207038 - DNA, 201 bp, Homo sapiens
cctgacctcgtgatctgcccgcctctgcctctattctttgcccattttttaatggggttatttgtttctcgcttgtcgaattgcttaaattccttatagaktctggatattaaatatttgcaaggaatagtttgtgaatatcttctcccattctgtaggttgtctatttactctgctgatagtttcttttgctgtgcagaa

SEQ ID NO: 207039 - DNA, 201 bp, Homo sapiens
tgtcaccatctgttattttttgatgttttagtaatagccattctgactggtgtgagatggtatctcattgcagttttgatttgcatttcactaacaattawtgatgttgagcattttttcatatatttgttggctgtatgtatgtcttctttcaagaagtgtctattcatgttctttgcctttttttttttttttttttct

SEQ ID NO: 207040 - DNA, 201 bp, Homo sapiens
tccttcttttttgttttgacaagatgtgaattcatcaggaaaccagtgttccctatcttattaaagccttccaagagcatctaaaaatggtaaagcatgtyggattatttttggagactagcataacaccaagaaaataaactttctttagcagttctgaacaatgaaaaacagaacagaaataaacaagttttgaacaaa

SEQ ID NO: 207041 - DNA, 201 bp, Homo sapiens
tgtgtgtgtgcgcgcgtgtgtgtcagggtgaaggtctggggagtgggctgtgaagaaaaagaaaatattagatgtcattaatatgattatagctactcttsttacattaactcacttccttcctgcaacttttgttattattggttgaatctaaagaattttcagactaagctaagcttaagtcaatttgactaccattct

SEQ ID NO: 207042 - DNA, 201 bp, Homo sapiens
ctacacacctttttctgttcatacttctatttaacaagtgatgctggaccatgatgttcccagcattttattttttaatttcatcctaagatctgctcttrtcccccattaagaaggattggtagaatgttctctttcctaatgacagaagtatgaaataacttgttcatcaggagagtttattattgatattgttaatat

SEQ ID NO: 207043 - DNA, 201 bp, Homo sapiens
tcattagatgataggcttctacatttccttccccatgcattaattttcaactgtaaggtttaagatgaataccagatatattcaagtagggagggaatctractaatgtttacaataagcttaccttgacaggcactgtgctagaaacttcacactttgtttaaccataggcctatgaagttatagatgaataaactggtg

SEQ ID NO: 207044 - DNA, 201 bp, Homo sapiens
ctcaaaacacagtgcacttgatcaggctgtcagaattacctagagcagtgcatattctgatggagagaattctctgaacaatcctgaattgcatttaaaartgtgcgaaatatttgtgtaataaatccttcgtttgtgttcatttgttagaagccaattctaaacattcaaatattctaatatgtaaacaaaaaaactgga

SEQ ID NO: 207045 - DNA, 201 bp, Homo sapiens
aaattatactgaaagctgctgtggttatttcagtattattcgatttttaattattgaaagtatgtcaccattgaccacatgtaactaacaataaataatayaccttacagaaaatctgatataatttttcagagtctgtggcactaaggagtccacagggctgcctaggtgctttgtgtttgggggaccaaaactgtgttg

SEQ ID NO: 207046 - DNA, 201 bp, Homo sapiens
ataagcattgattatttctttcataatctgcattcttcccaaaccactgtccatgccattatttatacccatggggatttttgaataatatatagtatatrcttgtatgttttatgatcaaaattgcattatatactacgtatcatgaaaatgtcatgattgtggtttttactgaatattttacttttgatatctctgtcg

SEQ ID NO: 207047 - DNA, 201 bp, Homo sapiens
agagtaagaccccatctcttaaaaaaaaaaaaaaaatggaggttattcggtggaatggttttgctagcaataataggccaataataggccaaacttactayggcagtctttatccaatagctatgcctatcatggattcagcttggtgaaatccttctctacaagcctctttttctattttcacaactaaacactgggaga

SEQ ID NO: 207048 - DNA, 201 bp, Homo sapiens
gaaccttaatctgaaaaaaaaaactattttataatgcaaaagggctcacggtgaaatttagatcggcaatatgaaattacaaatttattattatcgatatsacctaacttgtgcctaacttgatttagggggaagaaaccttaagaatagaggatatccttgaagtaattgagaaggaaggagactcaattgcagtgatcc

SEQ ID NO: 207049 - DNA, 201 bp, Homo sapiens
agacagcagcctattttgacagactgcctttttaacacaggattttttttcagagccacattcacagaactttgctgatctactttcaatgaagaatcctwtaagataaatcctctatttaaagactttaactagaatgttttatttttgctgcattgtttacctcctgctctagttgtgtgttggaatttcagtagggtg

SEQ ID NO: 207050 - DNA, 201 bp, Homo sapiens
ctatccattacaatacactacctttataagctattgatggattctgctcttctgctttctcagaaatttttgccctggttaaacagcatcattcccttctrcattagactcaatcccttcaaacaataattaggaattgataaacatctctaaaaaggataaaagaccaatgatccagtcttgtgcccattacagtaagca

SEQ ID NO: 207051 - DNA, 201 bp, Homo sapiens
tgcattttgttgaatccatggatacaaaacccatggatccagagggctgactgtactgaactgggagttgaacatgaatctttcccttcagggtttgcttyactatccattacaatacactacctttataagctattgatggattctgctcttctgctttctcagaaatttttgccctggttaaacagcatcattcccttc

SEQ ID NO: 207052 - DNA, 201 bp, Homo sapiens
agccctggatgcttaggtctggaacccagggccagaatctttgacagccagatccagtaaaggccaaaaccaagaatctcctcccacaccagtggattctsaaaacacagtgcacttgatcaggctgtcagaattacctagagcagtgcatattctgatggagagaattctctgaacaatcctgaattgcatttaaaagtg

SEQ ID NO: 207053 - DNA, 201 bp, Homo sapiens
ttgttactcctagatcatcatttgcatggctgtgctcctacagcagagtctgttgttaggccatgacccatctggtatctcacagctggaagctcttggartctaacaaggaccctctctcgaaagcagatgccaacatccgcctccccaaaactgttcctgaaatctctgttcacctgtttggcttttatctactgtttc

SEQ ID NO: 207054 - DNA, 201 bp, Homo sapiens
gggactacagcaaacaccaccatgcccagccagctttttaattttttaaatttttttaagtagatgggatcttggtatgttgctagggctggtctcaaacktctggtgtcaagtaattcttcaacctgagccttccgaagtgctgagattacaggtgtgaaccatcacacctggccaagacaattttagccatgtctattt

SEQ ID NO: 207055 - DNA, 201 bp, Homo sapiens
aggtattgatgggatgtatttcaaaataataagagctatctatgacaaacccacagccaatatcatactgaatgggcaaaaactggaagcattccctttgmaaactggcacaagacagggatgccctctctcaccactcctattcaacttagtgttggaagttctggccagggcagttaggcaagagaaggaaataaaggg

SEQ ID NO: 207056 - DNA, 201 bp, Homo sapiens
agaatgggtgggtatgctggctaagttcctttctggccacatgaatttgggcagattggttatcttctctgatcacaggtttgtcatttgtaaaataaacktatcattacctccattgcaaggttgttgcgaagatttaaaaatgaacgatgcatataaaatacctagaatagtattctgaactttgcaggcactatctgg

SEQ ID NO: 207057 - DNA, 201 bp, Homo sapiens
taccataaaaaattttaaaaagaagttaccaggaggataataaaaattattatgtgtacaaattgatagtgtggatagagaagagaaagaaataataaccrtatttattcatagaagtagaaaaaattcaatttcagatgagaagaaaaactgttaatgaaacattttatagagagccaataattcttcaaaacatggaat

SEQ ID NO: 207058 - DNA, 201 bp, Homo sapiens
aaaaagaaaataaatttaaaaagagaagttaaaagacattaatcccaagtattatatattttgttttaaaaaggcctgattttatataattactaacacayagaaaggtccacatagaaatgtttatttgctaaagctgatatttgaaataatcacacacatgcacataaaagctaagatatgtttatgtccgttttcaat

SEQ ID NO: 207059 - DNA, 201 bp, Homo sapiens
gctatgtaaaatacatggtaaggttgataacaacaaaataaaggatttataatatatcacaaactgataaacatatttgacaaacccctgcctcctgtcaygtacagttttttatgttttacctctgtggcttaaaattgcgactctcagaagcatttttggaacgtctctgggaaaaaaaaatgcaggatccaaataatc

SEQ ID NO: 207060 - DNA, 201 bp, Homo sapiens
ccatttatctaaaaagataaaactattcaccccagaaagactaaatataacttggcagtgagacatattggtcctgagttgctttaaagttcaatgcaacyaaatgcttttaagtcttatagcttttcttttttccatttgagagcgccaaaagctggtaagaaagaaactatccagtgctcactttaaaataatctctta

SEQ ID NO: 207061 - DNA, 201 bp, Homo sapiens
tgcaagcatctcataaatcctcctcattatatctctctaaaatagtcaggttataggtattattattcatatttaacataagacaagagcaatttaaaackcttataattccatttatctaaaaagataaaactattcaccccagaaagactaaatataacttggcagtgagacatattggtcctgagttgctttaaagtt

SEQ ID NO: 207062 - DNA, 201 bp, Homo sapiens
cctcagtgagaaattaaggacaaatttacactcatacttgagaagcaggacaagagagaaaaatcacagagacaacacattcatttgctcatttttccacrtgtttgtcacccctgctatataccagacactattctatgcagggaatacatgggtgagtaaaatagccttgataaatgagacaatgtctcttacaaagct

SEQ ID NO: 207063 - DNA, 201 bp, Homo sapiens
atgcaggccccacagcagactccaaccgggggtgcctgcgactctcagagccccagagggcacgttacagtgctcttttagctctgctgtccgcagtcctyagtccgcattagtgttaatagctcagtggggcctctgacttttcacatgaggcggctgccttccaccagccagggtgaagagccagtgtgacagccagac

SEQ ID NO: 207064 - DNA, 201 bp, Homo sapiens
tttgtcataccaaaaaaattggtttctagttatcaagagaaagcttcaagagcaacattccctacgcccctttaaaaactaaatgcaagtaatattcctcmaagttttactaacctatgcacacaaatgaactatcattaaatgtgatacttcacatatcgattgcccccatgtacatattagggcacccatagcataacc

SEQ ID NO: 207065 - DNA, 201 bp, Homo sapiens
agataaagcagcaaccaagaaaccagttgtgaacataattactccgtctcatgtagaggagcgggggtgccagctaacaataacattttctgttccaaacraagatgttttccaagaactagaaaaaagaggagtggttgtaagtatgtcttgctttgctaccagattttgtctatgggccgcatgttagggataaaattt

SEQ ID NO: 207066 - DNA, 201 bp, Homo sapiens
tgtttataaatttaccaatctgctcacttctatacttgactctgcagaaacaaaaaattagcagtgttttctagaacaacttaagcaaattatactgaaarctgctgtggttatttcagtattattcgatttttaattattgaaagtatgtcaccattgaccacatgtaactaacaataaataatataccttacagaaaat

SEQ ID NO: 207067 - DNA, 201 bp, Homo sapiens
tcaagtaaatgagataatgagatagtatcctatatggagcctatattcaatagaggtctcagatttgtttaggttcttcagcaagaatcatattccagtcytgctttaagactgcatgcctcaatatttcttcacatgttattaatggacagtcactcaagtaatttcagcacatgatgaattttaccaatttcattttga

SEQ ID NO: 207068 - DNA, 201 bp, Homo sapiens
tgagcaattgcttaaaatgcaggttcccagaactcaccaccagagattctgtttcagtagaatctagtggtattaatcccaggaacatgtaaaacaaatgycccttggtgattttaatatatgtggtcccggggtcacatttgtaagtgcatcgttcaggagagattttcatggaaggacaaatcatagcaaaactgctat

SEQ ID NO: 207069 - DNA, 201 bp, Homo sapiens
acatgttctcatttataagtgagccgagatcgtgccactgcactccagcctgggcgaaaaagtgagactctgtttcaaaaaaaaaaaaaaaaaaaaaaaamcttcctattgactatgtgatgggatcaataaaacccaaactaaaaaaataacttccctatctaactatgtgatgggatcaataaagcccaaacttcagca

SEQ ID NO: 207070 - DNA, 201 bp, Homo sapiens
aattctgccattctcatttttcagaaatgtatcaattgtattttattttaaaatgtattttatgcaatctttgtaacatgctttgaaattttaatattttkatattccctttattttttatatatttttcgattttctcatttattttagtaagttttctactggttccctatctcattagtcttttcaaataaacaaatt

SEQ ID NO: 207071 - DNA, 201 bp, Homo sapiens
acaataaaaagatctgtcaaatgcttttgattaaattttttaatagattatagctttatttcttttgttaaagtaaaacacgtgttaagggaagagaagayggaataggaacattgatttattagtctttttaaagacattgagcaaaccactgctctaaatcaagtgcagttataaatgttttattaattcttattgctc

SEQ ID NO: 207072 - DNA, 201 bp, Homo sapiens
ttcccataatatttttcatatttttgttttattttttactgtgtatatttaaggtctataacatgatgtatgggatacatagaagcagtaaaaggtcgctrtagtgaagcagattaagatatccaccttcatgcagttacccattttttttctagcaagaacagggaaaatctactcacttagcttgaatcccaaatataa

SEQ ID NO: 207073 - DNA, 201 bp, Homo sapiens
cgtgaggcggaggtttcagtgagccaagattgcgccactgcattccagcctgggcaacagagcgagactccatctcaaaaacaaaaacaaaaaaaaaaaacaaaaaaaaaaaaaactgctgtttttaaaaccatcagatcttgtgagaactccttcactatcatgagaacggcatgcaggaaactgcccccatgatccatt

SEQ ID NO: 207074 - DNA, 201 bp, Homo sapiens
gttgaaaaacaatcaaattttcaaaaggacaatgttaccctaatcttgatgatatgtggttagtgaattaccttaaaaaataaaatgcttctacatttcartgtgtggcattaataacatttatcctgaagacttactaaggattttcaatttgaacttgtcagtgtggctaacactgtgattatacacaaaaagtagatt

SEQ ID NO: 207075 - DNA, 201 bp, Homo sapiens
caaccaggccttggctcttagatggcattttgggacatgccctggaccagagtggaagctcactgccctaaagggtgagtcccaggtcaggcagcattcamcacagaattaaattaataccacagaatttaattctgtggtattaaagggataccacagaaatacacaagttctttaaatgccactatgaacaaaatctat

SEQ ID NO: 207076 - DNA, 201 bp, Homo sapiens
caaacataaaggatgaccagatcttgaactggctgtgaaaattttgctcttctatcatgtacttggcaaaagactttgagcagctcctcagtattacattragattgccttggttgaatagaattcaaacagtggtggaagagtatttggcttctctgggtagtcttgtaacaacagactcttccttagcccaagtctcag

SEQ ID NO: 207077 - DNA, 201 bp, Homo sapiens
ttgtattgtgttaattgtcctaatgaagcaggatatttccctgaccccttcgcggaattcctgacaggggtgcctcatttactcagccccgctcgctgctytcagctcctcgcgggagggagtgcacgagcgaacgagtacgggagctggaatgaatgagtgctggaatcggctggccacttggcgctggtaggacccaac

SEQ ID NO: 207078 - DNA, 201 bp, Homo sapiens
catctattctttctccaatagaatagctacacaaatatttaaaagcatctattatggctctctgaagtctttttttttttttttttttttttttgaggcaragtcttgcttcatcgcccaggctggaatgcagtgacatgatcatggctcattgcagcctcgaccttctgggctcaagcaatcctcccacctcagcctccc

SEQ ID NO: 207079 - DNA, 201 bp, Homo sapiens
tctaagaaattaaggagataattttaaaaattcttgaaacaaatgaaaattgaaacaatacaggaaaacctgtgagatatagcaaaaggagtgtgaagagsaaaatttatagcaataaaaacactgaatcaaaaaagtagaaaattttaaaataagcaatctaacaatatacctcaaggagctagaaaagcaaggacaaac

SEQ ID NO: 207080 - DNA, 201 bp, Homo sapiens
gctatcaaatactaggtcttagttatggtttctaactcattttttgtacccattaatcatcctcagctcctacccacctccccactaccctccccactacccacctccccactaaccacctccccactaccccactgcctcttatgaccctcattctactgtctccatgagttcaattgttttgatttttacatcacataa

SEQ ID NO: 207081 - DNA, 201 bp, Homo sapiens
ctatcaaatactaggtcttagttatggtttctaactcattttttgtacccattaatcatcctcagctcctacccacctccccactaccctccccactacccacctccccactaaccacctccccactaccccactgcctcttatgaccctcattctactgtctccatgagttcaattgttttgatttttacatcacataaa

SEQ ID NO: 207082 - DNA, 201 bp, Homo sapiens
tatcaaatactaggtcttagttatggtttctaactcattttttgtacccattaatcatcctcagctcctacccacctccccactaccctccccactacccacctccccactaaccacctccccactaccccactgcctcttatgaccctcattctactgtctccatgagttcaattgttttgatttttacatcacataaat

SEQ ID NO: 207083 - DNA, 201 bp, Homo sapiens
tgtagttcaatataaattttaagttttttttttctatttctgtgaagaatgtcattggtagagattgcattgaatctgtagattgctttgggtagttgaasattttaacaacattgacttttccaatccatgaacaggaaatattttttcattttttggtcccctctttaatttctttcatcactgttttatagtttttta

SEQ ID NO: 207084 - DNA, 201 bp, Homo sapiens
taggtatttaacttgattgtagctactgtaagtgggattacatttttatttatttttcagattgttcactgttggcatatagaaatgctacttaattttayatgttgattttgtattttgcaactttattgaatttatcagttctaatgttttcttgtgtgtgtgtgtgtgtgtgtgtgtgtgtgtgtgtgcatctgtagt

SEQ ID NO: 207085 - DNA, 201 bp, Homo sapiens
cagattgttcactgttggcatatagaaatgctacttaattttacatgttgattttgtattttgcaactttattgaatttatcagttctaatgttttcttgtgtgtgtgtgtgtgtgtgtgtgtgtgtgtgtgtgcatctgtagtctttaggcttttccaaatatagtatcatatcatctgtgaacaaggataatttgactt

SEQ ID NO: 207086 - DNA, 201 bp, Homo sapiens
agattgttcactgttggcatatagaaatgctacttaattttacatgttgattttgtattttgcaactttattgaatttatcagttctaatgttttcttgtgtgtgtgtgtgtgtgtgtgtgtgtgtgtgtgtgcatctgtagtctttaggcttttccaaatatagtatcatatcatctgtgaacaaggataatttgacttt

SEQ ID NO: 207087 - DNA, 201 bp, Homo sapiens
aattttccagttgatttaggactgaacacatgcatgtaactactcttttttctaaaacctcaccaaagaattctgaatggaatagaaaaaaaaattacaamgtctaaactgcagaggacaaaatagaatgccaaaggagatgataataatatctggggagttggctcgctgatagacaagtggtaattgcctttctcaaaa

SEQ ID NO: 207088 - DNA, 201 bp, Homo sapiens
ccattttactaaatgggtattggctttctgagcttccttaattagtgtatataatggcctggctattttgccgtacctgggaatccatatttggcagaagsctgttatgccaaggaaccttttatttgctttagggttttgggatgaggataagccagtataggctggatacatttcttactgagggccctggtgcctttg

SEQ ID NO: 207089 - DNA, 201 bp, Homo sapiens
gattgttcactgttggcatatagaaatgctacttaattttacatgttgattttgtattttgcaactttattgaatttatcagttctaatgttttcttgtgtgtgtgtgtgtgtgtgtgtgtgtgtgtgtgtgcatctgtagtctttaggcttttccaaatatagtatcatatcatctgtgaacaaggataatttgactttt

SEQ ID NO: 207090 - DNA, 201 bp, Homo sapiens
attgttcactgttggcatatagaaatgctacttaattttacatgttgattttgtattttgcaactttattgaatttatcagttctaatgttttcttgtgtgtgtgtgtgtgtgtgtgtgtgtgtgtgtgtgcatctgtagtctttaggcttttccaaatatagtatcatatcatctgtgaacaaggataatttgacttttt

SEQ ID NO: 207091 - DNA, 201 bp, Homo sapiens
tggtttttactgaatattttacttttgatatctctgtcgatatagatagatattattctttctactgttctatagtattccatcatatgcatatcacataktgtgtctcttcattttcttatgtttaacatttctaatctttgttatggaaaacatgcttatatggacaatagcccacatttctctttgtaagtgaagaag

SEQ ID NO: 207092 - DNA, 201 bp, Homo sapiens
tgttcactgttggcatatagaaatgctacttaattttacatgttgattttgtattttgcaactttattgaatttatcagttctaatgttttcttgtgtgtgtgtgtgtgtgtgtgtgtgtgtgtgtgtgcatctgtagtctttaggcttttccaaatatagtatcatatcatctgtgaacaaggataatttgactttttcc

SEQ ID NO: 207093 - DNA, 201 bp, Homo sapiens
aatgatctttttaatgtattgttgcatgcagtttgctaatattttgttgaggatttttgcatcaatatttatcagggatattggcctgtagttttcttttkttgatgtgtctttgtctggttttggtatcagggtaatactgggcatataatgagtttggaagtatttattcctcctctattttttgaaatagttggagta

SEQ ID NO: 207094 - DNA, 201 bp, Homo sapiens
caggggtgagtcctagagctgggctgagttcctgagtctttcataacaacccggctgcccatcaagatgcattcccataaacaacagttcttatgcaaatycgtttcagagagggtgaaggtaaccttttgagtcaggagtgagatggagttctttgcccactagggtctttgtccttctttacttttgtaggaatatgcc

SEQ ID NO: 207095 - DNA, 201 bp, Homo sapiens
agaatatgttatatgttgtgaaaagaaacggagttactaaatagaatctgacaccactaagtagggaatagatttgtaagatctgaaagatctgtcagtasatcggagagctctataagtaggtgtgtcttttgttttaacatcaaatctttagatgataatttacaatattttattttttatgtacttacaaaagtgatt

SEQ ID NO: 207096 - DNA, 201 bp, Homo sapiens
ctggattctagtggtcctttaccagcgtgcccaacattgcctttgtgctcaggggtgagtcctagagctgggctgagttcctgagtctttcataacaaccyggctgcccatcaagatgcattcccataaacaacagttcttatgcaaatccgtttcagagagggtgaaggtaaccttttgagtcaggagtgagatggagtt

SEQ ID NO: 207097 - DNA, 201 bp, Homo sapiens
ggggacatttttgtgaaaacaatggccacaagatgtcagcaatagagacctctaaggacttcaagaaagacctgaaagctcaattaactcgagcttggggaaaaaaaaaataaactgtacagtggaaataaattgggcttggctaaacattaaactattagattagattgttgatttctcatgctattattattcaaggca

SEQ ID NO: 207098 - DNA, 201 bp, Homo sapiens
agactgaaaatcctcagtgtatttgaaggagggtattgtctcaaaaatccagagctcaaagtgaagaagaaaggcaaaatttggaatttagctctaggacmaactcatcagttcaggggtcagagatttatatagttaaaggacaagtgtgtgtttacctgagtttaaagagcaaagttgcctctggaaagaagccctcac

SEQ ID NO: 207099 - DNA, 201 bp, Homo sapiens
agcataatgcccttgagatccatccaatttgttgcatgtctcaagaatgttttcttttatattgctaagtcatattattttgtggggatgaatcacaatctgtttacacattcacccatagaacatttaacagttaacttttgatcctattagagtgatatacattattaatatctatttttaaattatacaatatgtgct

SEQ ID NO: 207100 - DNA, 201 bp, Homo sapiens
ttgagtacaaatgaccctgttacccaagtagtgaacattgtacccaataggtagtatagttcctccctttatagctatatgtaccaaatgttagctcccayttaaaaatgagaacatatagtatgcagttctctgatcatgcattaattcatttaagataatggcctctggctgcatccatgttgttgaaaatgacatgat

SEQ ID NO: 207101 - DNA, 201 bp, Homo sapiens
gcataatgcccttgagatccatccaatttgttgcatgtctcaagaatgttttcttttatattgctaagtcatattattttgtggggatgaatcacaatctgtttacacattcacccatagaacatttaacagttaacttttgatcctattagagtgatatacattattaatatctatttttaaattatacaatatgtgctc

SEQ ID NO: 207102 - DNA, 201 bp, Homo sapiens
cataatgcccttgagatccatccaatttgttgcatgtctcaagaatgttttcttttatattgctaagtcatattattttgtggggatgaatcacaatctgtttacacattcacccatagaacatttaacagttaacttttgatcctattagagtgatatacattattaatatctatttttaaattatacaatatgtgctct

SEQ ID NO: 207103 - DNA, 201 bp, Homo sapiens
ataatgcccttgagatccatccaatttgttgcatgtctcaagaatgttttcttttatattgctaagtcatattattttgtggggatgaatcacaatctgtttacacattcacccatagaacatttaacagttaacttttgatcctattagagtgatatacattattaatatctatttttaaattatacaatatgtgctctc

SEQ ID NO: 207104 - DNA, 201 bp, Homo sapiens
aagatttaaatctgaagtgatgttgatattttgaaactagttcctaggttaagcttcatataaactaaaagagtaagctcataaggtccacagtggtggamatttttgatgcactaaaatgctcctcaagcaataaagtgagttttcagaaccatgagctttatagcaatcatactgtagccttttcaaagaaaggagcat

SEQ ID NO: 207105 - DNA, 201 bp, Homo sapiens
tagttgctaatttagatttcctcatggagcacagtaaatatgagagatcctcataatagcctctataggtttaaattatattttaaatgtaaatgcaaaasttaattattttttagaggacctgatgtcatccttgggagtaatttttaattactttttatccttcttagagttgattgtattaattatttgtactggctt

SEQ ID NO: 207106 - DNA, 201 bp, Homo sapiens
gatttaatagactgaaaacagagctcccatacaatgggaggggacccaaagggggttgccactccctgctcaaatgcctaggtttatatcctgatcattgwccccccgttgtgctctcaggtgatatatgatttgactatttctttacctccttcttttagcctaatttgtattttagtgagccttctttactacctgatt

SEQ ID NO: 207107 - DNA, 201 bp, Homo sapiens
aaattagagcttacctttgcttttccatcaaaacatattgttacttctaggtttcctcttcaatttgcaaaaggaaaaggaaaatataggtaatttctcarttaaacttacacctgattttcaatatgagtttgtttattgagtgtttgtatatgtgtgtgtttggcagttagaagtatgctgagatttttattcttttag

SEQ ID NO: 207108 - DNA, 201 bp, Homo sapiens
gatccatcagagggatcactatctgtggcaacaatatcctcacaaaatgctttttttaattgtatttaattttttttttttttggaaaagcagtctctatygctcaggctggagtgccgtggcacaatctcggctcactgcaacctctgcctcccaggttcaagtgattctcctgactcaaactcccaagtagctgggatt

SEQ ID NO: 207109 - DNA, 201 bp, Homo sapiens
taatgcccttgagatccatccaatttgttgcatgtctcaagaatgttttcttttatattgctaagtcatattattttgtggggatgaatcacaatctgtttacacattcacccatagaacatttaacagttaacttttgatcctattagagtgatatacattattaatatctatttttaaattatacaatatgtgctctcc

SEQ ID NO: 207110 - DNA, 201 bp, Homo sapiens
gtgtgatgaatatacaagtgcaagtgtctttttggtagaacaattcattttcttttgggtatatacccagtagagggattgctgtgtcacataatagttcttttttttttctttttttatttattattattatactttaagttttagggtatatgtgcacaatgtgcaggttagttacatatgtatacatgtgctatgctg

SEQ ID NO: 207111 - DNA, 201 bp, Homo sapiens
attatattttaaatgtaaatgcaaaagttaattattttttagaggacctgatgtcatccttgggagtaatttttaattactttttatccttcttagagttkattgtattaattatttgtactggcttaacaataccatactgaaaaagcttttattttttttttttttttgacatttcttctgtttcagttgatttatcat

SEQ ID NO: 207112 - DNA, 201 bp, Homo sapiens
gtatatacccagtaatgggatggctgggtcaaatggtatttctagttctagatccctgaggaatcgccacactgacttccacaatggttgaactagtttamagtcccaccaacagtgtaaaagtgttcctatttctccacatcctctccagcacttgttgtttcctgactttttaatgatcgccattctaactggtatgag

SEQ ID NO: 207113 - DNA, 201 bp, Homo sapiens
gaattgcttgaacccgggaggcagaggttgcagtgagtggagatcaccactgtactccatcctgggcgactctgcttcaataaaataaataaataaataawgtttagcttacactgtgcaaatgattacaactatggctattagataacactgtgaagttcttaattttagtgattaagaacgtaatttcacaacttgatg

SEQ ID NO: 207114 - DNA, 201 bp, Homo sapiens
tgatcgccattctaactggtatgagatggtatctctttgtggttttgatttgcatttctctgatggccagtgatggtgagcattttttcatgtgttttttrgctgcataaatgtcttgagaagtgtctgttcatgtccttcacccactttttgatggggttgtttgtttttttcttgtaaatttgttggagttcattgtag

SEQ ID NO: 207115 - DNA, 201 bp, Homo sapiens
tgtctggtaaggtctgctctctgcttccaagatggtgcttcttgctgtatcctcatgtggcagaagaggcaaacacctgcctcccacctgttttacaaggktactaatcccattcatgagggctctgcccttatgactgaatcacctcctaaagactctacctcttaatactgtcacattggcagatcaaattttaacata

SEQ ID NO: 207116 - DNA, 201 bp, Homo sapiens
tcatgtgttttttggctgcataaatgtcttgagaagtgtctgttcatgtccttcacccactttttgatggggttgtttgtttttttcttgtaaatttgttkgagttcattgtagattctggatattagccctttgtcagatgagtaggttgcaaaagttttctcccattttgtaggttgcctgttcactccgatggtagtt

SEQ ID NO: 207117 - DNA, 201 bp, Homo sapiens
ttctagatatacaatcatgtcatctgcaaacagggacaatttgacttcctcttttcctaattgaatacccttcatttccttctcctgcctaattgccctgkccagaacttccaacactatgttgaataggagtggtgagagagggcatccctttcttgtgccagttttcaaagggaatgcttccagtttttgcccattcag

SEQ ID NO: 207118 - DNA, 201 bp, Homo sapiens
  misc_feature (1)...(201): n = A,T,C or G
acatcctgcaattctaattttgtgagtaaatactcctagtagatgtctcagaaaacacccacttatagcaatgatttattctgtggcagtgagttaactcnctcccatgctctcttttcctttccagcatttgtaaaagaagattacatctatgctgcgactattttaagtagctttgtttgaacaatatattttttctta

SEQ ID NO: 207119 - DNA, 201 bp, Homo sapiens
gattacatttattgatttgcgtatattgaaccagccttgcatcccagggatgaagcccacttgatcatggtggataagctttttgatatgctgctggattyggtttgccagtattttattgaggatttttgcaccaatgttcatcaaggatattggtctaaaattctcttttttggttgtgtctctgccaggctttggtat

SEQ ID NO: 207120 - DNA, 201 bp, Homo sapiens
ccaccagcaccagtttactgacacagattcaacccaggttggtactatacaaaaagcacattttcattcctttctttcaagatgacaaacttttggattcytaaagaattaagaactgttacccagaaaaaatgggttttattcttttggtgagtaacaaaggtctttctggagacatggatgatgctggaaacatcattc

SEQ ID NO: 207121 - DNA, 201 bp, Homo sapiens
gccttgcatcccagggatgaagcccacttgatcatggtggataagctttttgatatgctgctggattcggtttgccagtattttattgaggatttttgcaycaatgttcatcaaggatattggtctaaaattctcttttttggttgtgtctctgccaggctttggtatcaggatgatgctggcctcataaaatgagttagg

SEQ ID NO: 207122 - DNA, 201 bp, Homo sapiens
tacttatgcaacaaacctgcacgttctgcacatgtatcccagaacttaaagtataataaaaaaaaaagtcagaggaatatatagcaggctcaaatatttayctttttaattgtgaaatcatctttgcaatatttattatgaaataagttttaaaatattgcataattctaaaatatgatttaaaataaattatttctctgt

SEQ ID NO: 207123 - DNA, 201 bp, Homo sapiens
tgggccctgtgagttgtcagtctgcccctgctggggggtgcctcccagttaggctgctcgggggtcaggggtcagggacccacttgaggaggcagtctgcyggttctcagatctccagctgtgtgctgggagaaccactgctctcttcaaagctgtcagacagggacatttaagtctgcagaggttactgctgtctttttg

SEQ ID NO: 207124 - DNA, 201 bp, Homo sapiens
aggaaaagtgacagggaagttttatggggtgatagggaagaaggtgcatcatctcatgtagaggaagagttccagttgcggagatgcagtgagtaatcacrccagtgcgtagatcgcatcttatggtaatgaagctatagctcctccccagggtggagactttagcatggtaatgaggaaatttcacacagactcgtctat

SEQ ID NO: 207125 - DNA, 201 bp, Homo sapiens
tgctggggggtgcctcccagttaggctgctcgggggtcaggggtcagggacccacttgaggaggcagtctgccggttctcagatctccagctgtgtgctgrgagaaccactgctctcttcaaagctgtcagacagggacatttaagtctgcagaggttactgctgtctttttgtttttctgttccctgcccccagaggtgg

SEQ ID NO: 207126 - DNA, 201 bp, Homo sapiens
agcccaaagaaattttatttcctgtaatatcattttgttcaaaaaaccaaacttaggagaggagaaatataaacaaacaagcttgggtgaagtttaaaacrtatgtgattaaatctccattgtcatttatccttttccaaaaagtgggaaatgttgcatgatgattaaacagaatacaatgtggtttcaagaaacatcaca

SEQ ID NO: 207127 - DNA, 201 bp, Homo sapiens
catacataagtaaaatacaaagaaatataaaattaatcacactaccaaagaggcataattttccagttgatttaggactgaacacatgcatgtaactactyttttttctaaaacctcaccaaagaattctgaatggaatagaaaaaaaaattacaaagtctaaactgcagaggacaaaatagaatgccaaaggagatgata

SEQ ID NO: 207128 - DNA, 201 bp, Homo sapiens
ttttggatatcttttcagcaatgtcccattctgctggtactaatttactgtattagtctgttttcatgctgctgataaagacatacctgagactgggcaawttacaaatgaaagaggtttaccagagaactcacagttccacctggctggggaagcctcacaatcatggcagaaggcaaggaggagcaaatcacatcttac

SEQ ID NO: 207129 - DNA, 201 bp, Homo sapiens
ttcatgctgctgataaagacatacctgagactgggcaaattacaaatgaaagaggtttaccagagaactcacagttccacctggctggggaagcctcacartcatggcagaaggcaaggaggagcaaatcacatcttacatggatggcaggaggcaaggagagagcttgtgtagggaaactcccatttttaaaaccatcag

SEQ ID NO: 207130 - DNA, 201 bp, Homo sapiens
atagaatagaaagaacagaaaacatcaaagcatatcacatgagggtaagtgctgtttcatgaaatattttttaaagttattttggaatatgtctctgtgtrtgtatgtgtgtgtgtaatccatcataagatatatttccttttgtgggtcatcatacatataatttagattagatggactagtttcatttcatttcttaag

SEQ ID NO: 207131 - DNA, 201 bp, Homo sapiens
tgttagtattaaattcataaagacagcaatgagatttaaagcattgcttgttcagaatattttccagtaaaataaaggtcttggtattagagtacatcatrgtaggagaagagaaatttctggtgatttaataaccactatttactctgaagaagtaggaatcaaataaagtcctcatcatcataatgctgtcccaggcac

SEQ ID NO: 207132 - DNA, 201 bp, Homo sapiens
aagaatattattaatattattattaagcttacttctccctggatagataaaaatcacacagcgttagctacatgcattcaaggttataaaaatggtgtaaygtgaacataaatttgctttatgaaatccgtggctgaccctcagagaagcaataatccctggaagctatccccccacagctgcagaccctcagtcatgtac

SEQ ID NO: 207133 - DNA, 201 bp, Homo sapiens
aagtaaaatacaaagaaatataaaattaatcacactaccaaagaggcataattttccagttgatttaggactgaacacatgcatgtaactactcttttttytaaaacctcaccaaagaattctgaatggaatagaaaaaaaaattacaaagtctaaactgcagaggacaaaatagaatgccaaaggagatgataataatat

SEQ ID NO: 207134 - DNA, 201 bp, Homo sapiens
tgcctgtctctgcttccaacatgctttcctcacttagcttaattatttctggctttttatttctggctttttatgtaaagtaagagacaagcaactcttcytttcacttagacactcagaggccattgtagtattctacttggcctaatttcaacattcttgtgtcttagtgaatagggcaacctgaggagagggagagag

SEQ ID NO: 207135 - DNA, 201 bp, Homo sapiens
aaaattaatcacactaccaaagaggcataattttccagttgatttaggactgaacacatgcatgtaactactcttttttctaaaacctcaccaaagaattytgaatggaatagaaaaaaaaattacaaagtctaaactgcagaggacaaaatagaatgccaaaggagatgataataatatctggggagttggctcgctgat

SEQ ID NO: 207136 - DNA, 201 bp, Homo sapiens
tatttggaatgaaatgtaggcacgaggattattaagttgttacaggttttgaatcatactctgagttaaatgagaaacagttgccaagttttaggcaaaamaattattagtacctctttggatgctgtgttgagaatagagcaaaacagagctggggtagaaatggtaagaattgttagattactatagtaatccagacaa

SEQ ID NO: 207137 - DNA, 201 bp, Homo sapiens
cagaaaaaaggtcagagtttagtcctcacacctccagaaggtagtgatgaaaatatgaatttttaaaaaagaagatttgttgaaattctgtttaaaatacrattagaatatcagatccccttgccaacttgatgctgcaggtgaatactcccacaccccatttcaggagatgactagaggattaatttccagaaaagggag

SEQ ID NO: 207138 - DNA, 201 bp, Homo sapiens
gaaatttgatgtgtgttgaaatcaatagtgtctcccaacagcaatcagccagtgaggataattccattacttatttatgggcaaccatcaaaatgccagayaaaaacttgcagaaaaggtagcagtggcttgtaggaaagcccagaaataattctggagagttcttttaaattcttagaaactatgagtaaagaaattgaa

SEQ ID NO: 207139 - DNA, 201 bp, Homo sapiens
gtggctttgttcccacatcaggatatatgtactggtatatatactgtatacatacatatacagtatatatgtactggtatatatcagtatatatgtacatrtatacatatatacacataaatatatatacagaaatatatatatatggagagagagagagagtatatatactgatgtgggaacaatcccacttatctgtgg

SEQ ID NO: 207140 - DNA, 201 bp, Homo sapiens
ttggttgtagataaaagggataaggggcctctttctcaataactacttcacgtgtgatatagggggtggtgtgggcaccttggaaaaacaaaaccttaatkttttgggtattcttgagagacgggttggtatccacattgtccttgtagtaggagcatcatctgtattgtctggaaacgcgtctgtgcctgcaagacagtt

SEQ ID NO: 207141 - DNA, 201 bp, Homo sapiens
aatttttagttgttaaatagctatttttaatatatttctctcatttttaatgcagagagggcattaaaaatgcccgtcagttaatatttagaattttccawatttaatctcatctcaagctctaagattacttccactgagataaatagtaatacactaagcatgttctacaataatttaaaaaaagatgaatgttccctt

SEQ ID NO: 207142 - DNA, 201 bp, Homo sapiens
gggactataaaaagaggctgcttttggtgttgtgtggagtctcatgagggcaaaagggagattttttgtccacgactggtgggtttttagagccagcttcrtgagttgcgctttaagtacagatttagttttttcaactttgcctgaagattgaggcctgtagggtgtgtggggaacctacttcatatttagagatgtaga

SEQ ID NO: 207143 - DNA, 201 bp, Homo sapiens
tgaggcaggagaatggcatgaacacaggaggtggagcttgcagtgagccgagatcgcgccactgcgctccagcctgggtgtcagagcgagactccgtctcaaaaaaaaaaaaattcgaatattgttgaaataacaaaatgtcagaaatagagatcagattagtggtttccagttgtaaataagtgggtggagtgaagtgga

SEQ ID NO: 207144 - DNA, 201 bp, Homo sapiens
tatctttataatagaataatttatattcctttgggtatatactcagtaatgggattgctgggtcaacagtatttctgcctccagatctttgagaaattgcygcactgtcttcaacaatggttgaactaatttacattcccaccaacagtttaaaagggttcttatttctccacaactttgccagcatctgttgtttcttga

SEQ ID NO: 207145 - DNA, 201 bp, Homo sapiens
gactttgaaggctaaattaagaaggtctccatgtggggtttgagggccgtcatcaagcttctgaagtttgcgtggaatattgggggtggactgggaggtgraccaaaggtttaagatagtggttccttttcagctggctgagtttaggttggtgtattttcttatgacttcagttaaacaagagagaaaaagggctggttt

SEQ ID NO: 207146 - DNA, 201 bp, Homo sapiens
aatgataagtgatgttgagctttttttcatatgtttgttgactgcatgaatgtctacttttgagaagtttctgttcatgtcctttgtccattttttaatgtttttttttccttgtaaatttgtttatgttccttgtagactctggattttagatctttgtcaggtggatacattgcaaaaattttctttcgttctataggt

SEQ ID NO: 207147 - DNA, 201 bp, Homo sapiens
atagtggttccttttcagctggctgagtttaggttggtgtattttcttatgacttcagttaaacaagagagaaaaagggctggttttcgtcaggaccctgsgtgatttctgaaagtttttcatagtttactactctatgggcaccctttttgagtcctgcaaggagacacacaatcatgtggtcttgatggtggcatccag

SEQ ID NO: 207148 - DNA, 201 bp, Homo sapiens
ttttcttatgacttcagttaaacaagagagaaaaagggctggttttcgtcaggaccctgggtgatttctgaaagtttttcatagtttactactctatgggmaccctttttgagtcctgcaaggagacacacaatcatgtggtcttgatggtggcatccagaggccccatcttgataataccagtgggggtcctgattggga

SEQ ID NO: 207149 - DNA, 201 bp, Homo sapiens
aggaaatcacagacaccacagatgctatttacatctgagaaatcatgcagagactacactactcatgcacctagaatcaaagacaaagtgccatatccagygaacaccatagatacatcttcaggaaaaagtcttcctctactaaagcaaattcaaaaaatagggagaaatgactgtttcaccagatgctcagatatcaat

SEQ ID NO: 207150 - DNA, 201 bp, Homo sapiens
acatggctaattgaaaaggtagtcctgacaaacacttaagatgttgagttaattaatgtctttaaaatactggagattataaaatgaaagtgtgacataawatgaacaaatgtataaattgtgtattaatgctttctcaataaatccattttattgcagttatcattttttaagcctacgccaaaacgatataaaattctt

SEQ ID NO: 207151 - DNA, 201 bp, Homo sapiens
gaattgaatttgatcaggggtagcaaactttttctgtgaaaggccagataggaaatattttaagctttctaggctatacagtctctgtggcaaatactcarttccgtcattgtggtggtaaagcagccataggtgatacataagtgaaagattgtggctatgttttcataaaactgtattttaaaaagcagggcctggcac

SEQ ID NO: 207152 - DNA, 201 bp, Homo sapiens
taggtatggggttatatgaaaaaaaaaatccaaaatttacaatatacaggaaaaagatgggtgacattctgtaacaccctagcccaagtattgtttggtarttatttagtactgacccctaagtacttcgttgactcactgagaatgtgcatagtaacatgtagactttgcccagtggagatcatttctcttaagcagaaa

SEQ ID NO: 207153 - DNA, 201 bp, Homo sapiens
aggcgggcggatcacgaggtcaggagatcgagaccaccctggctaacactgtgaaaccccatctctactaaaaatacaaaaaaattagctgggcgtggtgrcaggcacccgtagtcccagctactcggaaagctgaggcaggagaatggcgtgaacccgtgaggcggaggtttcagtgagccaagattgcgccactgcatt

SEQ ID NO: 207154 - DNA, 201 bp, Homo sapiens
acggtcaaatccaatttaaactttgagtaaactttagagtctgtatgactactgactctatttgccaattaataattatatttcagttgttagcattccamgattagctggtttaactatgtttaataagccttctgtcatcttacttttctgttctcttagagctttagagagaccaaagagtttttcactgttaaagtg

SEQ ID NO: 207155 - DNA, 201 bp, Homo sapiens
aaatatgcattttggacattgttcaaaacctatgacctaaggcttttccaagagccctttgcccataaagagaatgaataaattagaggccagagtcaacscacggcattaagcatcataactcaagctgttattctcacctagaatttaaccttttcctagttcattattaacttagctcattgcaatgtcatattctaa

SEQ ID NO: 207156 - DNA, 201 bp, Homo sapiens
gcagtaactgtgggtagccctcttgggcagggtgattttccacatgtgccagtcaggggccagaacattaagatccttatgttccaactaaggaattttgrttttattttaaagacaaaggggagccactgactgttcatgaggaacaagattacaaattcaggtctcttcacctctcattaagtcttggtttgcctgtgg

SEQ ID NO: 207157 - DNA, 201 bp, Homo sapiens
agggagtggacattgtatatactaaaaagaatagcttctgtgaccaggcgcagaggctcatacctgtaatctgacactttgggaggttgaggagggcagawcacaaggtcaggagattgagaccatcctggccaacacagtgaaatcccaactctactaaaaatacaaaaaagttagctgggtgtagtggtgcatgcctat

SEQ ID NO: 207158 - DNA, 201 bp, Homo sapiens
tcttgtgtcattgttttttctttcccacttatctaatgtgaataataaaatctatttaaagatttggttttagggttagtcaagctcaaaacaataagccmagtaggacacagcagtaccttaataaatactcattttcactcctcttttttcctattttccttttgtggcttttgccatgtaccaaagagtgtagcaatt

SEQ ID NO: 207159 - DNA, 201 bp, Homo sapiens
ttcatcagagatatgggcctgaaattttggtgtattttttgttgttgtatctcttctaggttttggtatccggataatgctggcttcataaaatcagttasggaggtgtccctccttttcaactgtttggaagagtttcagaagaaatagtaccagctcctctttgtacctctgataaaattgagctgtaaatccgtctgg

SEQ ID NO: 207160 - DNA, 201 bp, Homo sapiens
gagttggggtgatggtggaatgggtaattattgtttaatagagtttcagtagggtttgatgaaaagttctaaaaaggaatagtgatagtttcacaacagtrtgaatgtaagtcataccaataacctgtacacttaaaaatggataaaatagtaaattttatactatatatattttatcataattaaaatgaaaaaatagtt

SEQ ID NO: 207161 - DNA, 201 bp, Homo sapiens
tgatggtggaatgggtaattattgtttaatagagtttcagtagggtttgatgaaaagttctaaaaaggaatagtgatagtttcacaacagtgtgaatgtawgtcataccaataacctgtacacttaaaaatggataaaatagtaaattttatactatatatattttatcataattaaaatgaaaaaatagtttaggctttg

SEQ ID NO: 207162 - DNA, 201 bp, Homo sapiens
cggtgattagcactggagcaggttacagtttgtttacatctccatttaggttatagttcactatgcacagagaaacctttaagccaaacttgaaatatgtragtagatagctttaggctaaacttgattcaacaacactcatgtttattatacccaaattacaaaacttttcatgaaaatctatttttatacatccatgtt

SEQ ID NO: 207163 - DNA, 201 bp, Homo sapiens
tggtggaatgggtaattattgtttaatagagtttcagtagggtttgatgaaaagttctaaaaaggaatagtgatagtttcacaacagtgtgaatgtaagtmataccaataacctgtacacttaaaaatggataaaatagtaaattttatactatatatattttatcataattaaaatgaaaaaatagtttaggctttgaaa

SEQ ID NO: 207164 - DNA, 201 bp, Homo sapiens
gtggtttaaatgatgaaataattaaaataattttgtagtaactgcagtaaagagtagcaaaggccaaatttattttttctacttgctagggttactagcarcaaatccatatgggtctgcagcaacctcggtttttgcctctttagaagaaataattcaactgaggggcgtaaggcaggagagatcaaggcaaattttaga

SEQ ID NO: 207165 - DNA, 201 bp, Homo sapiens
ttaaatatgttagttcttgccttctcccgcacagtataagtacctcaagagatacagagtaacttaggcacattgcaactttgtcttcttggctgtactakgtgtgtgtgtgtgtgtgtgtgtgtgtgtgagagagagagagagagagaagagagagtgtgtgtgtgtgtgcgcgcgtgtgtgtcagggtgaaggtctggg

SEQ ID NO: 207166 - DNA, 201 bp, Homo sapiens
atggaataactttcccttataattaatgtcatattatcaagatggtagaaataaaattgctgaagaatattattaatattattattaagcttacttctccytggatagataaaaatcacacagcgttagctacatgcattcaaggttataaaaatggtgtaatgtgaacataaatttgctttatgaaatccgtggctgacc

SEQ ID NO: 207167 - DNA, 201 bp, Homo sapiens
acagtataagtacctcaagagatacagagtaacttaggcacattgcaactttgtcttcttggctgtactatgtgtgtgtgtgtgtgtgtgtgtgtgtgtgwgagagagagagagagagaagagagagtgtgtgtgtgtgtgcgcgcgtgtgtgtcagggtgaaggtctggggagtgggctgtgaagaaaaagaaaatatta

SEQ ID NO: 207168 - DNA, 201 bp, Homo sapiens
taaataggtgggctgttgtccaggctttgtcgtttcacttataaagcacaggaagagtagattaagcataattcttaagagccctattattttttgaatgstaaataaatattggcctaaacttaaagtcattagctacgttaatcctgaataagattctgcctgtcccttgaaggtttgtagctgagacctcctttctag

SEQ ID NO: 207169 - DNA, 201 bp, Homo sapiens
attgcaactttgtcttcttggctgtactatgtgtgtgtgtgtgtgtgtgtgtgtgtgtgagagagagagagagagagaagagagagtgtgtgtgtgtgtgygcgcgtgtgtgtcagggtgaaggtctggggagtgggctgtgaagaaaaagaaaatattagatgtcattaatatgattatagctactcttcttacattaac

SEQ ID NO: 207170 - DNA, 201 bp, Homo sapiens
ttataaagcacaggaagagtagattaagcataattcttaagagccctattattttttgaatggtaaataaatattggcctaaacttaaagtcattagctaygttaatcctgaataagattctgcctgtcccttgaaggtttgtagctgagacctcctttctagccataaagtcctagatagcatcttcttccaatagagga

SEQ ID NO: 207171 - DNA, 201 bp, Homo sapiens
aattctcacagtaagtacaattgtccttaaatatccatagaggatttgtgtcaagacccctcacagataccaaaatcaatggatgctcaaatccctatttaaaaaaaaaaaaaagttaacacctgtaattccagcactttgggaggctgaagtgggcagatccctagagctcaggagtttgagaccagccttgggcaaaac

SEQ ID NO: 207172 - DNA, 201 bp, Homo sapiens
tgattctcacctcacccttccccaagcaactcctgtgactaatgtcaaacaatatgtccttttgttgcttttttcagccacccttacagacccccaacacmatcaacctggaaatgacctcagtatgtgtaatcttaagtcatcttgctaacgcagacacctctgaggttcccaagaaaacttcagtggagttctctaaac

SEQ ID NO: 207173 - DNA, 201 bp, Homo sapiens
tccctttctgcatcaggtacctgacctgccgatgacaaagggattcacaaaagtacccattaaatctatatgtttatattttcaaaactgtgacactttcrtcatcattactctactctagcccttcctgcagggtttattacccaggttgtcaaaatattttgaaaaagacatcgtgaaacacaacgtctatgttgtatc

SEQ ID NO: 207174 - DNA, 201 bp, Homo sapiens
tagtaatatactctttggcaatgattacagtttgcatttctgctgataatgctgtgtgctataattatatgtaagtttataagaaacctggggtaaaaccrtggactttctcccttttgctggcatcatctacagaaataccatgggcatcatgaaaggcagtatagctataggctgaaaaaagcagggttcagtttgctg

SEQ ID NO: 207175 - DNA, 201 bp, Homo sapiens
acacagtggaagtgaaagtaagatttaaggggaacttgcagttaaaggggcagactagccacttttacactgctcttctctttaaagccaagagaatatgaaaaaaaaaaaagctttttagaaaactgagaagaaaattctgtctttaataaaagttaatagctataatcttaaaccacaaactattatattaagaatagc

SEQ ID NO: 207176 - DNA, 201 bp, Homo sapiens
gctataattatatgtaagtttataagaaacctggggtaaaaccatggactttctcccttttgctggcatcatctacagaaataccatgggcatcatgaaargcagtatagctataggctgaaaaaagcagggttcagtttgctgctgtcatgatgccctgttgagagactgctcttcaaagtttcttgtatcattgggtcc

SEQ ID NO: 207177 - DNA, 201 bp, Homo sapiens
agatagtgaatccccccgtaccattacccaccgcgtatgacttatatgtaaaacatagggaaggattatgtggaacaattgaagtcaacctctcagggaamggcaagaatgctatgtgaatctgcctaagggcaggatttatggtagcagcagttaaaatagaaatcttaaaggcattcccagaataagggttacccagaa

SEQ ID NO: 207178 - DNA, 201 bp, Homo sapiens
actgaattcaatgatatcactgttacatcgagatattaatctttatgccatgttttacagaaaattgtattattttccacatccagagtactctgactccmtttactactcattgttagagaattataatataaataaactctataaagagcaactattttctttattctattgatcttactcttattgaggtcaaaatag

SEQ ID NO: 207179 - DNA, 201 bp, Homo sapiens
agcttcttgcttgtggtcagtgttcctgattatttattgagcaggacattggcttaactagctgtgcccctttggatgagtcactcaaccactttaagccrtacttttctcaaatctaaaatggtagaaagaatatctacctcaaagtggtgttgtaaaaatttaagtgagaatacaggaaatgactatgcccatttccca

SEQ ID NO: 207180 - DNA, 201 bp, Homo sapiens
atggtagaaagaatatctacctcaaagtggtgttgtaaaaatttaagtgagaatacaggaaatgactatgcccatttcccagcaaacatgtcttagtttcyatccatttttccttagcagctagatgtgcagaagctttgctaaactattccttttgaacaggatttcttattggcacaggagccaataatttgattcgcc

SEQ ID NO: 207181 - DNA, 201 bp, Homo sapiens
agcctaaatgtcaataagcatcaaaagtctttctgaatgagatagtgccagcattcatcactgttccttctcagaacctcaagcctactctttccaattamcctcatatagggaagccccaatacactggcccctccataccccttttatctccttctggcaggtctcttaggcagttgctccattggcaacagctcccag

SEQ ID NO: 207182 - DNA, 201 bp, Homo sapiens
caaagtcactgctgattcagctagagaaaatacactggagggaggagccaagatggccgaataggaacagctccggtctacagctcccagcatgagcaacrcagaagacgggtgatttctgcatttccatctgaggtaccgggttcatctcactagggagtgccagacagtgggcgcaggccagtgggtgcacgcaccgtg

SEQ ID NO: 207183 - DNA, 201 bp, Homo sapiens
gtctacagctcccagcatgagcaacacagaagacgggtgatttctgcatttccatctgaggtaccgggttcatctcactagggagtgccagacagtgggcrcaggccagtgggtgcacgcaccgtgcgcgagccgaaacagggcgaggcattgcctcacctgggaagcgcaaggggtcagggagttccctttccgagtcaa

SEQ ID NO: 207184 - DNA, 201 bp, Homo sapiens
agtgggcgcaggccagtgggtgcacgcaccgtgcgcgagccgaaacagggcgaggcattgcctcacctgggaagcgcaaggggtcagggagttccctttcygagtcaaagaaaggggtgacggacgcacctggaaaatcgggtcactcccacccgaatactgcgcttttctgattgacttaaaaaacggcgcaccacgaga

SEQ ID NO: 207185 - DNA, 201 bp, Homo sapiens
aataagaataaagttcatggttcaagattaccttttgagaggacaaaactttcccatatttccaataatcaatttttagaaaataaactagatcttaattaaaaaaaaacaaattaaccaattcagtagatatttatttagctccatacataggtagagctctgaggaggataaaattagtcttttcctctcggaaacata

SEQ ID NO: 207186 - DNA, 201 bp, Homo sapiens
agttctttaaaggtgacaagttaaacagtagtttttaagataatattttgatgaaatttttaatcatattattacaagattttagaagaagcaagatcttrtgaaaacaaaaccttaatgtccatatctagctctctaaatctatagtcagtctttaaaagagtgacacaaaaatgacacagatccgccctctggttcgct

SEQ ID NO: 207187 - DNA, 201 bp, Homo sapiens
aacaattgaagtcaacctctcagggaacggcaagaatgctatgtgaatctgcctaagggcaggatttatggtagcagcagttaaaatagaaatcttaaagrcattcccagaataagggttacccagaagtcaacatggcagattaacacccaatatagagttgctttagcctccacaataatgtagggaaataaatataat

SEQ ID NO: 207188 - DNA, 201 bp, Homo sapiens
aagttatacactcaaatatccaatgaccagcttgacatttctacctgcatgttcaatacttatttgaaacttaatatatcctaaatataatttttttttamacagtcatgctctgttgcccaggatggagtgcagtggcacaattagctcactgcaacctcagactgctggtctcctaccccatcctcctcggtagctagg

SEQ ID NO: 207189 - DNA, 201 bp, Homo sapiens
atccaggacaaattttatttagttctaggaatatacagtgagatttttcttactgccccttgacgttagatattattcaccttacagtgatcagagatacrtcttttagcatccaccacttgttcatcaaccttgtctgtcaaatggagaaatctatgtggcaaatgcaacaagaagttttccttgacccaataaagatac

SEQ ID NO: 207190 - DNA, 201 bp, Homo sapiens
agctcactgcaacctcagactgctggtctcctaccccatcctcctcggtagctaggaccacaggtgcatgccagtgccagcacacctggcttttcttttcttttttctttttttttttttttttttgtagagatgacatcttgctacgttgtccagactggtctcaaactcctggcttcaagcaatcccctgcctcggcct

SEQ ID NO: 207191 - DNA, 201 bp, Homo sapiens
gatttgtgccagttttcaaggggaatgcttccattcagtgtgatattggctgtgggtttgtcatacatggctcttattattttgaggtatgttccttcaayacctagtttattaagagtttttaatatgaagggatgttgaattttatcaaaagcctttactgcatctattgagataatcttgtggttttcatctttagtt

SEQ ID NO: 207192 - DNA, 201 bp, Homo sapiens
agattcactggaaacatggctaattgaaaaggtagtcctgacaaacacttaagatgttgagttaattaatgtctttaaaatactggagattataaaatgawagtgtgacataaaatgaacaaatgtataaattgtgtattaatgctttctcaataaatccattttattgcagttatcattttttaagcctacgccaaaacg

SEQ ID NO: 207193 - DNA, 201 bp, Homo sapiens
ctgcaacctcagactgctggtctcctaccccatcctcctcggtagctaggaccacaggtgcatgccagtgccagcacacctggcttttcttttcttttttytttttttttttttttttttgtagagatgacatcttgctacgttgtccagactggtctcaaactcctggcttcaagcaatcccctgcctcggcctcccagt

SEQ ID NO: 207194 - DNA, 201 bp, Homo sapiens
ataggagtagtgagggagaacatccttgatttgtgccagttttcaaggggaatgcttccattcagtgtgatattggctgtgggtttgtcatacatggctcytattattttgaggtatgttccttcaacacctagtttattaagagtttttaatatgaagggatgttgaattttatcaaaagcctttactgcatctattgag

SEQ ID NO: 207195 - DNA, 201 bp, Homo sapiens
ttattaaaatcttcattactttaatggaactttcaagaaagcatgaaggacctatacttctgttactattagatcattttgcttaaaatagagaataactyagatgtgtatttattttcatttttcaagggctagccatatggcaagcaaactatttttctgttaataccactggattctgccatattcttcaatgggatg

SEQ ID NO: 207196 - DNA, 201 bp, Homo sapiens
tgcaacctcagactgctggtctcctaccccatcctcctcggtagctaggaccacaggtgcatgccagtgccagcacacctggcttttcttttcttttttctttttttttttttttttttgtagagatgacatcttgctacgttgtccagactggtctcaaactcctggcttcaagcaatcccctgcctcggcctcccagtg

SEQ ID NO: 207197 - DNA, 201 bp, Homo sapiens
tgtttcttcagagttttgtaccttcggataatttcttactgctaattaagatctgtttctttctgattgaagtacttcctttagcaattcttgtagtacargtctggtgttattgaaagccctcagcttttgtcagaaaaagtgtttatttaccttcatgttttaaggaggtattcaccagatatgctattttaggtatag

SEQ ID NO: 207198 - DNA, 201 bp, Homo sapiens
tggaggttgtggtgagccaagatcgcaccattgcactccagcctgggcaacaagagtgaagctccgtctcaaaaaaaaaaaaaaattatgaaaacttcagrattgctaggatacaggatacacataggtactttgtatttaactaatttttttcagctcaagttgtttgcaagaccaaatctaaattcattcacaaccttt

SEQ ID NO: 207199 - DNA, 201 bp, Homo sapiens
tcaaactccttacctcaagtgatctgcccaccttggcatcccaaagtgccaggattacaggcgtgagccacacacccggcatgttttctttttttggaaamaataacaggatatcagattgataaatgcaataccaatttctgataatttatcttgctatataatacttcatggacttcttgcactttgtggtgttttatt

SEQ ID NO: 207200 - DNA, 201 bp, Homo sapiens
ctatttgtgtcatctataatttttctttgagcagtactttggagttctccttgtagagagctttcacctccttggttagatgtatttcttagtgttttacygttttttcgctgttgcaaatgggattgtattattgatttggctctcagcttaaacattcttggcatatagaaatgctcctgattttttaatgttgatttt

SEQ ID NO: 207201 - DNA, 201 bp, Homo sapiens
tacttttctgttttatagaactcttcatattttagagcaagtataaatgcaaatataatacaccaacaaacttacacatttttatttgactggggaattcrtaagtgttccttttacttttttctggtatggaaataaagaaataatatgctgggaagaaaaaaaaaaacccttttcatagttgttgtattggagtatgtg

SEQ ID NO: 207202 - DNA, 201 bp, Homo sapiens
tggaagtgaaattgtccttaaacagaatagaaatgtttatgaaaatcattcagggaagaggtcaaacttggaacagaaactgaattggtgagtctaagatwgggaggaaagagaaaatctgtctttccattggtagtaggattgtcatgctaaagaatactggtttaggtgggtggcgagtagaggaattaggagaagtgg

SEQ ID NO: 207203 - DNA, 201 bp, Homo sapiens
taactaattgtaaaatagagtaaaattaaaaatgatatgtcattaaatttttacttaatatatgtttagtaaccaaactaaataattaagtatggtatatracatctcaactttacatatgtatcttaatatatcttaaggcaaagcacctttcacggtccttcttttcaaaagctattgaatattttactttctttattc

SEQ ID NO: 207204 - DNA, 201 bp, Homo sapiens
gtctaggactttcagtaatatgttcaacagcagtggttaaagtgggcatccttgtattgttcctaccttagaaaaaaggctttcaatttttcgctgttcartttgatgtaagctgtgggtttgtcatctatggcctttatgttattggggtgtatttcttctataaccaatttgttgagaatatttattatgaaggtatgt

SEQ ID NO: 207205 - DNA, 201 bp, Homo sapiens
cttttgtaactcatttctagttttattcccttatgatcagaaaagatacttgatatgactgcaacattttaaaagttgttgagaattgtttgtggcctaasatatggtctatcctggcaaatgttctaagtgctgatgagaaatatgtgtatgctaaagtagttgaatgaaatattctgtaagtgtctgttaggtccattt

SEQ ID NO: 207206 - DNA, 201 bp, Homo sapiens
tgattttctgtgtagacaatttataggttcctttcgatcttggactgttactaaaaagatgcactgagtataattatacataatttacttcatacttattyaaatacttttggagattaaatttccagaaatgaatttcgtaggtcaatggtgtttatctttataactttggtagctattgctcatttattttcacagagg

SEQ ID NO: 207207 - DNA, 201 bp, Homo sapiens
tttctctatttctcctattaaaatctattagtttccattttgttccttgctgggattaggatgaataagtaatattctcccaaaaaattattcaattaatytagatttgtcaatttaagcaatgtctcttttatgatgtgcttatttttccctattttgtgaatatccttctgcatatgtttttcttttcatagctttacc

SEQ ID NO: 207208 - DNA, 201 bp, Homo sapiens
ttgaaagataaagtcatcagattgtactacgaagcaaagacactcaattaaaataaataactcagaaaaaaattgaataaaaggatgagcaaaagtataartagaaaatgtaaaataaagcaagatgcaatctttatatatgacaaaatggaattcagaccaaaaaaaaatgatgagggatacttttgtcaataattttaa

SEQ ID NO: 207209 - DNA, 201 bp, Homo sapiens
taaagcaagatgcaatctttatatatgacaaaatggaattcagaccaaaaaaaaatgatgagggatacttttgtcaataattttaactttcttgatattcmctttgtattcttagatttgattatacttgttttacctgatctatcatgtttaaattatggatagtgagtaaaactatgttaactcctctatttgtttagt

SEQ ID NO: 207210 - DNA, 201 bp, Homo sapiens
taattttaactttcttgatattcactttgtattcttagatttgattatacttgttttacctgatctatcatgtttaaattatggatagtgagtaaaactaygttaactcctctatttgtttagttgtttatttttacactttcacatatcatttcctatttactgttaccttaatctccacatttgttcagtctcagtcct

SEQ ID NO: 207211 - DNA, 201 bp, Homo sapiens
tcttcgtgtagtcccttgtttctttcatatttgggttatgaaaatgtcatcactattttcaagcacaagttattatttcctcctgtgatactgtttgaacrctaggtctttgatgtttctgtcagatatacccagcaatcatcatcataactcatactcttgaatttttaatatcactccacacacagaagtgtcaagtac

SEQ ID NO: 207212 - DNA, 201 bp, Homo sapiens
gtattttgttgatgatttttgcttcaatggggatattgacccgtaattttgttgttgttgttgttgttgttatttctttggcagattttggtatcgagtgwtactggcttcctagaatgagtcggggaggagtcaccccctccttaattttttgggatagtttcagcagtgttggtaccagctcttctttgtaagtctgat

SEQ ID NO: 207213 - DNA, 201 bp, Homo sapiens
cataatgtaaccactgctctgaaaatggccctgctctcttgtattctatacccttaattgtatcaagggtgtagcttttggaattcaaattgggcaccttrtttttactttagataattttttttttaaactggaacttcagtagatattccatcgcttgagcttttaccattctgctctgacttttttcagttcctccta

SEQ ID NO: 207214 - DNA, 201 bp, Homo sapiens
tgaggttcaaatcttggctaggtcatttaattgttacacaatcttgagcaagttacttgacatctcgctttaaaagtgctaatttaacataacagcacccrccttacaggttcagtgtgagaatgatgaatataaaacaccaaatggattggcacacattctgctattaaatgatggtttccttacctttctactcttctc

SEQ ID NO: 207215 - DNA, 201 bp, Homo sapiens
tgaaggtaggaatgagcagctttaagtgtaactatgaagaagcaatcaatactatgggaatcaaatggggatatagcagatgtagatttatccattatcamgattattctaacaaatttttaccctcttgctgtagttcctcctattatcaaccaaggtgaggcaaagttctttgaaatgtagacttcgataggtctctct

SEQ ID NO: 207216 - DNA, 201 bp, Homo sapiens
gacttaatcatttccaaagccctgacctcctaatactgtcacattgggtataaggttgtgacatataaaattggggtctggggagaccaacatttagaccrtagcatccccctttcaaatttataattcccctaacttctaaccacatagtcagctttgtccattttgaactttatataaatgcattattttgtctagttt

SEQ ID NO: 207217 - DNA, 201 bp, Homo sapiens
aaggtatttgtatatttatttctaatcaataatgccaatcctccaaaaaagttgttcttctaccagcatatattagactttctgtttctctacagcttcamcaatagttactgttttcagtctttataattttagctgttctaagtagtttgcagtggtaatgcgtggcagttttattttgcagttccctgattattgata

SEQ ID NO: 207218 - DNA, 201 bp, Homo sapiens
gatgacaagtccctactattcattttgcttattttgcaaattctggttttgacttagattagatgatttaatttcttattctaaaatctcttataattccwtaagtcaaggagatccctctgttttcatctatctcaaagaatgttcagaattctatatgtgaattttattaagtggttcttctctgttgtgtattttgtt

SEQ ID NO: 207219 - DNA, 201 bp, Homo sapiens
ggttgggaatgggcttcgggttggctaaatataatatttcttatgttcctcaattataccctcataggatctcattgttcctaacccattttcctctttcstctttcattgctcctttttcctttttttctatccctttattcttccccctcgctctcctttctttttgttctctcccttgctctctctctttcttttttc

SEQ ID NO: 207220 - DNA, 201 bp, Homo sapiens
aactagccaacctattattgctaatcatttattcctaccctctatataaagatgaccagcatgtgtgcacacacacacacccagacacacatctccctatrccgttttctttttttcgttcattttctttaaatttcccattatactttttaaaaagtaatattgtccaaatttatagcactgtagttcttggattgtttc

SEQ ID NO: 207221 - DNA, 201 bp, Homo sapiens
ttctttaaatttcccattatactttttaaaaagtaatattgtccaaatttatagcactgtagttcttggattgtttcttattacttttgcatcaagcaagraatgatattcagaacacttaaagttctgattggtatggtatagaagctgcatttcccacagtcacaaagaaggtcatactccatgttaataccaggtagt

SEQ ID NO: 207222 - DNA, 201 bp, Homo sapiens
caccatatgatgtagctataaagatggatagcagcagaaaaactagtgggctcctgtgcagtgagtcaaatgggaatgacaaacagcatgacaaatagaaraaacaatcagtcaatcaacattcatataccgtgcccctactagagtccctgctaggaatcaaagaaagaaatgacatagatcttggttaaaaagatcgat

SEQ ID NO: 207223 - DNA, 201 bp, Homo sapiens
tgaattggtgagtctaagatagggaggaaagagaaaatctgtctttccattggtagtaggattgtcatgctaaagaatactggtttaggtgggtggcgagyagaggaattaggagaagtggaaattggccaatacagtatagacacaggctggaagctagacaggagctatcttgtgaggagcctcttaatagtaagttct

SEQ ID NO: 207224 - DNA, 201 bp, Homo sapiens
attggtagtaggattgtcatgctaaagaatactggtttaggtgggtggcgagtagaggaattaggagaagtggaaattggccaatacagtatagacacagrctggaagctagacaggagctatcttgtgaggagcctcttaatagtaagttctagtttaggtttacctttgagctctgagattggcatatctagtaccagt

SEQ ID NO: 207225 - DNA, 201 bp, Homo sapiens
ggtgggtggcgagtagaggaattaggagaagtggaaattggccaatacagtatagacacaggctggaagctagacaggagctatcttgtgaggagcctctwaatagtaagttctagtttaggtttacctttgagctctgagattggcatatctagtaccagttataaattacacacaaggttttgcttctcttctaaaatg

SEQ ID NO: 207226 - DNA, 201 bp, Homo sapiens
aggagaagtggaaattggccaatacagtatagacacaggctggaagctagacaggagctatcttgtgaggagcctcttaatagtaagttctagtttaggtktacctttgagctctgagattggcatatctagtaccagttataaattacacacaaggttttgcttctcttctaaaatgttttaagtttcaacttcctcagt

SEQ ID NO: 207227 - DNA, 201 bp, Homo sapiens
caccagccagggtgaagagccagtgtgacagccagactcttctcgaagttacgaagttacgccaccaagctgtccctctgaagtcaagccacttctctcckatgcccagctgtatcctgtctactggctgagtctgggattaatataggcacaggatggggcggggtggggccatgagtggtttaggaaaaagcaacattt

SEQ ID NO: 207228 - DNA, 201 bp, Homo sapiens
catctgttctgacccctaatattccaacaccagttattgtgtgcccttgtcactcatcttaatataagacatctcagcccacaaatggcagtattttcacrccagtgctagagtttagaaggggggaaatgagagaaaccaagcccaaatgcttcagtaaaaataaatgcattatctaatattatttgctttcctctctga

SEQ ID NO: 207229 - DNA, 201 bp, Homo sapiens
aacaatatacttcatttgaaatacatgctttccaaagaattcaattggttgaacaagaaatttaatcaaaaagggaagcttcagtgctaaaaacaagtcaytgcaatcatgtaaagcggatggtttaatgcaaagagaccacttgaatattttttttcaaaaattagactttagaaaatttcagattcctcacgttgatga

SEQ ID NO: 207230 - DNA, 201 bp, Homo sapiens
tgttgtccaagctggcctgagataatattttatatatataggtgctctttgacttacaatggggttatttcctgataagcccatcataagctgaaaatatcataagtaaaaaatgcatttaatacacctaatctatagaacatcatagcttagcctagcctaccttaaaacacattcaaaacacttacatagcctagagtt

SEQ ID NO: 207231 - DNA, 201 bp, Homo sapiens
cagtgtctctgaagatatatagggtcaatgaacctttcaggcataaaaagtaaaacttgtcaaagagcttcagctcttgttttaattacttcaagttttakccctaaagtaacctttgaaatctgcagggactttatttttttttcttactattaatcgtgaagagctattgctacattttcatgtgttcttgtttagaac

SEQ ID NO: 207232 - DNA, 201 bp, Homo sapiens
tgtttatttttagaataaacaatcatgctgtacccagcatgttccatgtttttgcaatgctatgacaatttgtctgatcagcacattttttaaagccaagraaacagtaagacaattatatttcattttaagttatagcctttaggaagagagagaagaggaaaagaatgttcgcattcctgaacacaaacttaaattatt

SEQ ID NO: 207233 - DNA, 201 bp, Homo sapiens
gcttccatacaggggtaatagatccacaggtaatggggatggggaaagacaatggatggcaaacaattagaatcttcggtggagctggttcaaggtccagrtgctctctttgtgtcctttgtacaaagctggcggaaatatataatttcttaagtgaataaatgcaaaaaagagatattagcatgaaataatgagataggc

SEQ ID NO: 207234 - DNA, 201 bp, Homo sapiens
tgctatttttttcattgctctgtctcacagccactgtttgcatcagatttttaaaaaagaaaatgccaagcagtacattttgaatcagtttccacagaaarcattatgtgcataaaatttcatatattatctttgatatgtaaatataggagaaataagtttctttggtaaattttagcatttcttcttttcaaaaaataa

SEQ ID NO: 207235 - DNA, 201 bp, Homo sapiens
taagactcaaagagaagagggaaataacctaatggtgtccaattcaggtgtctaaaactacctaacagaaagagtggagctgatgaataaatataaagaaygctgtgtttgacatattgtgttttgggcagaggcagaactagagaatagggcttctgacttctaatcgaagacattctcctattacttgattaagatctt

SEQ ID NO: 207236 - DNA, 201 bp, Homo sapiens
aaaaaccaacaaaaatatcttgccctagcttaagctaagagtgaggcttcctgataagtaggtcatccagactctagggatatgttttccccatgttggayggaaagatctaccctgtagtggagatgtgaggtatttgacaagtgtaatagatgattcaagtctgatactagcaaattcattaatactatgatgagactg

SEQ ID NO: 207237 - DNA, 201 bp, Homo sapiens
cagactctagggatatgttttccccatgttggacggaaagatctaccctgtagtggagatgtgaggtatttgacaagtgtaatagatgattcaagtctgayactagcaaattcattaatactatgatgagactgcagtcacagatggagagatcaatccttcccccaggcactgtctaacactgctttaaagggtagaaag

SEQ ID NO: 207238 - DNA, 201 bp, Homo sapiens
gacctaggcatgcaaagagaaacagaacaaggccctgctcataagagtttccagcgacctagagaaactggaaagaaaatagtctggccctttttgtcaayaagtcacgtgcatctataataggagtgagaacttgacgaaaaaataagaagaaaggctcagtcatatgtcagtaaatttcccgggaaagcagaagtatac

SEQ ID NO: 207239 - DNA, 201 bp, Homo sapiens
gagcttagtaaaagcaatttgtacagagaaacaccaaactccatggccttaaagaaagcagaactggccgggcgcagtggctcacacctgtaatcccagcrctttgggaggccgaggcgggtggatcacgaggtcaggagatcgaaacaccgtgaaaccccatctctactaaaaatacaaaaatattagccgggcatggtg

SEQ ID NO: 207240 - DNA, 201 bp, Homo sapiens
agaagaagtcacacacagagttcccaggcagttaaaaagtcggtgaaacagaaatggaagagacaggactcatttcatgtacatggcaatagaaaactttyaagagtatgaagacttgatcttttcacctgtgttaaatactcataaggcacaaaataacttccttgatttctgttcaaaattttcccactgcagttcact

SEQ ID NO: 207241 - DNA, 201 bp, Homo sapiens
ttacaaagaccagtctgaatagaaaaggatggaaagcaaggtaaagtttgctgcagtctaaagctacaagtacacattgcttcagttcatgctgtgttccracaatccatggaagtcctcagaacccaaatcactgaagctgtaagtagagtctagaatactaatggctctgggaggaaatatccaaagtcactgctgatt

SEQ ID NO: 207242 - DNA, 201 bp, Homo sapiens
acacgctttcattccttattatgactgtatagtattccattgtgtatatgtaccatatttgttttatccaacccccttaatggcacctcggctgattccaygtctgtgctattgtgagtagctgcaatgaacatacaagtgcgtgtgtctttttggtaaaataatttattttattttggatatgtacccaataatgagatt

SEQ ID NO: 207243 - DNA, 201 bp, Homo sapiens
taaaacttaagaataagaatgtcgtaaatgtctttacagggtttaaggagataatcttatttttcctttagctttattaataaaatgaattgtatattcayaaatttgctagtatagacccatttttgctctatgtgaaccctactgttcataatgtgttgtttaatatgctgttagaatctgtttgcagtattttatgat

SEQ ID NO: 207244 - DNA, 201 bp, Homo sapiens
tgaaattataggaattatattcaaagtccaagaagcttgttgggagcatagccttgtatggggcatccctattggaaaaaggacatgaatatttcctcagygcaccaccaggaaatttaatattatgaggtacatagcaacacaaaaaaatcttcactcactaccttctgaataatagtaaaaagaatatacttttttatt

SEQ ID NO: 207245 - DNA, 201 bp, Homo sapiens
aacacttctgatgctttcaaatgagatagaccagtaccaatagatttctcagtgagtttttatagaatccccagttgaaatatgacctcggccttctgagkcacctgttctgcttgtttagcctgtatttagccagtgttaatatggatgactttccagctacaacttcttggcttctcagccatatataattggctatct

SEQ ID NO: 207246 - DNA, 201 bp, Homo sapiens
taaggagataatcttatttttcctttagctttattaataaaatgaattgtatattcataaatttgctagtatagacccatttttgctctatgtgaaccctrctgttcataatgtgttgtttaatatgctgttagaatctgtttgcagtattttatgatgtttgtattaatatttttaagactgaatatgtatgcaatccta

SEQ ID NO: 207247 - DNA, 201 bp, Homo sapiens
aagtcttttctctatttctcctattaaaatctattagtttccattttgttccttgctgggattaggatgaataagtaatattctcccaaaaaattattcawttaatctagatttgtcaatttaagcaatgtctcttttatgatgtgcttatttttccctattttgtgaatatccttctgcatatgtttttcttttcatagc

SEQ ID NO: 207248 - DNA, 201 bp, Homo sapiens
agcaaacctccacatgtgcccattgtattagattctcctaaaatgcacatttcccttgggatacttttcttctgagcttttttgaatgggcaagaatgggsccgactgacaattttgataaaaatacttgaattttaaatcatgccaacacatttccataatcagctagaggtatttgattgaaagttttaaacagtgatg

SEQ ID NO: 207249 - DNA, 201 bp, Homo sapiens
agtaatattctcccaaaaaattattcaattaatctagatttgtcaatttaagcaatgtctcttttatgatgtgcttatttttccctattttgtgaatatcyttctgcatatgtttttcttttcatagctttaccttcttatgttttcttgatcaattggtattcctctccctcaccacaacaaacttgacttatgtatcag

SEQ ID NO: 207250 - DNA, 201 bp, Homo sapiens
aattagaaactttctttgatgcaacaacaatatgtgctctttaagaaaaatctggaaaacataggaataaagcataaattaaaatatttaacattttggcyatagttaaatataaatgcatacatgttattgttttaaaactagaatcacactcaaaatattgtgatctctattttaatctttttgtatatatattctttt

SEQ ID NO: 207251 - DNA, 201 bp, Homo sapiens
ttggcgctggtaggacccaaccccactcactcggacctgcagcgttccacccctcatgggagggagcgcacaggtgagcaggtgtaggaactgaccccacrctttagaaccggcaggattgaactccatgcaggccccacagcagactccaaccgggggtgcctgcgactctcagagccccagagggcacgttacagtgct

SEQ ID NO: 207252 - DNA, 201 bp, Homo sapiens
catgcaggccccacagcagactccaaccgggggtgcctgcgactctcagagccccagagggcacgttacagtgctcttttagctctgctgtccgcagtccktagtccgcattagtgttaatagctcagtggggcctctgacttttcacatgaggcggctgccttccaccagccagggtgaagagccagtgtgacagccaga

SEQ ID NO: 207253 - DNA, 201 bp, Homo sapiens
cagcagtggtggatagcaagcgaaagctcaggtcaagccgtaacaaacacggaccaaaagagtgtgcagttgcaagatttaatagagtgaaaacagagctyccatacaaagggaggggacccaaagagggtagccattgccagctcaaatgcctgggtttatatcctgatcattatccctccccctgtgctctcaggcaat

SEQ ID NO: 207254 - DNA, 201 bp, Homo sapiens
ggttcttctctgttgtgtattttgtttaggtgttttaaccttcaccttggatttaatataataatatgcccttatttttactttattatttgttatttcartgtacttctgtgctctcagcttgatttgataaatacatcatctttcctttttagtatgctattgagtcacaactacaacttcacggacttaacattgaag

SEQ ID NO: 207255 - DNA, 201 bp, Homo sapiens
actatgtttaataagccttctgtcatcttacttttctgttctcttagagctttagagagaccaaagagtttttcactgttaaagtgtccagtatgtagccragaaccatatggagaacatcaaatacagtggaacaaatgtaactgctattgatgtcacactttgtgaagtagtctttgttgcttaaaaagggtgacatct

SEQ ID NO: 207256 - DNA, 201 bp, Homo sapiens
ctcagtctccatttatttaaattgaaatagaggatctcatgtattatatcaacccaaagggtgagccagtgcccggatagaaggaggtggggtgggggggwagaagtaatatacataaattctagagaatgtcagtgttcggagttaagctttgacctcctagcacacacaggtcttgtacttgagatttctctcagcatg

SEQ ID NO: 207257 - DNA, 201 bp, Homo sapiens
cgaagaagctgaacactgaacaacagactgactacataaaaagtaatacttttctgttttatagaactcttcatattttagagcaagtataaatgcaaatrtaatacaccaacaaacttacacatttttatttgactggggaattcataagtgttccttttacttttttctggtatggaaataaagaaataatatgctggg

SEQ ID NO: 207258 - DNA, 201 bp, Homo sapiens
acaagtcagaaattcaagtttctaaatcaaactctgctgtcgtcaaactctgtcctctttggaaagttcattaggatctattggcttgaaattttcatccrtatttggggtataaaataaattacctccaagagttgtgattggattgaaatgggacagcacacataaactatatactatattgtctagcctatagcaggt

SEQ ID NO: 207259 - DNA, 201 bp, Homo sapiens
tcttcttgattatgatttcaaaaagtggttttggggaaaagcttacattgtatgatatttaaatccatttattaaggtatgttttacttgattatactaayttaatttaaaataattttgaaggtatgttcccggaccaaattgagggttgggctgctatttctcatggcccaataacaagatgcagatgaacaggggagg

SEQ ID NO: 207260 - DNA, 201 bp, Homo sapiens
aaaaatcccaccatctctgtctttaaagagatcagaatcagatgtgacatagaaatatgtaaagagaatattgctttagactgtgttaagtgcttgacaamgggagacaatagattcactaaggtgtcttagaaaaaacaccctcgacatgttctaacaccacccaaagtatacttatgtatgctccaattcgtttagctt

SEQ ID NO: 207261 - DNA, 201 bp, Homo sapiens
ggtcacggaagagaaccgtggaacccagtgactagtgttcagctccattaggatgaacctgggcacttagccgtgcaggaacaatggcaagcctttagccygatcaggagtggcagcgggcgcctcgctggatcaggagcacagtgaacacactgctggatccagagaggtggaagtcagtggtgggtctgcaacggtggc

SEQ ID NO: 207262 - DNA, 201 bp, Homo sapiens
catattcccacaagtgaagattctcctttcctctattcccagtcaaccattacttgcttcacaggttacaacttgtcctagaggtttgctttgtgtaggcyctcattgtattagcaaacatggtgtatttttaaaatgtagtcatatgccaacaataggaaatcatgagatttcatataaagactcctggtttcaaatatc

SEQ ID NO: 207263 - DNA, 201 bp, Homo sapiens; identical to SEQ ID NO: 36397

SEQ ID NO: 207264 - DNA, 201 bp, Homo sapiens
tctgtgttgggtggaaaggcctgtacttcactagagattgatccagaattattaaaaatgggtgtcctgacccctaaacaccctgtgaccaagcagataamctcatgctttatttagtccaacttcctacagaatctgtcatcatcagaggctgtcacattttctgtgattttaaaaaagcatctgtgagcatatggagaa

SEQ ID NO: 207265 - DNA, 201 bp, Homo sapiens
cttccatagtctcttaggtaccaatgctaagatgctcattattgttgtgtcaggtaagttattttcattcagcctgaattttaaaacagcaataatacacrtatgcatggattcctgtgtttgaaagaagcttatatattttgtcttcattatgaaattcttgccttggcctctaatcatagccaattaattttcacagta

SEQ ID NO: 207266 - DNA, 201 bp, Homo sapiens; identical to SEQ ID NO: 36399

SEQ ID NO: 207267 - DNA, 201 bp, Homo sapiens
gaattcttgtccaacaaagatgaagatgagatataagaagtgtctatgggggtggggtccaaagatgcaagccatggggaaaaatttcccacgtcaatgcmtaagtccaagttctgtgttgggtggaaaggcctgtacttcactagagattgatccagaattattaaaaatgggtgtcctgacccctaaacaccctgtgac

SEQ ID NO: 207268 - DNA, 201 bp, Homo sapiens
aattgatgattattggcatcaagaaatttgaagaccaaaataaacccaatgaaatgtgttgtatgttaatacatggtgcaagaatactgaggcacttttarctatgtgaatttggtctctgcatctcagtttattcaagggctatttctggacaaccttatctgcattatattacatcttttcatatatgtggctcataag

SEQ ID NO: 207269 - DNA, 201 bp, Homo sapiens
tctttaatgggccaagtatcatcctgtattcaggtcctttgcagctgctcatctctctcctggagtcatcttccccctgatatctccatgtcttgctgtcrggtctctgctcaaatgtcaggttattagacagactctgcgaccaccctagttaaaacagcagcccatcaaagtctttaaccctcttagcatttactcaga

SEQ ID NO: 207270 - DNA, 201 bp, Homo sapiens
agtaaatttaaaaccatttgactctagtcgaacaaataccatacttttccatttccccaaatattttctcacattattgttctatgtcttcatgcaacgtytttaatctttaaatttcttaagtgttttcttgggtaaaaattcactcaactagaaaatcaaactttctaggagtatctagcccaagcaataaagacttca

SEQ ID NO: 207271 - DNA, 201 bp, Homo sapiens
tcataactcccctgtctccttaccactcctgcaatctctcccagaccattcgttctgagccaatgacctcacttcataatgtatagagaaaatagaaactrccagatactcattttttaccctctaactttgcaaacataactgcatttgtgcatcatctccttcttccatcttattgcaaaaacctcctcttatcaaaaa

SEQ ID NO: 207272 - DNA, 201 bp, Homo sapiens
aaaattaatatgtaataggataaggatgcaaacatcaaagcaaatagcaaatatagagaacttcttacctaggaactaattatagttaacctctttgggtytctttgctcatttctaaagttaaaggtaatgagttaatttctcaattctttttcagtactaaaagtatttgctcatgtctgtagcttaccagatccttgg

SEQ ID NO: 207273 - DNA, 201 bp, Homo sapiens
tctcactagatcataaaggggacttgggaaccaaaagtatctcaagacatttaatcctagaagcacaaagaaagtataagttgtctcttatattgcttttrccaaatccagtttaacacttcagtaacgttaactattgtgtcatggttctaagggtctttactttattaactcagtgaatccttgtagcagtctataaat

SEQ ID NO: 207274 - DNA, 201 bp, Homo sapiens
aactgacttgacgaaatcagagaacacaggaagttctggatatttgcagatgaagtttaataaataggaataaaaggctcaataaaaaagacacacgcacrcacacacacacacacacacacacacacacacacacacagcaaatggaagcagccagacaaaagcaataaagaacaaacaactaaaactatttgtgtattt

SEQ ID NO: 207275 - DNA, 201 bp, Homo sapiens
ttctcctattgtatatttttatacaatatacatatagtgtatacaatatatattgtagggaacaaaaaaaaattccccctcaaccctcatgaattcttagytgggatgggtccctataacaaaagatagattaataagagggaaacaaacacgtttattaacgtgcagtgctcatcatacaggatacactccaaggaaaag

SEQ ID NO: 207276 - DNA, 201 bp, Homo sapiens
tattgtgaataatcctgcaatgaacatttatgtgcatgtgtctttatgacagaatgattaatattcctctgggtatatacccagtaataggtttccaaacyatactataggggggtacaataaccaaacagcatggtactggtacaaaaacaagcacatagaccaatgaaacagaatagagagaccagaaataaggccgca

SEQ ID NO: 207277 - DNA, 201 bp, Homo sapiens
aatagaattaaatttttcctgctgataatatatattttgatatgagaaaagaagcagggataggctgaaatcgaatggcaggagatatggccacagtcttyaatcccctattttcttgacctgcagattgtctcattcggggaagctccagggttctcaagcggaattcgtgtttcattttgtgtagcacccgtcagaaag

SEQ ID NO: 207278 - DNA, 201 bp, Homo sapiens
ttatttcatcacccaggtattaaacccactacccaataataatcttttctgctcctctttctccccccaccctccatcctcaagtagacctcaatgtctgytgtttccttctttgtgttcatcagttctcatcatttagctcccacttataattgagaacatgcggtatttggttttctgtttctgcattagttttttagg

SEQ ID NO: 207279 - DNA, 201 bp, Homo sapiens
atcctgcaatgaacatttatgtgcatgtgtctttatgacagaatgattaatattcctctgggtatatacccagtaataggtttccaaaccatactataggrgggtacaataaccaaacagcatggtactggtacaaaaacaagcacatagaccaatgaaacagaatagagagaccagaaataaggccgcacacctacgacc

SEQ ID NO: 207280 - DNA, 201 bp, Homo sapiens
taggggggtacaataaccaaacagcatggtactggtacaaaaacaagcacatagaccaatgaaacagaatagagagaccagaaataaggccgcacacctaygaccatctgatctttgacaaagctgacaaaaacaagcaatggggaaaagacttcctattcaataaatggtggtgggataactggctagccatatgcagaa

SEQ ID NO: 207281 - DNA, 201 bp, Homo sapiens
aataaggccgcacacctacgaccatctgatctttgacaaagctgacaaaaacaagcaatggggaaaagacttcctattcaataaatggtggtgggataackggctagccatatgcagaagactgaagccagtctccttccttatactatatacaaaaatcaactcaatgtggcttaaagactacctaaaactataaaaacc

SEQ ID NO: 207282 - DNA, 201 bp, Homo sapiens
aaattaagtatctgagcacccagaagttagctttctataagtatatattaccaataagacaaagccagcctgaagtttagaagggagcatgaatagtccasaagtaactgagaactgattaagtgcccttatggctacagtattctgctggctgtatcatgaatgaattaattgatgattattggcatcaagaaatttgaa

SEQ ID NO: 207283 - DNA, 201 bp, Homo sapiens
tcagcttctctttcctatttctcttaaaacttccatgtttgttccttctttcttataacaactctgtttccctctgaatctctatcctgttcctctctctycatctctgtctatgccccatttttctgtgcagcgtctctgcctctctattactcattatagtcctcacactcttatgatacttttacaacctcactgtca

SEQ ID NO: 207284 - DNA, 201 bp, Homo sapiens
taaaactgacttgacgaaatcagagaacacaggaagttctggatatttgcagatgaagtttaataaataggaataaaaggctcaataaaaaagacacacgracacacacacacacacacacacacacacacacacacacacagcaaatggaagcagccagacaaaagcaataaagaacaaacaactaaaactatttgtgta

SEQ ID NO: 207285 - DNA, 201 bp, Homo sapiens; identical to SEQ ID NO: 36401

SEQ ID NO: 207286 - DNA, 201 bp, Homo sapiens
aaactgacttgacgaaatcagagaacacaggaagttctggatatttgcagatgaagtttaataaataggaataaaaggctcaataaaaaagacacacgcaracacacacacacacacacacacacacacacacacacacagcaaatggaagcagccagacaaaagcaataaagaacaaacaactaaaactatttgtgtatt

SEQ ID NO: 207287 - DNA, 201 bp, Homo sapiens
gacttgacgaaatcagagaacacaggaagttctggatatttgcagatgaagtttaataaataggaataaaaggctcaataaaaaagacacacgcacacacrcacacacacacacacacacacacacacacacacagcaaatggaagcagccagacaaaagcaataaagaacaaacaactaaaactatttgtgtatttttag

SEQ ID NO: 207288 - DNA, 201 bp, Homo sapiens; identical to SEQ ID NO: 36402

SEQ ID NO: 207289 - DNA, 201 bp, Homo sapiens
cctgcagttacctctccctcttctgaaatataagtagaacatcaattatcctaggctatttattatttagcctattatttgtcttggttcatctcttgagwtaaattagatctgggaactttagcttaatccatgcatgagcgccaagggtctttgagcattctataatcttatgcagaactgtgtgggtatgtattgttt

SEQ ID NO: 207290 - DNA, 201 bp, Homo sapiens
tggaataaaagatttttaaataaatactcacaaccctcatttattttcattgaacagaggttttattctttctgcttcattccaattccaccttctcctasagcatatcctgcagttacctctccctcttctgaaatataagtagaacatcaattatcctaggctatttattatttagcctattatttgtcttggttcatc

SEQ ID NO: 207291 - DNA, 201 bp, Homo sapiens
tacttatcactgtccaggatgccaagatatttctctaccagacttgcttttgttcccacttcctcacataactatttcataactcccctgtctccttaccrctcctgcaatctctcccagaccattcgttctgagccaatgacctcacttcataatgtatagagaaaatagaaactgccagatactcattttttaccctct

SEQ ID NO: 207292 - DNA, 201 bp, Homo sapiens
ttcatctaatatgccctggcctggccctgctggttgttaaaaatattgaaattcttgataaacagctactcttcttccatattatcacagccccagatacwgcttcagtgctttctcctggatatcccaccttgcctccccgccccccatctccagggctccagcaattggcctggccttgccagtccaggagggctgcta

SEQ ID NO: 207293 - DNA, 201 bp, Homo sapiens
tctggcctagcctactctgccagttctgaggtgcatttttttttcgtattttaatacctctgatattgttatgctctccagttgataaaatcttaaaattwtaattgacagtggcttttttctaacttggtgaaacaaaaataagggttaatttccttctacaatcaacagcatctttgatttgatgaaatatagtgatag

SEQ ID NO: 207294 - DNA, 201 bp, Homo sapiens
tagtagaactggaatgtccccagattctccaatcctatcggcatgtcatacttaactcttaaagatccagagtaaatgatggagttctcatttcaagtaayttgggtaatccatcccctcatcatcactcctttactcctgagggttcctgggggtcagacttaaatgttcctggtgattgccatccactgtgtgctccaa

SEQ ID NO: 207295 - DNA, 201 bp, Homo sapiens
attcaactgagccagggctatttctgtgtctgtgaacaggtaatagtgtttatgagggcagatatctgacatgtttttcttctttattttacctgacataygcttgtaccctttatttaatctgacatttttttgtactcttctggcctagcctactctgccagttctgaggtgcatttttttttcgtattttaatacctc

SEQ ID NO: 207296 - DNA, 201 bp, Homo sapiens
atcctactaacctctctctgagctagtaaagcactataaactgcatttagaattgcaaagtaaacttagttatcaacattgtaggcagcctattcttgatkatattcatcaatcatacagaaaaagtattgtagacggaaataacaattcattgagaagtcatgtattttttatcttagaatatatttcatctcaatagta

SEQ ID NO: 207297 - DNA, 201 bp, Homo sapiens
ctaccatcgacattcttcacagaattagaaaaagttattttaaatttcatatgtaatcaaagaagaccacatatagccaagacaatcctaagcaaaaggarcaaagctggaggcatcatgccacctgacttcaaactatactaaaagtctacagtaaccaaaacagcatggtactggtaccaaaacagatatatagaccaa

SEQ ID NO: 207298 - DNA, 201 bp, Homo sapiens
ggtttcccattgggccccaagtgatctgggcccttcatccactccccacccctaatctctccaacctcatctcttttccctctgccctcactcattcagcyccaatttcactggcttcctggctagttctttaatgggccaagtatcatcctgtattcaggtcctttgcagctgctcatctctctcctggagtcatcttcc

SEQ ID NO: 207299 - DNA, 201 bp, Homo sapiens
ataaggtattccgtagcttctctgcagggttagaatttcagtttagtactacaaacattgctaaaaggtcttctaaacttggggacaagatttatagaaayccacctagttattgtcagtccaaggcagcatctttttttatatagagatgagagtaaaaaatcattgatttgagtaaatcaccatttactgtgctctttc

SEQ ID NO: 207300 - DNA, 201 bp, Homo sapiens
gaacatcaattatcctaggctatttattatttagcctattatttgtcttggttcatctcttgagttaaattagatctgggaactttagcttaatccatgcrtgagcgccaagggtctttgagcattctataatcttatgcagaactgtgtgggtatgtattgtttgtgtatttttctggagagtcagttactctcactaga

SEQ ID NO: 207301 - DNA, 201 bp, Homo sapiens
tttaaaactcaagtccatctgacttattgtcatctctcttacactaacccttacaggctgaattttcaccagggcagggattcttgcttggaagtcctgcsttgctcaatattctaagaaatctagactgctagtagttccaaatatactcttttattttctgtgtgtgcatctgtcatcttgtcccctgtacctgcaatc

SEQ ID NO: 207302 - DNA, 201 bp, Homo sapiens
ttgtggagtaaaaggaacacatacattgttggtgagaatgtaaagtagttcaaccactgtggaaagcagtatggcaatttcttagagagctaaaagcagawctaccagttgacccagcaaccctcttatagagtagtttaaatcccttttgttctatttctatcacctagataaacctgtgcacacatgaacttgtcttaa

SEQ ID NO: 207303 - DNA, 201 bp, Homo sapiens
tcttttttaaaaactacttccaaaactaaaattctgctaatgatattttattaaaaatgaacaagttaggaccaaaaaacgaaagcagatggacactaagwcaacaggtataaaatggaaatgtccctgacaaacaagtatggtcaccctacttatgaggtcagaaatagattttacgttctaattgactcttaaggaaat

SEQ ID NO: 207304 - DNA, 201 bp, Homo sapiens
tcattcagcaatctttatggattttctaccagtacttacaggttgattttagatacacagcagactctgtcttcctaaggttacaccagaccccatacttkaacaccatatgtcacaaaattgacttgttcttaaatatgaagaattgctttaaagatggcaagcatggttatagcttgtaatcctgggtttgaccttatg

SEQ ID NO: 207305 - DNA, 201 bp, Homo sapiens
tcctcagcctgcatcctttctgagcacctgccacccttggacttgagctttttgtggtggttgttattgttgtttatcactgtttttaaaaatatcatcasagatcaagagtcttattccaatcattaattcccattatggaaattaacttaaaaaagtaagatttttgcacaaaaatttatggctcattttcagtctcct

SEQ ID NO: 207306 - DNA, 201 bp, Homo sapiens
acatttttagataatgaaacattgacattgttgaggacagtatttattacttctttcattcagcaatctttatggattttctaccagtacttacaggttgrttttagatacacagcagactctgtcttcctaaggttacaccagaccccatactttaacaccatatgtcacaaaattgacttgttcttaaatatgaagaat

SEQ ID NO: 207307 - DNA, 201 bp, Homo sapiens
gctgggattacaggcatgagtcacatgcccagccctaagcatacttttataggcattttatagtgtcattacttttagatccagtgctttcattctagggraaaatttaaagtctggaaaggtagatggacacaggtaactcagcctccagtgaaatttatgatcttggctaaaacatcagtaaaatgggaacaatgaatt

SEQ ID NO: 207308 - DNA, 201 bp, Homo sapiens
tgatctctttattttttatggctgcatagtattccatagtgtatatgtattacattttctttaaccactctgtcactgaagggtttttaggttgattccaygtctttgctattgtgaataatcctgcaatgaacatttatgtgcatgtgtctttatgacagaatgattaatattcctctgggtatatacccagtaataggt

SEQ ID NO: 207309 - DNA, 201 bp, Homo sapiens
accaagacagttatttcctgtgtgttttggatatgagtttcaggcaaccaacaggcaatgagactatcatttgatagtgtcacttgtgcttggacaagaaragaaggcctacaagaaaaagtaattaaaaacaatctctatcatggccaagttaattgaccttttaatataaagttaattgaatttctaatgcaaatttat

SEQ ID NO: 207310 - DNA, 201 bp, Homo sapiens
tgtatgtaatatgcatgtattagaaggcccataaatagaaactcattattattattatagatttctgaatagcaggcttgcttttttagtctcaagaatgyaatcagtggaaatacactagcaaactaattcatgtattttataagcacttattacacatctttcatgtgcgtaccattacgcaataattcacttaaatta

SEQ ID NO: 207311 - DNA, 201 bp, Homo sapiens
tgtggctcatattaacacaaagataactaagagctctctaatgaaatgagatcactgattttttgtttttgttttttgtttgttttttgagatggagtctygctctgttgcccaggctagagtacagtggcatgatcttggctcactgcaacctctgcctcctgggttcaagcaattctccctgcctcagtctcccgagta

SEQ ID NO: 207312 - DNA, 201 bp, Homo sapiens
cactgaagctttctgtctgtcctctccttacctgagtaaggaaggaggaaaatcattgtgtgttatttttagtgcagtgagaaaaagaaaatctggcttayatcatgttgaaaacaaaagtaacaccatatgttgtgcccaccgagagccattatgataatgcattagtcgggaagtgcataattgctcagctcagaaatg

SEQ ID NO: 207313 - DNA, 201 bp, Homo sapiens
cactgagatgatttgtttccctatagaggaattcttcaatcccctatttgagggtagatggtggggcagggcttgggggcaggaaaaattatagtaaatamctataaatagtaaagttggttattgttgttgcatataaaacatttaaatccttggctagaaaatagtaagttttcaataattatttgatgtcattataat

SEQ ID NO: 207314 - DNA, 201 bp, Homo sapiens
tagagagctcctgtacacaacctctcctgcaagggaacatttagatatactatttttatctctatttagttaaaaatactcatttatgtgggagaggtctsatttcccatttagaagggcttatggaaactggactcatcctactaacctctctctgagctagtaaagcactataaactgcatttagaattgcaaagtaaa

SEQ ID NO: 207315 - DNA, 201 bp, Homo sapiens
aactatttcagatgtcatcatttttaattgacttgcattcttagagccatgatcaacactgcttgctataggttttttcaaatgcctatcaaaaacagttmatttgttttgttttgtgttggtgttttattttccaaggaggcatgtgagcatgtccagttgctgccagggatttagtaagtatcacacagagaacccaag

SEQ ID NO: 207316 - DNA, 201 bp, Homo sapiens
atatatttatacctgaaaacatgttccagaaagcagtcacggccaatgtgttctccttgctctgggctctgcttaaaggataatcattttatctgtcccastgtttggttcttatgttcaaatgccagaaagttttttaagagttagacagagctgtaactcaaataatcacatttaatccagcttcgtacttctattttc

SEQ ID NO: 207317 - DNA, 201 bp, Homo sapiens
tcatttcaagtaacttgggtaatccatcccctcatcatcactcctttactcctgagggttcctgggggtcagacttaaatgttcctggtgattgccatccrctgtgtgctccaagttcaacttttgatttcttctccccaaatcttgcatgtgctgcagccgccctttctcatcttgtttcacattgccttaaacatggac

SEQ ID NO: 207318 - DNA, 201 bp, Homo sapiens
ggggcatattgccaaaacccaaagagaaagcatgatgtggagcacagcattttagggcttgatatttgcttattataaaaattggtgacttttttatggcyctgccattctgggccataaaagttaagtaatttctaatgcacaaccataaaaagagatgcaagggccataggagaatactagatcttaagtctgtggaac

SEQ ID NO: 207319 - DNA, 201 bp, Homo sapiens
atagaattgtgaaatatgttgatcattgtcatcaatttagtagaactggaatgtccccagattctccaatcctatcggcatgtcatacttaactcttaaasatccagagtaaatgatggagttctcatttcaagtaacttgggtaatccatcccctcatcatcactcctttactcctgagggttcctgggggtcagactta

SEQ ID NO: 207320 - DNA, 201 bp, Homo sapiens
tttatctctatttagttaaaaatactcatttatgtgggagaggtctcatttcccatttagaagggcttatggaaactggactcatcctactaacctctctytgagctagtaaagcactataaactgcatttagaattgcaaagtaaacttagttatcaacattgtaggcagcctattcttgattatattcatcaatcatac

SEQ ID NO: 207321 - DNA, 201 bp, Homo sapiens
gcagtgaaaaataattctacctgaaaagagaaatagaattgtgaaatatgttgatcattgtcatcaatttagtagaactggaatgtccccagattctccartcctatcggcatgtcatacttaactcttaaagatccagagtaaatgatggagttctcatttcaagtaacttgggtaatccatcccctcatcatcactcct

SEQ ID NO: 207322 - DNA, 201 bp, Homo sapiens
aggcaattctatgtctctgcttctttagctgatgaaatcttttgcctgtcaggtagtacttatcactgtccaggatgccaagatatttctctaccagactkgcttttgttcccacttcctcacataactatttcataactcccctgtctccttaccactcctgcaatctctcccagaccattcgttctgagccaatgacct

SEQ ID NO: 207323 - DNA, 201 bp, Homo sapiens
tgggttttggaagttggttaccaacgggaaatgtacgtattttggcaataccacttgattaacgacaaaacactatttttcttcctggtctacaatgatartcaccccaaaagaataaacttacaagaagtcaaaggaagaaatactccaattgtgtcatatacaggcaattctatgtctctgcttctttagctgatgaaa

SEQ ID NO: 207324 - DNA, 201 bp, Homo sapiens
gcagctatagtcatcagtgaagaaatacatgatttcaagtaggtagggctggctgtgaagaaaattgtcacataagtgacttcatactctatttcagcttycttcccactctccctccttccctccacacacaccatgtacgccatctcctattgtcagtacttgggactctcatatgcacctggaccactgtcttttccc

SEQ ID NO: 207325 - DNA, 201 bp, Homo sapiens
gctcgtcttcattcttctctccaacaatggcaattctgtcttctcaggcgccctcacagaaattactggggtcatcactgattctttctttttacccatawcctacatccaaattgttggcgagccctgttggatctcggagtataacacataaaaactcccaccacttctcttcacctcccagctcactggtctgtggga

SEQ ID NO: 207326 - DNA, 201 bp, Homo sapiens
tgctcgtcttcattcttctctccaacaatggcaattctgtcttctcaggcgccctcacagaaattactggggtcatcactgattctttctttttacccatrtcctacatccaaattgttggcgagccctgttggatctcggagtataacacataaaaactcccaccacttctcttcacctcccagctcactggtctgtggg

SEQ ID NO: 207327 - DNA, 201 bp, Homo sapiens
ccattaccaggctgttttgattcatatagctttatagtaagtcttgaagtcagatagtgtcggttctccaactttattcttctctttccatattatattgsagattatgggtataaattattttttaaaaatacatgtctgctatttctgagggatactgaaaagcaaatcatgtagaatacaatgtcaaggaatatttta

SEQ ID NO: 207328 - DNA, 201 bp, Homo sapiens
aggcagcatctttttttatatagagatgagagtaaaaaatcattgatttgagtaaatcaccatttactgtgctctttctttccattttaattttcactgtyaaagattcttgtctgaattccagactaacaactaccttcctcatatcaccacctgaatgtccagtaggtatctcaaatttatattcctgaaaccagaggc

SEQ ID NO: 207329 - DNA, 201 bp, Homo sapiens
tgcttgtagttgcattcaaggtaagtttgataatccccattttacagatgaggaaatttaagttctgagaggctagataacaagcctcatctcattcataragcatcagaagaagagttcagctcatgtctgtctccctcagataaggtattccgtagcttctctgcagggttagaatttcagtttagtactacaaacatt

SEQ ID NO: 207330 - DNA, 201 bp, Homo sapiens
aatattatatgaacccaataggaagaaagagaggaaaacaaaccatgaacagaaaaacagaccatgtagcttttacagagaccaaacttggaagtgtaaarttatgcatgtatgttcatgtatatgagtttgtgtgctttaatgagacaaaatgagtggccagaattgctttattcagggtcttgaagtattcatgttgtt

SEQ ID NO: 207331 - DNA, 201 bp, Homo sapiens
tatacaatatacatatagtgtatacaatatatattgtagggaacaaaaaaaaattccccctcaaccctcatgaattcttagctgggatgggtccctataasaaaagatagattaataagagggaaacaaacacgtttattaacgtgcagtgctcatcatacaggatacactccaaggaaaagtaactcgaagtagtggttt

SEQ ID NO: 207332 - DNA, 201 bp, Homo sapiens
tgacacattagtttggcttgtgttctctctgaaagcatttgtaaggcattccatacctgattctggaacatagtcataacattgtgggtcctgctctgaargattcagttagaaaggacaatggccactttttttttttttttttttttttttttactttgaatctcttatactgatggcttatggttctatagggtatag

SEQ ID NO: 207333 - DNA, 201 bp, Homo sapiens
atctgcctaaaacgtgcatggacaaaattggtgtgtgctaaaggcagtgccacaggaaccgaaactaaaaaaaaaaaaaaagattaagaatgtataaaacygctctaactccatcccttgactgccttgggatctcaaatagcagaaatgtatgtccatcaacaatgcaagtggaagtgtatgtctaatttaaagccgtgt

SEQ ID NO: 207334 - DNA, 201 bp, Homo sapiens
tagtctcgaactccttacctcaggtgatttgtctgcctcggcctcccaaagtgctgagattacaggcatgagccaccatgcccgacagagatcactaattkttaatgtcattatttgttaatttttcatgaaatacactgtgatatagtgtaataagaactaatcattaaaatcattttactttattatcatctttcacca

SEQ ID NO: 207335 - DNA, 201 bp, Homo sapiens
ttttctttttctggaacttttattcatcaaatacttcctggattgattacctaattttcttatatttccagtttgctacaactttcctctttcagcccatstattaactttttactattatatttttaatttccaagaatgttttctatagcattcttttcatcattcccagatgtaataccttcttattcattacaaaat

SEQ ID NO: 207336 - DNA, 201 bp, Homo sapiens
gagacatgacacgtaagactctcagcttctcactatctgcctaaaacgtgcatggacaaaattggtgtgtgctaaaggcagtgccacaggaaccgaaactaaaaaaaaaaaaaaagattaagaatgtataaaactgctctaactccatcccttgactgccttgggatctcaaatagcagaaatgtatgtccatcaacaatg

SEQ ID NO: 207337 - DNA, 201 bp, Homo sapiens
gttctatttctatcacctagataaacctgtgcacacatgaacttgtcttaacaacaacacatttccctgagataaattgttttgcccccctcagtgtatgrtgagggtgatggtagtttcctattttaaaaaaatagcaatagttgctttgttgtattaacatacccaatagaaatatattggtcagcttttggaaaaata

SEQ ID NO: 207338 - DNA, 201 bp, Homo sapiens
taaactgcatttagaattgcaaagtaaacttagttatcaacattgtaggcagcctattcttgattatattcatcaatcatacagaaaaagtattgtagacrgaaataacaattcattgagaagtcatgtattttttatcttagaatatatttcatctcaatagtaggtctaatctcttatttatatttggcttattctaac

SEQ ID NO: 207339 - DNA, 201 bp, Homo sapiens
atttatgtgggagaggtctcatttcccatttagaagggcttatggaaactggactcatcctactaacctctctctgagctagtaaagcactataaactgcmtttagaattgcaaagtaaacttagttatcaacattgtaggcagcctattcttgattatattcatcaatcatacagaaaaagtattgtagacggaaataac

SEQ ID NO: 207340 - DNA, 201 bp, Homo sapiens
agaggagcataaacaacatgttggagctgaaaaacacagcacgagaacttcctgaagcatacacaagtatcaactgatgaatcaaccaagtggaagaaagratatcagagtctgaagacaagactagagaaaaaagaatgaaaaggaatgaacaaagcttccaagaaatatgagacttcataagaagaccaaacctacaat

SEQ ID NO: 207341 - DNA, 201 bp, Homo sapiens
gcaatctttatggattttctaccagtacttacaggttgattttagatacacagcagactctgtcttcctaaggttacaccagaccccatactttaacaccrtatgtcacaaaattgacttgttcttaaatatgaagaattgctttaaagatggcaagcatggttatagcttgtaatcctgggtttgaccttatgtgaaagt

SEQ ID NO: 207342 - DNA, 201 bp, Homo sapiens; identical to SEQ ID NO: 36404

SEQ ID NO: 207343 - DNA, 201 bp, Homo sapiens
tgtgacttctctctttcctacatacttttattcttctagtcatccaagtaactatcttactagtagcagtctgtgagtctgtctatgcattcatgcatccrtctaaccagctgtctacctacttatccatattttttaagcaataaaaatttcattttgtagcctcttttactagtgcacttgcccagaacagacagtctc

SEQ ID NO: 207344 - DNA, 201 bp, Homo sapiens
caactgacaaaagattttaaatgagactaaaaatagtaaacatttattttacctacttcgtgtcatttgagtgtttcttttccctctatgatgtttattartaaataaaggttaaactatttcagatgtcatcatttttaattgacttgcattcttagagccatgatcaacactgcttgctataggttttttcaaatgcct

SEQ ID NO: 207345 - DNA, 201 bp, Homo sapiens
acgtctctctctcctaagcctaagaatgtcttggctttttttgcctctatttgtcagaatgctaagaaaataaataaattaaatataagttaatttttttwaaaacctacttttcccaataatgaatactttgcagtgaaaaataattctacctgaaaagagaaatagaattgtgaaatatgttgatcattgtcatcaatt

SEQ ID NO: 207346 - DNA, 201 bp, Homo sapiens
agagattctgatgatctccttcctttaccatatcacttcttctgagaagagatttacacagctatagccatctatttcttcctaaaagaaaaaccacttcrcaaaagtagaagaaagatttcgatattttatttggggctttctacgtctctctctcctaagcctaagaatgtcttggctttttttgcctctatttgtcag

SEQ ID NO: 207347 - DNA, 201 bp, Homo sapiens
taattttcacagtattagggaagtcattcacaacagttctcaatttagaaggtatagtggaattaaacatctgtctacttctttcttttgggaaaatatgyctttgtcttctatatatgaatcctttttatatagcttaaattcaactgacaaaagattttaaatgagactaaaaatagtaaacatttattttacctactt

SEQ ID NO: 207348 - DNA, 201 bp, Homo sapiens; identical to SEQ ID NO: 36403

SEQ ID NO: 207349 - DNA, 201 bp, Homo sapiens
atatagccaagacaatcctaagcaaaaggaacaaagctggaggcatcatgccacctgacttcaaactatactaaaagtctacagtaaccaaaacagcatgrtactggtaccaaaacagatatatagaccaatggaacagaacagagacctcagaaataacaccacacacctacaaccatctgatcttcaacaaacctgaca

SEQ ID NO: 207350 - DNA, 201 bp, Homo sapiens
tctggaagctcttcaaatcctgttctcttgggccttttatgaaaacttcattggataggcatgactgaagcatggacaaccatgtagtaatgtgattggaygaaaaggttataatctaatgctgataggctgagtgggaaaacccagtgaggcctatctgttcagattcttcttgatctctctgtgcagcattaattcctc

SEQ ID NO: 207351 - DNA, 201 bp, Homo sapiens
ttgattgcattaaaattctaaatggaaatggtttccacatttgcaattaaaattgatggtgtgtcacctcttctctgtattttagagcttgtagccaagayatcgaacctcgagaacgtaaagtttgcttggcataaggagacatcatctgaataccaaagtagaatgttggagaaaaaggagcttcaaaagtgggacttt

SEQ ID NO: 207352 - DNA, 201 bp, Homo sapiens
cagaattgagaaagtaaacttcttgatggccaggaaaggaagataaaggaagaagaaactttgagtgatgatggatagcaaacagcatgggtgaatgtttmaagaaaagataatactttaaaactaaatgttaaatggttaaacaagactataatatgacagatctgaactattgacccccctttttttaaacaggcaaga

SEQ ID NO: 207353 - DNA, 201 bp, Homo sapiens
ggtatcaaagaaaagtttttttctgcaaatgtgatagccaagcatcaattgggagggttgctgtttaaaaggcagcctgtctggttaagggagatgagccmgaaggagatcactgaagctttctgtctgtcctctccttacctgagtaaggaaggaggaaaatcattgtgtgttatttttagtgcagtgagaaaaagaaaa

SEQ ID NO: 207354 - DNA, 201 bp, Homo sapiens
aaaaagacacacgcacacacacacacacacacacacacacacacacacacacacagcaaatggaagcagccagacaaaagcaataaagaacaaacaactamaactatttgtgtatttttagggaaagaaaaagaaattgaaatcagaattaaatgacaacatttactggtcagcttatggaaatatatgttgcttgatgga

SEQ ID NO: 207355 - DNA, 201 bp, Homo sapiens
ggaaccattgcctagcttgccttctccaccagagctataattctttaaaccccatttttcatttactcaacagattgaaacatttcctaaagttgaatatkgacccagaacttggaatgtctataccacattggtttacactaagttctgtttttattaagattctttgggtcactttcttaatggaatttgcttcataat

SEQ ID NO: 207356 - DNA, 201 bp, Homo sapiens
cagcatgggtgaatgtttcaagaaaagataatactttaaaactaaatgttaaatggttaaacaagactataatatgacagatctgaactattgacccccctttttttaaacaggcaagaggattatatacatctttttgttggccggacgtggttactcacgcctgtaatcccagcactttgggaggccaaggtaggcaga

SEQ ID NO: 207357 - DNA, 201 bp, Homo sapiens
gctctgcctggatatgccacctgccaggatcctacacatgttcactatctggaagctcttcaaatcctgttctcttgggccttttatgaaaacttcattgrataggcatgactgaagcatggacaaccatgtagtaatgtgattggatgaaaaggttataatctaatgctgataggctgagtgggaaaacccagtgaggcc

SEQ ID NO: 207358 - DNA, 201 bp, Homo sapiens
tcttcttgatctctctgtgcagcattaattcctctaggatatgggacaggacctcctctgaaatgaggtcttatgaccctcaatcacaaaggtggaaacaygttatagtcctgccttgtataggtgaaaggttttctgaggtctgctcctgaggccaaaagcaccataaaattataataaaagactattaacaagggctat

SEQ ID NO: 207359 - DNA, 201 bp, Homo sapiens
aaaacttcttaaactgataagcaacttcagcaaagtcttaggatacaaaatcaatgtgcaaaaatcacaagcattcctttacaccaacaatagacaaaaamagagccaaatcatgaataaactccaaatcacagttgctacaaagagaataaaatacctaggaatacagctaacaagggatgcaaaggacctcttcaagga

SEQ ID NO: 207360 - DNA, 201 bp, Homo sapiens
aaagaagacatttatgtggccaacaaacatatgaaaaaaagctcaatatcgctgatcatcagagaaatgcaaatcaaaaccaccatgagataccatctcaygccagtcagaatggcaattattaaaacatcaggaaacaatagatgctggcaaagccgtggagagataggagcacttttacattgttggtgggaatgtcaa

SEQ ID NO: 207361 - DNA, 201 bp, Homo sapiens
aatggagatgaaagaaatttgatttggggataaaaaagaagagatataagaacaagagagttggatttctttaaaaaatgtggagtatcccacactaaaayggtatcaaagaaaagtttttttctgcaaatgtgatagccaagcatcaattgggagggttgctgtttaaaaggcagcctgtctggttaagggagatgagcc

SEQ ID NO: 207362 - DNA, 201 bp, Homo sapiens
ctgaaattttaaaatactgagctgtgaaatggttcctttttacccattttatgggtactccctgggctatttcaattgagattcagatccttcagttatgmggaactttggtaatcattcttcaccactgttttctttttctggaacttttattcatcaaatacttcctggattgattacctaattttcttatatttccag

SEQ ID NO: 207363 - DNA, 201 bp, Homo sapiens
tcatggaaccaacccaaatgcccatcggtgatagactggataaagaaaatgtgcatatacaccatgttatactgtaaagccataaaaaagaatgagttcaygtccttcacagggacatggatgatgctgggagccatcatcctcagcaaactaacaggaacagagaaccaaataccgcatgttctcattcataagtggcag

SEQ ID NO: 207364 - DNA, 201 bp, Homo sapiens
atatttgcagatgaagtttaataaataggaataaaaggctcaataaaaaagacacacgcacacacacacacacacacacacacacacacacacacacacascaaatggaagcagccagacaaaagcaataaagaacaaacaactaaaactatttgtgtatttttagggaaagaaaaagaaattgaaatcagaattaaatga

SEQ ID NO: 207365 - DNA, 201 bp, Homo sapiens
atgctattcaaaattctcatccttggcatgtggaataacttttacattgctatgtgttttgttttccctattttgaactttttagaatcttcttacgtctrgtattctgaaattttaaaatactgagctgtgaaatggttcctttttacccattttatgggtactccctgggctatttcaattgagattcagatccttcag

SEQ ID NO: 207366 - DNA, 201 bp, Homo sapiens
gtctgtgaacaggtaatagtgtttatgagggcagatatctgacatgtttttcttctttattttacctgacatatgcttgtaccctttatttaatctgacatttttttgtactcttctggcctagcctactctgccagttctgaggtgcatttttttttcgtattttaatacctctgatattgttatgctctccagttgata

SEQ ID NO: 207367 - DNA, 201 bp, Homo sapiens
tcataggtgggaattgaacaatgagaacacatggacacaggaaagggaacatcacactctggggtctgttgtggggtggggggaggggggagggatagcaycgggagatatacctaatgctagatgacgagttagtgggtgcagcgcaccagcatggcacatgtatacatatgtaactaacctgcacattgtgcacatgta

SEQ ID NO: 207368 - DNA, 201 bp, Homo sapiens
gatcgaggcttcagtgagatatggctgagacactgctctcagcctggatgacagagtgagaacctgtctcaaacaagagaaaaaaataaatcaaatgctaytcaaaattctcatccttggcatgtggaataacttttacattgctatgtgttttgttttccctattttgaactttttagaatcttcttacgtctagtattc

SEQ ID NO: 207369 - DNA, 201 bp, Homo sapiens
ggggagggatagcatcgggagatatacctaatgctagatgacgagttagtgggtgcagcgcaccagcatggcacatgtatacatatgtaactaacctgcayattgtgcacatgtaccctaaaacttaaagtataataataataataaaaaaagaaagggagtgactattgagtagatagcatggggctggatttccagaga

SEQ ID NO: 207370 - DNA, 201 bp, Homo sapiens
atgctcattattgttgtgtcaggtaagttattttcattcagcctgaattttaaaacagcaataatacacgtatgcatggattcctgtgtttgaaagaagcttatatattttgtcttcattatgaaattcttgccttggcctctaatcatagccaattaattttcacagtattagggaagtcattcacaacagttctcaatt

SEQ ID NO: 207371 - DNA, 201 bp, Homo sapiens
gcagtatggcaatttcttagagagctaaaagcagaactaccagttgacccagcaaccctcttatagagtagtttaaatcccttttgttctatttctatcamctagataaacctgtgcacacatgaacttgtcttaacaacaacacatttccctgagataaattgttttgcccccctcagtgtatgatgagggtgatggtag

SEQ ID NO: 207372 - DNA, 201 bp, Homo sapiens
acattgttggtgagaatgtaaagtagttcaaccactgtggaaagcagtatggcaatttcttagagagctaaaagcagaactaccagttgacccagcaaccytcttatagagtagtttaaatcccttttgttctatttctatcacctagataaacctgtgcacacatgaacttgtcttaacaacaacacatttccctgagat

SEQ ID NO: 207373 - DNA, 201 bp, Homo sapiens
gtgaaatgaaaatcaaaaccacaatgagataccatctcataccagtcagaatgactatttattaaaaagacaaaaaataacagatgctgatgaggttgtgsagtaaaaggaacacatacattgttggtgagaatgtaaagtagttcaaccactgtggaaagcagtatggcaatttcttagagagctaaaagcagaactacc

SEQ ID NO: 207374 - DNA, 201 bp, Homo sapiens
gttttttaggccaatagcttctggctccatccatgtccccagaaaagacatgatctctttattttttatggctgcatagtattccatagtgtatatgtatyacattttctttaaccactctgtcactgaagggtttttaggttgattccatgtctttgctattgtgaataatcctgcaatgaacatttatgtgcatgtgtc

SEQ ID NO: 207375 - DNA, 201 bp, Homo sapiens
gctagataacaagcctcatctcattcataaagcatcagaagaagagttcagctcatgtctgtctccctcagataaggtattccgtagcttctctgcagggytagaatttcagtttagtactacaaacattgctaaaaggtcttctaaacttggggacaagatttatagaaatccacctagttattgtcagtccaaggcagc

SEQ ID NO: 207376 - DNA, 201 bp, Homo sapiens
aatattgaaattcttgataaacagctactcttcttccatattatcacagccccagatactgcttcagtgctttctcctggatatcccaccttgcctccccrccccccatctccagggctccagcaattggcctggccttgccagtccaggagggctgctaggactgtgctacagttcctcagcctgcatcctttctgagca

SEQ ID NO: 207377 - DNA, 201 bp, Homo sapiens
tttatctgtcccactgtttggttcttatgttcaaatgccagaaagttttttaagagttagacagagctgtaactcaaataatcacatttaatccagcttcstacttctattttcattaacctattgtatattaactcaaccactataccattgctataccaataattgtatatacatttatagataaattttttaacccac

SEQ ID NO: 207378 - DNA, 201 bp, Homo sapiens
attgaggtattttttgcttggaaaaaagaatttgattgtgcttattgccattttcgtatattttctgatgggcaaacaatagaatatttgccctcaaagcsccaatggttgaaagcttcagagagtgatttcttggctcagtgtaagagcctgttggctgggcctggtggctcacgcctgtaatcccagtactttgggagg

SEQ ID NO: 207379 - DNA, 201 bp, Homo sapiens
attgtctctgtttgtagacaacatgattgtatatttagaaaaccccatcatctcagcctaaaaacttcttaaactgataagcaacttcagcaaagtcttargatacaaaatcaatgtgcaaaaatcacaagcattcctttacaccaacaatagacaaaaacagagccaaatcatgaataaactccaaatcacagttgctac

SEQ ID NO: 207380 - DNA, 201 bp, Homo sapiens
aaaaaagaatgagttcacgtccttcacagggacatggatgatgctgggagccatcatcctcagcaaactaacaggaacagagaaccaaataccgcatgttstcattcataagtggcagttgaacgatgagagcacatggacacagagcggggagcaacagacaccagggcctgttgggggttggggttgaggggagggaac

SEQ ID NO: 207381 - DNA, 201 bp, Homo sapiens
tccaaaaatctcagtggcttaccacagcaaaggtttatgtctcattcacactacatccactgagggtttgctgtgcctgttctctgccatctgtgccgaargaacagccgccgtctgggatgtgctggcctcacgtcagcaggataacagcaatggcaggaccacgtgcaggctcttaaagccttacatgattcaccttca

SEQ ID NO: 207382 - DNA, 201 bp, Homo sapiens
aaattagcagctggatgacgcagtggggcgggtggaatgtgctaaaggtcggtttccctgccctgtgtctgctccatactcaggattgggaggctagtgtmcaggagaaaagaggagaaaagagcttagcgatgatcctcccccctcccctactccccttctaaccaggacctgggggtgtgaccctttttgaggctaagt

SEQ ID NO: 207383 - DNA, 201 bp, Homo sapiens
tgtgtcagggagaacagattatggctgagcgagccctcccctcagcgaggccagaggaggcctggtgtagggggcatagcccctggcacagaggttctctstggagcctctctgctgctggtgggctgaggatacacccttcagctttggtttctctgtgcttgaggaagggccactttacctccacccttcctgctggag

SEQ ID NO: 207384 - DNA, 201 bp, Homo sapiens
aggtggaggttgcagtgagccaagatcacactactgcattccagcctaggcgacagaatgagactctgtctaaagaaaagaatcaggaggttttgccttasagttgtgtggtagtattagacttggactggtagttacccttcttggatttgaatgacttgtttagggagatgggggaaagtacgagcatggccttgtcga

SEQ ID NO: 207385 - DNA, 201 bp, Homo sapiens
tagggttacagaaattccaggaagtggaaagttctctgagactcttctcctgagtggagggcagacaccgggaccccaggacggcagagccagctcatacracagcagttcccaggccacccccaccatcttggggccctaacagacattccctcctttgaatccccagcaagaaaagcccccgcctgtcagcccatctgt

SEQ ID NO: 207386 - DNA, 201 bp, Homo sapiens
acactactgcattccagcctaggcgacagaatgagactctgtctaaagaaaagaatcaggaggttttgccttacagttgtgtggtagtattagacttggaytggtagttacccttcttggatttgaatgacttgtttagggagatgggggaaagtacgagcatggccttgtcgaccatctcctggcctttgttccccccac

SEQ ID NO: 207387 - DNA, 201 bp, Homo sapiens
agacttggactggtagttacccttcttggatttgaatgacttgtttagggagatgggggaaagtacgagcatggccttgtcgaccatctcctggcctttgwtccccccactccaggttgcctaagtactcttgccagttcattgagatgtgtctgatggtgacagctgatcacgggccagccgtctctggagcccacaaca

SEQ ID NO: 207388 - DNA, 201 bp, Homo sapiens
catgggcattggtcaccgagtgaagtcggtgagttgttactctcctaaaaaagtgggatggaggccaggcgcggtggcccatgcctgtaatcacagcactwtgggaggccaaggcaggtggatcacttgaggtcgggagttggagaccagcctgaccaacatggagaaaccccgtctctactaaaaatacaaaaaaattag

SEQ ID NO: 207389 - DNA, 201 bp, Homo sapiens
ggtactttgctagatgctgggaattgaactgagtcagacacagtgtcgaccagtggggctggtagaaggtttttaaatgatggtcacaattcgtagtaatrgtagtgacagtggaaaattatgaagaaaaaatgagaaataatgataaatgctttgaatttttttgccttcccagaagccaaatcttatcctgaatgtaga

SEQ ID NO: 207390 - DNA, 201 bp, Homo sapiens
cctgaatgtagatggtctcatcggagtcgcatttgtagacatgcttagaaactgtgggtcctttactcggtgagcattgcagctgttttcttcttcattamgtttgttgatttttgttgtttcctccaaactataaaagtaatgcatactcataatagaatatttgaaaaataaggagaggtataaagaagaaaacaaaaa

SEQ ID NO: 207391 - DNA, 201 bp, Homo sapiens
tgctcgattatgcactggaagtagagaagattaccacctcgaaggtaacaaagaaaaaacttcctaattccctcacgttggacaagtttattggaggaaayaggagccacgttacattttgattatgcagctaaaagcaaacctagttttctagaaatgttatttttgtttcataactaaatttaacagacatgcactaaa

SEQ ID NO: 207392 - DNA, 201 bp, Homo sapiens
cattccttgtctcaacctcccgtctctaagccagaatgctctagtggcaaatctcttgttttctatcctgtattatcccattgtgtcttctctcctatccsccttccaaagaccctatggagatgggctcttggacctgaaatttgatctgggtctcaagaaaactgtgatttctcagctgcaggggtccattttttctcc

SEQ ID NO: 207393 - DNA, 201 bp, Homo sapiens
tccatcatttttacacatcaaatgggtaaataatacccccacctcatggggctactggaggaataaatgaattgtaatacatataagtgtctgagccaggrcctgcgttcagcaggtgctcagtgagtttttattgtagttaataatagtatcctcattatttttggtagtgggaacactgatcagtaggtcatgaataca

SEQ ID NO: 207394 - DNA, 201 bp, Homo sapiens
gaatacagtattatatctcagagtaacgtctggcacttagtaggttcataataaatgttagccattattgtttattattcctactattactactgctgtcrggcttagaaaccaaaagctgttgagatagagtcaccttgttcgtctccctggctctaccacatgatttccgataggatgcctgggtgaggaagaactctc

SEQ ID NO: 207395 - DNA, 201 bp, Homo sapiens
tgcctgtaatcccagctactcaggaggctgaggtaggagaattgcttgaacccgggaagtggaggttgtggtgagccgagattgtgccatggcactccagyctgggcaacaagagtgaaactccatctcaaaaaaaaaaaaaaaaaagtgggatggatctactgggtgggtggtgatagtgggggcattaatttatttggg

SEQ ID NO: 207396 - DNA, 201 bp, Homo sapiens
cagccagtggggtagaggcttcttcctcttgtcctcggggaaaagatggtggacaagtctctggatgaatggttttcactgggttttagaaaatgagaccrtggggattggtttcctctcccagtacatggtagaccatcttccccagttcagcgcccctcaccagcttcgcccccacaaccccaatcccactgtcctgtc

SEQ ID NO: 207397 - DNA, 201 bp, Homo sapiens
ccagggccctgctctctgggagcttatatccagttggaggagaccaatttataagcagattaaagctacagtcaggctctgagtccctacttggcgtaggyagcaaccagctgtctggagaagttgagatggcatccctgagaaggtgatgtttgaactgtagtttaggggatgagaagggctttgctgatgaaagggagg

SEQ ID NO: 207398 - DNA, 201 bp, Homo sapiens
ggccttgctgatgatggaggcctggagcaccatgacattaagggatgtcaatcccgggtaccccacgttcccacctcagcaacattctgagtgatcatatyccaggccgtggctgcttatgcgtagtcctgtgcttcctgaggagcagcacttgtcacatatacctggtatgtttgtttatcacggttataaatcattgac

SEQ ID NO: 207399 - DNA, 201 bp, Homo sapiens
gcatgccatgggctgagcagggtttgtgttcatgctgagccctgcatgttgaggtaccccagcatggtataccctgccatgggcttgaaactggacaaackggtgtccaaatcaaagctgtgtttattaaccatgtggcctggggcaagccatttcacctcttttgagttttagattccccatctctccaatgggataata

SEQ ID NO: 207400 - DNA, 201 bp, Homo sapiens
ggtcataaccttgcttattattaggtgggcttcttgggcaagttatcctaacgcctctgagattttattcctcatctaagaaatggggttataaatctcaktgtacctcccagagctcatatgagatgagtttctttttatctttttttagacacaaggtcttgctctgacacccaggctacagtgcagcggtgcaatcat

SEQ ID NO: 207401 - DNA, 201 bp, Homo sapiens
gtttggtctttgctctttcttgcttccattctgctcatcggtgctttcacctcttctgctggccttactccgttgtccattgcagaacaggagagggatgrtgagggctttagccctgaaaggcttgtccatgggacccttccctgttcccaccctctccctccaaagcctccagccatcagtgggtcactcagttgcctt

SEQ ID NO: 207402 - DNA, 201 bp, Homo sapiens
tcttcctcactctaaatacaaaccgcttttgttccagaacttggtagtcaagccagaccagctgatcaaacgtcgtggaaaacttggtctcgttggggtcracctcactctggatggggtcaagtcctggctgaagccacggctgggacaggaagccacagtgagtgggcatggggtcaggatgaacgtgtgtggtaacag

SEQ ID NO: 207403 - DNA, 201 bp, Homo sapiens
ttattcctcatctaagaaatggggttataaatctcagtgtacctcccagagctcatatgagatgagtttctttttatctttttttagacacaaggtcttgytctgacacccaggctacagtgcagcggtgcaatcatagctcactgtagcctcgaactccaagatgagttttcctatacatgtgatggaggatggtttctg

SEQ ID NO: 207404 - DNA, 201 bp, Homo sapiens
agtattaacttacatgatcacaaggtaccacaataggctgtctataagctgaggagcaaggagagccagtccgagtcccaaaactgaagaacttggagtcygatgtttgagggcaggaagcatccagcacaggagaaagatgtaggctgggaggctaggctggtctctcttcttcacatttttctgcctgctttatatttg

SEQ ID NO: 207405 - DNA, 201 bp, Homo sapiens
tatttagtttgtggaggcagtaggtctaggctggtattaaaatgtgttgagtttctgagcctacctatttggctgggaggtggcagccatagatgagagckccacatgaaaatgtttagagagtgttatctatgattgatagagagttattagatatcctgtgatctcttcccatttctacctcttaaacctgcctggact

SEQ ID NO: 207406 - DNA, 201 bp, Homo sapiens
cggcggcggcggccgcggctgcatctcttcaggtactggagatggagagcatggagacggccgccgccggctcggcaggactggccgccgaggtccgaggyagcggcacggtggacttcgggcctgggccggggatctctgcaatggaggcgagcgggggcgatccgggcccagaagccgaggatttcgagtgcagctctc

SEQ ID NO: 207407 - DNA, 201 bp, Homo sapiens
agctgctggaggcgaggcggcgctgctggaggcgaggcggcgctgctggaggcgaggcggcgctgctggaggcgaggcggcgcatgtgcggccggcgggcgacctggccccgccccgcgcgcactatttaatcccagaatccctctgtgtcgtaccaacagccgcatcgttccgaggctgtggaggccgggcgcagcggcg

SEQ ID NO: 207408 - DNA, 201 bp, Homo sapiens
gctgggaagagcttggtctcagtctcttgggctgtgaaggaagcaggtggtgttgagggagagtggcgtgggctggctctggccaggacttctcagggcaragtctaggaaggcgagaaatcaaatcattccagctgaggatgcagcccctctaatggaccagatggccttgtgctaactcaatcagctaaatggccctgg

SEQ ID NO: 207409 - DNA, 201 bp, Homo sapiens
gagctgctggaggcgaggcggcgctgctggaggcgaggcggcgctgctggaggcgaggcggcgctgctggaggcgaggcggcgcatgtgcggccggcgggcgacctggccccgccccgcgcgcactatttaatcccagaatccctctgtgtcgtaccaacagccgcatcgttccgaggctgtggaggccgggcgcagcggc

SEQ ID NO: 207410 - DNA, 201 bp, Homo sapiens
agagctgctggaggcgaggcggcgctgctggaggcgaggcggcgctgctggaggcgaggcggcgctgctggaggcgaggcggcgcatgtgcggccggcgggcgacctggccccgccccgcgcgcactatttaatcccagaatccctctgtgtcgtaccaacagccgcatcgttccgaggctgtggaggccgggcgcagcgg

SEQ ID NO: 207411 - DNA, 201 bp, Homo sapiens
cagagctgctggaggcgaggcggcgctgctggaggcgaggcggcgctgctggaggcgaggcggcgctgctggaggcgaggcggcgcatgtgcggccggcgggcgacctggccccgccccgcgcgcactatttaatcccagaatccctctgtgtcgtaccaacagccgcatcgttccgaggctgtggaggccgggcgcagcg

SEQ ID NO: 207412 - DNA, 201 bp, Homo sapiens
ctggtcgcctcaactccccctattctcttctacccctggttcttcttatgggggtgtggactgggcagggaggctgtggaggagatagggttacagaaatyccaggaagtggaaagttctctgagactcttctcctgagtggagggcagacaccgggaccccaggacggcagagccagctcatacgacagcagttcccagg

SEQ ID NO: 207413 - DNA, 201 bp, Homo sapiens
tgcaataaactcagtgaccctcttatattacctggcctctgtgagtctcagtgcccctttaccacctgtgttttggagctctgcataccagttcttctttmcttgagccagagagggagagagattccctccagagatatctagaaaccaacctggatttttggatgttggttaggagttatgtagtgctcctgtgggttt

SEQ ID NO: 207414 - DNA, 201 bp, Homo sapiens
tcatgaccagcatctgcgatgagcgaggacaggagctcatctacgcgggcatgcccatcactgaggtcttcaaggaagagatgggcattggcggggtcctyggcctcctctggttccagaaaaggtgagcatggagggcagaagattacagggccctgcagctcagagttaatgattttcccccaacaaaggggtgggagt

SEQ ID NO: 207415 - DNA, 201 bp, Homo sapiens
ccccttcatgagctgtttatttggcagggaaaggaagactgagaagcatttaattttcttaaaacctcaatggggtgggggtgggagtgagccaagcctctgaatcccagccagaaatccttttagatttctctctcaatcagcctccctcgactcttcacttgatttgttgcctctccatgattccaagtgtctcgcctt

SEQ ID NO: 207416 - DNA, 201 bp, Homo sapiens; identical to SEQ ID NO: 36410

SEQ ID NO: 207417 - DNA, 201 bp, Homo sapiens
cactgcaatctccgcctcctggtctcaagcaatttttctgcctcagccttccgagtagctgggattacaggtgcccgccaccacgccaggctaattttttrtttttagtagagacggggtttcaccatgttggccaaggctggtctcgaactcctgacctcaggtaatctgtccacctcggcctctcaaagtgctgagatt

SEQ ID NO: 207418 - DNA, 201 bp, Homo sapiens
tgggcaagttatcctaacgcctctgagattttattcctcatctaagaaatggggttataaatctcagtgtacctcccagagctcatatgagatgagtttcyttttatctttttttagacacaaggtcttgctctgacacccaggctacagtgcagcggtgcaatcatagctcactgtagcctcgaactccaagatgagttt

SEQ ID NO: 207419 - DNA, 201 bp, Homo sapiens; identical to SEQ ID NO: 36416

SEQ ID NO: 207420 - DNA, 201 bp, Homo sapiens
tcaagtcctggctgaagccacggctgggacaggaagccacagtgagtgggcatggggtcaggatgaacgtgtgtggtaacagaagcaaatatggtcacctycaggtcagcagctctgtggatcacccccacagccagtctcattgtagctcagggaaggcaggagtcctgtggcgctgacccactcaggtggctgccagca

SEQ ID NO: 207421 - DNA, 201 bp, Homo sapiens
tcctcagccaggagagtctgcgtggagaagtttccctgattaagccctggctccccacttctccacccattccctgcgcccggacccatgtcctgaggctragtcactgtgccttcctcaaggctcatgaagcagaatggttacctcccttctacccggtttcccctccccgtcaagctctgccacagccgtgacttgttg

SEQ ID NO: 207422 - DNA, 201 bp, Homo sapiens
atatgccgccagcatccctcacctccttgcccctgtctgtctgacacctctgcctccagcttctcgcctgacagctcctttccgcctcagtggctgaagakctatgtccagggagcaggggttgcagaggagatggaagggccagtggggtgcgtttagggaaatggagctgtcggtggcagtgagagattgctgcggggc

SEQ ID NO: 207423 - DNA, 201 bp, Homo sapiens
tttatttttagtagagacggggtttcaccatgttggccaaggctggtctcgaactcctgacctcaggtaatctgtccacctcggcctctcaaagtgctgakattacaggcgtgagccaccacgcccggccagaagtcctggttttgatctgactgtgtgcttctgctcctcccgccaggtcaggctttctgacagcaggag

SEQ ID NO: 207424 - DNA, 201 bp, Homo sapiens
tacatctgcaaagtgaagtggggtgacatcgagttccctccccccttcgggcgggaggcatatccagaggtaaggctggtttagagaggagatggggactsgggggagggcggtggggaggtgactcatctttgatgtgcatttggccccccttcatgagctgtttatttggcagggaaaggaagactgagaagcatttaa

SEQ ID NO: 207425 - DNA, 201 bp, Homo sapiens
ttgttaagacctcatttgcatataagctgatgacacaccttgcctgggaaatgaagcaggtcctataggaattatcctgggcatctttgactgtggggccyttctttctccattctttgcagagctacttaccagctagcaggccctcttagcttgatttgctctttctgccaccttcttccagaaaaatcgaggcacctc

SEQ ID NO: 207426 - DNA, 201 bp, Homo sapiens
  misc_feature (1)...(201): n = A,T,C or G
ctgtcctcttgacattcctttacggttgtgatgaggcatcaccctgtggacatggggcgtggaggggtctgtcaggcagccctggcccctgcaggtctccngggggtatgtgttctgggtgcactctctgtgtctttgcccaccaggaaagagcaccaccctcttcagccgccacaccaaggccattgtgtggggcatgca

SEQ ID NO: 207427 - DNA, 201 bp, Homo sapiens
gttcattggtgagtccattcgttgttgttttaagtgtttttttttaaaccccacggttcagctacaccacttacccatggggttgagtttctttttctttytttttttttttttttaattttctttttgtggttcagtttctacagaagaaatgtcatatcctcttaatcattgttcttaatctttcctttcttactttaa

SEQ ID NO: 207428 - DNA, 201 bp, Homo sapiens
ctccattttctatccagtttttacgtcaggatgggctgcactaacttggctttttctcattccccattccttggcagattgggggcactgaggaatataaratttgccggggcatcaaggagggccgcctcactaagcccatcgtctgctggtgcatcgggacgtgtgccaccatgttctcctctgaggtatggctgagat

SEQ ID NO: 207429 - DNA, 201 bp, Homo sapiens
ttccccattccttggcagattgggggcactgaggaatataagatttgccggggcatcaaggagggccgcctcactaagcccatcgtctgctggtgcatcgrgacgtgtgccaccatgttctcctctgaggtatggctgagatgggtcacttctgggctgggagtggggattgcaagagggggcatttgaggcgaaccaggt

SEQ ID NO: 207430 - DNA, 201 bp, Homo sapiens
tcctcacatcccagactatgggcggccaggcagagacgctcctcacttcccagacggggtggcggccgggcagaggctgcaatctcggcactttgggaggscaaggcaggcggccgggaggtggaggttgtagcgagctgagatcacgccactgcactccagcctgggcaccattgagcactgagtgaacgagactccgtc

SEQ ID NO: 207431 - DNA, 201 bp, Homo sapiens
gacggggcggttgccaggcagaggatctcctcatccccacatctcagacgatgggcggccgggcagagacgctcctcacctcctagatgggatggcggccrggaagaggcgctcctcacttcctagatgggatagcggccgggcagagacgctcctcactttccagactgggcagccaggcagaggggctcctcacatccc

SEQ ID NO: 207432 - DNA, 201 bp, Homo sapiens
tgccgggcggaggggctcctcacttctcagatggggcggctgccgggcggaggggctcctcacttctcagacggggcggttgccaggcagaggatctcctcatccccacatctcagacgatgggcggccgggcagagacgctcctcacctcctagatgggatggcggccgggaagaggcgctcctcacttcctagatggga

SEQ ID NO: 207433 - DNA, 201 bp, Homo sapiens
gctgccgggcggaggggctcctcacttctcagatggggcggctgccgggcggaggggctcctcacttctcagacggggcggttgccaggcagaggatctcctcatccccacatctcagacgatgggcggccgggcagagacgctcctcacctcctagatgggatggcggccgggaagaggcgctcctcacttcctagatgg

SEQ ID NO: 207434 - DNA, 201 bp, Homo sapiens
agcaggtctagagttttccctaaaattttgggaatactttgcctccccacactaaacacgtgtttgtttagtgttgaactttgtcacagcttgagtaggcrcagagctggcgggggcatggctggaggctggaacctaagactcttgagttggagagtggttaactttcagacctctgctgctcaacactgtaggacctgg

SEQ ID NO: 207435 - DNA, 201 bp, Homo sapiens
acgttattgttatggttggcagctatatctgaagtgtatgtaagattttccctttggattcattttaccatttcttacccaggtgaccttgggctggttamtgagcctctctaagcctcatttttttttttttttttttgctataacacaaggaatgcttctcctttgtgaggttaaaatgaagcaatgggctggatgcag

SEQ ID NO: 207436 - DNA, 201 bp, Homo sapiens
tcctcacttcccagacggggtggctgccgggcggaggggctcctcacttctcagatggggcggctgccgggcggaggggctcctcacttctcagacggggyggttgccaggcagaggatctcctcatccccacatctcagacgatgggcggccgggcagagacgctcctcacctcctagatgggatggcggccgggaagag

SEQ ID NO: 207437 - DNA, 201 bp, Homo sapiens
gaactttgtcacagcttgagtaggcacagagctggcgggggcatggctggaggctggaacctaagactcttgagttggagagtggttaactttcagacctytgctgctcaacactgtaggacctggccagttccctgaacatctcagggctcagtttcttctttgcaacttaaaagtgagaacctaccaaggttgttttgt

SEQ ID NO: 207438 - DNA, 201 bp, Homo sapiens
ggacggggtggctgccgggcgaagacgctcctcacttcccagacggggtggctgccgggcggaggggctcctcacttctcagatggggcggctgccgggcrgaggggctcctcacttctcagacggggcggttgccaggcagaggatctcctcatccccacatctcagacgatgggcggccgggcagagacgctcctcacc

SEQ ID NO: 207439 - DNA, 201 bp, Homo sapiens
gtactgtctgtggggaggagggcagtcacgtgagccttttaaaactacaagttgatgtgtgttgcagggaggaagctgatgaatatattgacattggagcsctcaatggcatctttgtgctgggaaggagtatggggttcattggtgagtccattcgttgttgttttaagtgtttttttttaaaccccacggttcagctac

SEQ ID NO: 207440 - DNA, 201 bp, Homo sapiens
ggtcaaggctacagtgagttgtgatcacaccactgcacttcagcctaggcagcagagtgagactctaaataaataaataaataaatgttaaataaataaatgaggtggctcaggctccaccccacccccactatatcctctctgtgctatgcataactggcttgaaaactgggattggctggatgccatggcttgtgtttg

SEQ ID NO: 207441 - DNA, 201 bp, Homo sapiens
aggtcaaggctacagtgagttgtgatcacaccactgcacttcagcctaggcagcagagtgagactctaaataaataaataaataaatgttaaataaataaatgaggtggctcaggctccaccccacccccactatatcctctctgtgctatgcataactggcttgaaaactgggattggctggatgccatggcttgtgttt

SEQ ID NO: 207442 - DNA, 201 bp, Homo sapiens
tgggtgatgtggacgccaaggcccagaagctgcttgttggcgtggatgagaaactgaatcctgaggacatcaaaaaacacctgttggtccacgcccctgamgacaagaaagagttgagtgagagggacggtagggaggtggcagttcggatgagaagaccgacaggctctgggcacagactggggagagcagagcggtctc

SEQ ID NO: 207443 - DNA, 201 bp, Homo sapiens
tgtccaccgtaacctgaggaaagaagtcaagctgatgaggacagtcagagggaccagggtccctgaagctgcactgaggatctgagggtgctgcggactcrggagtccagaggggaaggaaagggcttggtctacagcagagaggagttaggactggtaacaaaggggacttccaagtgcagggatgagaacgacctgcag

SEQ ID NO: 207444 - DNA, 201 bp, Homo sapiens
agcccctccccctttccaccccacctccccatccccaccatgatcaggacacttctaagagggtgagcacctcgcatttcagtatctggtggcactcatcrccccatgggtggggtgggtccttgaattattttaggtttttgtgtttttttttttttgagacggagtctcgctctgtcgcccaggctggagtgcagtggt

SEQ ID NO: 207445 - DNA, 201 bp, Homo sapiens
gggctcctcacatcccagactatgggcggccaggcagagacgctcctcacttcccagacggggtggcggccgggcagaggctgcaatctcggcactttggraggccaaggcaggcggccgggaggtggaggttgtagcgagctgagatcacgccactgcactccagcctgggcaccattgagcactgagtgaacgagactc

SEQ ID NO: 207446 - DNA, 201 bp, Homo sapiens
tgagggcactggccctgtgtaactagcttgctgctcctgccttgtgcagagccctggccagaaccacagttagcgataaggctgctgtgtcctcagccccrgctgcacaaacctcttctttggacctacactgacctagaattcatgctgattcaaaccctgactggagctggttttatgtccagatttacagggtaataa

SEQ ID NO: 207447 - DNA, 201 bp, Homo sapiens
tctttctacacagacacggcaaccatccaatttctcaatcttttccccacctttccccctttctattccacacaaccgccattgtcatcatggctcgctcrcaatgagctgttgggtacacctcccagacagggtggtggccgggcagaggggctcctcacttcccagtaggggcggccgggcagaggcgcccctcacctc

SEQ ID NO: 207448 - DNA, 201 bp, Homo sapiens
ccgggccgtgcaaggcatgctggactttgactatgtctgctcccgagacgagccctcagtggctgccatggtctaccctttcacgtgagttaccccatggygggaaatatctccttcctctgctaagacaaagcttggggctgggcacagtggctcatgcctgtaatcctagcgctttgggaggtcgaggtgggagaattg

SEQ ID NO: 207449 - DNA, 201 bp, Homo sapiens
gagttaccccatggcgggaaatatctccttcctctgctaagacaaagcttggggctgggcacagtggctcatgcctgtaatcctagcgctttgggaggtcraggtgggagaattgcttgagcccaggagtttgagaccagccctgggcaacatagggagacccccatctctacagataatttaaaaattagccggatatgg

SEQ ID NO: 207450 - DNA, 201 bp, Homo sapiens
agatcactgggctctggagggtggggggtggggaccatgaactatgcgcaggtagatcactgggctctaggggacagagggtggggaagcaggaatggctyctggttgatgtcccgtcactgctgcctgggacaaagggctggggatttgggagtagccagtggtttaggtggaaatggttggagacacatgatcttcaga

SEQ ID NO: 207451 - DNA, 201 bp, Homo sapiens
cttgctctgtcggcaggctggagtgcagtggtggatctcggttcactgcaacctccgcctcctgggttctagcgattctcctgcctcagcctccccagtarctacaggtgtgcaccaccacgcccggctaatttttgtatttttagtagaaacagggtttcaccatattggccaggctggtctcaaactcctgacctcgtg

SEQ ID NO: 207452 - DNA, 201 bp, Homo sapiens
aaatggttggagacacatgatcttcagaagtcaggatagtgacttagggcaggtcagtctgggcagaggctgcttatctgggcttacaaagaggctgctcrggcctgggacagtgacttatgcctgtaatcctaggactttggaaggcagaggcaggaagattgcttgaagccaagagttcaagaccagcctaagcaataa

SEQ ID NO: 207453 - DNA, 201 bp, Homo sapiens
gcgcaagccaccgtgcctggccgcaaatgttcttaactggtggtcagtctgtgggccatcggatcattgtcacaggtgagcaccttgaaacaatatgcacrattggatttgtgtacctttttctggggtttttttcagtctcagaagagtctgaggcctcaaagaggttaagagccactgccttagagagactttaagacc

SEQ ID NO: 207454 - DNA, 201 bp, Homo sapiens
caccaccctcttcagccgccacaccaaggccattgtgtggggcatgcagacccgggccgtgcaaggcatgctggactttgactatgtctgctcccgagacragccctcagtggctgccatggtctaccctttcacgtgagttaccccatggcgggaaatatctccttcctctgctaagacaaagcttggggctgggcacag

SEQ ID NO: 207455 - DNA, 201 bp, Homo sapiens
gacatggttaggctcaggacttaggcagagggccaagtacttgacgtcagagaagggagatgggaagtttgtccctaggcagtgactgtgactatgggtgkttttggtacttggagacaccatcaagtgtcttcaaggcatgtggggccctgcgtagccccttcttcccaccccattaaggcaccttttcatgtgcttcca

SEQ ID NO: 207456 - DNA, 201 bp, Homo sapiens
gaccatggtggccgggggtggcgcctctgtcgtgtacaggtgaccgaagggggttgctgaagggatgccagcccagtctacccagcatcaacatgtgtgtrgcctgggtgggtggggtcctgtcactttggtgtgggaatttggggcagaggaaagcagtggcatcccagagggcttcgagggatgttggtgagggcctgt

SEQ ID NO: 207457 - DNA, 201 bp, Homo sapiens; identical to SEQ ID NO: 36411

SEQ ID NO: 207458 - DNA, 201 bp, Homo sapiens
tccttgtgtccaggctgaaattaaactccttttatttggccaaagcccgtgtcactccattttctatccagtttttacgtcaggatgggctgcactaactyggctttttctcattccccattccttggcagattgggggcactgaggaatataagatttgccggggcatcaaggagggccgcctcactaagcccatcgtct

SEQ ID NO: 207459 - DNA, 201 bp, Homo sapiens
ctgtcccaaatcagcatccttgtccatggcacgggtcaaccccatgctggccaatcatctcatagtgtttcatggagacaaaaagggattggcattaagakggtgggactgcgccagctagagagcccagagttcaagtcatccagctgtccctgcagagggcctgggggaggcgctggtgttgagcacatctgcccagcc

SEQ ID NO: 207460 - DNA, 201 bp, Homo sapiens
ggtggccgggggtggcgcctctgtcgtgtacaggtgaccgaagggggttgctgaagggatgccagcccagtctacccagcatcaacatgtgtgtagcctgrgtgggtggggtcctgtcactttggtgtgggaatttggggcagaggaaagcagtggcatcccagagggcttcgagggatgttggtgagggcctgtcctgca

SEQ ID NO: 207461 - DNA, 201 bp, Homo sapiens
tgatgatggaggcctggagcaccatgacattaagggatgtcaatcccgggtaccccacgttcccacctcagcaacattctgagtgatcatattccaggccktggctgcttatgcgtagtcctgtgcttcctgaggagcagcacttgtcacatatacctggtatgtttgtttatcacggttataaatcattgacttgtggct

SEQ ID NO: 207462 - DNA, 201 bp, Homo sapiens
gaggtcaaggctacagtgagttgtgatcacaccactgcacttcagcctaggcagcagagtgagactctaaataaataaataaataaatgttaaataaataaatgaggtggctcaggctccaccccacccccactatatcctctctgtgctatgcataactggcttgaaaactgggattggctggatgccatggcttgtgtt

SEQ ID NO: 207463 - DNA, 201 bp, Homo sapiens
taaactttggagtggtcaggaaagcattttcattgagctctacacttaacagatatttattaaagatcactcgctctgtgctgggctttgtgctggtgacragggttacagccacaaatggacagacagcaagccttgatggaacggaggacacaaactgctatgtcagggggtgccgagtgccaggaaggaaaacaaagc

SEQ ID NO: 207464 - DNA, 201 bp, Homo sapiens
ggaggtcaaggctacagtgagttgtgatcacaccactgcacttcagcctaggcagcagagtgagactctaaataaataaataaataaatgttaaataaataaatgaggtggctcaggctccaccccacccccactatatcctctctgtgctatgcataactggcttgaaaactgggattggctggatgccatggcttgtgt

SEQ ID NO: 207465 - DNA, 201 bp, Homo sapiens
ctgcaacctctgcctcccgggttcgagcgattctccctgcctcagcctcctgagtagctgggattacaggtgtccaccccaccacacccagctaatttttrtatttttattagagacagcgtttcaccgcgttggccaggctggtcttgaactcttgagctcaagtgatccactggtctcagcctcccaaagtgctgggat

SEQ ID NO: 207466 - DNA, 201 bp, Homo sapiens
ggaaagtggtttggggaaagcagggaaggggccttgaaagcagagtttgagccagagccaagttaccatgagttcccaggtcaggtagggagctcttgccycagggtctcttaaaggggtggagaagacactgggacaggagctgcccatctgcgctgtgtgtctctgggcaagcagctgctacgctgaactataactctc

SEQ ID NO: 207467 - DNA, 201 bp, Homo sapiens
ggacctgggggtgtgaccctttttgaggctaagtaaacttgctggcttggccattggcccggtggtgtgtaagggtgtgtataggggtaaatctgggtgtsggggagatgaaacctgtagggagagaaaggctagccttttgcaatttcagccgtactctgcactggtcagagaacagaaaggtgtttcagtgtctgccca

SEQ ID NO: 207468 - DNA, 201 bp, Homo sapiens
attagcagctggatgacgcagtggggcgggtggaatgtgctaaaggtcggtttccctgccctgtgtctgctccatactcaggattgggaggctagtgtccrggagaaaagaggagaaaagagcttagcgatgatcctcccccctcccctactccccttctaaccaggacctgggggtgtgaccctttttgaggctaagtaa

SEQ ID NO: 207469 - DNA, 201 bp, Homo sapiens
  misc_feature (1)...(201): n = A,T,C or G
aacttgaggctaatcattgaactttggctctcagtttctctgactgcacagagggcagggaccacatctatcagtgggaggggactgagagggcaagaggngatgtgtgataaagcccttcaaacaagtgcaggggaggaggtggctgtggcatgctcctgctacaattgcagtaaactcagtttatccgattgcgataaa

SEQ ID NO: 207470 - DNA, 201 bp, Homo sapiens
gcataggtcttagaaacttcttttttttcccatgccttgtcagtccgcttattccatgaagctgttcctgattctccttttttttttttttttttttttttgagacggagtctctcgcctaggctggagtgcagtggtgcgatctcagctcaccgcagcctctgcctccctggtttaagcaattctcctacttcagtctcc

SEQ ID NO: 207471 - DNA, 201 bp, Homo sapiens
aggagttgaaggctgaagttagccatgactgtgccactgcactccagcctgggtgacagagtgagaccctgtctgtaatttaaaaaaaaaaaaaaaaaaaagggctgggcctggtggctcatgcctgtaatcccagcactttgggaggccagggtgggcggatcacctgaggtcaaaagttcgagaccaggctggccaaca

SEQ ID NO: 207472 - DNA, 201 bp, Homo sapiens
gagactctggtccccctccagaaatgaagcaatggatatgaactgcttaggctatttcctagcccagcaaatgctcagggaaggatagaaatagagctgakagtgctgatgccaagtggtgtcatgggtcctcctgttttctatgtccaaaatgatctaatgaaagggcttttgcacttctttcttgggaaaactttgaga

SEQ ID NO: 207473 - DNA, 201 bp, Homo sapiens
gcagggtcttgctgtgttgctggagtgcagtggcttttcacaggtgcagttataacacacttcagcagccccgaactcctaagctcaagcaatctccctgyctcagcctcctgagtagctgggattccagaagtgttctccacacctggcttatttttacttcttactgtattaaaaaaatggagctagtatttatttcca

SEQ ID NO: 207474 - DNA, 201 bp, Homo sapiens
atcatagactctttgaagtgaaaaggacacatgggcctggctcttggaaaaatggtcttttcttgggctggtgtggatttttctggggacctaggtgtaaragggtttgggttcgagtcttgggtcataaccttgcttattattaggtgggcttcttgggcaagttatcctaacgcctctgagattttattcctcatctaa

SEQ ID NO: 207475 - DNA, 201 bp, Homo sapiens
tgtcttgtgtcttatgttctctgtatttatgcagctgatttgtctgtctgtaactgaagtgtgggtccaaggactcctaactactttgcatctgtaatccmcaaagattctgggcagctgccacctcagtctcttctctgtattatcatagtctggtttaaataaactatatagtaacaatgaaggcatactgctggctcc

SEQ ID NO: 207476 - DNA, 201 bp, Homo sapiens
caaatcaggattaaagcactttattttatgtatgtttgtatttatttattttttttttttgagacagggcctcactctgtcacacagcctccacttcccargctcaagtgattctcgtgcctcagccttctgagtagctgggattacaagcacatgccaccacacctggctttttttttttttttttttttttgtacagat

SEQ ID NO: 207477 - DNA, 201 bp, Homo sapiens
tactttctcacagtggggaccacaagcagaagttttactgggggcacaaagagatcctgatccctgtcttcaagaacatggctgatgccatgaggaagcayccggaggtagatgtgctcatcaactttgcctctctccgctctgcctatgacagcaccatggagaccatgaactatgcccaggtagatcactgggctctgg

SEQ ID NO: 207478 - DNA, 201 bp, Homo sapiens
ttcccagaagccaaatcttatcctgaatgtagatggtctcatcggagtcgcatttgtagacatgcttagaaactgtgggtcctttactcggtgagcattgyagctgttttcttcttcattacgtttgttgatttttgttgtttcctccaaactataaaagtaatgcatactcataatagaatatttgaaaaataaggagag

SEQ ID NO: 207479 - DNA, 201 bp, Homo sapiens
  misc_feature (1)...(201): n = A,T,C or G
ggcgggaaatatctccttcctctgctaagacaaagcttggggctgggcacagtggctcatgcctgtaatcctagcgctttgggaggtcgaggtgggagaantgcttgagcccaggagtttgagaccagccctgggcaacatagggagacccccatctctacagataatttaaaaattagccggatatggtggtgtgcacct

SEQ ID NO: 207480 - DNA, 201 bp, Homo sapiens
ggttttaaagagacacacatactgctctgtagcccaggctggagtgcagtgatgcaatcatgcaactcactgtagcctcaacctcctgggttcaattgatyctcctaccgggtctccctgtgttgcccaggctggccttgaactcttgggctcaagggatccacctgccttagactcccaaagtgctgggattacaggcat

SEQ ID NO: 207481 - DNA, 201 bp, Homo sapiens
agcaggcacaggaacaggtagacaacaggagggtgtgagcttttgggtgagagtgaacgtagctgctatgactgtagcagggcttccgaaatacctgcctytcttgggtggatcactgtggtgttagctagtggagatcagtttcggctatccaccacttgtgttttcaggagatggttagagtgattacgagcagaggcc

SEQ ID NO: 207482 - DNA, 201 bp, Homo sapiens
agtgagaccctgtatcaaaaaaaaaagaagaaagaaaagaaaactgacatttgagcaaagacctagaatgagggagcagcgccatggtgactcttggagarggaagggcaaattcccataccctgcagtggtaaggggctgggactgagagagtggcagcgagacactacaggtcacaggaggacttggccatcactgtga

SEQ ID NO: 207483 - DNA, 201 bp, Homo sapiens
cagtgggtcactcagttgccttggtcattttctttgacagattcagtcccaagtccaagatccctgcaaggtaggatgcccccaccctgcccccactccgygtgtggctttgttagcgggtgacagttttactgtgtgctctgtttccccctcccctggtgggttgcagtgtcgtctggtctattttctgtccctgccttg

SEQ ID NO: 207484 - DNA, 201 bp, Homo sapiens
gatgtggcctgaccccaagtcctaagtcttcgctcttcctcccctcctatccgtgctcagtacgcgccccactcagtcctctcctcactgtgtggctgttyctggctccaagcttgggaaggggtagagattttggaaggagcaagagccagacccacagccctggagagtgtagtggtgtcaaggagagagtgtcgcctg

SEQ ID NO: 207485 - DNA, 201 bp, Homo sapiens
tactttgctagatgctgggaattgaactgagtcagacacagtgtcgaccagtggggctggtagaaggtttttaaatgatggtcacaattcgtagtaatggkagtgacagtggaaaattatgaagaaaaaatgagaaataatgataaatgctttgaatttttttgccttcccagaagccaaatcttatcctgaatgtagatg

SEQ ID NO: 207486 - DNA, 201 bp, Homo sapiens
ttgttactctcctaaaaaagtgggatggaggccaggcgcggtggcccatgcctgtaatcacagcactatgggaggccaaggcaggtggatcacttgaggtygggagttggagaccagcctgaccaacatggagaaaccccgtctctactaaaaatacaaaaaaattagccaggcgtggtggtgcatgcctgtaatcccagc

SEQ ID NO: 207487 - DNA, 201 bp, Homo sapiens
tgtccccttgctaaggggaggggaaggagtaattggcagggtcgataaccagctggaaaggcctggaatgcagcactgtggccacctggctttaatcctgrtgtttttgcctctggaaaaagttaagagcagagtgagcccagtgtggaaagaacagggaccagccctggttctccaggagctctctgtgctctgaagggg

SEQ ID NO: 207488 - DNA, 201 bp, Homo sapiens
tagatagagcattcttgggatgtcttacaggagcccaaaataagaaaatccacatggatgtcttttttttcctgcctcccaggtctgtatacgaagatctygtggccaatggagtcattgtacctgcccaggaggtgccgcccccaaccgtgcccatggactactcctgggccagggtaggtgccttaaatgtctctaaca

SEQ ID NO: 207489 - DNA, 201 bp, Homo sapiens
tcattcaatgaatgttgaatgatcctgcagaggttatagcttttctcttgcgaatgctcttttctttttttttttttttttttgtttaaatcctcattccmttgttggatgtaagaggagaaaaatggttagggtatatatttaatacagtatttttttgctgctgctgtttggtgggctgtagaggaagcagccatgatg

SEQ ID NO: 207490 - DNA, 201 bp, Homo sapiens
atgatgatacggctgctccattgggagggttggggtaggtccactgcccatccagaaggtatcagaagtgcagcctcctgtcagacagcaacactgaccaygtgagtaggtaacatttctaatcttcaaaatcattttggtttaagagacaaataccgatactttgcttgtttgatgagagcccggtttgaagaacataag

SEQ ID NO: 207491 - DNA, 201 bp, Homo sapiens
ccgtctgagactagtctgagaacatagtgttaaaatgtgtagattttaatcacctaaattcattgcagggtgggctaacaacccaagatgtgtgagtgccycgcctccactccagtcttacgactctccaaacgtagttttataagaaggccttctgggaaaaaaactctatggaaaatggagtaggcctggaagaattac

SEQ ID NO: 207492 - DNA, 201 bp, Homo sapiens
caaaaggtgttgcggctttataagcgggcgctacgccacctcgagtcgtggtgcgtccagaggtaagggatggggacccaggactcggggaggtgaccctyggggccccatggaggtggagaggcccctgggtacctggaggttcaaggacttcgggaacggaattggaaggtggcctctcgcttcacagaatcctatggt

SEQ ID NO: 207493 - DNA, 201 bp, Homo sapiens
aactcctgacctcaggtgacctccacctcagcctcccaaagtgctgggattacaggcgtgagccaccgtgcctggcctttttgttgttgttgttgttgttkttttttgagatgaagtctcgctcttgtcccccaggctggagtgcaaatggcacaatctcgactcactgcaacctctgcctcccgggttcaagctattctc

SEQ ID NO: 207494 - DNA, 201 bp, Homo sapiens
ctgtttggtgggctgtagaggaagcagccatgatgatacggctgctccattgggagggttggggtaggtccactgcccatccagaaggtatcagaagtgcwgcctcctgtcagacagcaacactgaccacgtgagtaggtaacatttctaatcttcaaaatcattttggtttaagagacaaataccgatactttgcttgtt

SEQ ID NO: 207495 - DNA, 201 bp, Homo sapiens
tcaccgtttagaagcttgaagtatatgcatggtgagccgcaggtgcattctgcaattgatcactgggataacatcaaacaattcctcctttacacatcccrtcacttcaacactattaagcagcacgtgtgactggaggcccagggcagccacaatccagaatgggtgatcttctgttaggacatttatcttggccataac

SEQ ID NO: 207496 - DNA, 201 bp, Homo sapiens
gcaatcctcctgtcctagccaaccaagtagctaagaaaacagaggcacaacaccacacctagctaatttattttattttttgtagagatggaatcttgctrtgttgtccaggctggtctggaactcctaccctcatagaatctccctgcctcagccttcaaagggctgggactaaaggcaggagccacctcacccaaccaa

SEQ ID NO: 207497 - DNA, 201 bp, Homo sapiens
tctccctgcctcagccttcaaagggctgggactaaaggcaggagccacctcacccaaccaataatgtatttttaaattatgtcttttttttggtggagggrgacagagttttgcccaggctggagtgcaatggcacaatctcggctcaccgcaacctccacctcccaggttcaagcgattctcctacctcagtctcccaag

SEQ ID NO: 207498 - DNA, 201 bp, Homo sapiens
ccagaatgggtgatcttctgttaggacatttatcttggccataactagaactggaggtagtagggcagcacttggcagaactgagcatatttttacatgtrattttgtgatttatttttgttcttggttgctaggaagggggcttagaattaacatccccagcatattatgaactgaggtttcttaatggtgcttttggag

SEQ ID NO: 207499 - DNA, 201 bp, Homo sapiens
aagcgactcatgactgcgcatggaggacctccccagcggaagcggaagtggccgccggcaactccgcccttccggctggccccgctcagtcacccgcagcrggcgtgcagtttcccggctctccgcgcggccggggaaggtcagcgccgtaatggcgttcttggcgtcgggaccctacctgacccatcagcaaaaggtgtt

SEQ ID NO: 207500 - DNA, 201 bp, Homo sapiens
gggtgggggctgtgacaaggagaattggaatgatagttgtcatttttctgtctgcagaataagaggaggtccagataatgaggtgatgaaaaggggtaggrggaagaataggaagggtaggctttgctatttaaaagaatgggaaaacccttaaggagacttttctaaaagtgtggatatgaaaataaagcaggtatatgt

SEQ ID NO: 207501 - DNA, 201 bp, Homo sapiens
actgcggagggaaagctgggaacgagaggtgcgttctacttgtacttcgttattccttagctatgtagatggagtgaagttttgctccccacaagcagagstccagattccagccatgacagttactctgggcccttgcttctcagatatactttagtatctaagtgtatcaatttaacatttataatcaccttacaagta

SEQ ID NO: 207502 - DNA, 201 bp, Homo sapiens
ggaggccaaagtgggtgatagcttgaggtcaggagttcatgacgaccagcctgactaacatggtgaaaccccatctctactaaaagtacaaataattagcygggcgtgggggctgtgcacctgtaatcccagctacttgggaggctaaggcaggagaattgcttgaatcccaggaggtggaggttgcaatgagctgacatc

SEQ ID NO: 207503 - DNA, 201 bp, Homo sapiens
ttcactgcagcagacagatttttatagtcaattagattcctttggtaatgattccttccttgcctccttctaggttaagcagctgcaggaggaaacgccayctggtggtcctttaactgaagctttgccccctgcccgaaaggaaggtgatttgcccccactgtggtggtatattgtgaccagaccccgggagcggcccat

SEQ ID NO: 207504 - DNA, 201 bp, Homo sapiens
tgtgcttggcagatattgtattttcacagattgaaagtttgtggcaaccccgtgctgagcaagtctgtgggcaccatttttccaacagcatgtgctcactycctgtctctgtttctcagtttggcaattcttgcaatatttcaaacttttttttattattactctatctacacacagttgtggtgaactgtgatcagtcac

SEQ ID NO: 207505 - DNA, 201 bp, Homo sapiens
acagtggaagaaactgcggagggaaagctgggaacgagaggtgcgttctacttgtacttcgttattccttagctatgtagatggagtgaagttttgctccycacaagcagaggtccagattccagccatgacagttactctgggcccttgcttctcagatatactttagtatctaagtgtatcaatttaacatttataatc

SEQ ID NO: 207506 - DNA, 201 bp, Homo sapiens
ctttgattttgcttcagatctccttctctttagtcctttgtctgacttttttgccttcttgctatactttccctcaacctgcctctccactattttcttargcatttttcagtcatgttaggatggtcagttatatttttaaaagctcaatcttgctgtagtgtgaagaatatattggagaggggaagaggagaagcagag

SEQ ID NO: 207507 - DNA, 201 bp, Homo sapiens
gctcaatcttgctgtagtgtgaagaatatattggagaggggaagaggagaagcagagagacccttctaggattattgcagaagtttagtcaaaaggttgtmatgactaacactagggtggatgaagtggatatggaaggaaattgactcaggacatcatttggagggatgtgacgactgactggatgttgagggtgggtga

SEQ ID NO: 207508 - DNA, 201 bp, Homo sapiens
gcgcatggaggacctccccagcggaagcggaagtggccgccggcaactccgcccttccggctggccccgctcagtcacccgcagcaggcgtgcagtttccsggctctccgcgcggccggggaaggtcagcgccgtaatggcgttcttggcgtcgggaccctacctgacccatcagcaaaaggtgttgcggctttataagcg

SEQ ID NO: 207509 - DNA, 201 bp, Homo sapiens
agtgtgaagaatatattggagaggggaagaggagaagcagagagacccttctaggattattgcagaagtttagtcaaaaggttgtcatgactaacactagkgtggatgaagtggatatggaaggaaattgactcaggacatcatttggagggatgtgacgactgactggatgttgagggtgggtgagggatggggaggaat

SEQ ID NO: 207510 - DNA, 201 bp, Homo sapiens
ttggagaggggaagaggagaagcagagagacccttctaggattattgcagaagtttagtcaaaaggttgtcatgactaacactagggtggatgaagtggayatggaaggaaattgactcaggacatcatttggagggatgtgacgactgactggatgttgagggtgggtgagggatggggaggaatcaagaatggtttctg

SEQ ID NO: 207511 - DNA, 201 bp, Homo sapiens
accgataaacttgaagcgactcatgactgcgcatggaggacctccccagcggaagcggaagtggccgccggcaactccgcccttccggctggccccgctcrgtcacccgcagcaggcgtgcagtttcccggctctccgcgcggccggggaaggtcagcgccgtaatggcgttcttggcgtcgggaccctacctgacccatc

SEQ ID NO: 207512 - DNA, 201 bp, Homo sapiens
aaggaaatggaagttgtcattcaatgaatgttgaatgatcctgcagaggttatagcttttctcttgcgaatgctcttttctttttttttttttttttttgkttaaatcctcattccattgttggatgtaagaggagaaaaatggttagggtatatatttaatacagtatttttttgctgctgctgtttggtgggctgtaga

SEQ ID NO: 207513 - DNA, 201 bp, Homo sapiens; identical to SEQ ID NO: 36446

SEQ ID NO: 207514 - DNA, 201 bp, Homo sapiens
tcaatccactggattaggtactccaagcttatagcatggagaaatgtgtaaacctttcactgcatagatagggtatgaaatacatttggaaatggggaggwcaagccaagatggccgaataggaacagctctggtctacagctcccagcataagcgacgcagaagaagggtgatttctgcacttccatctgaggtactggg

SEQ ID NO: 207515 - DNA, 201 bp, Homo sapiens; identical to SEQ ID NO: 36447

SEQ ID NO: 207516 - DNA, 201 bp, Homo sapiens
cttgatatcatctttagtcccattaatgcccttaaaaacaatttgcttgggatgacactagtggcggaggcaatggccagcaaccctctgtaagcgaggcrtggaagacatatgcttgtgagaaaaaggtgtctatgaaactatggatggtacaagaacttcacttgacattgaagagtactccaatactgaggtacagaa

SEQ ID NO: 207517 - DNA, 201 bp, Homo sapiens; identical to SEQ ID NO: 36449

SEQ ID NO: 207518 - DNA, 201 bp, Homo sapiens
tatttgtagtagggaaaggtgatctttactaaacaaaacatgcaggaaatgtgaaccaggtttcctcttcccttacttctccagcagaaattaaacaactwttacaccccacgtagtcttcagtagaggatgctaatgatgtctctgatgccctctacatctgatcaaactttattgtctgtgtcaggctgccaattaagg

SEQ ID NO: 207519 - DNA, 201 bp, Homo sapiens; identical to SEQ ID NO: 36450

SEQ ID NO: 207520 - DNA, 201 bp, Homo sapiens; identical to SEQ ID NO: 36451

SEQ ID NO: 207521 - DNA, 201 bp, Homo sapiens
aatgtgaaccaggtttcctcttcccttacttctccagcagaaattaaacaacttttacaccccacgtagtcttcagtagaggatgctaatgatgtctctgwtgccctctacatctgatcaaactttattgtctgtgtcaggctgccaattaaggcatggctctcctattgcacaaacttcccgagccaccttaaaggttaa

SEQ ID NO: 207522 - DNA, 201 bp, Homo sapiens; identical to SEQ ID NO: 36452

SEQ ID NO: 207523 - DNA, 201 bp, Homo sapiens
actttattgtctgtgtcaggctgccaattaaggcatggctctcctattgcacaaacttcccgagccaccttaaaggttaattgaatcatgtacacgcgacrctccagtggacatggggctgtagatttcctctcagacagtggatcttttgggagaacaaattaaaaaatagtgtgattgttatacagccagagtgaaggc

SEQ ID NO: 207524 - DNA, 201 bp, Homo sapiens; identical to SEQ ID NO: 36453

SEQ ID NO: 207525 - DNA, 201 bp, Homo sapiens; identical to SEQ ID NO: 36454

SEQ ID NO: 207526 - DNA, 201 bp, Homo sapiens
gcccagtatatggtctgtcttggtgaatgttctgtgtgtatttgaaaagattatataattctctggttgttgatggagcttttcataaataccagctaaaytacagttggtatggtcacataggtctcccattttttttttatttttttattttttaggcaaggtctcactcacccaggttggagtgcagtggcgtgatca

SEQ ID NO: 207527 - DNA, 201 bp, Homo sapiens
tcaaaatttgatatgctttcattagaatccagttcaaaatattttctgggttgatttgtgatttcttctttgacccctgggtttagaattaggttaaattktggatatttgaggtttttctaaatgttttattgttgattttgaattccattgtagtcaaagcacatttcctataagatttcagttttttggaatctattc

SEQ ID NO: 207528 - DNA, 201 bp, Homo sapiens
atgagcatatagtgctgtacatttacttgcagctctgcttcagtctatcaaaatttgatatgctttcattagaatccagttcaaaatattttctgggttgmtttgtgatttcttctttgacccctgggtttagaattaggttaaattgtggatatttgaggtttttctaaatgttttattgttgattttgaattccattgt

SEQ ID NO: 207529 - DNA, 201 bp, Homo sapiens
ttttggtttcttaaggtggaagtttaggccattgctgtattgtcttacatgagcatatagtgctgtacatttacttgcagctctgcttcagtctatcaaartttgatatgctttcattagaatccagttcaaaatattttctgggttgatttgtgatttcttctttgacccctgggtttagaattaggttaaattgtggat

SEQ ID NO: 207530 - DNA, 201 bp, Homo sapiens
ggccagtgtctctggaaaccaagggagagaatggcggatgaggttgggggtacttgtaggacttcataaatgtgctaagaagtactttgagttttatttgyagtaagatgggaagccatgaaggaatgatgtaataaaattaaattattttaaagtttatgccagatgctatctgggcaactggagggagacttagaagga

SEQ ID NO: 207531 - DNA, 201 bp, Homo sapiens; identical to SEQ ID NO: 36464

SEQ ID NO: 207532 - DNA, 201 bp, Homo sapiens
gccactgtagtaagacttgaatttcggtatggtgagagctgaagaactttgctcttctctgatgagattgtttttgctattctatttatacatttgctgtrtaaatgttaagagtttcatggaaatttgtcagtttccatgaaaaagcctttgggacttgtgattgggattgtattgtatctgggtatcaatttgggaaaa

SEQ ID NO: 207533 - DNA, 201 bp, Homo sapiens
gagcttgccaagcccagctgtgcatctgccgcgggccctgcctgaccttgcgcctgtggggctgatggaactcagctcgtggtggtcactccccacatgtggtcatgtggggtcccgtggtcgggcgctttgcctctcccagtcccagccagcactccaggcatgcccttccctgctgtggatggccccaccggctgtgct

SEQ ID NO: 207534 - DNA, 201 bp, Homo sapiens
tcatttctttttggtgcagaatagtattttattgtctgggtgtaccacaatatacttacctatccatttacctactgaacgacattttgatggcttcacargttttggctattatgagtaatgctactatataaatatttgtttggaaagtttttataagttttcattcatctttcttgggtaaatactagggatcgtgat

SEQ ID NO: 207535 - DNA, 201 bp, Homo sapiens
aagacttggtggaggttcaggtcagttctgggaatgatgagtctgaagtcattggggcattcaagggaagcatgagcaggcagtgggaacctgggaccacwatcaggaagaaaagggtgggtaggatataaggggtccaaagtcacttggaagaggttgtcgtggctggagcagtgaggggctcacacctgagactccagt

SEQ ID NO: 207536 - DNA, 201 bp, Homo sapiens
tgcaagctccacctcccgggttcacaccattctcctgcctcagcctcctgactagctgggattataggcatgtgcctggctaatttttgtatttttagtasagacgggatttcatcatgttggtcaggctggtctcaaactcctgaccttttgatccgcatgcctcagcctcccaaagtgttgggattacaggcatgagcc

SEQ ID NO: 207537 - DNA, 201 bp, Homo sapiens
aaaaaacctctagcaattaaaatattatttccaccagttgaatgaaagtcaggttgttttgccagggaggttatttggctcctctgaaatgtccattcatragttttctggtggctttggcttattctctttcactttggaggaaatatttctgattcataattcttcatgctccgccctcagagaacttctgccattgct

SEQ ID NO: 207538 - DNA, 201 bp, Homo sapiens
agggataaaagcaggagtggttaaagtgaaatggcagagctcattaatcaaattcgttcagttttattgattgattgagatggagtctcgctctgtcgccsaggctggagtgtactggtgttatctcggctcactgcaacctctgcctcccaggttcaagtgattctcctgcctccgcctctggaggtgggattacagtca

SEQ ID NO: 207539 - DNA, 201 bp, Homo sapiens
atggcttcacaagttttggctattatgagtaatgctactatataaatatttgtttggaaagtttttataagttttcattcatctttcttgggtaaatactrgggatcgtgattgctgaatcatatggtaagagtatgtttcagtttgtaagaaactgccaaactgttgtccgaagtggctgtgccatttgctttccatcca

SEQ ID NO: 207540 - DNA, 201 bp, Homo sapiens
ttaacttcagaccaaagacaacagtggtcattaatatccaagatggttaaaaacagtttttgaactctttttgcagttgagacccttctgccttgaaaacwttaaaacttgctaactcttgattagacaattctaaactaaaatataatcggagaaataccagttaatctttagctagtgaagaataatatcccagacatt

SEQ ID NO: 207541 - DNA, 201 bp, Homo sapiens
tttgacatttcgttataattctctaatggcttttagttatacttgttgatattattatggtttctgtttttgccttttttttagtgatcgttgtagagtartgcttctgagtaatcactcaggctcagcatcgaatgggaacttgtttgaaacatgaattaccaggctgcatcccgggcctcagaaattctgtgggagaga

SEQ ID NO: 207542 - DNA, 201 bp, Homo sapiens
tattacactgtcttacaaaattaagagaaacaaaaaatgagtatttatatttattcacaatttctggttctcattcttcctgtatatctgaggttccatcrgtaccattttgcttcagcccaaataattttcattagtgtttctcatgacagaaattgttgggagacaattctccataggtcttctgcatttctgcacctt

SEQ ID NO: 207543 - DNA, 201 bp, Homo sapiens
gagcaaagaaacatcaaagaaagaaaaaaaaaaagtcccatgccctaccaccctggtctaactactacgaaccacagaagaccattctggacagaagagtrgatgtatacagttaacagttatttcataaacacagaatcgtatgcatggtatttagtagaagataaatataagttaataggaaggaattgtagaattttt

SEQ ID NO: 207544 - DNA, 201 bp, Homo sapiens
ttttaaaactatttttttccttttatgaacaggttgaaaggattgttgacaaaaggaaaaataaaaaagggaagacagagtatttggttcggtggaaaggytatgacagcgaggacgacacttgggagccggaacagcacctcgtgaactgtgaggaatacatccacgacttcaacagacgccacacggagaagcagaagg

SEQ ID NO: 207545 - DNA, 201 bp, Homo sapiens
accattcagagaagtgtagtttcctgttcttaatgaaagacatcaggtgaacaataaaatcctcctgttcctctaaaacaaatcgcctttcagacgacagraagctgccctttatgcctttgtgctcccccttccctgtgggttatttgtccttgctggagaatgggttttctctcctgctgtacatcattgaggacatca

SEQ ID NO: 207546 - DNA, 201 bp, Homo sapiens
gccggttttatttctgtttccctggccctggcagcctccccgccctaggcatctcccccactcccagtgggcaggaactccagtgattcaaacttaaatgsctgctacccagtacagtccttgaggagctctgcagtgctctgtgagcttttgaggggccatgtgcatcagaaagcacctgccactaaaaattgttgtaga

SEQ ID NO: 207547 - DNA, 201 bp, Homo sapiens
tgctcctgggtttcagttgcgcttctctcccctagtggtgtctctgggcacggtgggccctccgcaccacatctgtcttgctgggccggttttatttctgkttccctggccctggcagcctccccgccctaggcatctcccccactcccagtgggcaggaactccagtgattcaaacttaaatggctgctacccagtacag

SEQ ID NO: 207548 - DNA, 201 bp, Homo sapiens
aggtaaccaggatagaatatgctttgggggtacaaaactgttgaagggaatcattatcagtagcttttcacagctacccaaccataaaacgcctttggctytgagaatagtagtagctagattttggcttcttttgtttttttctgtcccatcccccatctccccttggatgcctttggattcaaatgtagatgaaatgca

SEQ ID NO: 207549 - DNA, 201 bp, Homo sapiens
agaattcttagagaggccccttttatttaaaaatgattttactggccgggcacggtggctcacgcctataatcccagcactttgggaggccgaggcgggcrgatcatgaggtcaggagatcgagaccatcctggttaacacggtgaaaccccgtctctactaaaaatacaaaaaaattagcctggcgtggtgtgggtgcct

SEQ ID NO: 207550 - DNA, 201 bp, Homo sapiens
gaaacataatcctcatttcttaagtgtgggctgctcaaagtgactcccttccaaacactacagtatggaaagggacaggggctgggagtggagaacagtawgttttcagtgcagaaatctgacaagcactgtatttgctaggtgatcaaggtcaacatcagcagtgaagtcatgttgatcgtaggtatccttgatacaatg

SEQ ID NO: 207551 - DNA, 201 bp, Homo sapiens
actttattttgaaatgatttgatatctaaacaaaatgtaaaaacatcaaatttaatgcaatattgcaataattccctaaccactctcctccaaccactttctcttcatagagccaaacttttaaaaaatataagtcagattattgatgaagagacccaggacctggtcatgagctaccagatttgcctgcctctccatccc

SEQ ID NO: 207552 - DNA, 201 bp, Homo sapiens
cattcacttggcccacagcacatccttccactccacattccagatggggagagtgtagctgctctctctgtctgctttctcttcatcccgctgggacgggmtgctgcagcaagacttttgcattcagaattctctagatgaaaaggagagaccagtttctatgttcagttagactcctaattcaggaaggggagggcacag

SEQ ID NO: 207553 - DNA, 201 bp, Homo sapiens
tgtattgtaatacgtcattataaattgcaggtaaccaacatattgacatatattgtggtgaagaagagcaagtttgactactttaaacattgctttttatkccttatcattttaaatgtgttgctacttttgatgcactgcttactgacatttattgcttcctctgcacaagcacaaaatgctggctcactctcagattca

SEQ ID NO: 207554 - DNA, 201 bp, Homo sapiens
gtcttcaccctttggtgggcagatggttctgacccttttcaaacagttaaaggagagaaattgataaccaccaggggtggaaagcaggcaaattgtttcakctgaatgttggctggttcttttgggagaagaaggggtgggacttgttaaggcagaaggctaacagctaggttgccacatggttggctcttccagcactgg

SEQ ID NO: 207555 - DNA, 201 bp, Homo sapiens
aaatagctcccgaaataggaaacatacaattttgtcctggtggaaggagagcaacaatgctagtacctagggaagtggggagtgcattacaccttgggaarttctgggacagggaacattaatgatccttgtcattcagaaccacccctagagccttcctcagggatgaaaaagccctggtgtggttctcccagatttttg

SEQ ID NO: 207556 - DNA, 201 bp, Homo sapiens
ccctgttttccagcctctgcctgcatgggaggggcagtgagtcagccacgtgtttgctttgccgcctctgcctgtgtgctctccaagctgcgggtttcacrtgcagtaaacggcatcaagacattgacagaaggtgtatgggcagtcttacactgtctcagcgacttcagggccaaaactgtcttttgtgattttgcctct

SEQ ID NO: 207557 - DNA, 201 bp, Homo sapiens
caattttgtcctggtggaaggagagcaacaatgctagtacctagggaagtggggagtgcattacaccttgggaaattctgggacagggaacattaatgatmcttgtcattcagaaccacccctagagccttcctcagggatgaaaaagccctggtgtggttctcccagatttttgcaagggactgaagtgaagctttcaga

SEQ ID NO: 207558 - DNA, 201 bp, Homo sapiens
cagtgtagaactggggaaagtcattaaatgccatgagccttgggttttttcccatgtactgtagtaaattcctcttgttgggattgtaattgcaggtggtmatcagagaacacagagcccccggaagaattttatgacatttcaggcaagccacaggtcagcctggggaaaaagcaggaagaaaaactggcaatacgaggg

SEQ ID NO: 207559 - DNA, 201 bp, Homo sapiens
tcaccatgttgtccaggctgatctcaaactcctggtctcaagtgatctgcccaccttgtcctcccaaagtactgggattacagttatgagccaccacaccyggccatatatttttaattgtatttttgcccattcatatcaatgaataaacatttccaaatgcaactgttaatttttgaattttttctatgtatctgatat

SEQ ID NO: 207560 - DNA, 201 bp, Homo sapiens
ggaactgccttaatctaattaaataggcctacaaaattccttcagcaaatatcatccctaatggtaaaagctttccctctgtaataaaaatcaagacctgrtatccactttactcaatgtcatattggaggtcctaagtgcagtgtccctcactttataggcatgctgcatatgcagttggcatcagcgaagcaggtccac

SEQ ID NO: 207561 - DNA, 201 bp, Homo sapiens
ataacatattttcaactaaataataataaaaatacaaactattaagacttgtgggatgcaggggaatttataggttttaattcatacatttgaaaagaagrctgaagatcaatgaacaaagtcatcttttttgtttcccgtttttttttttttgatacagagtcttgctctgtcgcgcaggctggagtgcagtggcacaat

SEQ ID NO: 207562 - DNA, 201 bp, Homo sapiens
acccatctctactaaagtacagaaaatcagccaggcatggtggtgggcacttgtaatcccagctacttagggaggctgaggcatgagaatcacttgaaccygggaggcagaggttgcagtaagctgagatcgcaccactgtactccagccttggtgacagagggagacttcgtctcaaaaaaaaaaagacaaataaaaata

SEQ ID NO: 207563 - DNA, 201 bp, Homo sapiens
ctttatggcctaatatgtgatctattattgcaaatgttttaggtataatcaaaagaatgttttctgtttgtgttgtgtacacacacacacacacacacacatatatatatatatatttgagacagaatcttgctctgtcacccaggcatgatcttgacttactgcaacctccacctccagggttcaagcaattctcatgcc

SEQ ID NO: 207564 - DNA, 201 bp, Homo sapiens
tttatggcctaatatgtgatctattattgcaaatgttttaggtataatcaaaagaatgttttctgtttgtgttgtgtacacacacacacacacacacacatatatatatatatatttgagacagaatcttgctctgtcacccaggcatgatcttgacttactgcaacctccacctccagggttcaagcaattctcatgcct

SEQ ID NO: 207565 - DNA, 201 bp, Homo sapiens
ggattttattaaatgctttgtcaatgactagtgagatggttatgtggtttttctcctgtaatccattaatatggaatattacattaattgattctctgatrtgaaaccaactctgaattcttgggataaactctgcctggtcatgatgcacaatcctatttatctgttgctgaatttggtttgggattttcatgtctgtgt

SEQ ID NO: 207566 - DNA, 201 bp, Homo sapiens
ttctaaatccctgtggttgaaataagcatgctgaccatagctaataacactgtattgaatgctggaaattggcaaagagtgtagatttcaggtgttctcaccacacacacacacacacacacacacaaaggtaactgtcaggagatggatatgttaatttgcttgactgtagtattcatttcactatggatatgtactgca

SEQ ID NO: 207567 - DNA, 201 bp, Homo sapiens
ctggtcatgatgcacaatcctatttatctgttgctgaatttggtttgggattttcatgtctgtgtttatgaggaatattgttttgtaggttgttgtggggttttttttttttttttggtaaaaaagattttgctgatttccttttcttctggagtcagttttggtaacttatagtttcctaggaatttttgcattttgtct

SEQ ID NO: 207568 - DNA, 201 bp, Homo sapiens
taaaatatttgggggtaaaactgcagtaaaagtaatacaacaatataaataatacaaatttaaaacccatgtagtataactatttacatagcatttacatkgcagtagatattaagaaatttagcgatgatttagagtacacaggaggatgaagttttatacgcattgactatgccattatatcagggacttgagcatctg

SEQ ID NO: 207569 - DNA, 201 bp, Homo sapiens
ctaaatccctgtggttgaaataagcatgctgaccatagctaataacactgtattgaatgctggaaattggcaaagagtgtagatttcaggtgttctcaccacacacacacacacacacacacacaaaggtaactgtcaggagatggatatgttaatttgcttgactgtagtattcatttcactatggatatgtactgcaaa

SEQ ID NO: 207570 - DNA, 201 bp, Homo sapiens
tcgactctatctgtattatttgaatttcatacaatcaagcaggtatttcggtatgacttaattaaaaactgaatacagagtcttaaaacttctatcatttagattctttttttttttttttggagacagaatcttgctgcgttgcccaggctggagtgcagtggcacaatctcagctcactgcagcctctgcctcctgggt

SEQ ID NO: 207571 - DNA, 201 bp, Homo sapiens
taaagtttacctactgtatttattatttgtgttactcattcagcagaagcatatgttgccctgtgtagtaattgtagtaattaaaattatcgtgtgtatgygtgtgtgtgtgtgtgtgtgtgtgtgtgtgtgtatcttgcctccttggtcagattttaaaattcctagagggcaaaatgaattacaaccatcttctacatc

SEQ ID NO: 207572 - DNA, 201 bp, Homo sapiens
tttaaataaactttaaagaaaatacaatagaaaaaaatgagtaaatgatacatgcagtaattcacagaagaaactgctatagtcaaaaaatacaggctggkctctatggctcccagcactttgggaggccaaggcaaatggatcacttgaggccaggagttggagaccagcctggccaacatggtgaaaccccatctctac

SEQ ID NO: 207573 - DNA, 201 bp, Homo sapiens
cgactctatctgtattatttgaatttcatacaatcaagcaggtatttcggtatgacttaattaaaaactgaatacagagtcttaaaacttctatcatttagattctttttttttttttttggagacagaatcttgctgcgttgcccaggctggagtgcagtggcacaatctcagctcactgcagcctctgcctcctgggtt

SEQ ID NO: 207574 - DNA, 201 bp, Homo sapiens
ttgctttggattgcctttcaagtttgttgcctttccttgtaaatgttaaaatcatcttgttggtttccacataaaagcttgccaggattatttttgggaaygtgttgtatctatagatgcatttgggggaaattttatattaatatttgctcttttaatttgtaaacatggactgtctttacattcatttaggcttgtaat

SEQ ID NO: 207575 - DNA, 201 bp, Homo sapiens
cagggaacattaatgatccttgtcattcagaaccacccctagagccttcctcagggatgaaaaagccctggtgtggttctcccagatttttgcaagggacygaagtgaagctttcagatctgccattcctccttgccagaccactctggtgacgatttggtgcattcctttgacccatgcggagaattctatcagaagcag

SEQ ID NO: 207576 - DNA, 201 bp, Homo sapiens
atccttgtcattcagaaccacccctagagccttcctcagggatgaaaaagccctggtgtggttctcccagatttttgcaagggactgaagtgaagctttcrgatctgccattcctccttgccagaccactctggtgacgatttggtgcattcctttgacccatgcggagaattctatcagaagcagcaggggatggtgcca

SEQ ID NO: 207577 - DNA, 201 bp, Homo sapiens
cccagatttttgcaagggactgaagtgaagctttcagatctgccattcctccttgccagaccactctggtgacgatttggtgcattcctttgacccatgckgagaattctatcagaagcagcaggggatggtgccagcgcctgcacctgccacacagaacacctgctagcacctctggctgtctgcccacccatactcatg

SEQ ID NO: 207578 - DNA, 201 bp, Homo sapiens
attaagacttgtgggatgcaggggaatttataggttttaattcatacatttgaaaagaagactgaagatcaatgaacaaagtcatcttttttgtttcccgtttttttttttttgatacagagtcttgctctgtcgcgcaggctggagtgcagtggcacaatctcagctctctgcaacctctgccttccaggttcaagtgat

SEQ ID NO: 207579 - DNA, 201 bp, Homo sapiens
cacacccggccatatatttttaattgtatttttgcccattcatatcaatgaataaacatttccaaatgcaactgttaatttttgaattttttctatgtatstgatatagttcaagattgtattggtaggtgttatatgtttatgatgattattttgattttatactgttccttaaacatttttaaacagtgaaatataact

SEQ ID NO: 207580 - DNA, 201 bp, Homo sapiens
ccatatatttttaattgtatttttgcccattcatatcaatgaataaacatttccaaatgcaactgttaatttttgaattttttctatgtatctgatatagytcaagattgtattggtaggtgttatatgtttatgatgattattttgattttatactgttccttaaacatttttaaacagtgaaatataacttacatgaat

SEQ ID NO: 207581 - DNA, 201 bp, Homo sapiens
atctaacacccagaacttgctttctaatatgatttttcaacaaagaggaaccaaggctccttggagaaatggttgattctaggactggagcagaaaatatwcaagatgagcctgcagcatcttacaatgccagaaagtaaggaagtgatcaaaatatacaccgcctcatgatgagagtatgtcaaagatgcacagaagtca

SEQ ID NO: 207582 - DNA, 201 bp, Homo sapiens
taaagtaaaaaaaaaaaaagaaaaaagtgagtggttatgtgtttttaaaaagacagagatgaaatggataaatattacacaagactagtctaaattgtttrgtgcacaccatgaaatacttttttcaacctctggctccaaatctccaaatttttgtccccttccttactccttgtgctgaacagacagccttttagtcac

SEQ ID NO: 207583 - DNA, 201 bp, Homo sapiens
ccatcattcgaatttactgtacgtgtgtgtgtgtgtgtgtgtgtgtgtgtgtgtgtcttttgagacggagtctcactctgttgcccaagctggagtgcagkggtgtgatctcagctcactgctgcctcagcctcctgagtagctgggactacaggcatgcgccaccacacccgactaatttttgcatttttagtagaaaca

SEQ ID NO: 207584 - DNA, 201 bp, Homo sapiens
acttacatgaataaagtttataaatcttatatgcatatttaaagcaatacttacagacatccatataaccaccactaaggtcaagaaataggctgggcacrgtggctcacacctgtaatcccagcactttgggaggccaagatgggtggatcacctgaggtcaggagttcaagaccagcccggccaacatggcaaaatccc

SEQ ID NO: 207585 - DNA, 201 bp, Homo sapiens
gacggagtctcactctgttgcccaagctggagtgcagtggtgtgatctcagctcactgctgcctcagcctcctgagtagctgggactacaggcatgcgccrccacacccgactaatttttgcatttttagtagaaacagggtttcaccatgttgaccaggctagtctcaaactcctgacctgaagtaatccacctgccttg

SEQ ID NO: 207586 - DNA, 201 bp, Homo sapiens
gatgatgctttattaaaacatagtataacaaggtctaacagtgatttctaactagtgatgagtataaaggtattttgctatatctgcaatagctgtatgtwatatgaaaacacgtgtgctttctactagagactaagttacagttgttgctggtactactatagtttgttgcgtacattcataattgggggaaatgcaaca

SEQ ID NO: 207587 - DNA, 201 bp, Homo sapiens
attgtcataaaggttaaatcagatttccagtaatggcagactaaataagtgtgattgagcttcctgctaaggacaactaagaaagctgggggaaaagcatyttaagaatctgattcaaagcagtagagaactaataagatgtttaaaaacactgagctagggtggggaagcttggaagcccatggaggtgagcccggagtt

SEQ ID NO: 207588 - DNA, 201 bp, Homo sapiens
tctatctgtattatttgaatttcatacaatcaagcaggtatttcggtatgacttaattaaaaactgaatacagagtcttaaaacttctatcatttagattctttttttttttttttggagacagaatcttgctgcgttgcccaggctggagtgcagtggcacaatctcagctcactgcagcctctgcctcctgggttcaag

SEQ ID NO: 207589 - DNA, 201 bp, Homo sapiens
ctatctgtattatttgaatttcatacaatcaagcaggtatttcggtatgacttaattaaaaactgaatacagagtcttaaaacttctatcatttagattctttttttttttttttggagacagaatcttgctgcgttgcccaggctggagtgcagtggcacaatctcagctcactgcagcctctgcctcctgggttcaaga

SEQ ID NO: 207590 - DNA, 201 bp, Homo sapiens
ccagaagtaatatcatttatagtaccaaacttttctatttgattaatgcaattaaggcaaattaatatttgtgtgttgattcttttatttgcatttttttwaaaaacaaaacttggatgttgtaattttgttattttctttttcactcgattatgtatcatggccttttttgacatatgcatctacattatcattttagat

SEQ ID NO: 207591 - DNA, 201 bp, Homo sapiens
aatactaaagatagaactagcagttgtttatttttaataagctctctagacttaaactattttaaataaaaacagagcacctgacttaaaatagcattttwaaaagtacctcttcagtagtaataggctgtcactgctagcttattggttattttccctcagctcttgctctcttctggtcagttatggattcttgtttga

SEQ ID NO: 207592 - DNA, 201 bp, Homo sapiens
ctgacccacccacctcagcctccaaaagtgctgggactacaggcatgagccaccatgcctggcccagaacttcctaagaaacacttacacgtcactgcttrctgtctcacacttccttgggtgaattccctggagagtgaaaagattcaaacagacacaaaatggcaatacatgctctgtccacttcacaggaatttacct

SEQ ID NO: 207593 - DNA, 201 bp, Homo sapiens
tgctgatggcagggaccagcattaggatgggaggcccaagaaggcttgtctgagatgctgaaatttgagctgccgtccagatgagcagaagaaactggccwtttgaattccaggtcataggcgttctaggcagagggaagaacacatgcaaaggtcctgagatgggcacaaccctgggtggcatgagaaccccgggtgatg

SEQ ID NO: 207594 - DNA, 201 bp, Homo sapiens
ccagcctgggcaacaagagcgaaattccatctcaaaaaaaaaaaaaaaaaaaaaaaaaagaacatacctctttcagcatccccttgcagggtcctccctayctctgtgattccaatagtattctctgaaacaacacagaagagttggcctccctccctcgcctgacatagctctttacacagttgcaattccatgcctcac

SEQ ID NO: 207595 - DNA, 201 bp, Homo sapiens
tagtcctttgcccatttttcattgggttatttgtcattgttgttgagttttgttgagttctttatatattctggttattaagcccttaccttaccagataygatttgcaaatatttttatgttggcttttcacttgcttgataatgtcctttgaaacacacaagtttttaattggttaaagttcagtttacctattttttt

SEQ ID NO: 207596 - DNA, 201 bp, Homo sapiens
agtacatcgatgatactgtaaataaaaatacaatgagaaagaaataactttcatgggtgctttgaaggaaataaaccagggtgatatgaagtgctgatggsagggaccagcattaggatgggaggcccaagaaggcttgtctgagatgctgaaatttgagctgccgtccagatgagcagaagaaactggccatttgaattc

SEQ ID NO: 207597 - DNA, 201 bp, Homo sapiens
cattttactcctcttctcctctctctctgcagtttctttttctttttcttttcttttcttcttcttttttttttttcttgagacagagtctcactctgttrcccaggttggagtgcaatggcacaatctcgtgtcactgcaacctctgcttcctgggttcaagctattctcctgcctcagccacccaagtagctaggatta

SEQ ID NO: 207598 - DNA, 201 bp, Homo sapiens
accccagggtagttcccctcacccatagctcccacctctgctggcttcagcagccgcccaaatgctaaaacactcacccccaagggatctgtggcctgctyactgtgcccagctcagagttgctgcacttgtccacttaactgctatagttgatcaggagaggaacaagcggcaccggcctgcatcccatttcccaggcca

SEQ ID NO: 207599 - DNA, 201 bp, Homo sapiens
gtgcttgatacagagtgacttcctgcttgttgtttgtccttaggcagtttgacttctccactcagcaagcctttaaagcacctgggttatgatgcgcatgkatctggttaagttacaaagacccatgaccatctccttaaaatccagcatccagtacaaagtgtacattccccattcaatcacatagtcatttttataaat

SEQ ID NO: 207600 - DNA, 201 bp, Homo sapiens
ggtggagtacatcgatgatactgtaaataaaaatacaatgagaaagaaataactttcatgggtgctttgaaggaaataaaccagggtgatatgaagtgctratggcagggaccagcattaggatgggaggcccaagaaggcttgtctgagatgctgaaatttgagctgccgtccagatgagcagaagaaactggccatttg

SEQ ID NO: 207601 - DNA, 201 bp, Homo sapiens
gtctcgaattcctggcctcaggtgatccatccgtctcagcctcccaaagtgctgggattacaggcatgagccaccacgcccagccctctctctgctgtttccccctctggcgttgtcgggaagggaggggaaaggactaggggaaaggtgcctttatgtaagtcatgcagctgtcctgacagtcaaactctctctctggga

SEQ ID NO: 207602 - DNA, 201 bp, Homo sapiens
tgaaattttaagtattctttattctagagctagattagttccactgctgatatgtgcctgatctggggtctctctactgaatgcctcatgtatttgatgaratctctgctctggctgattaggacttccggccctaggcagacttgagattattcagtttataggtctctggtaattgttctttcctcaaaagttgttcac

SEQ ID NO: 207603 - DNA, 201 bp, Homo sapiens
gctgctgcagcaagacttttgcattcagaattctctagatgaaaaggagagaccagtttctatgttcagttagactcctaattcaggaaggggagggcacwgggatgggaagttgggggatggggatggagggaagatggggatggggaagaggatgggtccacctctctcagaaactttctcattattctgtgctagtgt

SEQ ID NO: 207604 - DNA, 201 bp, Homo sapiens
aacagttttgaagatgttcttttctcgtaataccatcatctctcatttttagtctttattaactgattttatcttagtcactggtcctattttcccacttytttgcttatctagtaatggttggttgatgaacattgtgatttacattttggggtgctggattttgttgtatgcttttttaaagtgttagatttgttctgg

SEQ ID NO: 207605 - DNA, 201 bp, Homo sapiens
caggagaatcgcttgaacccgggagatggaggttgcggtgagctgagattcattacatcgttgcactctagcctgggtaacaacagcgaaactctgtctcaaaaaaaagaaaaaaaaaaggacgtttttaagtttataaaataaaatatacaggactacaaaggttatcaattacattgaaatgcagttatcacaatcatt

SEQ ID NO: 207606 - DNA, 201 bp, Homo sapiens
ctcactgcaagctccgcctccagggttcacgccattctcctgcctcagcctcccaagtagcggggactacaggcgaccgccaccacgcccggctaatttgkgtgtgtgtgtgtgtgtgtgtgtgtgtgtgtgtgtgtgtgtgtgtatttttagaagagatggggtttcaccatgttagccaggatatggtctcaatctctt

SEQ ID NO: 207607 - DNA, 201 bp, Homo sapiens
tgaccactgtcaggcagttcttccaaaaacaagggcaagactcagtgattgaactgagctgtagacctttaagagccatagccatctagaaagctctgttraaggcactgtcagcctatgcccctatgatgcagggctcactggtaattgtaagcagcactttccaggaccaatgcaacactgagactgcactctccctct

SEQ ID NO: 207608 - DNA, 201 bp, Homo sapiens
gtcccactctgtcacccagtctggagtgcagtggtgtgatcacagctcactgtagcctagacctccttggctcaagtaatcctcctacctcagcctcccargtagctgggattacaagtgtactccaccatgcccagctaatttttttatattttgtagagatggggtcttgctatgttgtccaggctggcctcaaactgc

SEQ ID NO: 207609 - DNA, 201 bp, Homo sapiens
agctaatttttttatattttgtagagatggggtcttgctatgttgtccaggctggcctcaaactgctaggttctagcaatgctgccacctcagctttccaragtgctgggattacagacgtgagctactgtgcccagccaattcattattttaacttgtgtaccgttctgagcagggtgatgaaattttatgttgtcttga

SEQ ID NO: 207610 - DNA, 201 bp, Homo sapiens
actctatctgtattatttgaatttcatacaatcaagcaggtatttcggtatgacttaattaaaaactgaatacagagtcttaaaacttctatcatttagattctttttttttttttttggagacagaatcttgctgcgttgcccaggctggagtgcagtggcacaatctcagctcactgcagcctctgcctcctgggttca

SEQ ID NO: 207611 - DNA, 201 bp, Homo sapiens
acagctaacattgagaggatgccgtgtgccaggagttttgtagatgtgatatcatctcatgcttacgggacgtgtggctgttaccagcaccttacagatgygaacacagagggttggagagttaggtcatttattcatccacacaggggaggtttggggccaggatcaaacccacgtgtgttggatagactgactccacag

SEQ ID NO: 207612 - DNA, 201 bp, Homo sapiens
actgacatttattgcttcctctgcacaagcacaaaatgctggctcactctcagattcagtgtagaactggggaaagtcattaaatgccatgagccttgggttttttcccatgtactgtagtaaattcctcttgttgggattgtaattgcaggtggtcatcagagaacacagagcccccggaagaattttatgacatttcag

SEQ ID NO: 207613 - DNA, 201 bp, Homo sapiens
gattaaccatcacatcaataatcaagacagtatagaaagtgagactagttcattaacggcagttacttatttgatgcagaggatctaaaaatatagaagakttaaaacataaatatcaatgaaaaaatgtgatgctatgagcaaaatgggaagcctatctgtgtcctttctggctatgtgtatggcgtatacggtgatgcc

SEQ ID NO: 207614 - DNA, 201 bp, Homo sapiens
taaaaatatagaagagttaaaacataaatatcaatgaaaaaatgtgatgctatgagcaaaatgggaagcctatctgtgtcctttctggctatgtgtatggygtatacggtgatgcctaggttaccattctctggggtgtgcacccaggcctgaaaggcactaagtgcaaatggagtcgttaactgtgggcataagttgtct

SEQ ID NO: 207615 - DNA, 201 bp, Homo sapiens; identical to SEQ ID NO: 36468

SEQ ID NO: 207616 - DNA, 201 bp, Homo sapiens
gtgattcactcacctcaaccttccaaagtgctgggattacaggtgtgaaccaccatgctcggcccccatggtttccttaatctgaaaagtataaaaaaggttttttttaatccagattcccactagccagaagtaatatcatttatagtaccaaacttttctatttgattaatgcaattaaggcaaattaatatttgtgtg

SEQ ID NO: 207617 - DNA, 201 bp, Homo sapiens
gtaaaaaaaaaaaaagaaaaaagtgagtggttatgtgtttttaaaaagacagagatgaaatggataaatattacacaagactagtctaaattgtttagtgyacaccatgaaatacttttttcaacctctggctccaaatctccaaatttttgtccccttccttactccttgtgctgaacagacagccttttagtcactcag

SEQ ID NO: 207618 - DNA, 201 bp, Homo sapiens
aaatacttttttcaacctctggctccaaatctccaaatttttgtccccttccttactccttgtgctgaacagacagccttttagtcactcagttttaagaraaacttcattctggtcattaagactccatctcaggtatgaaaatttcagtaagtgaaggcaaagattaattttatattcgtttaaaggcttttcccgtcc

SEQ ID NO: 207619 - DNA, 201 bp, Homo sapiens
agtgcctagtaagtaagttttccagaactggttgttggaaaggttagaacatgaattttgtgaagtttctagaatcgggagtatttgaacctaacctatayctttccaaaattttaagtcctagtagtttgtgagtagctaggttgagttttgtccagacaagaaaacttaactacagaaagtctgtgtgttcgcccgggg

SEQ ID NO: 207620 - DNA, 201 bp, Homo sapiens
tggtaacatttaaaatctgctctatttgaaaatatacaataaattattgctaattttagtcactctgcagtgccatacgacactcagaacttattcctccrgtctagctttaattttatatctgttaactgacctttgactcttctccccccacccactacttcccagcctctagtaaccactgttttactccctgtgagg

SEQ ID NO: 207621 - DNA, 201 bp, Homo sapiens
agtgtggcccagggagcttttttccccccttttattttttactatttttactcaacacttatgtacatattacaattattatgtacaatataatttgatayatatgtgcaatatgtaatgaccaaatccatcacttcagacatttatcatttctttattttggtaacatttaaaatctgctctatttgaaaatatacaata

SEQ ID NO: 207622 - DNA, 201 bp, Homo sapiens
atggcatagtacctcgacatgccatatactttttttttttaaccaattacattcaaaaaatacttattgagcaccaactgcatgcaaagcacttgagagtyagttagaatcccaactccataaagtcttcaccagcattccctgggaatattcctaacctccgtggagaggtttcttgtcagtaaccactcatttttccac

SEQ ID NO: 207623 - DNA, 201 bp, Homo sapiens
gtttctttgctaatggcatagtacctcgacatgccatatactttttttttttaaccaattacattcaaaaaatacttattgagcaccaactgcatgcaaarcacttgagagtcagttagaatcccaactccataaagtcttcaccagcattccctgggaatattcctaacctccgtggagaggtttcttgtcagtaaccac

SEQ ID NO: 207624 - DNA, 201 bp, Homo sapiens
cacggtggctcacgcctataatcccagcactttgggaggccgaggcgggcggatcatgaggtcaggagatcgagaccatcctggttaacacggtgaaaccycgtctctactaaaaatacaaaaaaattagcctggcgtggtgtgggtgcctgtagtcccagctactcgggaggctgaggcaggagaatggcgtgaacccgg

SEQ ID NO: 207625 - DNA, 201 bp, Homo sapiens
tccactattatttctgcaaatgttttacttacacacacacacacacacacacacacacacacacacacacatacatacacaccccttctctgagactcaarttacacatatgctagactgcttaatattgtcctacagggcactcaggttcatcgttttttctgtttcttctcctgtctattgctgtgccttcaggttctc

SEQ ID NO: 207626 - DNA, 201 bp, Homo sapiens
ggaggcggaggttgcagtgagccaagatcacgccattgcactccagcctgggcaacaagagcaaaactctgtctcaaacataaataaataaataattaaawaataaaaataaaataaaataaaataaaataaaataaaaacaatgttgaggccaggcacagtggctcactcctgtaatcctagcactttgggaggctgagg

SEQ ID NO: 207627 - DNA, 201 bp, Homo sapiens
gaggcggaggttgcagtgagccaagatcacgccattgcactccagcctgggcaacaagagcaaaactctgtctcaaacataaataaataaataattaaataataaaaataaaataaaataaaataaaataaaataaaaacaatgttgaggccaggcacagtggctcactcctgtaatcctagcactttgggaggctgaggt

SEQ ID NO: 207628 - DNA, 201 bp, Homo sapiens
tgtgtgtgtatgtgtgtgtgtgtgaggggggctgtctttttatgtttcttagtacaatttgatgttttctgtttgtttattccattttttttaagttgttyattcctaattttagttcaggattatggatgttttctttttaatgtgtgtttattttctaaatagttcccagaatctagaaatgctgttgtttagtatgtt

SEQ ID NO: 207629 - DNA, 201 bp, Homo sapiens
gcggaggttgcagtgagccaagatcacgccattgcactccagcctgggcaacaagagcaaaactctgtctcaaacataaataaataaataattaaataataaaaataaaataaaataaaataaaataaaataaaaacaatgttgaggccaggcacagtggctcactcctgtaatcctagcactttgggaggctgaggtggg

SEQ ID NO: 207630 - DNA, 201 bp, Homo sapiens
gaatctgggaggcagaggttgcagtgagccgagatctcgccatttgcactccagcctgggtgacaagagtaaaactctgactcaaaaaaaaaaaaaaaagytgagtaaaaaaaaaatgccacggatagttttatacagtataataccacttatttaaatattcttaaataccaaagcaacattaaatatttacagatgtat

SEQ ID NO: 207631 - DNA, 201 bp, Homo sapiens
gtgagccttgagcctcatgtcaagccggtgcttctcaacctggggacaattttcactgccaggggacacttggcaatgtctggaggcattttagtcgtcayagctggggcagagggcgttgctactagaatggagagtgtcgaggccagggaactgctgaacatcctgagattctcaggacagcccccaccacaaagaacc

SEQ ID NO: 207632 - DNA, 201 bp, Homo sapiens
ccggcaggagctattcttagactgattctagctcatcgttttcccctgtactagaactatgcgcttcatgtagatttataacatacaactagttaggtagrtttcattcattattcttttcaaaaatgtcttagcctatctccctgctaaatcctaaccaccgagttttttattggaagtctactagaattagactagcct

SEQ ID NO: 207633 - DNA, 201 bp, Homo sapiens
actctaaaatctttttttttttttttgagatggagtcttgctctgtcacctaggctggagtgcagtggtgtgatctctgctcactgcaacctccgcctccygggtttaaacgattctcctgcctcagcctctggagtagctgggattacaggcatgtgccaccgtgcctggctaatttttgtatttttagtagagatgggg

SEQ ID NO: 207634 - DNA, 201 bp, Homo sapiens
ttcgtggtttgccgttcacctgcccttctttatatttctagcattctcaagttatttagcagtttccaggaattatttgtatgtttcatggactaaaatgycttttacacctcctctgttctcaggtttttcttttgcttttaaagtgagtttaaagcattctctgaatgtggtctttggtagtaagcatttccatcctca

SEQ ID NO: 207635 - DNA, 201 bp, Homo sapiens
gggatttcatcatgttggccagactggtctcagactcctgacctcaagtgatccacccatctcggcctcctaaagtgctgggattagaggcgtcagccacygcacccagccaaatttgttcagttttaaattgcatgtgtgtgtttgtatgtatgtgtggcttctcagtaactgcaccagcatgatacatctgtgtgtgtg

SEQ ID NO: 207636 - DNA, 201 bp, Homo sapiens
ttttgaaatgacccctttcttgaattctggaatattgcatcctctttcttttagttctctctctgattaagcctttgtcctgtttgttgttgttgttgttkttttttgttttttgttttgttttgttttgtttttgagacagaatttccctcttgtcacctaggctggagtgcaatggcacaatcttggctcactgcaacc

SEQ ID NO: 207637 - DNA, 201 bp, Homo sapiens
aagaggatgaatggacacgggggtaggggtaggagcgtgggaggtatggggaccaggataggaagacatacatggttggatggagagactgatggcaaagmcacacacacacacacacacacacacacaaacaaattttagtaaaagaaaatataaagaaaagaaatcttggcaaactgtaaaactaaagatggaagaagg

SEQ ID NO: 207638 - DNA, 201 bp, Homo sapiens
gatttaaaggtacattatctcattaattggtacttttatctcaaaatagttatttttctttttaaagtcccctcactgcttttggcacttaattttttggrgttgattctctgtgaaaagttagctatgaaacagaatcattttaattgcaggaaccttagcttacgttcttctctctgttgattttcagaatgctcccta

SEQ ID NO: 207639 - DNA, 201 bp, Homo sapiens
ttttatgttttattttttctccttaagctggctcggaacacattttctgagccctggaagatctttctcagcccccacttcctaggctcagctttttgttattcctcgtaggtgggtgagctgtagacttccttgtgccctttccaatgcctccacctttgtgtcatatgctttttaacttggtatttaacccttcaaagg

SEQ ID NO: 207640 - DNA, 201 bp, Homo sapiens
ttcatgtctgcaaaggaaaataatgtgtgtgtgtgtgtgtgtgtgtttgtagataggtaggtaggtaggtatgtaggtaggtaggtatgtaggtaggtagrtagatagatagatttttttttttaagacagcatctcactctgtcacccaggctgcagtgcagcagtgtgatcttggctcaccgcagcctcaacctcctgg

SEQ ID NO: 207641 - DNA, 201 bp, Homo sapiens
ttttcgtgtagatttgtaatatacaactagttaggcatatttcactcattattcttttcaaaaaaattttagcttgtcttcctgctaaatcttcaccaccraggttttaattggaagtctactagaattcaaattgggaaagagaaatcactttacagtgcttggtgttctccagaatggtggcatcccaccacacctttt

SEQ ID NO: 207642 - DNA, 201 bp, Homo sapiens
aaatccatcacttcagacatttatcatttctttattttggtaacatttaaaatctgctctatttgaaaatatacaataaattattgctaattttagtcacyctgcagtgccatacgacactcagaacttattcctccggtctagctttaattttatatctgttaactgacctttgactcttctccccccacccactacttc

SEQ ID NO: 207643 - DNA, 201 bp, Homo sapiens
ccgtaaatgtggaggcacaggggacccgtgtctgcccgcatgcaccctgctaactggctgcttgttttccggtgcaggtgcttgaggaatccaaagccctygtgcgctgcaacatgaagatggagctggagcaggccaacgagagggagtgtgaggtgctgaagaaaatctggggctcggcccaggggatggactccatgt

SEQ ID NO: 207644 - DNA, 201 bp, Homo sapiens
attcaaattttagtgtccatagatagagggtttttttgtttttgtctttgtttaatgccatttcattcattacatattgtgtctcgctacttccttgctayaagaacagggttaagtgattgggagaccagatgacccataagcctaaaacatttactctttggcagtttatgtaaagtttgccaactcctggtctaatgt

SEQ ID NO: 207645 - DNA, 201 bp, Homo sapiens
ataaaataaagcccacagtcctgggaacaccccacagaccaaactgaggcaactgattaccctagcataagcaatctttgaatgaaaatatcaaaatcatsaagaccactccctttaactgaattaaacagcctttattgaatgccttctgtgtataaagtacaggcagcccttcatacccacaggttccatatccatgga

SEQ ID NO: 207646 - DNA, 201 bp, Homo sapiens
tctctgtgtgtgccaggttctgttgctgttttaacgtcctacgtaaataaacaaaacaccctagaatgaaaagtaacaagtcacctccttccctgtaatcrcccctgatcccctggcatagtctgtaggttttagctttgaaataaatatttgtttgaaaaagagagaggaaagtgctgctgtttcactggagatattttc

SEQ ID NO: 207647 - DNA, 201 bp, Homo sapiens
attttcacataaaacactttagaacagttaattaatttgcttatacttagtttgtaattcctagactatttcctcatttatagcttcaaagagaaactctrtggcagtaattttccaggtggtccacttggttaagaatatctcttccctttctcaaagaactaaaattagaactgtcatttgacccagcaatccctctac

SEQ ID NO: 207648 - DNA, 201 bp, Homo sapiens
tgaaattatgaagagttgctcctagaaagccattttgttctacaagcatgtttaatcaagaaaataaatatccttttgcaaatttttataagcatgtaagrcatatttcttgcagaagctgagacatatttaatgcagaagctgatttcaaattggcttaatttttaatgcctgcattggaataaacctgtatcccatttc

SEQ ID NO: 207649 - DNA, 201 bp, Homo sapiens
tttccataatgactgtactaatttacattcctactgacagtggataagaaagagttcctcttctaacccggtgaaaccccgtctctactaaaaaatatttwaaaaaaattagccaggcatggtggcgggcgcctgtagtcccagctactcgggaggctgaagcaggagaatggcgtgaacccgggaggcggagcttgcagt

SEQ ID NO: 207650 - DNA, 201 bp, Homo sapiens
ttttttgaaatgacccctttcttgaattctggaatattgcatcctctttcttttagttctctctctgattaagcctttgtcctgtttgttgttgttgttgtttttttttgttttttgttttgttttgttttgtttttgagacagaatttccctcttgtcacctaggctggagtgcaatggcacaatcttggctcactgcaa

SEQ ID NO: 207651 - DNA, 201 bp, Homo sapiens
aaaaatagctctgtatacaggggcaatgctaggaaaactgttgcttttctgtactttgtggattctactgagtttgtaacctgccctgtcttatcaaatcrtttgctttcatggttattccttccttatggttttggggtggttgagtgtctatgtgtgtgttggcttgttttcttttaaagaacctcatggagaaattta

SEQ ID NO: 207652 - DNA, 201 bp, Homo sapiens
aaagcaggaagaaaaactggcaatacgagggcccaacccaaaagttattcctgaagagaaacaacggtaagaacttgcaggaatcaaattagttctgatgyagtaggcagaattcttagagaggccccttttatttaaaaatgattttactggccgggcacggtggctcacgcctataatcccagcactttgggaggccga

SEQ ID NO: 207653 - DNA, 201 bp, Homo sapiens
tggctcactgcaacctctgtctcccaggttcaagctattcttctgcctcagcctcccaaagtagctgggattacaggtgcccgccaccatgcccacctaatttttttttttttttgtatttttagttgagacggggtttccccctgttggccaggctggtcttgaactcctgacctcaggtgatccacctgcctcggcctc

SEQ ID NO: 207654 - DNA, 201 bp, Homo sapiens
ctaattccaaggaggtgtagtgtgtagtgatcccctcatgctgggcaggtaccccggatggaggcctggccacgtgcacggcccactgccacacctccacytctgacacgtgggccctgagggtgatggggagtccagagcaccctgcccaccagagaacttcagctttgatccgttttgtttttgaggttccaagtaaga

SEQ ID NO: 207655 - DNA, 201 bp, Homo sapiens
attagatgttatttttctccaagacacatactagtgaccttaacaacaacaaactcatttttcttggtatgaggactagagttaggagaatttctgaagcscttttggaaagtaggcggacatttgagttcctcatctgccttttcccctggtcatcatacatgggatcattaagcagaacacagagcagacttgactaaa

SEQ ID NO: 207656 - DNA, 201 bp, Homo sapiens
ggctcactgcaacctctgtctcccaggttcaagctattcttctgcctcagcctcccaaagtagctgggattacaggtgcccgccaccatgcccacctaatttttttttttttttgtatttttagttgagacggggtttccccctgttggccaggctggtcttgaactcctgacctcaggtgatccacctgcctcggcctcc

SEQ ID NO: 207657 - DNA, 201 bp, Homo sapiens
cctacagggcactcaggttcatcgttttttctgtttcttctcctgtctattgctgtgccttcaggttctctgatctttttagtatctaattggttcaacayattcaatgaaatttttattcctagtctttcatttctgcattatgttcatgtttttctttaaatccttgagcacattgagattataacagttttgaagatg

SEQ ID NO: 207658 - DNA, 201 bp, Homo sapiens
gcataaccacagtctactttaatgacagcagatgccccactgtttagtcacactgcaaagagcatcctttcgatcacctcccagtggaaatccatgatgawgaataaattcctagattcggatttgtcaaagatttgttttgttttgtttaatatttttgatacaagttgtcaaaccatcttccaaaacacattttaccac

SEQ ID NO: 207659 - DNA, 201 bp, Homo sapiens
ctctaaagtttacctactgtatttattatttgtgttactcattcagcagaagcatatgttgccctgtgtagtaattgtagtaattaaaattatcgtgtgtrtgtgtgtgtgtgtgtgtgtgtgtgtgtgtgtgtgtatcttgcctccttggtcagattttaaaattcctagagggcaaaatgaattacaaccatcttctac

SEQ ID NO: 207660 - DNA, 201 bp, Homo sapiens
gttctctgatctttttagtatctaattggttcaacacattcaatgaaatttttattcctagtctttcatttctgcattatgttcatgtttttctttaaatscttgagcacattgagattataacagttttgaagatgttcttttctcgtaataccatcatctctcatttttagtctttattaactgattttatcttagtca

SEQ ID NO: 207661 - DNA, 201 bp, Homo sapiens
gtttgcatgtgagaacacacatctctgtcttgtgtgctggggctggcccaacctcgtagatcatgtttaactctgtgttgttaggcataaccacagtctastttaatgacagcagatgccccactgtttagtcacactgcaaagagcatcctttcgatcacctcccagtggaaatccatgatgatgaataaattcctagat

SEQ ID NO: 207662 - DNA, 201 bp, Homo sapiens
ttgactttggtttgcatagaacacagggtttgcagaatgggtttgtgactggggtgggttgtgacatggtttcttagaacggggcccacacatggcccacrcatagaggtgtttcagtacagcagtaacagcccggcacggtaccacagtgttcacagttgtgggaacagggtgaagagtagactgtcctccagctgggag

SEQ ID NO: 207663 - DNA, 201 bp, Homo sapiens
ggcctgtgctgagtgtccatccccattctcccgggtgtgggtccacccaggcctctgtgcctctgtggttcacctcctgcctggaagctcttcatctggcrggcacggggctccatgaaggcacgtgggaaatgtgtgtgcacgcgctttgctttagctttcatcagatccttaaagggttctttgttcagacagaattta

SEQ ID NO: 207664 - DNA, 201 bp, Homo sapiens
gtgccagtccacacgcagcctcttgcaggtctttagaagctcagctgagtttcttactattatctgtctcttgtgttctgccgcagttgagacagtccacrtggccccagctttccttgcagcggctcatctttcctcagattgcaggctgtgtggctgccttgcaacctcagccatcctgcaagttcaagaacagttgta

SEQ ID NO: 207665 - DNA, 201 bp, Homo sapiens
ggctgaagttgaactacttttgatagttactaggctccagctgagcactgcccttggtgcactgggctttctagcacctaaacccttctagagcttgcacrgcaggattggtgtggtgggtaggggggctcttttttctgttttgttgagtctggggtaggcagggacgtctttctttgactgacacccaagatggctctg

SEQ ID NO: 207666 - DNA, 201 bp, Homo sapiens
cgctaaacagtcaaatgaaggtacatggccataaagaacgagatgatccctggtgggagtggctcccagtgccccagcatgatgttgaaaagatacgtggycctttcacctgtttccaagttgggaattttttttttcctgaccattaggaaaaatgttgacgttggttttggtgaatctgatttgacccattcttcctgg

SEQ ID NO: 207667 - DNA, 201 bp, Homo sapiens
agataaaattcatacttttttttgtttgtttttgagacggagtctccctctgttgcccaagctggagtgcagtagcaccatctcagcttgctacaagctcygcctcccgtcttcatgccattctcctgcctcagcctcccgatttagctgggactacaggctcccaccaccacgcctggctatttttttttttttattttt

SEQ ID NO: 207668 - DNA, 201 bp, Homo sapiens
gtctgctttctcttcatcccgctgggacgggctgctgcagcaagacttttgcattcagaattctctagatgaaaaggagagaccagtttctatgttcagtyagactcctaattcaggaaggggagggcacagggatgggaagttgggggatggggatggagggaagatggggatggggaagaggatgggtccacctctctc

SEQ ID NO: 207669 - DNA, 201 bp, Homo sapiens
acttggcccacagcacatccttccactccacattccagatggggagagtgtagctgctctctctgtctgctttctcttcatcccgctgggacgggctgctscagcaagacttttgcattcagaattctctagatgaaaaggagagaccagtttctatgttcagttagactcctaattcaggaaggggagggcacagggatg

SEQ ID NO: 207670 - DNA, 201 bp, Homo sapiens
tgttatcttgcttattcttttcaagagcaaacccacttacacaaggaaagggtccagaagctagaaatcaaacgagaggggagtagtcctttgagacatgyagatgcacagcctccctcctttctaagcatttaataggtatcctcaggcagaatgatgtgatgcccagcagcaggtgggttcctcagttcctcagagtga

SEQ ID NO: 207671 - DNA, 201 bp, Homo sapiens
gttcctggccatgtggactctgggtcccagttgaatgggttgaagaatgatggacagagggagaggtgaagacagcaagtgcaggcaggtgaggccgtgaygggactgagactggaggaacagattagagagggttcctgaggggagacgagattgtcaaacgtttttaaacaaagatgggagaaggatctggtagggtag

SEQ ID NO: 207672 - DNA, 201 bp, Homo sapiens
gatacagagatattgtggtcaggaagcaggatggcttcacccacatcttgttatccacaaagtcctcagagaataactcactaaatccagaggtgagaggsgctcttgggctggcgtgggcttcgcgcttctccctgcctgatttccaggcctgcctggcggaactggctcttcctgtgctctttctaaacctccttttgg

SEQ ID NO: 207673 - DNA, 201 bp, Homo sapiens
actctgggtcccagttgaatgggttgaagaatgatggacagagggagaggtgaagacagcaagtgcaggcaggtgaggccgtgatgggactgagactggakgaacagattagagagggttcctgaggggagacgagattgtcaaacgtttttaaacaaagatgggagaaggatctggtagggtagaggatggaggttaaaa

SEQ ID NO: 207674 - DNA, 201 bp, Homo sapiens
gtggtacgcacctgtaatcccagctactcaggaggctgaggcaggagaattgcttgaacctgggaggcagacgttgcagtaagccaagatcgcaccattgyactccagcctaggggacagggcgagactctgtctcaaaaaaaaaaaaaaaaaaaattagctggatatgctggcacacacctgtggtcccacctatttggg

SEQ ID NO: 207675 - DNA, 201 bp, Homo sapiens
ccctctctctgctgtttccccctctggcgttgtcgggaagggaggggaaaggactaggggaaaggtgcctttatgtaagtcatgcagctgtcctgacagtyaaactctctctctgggagggtccccttgtgtgggctcaagagacctttgagggtctctccagggcactgttgtctgatgcatactgggtcatctcagagt

SEQ ID NO: 207676 - DNA, 201 bp, Homo sapiens
gcccagccctctctctgctgtttccccctctggcgttgtcgggaagggaggggaaaggactaggggaaaggtgcctttatgtaagtcatgcagctgtcctkacagtcaaactctctctctgggagggtccccttgtgtgggctcaagagacctttgagggtctctccagggcactgttgtctgatgcatactgggtcatct

SEQ ID NO: 207677 - DNA, 201 bp, Homo sapiens
ctgcaaaaattaatatgcaagaaaattcaagggactagtaatctgtggaaggagggggaagatggtaatgttttatttcttttcggtgtcaattacatgakgtcattttattttataatatattctcttgtatgtgtgaaatacaaattttaaatatgtgataatttaaaagtaatatgtagagttgatttaaaataggaa

SEQ ID NO: 207678 - DNA, 201 bp, Homo sapiens
aaggggctatcatgatctaattcaaatggtaagaattccagggtctatgtcaggtgcccctggctccctctgtgtctcatccccttccattatggatccamaaaacatgtcttgaaatgttgcctcctggccgggcatggtggctcatgcctgtaatcccagcattttgggaggctgaggtaggcagatcacttgaggtca

SEQ ID NO: 207679 - DNA, 201 bp, Homo sapiens
caggttttttcacatgaagtgttcacataaatcatggatctcccaacctattttcatctttatgagtagttaagacataaatccttcttacagtattaaarggtgctagtgtattaaactacctaaatagccagcatgccttttaaaggggctatcatgatctaattcaaatggtaagaattccagggtctatgtcaggtg

SEQ ID NO: 207680 - DNA, 201 bp, Homo sapiens
gacagtcaaactctctctctgggagggtccccttgtgtgggctcaagagacctttgagggtctctccagggcactgttgtctgatgcatactgggtcatcycagagtcccactcctaggctcctgccagctctccccatcacagcctggggcacatgatgcagggggctccccaccagacagccagccaccttgggcgggt

SEQ ID NO: 207681 - DNA, 201 bp, Homo sapiens
gtgtgggctcaagagacctttgagggtctctccagggcactgttgtctgatgcatactgggtcatctcagagtcccactcctaggctcctgccagctctcyccatcacagcctggggcacatgatgcagggggctccccaccagacagccagccaccttgggcgggtcaccagccagatggcctgagtcactgtctgctgc

SEQ ID NO: 207682 - DNA, 201 bp, Homo sapiens
tccagggcactgttgtctgatgcatactgggtcatctcagagtcccactcctaggctcctgccagctctccccatcacagcctggggcacatgatgcaggrggctccccaccagacagccagccaccttgggcgggtcaccagccagatggcctgagtcactgtctgctgcattcacttggcccacagcacatccttccac

SEQ ID NO: 207683 - DNA, 201 bp, Homo sapiens
tggggatggggaagaggatgggtccacctctctcagaaactttctcattattctgtgctagtgtcagcaccagatgggccttcagaccccagcatctccgygagcagtgagcaaagcggggcacagcagcctcccgctttacaggtaggtcttggtttctcccagtggcaagcttggagtccatctggcaaggaagagccc

SEQ ID NO: 207684 - DNA, 201 bp, Homo sapiens
tattcttcaaaaagaaagaaattgaactcagaaaggcataagatgattggtgagcaaggaaatgggagatggcaggtatgtctaaaccacattagttgtaygaaacagtaatactgattttgataaaattgggaaacattttattgactaaaatttgtagcaacaagaagaagataggtgatcaggaataatattttatcc

SEQ ID NO: 207685 - DNA, 201 bp, Homo sapiens
acccaaaagttattcctgaagagaaacaacggtaagaacttgcaggaatcaaattagttctgatgcagtaggcagaattcttagagaggccccttttattyaaaaatgattttactggccgggcacggtggctcacgcctataatcccagcactttgggaggccgaggcgggcggatcatgaggtcaggagatcgagacca

SEQ ID NO: 207686 - DNA, 201 bp, Homo sapiens
aactttagattttaatagataagcatgctgatatggtttggctgtgtccccacccaaacctcaacttgaattgtatctcccagaattcctacgtgttgtgrtagggacccagggcaagggggtaattgaatcatggggccggtttttctcatgctgtgttgtgacactgaataagtctcacaagatctgatgggtttatca

SEQ ID NO: 207687 - DNA, 201 bp, Homo sapiens
tgagaacttactgttttctttattccttctcttctacgtgggctgttttttcttcctgaattacatctttttcttttcttttcatttcttttttttttttkgagatatagttcacataccgtagaatttctccttttaaagtatgtagttcactggtttttagtgtattcacaaagttgtacagccgccgccaccactatc

SEQ ID NO: 207688 - DNA, 201 bp, Homo sapiens
cagctgcagcaagccgctggcgcaggagcatgaggaaggagctgagagcagcgcagcctgcctgctgctgagattcgaccgcagggagcgggtgtacatgycgcagggacgcaagacctgccagtgctggacagagtggccatccacaaagtcctctgaggtcagcaggaggggccctgcatgccgacccaccggctgtgc

SEQ ID NO: 207689 - DNA, 201 bp, Homo sapiens
gggattataggcatgagtcacggtgcctagctcctttgttcttttgacatctgcccatactccctcattagtcttttcctgctttttgacacagtaaggtrgccaaggctcaccttatacttcctcatgcagttgatgacagtaattccgtagccattactgagcatgtacatttgtcaggtactggtttgtactttaaaa

SEQ ID NO: 207690 - DNA, 201 bp, Homo sapiens
tgaattgtatctcccagaattcctacgtgttgtgatagggacccagggcaagggggtaattgaatcatggggccggtttttctcatgctgtgttgtgacastgaataagtctcacaagatctgatgggtttatcatgggtttctgcttttgctgcttcctcatttttctgttgctgtcatcacataagaagtgcctttcac

SEQ ID NO: 207691 - DNA, 201 bp, Homo sapiens
tccgttgcttagccagtctaatgcatttattttagtaaatgttttgttcagatctaggcttttagtttttctggtttcatttttctcccttgagattgccrtatctgttcacttattgataccatattttccttcaattctttgggcatgtttttcagacgtttttgaaatatttatgataaatgtttgaagtctgttaaa

SEQ ID NO: 207692 - DNA, 201 bp, Homo sapiens
gggctttcctggacacattgcaatcctaacctcagggtaaaagccatgtccctgttccgccacagcatggcaaaatcaattccagttggattaaaaagttmcatgtttttaaaaaaatgaaaccgtaaaaatgtatgtgactcagataaagtaaaaaaaaaaaaagaaaaaagtgagtggttatgtgtttttaaaaagaca

SEQ ID NO: 207693 - DNA, 201 bp, Homo sapiens
tcactagcagaattggtgggaaactagactctacgttagaacctactcctgacttccatttagttctttgtactgtgtcacactgataagtgaattttttrtaagcgtaattgattttattaagtacacagtattactcaagactttcgcttctgtgtcaagtgagtgaaactgaacccacagtggcttaaacatacaagc

SEQ ID NO: 207694 - DNA, 201 bp, Homo sapiens
aagcagcccagatttggccaggagcccttgttggcggagcccgggtctagcctgttggccacccaagttcttacctgtctcctcctaaccttctcaccttkggaaacataatttattaccatgtatgcctgagtcatagaggactgactgctctctctatggtttctcctctcctaggagtggactattgttgatttttac

SEQ ID NO: 207695 - DNA, 201 bp, Homo sapiens
aggattaatgctctcagaggagctcagcacaactcaaaatgaagattaaaattgacacaggattcttctacacatagtaatctataagtatgggcctttakactacagaaccttcagacgtgggcaaagacacttgactgtctctagttgaaacctgcgctaactgtatagttttgcatagtttatggtgatattgctaat

SEQ ID NO: 207696 - DNA, 201 bp, Homo sapiens
tcagtagctccagccgaaagccatgccctcccctttcctgcatccttattatcagctctgctgctcaccattgccaccaccttgtccaagcaattgacatyagtctttattgcctttttccaatccatttctcacacaccaggaggattttttatagatgtaagtcatatattactgccctgcttaagggtgtgtcttcgc

SEQ ID NO: 207697 - DNA, 201 bp, Homo sapiens
gtgtttttattgtagcagactgttaataaactgcttggtcaaactacacactttgtttttcctgtgatatgcagccgcttgtagctctcctctgctcttasgtctttgcactggtggtggttttagtgtggcaccctgtgagtctcccctgtgtctgcaaaatttgaaagttggctaaggatctgagtagagatggacttt

SEQ ID NO: 207698 - DNA, 201 bp, Homo sapiens
ggttaccaggttgtcctcctacagaaaggggagatggggggaaaacagaccaccctgctgcagttttagcctgcatttccatgagttatggaaggattggragaaaagctgactgtcagagttttgctctaatacagcttttttgtgggtttttgtgtgttttctttttttctgagacagggtccggctccgtctcatcca

SEQ ID NO: 207699 - DNA, 201 bp, Homo sapiens
agttttcctgtgaggtgcctgttgacagtgtcagggttcttctgctcccatccatcagacaccctgttgctatcctctgcttcctctgcacagatcctcayccacctggtcctgcagcttttgcccatttatcatccctttccagtcacttagttttctcttggctattatctcaagatttgagggattgggcaatttctg

SEQ ID NO: 207700 - DNA, 201 bp, Homo sapiens
tgtatattgtgcagtctaatgtgtgcatttcccagttttcacaaggggttttctcatgtgcatgtaataagcagttccacactgggttttcttgattatasagtctgtgtaacgctgtgacagcctggggtggcacctcgccacaatcttcagagttgcacattactgtgtaacattagaaactgctgctactctgagctc

SEQ ID NO: 207701 - DNA, 201 bp, Homo sapiens
agtggtgtaaaaatagactcagtctgagttttggtttggtttcgttttatctgggggagaaggaggttgccctagtaaaattacttgcaaagtcttccacrtgccattttttctgttaatatgttctcagtgagtggtctaaactaaatgtattgtgttctattaatcactgtttacagaaatttgccatttaggaatgta

SEQ ID NO: 207702 - DNA, 201 bp, Homo sapiens
acccccaagggatctgtggcctgctcactgtgcccagctcagagttgctgcacttgtccacttaactgctatagttgatcaggagaggaacaagcggcacyggcctgcatcccatttcccaggccacgtgtccttccagatagaggtctttgtactgtatgtgctacaaatcagaaaacgctgctgcccaccatcatggag

SEQ ID NO: 207703 - DNA, 201 bp, Homo sapiens
ggtttacgtgactaggatgctgacacaagtgagtttgcgcatggcttgctgttctcttcaaccctctccagcctgaataggaatgttaaacccactcaggrattctcgttggtctaaaggactgtgttcattggtctttgacactccgtcaaccaacttagcggggttgacctgagccttcggacacgatgtgcctgtggg

SEQ ID NO: 207704 - DNA, 201 bp, Homo sapiens
agttttcacccccgacctcacccctggggaacaatgtctggagacaacttggttgtcacacatgaggagatggccgttagcagaggctggggtactgctcrgcaccctccatagcccacgggacagccctgctcagcaccctgcatgtagcccccacaggacagcccccacaccaaacaacagtccagcccagaatgtccc

SEQ ID NO: 207705 - DNA, 201 bp, Homo sapiens
agattagagagggttcctgaggggagacgagattgtcaaacgtttttaaacaaagatgggagaaggatctggtagggtagaggatggaggttaaaagaaaragtctttcctgagtccctcagaaggactcagcaacacctttgctgactggtaacatccgacccagtggtctccagttagaactactccaggctacaagtc

SEQ ID NO: 207706 - DNA, 201 bp, Homo sapiens
ggggagacgagattgtcaaacgtttttaaacaaagatgggagaaggatctggtagggtagaggatggaggttaaaagaaaaagtctttcctgagtccctcrgaaggactcagcaacacctttgctgactggtaacatccgacccagtggtctccagttagaactactccaggctacaagtcctttggaagcttgtagagat

SEQ ID NO: 207707 - DNA, 201 bp, Homo sapiens
gttgttggtcatatcgacaagtcactgaatagtagtgcgtattgcagtgtgaactggaaaatgaattacagtgcatccctaccttgggcctcgcctgccaygcagccttaggaaagaacaggaagctatgttctgatagaggagccattctaagatattgtggaaggaataaccatgagatgtaacaatgtgtatatctta

SEQ ID NO: 207708 - DNA, 201 bp, Homo sapiens
agcattccctgggaatattcctaacctccgtggagaggtttcttgtcagtaaccactcatttttccaccacttttcttttgctagttcgtttttcacgtargtaccgttcctgcctctgtggtggcagctgggtatgacggaggctgcatttgtgcagcctcatgggcctgaatttggtatgagcttagcacccctcacct

SEQ ID NO: 207709 - DNA, 201 bp, Homo sapiens
tctttgcatgttttcaacgtctgggcctggaacaagtgcaggtattcctttgctcattccgtaacgatgctcagcattgagtgtgctatcctgactagtgygaatactccattgcttgacttctcctgtgtccggaacgttacacttctggtaatacattgtacgattgtatttgtctttttcaagaccacttaacacctt

SEQ ID NO: 207710 - DNA, 201 bp, Homo sapiens
tttggaatgatgagattaccggtccactgttgtttgctgcttctttgcatgttttcaacgtctgggcctggaacaagtgcaggtattcctttgctcattcygtaacgatgctcagcattgagtgtgctatcctgactagtgtgaatactccattgcttgacttctcctgtgtccggaacgttacacttctggtaatacatt

SEQ ID NO: 207711 - DNA, 201 bp, Homo sapiens
taacacctatttagcaaatatcctggaaaaatatttccaaaaaaagttaaaagtggttgtttggaatgatgagattaccggtccactgttgtttgctgctwctttgcatgttttcaacgtctgggcctggaacaagtgcaggtattcctttgctcattccgtaacgatgctcagcattgagtgtgctatcctgactagtgt

SEQ ID NO: 207712 - DNA, 201 bp, Homo sapiens
aaactttctcattattctgtgctagtgtcagcaccagatgggccttcagaccccagcatctccgtgagcagtgagcaaagcggggcacagcagcctcccgstttacaggtaggtcttggtttctcccagtggcaagcttggagtccatctggcaaggaagagcccataggggaatcgccccacaccacactctccctttac

SEQ ID NO: 207713 - DNA, 201 bp, Homo sapiens
caagagcgaaattccatctcaaaaaaaaaaaaaaaaaaaaaaaaaagaacatacctctttcagcatccccttgcagggtcctccctatctctgtgattccratagtattctctgaaacaacacagaagagttggcctccctccctcgcctgacatagctctttacacagttgcaattccatgcctcactcaccaccccgtt

SEQ ID NO: 207714 - DNA, 201 bp, Homo sapiens
ggtcaggagttcaagaccagcctgaccaacatggtgaaaccccgtctctactaaaaatacaaaattagcctggcgtgctggtgcatgcctataatcccagstactcaggaggctgaggcagaagaatcgcttgaacccaggaggcggaggttgcagtgagccgagattgcgccattgtactccagcctgggcaacaagagc

SEQ ID NO: 207715 - DNA, 201 bp, Homo sapiens
atcacaaggtcaggagttcaagaccagcctgaccaacatggtgaaaccccgtctctactaaaaatacaaaattagcctggcgtgctggtgcatgcctatamtcccagctactcaggaggctgaggcagaagaatcgcttgaacccaggaggcggaggttgcagtgagccgagattgcgccattgtactccagcctgggcaa

SEQ ID NO: 207716 - DNA, 201 bp, Homo sapiens
ttgtgctggcatccggcaaggtcctaaagaggccctacagcctgtttttgctcaggctgttttcaagcctttttccaatctactttctctgaaactttgcrtgcatatacacacaccagaatcaacaagtcgactgagcatgcaaaagccacatccacatttctagaccttgataccttctcagacctctggcaaatctaa

SEQ ID NO: 207717 - DNA, 201 bp, Homo sapiens
ccactaatttagtacataccagggtgtacccaggcttcaggctggtctgggttctacttcccaagcccagtcccagcacatgccttcccaaagatctttcstcccaggtcccagtctccctcttaggatcaaaccaattcaacttaacccttatttaatgtcttctctctgcctactcagcccagtgtggtagtcaggcac

SEQ ID NO: 207718 - DNA, 201 bp, Homo sapiens
caaagcggggcacagcagcctcccgctttacaggtaggtcttggtttctcccagtggcaagcttggagtccatctggcaaggaagagcccataggggaatygccccacaccacactctccctttacatctgtcctgtgcttgggtccctttggtggtctggtgaagctgtggactccttagaatgatgtttttggccgggc

SEQ ID NO: 207719 - DNA, 201 bp, Homo sapiens
ctgaagccaccacccctgaggccactgcctgtgccagggcattcccaagcctctatccccagtgtgggcttccctgctgcatgtggctcttcagcctcagsttcctcctcttcactcccccatccttgcatgggcttcctcttccgtcccgcttgcttctagaacatttccaattattgcttccaggtcctgaacactagt

SEQ ID NO: 207720 - DNA, 201 bp, Homo sapiens
ttttggccgggcacagtggctcatgcctgtaatcccagcactttgggaggccgaggcaggcggatcagctgaggtcgggagttcaagaccagcctgaccarcatggagaaaccccgtctctactaaaaatacaaaatttgctgggcgtggtggcgcatgcctgtaatcccagctacttaggaggctgaggcaggagaatcg

SEQ ID NO: 207721 - DNA, 201 bp, Homo sapiens
acaactgagacgacctacaagtgcccatttgatagttaacccatgcttcagaatttgcttattttttttcctttttaaggactctttcttcaactaaacaktttctcttcagagtgttatcactccgctcccatgaaatgactgggactgttacttcttttatctctggtcacacccagcaaaattaagcttgcttgtgga

SEQ ID NO: 207722 - DNA, 201 bp, Homo sapiens
agtggctcatgcctgtaatcccagcactttgggaggccgaggcaggcggatcagctgaggtcgggagttcaagaccagcctgaccaacatggagaaacccygtctctactaaaaatacaaaatttgctgggcgtggtggcgcatgcctgtaatcccagctacttaggaggctgaggcaggagaatcgcttgaacccgggag

SEQ ID NO: 207723 - DNA, 201 bp, Homo sapiens
ctaatgaattaatcctacaaaagaagtaattgcttttaaaaactggattatcgtaactttgtcctttcatggattcaaacatataattcatcatcattccrtaagtatgaaatttcagaaaatgctattagcaaacttaaaacaaataggtgtaaaccttatcagtgttgtgacatagggttggcttttggatttcatatt

SEQ ID NO: 207724 - DNA, 201 bp, Homo sapiens
aacttaaaacaaataggtgtaaaccttatcagtgttgtgacatagggttggcttttggatttcatattgaagccaacagacctagtaggaaaatgactgargaaatattaataccttagcacaccttgcatttcatgagcatttcaaccaaaggaaactcctaagagaaagtgttgaggaaaacctggctgcttctgagga

SEQ ID NO: 207725 - DNA, 201 bp, Homo sapiens
aacatggagaaaccccgtctctactaaaaatacaaaatttgctgggcgtggtggcgcatgcctgtaatcccagctacttaggaggctgaggcaggagaatygcttgaacccgggagatggaggttgcggtgagctgagattcattacatcgttgcactctagcctgggtaacaacagcgaaactctgtctcaaaaaaaaga

SEQ ID NO: 207726 - DNA, 201 bp, Homo sapiens
acagtctgaaaaaataaaatcggatgtttttaaaatatccagggaaagatccagagtagatggacaaattcacttaaactttaaatggtaaaatggaagtrttgtgcagatatttcagtggtctttagaatctcctacattgcctagtccaattgtttacacacattaggggcttcattaacatttgcgtgtacatgagtg

SEQ ID NO: 207727 - DNA, 201 bp, Homo sapiens
cccttctcccctcccctactcacattctaaccatccttccaagctattccctcctcctcaaagcttcccagaccactactatcatccctttctaaatcccygtggttgaaataagcatgctgaccatagctaataacactgtattgaatgctggaaattggcaaagagtgtagatttcaggtgttctcaccacacacacac

SEQ ID NO: 207728 - DNA, 201 bp, Homo sapiens
accccgtctctactaaaaatacaaaatttgctgggcgtggtggcgcatgcctgtaatcccagctacttaggaggctgaggcaggagaatcgcttgaacccrggagatggaggttgcggtgagctgagattcattacatcgttgcactctagcctgggtaacaacagcgaaactctgtctcaaaaaaaagaaaaaaaaaagg

SEQ ID NO: 207729 - DNA, 201 bp, Homo sapiens
tcctctgccctgcagcttctcacatccccaggtggaaatgctgtgccccttcatccataccgtggcacttcctcactggaggtcacctctcctgtgcatgktcacattctgcctgtctgttgagaggctccgttcttcgctgcgttctgcttacctggttaagccacaaaaggttctatgcttagactagacgtgggattt

SEQ ID NO: 207730 - DNA, 201 bp, Homo sapiens
agtgtacaaaatatgcatgagcaagtggtcacagtcatagacacaccgtgccttggggggccccaggtcataagatggtgttctctgtatttcacctgacrcctttggttttgttgctctgtgagaatgagggcagtcttttaaaggaactcatccagaaagaaaggagaagcaagtgtgttggagagaagatacattcat

SEQ ID NO: 207731 - DNA, 201 bp, Homo sapiens
tctaaccatccttccaagctattccctcctcctcaaagcttcccagaccactactatcatccctttctaaatccctgtggttgaaataagcatgctgaccrtagctaataacactgtattgaatgctggaaattggcaaagagtgtagatttcaggtgttctcaccacacacacacacacacacacacacaaaggtaactg

SEQ ID NO: 207732 - DNA, 201 bp, Homo sapiens
agtctcgctctgtcgccgaggctggagtgtactggtgttatctcggctcactgcaacctctgcctcccaggttcaagtgattctcctgcctccgcctctgraggtgggattacagtcacgcgccaccacatgcagctaatttttgcatttttagcagagacgggatttcatcatgttggccagactggtctcagactcctg

SEQ ID NO: 207733 - DNA, 201 bp, Homo sapiens
tcctctgcacaagcacaaaatgctggctcactctcagattcagtgtagaactggggaaagtcattaaatgccatgagccttgggttttttcccatgtactstagtaaattcctcttgttgggattgtaattgcaggtggtcatcagagaacacagagcccccggaagaattttatgacatttcaggcaagccacaggtcag

SEQ ID NO: 207734 - DNA, 201 bp, Homo sapiens
catccacctggtcctgcagcttttgcccatttatcatccctttccagtcacttagttttctcttggctattatctcaagatttgagggattgggcaatttytgcacctcctctgctgtccccattctcctccatctgccttgaagtgaagcagattttatcctgctctgaagcctggggcatggatgagaattctttcagg

SEQ ID NO: 207735 - DNA, 201 bp, Homo sapiens
ttttaaaaaaatgaaaccgtaaaaatgtatgtgactcagataaagtaaaaaaaaaaaaagaaaaaagtgagtggttatgtgtttttaaaaagacagagatsaaatggataaatattacacaagactagtctaaattgtttagtgcacaccatgaaatacttttttcaacctctggctccaaatctccaaatttttgtcccc

SEQ ID NO: 207736 - DNA, 201 bp, Homo sapiens
agacagagatgaaatggataaatattacacaagactagtctaaattgtttagtgcacaccatgaaatacttttttcaacctctggctccaaatctccaaayttttgtccccttccttactccttgtgctgaacagacagccttttagtcactcagttttaagaaaaacttcattctggtcattaagactccatctcaggta

SEQ ID NO: 207737 - DNA, 201 bp, Homo sapiens
ttgtgggccaacgaagaaaacaaaccggaattaagagtggttgtcaaaattttggagtcggtcaagtacccaagttaaaaatcagacagaagagtgaatamagttaaaggaaaagagatgtttttctttgttttctttaagaatgttaaagagaagaacagaaaataattccaaaacaaggatacagttaagaggatacaa

SEQ ID NO: 207738 - DNA, 201 bp, Homo sapiens
tcagacagaagagtgaatacagttaaaggaaaagagatgtttttctttgttttctttaagaatgttaaagagaagaacagaaaataattccaaaacaaggrtacagttaagaggatacaagtgcaaaagtggttatttatttatttttttaaaagtggcagtttatcaagtagaagaaagaagattaaaacattaggaatg

SEQ ID NO: 207739 - DNA, 201 bp, Homo sapiens
ttacccaaattgactaaaaaagagtaggagaccattcaataaatgaatgggttaataatctataccctctcactttgcgttctacccccatactaggcccrgagagttcacggatgtattctaccaaacagtcaagggaatggattctcaaaattttacaccattatttccagagagaagaaaaaaaggaactaaattgat

SEQ ID NO: 207740 - DNA, 201 bp, Homo sapiens
atagaccaggaaataatttattatttcattttttctcatttttaagaatgcccagttttttgtcattggtggtggtggtggtggtttttttctgtttttcrtttgtttggttgttttttgttgcccaagctggaatgcagtggcacgatctcagctcactgcaacctctgcctcctgggttcaaatgattctcccacctca

SEQ ID NO: 207741 - DNA, 201 bp, Homo sapiens
aattcaatgaaaaggcaaatattttggtcaggagaggaattcttcctagggagtattagcacagtgtatttttagttgtgtggctatttatagctgcccartggcttgcgtctgagtctttatttggtttttaggacatgctaaggattgagggtcgtgggccttaattgtatagaagacgcagttgcgtttggttgcctg

SEQ ID NO: 207742 - DNA, 201 bp, Homo sapiens
acaggcccatccaatctattcagctacttcttccaacaggtgcctctgctccaaggctcatccaggtcccacaggcacgctgtgctcccgtctttattctytgctccttgtacctggatgtttcccttctcccctcccctactcacattctaaccatccttccaagctattccctcctcctcaaagcttcccagaccacta

SEQ ID NO: 207743 - DNA, 201 bp, Homo sapiens
aaattcaatgaaaaggcaaatattttggtcaggagaggaattcttcctagggagtattagcacagtgtatttttagttgtgtggctatttatagctgcccratggcttgcgtctgagtctttatttggtttttaggacatgctaaggattgagggtcgtgggccttaattgtatagaagacgcagttgcgtttggttgcct

SEQ ID NO: 207744 - DNA, 201 bp, Homo sapiens
tatggcagattgattcttggtgctttttttccagtggcaaacttttatagaaattggagagtttcgtaaagacttttaaaaagttgtcagaattacctatkatgtcctttcctagataatcaatttggaaacaattgctggtaccttaagcccgatgtatgcctcctattatagtgttgaaaatgttcttttgacaaatgc

SEQ ID NO: 207745 - DNA, 201 bp, Homo sapiens
tcccctcaaggtatccaacattcattggtgtgtcttccccaacctttttctgaacattttgttataattttcagtttaattttttagacttacttttaaaytcagaagtaaaaattgtatatacttatagtgtacaacatggtgtattgaaacacgaatacattgtggaatggttaaatcaagctaattagcatatgcatt

SEQ ID NO: 207746 - DNA, 201 bp, Homo sapiens
tcatacattcaggtgaggaagaagggtaggaagctcatggatgtatgcagaggaacttaagaactcctctcaaacactgtaaaacaggttttctgtccatrcatagggtggatttgcaacacagccttccacaggctcaagcccatctgttgtaaggagcatgagttaggacagaacaaggaggaaaactaccaagtcatc

SEQ ID NO: 207747 - DNA, 201 bp, Homo sapiens
aataagtaatgacagtttgtccaaaagtgtcatacattcaggtgaggaagaagggtaggaagctcatggatgtatgcagaggaacttaagaactcctctcraacactgtaaaacaggttttctgtccatacatagggtggatttgcaacacagccttccacaggctcaagcccatctgttgtaaggagcatgagttaggac

SEQ ID NO: 207748 - DNA, 201 bp, Homo sapiens
aattcaacaaattacatctatcatgtttcaagtgctttgtttatcgatatagtggtaaacagaatacactgatgggacaagcaactctgagatgacagaaygagttccctaaatagtctgttactgtgactcctgtttatgcttgatattcacaaaatattctggaattgatacccgagaaactgctaacagtgattacct

SEQ ID NO: 207749 - DNA, 201 bp, Homo sapiens
ttgctatctcattgttttaattttaaaacaggaaaactgtttttgcaagttaattgactgtttgcattcattcttctgttaattccgtatacgtgtgtgtrtgtatatatatatatatatatatatatatatatatatatatatatatcttgcctgtttttcttttgggtggtttaacttccaaaatgtgaacatttcgtg

SEQ ID NO: 207750 - DNA, 201 bp, Homo sapiens
gggtagaagtttgaaacctctcattttgaaactactgaaaatagtgtgtttatataagaatatgctcacgcaaattgcgtgtatttaatcctataatacawatcttaccaagggagatttgttgttgttgttttcttgggtgactgtcgttcaaaccaactcactggccgtgtttaagtgaaaaagctttaacaacctagc

SEQ ID NO: 207751 - DNA, 201 bp, Homo sapiens
gctatctcattgttttaattttaaaacaggaaaactgtttttgcaagttaattgactgtttgcattcattcttctgttaattccgtatacgtgtgtgtgtrtatatatatatatatatatatatatatatatatatatatatatatcttgcctgtttttcttttgggtggtttaacttccaaaatgtgaacatttcgtgaa

SEQ ID NO: 207752 - DNA, 201 bp, Homo sapiens
ctttttttttttaatctggttgacctcttatccttctggcctcagcacagacggcacttcctgggagaagactccccgattttccccctccatctaaaacrtagcgctcagccacagttctagttgcatgcttaatgtgttggtttctttacctaagctaagctgcgggaagttaggcagcacatatgtttatttactcag

SEQ ID NO: 207753 - DNA, 201 bp, Homo sapiens
gctgctgctttcaactgggcagttttcacccccgacctcacccctggggaacaatgtctggagacaacttggttgtcacacatgaggagatggccgttagyagaggctggggtactgctcggcaccctccatagcccacgggacagccctgctcagcaccctgcatgtagcccccacaggacagcccccacaccaaacaac

SEQ ID NO: 207754 - DNA, 201 bp, Homo sapiens
caaacgattaccctgcctcctaggattttatagttcaaatagaataggtgagcactaaaacaatcaaatctgttatcctgaaaggccaaattggcaaagtrgttcctagtgaaaatcatggaatattagccctcaaagatattttaaagcccacccctccttttttggtaattgtctgtgaaatgaggatcttacagaccc

SEQ ID NO: 207755 - DNA, 201 bp, Homo sapiens
agtaaaaataaaaataaaacaaatgcaggaaaagttgtacaactttaccacaaacatgtaaatgcaaataaatccacatttcactcccacaaatcatttcrctttcccatatgattagaaaaactttaaaattttgacaaaaccaagtgttagagaggatcgtgggaaaccaaagattctcatgcactattagtgggaatg

SEQ ID NO: 207756 - DNA, 201 bp, Homo sapiens
ttgtccactcttgctgacaagtccaggggctaaggccaagtctcagccctctctgcctcttgctcccggctgcccctctgcttgcacccatgtccctgccyctcacctgtgagagtgttagcacgtggacggctgcctgtgccaggtactgtggcttctccacctggcctgttggggggtggtccctcattgccagctggg

SEQ ID NO: 207757 - DNA, 201 bp, Homo sapiens
ttgggagctaggcactgcatttatctcctttttaatttgatatctcaccttttacacatcagtcacattaattacacaaatggactgtttatgaggatccbccagggagtccgattctccaaggctcttttgccttgggtgcagaaggtttaactaacgtggcttgagtacttagattggatggatgggagccgattccct

SEQ ID NO: 207758 - DNA, 201 bp, Homo sapiens
tgtctttgtcttgttgccagattaagttcttgtctgtggttttatggccagaagaggcacacataaatgaatgagtactctgcctttaactcccttcataytttctgctcttttccttctgtccaatttattaagcacactgcatactatgtgccatgtcatgaggttcactgggtgacccccatgggaccatgtgactga

SEQ ID NO: 207759 - DNA, 201 bp, Homo sapiens
tgggtgggccatgtccgtaggctcgggatcagaggaagctggacttcaaagttgggggcattcacccagaagcgcctataccaagttctagggtacctccmcacccctcacaagctgacagaccctcctccagtggctgattaacctgggtggagcttgtccactcttgctgacaagtccaggggctaaggccaagtctca

SEQ ID NO: 207760 - DNA, 201 bp, Homo sapiens
cagcttcagggtaggtgggtagatagataaataggacagagatgggtgtgttttaagcacagggcaggaagcaccaacataggtgcctagtgcgtcacttyccacattttccctccacaggacatggaatactagtgactaagcctcgttttctctctctgcccaagtaactgaagctcaccacatggtggcccagcaccg

SEQ ID NO: 207761 - DNA, 201 bp, Homo sapiens
ggtaatctttggttgttctggtcttaggccctgtgtgtctcacctgtgggggtgaagtgtttcatgatttttttcttctgctcaaggagtgaaagagttcttttttttttttttttccacactctccttcctttggcactagtagatcaacagggtttgctgcccttcccccagaggccagagagagggcagggcaggaga

SEQ ID NO: 207762 - DNA, 201 bp, Homo sapiens
catccctgcacctgcactgtggcagctgctttcggtggaaaggcgggtggactgttaggctcaccatgtttgtctcctttcactctgggaacattgccctrcacagcctgtggtccagtgcctgcaaacagttgttatgtgtattttattcagtttcctagctatcagtggcaggtgaagaagtacagacgctgttctctt

SEQ ID NO: 207763 - DNA, 201 bp, Homo sapiens
acgtggagaaaccccgtctctactaaaaaatacaaaattagctgggcatggtggcgcatgcctgtattcccagctactcgggaggctgagacaggagaatygctagaacccaggaggcagaggttgtggtgagccaagatcatgccattgcactccagcctgggcaacaagagtgaaactctgtctcaaaacaaaaagaaa

SEQ ID NO: 207764 - DNA, 201 bp, Homo sapiens
taaagtgaaatggcagagctcattaatcaaattcgttcagttttattgattgattgagatggagtctcgctctgtcgccgaggctggagtgtactggtgtkatctcggctcactgcaacctctgcctcccaggttcaagtgattctcctgcctccgcctctggaggtgggattacagtcacgcgccaccacatgcagctaa

SEQ ID NO: 207765 - DNA, 201 bp, Homo sapiens
aggcgggtggactgttaggctcaccatgtttgtctcctttcactctgggaacattgccctacacagcctgtggtccagtgcctgcaaacagttgttatgtstattttattcagtttcctagctatcagtggcaggtgaagaagtacagacgctgttctctttaggtgggaagagggtgtcacaagtcattgttagagactt

SEQ ID NO: 207766 - DNA, 201 bp, Homo sapiens
gcatggtggcgcatgcctgtattcccagctactcgggaggctgagacaggagaatcgctagaacccaggaggcagaggttgtggtgagccaagatcatgcyattgcactccagcctgggcaacaagagtgaaactctgtctcaaaacaaaaagaaaaaaaaaagtaattgatacacactaaatttctgatggaaaggaaat

SEQ ID NO: 207767 - DNA, 201 bp, Homo sapiens
aacctctgcttcctgggttcaagctattctcctgcctcagccacccaagtagctaggattacaggtgatggctaatttttgtattttttagtagagatggrgtttcaccatgttggccaggctggtctcgaattcctggcctcaggtgatccatccgtctcagcctcccaaagtgctgggattacaggcatgagccaccac

SEQ ID NO: 207768 - DNA, 201 bp, Homo sapiens
tcttcctgtgtatatttttcatttctctggtgtcttgtctcatgttccttaaaacttggaggcaaaggacttcatcgtagcaagtttccaaaggaaaagcrggaagcaaacaggaagatgaggtttcatattaggtcaccaggtatctagagcagctgactttgtgacgaggattcgtggtttgcagtttgcagggtaatt

SEQ ID NO: 207769 - DNA, 201 bp, Homo sapiens
tagcaagaggataagaattattctatgtctctctcaccaataaagagccaatattaacatttctataatttacattcctaataaactcacatggaaacatygttgatatctgtctgtccacataccccttctgttatctttcatttttatttttttcatgtatgattttggggatgggcagtggaaggacacaagcgtggg

SEQ ID NO: 207770 - DNA, 201 bp, Homo sapiens
tccattgtctggcaaggaacctaggaagatgctcggaaagtgcctggggccacagccttatctcctgccaaggctggatgggcttgcactcactggaagcwgtatttttcatcctacaagactcccagttacaggactcatagctgagtttagattacaggcagagtctaatctttacaaagctatgtttccttccatctc

SEQ ID NO: 207771 - DNA, 201 bp, Homo sapiens
agagccaatattaacatttctataatttacattcctaataaactcacatggaaacatcgttgatatctgtctgtccacataccccttctgttatctttcatttttatttttttcatgtatgattttggggatgggcagtggaaggacacaagcgtgggaatcagatctgcaggtaccacacacctttcaggtgtgctgcag

SEQ ID NO: 207772 - DNA, 201 bp, Homo sapiens
tttctaatctgaaggtagaaagaacgtctttttttttttttaactcagatcaattttttatgttttagtgttttcattccatcattcgaatttactgtacgtgtgtgtgtgtgtgtgtgtgtgtgtgtgtgtgtcttttgagacggagtctcactctgttgcccaagctggagtgcagtggtgtgatctcagctcactgct

SEQ ID NO: 207773 - DNA, 201 bp, Homo sapiens
atgaatttgttgcctagaaaaaggtctatgtgaaatagagctcttcagagtgagaaatctggacctacgctatgaggaaattggcataaaaggaccaagargaagcctgacaagaaaggaaaatacttggttaaaacaattgcagtagaaagggagaaatctgggcttaatatagatagaactgtcaaagataagagtaac

SEQ ID NO: 207774 - DNA, 201 bp, Homo sapiens
attatattagtccttggtgatattttgtatggtaggggtattatattagtccttggcgatattttgtatggtaggggtattatattagtccttggcgataytttgtatggtaggggtattatattagtccttggcgatactttgtatggtaggggtattatattagtccttggcgatactttgtatggtaggggtattata

SEQ ID NO: 207775 - DNA, 201 bp, Homo sapiens
cattaaacacaattttctcttgtctttagcttttggtagtttgactattatgtgtccaggtaaggatctttttatatatcttaaatctttttaaaataackgagtcctgttttatggcctacattctggtcttttgtagtaaatgttctgagtgcacttggaaggaccattgttggatggactataaatttcagaatgagt

SEQ ID NO: 207776 - DNA, 201 bp, Homo sapiens
taggggtcactgttttagctgcatagtttatttgtgagccatgttttggtcagggattgtggacaaacatcttgagcccataaggcttccactccctgctsttggattttaatgtggattggaagtgcattcaaattttaggcaggtttcaaggctgccccaaaaagttttggattttagagcattttggattttggattt

SEQ ID NO: 207777 - DNA, 201 bp, Homo sapiens
tcaataaatattgctataatggaagactgcagttagtgaaaccagactctctaggatccatctggttaggaggctccaacacactgaagggtctcagcatygcagcctctcacgtggcagacctacaagctagtgtcaaacctggagcctgcaaatattgactgtgcatctgtgattcgctctagtgggttgggatttttt

SEQ ID NO: 207778 - DNA, 201 bp, Homo sapiens
tcagacacattttggccaaagacattttggaagtggagccctggagctgaatgctgctcaggggtagaggtgtcagagttcaccattcccagaaagggccrtgaggcttgaagtcatcacaggacgaatgcctgccctctggtcagccgtgtttctccctactctacaagccttggcagatctttactttacgcttcccct

SEQ ID NO: 207779 - DNA, 201 bp, Homo sapiens
gtggcaaactctccaaaatgagtctacccttgagtatctggggcagccccccagagggatcattgactcaccatgtgtgtgcatcctacaagtagctttcsccactgtgagagccatagacatggtggtaggaaatttgtccatgacgttctctaaagtgatccataaaagcatctggaagcattcattaatggatgatag

SEQ ID NO: 207780 - DNA, 201 bp, Homo sapiens
atgtctggagacaacttggttgtcacacatgaggagatggccgttagcagaggctggggtactgctcggcaccctccatagcccacgggacagccctgctyagcaccctgcatgtagcccccacaggacagcccccacaccaaacaacagtccagcccagaatgtccctagtgtccagggggagaaaccctgctctaactc

SEQ ID NO: 207781 - DNA, 201 bp, Homo sapiens
ccttggtacatttttagactgcagagtcccttcattgattatttttaaatgcttcacagagatcatttaaaatgattttatgccctaaaattaccagtccrtgctaatgtgcttggacttaacgcacttacgcaccaaactattttctgtcccaagtgtaatagggtagtttttaaaacaaaacaaaacaaaaaacagtag

SEQ ID NO: 207782 - DNA, 201 bp, Homo sapiens
ccaccgcctgcatctgtgtgaatcggttatttgggtagaagtttgaaacctctcattttgaaactactgaaaatagtgtgtttatataagaatatgctcaygcaaattgcgtgtatttaatcctataatacatatcttaccaagggagatttgttgttgttgttttcttgggtgactgtcgttcaaaccaactcactggcc

SEQ ID NO: 207783 - DNA, 201 bp, Homo sapiens
actgtagtaaattcctcttgttgggattgtaattgcaggtggtcatcagagaacacagagcccccggaagaattttatgacatttcaggcaagccacaggycagcctggggaaaaagcaggaagaaaaactggcaatacgagggcccaacccaaaagttattcctgaagagaaacaacggtaagaacttgcaggaatcaaa

SEQ ID NO: 207784 - DNA, 201 bp, Homo sapiens
tcatggggaaatactgaggtgtgagaatggttcatgctttcaaggagtgtctgttggggaggaagtaagtatattgcaaataaatgatacacctgcacaaytgaacttttgattctgagttttattttagttttggaaaaaaaggtattatagaagtatagttcaggtgataaatttaagtatgtgtagtaaatatgtagt

SEQ ID NO: 207785 - DNA, 201 bp, Homo sapiens
gagatatttgccttatcttctagcaaggggggcttacgtgttctgatagggatgggtgggccatgtccgtaggctcgggatcagaggaagctggacttcaragttgggggcattcacccagaagcgcctataccaagttctagggtacctccccacccctcacaagctgacagaccctcctccagtggctgattaacctgg

SEQ ID NO: 207786 - DNA, 201 bp, Homo sapiens
cctcactcagcagggcccccacctccctcgtgcttccagtagccatcccagcagccaggtcagaccatctcctgggaacctagcagggccaaatcagtatsgcaggagagcccccacgtcagtgaatctcctgtccagcttgtggttgggccccaggtcaggcgccctgagaatccaggccctcgtgttttctcacagctc

SEQ ID NO: 207787 - DNA, 201 bp, Homo sapiens
agcctcactcagcagggcccccacctccctcgtgcttccagtagccatcccagcagccaggtcagaccatctcctgggaacctagcagggccaaatcagtwtcgcaggagagcccccacgtcagtgaatctcctgtccagcttgtggttgggccccaggtcaggcgccctgagaatccaggccctcgtgttttctcacagc

SEQ ID NO: 207788 - DNA, 201 bp, Homo sapiens
tcccagtcccagccagcactccaggcatgcccttccctgctgtggatggccccaccggctgtgctgccctcctccctctggcactgaccacaggctccatrtgcatcttgtcccacccctccctactcagccctggcctttcagcctcactcagcagggcccccacctccctcgtgcttccagtagccatcccagcagcca

SEQ ID NO: 207789 - DNA, 201 bp, Homo sapiens
gggcctccctgggaatggtgtcttgtgggccgatcacattggcatctcctgctggcaggctggacactcagtagcaacagcgactgcatcagcctttggtragtcagagactgtgctgttgaggcccctctggccagccctgggtggccagcgaccaccagccatctctcaaagctgttcagtgccccctccatggcggat

SEQ ID NO: 207790 - DNA, 201 bp, Homo sapiens
caatagttttattataattactaattaaacacattctagataatttaggaaactattaaatatagcttcaaaaaattaaaatgaccacatgatgcagcggktctttttctaggtatatacccaaagaattgaaagccgggtggtgaagaaatctttgtacccctatgttaacatcatcaatagctaaaaggtggaagcaac

SEQ ID NO: 207791 - DNA, 201 bp, Homo sapiens
gtgacattttttaacctagggagagctgcctgaaggtttatgggaactctgtactacttttatcatcttcctgcatctaaacgtacttgaaaaccagaacrtttaaaataaaggaatacaagagaggaggaggaaggtgactaggccagactgtgtcccccagtgccgcactggtctcagagctgccctgctcctcacctt

SEQ ID NO: 207792 - DNA, 201 bp, Homo sapiens
ttctaatctgaaggtagaaagaacgtctttttttttttttaactcagatcaattttttatgttttagtgttttcattccatcattcgaatttactgtacgtgtgtgtgtgtgtgtgtgtgtgtgtgtgtgtgtcttttgagacggagtctcactctgttgcccaagctggagtgcagtggtgtgatctcagctcactgctg

SEQ ID NO: 207793 - DNA, 201 bp, Homo sapiens
agttttattataattactaattaaacacattctagataatttaggaaactattaaatatagcttcaaaaaattaaaatgaccacatgatgcagcggttctwtttctaggtatatacccaaagaattgaaagccgggtggtgaagaaatctttgtacccctatgttaacatcatcaatagctaaaaggtggaagcaacccaa

SEQ ID NO: 207794 - DNA, 201 bp, Homo sapiens
cagtgctccaccaaagcgccaaggtcggagaagacgtggaaagactgaggaaccgtctcagactggaggagaccaaggggacacgacagctcagaacatcwgggacccaggatgggctcctgggccagagaaaggacaagagtgggaaggctggtgaaattcacatcatgtttgtagttgagtgactagcacattgtcagt

SEQ ID NO: 207795 - DNA, 201 bp, Homo sapiens
ctagcactgtgcctcccactgggtaaatctgactacaaggcagaggaagggggcttgttgatggagtcctcgcctgtcagcaccccaagccacagagcagrgcagagtgagtctgaaggcacacaaacaacacataagcctggcccctgctcttggcaacttaaaaatctaagggaaacatcaagtcgttattttaggcac

SEQ ID NO: 207796 - DNA, 201 bp, Homo sapiens
agttagtattttttaagcttcttgaatctgtcagcttctggtttttatcaaatatggaaaactttccactattatttctgcaaatgttttacttacacacacacacacacacacacacacacacacacacacacatacatacacaccccttctctgagactcaaattacacatatgctagactgcttaatattgtcctaca

SEQ ID NO: 207797 - DNA, 201 bp, Homo sapiens
gcagtgctccaccaaagcgccaaggtcggagaagacgtggaaagactgaggaaccgtctcagactggaggagaccaaggggacacgacagctcagaacatyagggacccaggatgggctcctgggccagagaaaggacaagagtgggaaggctggtgaaattcacatcatgtttgtagttgagtgactagcacattgtcag

SEQ ID NO: 207798 - DNA, 201 bp, Homo sapiens
tgcaggtgcatacctgtaatcccagctactcgggaggctgaggcatgacaattgcttgaacccagggggcagaggttgcaatgagccaagatcgtgccacygtactccagcctgggtgataagagtgagacattgtctcaaaaaataaaataaagcccacagtcctgggaacaccccacagaccaaactgaggcaactgat

SEQ ID NO: 207799 - DNA, 201 bp, Homo sapiens
gttagtattttttaagcttcttgaatctgtcagcttctggtttttatcaaatatggaaaactttccactattatttctgcaaatgttttacttacacacacacacacacacacacacacacacacacacacacatacatacacaccccttctctgagactcaaattacacatatgctagactgcttaatattgtcctacag

SEQ ID NO: 207800 - DNA, 201 bp, Homo sapiens
aatattactaatttgttttaaataacttgtccaactcctagaaggaaacaaggatttggggagcagaagtagatcaagaaaattagtattaaatggcaggrgtaaagggataacatttgaaattctggcttcctggagtgatcagtcaaaagctctcctgctggaaaataatatcttgaattgaaaagcattcggatcatg

SEQ ID NO: 207801 - DNA, 201 bp, Homo sapiens
gcataagatcagcttctagtatttaggggaagaaaatgcacattcctaaagtggtatgacaccaagctaccctacattgaaaagcagcctacttttccagyctgatctaaagcaaatcccaaaatagcatgggcttgatttattaaacctctgtcctgtgcagaggctgccccacgcctgaccccactgtcctccgaactc

SEQ ID NO: 207802 - DNA, 201 bp, Homo sapiens
gatgtttggattagtgcatttccgttgcgaaatccgattttctattatccagttacacctagtaggcatgaaataaatgtttgttgaaatgaattaaatgyaatatgctcaggtcaatgtctttcacattctttataaggtcttatatttggaaaataatattaacaaccatttccatgaataacatttacttcatccata

SEQ ID NO: 207803 - DNA, 201 bp, Homo sapiens
aagccgggtggtgaagaaatctttgtacccctatgttaacatcatcaatagctaaaaggtggaagcaacccaagtgtgtctatcatcagctgaataaataracaaaatgtggcctatccacagaatggaatatgaatcagccttaaaaagcatggagattctcacacatgctgcaatatggatgaaccttgcggacatggt

SEQ ID NO: 207804 - DNA, 201 bp, Homo sapiens
ccaaggcaggagaatcgcttgaacccgggaggcagaggttgcagtgagccaagatcgcaccattgcactccagtctgggcaacgagtgaagctccatctcaaaaaaaaaaaaaaaaagacagtaggtactgagcaagcctggacaatcatactttgaattaatgtcatgttccagcgtttgggtggccctctgaaacagta

SEQ ID NO: 207805 - DNA, 201 bp, Homo sapiens
ttccaaatagtaagttaccatttgctcgactctgaagtaaattgtctaggctttatgatgagatagctccgtaacaccacatggagagttttgttttttgkttttttttgttgttttttttttttgtttctttaaatacaagtagtgcacattcttgttcagtttcatcctaagttccaactggacagagaaccagatagt

SEQ ID NO: 207806 - DNA, 201 bp, Homo sapiens
ggtcttgaaaaattcttaaaacttaaccagaatgaatgacgactgatctttctttccaatagtttgatgtttggattagtgcatttccgttgcgaaatccrattttctattatccagttacacctagtaggcatgaaataaatgtttgttgaaatgaattaaatgtaatatgctcaggtcaatgtctttcacattctttat

SEQ ID NO: 207807 - DNA, 201 bp, Homo sapiens
tctttgtacccctatgttaacatcatcaatagctaaaaggtggaagcaacccaagtgtgtctatcatcagctgaataaataaacaaaatgtggcctatccrcagaatggaatatgaatcagccttaaaaagcatggagattctcacacatgctgcaatatggatgaaccttgcggacatggtgctcggtgacataaggcca

SEQ ID NO: 207808 - DNA, 201 bp, Homo sapiens
ggtttcaaacaccctataccaccttcggacagagtccagatggctgttctaccgttatgtttcccaagataatgggaggagcatctgtgagtacctttttaaaaaaaaaaaaaaaaagtcattctagaaagcttcctgaagaaatctagtttggttattgtttttctaaagctgtacagtgtgtcattctgtggggacttt

SEQ ID NO: 207809 - DNA, 201 bp, Homo sapiens
gggaatgtggtcttgaaaaattcttaaaacttaaccagaatgaatgacgactgatctttctttccaatagtttgatgtttggattagtgcatttccgttgygaaatccgattttctattatccagttacacctagtaggcatgaaataaatgtttgttgaaatgaattaaatgtaatatgctcaggtcaatgtctttcaca

SEQ ID NO: 207810 - DNA, 201 bp, Homo sapiens
gtttcaaacaccctataccaccttcggacagagtccagatggctgttctaccgttatgtttcccaagataatgggaggagcatctgtgagtacctttttaaaaaaaaaaaaaaaaagtcattctagaaagcttcctgaagaaatctagtttggttattgtttttctaaagctgtacagtgtgtcattctgtggggactttc

SEQ ID NO: 207811 - DNA, 201 bp, Homo sapiens
ccctgtccctcaaggtgaagctatgtgagttagagccctccctgtcttgtagctacatggcgggccaggtgctgctcctcctggctttacattctgtcccrggaatagccaagccatactgcttcatgcagaagctcctggttttcgtgttttttgtttgtttgtttttgagacagggtcttgctctgttgcccaggctgg

SEQ ID NO: 207812 - DNA, 201 bp, Homo sapiens
taatgaaagacatcaggtgaacaataaaatcctcctgttcctctaaaacaaatcgcctttcagacgacagaaagctgccctttatgcctttgtgctccccmttccctgtgggttatttgtccttgctggagaatgggttttctctcctgctgtacatcattgaggacatcatcctgtcagggttttgctaggctggtgttg

SEQ ID NO: 207813 - DNA, 201 bp, Homo sapiens
tggagcttgccaagcccagctgtgcatctgccgcgggccctgcctgaccttgcgcctgtggggctgatggaactcagctcgtggtggtcactccccacatgtggtcatgtggggtcccgtggtcgggcgctttgcctctcccagtcccagccagcactccaggcatgcccttccctgctgtggatggccccaccggctgtg

SEQ ID NO: 207814 - DNA, 201 bp, Homo sapiens
ggagcttgccaagcccagctgtgcatctgccgcgggccctgcctgaccttgcgcctgtggggctgatggaactcagctcgtggtggtcactccccacatgtggtcatgtggggtcccgtggtcgggcgctttgcctctcccagtcccagccagcactccaggcatgcccttccctgctgtggatggccccaccggctgtgc

SEQ ID NO: 207815 - DNA, 201 bp, Homo sapiens
gtttttccttctcagttgtagcagctgtgtgggaaaagttctgtttatacaatacacatatatagacatgattcaatttgtgatttgtcaagtacacaaargagcaagtggttttatttgtaccagacaccattctgcacttgttagaacaaaacactagcaataggacttgtcggtatcatttctacatggcttaacttt

SEQ ID NO: 207816 - DNA, 201 bp, Homo sapiens
atgatgatactgttctgtgcaatttttaatgggatggatagaaattcacgcttgttaataacttaaatcatagcatttctcctttgtttttggttagaacrttaacttacatttaacactggaaaacatgactgtcagaaatttctgtaccttaattctacccacctgcttgaagaataaatggatgtgataatatacaat

SEQ ID NO: 207817 - DNA, 201 bp, Homo sapiens
tttctctcctgctgtacatcattgaggacatcatcctgtcagggttttgctaggctggtgttgtgtggatattgataatgataaaaagcaacaagcatatrggaagatttgctgttctcctcagttatctcttttggatatatgctgtattagcaagaagctatttactctttcagtaagtgtttgttaagggtggtggta

SEQ ID NO: 207818 - DNA, 201 bp, Homo sapiens
ctcatcgttcagttgccctctaaaattcttcccactcacacactctcaacagttaaagaaggtgtttcttcacacctctgtaagccttacagacagaaaayggttcactttggtgaggttaaacgttactcatatttattggccatttgtatttttttttcatgaattgcttactcagaatttggtgggtattctttgtgt

SEQ ID NO: 207819 - DNA, 201 bp, Homo sapiens
agtagtgaaactctattctgctccccattgggggaaaaaaaagcatatgcttggtagaaagaatgttagaacttgaaagtagaaagaaatgttagaactcraatcaggcaaggtaccatcagggctcagagccacactggtaattcgaatggcggaaatttcatagaattgttggagaggtgtttaggatcctccagagaa

SEQ ID NO: 207820 - DNA, 201 bp, Homo sapiens
ctttgtatggtaggggtattatattagtccttggcgatactttgtatggtaggggtattatattagtccttggcgatattttgtatggtaggggtattatrttagtccttggtgatattttgtatagtaggggtattatattagtccttggtgatattttgtatggtaggggtattatattagtccttggtgatgtttctt

SEQ ID NO: 207821 - DNA, 201 bp, Homo sapiens
ttgaaagagcgttttgttaataagccatagcctcttatttacagcttgtcagttttatttcatagcgtttcttttttatatgtacatgtgcacgttattcrgtgtttctgttcagcgttggcgttagggttggcgaggccttccccactgtgtgcctggcaggaactgttgctctgtgctcctcatgggaagctctgcctg

SEQ ID NO: 207822 - DNA, 201 bp, Homo sapiens
gggcagattgcttgagcccagggttcaagaccagccttggcaacatggcaaaaccacttctctacaaaaaatacaaaaatcagctgggtatggtggcacayacaggtagtcctagctacttgggaggctgagatgggaggatcacttgagcctggaggtcgaggctgcagtgagtggagattgtgccactgcattctagcc

SEQ ID NO: 207823 - DNA, 201 bp, Homo sapiens
ctcagctgagtttcttactattatctgtctcttgtgttctgccgcagttgagacagtccacgtggccccagctttccttgcagcggctcatctttcctcarattgcaggctgtgtggctgccttgcaacctcagccatcctgcaagttcaagaacagttgtaattgatagtttatccagctgtaaccagcgttttagctgt

SEQ ID NO: 207824 - DNA, 201 bp, Homo sapiens
tgaaagagcgttttgttaataagccatagcctcttatttacagcttgtcagttttatttcatagcgtttcttttttatatgtacatgtgcacgttattcartgtttctgttcagcgttggcgttagggttggcgaggccttccccactgtgtgcctggcaggaactgttgctctgtgctcctcatgggaagctctgcctgt

SEQ ID NO: 207825 - DNA, 201 bp, Homo sapiens
ctgtagttgattctgtaggttgggattgccataaggttggttagaaaaaagatgtgcgaaagctttcctgagggtttttgcccttgctttcacatgtcccrtaattgaaattaagaactgctggcaactggttagtgaccagtgttgaaatgggaaaatattactggcttatgcttttgcttatagatattgaaatttaat

SEQ ID NO: 207826 - DNA, 201 bp, Homo sapiens
aggtgggtttgcctcttctaggatttcatacaaacacagtcatatagtatgtacttgttcgtgtctgttttcatttgctgagcatggtgacgtttggattygtctgtgttgtcgtgggatggtgagcagtgttccattgtgtgaacatacccagcatgtttatccactttgctctcagtgggtacctgggctgattccgtt

SEQ ID NO: 207827 - DNA, 201 bp, Homo sapiens
gaaaacaccaagaaaaggagtgtgggcaatataaatggtattgatattgttaaacctttctaagaaagattgtttctatgaaagggagattttctaagccytttgaaggtgtttgatacctccctgtgttaatgcggtgtgaggtatgtacagtgaacagctgaattagtcagcagtctttgcccttagttgattgtgcgg

SEQ ID NO: 207828 - DNA, 201 bp, Homo sapiens
ccgctaaactctgcaattcctcactctcctgttcatacacacacagacacaaccctcctcacctccctgacctgcccctgccaaaaaatatgagtcatccrtcagtgtctcggggagttgagtggggagctatctcagatgctgagtcatgattttcagagaagatctgaacagattgctgtggttttaaattgctgaatt

SEQ ID NO: 207829 - DNA, 201 bp, Homo sapiens
ttgccttctgttccataaggcagatgaaattggagctactcagattttggaaacagctgttccttatcattgagagacagttcagcagttttaccttttcrtgagtcatcagttactgggcctaggaaatgtatttccatcttgtgtcattgaccccatatcttcaaaagatgacacaactgaaatagcttcatgtagttc

SEQ ID NO: 207830 - DNA, 201 bp, Homo sapiens
gcatgctggttcattcataccccgtccagaaagagccaccagcttcaggtgaagtcaccattccaggcaaaagtaaaaataaaatttcagttccaaaaaaygccttcagcctatcaaaatctaagtttcgacttaccaatatctattaatattttagaagcagatttttttatacaaatatatgggcatggaggcaaggat

SEQ ID NO: 207831 - DNA, 201 bp, Homo sapiens
caaatcaacattgtgacccaataattattaagtccattaatctttactgcattattaatcgcaaatctcaccaactaaccttgcaaagtgcatatgtgggyaagccatggaagctagaaagagtttcctgggaaaatctgggatcttatttcatgtcctcacatttctctgaaggaaaaaaacttgtaaacattgagtcaa

SEQ ID NO: 207832 - DNA, 201 bp, Homo sapiens
aattatgtggcaaatatcagcctccttccctgccatacccaacaacagccttgaattcaattccaaagaaacaaatttaacttcagtacgttgcatggcamacatttgagtgttcatacattttgatttcaagtttaaaacacacttggctgaagcccacagaagcaggggctacttgggagaggaccgtcccaggcttga

SEQ ID NO: 207833 - DNA, 201 bp, Homo sapiens
gtatttctctccgtagtccatttcaacgcttatagcaaatcaacattgtgacccaataattattaagtccattaatctttactgcattattaatcgcaaayctcaccaactaaccttgcaaagtgcatatgtgggtaagccatggaagctagaaagagtttcctgggaaaatctgggatcttatttcatgtcctcacattt

SEQ ID NO: 207834 - DNA, 201 bp, Homo sapiens
atctgagtgttccaggttacacttgttttaaataagagaagaaagagggagaaattgttcatagtagctgcatggttaacggtgttagctagtttgaatcrgatttctaaatcagaccaaaaaaaccccaaaaaacaaaaacccagaaaacagactagatggtgcttttgaataggaataatatataaaccattgatctca

SEQ ID NO: 207835 - DNA, 201 bp, Homo sapiens
ctttttagactaattatgtggcaaatatcagcctccttccctgccatacccaacaacagccttgaattcaattccaaagaaacaaatttaacttcagtacrttgcatggcaaacatttgagtgttcatacattttgatttcaagtttaaaacacacttggctgaagcccacagaagcaggggctacttgggagaggaccgt

SEQ ID NO: 207836 - DNA, 201 bp, Homo sapiens
gagaacgatgatgggggttgatccttggctgatagacttcaaagtcaaccattagcacccaggatgagtcattttgaattagaatcagatactctgcccayctataatgagagatcttcttgatctttaatgagtaccatctcttcattgaaacagtcaccagaatttgcatttccaagatctcttgccactttccccaaa

SEQ ID NO: 207837 - DNA, 201 bp, Homo sapiens
ttcttcctacccatgagcatggaatgttcttccatttgtatcctctttaatttcattgagcagtggtttgtagttctccttgaagagacccttcacgtccsttgtaaggtggattcctaagtgttttattctctttgtagcaattgtgaatgggagttcactcatgatttggctctctgtttgtctgttattggtgtataa

SEQ ID NO: 207838 - DNA, 201 bp, Homo sapiens
ccatggaaagcagcacactggctgcccaacttcaggtccctgctgcctccttctccccaaacgttcctttgacagtccctacatcttatgtgattttccarctgtttgatatttccagattagtaaatgtcctttaaaggaagagttttgtttaattataaagtctttttagactaattatgtggcaaatatcagcctcct

SEQ ID NO: 207839 - DNA, 201 bp, Homo sapiens
atgaagacaacaaagacaggagaacgatgatgggggttgatccttggctgatagacttcaaagtcaaccattagcacccaggatgagtcattttgaattaraatcagatactctgcccacctataatgagagatcttcttgatctttaatgagtaccatctcttcattgaaacagtcaccagaatttgcatttccaagatc

SEQ ID NO: 207840 - DNA, 201 bp, Homo sapiens
gcagtttgcagggtaattgcaacaaaaatattctgcacctttgtggttagaacaaaattctttcaagttcatggacagcattaggcttttgaagtctgccrgaaccagtagctgccactgggttttaaggaccaggagacttctctccccaaaagtgaggtttcttcttcctcccacagagggagaccgggggccctgccc

SEQ ID NO: 207841 - DNA, 201 bp, Homo sapiens
acacctatcttgacccccattcctgcaaggcctaagctgcctactagctgcctattagctaatcaacagaatattcactttttagagcttttaaaattatkactcattttcatgaagattaaaatgacttccagagccaaggaatgaagctataatgaagacaacaaagacaggagaacgatgatgggggttgatccttgg

SEQ ID NO: 207842 - DNA, 201 bp, Homo sapiens
gataatactgtgataataaacatcttcatatgtatactcttgtgcatgtatctgggtgtctctccttactatccatttatagaagtaggattactaggtcraaagatgtggttaacggtattaatacacattgtccttaaatttaacatcacgtcatctaaactgtggcctcaccttccctcccctctaagtacttcccac

SEQ ID NO: 207843 - DNA, 201 bp, Homo sapiens
gttattttctttttcactcgattatgtatcatggccttttttgacatatgcatctacattatcattttagattcctgcaggatattccagtttattgatargcattcaggttatattgatagacattcaggttatttccactggtttttttttttctttttttctttcttttcagacagagttttgctcttgttgcccagg

SEQ ID NO: 207844 - DNA, 201 bp, Homo sapiens
tgggattacaggtgtgaaccaccatgctcggcccccatggtttccttaatctgaaaagtataaaaaaggttttttttaatccagattcccactagccagargtaatatcatttatagtaccaaacttttctatttgattaatgcaattaaggcaaattaatatttgtgtgttgattcttttatttgcatttttttaaaaaa

SEQ ID NO: 207845 - DNA, 201 bp, Homo sapiens
ttgaggttcaaataagtgggggtgataatgatactaaccaaaaacagtgtggcattttacacccttttctatgtcagtcccctacttttatttatttctayagtgactttttgaagtaaccaggccagttgcttcttggtggtgtgtgtaatttatttctctttcccttgctcttctgtaaagcgatggcttcccctttgc

SEQ ID NO: 207846 - DNA, 201 bp, Homo sapiens
ccttggagatacagtaaaaacaaaacaaaacaaaaaaaccaaaggacaaaataatgagttaaatatgtaggtgactctaaataaatattgattgcataagycaataattataataatttttagcaattaaaatgaagaattaaaacacaaagcaacaataaggatggaatatagaattagtggtgttggaacatgggtcag

SEQ ID NO: 207847 - DNA, 201 bp, Homo sapiens
ttaaagcaagaatttgtaaaccaaaagatagatcaggagaaagtacccagaatgtagtagaaaaacaaaataatagaaaaatcagaaatgataatacaacrcataggactgtagtgaaaagctgtaacatacgttcattggaaactcagaagggaagaagagactgaggtagcagcaataataagagataatggctgacaa

SEQ ID NO: 207848 - DNA, 201 bp, Homo sapiens
cttaaaattaaaaataaatatgtcaatgcatttacaaaatgaaggaataaaatcatttgatcatttcagtagatgacaaaattcaatattcattcatgataaaaaaaaaaaaagtttagaaaactaggatggagactgggcgcagtggctcacacctgtaaccctagcacttcgggaggctgaggcaggtggatcacgagc

SEQ ID NO: 207849 - DNA, 201 bp, Homo sapiens
ttaaaattaaaaataaatatgtcaatgcatttacaaaatgaaggaataaaatcatttgatcatttcagtagatgacaaaattcaatattcattcatgataaaaaaaaaaaaagtttagaaaactaggatggagactgggcgcagtggctcacacctgtaaccctagcacttcgggaggctgaggcaggtggatcacgagct

SEQ ID NO: 207850 - DNA, 201 bp, Homo sapiens
tttttatctacctctttttttaagattatgttggcttcataaagcaaagtaggaaatagtctctcattttctgaaatgatttctataaaattggtattttytttcctcaaatgtttgatagaattcaccagcaaagccatctggggtttgatgtgtgtgtgtgtagaggtttgggagaaatttgtgtgtgtgtaacatttt

SEQ ID NO: 207851 - DNA, 201 bp, Homo sapiens
taaaattaaaaataaatatgtcaatgcatttacaaaatgaaggaataaaatcatttgatcatttcagtagatgacaaaattcaatattcattcatgataaaaaaaaaaaaagtttagaaaactaggatggagactgggcgcagtggctcacacctgtaaccctagcacttcgggaggctgaggcaggtggatcacgagctc

SEQ ID NO: 207852 - DNA, 201 bp, Homo sapiens
agctctaagttgccatctagtgtagtttccatttggactagagatctttctttagcatttcttgttatagatctaccaatgacaaatagtttatttgaaartgcccttattttaccttcatttttaaaggaaacttcttctgaatactagaattcttggttgactggttttcttccttttccttcttcagtaatttgaata

SEQ ID NO: 207853 - DNA, 201 bp, Homo sapiens
aaattaatatgttaatgtatattatatacaattttatatgtgtaaaatagccatatatgtatatattcatacttctgtttcatcttggtgtcagttttggyaagttgtatttatcaaggaacatgtctacttttacgatgatgaatttattggtataatgtttttcataatattttgttattttaatgtctgtaggatctg

SEQ ID NO: 207854 - DNA, 201 bp, Homo sapiens
cagaacttccttctgggatttttttttttcttaagtgtatcctttagagatttctttagtgagggactatggatggaaaagtttctaggtttttttttttwaattattattatctggacatgtctttattttgccatcattttttgaaagagaatagtatttcaaataaaaccagttaattggttaatttctttcagctcc

SEQ ID NO: 207855 - DNA, 201 bp, Homo sapiens
atgagccattgcgcccagccaagatctctcatctctttgttttattgttttttggtccaattttatcaattactgagaaatatgttagaatttccaaataygattgtgcattggttgtttctgtttctgtttcacgtattttgaagctgtcattagatggatgtatatttataatattgttatattttccttttaaaatca

SEQ ID NO: 207856 - DNA, 201 bp, Homo sapiens
gttgctgtaataactagttttggatagtatttactagttgaatctttttccttccctttttatttaaaaaagtttggttttgtttggaactctgtcttgaragcaccatataactagattttaacacttcagtagtatcttttatcagtttaatgtgtttaattttgttattactataatgtttggaattcttagtgtttg

SEQ ID NO: 207857 - DNA, 201 bp, Homo sapiens
gggcgggagaggaagcctgcggacacctgccctttgtgattgaaccgcagacaccaggcctggcggggtcgcttgcctccgctgcccaagctaaggctccrctaagctggtcctgagaacatacttcatgctcaacttcagggatgtggctgtagtgtcctcactctatgctgagaatgaaagaagcacagtctatgaaag

SEQ ID NO: 207858 - DNA, 201 bp, Homo sapiens
acaagcggcaccggcctgcatcccatttcccaggccacgtgtccttccagatagaggtctttgtactgtatgtgctacaaatcagaaaacgctgctgcccrccatcatggagccacctccaaactggcacctctcaggccgtgccgacgccctaccaggctggcggctgtggcaggtgctatatgtgacttagccacagga

SEQ ID NO: 207859 - DNA, 201 bp, Homo sapiens
ttcactttcagattttttttctgtttatttaaaatacattcactttttttcctgagacagagtcttgctctgttgcccaggttagagtgcggtgcagtggygtgatctaggctcactgcaacctctgcctcccaggttcaagtgattctcctgcctcagccttctgtgtagctgggactacaggcacgcaccaccatgtaa

SEQ ID NO: 207860 - DNA, 201 bp, Homo sapiens
  misc_feature (1)...(201): n = A,T,C or G
ttcccacctgcccaatggactgcaccttgcacagggtctgttcccagcggcccctagaggatgtgccccatttccctgcggggctggtatttgtgaatgtntcccttcggtgtggattttaagggatgggtcttccccgcccgcctcccaccgcaattcatattacatccactcttcttccttgcaggcaaacgagatgct

SEQ ID NO: 207861 - DNA, 201 bp, Homo sapiens
cttgagctgctgctttcaactgggcagttttcacccccgacctcacccctggggaacaatgtctggagacaacttggttgtcacacatgaggagatggccrttagcagaggctggggtactgctcggcaccctccatagcccacgggacagccctgctcagcaccctgcatgtagcccccacaggacagcccccacaccaa

SEQ ID NO: 207862 - DNA, 201 bp, Homo sapiens
aagtgcgtgctcataccttggcagaagttcagtgctgagaccagacacattcagcttgcccaggaacctaacgaaagtcaacagaaaagaaatcgtgggtytgagctgggcagcttcatggcaacgctgccccctcacctttgacagaaaggcagctgggagagaaggagaccaaagacatgcaggtggaggtgcggacag

SEQ ID NO: 207863 - DNA, 201 bp, Homo sapiens
gggaccctcccacctcatcctctggagtagccgggattacaggtgcatgccaccacccagctaatttttatcagcagtttttaacctatttaagcccaggrtcccttctggaatgtgccaagaaggcatagattctcaacctagaaagttgcacacatgcacccacgatttttcacacagtttttttccatttggtggaag

SEQ ID NO: 207864 - DNA, 201 bp, Homo sapiens
caggtggatttaggagcctctggatacgcccttctgtgtttcagacccttaggctctgcgtggaggtgggtgggggtgggttggggatctgcctggcggargaggagctctcggtggaccagactggttctttctgcaggctccttgaccactgctggttgttaactgagtaattccaggaagggaatattaaaaacatca

SEQ ID NO: 207865 - DNA, 201 bp, Homo sapiens
tgcattgagacacccttcccaaaagtatttcagaattacccaaatttctggtgaaaagttttacattaataacaatgcgtttttatatacacgagagtaarcatcgaatttaagggtagttgcaaatgttgctctaggggaggacttcccttcgtggggcaaaatatgctgaaattcttgagaaataagtctaagagactc

SEQ ID NO: 207866 - DNA, 201 bp, Homo sapiens
agggcctgtcgtgtagtccacaccgttccgcgaaaggaaccaccattgacagcctcgttcgattagaacccggacctccctggaatccagactcggtcccytcccagctgcgcttcggaggaggcggacgctccgagaggaacccagaggcctggcgtggggggagctgcgggcagagcggaggcagccgcgccctcgcgc

SEQ ID NO: 207867 - DNA, 201 bp, Homo sapiens
ctgtcctccgaactcctgctgcagccgtaccctccagccctcagtggagcaggatgtgggtacaggcctgagccctgtgctgtttgctcttcttgtttgcrggtcgcatgtcttgagccagcctgtgacactcttgtctctgtatcccccagactgttcagtccacttccacataaactcaggaaatagcaattattgcca

SEQ ID NO: 207868 - DNA, 201 bp, Homo sapiens
cactccccacatgtggtcatgtggggtcccgtggtcgggcgctttgcctctcccagtcccagccagcactccaggcatgcccttccctgctgtggatggcyccaccggctgtgctgccctcctccctctggcactgaccacaggctccatatgcatcttgtcccacccctccctactcagccctggcctttcagcctcact

SEQ ID NO: 207869 - DNA, 201 bp, Homo sapiens
agcagcagtgttggaagcgatggtttggatagaaggcatgaagtgggtagtggagtgtttctgatggtttatacacctctagaccttacctgagaaaggattttttttttttttcccccaagacggagtctctctctgtcgcccaggctggagtgcagtggcacgacctcggctcactgcaagctccacctcccaggttca

SEQ ID NO: 207870 - DNA, 201 bp, Homo sapiens
cagcaagttagcaaatgtcctatgaaagtcaacaacaactaacatggatataattctttactggttccaaagcctttcagtcacattattagcttctcccstgtttccccacagtgggcctaagttgtttttgggttgttgttgtttgtgagatggagtctcactctgtcgctcaggcttgagtgcagtggtggaatcttg

SEQ ID NO: 207871 - DNA, 201 bp, Homo sapiens
ttttgagtaattccccatttatttttcattttagaaacttcgtgaatactttcattcaatttaagaagcccattattgtagcagtcaatggcccagccatyggtctaggagcatctatattgcctctttgcgatgtggtttgggctaatgaaaaggcttggtttcaaacaccctataccaccttcggacagagtccagatg

SEQ ID NO: 207872 - DNA, 201 bp, Homo sapiens
agcaagttagcaaatgtcctatgaaagtcaacaacaactaacatggatataattctttactggttccaaagcctttcagtcacattattagcttctccccygtttccccacagtgggcctaagttgtttttgggttgttgttgtttgtgagatggagtctcactctgtcgctcaggcttgagtgcagtggtggaatcttgg

SEQ ID NO: 207873 - DNA, 201 bp, Homo sapiens
cttggttaaaacaattgcagtagaaagggagaaatctgggcttaatatagatagaactgtcaaagataagagtaactgccagaaaaccaacaaacaaaacyagataaatcagtgagccttctgggatttttttttttttctgggattctctctcaaccaacccaactcccagccgcatcccaacccccgtagataaagtct

SEQ ID NO: 207874 - DNA, 201 bp, Homo sapiens
  misc_feature (1)...(201): n = A,T,C or G
aaatgtgttgctacttttgatgcactgcttactgacatttattgcttcctctgcacaagcacaaaatgctggctcactctcagattcagtgtagaactggngaaagtcattaaatgccatgagccttgggttttttcccatgtactgtagtaaattcctcttgttgggattgtaattgcaggtggtcatcagagaacacag

SEQ ID NO: 207875 - DNA, 201 bp, Homo sapiens
  misc_feature (1)...(201): n = A,T,C or G
ccttatcattttaaatgtgttgctacttttgatgcactgcttactgacatttattgcttcctctgcacaagcacaaaatgctggctcactctcagattcantgtagaactggggaaagtcattaaatgccatgagccttgggttttttcccatgtactgtagtaaattcctcttgttgggattgtaattgcaggtggtcat

SEQ ID NO: 207876 - DNA, 201 bp, Homo sapiens
tttttttttttggagacagaatcttgctgcgttgcccaggctggagtgcagtggcacaatctcagctcactgcagcctctgcctcctgggttcaagaagtwctcctgtctcagccccccaagtagctgggattacaggcatgggccaccacacccagctaatttttgtatttttagtagaaatgaagtttcaccattttgg

SEQ ID NO: 207877 - DNA, 201 bp, Homo sapiens
ctctgattaagcctttgtcctgtttgttgttgttgttgtttttttttgttttttgttttgttttgttttgtttttgagacagaatttccctcttgtcaccyaggctggagtgcaatggcacaatcttggctcactgcaacctctgtctcccaggttcaagctattcttctgcctcagcctcccaaagtagctgggattaca

SEQ ID NO: 207878 - DNA, 201 bp, Homo sapiens
gtatcttcctttaatatctaggttttgaaattaacggccacacactgttaatgaaatagagaaattagattgtaattgatcagttgtcttatgaaaacaakagttgcaaaagccagttggttctgagagtcaggataaacatgaagaaaagtattgatcattcaatcccatgtcaaagtagaatcatttctgcaggaaatg

SEQ ID NO: 207879 - DNA, 201 bp, Homo sapiens
ctcttgcctgccaccatgtaacgtgtgaccttgctcctcattcaccttcctccatgattgtgaggcccccccagccatgtggaactgagttaattaaactygtttcctttataaattacccggtctcgggtatgtctttattagcaatgtgagaatggactaatacacaagtcctcactattgtgttaaaattgcctacag

SEQ ID NO: 207880 - DNA, 201 bp, Homo sapiens
atttaatttattattattattattttgagacggagtcttgctctgttgcccaggctggagagcaatggcacgatcttggctcactgcaacctccacctccygggttcaagagattctcctgcctcagcctcccatgtagctgggactacaggtgtgcaccaccatgcccggctaatttttgtatttttaaaagagacgggg

SEQ ID NO: 207881 - DNA, 201 bp, Homo sapiens
ggtttcaccatgttagccaggatggtctcgatctcctgacctcgtgatccacccgcctcggcctcccaaggtgctgggattacagatgtgagccactgcayctggccaggaattgtagaattttatatgaaaacattttacatcattggatcacttttattttgccttttccttgttgatttgttggagatcttggtatat

SEQ ID NO: 207882 - DNA, 201 bp, Homo sapiens
cggtgtggtggtatgcacctgtagatccaggaatttgggaggctgaggtgggaggatcgcttgagcccagaaggtcgaggctgcagtgagccataaccacrccactgcactccagcccaggtgacagagcaagaccgtctcaaagaaacaaaaatgaaagaaaaagaaaaaatatataacagttaagtagaagcagaagct

SEQ ID NO: 207883 - DNA, 201 bp, Homo sapiens
attcccagtgtgttgaatgttttaatcatgagttagattttatcagtgccttttctgcattgattgaggtgatcctgtggttttcctttctttgatttttmtaatgcaatatattacattgattgattttctcatattaaaccacccttgtattcctgggataaatcccatttggttataatccttttagatgttagattt

SEQ ID NO: 207884 - DNA, 201 bp, Homo sapiens
ggcattcttcaccttttgaatgtattctctctcctatttgacatgtatctagaatttttaattcttttcagtgtaccaaaaatgaaatatgtatattactttaatttatatccatctttcttgaagacacaataaggaaattcactgattaactcttcattctaatctgtaatcttaccctccactagattaattttaact

SEQ ID NO: 207885 - DNA, 201 bp, Homo sapiens
atattgattaggataaggtttagttgcataaaacaggaaaatgcaaaataatatgtttaaacataatacaaggtggtaaccccacagatgtggcttgtcakatgtgtagtatgataagaaacacaatttgcttattaattataacagttcctagtaataacttgtacctgagagtatatgacttagataaaatacctacag

SEQ ID NO: 207886 - DNA, 201 bp, Homo sapiens
gcattcttcaccttttgaatgtattctctctcctatttgacatgtatctagaatttttaattcttttcagtgtaccaaaaatgaaatatgtatattactttaatttatatccatctttcttgaagacacaataaggaaattcactgattaactcttcattctaatctgtaatcttaccctccactagattaattttaactt

SEQ ID NO: 207887 - DNA, 201 bp, Homo sapiens
caatacaaaccaaaattttacacttcttaccccttcccccagccacatcttcagtttgcatgttgcttgctttatattattcaggaaatggcaattttgakcaaatgttttgctacagcataacaagggtcactaattttccaactgatgatatctgctcaccactgctccatgtctgatcttctccactaagccaatgac

SEQ ID NO: 207888 - DNA, 201 bp, Homo sapiens
cattcttcaccttttgaatgtattctctctcctatttgacatgtatctagaatttttaattcttttcagtgtaccaaaaatgaaatatgtatattactttaatttatatccatctttcttgaagacacaataaggaaattcactgattaactcttcattctaatctgtaatcttaccctccactagattaattttaacttt

SEQ ID NO: 207889 - DNA, 201 bp, Homo sapiens
attcttcaccttttgaatgtattctctctcctatttgacatgtatctagaatttttaattcttttcagtgtaccaaaaatgaaatatgtatattactttaatttatatccatctttcttgaagacacaataaggaaattcactgattaactcttcattctaatctgtaatcttaccctccactagattaattttaacttta

SEQ ID NO: 207890 - DNA, 201 bp, Homo sapiens
tagttgaaaaagcaaatgatccttaattgtagattgatgagctccggccagtgatggtatcacagcctaagatgaaattggtgaaatcaaatgttaagagstctcagaattggcatcacgagggcaaagagatgaaacaactagtgatatctggccaaggagcagcagtgtggcagctggctactggcttctatatgaaag

SEQ ID NO: 207891 - DNA, 201 bp, Homo sapiens
tacggaaatcatattttgcttaagctggggagtgggtacataggccttgttgtatttttctttatgcctttttgcatatctagtatttcattttttaaaaygctaaatgtaaagcaattgcgtaaaagtcaaaatgttgatctctcgcatgatggctacttagttttaaaatatcaaattatttgaaaataatttttcaat

SEQ ID NO: 207892 - DNA, 201 bp, Homo sapiens
tgcttatttcttctctgatctcataatctgatatcaggtgtttatgacagtggttttcagagggggaggtagatcaaattcaccctcaagggacatttggyaatgtctggagacattttgtgatggtcatagccaggttggggttgaggggctgtgctcctggcatcttatgggtagaggccagggattctgctgaacatc

SEQ ID NO: 207893 - DNA, 201 bp, Homo sapiens
agcagaaaatatacaagatgagcctgcagcatcttacaatgccagaaagtaaggaagtgatcaaaatatacaccgcctcatgatgagagtatgtcaaagaygcacagaagtcaactgaaagagctcccggtggccaaagctagagaatctgatcaaggaaataaataatgcattatggattataatccagggtataaaata

SEQ ID NO: 207894 - DNA, 201 bp, Homo sapiens
agtcattctagaaagcttcctgaagaaatctagtttggttattgtttttctaaagctgtacagtgtgtcattctgtggggactttccatcttgtaattcakatttgggttcatagacgttgttgacctttgttgcatcattccctagagaaggacttcattcactgaggagcctaccactttgcataattcacatggatat

SEQ ID NO: 207895 - DNA, 201 bp, Homo sapiens
gttcctccaacattcatcttcctctttcagagaatccttgttttacagaagaggccgcttgtgaaagagagtgatttgatcaaatcactagcagaattggygggaaactagactctacgttagaacctactcctgacttccatttagttctttgtactgtgtcacactgataagtgaattttttgtaagcgtaattgattt

SEQ ID NO: 207896 - DNA, 201 bp, Homo sapiens
cccattgacttaagcttctgtatcgcactagttcaaggctctgcctccttcacttattttccttgcccttcaaaattgtgcttatttctgaatgcaagaarttcaactaggagccttgttcatccactttctttcatttccttttatcttaaaatatacttcttgtccagagtgaggctttaaaaagatttttttggttgt

SEQ ID NO: 207897 - DNA, 201 bp, Homo sapiens
gatatcaggtgtttatgacagtggttttcagagggggaggtagatcaaattcaccctcaagggacatttggcaatgtctggagacattttgtgatggtcayagccaggttggggttgaggggctgtgctcctggcatcttatgggtagaggccagggattctgctgaacatcctgccatgcataggatggccccacaccaa

SEQ ID NO: 207898 - DNA, 201 bp, Homo sapiens
attgcttcctctgcacaagcacaaaatgctggctcactctcagattcagtgtagaactggggaaagtcattaaatgccatgagccttgggttttttcccakgtactgtagtaaattcctcttgttgggattgtaattgcaggtggtcatcagagaacacagagcccccggaagaattttatgacatttcaggcaagccaca

SEQ ID NO: 207899 - DNA, 201 bp, Homo sapiens
cccccttgagctccgtgttctctaccaccccacttggtgcccataaggaaagagacacataaaagcccctccttgctgtcagggggctcatgggctgtcaytcctcaatgtacttggtgtggacccctgaaatgccaaacacatggaaaattctagcaccctagttagaggaacactgcatgacaagttcttgtttctcct

SEQ ID NO: 207900 - DNA, 201 bp, Homo sapiens
ggaagctatgttctgatagaggagccattctaagatattgtggaaggaataaccatgagatgtaacaatgtgtatatcttatatatgtacaagcaagacarcaatgtataagatacagcatcttatactacatctagtgtactgccatctgtgcttttaaaagccagggtggtggagaagtctgtattgatgttttcttgt

SEQ ID NO: 207901 - DNA, 201 bp, Homo sapiens
tttctgaatgcaagaagttcaactaggagccttgttcatccactttctttcatttccttttatcttaaaatatacttcttgtccagagtgaggctttaaaragatttttttggttgtatttaaaaaacccacatattttcctagaaaaattcaagtagtaaagaggaagggaaactcggaaaaatctaagactcagtacta

SEQ ID NO: 207902 - DNA, 201 bp, Homo sapiens
cactcacccccaagggatctgtggcctgctcactgtgcccagctcagagttgctgcacttgtccacttaactgctatagttgatcaggagaggaacaagcrgcaccggcctgcatcccatttcccaggccacgtgtccttccagatagaggtctttgtactgtatgtgctacaaatcagaaaacgctgctgcccaccatca

SEQ ID NO: 207903 - DNA, 201 bp, Homo sapiens
attgcggattacttgccattgtgtaggtaggtcagctgcccggggtgccttgcttaaaccttctcagtcctgagttggttgcccttgcatcacagaagaakaagtggatggagttatgtccctgccacggtcccctggcagagccaacggtggtctccagagcgctaccacactcactccctctgtaaggaaagcacaatt

SEQ ID NO: 207904 - DNA, 201 bp, Homo sapiens
gccttgggttttttcccatgtactgtagtaaattcctcttgttgggattgtaattgcaggtggtcatcagagaacacagagcccccggaagaattttatgrcatttcaggcaagccacaggtcagcctggggaaaaagcaggaagaaaaactggcaatacgagggcccaacccaaaagttattcctgaagagaaacaacgg

SEQ ID NO: 207905 - DNA, 201 bp, Homo sapiens
tcagagaacttctgccattgctaatgctactagtaaagtctgatctagttttcttacatttcattccttttttccccatccactctacattcatcaccacrttggatcatatttggacaattcatacagacaggaggataattatttgcattcttaaccaggcacagtggttcatgcctgtacatctcagctgcttgagag

SEQ ID NO: 207906 - DNA, 201 bp, Homo sapiens
taggaaatatatatatataaaaaatatatatataatgtatattgtatatcatgtatatattacatattattatatatattttgtatattatgtataatatrcatatatatcatatatattatattttgtatcatattatgtatattatataatatataaataatatatataggagtttattaagtattaacttacacaatc

SEQ ID NO: 207907 - DNA, 201 bp, Homo sapiens
tgtcccacaggggtggtggtctgaagtggtggctgccacacagctctatgacccgcagagaaggctggctgcatccacgtgtctatccagtttatcttgcwtttggaaaaagaagtttcgactagatggccttgactctaataataagatgttttcttgattattttccttttttctttcggcttctcaaacctggaatag

SEQ ID NO: 207908 - DNA, 201 bp, Homo sapiens
agacacacccaagattaatattttgtatccttcattccaatcaagttgacattcgggattaaccatcacatcaataatcaagacagtatagaaagtgagaytagttcattaacggcagttacttatttgatgcagaggatctaaaaatatagaagagttaaaacataaatatcaatgaaaaaatgtgatgctatgagcaaa

SEQ ID NO: 207909 - DNA, 201 bp, Homo sapiens
ggaaaaagaagtttcgactagatggccttgactctaataataagatgttttcttgattattttccttttttctttcggcttctcaaacctggaatagataytctccatgagacccattctgtcttgattctgtcctttaaaaaaatctctaactatgtagcttcctttcaataagtacctctccatctgtattttttaggc

SEQ ID NO: 207910 - DNA, 201 bp, Homo sapiens
gggattaaccatcacatcaataatcaagacagtatagaaagtgagactagttcattaacggcagttacttatttgatgcagaggatctaaaaatatagaasagttaaaacataaatatcaatgaaaaaatgtgatgctatgagcaaaatgggaagcctatctgtgtcctttctggctatgtgtatggcgtatacggtgatg

SEQ ID NO: 207911 - DNA, 201 bp, Homo sapiens
tggagcttgtccactcttgctgacaagtccaggggctaaggccaagtctcagccctctctgcctcttgctcccggctgcccctctgcttgcacccatgtcsctgcccctcacctgtgagagtgttagcacgtggacggctgcctgtgccaggtactgtggcttctccacctggcctgttggggggtggtccctcattgcca

SEQ ID NO: 207912 - DNA, 201 bp, Homo sapiens
tgcccttgcttgtcctgcacatccaaccacctggaatggagaacaccgaaggtagggaaaggatctccagggatgagcaggcctggagccggcggggctgyggaggaagaccggccgcaatgagtgagtgctgagcagagagaagggccgttctcggctggtatcaggcccaagagagtcaacaaaggggggacgaaaggg

SEQ ID NO: 207913 - DNA, 201 bp, Homo sapiens
attgcctaactttgcatatgctgattttcccaggattgttttgtgtattaaaagagctcacacgtgggaagggccggcattagggggaggaaggcagatgrgaggagaggaagctataccagtaactttttaaacgaatggcaaaaagaccttttctattttagatttctttattgagtccctgtaattctgtagtaggtt

SEQ ID NO: 207914 - DNA, 201 bp, Homo sapiens
tacaccttgacccgaatctagcaacctcaaggctcttctctggttgtttattcacagccatctgttttcctcattctctcctctgattccccctcaggagygacagaaggccctttaccctcacctttctctcttagtcttatgaactgtgtctttctcagtgataggtcactcagctgctgtatttggtggcagagccca

SEQ ID NO: 207915 - DNA, 201 bp, Homo sapiens
ttttccagaggaggccctttaacctaaccctctcctgccacagagtaaaggaagaaacaagaagtttcagtgacttacgggaagtcgtacaccttgacccraatctagcaacctcaaggctcttctctggttgtttattcacagccatctgttttcctcattctctcctctgattccccctcaggagcgacagaaggccct

SEQ ID NO: 207916 - DNA, 201 bp, Homo sapiens
agcctgggcaacacagcaggaccccatctcaacaaaaaaattaagcactttgggaggccaaggtgggaggatggcttaaggtaaagagttcgagaccagcytcagctacttggcaagaacctgtctcaagaaaacaaagaaaaaatttaaaaaaacacaaaaactaattaaattatgattatagaaatcttccgaaagata

SEQ ID NO: 207917 - DNA, 201 bp, Homo sapiens
ttctgctacgcactttattagcaacttagctttttttttccctcataacccatagacttagcaggaggagcatagacattaagagtaagtgcacatgaaayattgaaaaggagtaaacatgaatcctctctttgcaaaagacagtctcagaaatttctcatctgctaattcacttaattcaacaaattacatctatcatgt

SEQ ID NO: 207918 - DNA, 201 bp, Homo sapiens
ctgcagtgagtcgagatggcaccactgcactccagcctgggtgacagtgagacactgtcgtaaaataaataaaataaaactacaaatatagaggagcagasagtggcaaagcagattgaggacagacttcagaaggccttgaactctaatgtaaagcattcagattttcacctcaggccagtggggactcgccaaaagctt

SEQ ID NO: 207919 - DNA, 201 bp, Homo sapiens
tataaaggtattttgctatatctgcaatagctgtatgttatatgaaaacacgtgtgctttctactagagactaagttacagttgttgctggtactactatrgtttgttgcgtacattcataattgggggaaatgcaacatttcagctagaggatagtgaaaataaggatggaatatttttcccattgatgtttgcaacctg

SEQ ID NO: 207920 - DNA, 201 bp, Homo sapiens
ctgtaaccattatgtaaaaactccccattcgcttcccccagtccctggaaatctctattctactttctgcctcagtgaatttgcctattctagatatttgmtataagggagatcttgtagtatttgtccttttgtgtctggcttccttcacttagcataatgttttcaaggttcatccgtgttccagcatgtatcagcact

SEQ ID NO: 207921 - DNA, 201 bp, Homo sapiens
atatgagaattcaactctattaactctcaatgcagaatatgcctcattatttaagtgaaaaactgtcttttctacaaatgaaaagaaaactctatttttcrtataacttttgaagaaaaggcattgtgtaaattttatttgctaaaaataattttattaagccaggtgtggtagttcatgcctgtaatcccagcactgtgg

SEQ ID NO: 207922 - DNA, 201 bp, Homo sapiens
cctaatgagtacgatgagcatcacttgatatgcttattagctatttgtatgtcttctttggagaaatgtctagtcctttgcccatttttcattgggttatytgtcattgttgttgagttttgttgagttctttatatattctggttattaagcccttaccttaccagatatgatttgcaaatatttttatgttggcttttc

SEQ ID NO: 207923 - DNA, 201 bp, Homo sapiens
aacaaaacaaaacaaaacagagcacttctcctagtttttgcatttaactctgtgactccaggtttgcattgagccaggtgatcagtctgaggtgaaagccragaaacttctcaggtctttctgagcgtgcatcttgccctgggcttgtgcatggctgtctttccccttacacccacatgctttagaatgtcctgatcttcc

SEQ ID NO: 207924 - DNA, 201 bp, Homo sapiens
attaaaatcctcccaaaagatggctttatcactaaatgaaagaaactggatgataaactatacatctgtaaaaattttttaaaaacaagtttcctaatttkttaatttcatttttttctacttattttcaaacaaaattaacttttattaaaaatatctttgtggcctggtgcagtggctcacacttgtaatcccagcact

SEQ ID NO: 207925 - DNA, 201 bp, Homo sapiens
atagggtctgtttgaaaagcattgtggttgacagagccatgccacgctgtctgcagaccagaggccgggcccctcgcagtgttgaaagttcagccctgccrttgtgggtagtgctccctaaggcaagggcagatgccagactattgttaagaagattatactaaactgatccttgtacagccctgcttctcgtggagtgat

SEQ ID NO: 207926 - DNA, 201 bp, Homo sapiens
tgcctatttgctaaaatttatttgtaacccaaaaattaataatgcagtggtttcatggtcatttatacatacacctagaatggcaaaaaaaaaaaaaaaaragagagtcacctgacacacatcttcctagctgagactgcccataacaacacactgccttgtttcagctgtgagaccaccagcgggtggaagtgatggggg

SEQ ID NO: 207927 - DNA, 201 bp, Homo sapiens
tgcctgtggacttgtttgtatatctcaacttgatcatttagcctaggtgtttgtgggtgttagtttgtgaacaatctcccccatttttctggcttaagggsccaagttcagatgtcgtgccgtggtcttctagatagccttcagtcaggttagaacatacctacacaattatttgtgaataaggttggctgtgctccctct

SEQ ID NO: 207928 - DNA, 201 bp, Homo sapiens
gtgtgggtgcctgtagtcccagctactcgggaggctgaggcaggagaatggcgtgaacccgggaggcggagcttgcagtgagcccgagatcgcgccactgyactccagcctgggtgacagcaagactccatctcaaaaaaaaaaaaaaagactttaccaatatgtagtcagaaattgttcaacataagctttctggtattc

SEQ ID NO: 207929 - DNA, 201 bp, Homo sapiens
acagtttttgacttaaagtctgttttgtctgatattagtgtagccacctccagctttctcttgcttactatttacatttaatatattttttactactttcyctttcaacctttttgtttttgaatcttgagtttcctgtagataacatatagttatataatgtttttatatccattctgccagtctctgccttctgtcaga

SEQ ID NO: 207930 - DNA, 201 bp, Homo sapiens
aacaatctcccccatttttctggcttaagggcccaagttcagatgtcgtgccgtggtcttctagatagccttcagtcaggttagaacatacctacacaatwatttgtgaataaggttggctgtgctccctctagaaccaggaaccagggactttcccactgggaatgcaggctgtcaggccagggaggcacagcaagtaca

SEQ ID NO: 207931 - DNA, 201 bp, Homo sapiens
ggcctcctgccctgcaccccacatagcacacactggccaggtcttctcgctgtgccggcccctcaccccatctactcttgggggtcctgctccatgctgcrttaccccaatccccatcctaaattagttctgtgtccctttctctcagggtctttcctagctactctggtgaatgatttaatgttaaaaattcataggcat

SEQ ID NO: 207932 - DNA, 201 bp, Homo sapiens
ctacacaattatttgtgaataaggttggctgtgctccctctagaaccaggaaccagggactttcccactgggaatgcaggctgtcaggccagggaggcacrgcaagtacaagtaaaaataccacaaacctttcctgtaattttgaagttgctagcttcttgattcaatgttcacttgtctgctgccaatctttgacttatt

SEQ ID NO: 207933 - DNA, 201 bp, Homo sapiens
ttttggtaccagtaccatgctgttttggttactgtagccttgtagtatagtttgacgtcaggtggcgtgatgcctccagctttgttcttttggcttaggawtgacttggcgatgcgggctcttttttggttccatatgaactttaaagtagttttttccaattctgtgaagaaagtcattggtagcttgatggggatggca

SEQ ID NO: 207934 - DNA, 201 bp, Homo sapiens
gttccatatgaactttaaagtagttttttccaattctgtgaagaaagtcattggtagcttgatggggatggcattgaatctataaattaccttgggcagtrtggccattttcacgatattgattcttcctacccatgagcatggaatgttcttccatttgtatcctctttaatttcattgagcagtggtttgtagttctcc

SEQ ID NO: 207935 - DNA, 201 bp, Homo sapiens
ttcacgatattgattcttcctacccatgagcatggaatgttcttccatttgtatcctctttaatttcattgagcagtggtttgtagttctccttgaagagrcccttcacgtccgttgtaaggtggattcctaagtgttttattctctttgtagcaattgtgaatgggagttcactcatgatttggctctctgtttgtctgt

SEQ ID NO: 207936 - DNA, 201 bp, Homo sapiens
ttcttttacatttgctgaggagagctttacttccaagtatgtggtcaattttggaataggtgtggtgtggtgctgaaaaaaatgtatattctgttgatttrgggtggagagttctgtagatgtctattaggtctgcttggtgcagagctgagttcaattcctgggtatccttgttgactttctgtcttgttgatctgtcta

SEQ ID NO: 207937 - DNA, 201 bp, Homo sapiens
gaatctgacaattatgtgtcttggagttgctcttctcgaggagtatctttgtggcgttctctgtatttcctgaatctgaatgttggcctgccttgctagaktggggaagttctcctggataatatcctgcagagtgttttccaacttgattccattctccctgtcactttcaggtacaccagtcagacgtagatttggtct

SEQ ID NO: 207938 - DNA, 201 bp, Homo sapiens
gactacttatgtggtagtattcaaatacccaaagaccacctactctaattagcaaaataagctgtatttgtattggtcccattctttcattattctcaacmtgtttcctctctgtaagatggaaataatatctgttttatagaattgtcataaaggttaaatcagatttccagtaatggcagactaaataagtgtgattga

SEQ ID NO: 207939 - DNA, 201 bp, Homo sapiens
agtcctcagagaataactcactaaatccagaggtgagaggcgctcttgggctggcgtgggcttcgcgcttctccctgcctgatttccaggcctgcctggckgaactggctcttcctgtgctctttctaaacctccttttgggccatctcccgatgcccaccagaagggagggagcagaggggaagttgcgggctttgctcc

SEQ ID NO: 207940 - DNA, 201 bp, Homo sapiens
ggcagcagtggtgttcacctgtatatccccagtacctcgtacagtgccttatacatagcagacactctcttgctgaataaatgaggatccagataagatakgtcaatcattgttaaaggcatagacctgagtcagtgggtattacatgttcagggatatgaattggcaatttgttttattttactaatttgcttctgtgta

SEQ ID NO: 207941 - DNA, 201 bp, Homo sapiens
agaaatgtgaatactacaattttataaatgcaaattctgcgattgcacctaagaattagttgtctttgggtactgccttcttaaaaaaaaaaaaaaaaggkggatatggctattttttcagatgttgtctggttttcatgtgcccactgatagcaccccaaccccacagggtgcacggcaaatgtggagacatgtgcaaat

SEQ ID NO: 207942 - DNA, 201 bp, Homo sapiens
ttgggaggccaaggcaggaggatcacttgagcccaggagttcaagaccatcctagacaacatagcaaaactccatctctacaaaaaaagttgaaaaatgarccaggcatgatggcacaagcctatagtcccagctacttgggaggctgaggcgggaggattgtttgagcccaggagttcaagaccaccctagacaacatag

SEQ ID NO: 207943 - DNA, 201 bp, Homo sapiens
agacacgagcagcaaaattaattaaatcatctgtctcttctatgggcctgccataaattactacttgccttgggcaaaatcttttctatgggcctgccatraattactacttgccttgggcagataactgatttcaaggttggtttaaaccctgcaagtgttcggagaatgttctgatgattagagtagatgatcatgggt

SEQ ID NO: 207944 - DNA, 201 bp, Homo sapiens
ttcaaggttggtttaaaccctgcaagtgttcggagaatgttctgatgattagagtagatgatcatgggtagccagagttcctattatttgtgccgtgagtrtgttctgtcctcaacccctagataaagatctcttccaaatagtaagttaccatttgctcgactctgaagtaaattgtctaggctttatgatgagatagct

SEQ ID NO: 207945 - DNA, 201 bp, Homo sapiens
ctttttctgaacattttgttataattttcagtttaattttttagacttacttttaaactcagaagtaaaaattgtatatacttatagtgtacaacatggtrtattgaaacacgaatacattgtggaatggttaaatcaagctaattagcatatgcattacctcacatacttactattttgtgtgtgtggtgagaacactta

SEQ ID NO: 207946 - DNA, 201 bp, Homo sapiens
ttttatttaaaatggatgaaacctagtcatcaacatgaaagttggctatgcttctctactcacctccctaaaatgacatatccccaggtggcccccataarccctttgtgcttgcctttttaacttacagaggatgaaaaatgaaagaaaacgtagactggcaaaatggcagtaaagtaagttggatcttttccaaaatcc

SEQ ID NO: 207947 - DNA, 201 bp, Homo sapiens
gcaaaatggcagtaaagtaagttggatcttttccaaaatcccagatttctggagggctgaagttgaactacttttgatagttactaggctccagctgagcwctgcccttggtgcactgggctttctagcacctaaacccttctagagcttgcacagcaggattggtgtggtgggtaggggggctcttttttctgttttgtt

SEQ ID NO: 207948 - DNA, 201 bp, Homo sapiens
tgcccccaccccattgccttcagtagcaggtgtgccctgtgtgtctgcgacctggcgctccgctgccctctggctcgctctctctgtcagcaccagggccrcacgtggtcccttcctctccatctgctcaggggcccccaccacctggccctctcctctctctcccttctgagttgtagtcttaaaattgtctctttagcc

SEQ ID NO: 207949 - DNA, 201 bp, Homo sapiens; identical to SEQ ID NO: 36469

SEQ ID NO: 207950 - DNA, 201 bp, Homo sapiens
caggaggcagggggaacattaaacatagctttcctacaagacataatctcattgccccttttcttttaaaactcttaaactatttctgcaaaaacgtcatytatgtggacttttccagaaatatgtcttttacttaaattgaaatacaccctcatacacaactattcacaagtgaaggagcaagggaaaaatcgctttcaa

SEQ ID NO: 207951 - DNA, 201 bp, Homo sapiens
aagttctaaattgtttcttttctcctgcttgccttgggtttagtttccttttttgccagtgtcctaagataaagggttaggttattgatttgaggtctttmttctttttagtgtaggtgttcactggtagaaatttccctcccatcactgcttttgctgtattccataagttttggtatgttgtggtttccaacttctctt

SEQ ID NO: 207952 - DNA, 201 bp, Homo sapiens
atggaatggtagtgacagtgttgtccaaaatatttgaccatatataagggagtttatttcagagccttctattccattaggctatatgtctgtagttccaygctgccagtttcatagtatattaattactgtagctttgtattaagttgaaaccagttagtgtgagttcttcaactttttcttctttttgaaaattttttg

SEQ ID NO: 207953 - DNA, 201 bp, Homo sapiens; identical to SEQ ID NO: 36458

SEQ ID NO: 207954 - DNA, 201 bp, Homo sapiens; identical to SEQ ID NO: 184736

SEQ ID NO: 207955 - DNA, 201 bp, Homo sapiens
atgtttttcaaacttttagatttctcttcttcctcagtaacaccatttattcttaggattggccatttaacataatccccaacttctcagaggctttttctttttttttttttttaattctttttttgtctttgttggattgggttaattcgaaagccttgtctttaagctctgaagttctttattctacttgtttgattc

SEQ ID NO: 207956 - DNA, 201 bp, Homo sapiens
cgagctcctgggtgcaggtaatcctcctgcctcagtcatttgagtagccgggaccagctaccatgcccagctaatattttaattctttgtagagaagaagycttgctttgttgcccaggctggtcttgaactcctggcctcaagtggtcctcctcttgggcctcccaaagtgctgggattataggcatgagtcacggtgcc

SEQ ID NO: 207957 - DNA, 201 bp, Homo sapiens
cctatcaacagtgtactggataaagaaaatgtggtacatatacaccatggaatactatacccccataaaaaagaatgaaattatgttctttgcagcagcayaatgcagctgaaggccattatccaaggtgaattaatgcagaaacagaaaatcaaataccacattttcacttataagtgggaactaaacagtgggtacgca

SEQ ID NO: 207958 - DNA, 201 bp, Homo sapiens
tttatatattataccattgtaacaaacttgtacatgtagtccccgaatccaaaatcattaaattatttttaaaaagactacctcttccccttctttgcctygcttttcgtggcaaaaatagaaaaaatcgagtcacataatttcttgttcttttggaattaaaaaaaggtcactttacactcaaaaagaatgatccttcca

SEQ ID NO: 207959 - DNA, 201 bp, Homo sapiens
tagtccccgaatccaaaatcattaaattatttttaaaaagactacctcttccccttctttgcctcgcttttcgtggcaaaaatagaaaaaatcgagtcacrtaatttcttgttcttttggaattaaaaaaaggtcactttacactcaaaaagaatgatccttccaaaggaattaacagctaactaggtattgtttgacatt

SEQ ID NO: 207960 - DNA, 201 bp, Homo sapiens
cttctgtctttaaaatagccaattggaattagcttagactgtgcggtccaaccctagccaataggggaatgacacagcagtaggggctccctgcatcaggmataagaaccccttcccctcccttttccaggtttattctcgccattgctccatctgtgagtcacacccttctatagaagtaaaaattgccttgctcagaaa

SEQ ID NO: 207961 - DNA, 201 bp, Homo sapiens
ccctcccttttccaggtttattctcgccattgctccatctgtgagtcacacccttctatagaagtaaaaattgccttgctcagaaaaggaaatttatgttygagtgctgttttcttgcagcaccaagtaacaagcatttgtttctaacgaagagtatagaatgaaatggtcaaaataaatacaggtaaaatgtgtttgtaa

SEQ ID NO: 207962 - DNA, 201 bp, Homo sapiens
cgagacggagtcctgctctgtcacccaggctggagtgcagtggtgcaatcttggctcactgcagcctctgcctcctgggttcaagcgattctcctgtctcrgcctcccaagtagctgggactacaggtgcccaccaccatgcccagctaatttttgtgtttttagtagagatggggtttcactgtgttggccaggctggtc

SEQ ID NO: 207963 - DNA, 201 bp, Homo sapiens
tcattaaatgccatgagccttgggttttttcccatgtactgtagtaaattcctcttgttgggattgtaattgcaggtggtcatcagagaacacagagcccmcggaagaattttatgacatttcaggcaagccacaggtcagcctggggaaaaagcaggaagaaaaactggcaatacgagggcccaacccaaaagttattcc

SEQ ID NO: 207964 - DNA, 201 bp, Homo sapiens
tggcattcttcaccttttgaatgtattctctctcctatttgacatgtatctagaatttttaattcttttcagtgtaccaaaaatgaaatatgtatattactttaatttatatccatctttcttgaagacacaataaggaaattcactgattaactcttcattctaatctgtaatcttaccctccactagattaattttaac

SEQ ID NO: 207965 - DNA, 201 bp, Homo sapiens
tatgcttgtaacaaaattgcatttggcaaattataggatgtgaaatgtataatattaactgacacgactcccatcccaggcagacaagcaaccctcattaygaaaattacattttgtttagaaaaattccctcaacaggcatccccagagctttctgggcatcagcagagcagacgtccagttcgggggtccacgccagta

SEQ ID NO: 207966 - DNA, 201 bp, Homo sapiens
attcaatgtagttttctttgaaacatcagctccccttttgtaatcatcccctgttgtatgtaaaaatgaattaaatataacaagttcagctagccaaaaawgtgtaagaggaaggagagcgttccctctatcctcttaggtttgtggctggggcctgtgaattacagtggtgaaagacatattaacaggagaaaaggacat

SEQ ID NO: 207967 - DNA, 201 bp, Homo sapiens
ttacagacgtgagctactgtgcccagccaattcattattttaacttgtgtaccgttctgagcagggtgatgaaattttatgttgtcttgatgtgtcttgcmcaggacgtgaattgttcctttgttcagtgtctccatgccatagatgctaccacctcattagtgacttagtagctggttcagttatcagatggatcagagt

SEQ ID NO: 207968 - DNA, 201 bp, Homo sapiens
cttgttgggagagagttctccagggatcttttgcatttctgtatgtctctggaaaagagagtgagcgcatttgtggtggactgtcttttcagtagtgttgktgtaagcagttagcctcggagacaagatagtgtctccaggccataggtaagtttgtttactgcgctgtaggataaagatgggatgtgggcaggcatgccc

SEQ ID NO: 207969 - DNA, 201 bp, Homo sapiens
tgtgtgtgtttttaatccattttgatgatttctgccctttaagtggagcactcagtccacttacatttagtataattgttgatagggtttgatttgggtcyagtgttttatttttttctagttctctttttttggtttttgttcctctgttcctcttttccactttctttggctaataatattattgaaatttgacatttc

SEQ ID NO: 207970 - DNA, 201 bp, Homo sapiens; identical to SEQ ID NO: 36466

SEQ ID NO: 207971 - DNA, 201 bp, Homo sapiens
ggctgtcccattttaaaatcctaccaacgatgtatgaatgtcctagttgcttacctttgatatttttttcattttggccattctgatgggcatgtagttgtaacttattgtgcttctaatttgcatttccctcatgaacggtgtgatattcatcacttcaaaaaatgtttaattgataagtaaaatattcagcacttttta

SEQ ID NO: 207972 - DNA, 201 bp, Homo sapiens; identical to SEQ ID NO: 36467

SEQ ID NO: 207973 - DNA, 201 bp, Homo sapiens
tatttagttttataaaatgctgtcagaccttttgccaaagtggctgtcccattttaaaatcctaccaacgatgtatgaatgtcctagttgcttacctttgrtatttttttcattttggccattctgatgggcatgtagttgtaacttattgtgcttctaatttgcatttccctcatgaacggtgtgatattcatcacttca

SEQ ID NO: 207974 - DNA, 201 bp, Homo sapiens
aggcatccccagagctttctgggcatcagcagagcagacgtccagttcgggggtccacgccagtatgcggcagtggcgcggggccgaggctgctcacaggmtgggtgccgacagcccagctctcctttgaaataagccgttttgaagttaagaatgcacccagtgccaagtgtgaaatgtgctttatacatatgttaggcc

SEQ ID NO: 207975 - DNA, 201 bp, Homo sapiens
ccctcaacaggcatccccagagctttctgggcatcagcagagcagacgtccagttcgggggtccacgccagtatgcggcagtggcgcggggccgaggctgmtcacaggctgggtgccgacagcccagctctcctttgaaataagccgttttgaagttaagaatgcacccagtgccaagtgtgaaatgtgctttatacatat

SEQ ID NO: 207976 - DNA, 201 bp, Homo sapiens
attcaagatagctagcattttttccccttaaaacatctctttggccaggcacggtggctcatgcctgtaatctcagcactttgggaggctgaggcgggcarattgtctgtgttcaggagttcaagaccagcctggccaaaatagtgaaaccctgtctctgctaaaaatacaaaagattagctgggcgtggtggcatgcacc

SEQ ID NO: 207977 - DNA, 201 bp, Homo sapiens
tcacgtttttctgccactttatattcactggcagctgattagattgtgcccaccagatgaagggtagatctgccttccctagcccactgactcaaatgttwatctgttttggccacacccacccagacacacccaagattaatattttgtatccttcattccaatcaagttgacattcgggattaaccatcacatcaataa

SEQ ID NO: 207978 - DNA, 201 bp, Homo sapiens
aacggcatcaagacattgacagaaggtgtatgggcagtcttacactgtctcagcgacttcagggccaaaactgtcttttgtgattttgcctcttttggaartggaagccacctaccgaaattgtgttttaccagagccccaggagctcatagtcaaggctttgtgacatcagagttgttaggaaggttaaccgggcaagat

SEQ ID NO: 207979 - DNA, 201 bp, Homo sapiens
caaaaaaaaaaaaaaaaaacttgcaaaccctcatgaggagcctgtccccagccctgttttccagcctctgcctgcatgggaggggcagtgagtcagccacrtgtttgctttgccgcctctgcctgtgtgctctccaagctgcgggtttcacatgcagtaaacggcatcaagacattgacagaaggtgtatgggcagtctta

SEQ ID NO: 207980 - DNA, 201 bp, Homo sapiens
gggtttctgctgagaaatctgctgttaatctgttaggttttcctttataggttacctggtgcttttgcctcacagctcttaagattcttttccttcatctyaactttagataacctgatgacagcgtgcctaagtgatgatctttttgcaataaatttcccaggtgttctttgagcttctcgtatttggatgtctagatct

SEQ ID NO: 207981 - DNA, 201 bp, Homo sapiens
tgcacatccaaccacctggaatggagaacaccgaaggtagggaaaggatctccagggatgagcaggcctggagccggcggggctgcggaggaagaccggcygcaatgagtgagtgctgagcagagagaagggccgttctcggctggtatcaggcccaagagagtcaacaaaggggggacgaaagggagacagggaagagaa

SEQ ID NO: 207982 - DNA, 201 bp, Homo sapiens
ctatgtgtttgactattttatatttctcaagtgaaatgatgtagtgcttgtccttctgtgtctggcttctttcacttagatgatgctttattaaaacatartataacaaggtctaacagtgatttctaactagtgatgagtataaaggtattttgctatatctgcaatagctgtatgttatatgaaaacacgtgtgctttc

SEQ ID NO: 207983 - DNA, 201 bp, Homo sapiens
acttcggtaaacaccagcattaagaaaaaataaatttagtttcatgagagtctcctgatatctaagagtagttataatatttccatttcttttttgtgggktttttttttttttttttttttttgagacagagtttcgctcttgttgcccaggctggagtgcagtggcacaatcttggctcattgcaacctctgcctcccg

SEQ ID NO: 207984 - DNA, 201 bp, Homo sapiens
gagtttcgctcttgttgcccaggctggagtgcagtggcacaatcttggctcattgcaacctctgcctcccgggttcaagcaattcccctgcctcagcctcycaggtagctgggattacaggagcccaccatcatgcccagctaattttttgtatttttagtagaggtggggtttcaccatgttggccaggctagtcttgga

SEQ ID NO: 207985 - DNA, 201 bp, Homo sapiens
gagtagatgtatacagttaacagttatttcataaacacagaatcgtatgcatggtatttagtagaagataaatataagttaataggaaggaattgtagaattttttttttttttttttgagacggagtcttgctctgttgcccaggctggagtgcagtggcgcgatctcagctcactgcaagctccacctcctgggttcac

SEQ ID NO: 207986 - DNA, 201 bp, Homo sapiens
cccatggaatggtagtgacagtgttgtccaaaatatttgaccatatataagggagtttatttcagagccttctattccattaggctatatgtctgtagttscacgctgccagtttcatagtatattaattactgtagctttgtattaagttgaaaccagttagtgtgagttcttcaactttttcttctttttgaaaatttt

SEQ ID NO: 207987 - DNA, 201 bp, Homo sapiens
agttagtgtgagttcttcaactttttcttctttttgaaaattttttgggctgttctcaattgttcttaccaattccgtgtgaattttgggattagcatgcyagtttctacaaagaaaacaactttaatgttaataagagttacgtcgaatctaaagatcaatttggagagttttatggtattaacagtattaagtccccaa

SEQ ID NO: 207988 - DNA, 201 bp, Homo sapiens
aatagcaataattgtacttcttcctttccaattcagatacctttgtgtttcttgtctagtcactcagccaaaactagctagaactccaatacaatgttgartagaagtggcaagaacaaacatcttgtttttctgatcttagggggaagcttttagtctttcagtattctgtgtgatgttatttgtgtgtttttcatagat

SEQ ID NO: 207989 - DNA, 201 bp, Homo sapiens
gaagagatcattttatcatctattgtggtttttgctatttttgatgtttcctaatgaaacttgcacttttccccccaaattttgatttttttaaaactatktttttccttttatgaacaggttgaaaggattgttgacaaaaggaaaaataaaaaagggaagacagagtatttggttcggtggaaaggctatgacagcgag

SEQ ID NO: 207990 - DNA, 201 bp, Homo sapiens
aattgctatctcattgttttaattttaaaacaggaaaactgtttttgcaagttaattgactgtttgcattcattcttctgttaattccgtatacgtgtgtrtgtgtatatatatatatatatatatatatatatatatatatatatatatcttgcctgtttttcttttgggtggtttaacttccaaaatgtgaacatttcg

SEQ ID NO: 207991 - DNA, 201 bp, Homo sapiens
tatttaaaaatgattttactggccgggcacggtggctcacgcctataatcccagcactttgggaggccgaggcgggcggatcatgaggtcaggagatcgaraccatcctggttaacacggtgaaaccccgtctctactaaaaatacaaaaaaattagcctggcgtggtgtgggtgcctgtagtcccagctactcgggaggc

SEQ ID NO: 207992 - DNA, 201 bp, Homo sapiens
tgtttggtgcttacatgtttataattgttatattttcttgttgaactggcctttatgtcaccatcttttgtgtcttgttacagtttttgacttaaagtctrttttgtctgatattagtgtagccacctccagctttctcttgcttactatttacatttaatatattttttactactttccctttcaacctttttgtttttg

SEQ ID NO: 207993 - DNA, 201 bp, Homo sapiens
ctgcaactttgctgaatttattagctttagtagcattcctgtggatttttcaggattttctatatataggatcgtgtcctatatatagaattgtgaatgartagtgatagttttacttcttttcaatttggatgccgtttgttttttgtctaattactctggctataacttccagttatacacttcacaattgagtgtatt

SEQ ID NO: 207994 - DNA, 201 bp, Homo sapiens
taatcaattagccaccgtttttgtattattcatgactcatcgtgacttccaaagtttaaacttctgtgtgtactagggtttgttttgggctggttgctgcrtcagaattagatgaatttgtctgtagtctcattgcttgagacaaaatatcttctaaagaaactgaaataacatctttttcatattaaaaacgtttaggca

SEQ ID NO: 207995 - DNA, 201 bp, Homo sapiens
ctcacatggtggaagggactagccaggtctcttatcagggcaccaatcccattcatgagggcagagccttgtgccactctcctatgtatgagacctagttrtttctcaaaagtctaaccttttagtaccatcatactagggattgggtttcaacataggaaattttgggggacacaaatattcagaccatagcaagtggtc

SEQ ID NO: 207996 - DNA, 201 bp, Homo sapiens
ctttcagaccttttgtataagacgtcagttatgtcttcctaccagactgtagaccacatgaggacaagacgcgcctccttgtcatctgtgtccaccagtckactagaaaagctgaaaaaaggaaaggggatggtccttaagctgtaatgcagacacattttcatgactgcaaatgatagccttccaacctcatgataagta

SEQ ID NO: 207997 - DNA, 201 bp, Homo sapiens
gctgaggcgggtgaatcacctgaggtcaggagtttgagaccagcctggccaacatggtgaaaccccgtgtctactaaaaatacaaaatcagcatggtggcrcatgcctgtaatcccagctactcaggaggctgaggcaggagaatcccttgaaactgggaggtggaggttgcagtgagccgtgatcatgttgcaaaactcc

SEQ ID NO: 207998 - DNA, 201 bp, Homo sapiens
tcagaaatattctcatttttcctggtttgtgacccttagtttgccttctcttcaatcccaaagtccgatttttaaagctgccagtaggaacttgagctttaatagtacatgcttatgcttttatactagtaataacaaatacttacagatggaaataggatatgtctgtgttctcaccctccctcaaccctaaccttccag

SEQ ID NO: 207999 - DNA, 201 bp, Homo sapiens
ttatcctcataattctggagagaaccctaagatcagggtgccagcaggttcagggtctgctgagggctcacttcctggttcacaaatagcacctttctgcwgcatcatcacagggcagaagagccagggggtgtcggccctcatttataagggcactcatcccattcatgagggccccacccccatgacctaatcaccccc

SEQ ID NO: 208000 - DNA, 201 bp, Homo sapiens
ggataactttcttttaatagttggacaactttgaccacatcatggggtgatgtaggttgtctacagggagtccctgtgcactcagccatctcagagcaacstgctagctggtcaggttcccaccgcctgcatctgtgtgaatcggttatttgggtagaagtttgaaacctctcattttgaaactactgaaaatagtgtgtt

SEQ ID NO: 208001 - DNA, 201 bp, Homo sapiens
aagaagtcatctgttcattctttcatttatttaccgtatacggtgttgggtgcacaaaaagcatggagcaaggtgcttcagggtgtttagcaatgagcaasacaaagacactgacaaggagctttcattctgcaagccgaaaaagacaggagctcaaattgataccatacaagtagcatgaaataggcaccccagagaggg

SEQ ID NO: 208002 - DNA, 201 bp, Homo sapiens
tcctgcccagtccaatgtccagctaacctagggctacccagggacaggaaatcggaagcatgcggtgtgcagggcccagcctcagcacactctcccggggyggtttcacccccacccacccacacatcctcccaagacttcagtcctcaccaacatactgatccatctctagcccataattccaactgctcactgcgccgt

SEQ ID NO: 208003 - DNA, 201 bp, Homo sapiens
acatgcttaggaattgcccctgggtggcttctgtttaccggctgactccagaagagaagaggctgttagaagcgtagtgtgtgtgaaagactcagattctktgtgaagggcagagtgctgtgcagggcccaggggagaggagatgagggctctataccagctgggccagaccagctgtggccttgggcctttccctcatca

SEQ ID NO: 208004 - DNA, 201 bp, Homo sapiens
gatgagggcacgccgtggccggatcctgaacatgtatggttgaatcattctttgcaccgtccagttaaggtcctggttcgagggctgaatcaaccttcacrgagccagcctactggtcccatccctctgctgcaacccagggcttccttcttcctcttcacaaagcgctctgccctatcttgtggttctgcaggtccccaa

SEQ ID NO: 208005 - DNA, 201 bp, Homo sapiens
aattactccaagtagttaaccatttatgaagctgtttctaccccttctcattggcaatttaagtcaaatagcagctaaataactgaggaattatttgctcrgctgaatcctagtgagttgttattccagaaattgccatagacaagcactagctttggagttctgatgtcagacagcattacagagtgttgtgggccatct

SEQ ID NO: 208006 - DNA, 201 bp, Homo sapiens
gcagtctcttctgctctgggccttcacgcatgctgttccctctggccagaggaggtgtatttttaaattttttaagcaccttattcccatctttccttccycatgatttctgtttcgggcctagtataatttctttctgtgaaataacttactttgacaattttgactctcagactgaatatctgaactgccttctacact

SEQ ID NO: 208007 - DNA, 201 bp, Homo sapiens
cctccaaaaatccatcttaatcagggactaacacccactacttgaaattactccaagtagttaaccatttatgaagctgtttctaccccttctcattggcmatttaagtcaaatagcagctaaataactgaggaattatttgctcggctgaatcctagtgagttgttattccagaaattgccatagacaagcactagcttt

SEQ ID NO: 208008 - DNA, 201 bp, Homo sapiens
aagtctccatgcacgttcctcaccctggtctcccttttctcttccttattcaccttgttccagatcctcttttcttgcctgaaatactaccttaaaccttyaaaaaacatcctctcactcagctctgcagtctcttctgctctgggccttcacgcatgctgttccctctggccagaggaggtgtatttttaaattttttaa

SEQ ID NO: 208009 - DNA, 201 bp, Homo sapiens
atggctcaggtctcaactgcagagagaggccatgcactgagtgaggaatggcagggaagcccatgggatgtaccatcagtatggaagtgactgaggcgctrtgagggtggggcctctatgacagtctacagtcagtgcatttgacctcccacccagccacctccctttctcaagcctggcaaagtcaccttggccaatagg

SEQ ID NO: 208010 - DNA, 201 bp, Homo sapiens
acctgatctcccagactagaagtctctctaacctgctgtgcagggggaatccctgtgatgatgggtatgtgctgtcatctgccttatccagtgtgggagcygcttgtcacgcatggctatcgagtgcttgaaacctgtctggtgtgagtgaggaactgaattctgaattttatttcattttaatttattttggataccccg

SEQ ID NO: 208011 - DNA, 201 bp, Homo sapiens
acagtttaaggaaggaaaggcaggtgtgggttgggagagggtatgggatccctctacagcaccctgaaatggagcttttggaggtcaagttcttggattcrcttttggtccaaagagggatcctgaactacctgggtcttcattctggagagagatggctcaggtctcaactgcagagagaggccatgcactgagtgagga

SEQ ID NO: 208012 - DNA, 201 bp, Homo sapiens
tgccaccccccaagaatgattcctctttcattggtctttgttgtagtaagaggcataacatttcctgttatctcatccacccatgagacctgatctcccakactagaagtctctctaacctgctgtgcagggggaatccctgtgatgatgggtatgtgctgtcatctgccttatccagtgtgggagctgcttgtcacgcat

SEQ ID NO: 208013 - DNA, 201 bp, Homo sapiens
ggagtcatgctgagtcttctctgagtgcccctacaccgcccagctgaacaggagtaagctccctcatgccccgggtttctgttggtgaagctagggggaastctgtggcatcatcacctacttgcaaagaggggagcaccctgccaggaggaccagggtgtgtaataagagtgtaaatacagcagaagtcaaatgtacaca

SEQ ID NO: 208014 - DNA, 201 bp, Homo sapiens
tggagtggtcaggaaaggcttttcttgtgttgaagaatcaagacctcacatgatgtgttggacgataggacatgaacatggtcctgtttctcacattcccrtctgctgctaagcttccagaattatccacatttgctccccttttcctcactcctcaacctactctgatccaacttttgtttctaccctgaccttgaaact

SEQ ID NO: 208015 - DNA, 201 bp, Homo sapiens
ttccactccccacacctactctcatcctccccccagctcctgctgtgtccagctgctattctcgatggcaagacccactgcttctttgttctgcccatackatggaagtgggaggggagccacccacatgcttttcctcagcagcagccacagccccctttccttggtgcagctctctacgggccacagtgctttggcaat

SEQ ID NO: 208016 - DNA, 201 bp, Homo sapiens
tgcttctttgttctgcccatacgatggaagtgggaggggagccacccacatgcttttcctcagcagcagccacagccccctttccttggtgcagctctctrcgggccacagtgctttggcaatgatggaagctcatgcttttggagcacatcctctaccagactcatccctcctttaatcctcacaacctccctttaagtc

SEQ ID NO: 208017 - DNA, 201 bp, Homo sapiens
actgcttgctgatggcagtcagaactttccatgtgtgtcaacgtttaaagagcgaagtttcccagtggacaaaagaaggggaggaggggaggcccacacarggagagagccctagggcagggagtaatggcagcggcccttgggctgtcttccagaggcaagagctggagtcagagaacaaaaagctgaagaatgacctga

SEQ ID NO: 208018 - DNA, 201 bp, Homo sapiens
ccgtacccattaacaacttcccagttcctcctcccccaacctctggcaaccacaattgtactttctgtctttctgcattagacaattctaggttcctcatrtaagtagaatcgtatagtatttgttttttgtaattggcttatttcacttaacatttgtgtcctgatggttgatctctattgtagtatgtgtccatcttct

SEQ ID NO: 208019 - DNA, 201 bp, Homo sapiens
tccccattgcagacatgccagctaattttggaatcttggctttagaacttctctggataccaaataaaaaagggtatctttttcctccaaaataaccactraacaatagttagaactctaggcctgggccatagctctgtcatgtatattaaggatctctctttagggagaatggccttgtttctgacagtttaaggaagg

SEQ ID NO: 208020 - DNA, 201 bp, Homo sapiens
ggaaatgtgagcttagattgtcttggagagaataaagttagtatatgcaaagtgctagcatgaagtctattccatagtaagtgtcccctctatgttagctrtaatatttaccttgcagagttgctgggaagattagcttttgtgtggaaagtgataaaatgtctagtatttagtagacacctaatgaatgtcaatatgatg

SEQ ID NO: 208021 - DNA, 201 bp, Homo sapiens
acccatcagcagctccccagagtagctgaggcacctttaagtgagagtcgctgccttctgagttcctggggtggggagagccagtgaccccaatccttagytccagtgtgttgccattttttcctgcccctttctacctgatgccgagggtggggcagctcctcccttattaactcacctcttggtgccttgagcttaatt

SEQ ID NO: 208022 - DNA, 201 bp, Homo sapiens
ctacacagatgacatcagacggtgcctgatgtacaagttcttggcctatccagctgtacctaaagattcattctccaggctccccattgcagacatgccarctaattttggaatcttggctttagaacttctctggataccaaataaaaaagggtatctttttcctccaaaataaccactgaacaatagttagaactctag

SEQ ID NO: 208023 - DNA, 201 bp, Homo sapiens
ggaagtctgtggcatcatcacctacttgcaaagaggggagcaccctgccaggaggaccagggtgtgtaataagagtgtaaatacagcagaagtcaaatgtwcacagagatgacctatcgccctttcatacctgggatcttgcatgggcttgggttcagcctttttgggtcagaggcagaccaagtgtgtgtcactcacttt

SEQ ID NO: 208024 - DNA, 201 bp, Homo sapiens
gtctgggtgacagagggagactccatctcaaaaaacaaaagaaacacctgtggctgcataatttataagtaaaaatgtctaattgactcacagttctatartctgtacagaaagtgtagttctggcatctgtcctgatgagggcctcagggagcttccagccatggcaaaagttgaagggggagcaggcatcacatggcga

SEQ ID NO: 208025 - DNA, 201 bp, Homo sapiens
cactggggcaaaaggtgaatggtgtttgaaaaaacccttctcattgttaaggagcttaaatgtgtggggatgggggaagaaagtacagagaggaatctaaygtgaattaccccccaagggctacaaacaacaatgaagcagagtaaaggggatggagggcgacctgtgggggcctgaggggtatgatttcacttttgatgg

SEQ ID NO: 208026 - DNA, 201 bp, Homo sapiens
gcttgtgaaacttgatgcagaatatttgactacttgaattcagcagaacatactacatatttttctttgtagacatttttggcagtttcattctttaagarcaagtcgagaagtagataatcttctctacccaaattttttaccttttgagaaaaaatatggatttaaattatgagcaatattaaactctcattacatcat

SEQ ID NO: 208027 - DNA, 201 bp, Homo sapiens
tagaaaaattgcaaacaaaaccaagtaagtcaggctgaaaaattactctgactccctgttaggccaggggaaatgtgactcttatttcacttaatgattcmctgagttgaaataggtgattgccacatacaaaagtaattcctggataattttctcgaagtcatcatattaggagtgaggagtactttaaaagagtctaat

SEQ ID NO: 208028 - DNA, 201 bp, Homo sapiens
tcctgtggcaggagttcacctgggtgagtgggtgagcttggcactgcaggtggatgtgttttgtgatgctgatgtcacagccccagttgcagggaagtacyttcaggtggtcctgcaggctgtgactctgctcctgtgaccttggctttcaccctcatcctccctagcacttccagtgtctgccaaccagcaggctcagct

SEQ ID NO: 208029 - DNA, 201 bp, Homo sapiens
gcaccaactgtgatatgagaaatgttagttggttgtcattggctttgtatttgagatgcaaattgatgtttgggaggagagaggagacagatggctgatakagagggaggcagtgaagtgctgtgtgttccctaaggcatgtatttaggaaaaccttttttctgtgcctgtcttcctttgaaggaaattggcctggagaag

SEQ ID NO: 208030 - DNA, 201 bp, Homo sapiens
ataaataggttccggggcagagcaagcattgattccatttcaagatgcaatcaagtgatggctgacagcacattgcagtgattggtaaccatgttgattcytcatcaggaagtgctatgtcccaagttctatagtttctctggtgtgagaccattttccagaagtgagctcttttaacttccaaagaaagtgcctgtgttt

SEQ ID NO: 208031 - DNA, 201 bp, Homo sapiens
atcatctgagactcttgatcattgttaattcctgccggcccttatttttggttggaggtggggtggacagtgaaaggagagactgatccttgtcagaaaatatgtatacacttgaccttggttgttggtttcctctgcttattaattcatgccaatctgaattagtgaatatgcaggattacgaagtcttctcacagaagt

SEQ ID NO: 208032 - DNA, 201 bp, Homo sapiens
ttaaaactctgtcgtcaggcaggaagaattaacttgtcctgtttggaacaccagctctgctatttaatggcaaaagccacaattacttttgcaccaacctratacttccccattatgtgaccttggcaagttacttaacctctctgtctccatttccttgtctctaaaatgtttacaaacatagcacctagctgacatgat

SEQ ID NO: 208033 - DNA, 201 bp, Homo sapiens
ggtctgtgtataattttgtcaaaggtacaaaagatacaatttttcctctggcatttgaaaagaaaatcacaggcacatgcgcgcgtgtgtgtgcgcgcacrtacacacagaaccttgtaaagtatgtggaaataacatggaggagagacagaataaaaacaaatgggtttggagcagttctttgtgcaggatctgctggtc

SEQ ID NO: 208034 - DNA, 201 bp, Homo sapiens
ttcagctgcatattatggagctaccgatatccatgacccagaagttatcaaaatataagattttttttctttctcctgtggctgtttaaaatctatttctrtggaaagatttttggagataagcaccttctaccttgttctgcttttgtggcagcctttaaaactctgtcgtcaggcaggaagaattaacttgtcctgttt

SEQ ID NO: 208035 - DNA, 201 bp, Homo sapiens
agaggtgaaataggtggtttaggaaggaacagctaagtcattaaaatagatacaacttatccccacttaatatcatagtgcatatagtaatatcaataaayaaacaagaaaattgccccctcacttagaagctggataaaactcagaacaacaaaaaatatttggaatgaaagtatgctgggtgactgtatctttgttggt

SEQ ID NO: 208036 - DNA, 201 bp, Homo sapiens
aacattgagaggggctcagggagcccagaacttgcactcccccactgccatgcctgctttttttttttttttttttttttgctactttattttactagcarggagtggaatcaggtctaatgtatttttaacagctttaatgagatataattgacataccatacaattcacccatttaaagtatacaatttggtggttttt

SEQ ID NO: 208037 - DNA, 201 bp, Homo sapiens
tacatagagacaattttatgatattttaggatctgtcattcttttttaccccatgtaaacatttcctccagaaatgagtattcaaacaagatggagtaagktaattgcatagaagccaggaagaaaagctgaataggaacatccagagaagtctaaaattgtcctaccaagctcaattttcacactgacagccaaatcaga

SEQ ID NO: 208038 - DNA, 201 bp, Homo sapiens
ttagagttccacagggaacattgagaggggctcagggagcccagaacttgcactcccccactgccatgcctgctttttttttttttttttttttttgctaytttattttactagcaaggagtggaatcaggtctaatgtatttttaacagctttaatgagatataattgacataccatacaattcacccatttaaagtata

SEQ ID NO: 208039 - DNA, 201 bp, Homo sapiens
gatgaatttgcccagaactctgtgaaggaaaatctcatgaagaaagaactggaggaggagcgatcccggtaccagaaccttgtgaaggaatattcacagtkggagcagagatacgacaaccttcgggatgaaatgaccatcataaaggcaaggggggtgcttctgctgtgccatggcacaggtccctggctcctgtccagc

SEQ ID NO: 208040 - DNA, 201 bp, Homo sapiens
agtgttttccagagctgctgcaccattttatattcccaccagcagcatatgagggttctgatttcttcatattctcaccaacacttgttattgtctgtctktattatagccatcctggtgagtgtgaactgttatctcagtgtggctttgatttgtatttccctaataagatactgagtgtcttttctgtgtttatcggcc

SEQ ID NO: 208041 - DNA, 201 bp, Homo sapiens
tctgtagatgaatttgaggagtgttgccatcttaaaaagtgttttgatccattatctcaagatgtctttccatttattaagatctttaatttctttcaatwatgttttttcatttaccgagtatgaattttacacttctcttgttaaagttattcctaaatattttatgccattatagtggaatcgttttcttaatttatt

SEQ ID NO: 208042 - DNA, 201 bp, Homo sapiens
acctcctccgtggggtccttccagcccatcaccaccagcacccacatcacacactcctggcttggtgcctgactgagctgtgtcatagtgtttccatgtgratgtacagatgtgtctccttagttcgactggccagggacagattaagcatgccattgtatctgttcccatgcttaggacagcgtcccgtgtgcagtcagc

SEQ ID NO: 208043 - DNA, 201 bp, Homo sapiens
taaaaagtgttttgatccattatctcaagatgtctttccatttattaagatctttaatttctttcaattatgttttttcatttaccgagtatgaattttayacttctcttgttaaagttattcctaaatattttatgccattatagtggaatcgttttcttaatttatttttcagattgttcattgcaaatatatacaaat

SEQ ID NO: 208044 - DNA, 201 bp, Homo sapiens
agtgttttgatccattatctcaagatgtctttccatttattaagatctttaatttctttcaattatgttttttcatttaccgagtatgaattttacacttstcttgttaaagttattcctaaatattttatgccattatagtggaatcgttttcttaatttatttttcagattgttcattgcaaatatatacaaatacaat

SEQ ID NO: 208045 - DNA, 201 bp, Homo sapiens
ccattatctcaagatgtctttccatttattaagatctttaatttctttcaattatgttttttcatttaccgagtatgaattttacacttctcttgttaaakttattcctaaatattttatgccattatagtggaatcgttttcttaatttatttttcagattgttcattgcaaatatatacaaatacaattgagttttgta

SEQ ID NO: 208046 - DNA, 201 bp, Homo sapiens
tcctgtcagcagctttgctgggggcaggctttggcctcagaagatgtcccaggccagcgatggcaacatctgtgatagagagtacagtttctgtttagagwtccacagggaacattgagaggggctcagggagcccagaacttgcactcccccactgccatgcctgctttttttttttttttttttttttgctactttatt

SEQ ID NO: 208047 - DNA, 201 bp, Homo sapiens
tcactgcggccccaacctaccaggctcaagcgatcctcctgccttagtctccccagtagctggggctacaggcaagtgccaccatgcctggctaatttttmagttttttgtagagatgaggtctccctgtgttgttgcccaggctggtcttgaacttcttgggctcaagccatcctcccacctcggcctcccaaagtgctg

SEQ ID NO: 208048 - DNA, 201 bp, Homo sapiens
cttgttctgtcacccaggctggagtacagtggtgtcatcacagctgtcactgcggccccaacctaccaggctcaagcgatcctcctgccttagtctccccrgtagctggggctacaggcaagtgccaccatgcctggctaatttttaagttttttgtagagatgaggtctccctgtgttgttgcccaggctggtcttgaac

SEQ ID NO: 208049 - DNA, 201 bp, Homo sapiens
aaaataaaggcctggaagcagcactgggggtggctggcaggtgaggaggaaggagctgcctccattctagagagcagtgaggactgcagagtcctgggggvggccagctgggcttctgtgatggcaaagaggggaggggccagagggtactccttaaagaggctggggatccagaggtatttatggtacagtgatttgaga

SEQ ID NO: 208050 - DNA, 201 bp, Homo sapiens
ggcaggctctgccctgtgtcctgtgatgaggattctttgtttcctggaagaaaggaaatcactcaggactgtggagtgaaatcagctcactcagtggggakgccagtgtcccccgccccctgtttcctcacctggcccagcctgctgtcaggaggatttactctgtattcagatcaggggattgtggtttcttaagaagtg

SEQ ID NO: 208051 - DNA, 201 bp, Homo sapiens
ctgaataatattccattgtatggctgcaccacagtttgtttatccattcacctgttgaaggacattgttgtgggaagtcagggaccctgaatggagggacyggctagagctgtggcagaggaacataaattgtgaagatttcatggacatttatcacttccctaataatactcttaacgcctgtcttactttaatctctta

SEQ ID NO: 208052 - DNA, 201 bp, Homo sapiens
gcccctgctgccttctaagccctatttgggttgggatttcctaatatcctcttcccattcatcagtccactttctctcagaggaacaggcaaccttgaacmctggaagcaattctagtaagtgaagcccaggcgctgtatcaagttggaggtgttggagcaatcaacggcaggtctgagtggggcggcaggctctgccctg

SEQ ID NO: 208053 - DNA, 201 bp, Homo sapiens
ggccccaaacaagccacagactaaaattgttcctccgttacccaagcccactcctccaagaaggtgtttgagtgtcagcaatgttaatttccaggctgctygtaacaagactctccaaagatgtctggtggcgggtggggagtaggtgcccaccagcccctgctgccttctaagccctatttgggttgggatttcctaata

SEQ ID NO: 208054 - DNA, 201 bp, Homo sapiens
cctgccaatcaggctggtgggggctagacatgtcaagacattgggtggtactgtggatgtgacacgtgtaaactcacactggtggccaagaagatgagttsaacaccacattagggaataagacaaaagtccacaatgtggagactttttgtaacaggtttaattgttctggaaattcaggatgatttagcatagtctgat

SEQ ID NO: 208055 - DNA, 201 bp, Homo sapiens
aaaggcagcgccatgtcttgtgtccaacccaggcctctgggatgctaagctggtgtggctccctggggccagtactcaaggaggaccctggcttttcactstcctcccaagtggtgaaggtgaaggtcgtatacagttctcagggcacatggagtaggcagtttgtcctacacaggtttgtggaaagcctgggtttcctgc

SEQ ID NO: 208056 - DNA, 201 bp, Homo sapiens
gccatgtgccaagctctgcgatatgtgttttgtgttcactcttatttgatcttcatacaattttgtgagatcattttgtatatgaggaaatggtgggccarggacatcaagtcccttgccaaagtcacataaatagaaagtgctgggaccaggatcctacccgagctctgatcccacagccataatgggggcattgcgggt

SEQ ID NO: 208057 - DNA, 201 bp, Homo sapiens
acggagctgtctggccgagcatagtggctcacacctgtaatctaagcactttgggaggctgagatgggcagatcacctgaggtcaggagtttgagaccagsctggccaatgtggtgaaaccctgtctctactaaaaatacaaaaattagccgggcgtagtggcgggtgcctgtaatcccagctactcaggaggctgaggca

SEQ ID NO: 208058 - DNA, 201 bp, Homo sapiens
gtaattttataaagtccagtctacgactataaaggaaattaaaaatttgggctttaatcttgcttctctttattactaaaatactggttacatatatgctrggagaccttacattcctagactttctacttaggtaaacatgaaccgtatcacccatgagtaacttactgtttacacacagaaaactcaacttttatcatc

SEQ ID NO: 208059 - DNA, 201 bp, Homo sapiens
ctaatgatttcaaattctcttagaacacagctgaattgttactttttaaaaacccatacaaatagttgctctaataataaatagcaaaaacattttttaaraactttcttcgcactttttttttttttgagacggagtctcactgtctcccaggctggagtacagtggcgcgatctcggctcactgcaagctcttcttcct

SEQ ID NO: 208060 - DNA, 201 bp, Homo sapiens
acttgaacctgggaggtggaggttgcagtaagtggagatcatgccactgcactccagcctgggcaacaaagcaagactgtctcaaaaaaaaaaaaaagaaraagaataatgaacaactgtatattcttcatttggattccccagttggtaatatttggccatatttgctttatctttctctgccagtgtatagtcatgcac

SEQ ID NO: 208061 - DNA, 201 bp, Homo sapiens
atctcctcactttccaggactccctgcctgcctgtctcttccgtctacactggacaccctgtttttctgtcctttgtttctagcaagactgaggattgggratatttaaatgaagatggagaactcggcttggcctaccaaggcctaaagcaagttgccaggtggaacatattcctttcttcctgtgtctgctttgtccgt

SEQ ID NO: 208062 - DNA, 201 bp, Homo sapiens
ggacatactcagcagtctcagaagctgggccccctcagacctattaagtcagagcctgagactgagtcctgaacatctgcattttgacaagtttccccagrtgatttaaaaatgcatcctgccttaaaatcattaccctgaaggcatgtgttgccccctgggtaaactacaagccacttcgtcacatccaagcagtgatag

SEQ ID NO: 208063 - DNA, 201 bp, Homo sapiens
tcagtgtctctctggtgtgggaaaggaggtgggtggagcccaggatccctgcacttgttccctttcagcgctgatgcgctctacttccggccctccccaaraatcactgcagtgggtgcctacagtcctccagtgagctgtgcctttgggttaaagcaccagccatgaaaggccgtagtaaaatgcaggcactaacatctg

SEQ ID NO: 208064 - DNA, 201 bp, Homo sapiens
agtagaagacagagaaaaatataccagttctacagcttgcatatttttttttaacctcctgaaggtttttagcatttcactagagatgtgggcttcatccygagaatcggtatccaagcagagataatctctcagtgtagcaagtgtttgtccaggcttgcctaacctgaggggtagcagtaaaggtaaaacaattgtccc

SEQ ID NO: 208065 - DNA, 201 bp, Homo sapiens
gtggttgattgctaaaaggggtaaatatataccagttcctccagggatggaaacactaatcaacaggtataaaagccacatgattcttgctattgcaaggsaaagaacccacttgcttttactttctgctctcccacatcttgcctgtaaaggcttaagtgtggcttgatggtttggtaggaagtgtttcctttcagaagg

SEQ ID NO: 208066 - DNA, 201 bp, Homo sapiens
acgtcagatggcttgtgagtgatagagttgcatggcatggtggcaggtgaaattcataatttccccatctggtttctgaggggctgtacctggtgggatgrggtgagtgctgacttgtcagcctggagagtgcctggcagcattgggagggtaaggtttagaggatctgggttttatcaattacctaacttctttagcctc

SEQ ID NO: 208067 - DNA, 201 bp, Homo sapiens
ggtccagcggaaagagaaggatttccagggcatgctggagtaccacaaagaggacgaggccctcctcatccggaacctggtgacaggtaaggaccctctgwgccaccctatgctgcctgcccctccttcagcccctgctcccatctccatccccagcacaacccccacaccccttccttcacctcctgcacagcccccacc

SEQ ID NO: 208068 - DNA, 201 bp, Homo sapiens
aaaggtggaatttcatctgtgatcagctggccttcagtgtgctggaagaagcgttggcaggctgcatactagaagcatgtaccattctgtgtgctagaagrcaacatgtttaaagtgactggcaggtgttgctacactggtaaacgtatgcctctcttgggggagcctgggtggcacgggttggcataatatggtggtttg

SEQ ID NO: 208069 - DNA, 201 bp, Homo sapiens
tggtggtcaatatgaatgatagaatcattgctgactttcttttttaaactttcttttccaaaattttcctgctgtcattactttttctagttttgaaaatmgacatgttcttcaattaggctctgtgtagtgctaacttctgcaacagtggtctctctgaacacaagatgagacaatggggattctgtagtggcatcgggg

SEQ ID NO: 208070 - DNA, 201 bp, Homo sapiens
gctaacattacacagttgaccaaagagctgtgatacactaccattcccagactcccagtaaagaggggcaggaccagatggggagaacactggaggctgayccgaatggagcatggggaaattttccaggtgatgaaaatgtcctccatctgtgtttgcatattcacagaacatctcgatataaaaattctctatcaaaaa

SEQ ID NO: 208071 - DNA, 201 bp, Homo sapiens
gctccctcccctccagtcttgtgccccatctgccacaggccactgcaacaggccacctccctgctctgtaccaacccagtccagcatcgccctgcagagcmaggaagagtcttagaggagagagtcctgtgggaaagaggagaaatctttggtggtctgatcctctggaccctgagccagcagctcccttctttatggcac

SEQ ID NO: 208072 - DNA, 201 bp, Homo sapiens; identical to SEQ ID NO: 36640

SEQ ID NO: 208073 - DNA, 201 bp, Homo sapiens
gacaattttatgatattttaggatctgtcattcttttttaccccatgtaaacatttcctccagaaatgagtattcaaacaagatggagtaagttaattgcrtagaagccaggaagaaaagctgaataggaacatccagagaagtctaaaattgtcctaccaagctcaattttcacactgacagccaaatcagatgcaggaa

SEQ ID NO: 208074 - DNA, 201 bp, Homo sapiens
gagtattcaaacaagatggagtaagttaattgcatagaagccaggaagaaaagctgaataggaacatccagagaagtctaaaattgtcctaccaagctcarttttcacactgacagccaaatcagatgcaggaaaaaaaaaagtatttttaaatgaacagtataaatggtaaactatttttaatatgctactattttcata

SEQ ID NO: 208075 - DNA, 201 bp, Homo sapiens
aacaagatggagtaagttaattgcatagaagccaggaagaaaagctgaataggaacatccagagaagtctaaaattgtcctaccaagctcaattttcacaytgacagccaaatcagatgcaggaaaaaaaaaagtatttttaaatgaacagtataaatggtaaactatttttaatatgctactattttcataaaatttgag

SEQ ID NO: 208076 - DNA, 201 bp, Homo sapiens
tcctggacatctatgggtaggcctgccgcctgtctcgctctatctgctacctgggagtggcttcctgctcatactttacagccagcaggggcattggagakcttcctggtggttctcaacttagggcagtttaaaatgtgtggggccatttttagttgattagttgacacaatgatggggcctgaggccagggaggcttag

SEQ ID NO: 208077 - DNA, 201 bp, Homo sapiens
ctaaaagtagaacaataactttacatctcatgaaagactccacatctagacaaaaattatcacaattttaatatacatattaaaattacaagaatacatamctgcttaaacatgatgtaaacctgaaaaggactaaatattttcaaaaataacttgtttcaagcaattttgtagcttacgtgaaggacattttttatccca

SEQ ID NO: 208078 - DNA, 201 bp, Homo sapiens
aaatccttgtctgctaatttcagtgtctgggtcttcttgggattggtctctgttgattgtcatattttttgtttcctcatatgtggattaactttgaattrtattatgaatattgcagatggaacattgtggagactggattctgttataatcctgcagacagaactgacttattgattggttggctatttattttttgta

SEQ ID NO: 208079 - DNA, 201 bp, Homo sapiens
tatcatatatacacacacaaatatatatatgatacatatatttaaagatgtcaatgatgtgatcattgctaaaggaaagagaatgacaatggacacagaartcactaggccttgcatttgaacttgatgctgttcatcttgccgttgtgtatcttcacatccagaaaaagcagtgacttttttcctttggcagttatgtct

SEQ ID NO: 208080 - DNA, 201 bp, Homo sapiens
cccccacaccacagacccgcgccgccgacgacccagcagccgccatggctctgctccgaggtgagcgcagccccctcctcctctcctcgcccctcggggtyctgccctccccaggccaggcctccgcttccggccgccgcggagagtcggggtcgtggggtgaagttcactcaacctcctcggttttggagcggacgtgat

SEQ ID NO: 208081 - DNA, 201 bp, Homo sapiens
tctcttgagcttcactttgaagattttcctcttaaaggtgagggagcctttcttgggagagttttatctctgagggtttgttttctcacagaaatccacckaaaggagaattcacatttgatgctgggtccttcggggagcgacatctttacagccattttcccagaccccatagtgggtactgaactctcttggtccctc

SEQ ID NO: 208082 - DNA, 201 bp, Homo sapiens
cctcaggggtggcacacaggagagtaagagtggatgggcaattctgagatcttagtgaggctgatggttagcatgagaaccagggctggggagtccgtggrcacctacctgcattggggggcgagaccagcaaaattaaggcttaagcctgtaagtgaagtgtctctgatcttatagttgaccctccacacccagcctccg

SEQ ID NO: 208083 - DNA, 201 bp, Homo sapiens
aatagtaagaagacattagttgagccgcaagctgccaagatagcatcaggtttccatgcggagccctgagccccatcgactaaggcacaagtcaccatggrgtttggtctttcagatgattttggagcttagggaaacaagaacctgcctggactttccccagtcccctctttctctcttcctttaccaagtgcaggcata

SEQ ID NO: 208084 - DNA, 201 bp, Homo sapiens
gagctgtatacttaaaaatggttaaaatggtaagtattatatatatatatatacttcaatatttttaaaagctagtatgttcatcattctttcgagtgctycctacatgctaggcaccctgctagatttacattcaatatctcatttaatcttacaaccatcctatgaagcaagaactattattattattcccattttaca

SEQ ID NO: 208085 - DNA, 201 bp, Homo sapiens
aattaagaatcattgtacctaactcagagacttagaactagtccgagactctagttagagtgccctggtgtagcacagcaggttgctatagagccggtccmaaacaggcaaatgtgacagcagttcttttagcagtgcagcaagttgaagaaatgtgatatttaaaaaattaaactgttaaagcaagtggaaactcttatt

SEQ ID NO: 208086 - DNA, 201 bp, Homo sapiens
ttgaagcatcccagatgaataagtggggagaataagttattaagtatctagtgggaactggtttgttaatctaacttacaagaatagtggttctcagttcyatgattacctaatgactagcaatccttagccctgcagaatagctgcagaccaaaaaaaaacggggaaagccatgacttgaaaagaatagtactggttctg

SEQ ID NO: 208087 - DNA, 201 bp, Homo sapiens
tttgttaatctaacttacaagaatagtggttctcagttctatgattacctaatgactagcaatccttagccctgcagaatagctgcagaccaaaaaaaaasggggaaagccatgacttgaaaagaatagtactggttctgaggaaatacacagctatagaaagacagcactccctggaactcctcaggggtggcaatggta

SEQ ID NO: 208088 - DNA, 201 bp, Homo sapiens
aagaagaggtggagaaacatttaaagatggttatatacattccacacttttggaatatttatttgaaaattttaggtgattaagcatgtgatgcctggcaytgggaaataactaatagaacaaaggaaatctatttaacttgatagcgaaggggtaggcacaggtgtgatttcctctatgataatctctcacacaggaaac

SEQ ID NO: 208089 - DNA, 201 bp, Homo sapiens
ctgtacctccttttgagaactaatattccaacacagtcatctccctctaaatcccagatcctgccacttccaaatgcagtctcaacagcaggaacttaaasgaaaacctagcttttcaaataacatacaaattcttcagactaaaccttgattacgtttgtatccagattatagcacagtgccagcttaggtacaaatctg

SEQ ID NO: 208090 - DNA, 201 bp, Homo sapiens
ttggagcagttctttgtgcaggatctgctggtcagtgctagagaaacagtggtgactgagccggagaagtccttgccctcatctgacagagagctagtcartgagcagttagggaagaaacatgtgatatgattgcaggtcctgctaagtgctataaagaaaaataagagaccatcagcaatagagaatgctggagcagag

SEQ ID NO: 208091 - DNA, 201 bp, Homo sapiens
tcggccatttgtatatcttctttggagaaatgtctatttcagttctttgcccgtttttaaaattgggttgtctttttattgttgagttgcaagtgattttkatatactcatgctatgagtcatgtatcacaggagtccccaacccctaggccatggaccagtagtggtccaggaaccaggccgcacagcaggaggtgagtg

SEQ ID NO: 208092 - DNA, 201 bp, Homo sapiens
gtatttccctaataagatactgagtgtcttttctgtgtttatcggccatttgtatatcttctttggagaaatgtctatttcagttctttgcccgtttttaraattgggttgtctttttattgttgagttgcaagtgatttttatatactcatgctatgagtcatgtatcacaggagtccccaacccctaggccatggacca

SEQ ID NO: 208093 - DNA, 201 bp, Homo sapiens
tcctggggggttggcatggcaaccggaggaggcttggcttggggaggcttgggattcagcaaggcgccagagagcctgacctgggaggagtcttgccttgmgagaatggactctgactcatcatctcccacttcctgagttccagagcaggtggcaacagcctgtgaagagcagctctcctggcagcgtccctgactggcg

SEQ ID NO: 208094 - DNA, 201 bp, Homo sapiens
gcttctgtatgtgtttcatataccctaaatctactctataaccctaaatccactcatctcctttttagtttgcctccctcttctggtgtttgtttttgttytttgttttttgttttttttgattaaaaactttcagctttccaaagtctgttgcctgttgtaattataccaaaattgaggactggggaaaagattgagcag

SEQ ID NO: 208095 - DNA, 201 bp, Homo sapiens
aattctcctgcctcagcctcccgagtagctgggattacaggcgtgtgccaccaagcccagctaatttttgtgtttttaatagagacagggttttaccacaktggccaggatggtctcgatctcttgacctcgtgattctcctgtctcggccccccaaagtgctgggatgacaggcgtgagccaccactcccagccaatagt

SEQ ID NO: 208096 - DNA, 201 bp, Homo sapiens
aattttgttaaggattaacattaatttgtcagatttcagtcaacaagaagaaccggctcctaggtttttattagcacccatcccagtacttggcaggaggktttcgctcgacagatcatagctctcctactgctcctagctttgttgggaatgtttgtgtattttttcaaggcaagtagacagggctgctaaattacctta

SEQ ID NO: 208097 - DNA, 201 bp, Homo sapiens
gggcctggtggtgggtgtctgtagtcccagctactcgggaggctgaggcaggagaatcacttgaacccgggaggcggaggttgcagtgagccgaaatcgcrccactgcgctccagcctgggcgacaagagcaaaactctgtctccaaaaaaaaaaaaaaaaaagcaatatcattagtttatgttgtccatgaccagcacac

SEQ ID NO: 208098 - DNA, 201 bp, Homo sapiens
catgctcggccccaaaccaccctggaacagttacagaaacttcctccagtattcaagaaagatggaactgttactgcagggaatgcatcggttggtatcaycacacagattagcttgaattcttcctggtgtgttcaacaaaagtaatcatgaagtatcttgtaaatactttttatgccagtctttagttgtttagcttaa

SEQ ID NO: 208099 - DNA, 201 bp, Homo sapiens
gagagcagtgcagcaactcagagcctgcggggtattggagacgattcgaatcagtgcagctggctacccatccaggtaactaacgtgcccgccagctgccycctggggctgccctagagcagccagagtttggttccccagggagccctctgtgtaccgtcggccagaaacagatccttcaaaacggttcccaaacattga

SEQ ID NO: 208100 - DNA, 201 bp, Homo sapiens
aggttagcagtcacatcctcttggctgcttttctctaaagtccttttcagatttcagatttttggtgttggtctaagtgatgagctagctagagttgcaargaggatttccccttctctcaattcctaccttgtcccctttaccattcccccaccctttctaacagtaggaaaatatatgtatttaccatcttaactactt

SEQ ID NO: 208101 - DNA, 201 bp, Homo sapiens
aagttgcccacttggccctcttccaagtgtactttacttacttttattcctgctctaatacttcttaataaactctcactcctgctcaaaaacttgcctcrgtctctcactctgccttatgcttcattcctttgaggaggcaagaagtgagttgctgcaggccagtacggatttgccactgcgaacaatttcattcatctg

SEQ ID NO: 208102 - DNA, 201 bp, Homo sapiens
ccgactctgctgagcactgtgcctagggccgagggacccaggaagaacagattgtgacatctgccttaaacagatttgctccagctgtttggtttgtgtgkttttagtagcctgcttcttagatgtattttgctcttttaaaaagcttaatctcccctacagttgtccagcaattaattaaatgtggtgtaagtttatctt

SEQ ID NO: 208103 - DNA, 201 bp, Homo sapiens
agtgcttattaaatcctggtggaaccaaattatattgtctcacatgtacatacatgtgcttaaaaatccacatggatgtgctcatacacattacccattcmcaggcagatagacgtgtttgtacacccctatccccacgcattggagtcctggagggcaaactcaggcatgaatccaaaaggaacaaaatctgggaaatag

SEQ ID NO: 208104 - DNA, 201 bp, Homo sapiens
aaaggtgagggagcctttcttgggagagttttatctctgagggtttgttttctcacagaaatccaccgaaaggagaattcacatttgatgctgggtccttyggggagcgacatctttacagccattttcccagaccccatagtgggtactgaactctcttggtccctcctgagggtgtccccaccctcacggccacgaagc

SEQ ID NO: 208105 - DNA, 201 bp, Homo sapiens
gctagaatctccaatgttgaatagaagttataagaaatggatatctttgtcttattcctgattatagggggaaagcatctggcctttcaactttacatatratgatagctgtggatttttttttttttttttttattgatcattcttgggtgtttctcgcagagggggatttggcagggccacaggacaatagtggaggga

SEQ ID NO: 208106 - DNA, 201 bp, Homo sapiens
tattctgggaccaaatgcagtgtttacagtttcctgcaacgtggatttcatttgccagtgcccttcctgactgaatttactacatttacttcataaagcarcgtggtgaattttttttagacgaggcatttacacttcatttaaaaggtgcattgtcatgagctatcttctaaaaaaggaaataatatttttactgatatc

SEQ ID NO: 208107 - DNA, 201 bp, Homo sapiens
gctggaatcttaccccaggtctctgaaatttcttccatccttctggattaataatataatagtaacaataactaccgccacccatatatgagtttttcttyatcacacatccacgacttgttaaaactaaccaagcactggcttttgtctctctagttccgtacctccctgcatctgctcatggagaccctgaatgccacg

SEQ ID NO: 208108 - DNA, 201 bp, Homo sapiens
gagagttttatctctgagggtttgttttctcacagaaatccaccgaaaggagaattcacatttgatgctgggtccttcggggagcgacatctttacagccmttttcccagaccccatagtgggtactgaactctcttggtccctcctgagggtgtccccaccctcacggccacgaagcgatggtggtgcttctcagtggac

SEQ ID NO: 208109 - DNA, 201 bp, Homo sapiens
gtctctgcaagaccccttggcttggcgtaagttttgtgcatttgtctgagaatggagggtgcagatttgcatccagttgtccacactcttctgccccattkttgggccattgcatttaaaatgacctcaagaggagattttttttttaaagtccaatgaataatttgttaaggtgtgaataaatgatggtaaaaaccatac

SEQ ID NO: 208110 - DNA, 201 bp, Homo sapiens
cacctacaccttctattgtgaactcagtgagggatgagttcaccaaggggattgtgctacagcattcatgagggatccacccccatgacccagtcacctcycaccaggccccacctccaacattaggaatcacatttcaacacgagatttggaggaaatgaacgtccaaaccatatcaactaccatgagtcagtctatctc

SEQ ID NO: 208111 - DNA, 201 bp, Homo sapiens
cagttttgggaaatttttagcctctgaattttcagggtgttcaaatgagatttcagtttggtgttaaagattgttaagttttagaccttttagtatccacrtaaaattgacatcaaatgaaaattgacatggtatacaatttatgaaattaaaaaaaaaaaactttaaacctttatagtctatctgcacatcccagattat

SEQ ID NO: 208112 - DNA, 201 bp, Homo sapiens
attcccaccagcagtgaatgaatttctgttgttccacatcctcaccagtgtttggtgttgtcagtgtttgggattttagcctttctaaaatccaaaagacyaatagttgtgtagtagtatctcattgttttaatttgcaattccctaatgacatacaatgttgagcatcttttcatatgcttatttgccatctgtatatct

SEQ ID NO: 208113 - DNA, 201 bp, Homo sapiens
aggtaactaacgtgcccgccagctgcctcctggggctgccctagagcagccagagtttggttccccagggagccctctgtgtaccgtcggccagaaacagrtccttcaaaacggttcccaaacattgaggcccaagcaggatgctgatggaaatgagactctcacattagcctgaaaaattgggaaggttagcagtcacat

SEQ ID NO: 208114 - DNA, 201 bp, Homo sapiens
gccccaaaccaccctggaacagttacagaaacttcctccagtattcaagaaagatggaactgttactgcagggaatgcatcggttggtatcaccacacagwttagcttgaattcttcctggtgtgttcaacaaaagtaatcatgaagtatcttgtaaatactttttatgccagtctttagttgtttagcttaaactaatag

SEQ ID NO: 208115 - DNA, 201 bp, Homo sapiens
gttggtctaagtgatgagctagctagagttgcaaggaggatttccccttctctcaattcctaccttgtcccctttaccattcccccaccctttctaacagwaggaaaatatatgtatttaccatcttaactactttttaaattttttcaataggttttttgggggaacaagtggtgtttggttacatgaataagttcttca

SEQ ID NO: 208116 - DNA, 201 bp, Homo sapiens
taaaacaaattttgaatagaatacaaagcatactgtacctccttttgagaactaatattccaacacagtcatctccctctaaatcccagatcctgccactkccaaatgcagtctcaacagcaggaacttaaacgaaaacctagcttttcaaataacatacaaattcttcagactaaaccttgattacgtttgtatccagat

SEQ ID NO: 208117 - DNA, 201 bp, Homo sapiens
tgtaaaatcagtgtgtttcttaatacattgtttgggtacggtaaaaggagtttttattactgtttgtttttaaataggaaatttgtgttaaagaagctgargttgttttatgtggaggaaccgaaagcatgagccaagctccctactgtgtcagaaatgtgcgttttggaaccaagcttggatcagatatcaaggttggaa

SEQ ID NO: 208118 - DNA, 201 bp, Homo sapiens
ggaggatctggatcaagaattactgcacacctggttcacgaattaaggtatttgctagaaatagctgcatttcagatttgctgttttttatagaaatgcayggatttaggcttccccagaacactccaacatttttcattcttcttcatgtctcctgcactggctgttaccaggaacaagttacttgggcagtgcttttca

SEQ ID NO: 208119 - DNA, 201 bp, Homo sapiens
gagtgggctgggattgagtatcccatctgcaggagcatggtttgggcagggtgggtcagggcatcagttccctgagtcttagagtcttatggggcaagccrtggctgacaggggtgagagagattccaagaccccatggagggcctccttggaagagaggatgctgaaggggtcctttgtctcaaagccagcgattagatt

SEQ ID NO: 208120 - DNA, 201 bp, Homo sapiens
aacaaacttacagtttgtagtgatgaaacccaaaactcaggggtgcacaatattctagggcatgtgtaagagcttgattgtgaggaattccaaagaagagrgaagtgagatcaacagtggtcaggaaaggacagacttgagccaaacctggacaatggtatctaggtgagtttagggagggaaggtaggctttcctgtggc

SEQ ID NO: 208121 - DNA, 201 bp, Homo sapiens
ataactcttttcatcttttaaaactgaagcccgtacccattaacaacttcccagttcctcctcccccaacctctggcaaccacaattgtactttctgtctytctgcattagacaattctaggttcctcatgtaagtagaatcgtatagtatttgttttttgtaattggcttatttcacttaacatttgtgtcctgatggtt

SEQ ID NO: 208122 - DNA, 201 bp, Homo sapiens
tgccctgatctgattactatacactatatatgtcaaaactaggtaccccatgtatgtacagttattatgcgtcaattaaaaaataaaaatttaaaaacttmttttcactcagaaatgtgatcctttgtatgggtcctttgtcaagtaagagcttggtgactacggctgggtgcggtggctcacgcctgtaatcccagcact

SEQ ID NO: 208123 - DNA, 201 bp, Homo sapiens
tcaaaaaaaaaaaaaaaaagaaaaaaaagaaagagtgttaatgtatataacccctagtaaaagtaataaaactagataatgtctgagccctatatgctggrcacttttctacatgcttacatggattctctcattcagtcctctcctcagcccttgttctcaggaggaagggaagtctcagcaagtgtagagctcaggatt

SEQ ID NO: 208124 - DNA, 201 bp, Homo sapiens
cgggtggatcacctgatgtcaggagttcgagaccagcctgaccaacatgctgaaacgctgtctctactaaaaatacaaaattagctgggtgtggtggcacmtgcctgtaatcccagctactcagaaggctgaggcaggagaatcacttgaacccgggaggcagaggttacagtgagccgaggttgtgcctttgcactgcag

SEQ ID NO: 208125 - DNA, 201 bp, Homo sapiens
cagggagccctctgtgtaccgtcggccagaaacagatccttcaaaacggttcccaaacattgaggcccaagcaggatgctgatggaaatgagactctcacrttagcctgaaaaattgggaaggttagcagtcacatcctcttggctgcttttctctaaagtccttttcagatttcagatttttggtgttggtctaagtgat

SEQ ID NO: 208126 - DNA, 201 bp, Homo sapiens
ctatgcctaatccctgacttgagctcaagggtaactcagtggctgtaactcagtggcagcaggtacttcacatgctgcaggaaaagattcttttttgtttyttttttgcaaatgtggccactcatctcttgtcttgctttttttttttttttctcctttggcagctttgacccaaagagagcagtgcagcaactcagagcc

SEQ ID NO: 208127 - DNA, 201 bp, Homo sapiens
aaattttgaatagaatacaaagcatactgtacctccttttgagaactaatattccaacacagtcatctccctctaaatcccagatcctgccacttccaaakgcagtctcaacagcaggaacttaaacgaaaacctagcttttcaaataacatacaaattcttcagactaaaccttgattacgtttgtatccagattatagc

SEQ ID NO: 208128 - DNA, 201 bp, Homo sapiens
gcaggtacttcacatgctgcaggaaaagattcttttttgtttcttttttgcaaatgtggccactcatctcttgtcttgctttttttttttttttctccttkggcagctttgacccaaagagagcagtgcagcaactcagagcctgcggggtattggagacgattcgaatcagtgcagctggctacccatccaggtaactaa

SEQ ID NO: 208129 - DNA, 201 bp, Homo sapiens
atggactggtagtcatcgagcttgctttccagagaggaaaccgggactcaacaaggtggcatgagtgctggacccagctccctcagccaggtggtggcggrgcaggagccagaagccctcatgctgcttctccttgccgcctgctgaggatgtagtagaggtactgttgcaccaagagcatctcttcttggaaaaagaaag

SEQ ID NO: 208130 - DNA, 201 bp, Homo sapiens
ttagccaggcgtggtggtgggcgcctgtagtcccagctactcgggaggctgaagcaggagaatggcgtgaacctgggaggcggagcttgcagtgagccgaratcacgccaatgcactccagcctgggcgacagagcgaaactacatctcaaaaaataaaaataggttagatggctaattttgtgttttatattttttacca

SEQ ID NO: 208131 - DNA, 201 bp, Homo sapiens
atccattactgtttactgtggctagatttgtgagagccattttcacaactttagcttgttttatggaacacggatcagttttactggcttaaaatcttacagagttatagaatggtggtatagtgttgactatatatagaatttcaatgaacccttattcaaaattgtgccgcctccagtggtaacgctcatcccgtgtga

SEQ ID NO: 208132 - DNA, 201 bp, Homo sapiens
tatccattactgtttactgtggctagatttgtgagagccattttcacaactttagcttgttttatggaacacggatcagttttactggcttaaaatcttacagagttatagaatggtggtatagtgttgactatatatagaatttcaatgaacccttattcaaaattgtgccgcctccagtggtaacgctcatcccgtgtg

SEQ ID NO: 208133 - DNA, 201 bp, Homo sapiens
gaggggaaatgatcctctctttggctttgactcccattcctctgagcctaggtgtctagggtatttaagcaacagcaagccagatatggggcttcctgtgrttgaatgggaatacggcaactcaggtgattgttaaagtgcccccaggaagtgttcacccaggcatgaggaatcgcctaactgtgctttgcttttctgcag

SEQ ID NO: 208134 - DNA, 201 bp, Homo sapiens
taaagtaattctgttcatcttagaaaaattttaaaatacaagaaaatctagagaatttttaaaaaatccatattcctgccacttaaaggcagtctctgatrttatttggatatttatttctaatgctttttatatgcatatttatatagttgttatatatataattttttattctgctttttttctcactataacgagcat

SEQ ID NO: 208135 - DNA, 201 bp, Homo sapiens
tgtcttttcagtcttctgaccatttctgaattatgctgtttggggttttgtgttgagttttaggagttctctacatattctagatattaatcccttatcaratacatgattggcaaatagtttctcccattctgtgggtcatctttttattctgatagtgtcttttggtgtacaaaatgtttaaattttcatgaagtccaa

SEQ ID NO: 208136 - DNA, 201 bp, Homo sapiens
agggccacagagggagaggtttgcatttgcagatgtctcagggttctctgcatcagggcggtcaatactctctccctgacactgcctgtttcctcttgctscccaggctggctgagcacctgcggaggatcagagcggctgtggtgctccagaaacattaccgcatgcagagggcccgccaggcctaccagagggtccgca

SEQ ID NO: 208137 - DNA, 201 bp, Homo sapiens
gctattgtgaataatgctgtactgaacatggatatacaagtatctctttgagaccctgctttcagttcttttaggtatataccccaaagtggagttgctgratcatgtggccatcctattattaatttttggaggaactgctatactgttttccatagcagctgcaccattttacattcccaccagcagtgcacaaggatt

SEQ ID NO: 208138 - DNA, 201 bp, Homo sapiens
caccacgcctggctaattttttgtatttttagtagagatggggtttcaccgtgttagccaggatggtctcgatctcttgacctcatgatctgcctgcctcrgcctcccaaagtgctgggattacaggtgtgagccactgcgcctggcctcttcacacttttaattcttactcctctttgagtagactacaatttttgttta

SEQ ID NO: 208139 - DNA, 201 bp, Homo sapiens
ttttgcaaatgtggccactcatctcttgtcttgctttttttttttttttctcctttggcagctttgacccaaagagagcagtgcagcaactcagagcctgsggggtattggagacgattcgaatcagtgcagctggctacccatccaggtaactaacgtgcccgccagctgcctcctggggctgccctagagcagccagag

SEQ ID NO: 208140 - DNA, 201 bp, Homo sapiens
gatggaaagctggtgagtgaaactggaaagtatcagtatctatagaataaatatctataggaaatattttcatcatttctattatggttatataatatttwcaaatcatacctttaagaattattacatcttttcattattcctttgtctttagatgatcagatattttattaattattgcaaaattaactaggaatttct

SEQ ID NO: 208141 - DNA, 201 bp, Homo sapiens
gagtagctgggactacaggcacccaacaccacgcctggctaattttttgtatttttagtagagatggggtttcaccgtgttagccaggatggtctcgatcwcttgacctcatgatctgcctgcctcggcctcccaaagtgctgggattacaggtgtgagccactgcgcctggcctcttcacacttttaattcttactcctc

SEQ ID NO: 208142 - DNA, 201 bp, Homo sapiens
cttttatcagtaagtgttcattcagatggtatagggattagatctcaaaaacctttatacagtactgttttcagattcaatcaacaaacgttgaatgcctmttatgtgttagctctgtcctaggcaccaaagatacagtaaaggacaagacagaacttttccttatggattttaaagtcttatcaggggaatgtcataaat

SEQ ID NO: 208143 - DNA, 201 bp, Homo sapiens
gggttcacgccattctcctgcctcagcctcccgagtagctgggactacaggcacccaacaccacgcctggctaattttttgtatttttagtagagatgggrtttcaccgtgttagccaggatggtctcgatctcttgacctcatgatctgcctgcctcggcctcccaaagtgctgggattacaggtgtgagccactgcgcc

SEQ ID NO: 208144 - DNA, 201 bp, Homo sapiens
aaaaatatcccataactgaatatgaatagtggttatcagaaagtcttaattttacttttgtttattggaagtgttgattatttaaagaaattataacatattacttttaaaaggaaatgccttaacaagtcactttattaatgtcttttaatagctggaagattctttatgggtatcattaacagatcagcatgtccagct

SEQ ID NO: 208145 - DNA, 201 bp, Homo sapiens
gtggcgcgatctcggctcactgcaagctcttcttcctgggttcacgccattctcctgcctcagcctcccgagtagctgggactacaggcacccaacaccaygcctggctaattttttgtatttttagtagagatggggtttcaccgtgttagccaggatggtctcgatctcttgacctcatgatctgcctgcctcggcctc

SEQ ID NO: 208146 - DNA, 201 bp, Homo sapiens
aaaaaatatcccataactgaatatgaatagtggttatcagaaagtcttaattttacttttgtttattggaagtgttgattatttaaagaaattataacatattacttttaaaaggaaatgccttaacaagtcactttattaatgtcttttaatagctggaagattctttatgggtatcattaacagatcagcatgtccagc

SEQ ID NO: 208147 - DNA, 201 bp, Homo sapiens
cagctgaattgttactttttaaaaacccatacaaatagttgctctaataataaatagcaaaaacattttttaaaaactttcttcgcactttttttttttttgagacggagtctcactgtctcccaggctggagtacagtggcgcgatctcggctcactgcaagctcttcttcctgggttcacgccattctcctgcctcagc

SEQ ID NO: 208148 - DNA, 201 bp, Homo sapiens
tttagtagagacggggtgtcagcatgttggccaggatcatctcgatctcctgacctcgttatctgcccacctcagtctctcaaaatgctgggattgcaggygtgagccacggtacctggccgggtttccattttatagagggggaaacaggtttatagagcccaggatctgtgtggctgtgaaacttgttgtctttgccat

SEQ ID NO: 208149 - DNA, 201 bp, Homo sapiens
cagataggtgatttgaaaatatttttttccattctgtgggttgccctttcactttcttgatggtttgaagcataaaaactttaaattttaatgaagttcartttatttttaacttggtggcttgtgcttttggcattgtatttggcttgtgcctaatccaaaggtcacaaagatttgttgccatgttttcttctgagagtt

SEQ ID NO: 208150 - DNA, 201 bp, Homo sapiens
tgagccaagactacagtctgagagtgctgtggttaacagcatgtatgccacctacaccttctattgtgaactcagtgagggatgagttcaccaaggggatkgtgctacagcattcatgagggatccacccccatgacccagtcacctctcaccaggccccacctccaacattaggaatcacatttcaacacgagatttgga

SEQ ID NO: 208151 - DNA, 201 bp, Homo sapiens
tctagatggctcacagagcagtaggtcacctgagaagatcaagacccctcgccatcctttgagcatcctacacacagtcaatatccctctgaaatggaacrtgccatctgaccagcacagagtgcatgacatcatcaccaagtgggtcctgaaatctccagtcctatgaatgccacctaagaacatgtgacttcattgcaa

SEQ ID NO: 208152 - DNA, 201 bp, Homo sapiens
ataagatgcttccttaccctctgtcttgctatgtgtgatgtacaaaatcaatcattcatatgcaggtaattgaaaattcagaattcctttaaagtatacamacatttgttggatacctagttagaggctattataggtgctatggcacccaggtggaccaaaaggaggtaataatctaatgaaaaagataagagatatata

SEQ ID NO: 208153 - DNA, 201 bp, Homo sapiens
agcagctccccagagtagctgaggcacctttaagtgagagtcgctgccttctgagttcctggggtggggagagccagtgaccccaatccttagctccagtrtgttgccattttttcctgcccctttctacctgatgccgagggtggggcagctcctcccttattaactcacctcttggtgccttgagcttaatttacagcc

SEQ ID NO: 208154 - DNA, 201 bp, Homo sapiens
ctgggccacgtgctcacctgtcctctccctggcacaggctgctggaggctcagctgcaggcccagagcctggagcatgaggaggaggtggagcatctcaargctcagctcgaggccctgaaggaggagatggacaaacagcagcagaccttctgccagacgctactgctctccccagaggcccaggtggaattcggcgttc

SEQ ID NO: 208155 - DNA, 201 bp, Homo sapiens; identical to SEQ ID NO: 36520

SEQ ID NO: 208156 - DNA, 201 bp, Homo sapiens
ggtagaaggtttgcaaggatactgcccacctgcaggtgggagggaggtggcctcccttcattgccattctgagcctacaggtggctcatgaggcctcgttygggagggtatgagtgtaaagaacaagggctggagatacagtgcagagctatggtgagacccctggggccttgtgctcctgccccattctcacctgtcatc

SEQ ID NO: 208157 - DNA, 201 bp, Homo sapiens
tgactttaatttggtctcattgctctttgaatttcattgtagttagcctttccaaatgatgtacatctaaataaatagtaccttcattagatgccttgtgwtgatacttttccccacctggttaacatgctttatttatatttgaatattcaaactgcctgatttctcttactcaagtataaattcctgggaatttcttac

SEQ ID NO: 208158 - DNA, 201 bp, Homo sapiens
agcaaactccaggtcataggcggaacccatcaaaccaaagtagcttagaatctgactccaattacccctccatctccacatctgagatcggagacactgargatgccctccagcaggtggaggtgagtgatgcaggctcttgggtactgtcctcctccagagggagtgtgtgtttttttctgtgtggaactgtccaagaga

SEQ ID NO: 208159 - DNA, 201 bp, Homo sapiens
gttcacgctagggcaatgaaaacgttgcttccccttaacatcctcctaatatctagatggctcacagagcagtaggtcacctgagaagatcaagacccctygccatcctttgagcatcctacacacagtcaatatccctctgaaatggaacatgccatctgaccagcacagagtgcatgacatcatcaccaagtgggtcct

SEQ ID NO: 208160 - DNA, 201 bp, Homo sapiens
ataggactggagatttcaggacccacttggtgatgatgtcatgcactctgtgctggtcagatggcatgttccatttcagagggatattgactgtgtgtagratgctcaaaggatggcgaggggtcttggtcttctcaggtgacctactgctctgtgagccatctagatattaggagaatgttaaggagaagcaaagttttg

SEQ ID NO: 208161 - DNA, 201 bp, Homo sapiens
tcaggttttagatcataggttgttgcaatgaagtcacatgttcttaggtggcattcataggactggagatttcaggacccacttggtgatgatgtcatgcrctctgtgctggtcagatggcatgttccatttcagagggatattgactgtgtgtagaatgctcaaaggatggcgaggggtcttggtcttctcaggtgacct

SEQ ID NO: 208162 - DNA, 201 bp, Homo sapiens
aagttaacttgagaggataaaaataaatctagcattttacaatccacgtgcttgaaaaatcaaagaaaagcagatttaaatggcctatttaaaaaaaaaaataaaaaaagctttttgccttaagcttcctgcttggcaaacatctgtgagtggtggcaggtgttagctaccctgggcaggatgccctgtgtgtagagggtg

SEQ ID NO: 208163 - DNA, 201 bp, Homo sapiens
aaaactcatttattccaagtgatatttaataatattaaactcaattagaaaagcagctttgtggtatttgtcaaatgttattcgaagcatattctgttctytcttaaccataaaggcctaaccccaaatatttatctgttaataatttacacgagatgatcgtgtaaattttttttattctgttgatatgtgatatttgac

SEQ ID NO: 208164 - DNA, 201 bp, Homo sapiens
gttaccttatatggcaaaagggactttgcagatgcaattaaattaagaactgtaggatgggaagagtatcctgggtgagccaggtgagcttgatataatcacaggggtcctcctaagagggaggctggaggatcaagttcagagaagaagtgatgacagaatcagaggtgggagggatgcaggcagccttgagaagccaga

SEQ ID NO: 208165 - DNA, 201 bp, Homo sapiens
tgttaccttatatggcaaaagggactttgcagatgcaattaaattaagaactgtaggatgggaagagtatcctgggtgagccaggtgagcttgatataatcacaggggtcctcctaagagggaggctggaggatcaagttcagagaagaagtgatgacagaatcagaggtgggagggatgcaggcagccttgagaagccag

SEQ ID NO: 208166 - DNA, 201 bp, Homo sapiens
aggcaggagaatcaggcagggaggttgcagtgagccgagatggcagcagtacagtccagcttcagctaggcatcagagggagaccgtggggagagggggargaggagggggagagggagagctgtggattttttatagattccctttgtcagattgagaaagttgccatctgttcctagtttgttcagtgtttttgtcatg

SEQ ID NO: 208167 - DNA, 201 bp, Homo sapiens
gtgttaccttatatggcaaaagggactttgcagatgcaattaaattaagaactgtaggatgggaagagtatcctgggtgagccaggtgagcttgatataatcacaggggtcctcctaagagggaggctggaggatcaagttcagagaagaagtgatgacagaatcagaggtgggagggatgcaggcagccttgagaagcca

SEQ ID NO: 208168 - DNA, 201 bp, Homo sapiens
ccagccctccagccacaattccaagaatcacattcacagtgaaattcttggagggcactggggaggacaaaactcccctgggactgttctttgctgctctragaatgactttgtgccacagtgttgaccccatagggaactgtctgaggtcacgcctggcttttgtgtggccaagaggcaggatgtgtcacctgatgcccc

SEQ ID NO: 208169 - DNA, 201 bp, Homo sapiens
ttttgttttgttttgttttgtttttttgtttttgctagtcttgctttggcaatgcaggctcttttttggttccatatgattttaggattttttttttttttagttctgtgaagaaatatggtagtattttgatgggaattgcattgaatttgtagatggcttttggcagtatggtcattttcacaatattgattctacccg

SEQ ID NO: 208170 - DNA, 201 bp, Homo sapiens
aggtcccagggaatatgctaggaggttgaatagaaagcttgggtatgaactaaagaagttaggctgtctgtggagcacacagtgggctttttagaaccggraaactgaccatctctgagctggcaggaaccttgtctgtttccccaggaaggcaggttcttaactgtggcggggccgtggttgatagatcctgtttttcca

SEQ ID NO: 208171 - DNA, 201 bp, Homo sapiens
tgagcattttttcacatgtttgttggccatttgtatatcttcttttgggaattattttctcatgtccttagcccactttttgacgggatggtttttttttygtgctactttgagttccttgtagattctggacattagtcctttgttggatgtatagattgcaaagattttctcccactccgtgggttgtctgtttactct

SEQ ID NO: 208172 - DNA, 201 bp, Homo sapiens
gagtcaagatttagtcattttaaattatcttgggttgaagataagaaatgagatgaataagaaaaagcccaggtgatactaaagtagaagggaagaagcarctgtgtgcttggtctgacaagcggtgtgcgtatctccccgatcttcagagccgtcaccattggcagcctcttttattcatgcagcggttgtcagggatcc

SEQ ID NO: 208173 - DNA, 201 bp, Homo sapiens
gagctatggtgagacccctggggccttgtgctcctgccccattctcacctgtcatcttgcctttgcaccaggcctttccccctagttctctggccttctaycaccacctgttgccttaagtctggctcagctggcatggtctggaatagaaaatggtctgacagctgcttcctgtccctccagggccttttgcaagaaagg

SEQ ID NO: 208174 - DNA, 201 bp, Homo sapiens
taaatttgttgatttcaagctttaaagattcccaggtggttccaatacccctacaaagtttgggaagcatagctctatataattccccttagcacattaaraattcagccttctgggatttgtagggggttgggggttagacacccaggcatgtcttagcacaaagccaccgttagtgacatggatcttacaatcacctct

SEQ ID NO: 208175 - DNA, 201 bp, Homo sapiens
tcaaacatcttgaaaattcacttcagaaagtatatgaattagaattatttaataagccagtgttttgctttgccatgacagacaggcatgaatcacaatgrcatcttcaaaatgtgaacctgcctccagcctcccattatttccccatggagctttctcagcaccagtctgacgggccactttgtcctttcttacctgtgt

SEQ ID NO: 208176 - DNA, 201 bp, Homo sapiens
gctgtccacagctgttttattccatacagaaatcaacacattagaaattttttgccaaatgttataagttcctaagcatgtcaacattgcacacctctggrtggtatcattgctaaagcccggagcactaaatgatttgagtggtccaatctttgcattgttagtggggaatgcaagcttctctaactgtgcttttatttc

SEQ ID NO: 208177 - DNA, 201 bp, Homo sapiens
aatcccagcttgttccagatatgcccgctcacaggttcctgtaggtcttccaacttttcttccccttcctttcacatatctcaccatccacccttcccaargtcaagacatagtgtaaaccaaaatagtgcgaccatttttaaagctttattccatcttttgtgccagaaccaattttgacagactcttctccctgggtta

SEQ ID NO: 208178 - DNA, 201 bp, Homo sapiens
cttggttttcctggtggtacctccagctttcggaaggggctctccactgctcaggagggagaactgaatgggggcaactgtgctgagaggggaaatgatcytctctttggctttgactcccattcctctgagcctaggtgtctagggtatttaagcaacagcaagccagatatggggcttcctgtgattgaatgggaatac

SEQ ID NO: 208179 - DNA, 201 bp, Homo sapiens
gcacccttggggacctcagaccgtgggcacaccttatcatgcctcgtggctggaagcagcaataaggccagccacaggagacctgcctctaggaggccttsatgagcccaaggggccccaaaaagcactcctgggttatgtaagtagagtctgcataacccatgatcaatagaggccctgggagtctccatgaaactcttg

SEQ ID NO: 208180 - DNA, 201 bp, Homo sapiens
attagatgaccataaatagtgctgagctcatctgtcttgttttaatgggatttttctttcagtacacaatttttccttgaaaacaaaagaagctttaaccmaatcgattttcttaaaaagagcatttacacgtatccagttaaaattcaaatcccacaagaggagcctctcctcttcccagcatcatgagacatttttccc

SEQ ID NO: 208181 - DNA, 201 bp, Homo sapiens
tccaccaaaaaaatacgaaaaccagtcaggcgtggcggcgcgtgcctgcaatcgcaggcactcagcaggctgaggcaggagaatcaggcagggaggttgcmgtgagccgagatggcagcagtacagtccagcttcagctaggcatcagagggagaccgtggggagagggggaggaggagggggagagggagagctgtggat

SEQ ID NO: 208182 - DNA, 201 bp, Homo sapiens
cccagcaccccgggaggccgaggctggcggatcactcgcggttaggagctggagaccagccaggccaacacagcgaaaccccgtctccaccaaaaaaataygaaaaccagtcaggcgtggcggcgcgtgcctgcaatcgcaggcactcagcaggctgaggcaggagaatcaggcagggaggttgcagtgagccgagatggc

SEQ ID NO: 208183 - DNA, 201 bp, Homo sapiens
ttgagcattttttcacatgtttgttggccatttgtatatcttcttttgggaattattttctcatgtccttagcccactttttgacgggatggttttttttycgtgctactttgagttccttgtagattctggacattagtcctttgttggatgtatagattgcaaagattttctcccactccgtgggttgtctgtttactc

SEQ ID NO: 208184 - DNA, 201 bp, Homo sapiens
gcagtatacactgtacctaatgtatagtcttttatccctcaccatcacccccctttcccccaagtcctcaaagttcattgtatcgttcttatgcctttgcrtcctcatagcttagctcccacttatgagtgagaatgtaccatcttttgttttccattcctgagttacttcacttagaataatggtctctaactccatcca

SEQ ID NO: 208185 - DNA, 201 bp, Homo sapiens
ctctcaattcctaccttgtcccctttaccattcccccaccctttctaacagtaggaaaatatatgtatttaccatcttaactactttttaaattttttcartaggttttttgggggaacaagtggtgtttggttacatgaataagttcttcagtggtgatttctgagatttcggtgcacccatcacccaagcagtatacac

SEQ ID NO: 208186 - DNA, 201 bp, Homo sapiens
aacccagatctgcctagtctgaaactcatccttttaatgcttgagccaaataatggggctaagcatatatgcttgggacagtgagtgaagatgcatgcccwtgtggataaaaacagtaagagtaggctctggagaggagcaggaatgatgagtcttggagggtggggaggattcgggtgggcaaagaagaagggtatccca

SEQ ID NO: 208187 - DNA, 201 bp, Homo sapiens
tgttttcccccattatatggatgagggtactgaggcccaaggggacatgaagtgacttgccccaaagtagacacccagctggtaagcgaccatgtcatgaytgaaacccagatctgcctagtctgaaactcatccttttaatgcttgagccaaataatggggctaagcatatatgcttgggacagtgagtgaagatgcatg

SEQ ID NO: 208188 - DNA, 201 bp, Homo sapiens
aagactccctgcttactctagacaatggtgatgtcttgctctctgccttcttttttttttcttactagtgtttttttttgagacagagtctcactctgtcrcccaggctgcagtgcagtggcacgatctcagctcactgcaacctctgcctcccggattcatgccattcttctgcctcagcctcccgagtagctgggacta

SEQ ID NO: 208189 - DNA, 201 bp, Homo sapiens
ttgccttaattctttctctatgaagactccctgcttactctagacaatggtgatgtcttgctctctgccttcttttttttttcttactagtgtttttttttgagacagagtctcactctgtcgcccaggctgcagtgcagtggcacgatctcagctcactgcaacctctgcctcccggattcatgccattcttctgcctca

SEQ ID NO: 208190 - DNA, 201 bp, Homo sapiens
gcctcacatatccccttgggatatgtgaacagggaaagatgatggcaatatcttctttgtatagtgtctcttagctttttctaaaagcattcttcttgttkttttgtttgtttgtttgtttgtttttgtaacatagtcattacagccaccactgcttcatagttgggcagatatgttgagctctcattgagtaaatgagga

SEQ ID NO: 208191 - DNA, 201 bp, Homo sapiens
tgaataggaattattcatgagagtatataaatttatgtgattacagttattagttacatcatcctagaaggaagtttctgtgtctctccacccatttcctrtaatcggagttgctcagcctcagcagcactgacatattgagttagagaattctttgctggggcaaggggtgctgtcctgtgcatcataggatgttgagaa

SEQ ID NO: 208192 - DNA, 201 bp, Homo sapiens
aattagctgggcatggtggtgcatgcctatagtcccagctactccagaggctgaggtgggagaattgcttgagcccaggagtttgaggctgcagtgagctrtgattgtgtcactgcactccagcctggatgacagaggaagactatctctcaaaaaaataaaaataagtatcctgatgaaagaatctgaataggaattatt

SEQ ID NO: 208193 - DNA, 201 bp, Homo sapiens
gagcgatcccggtaccagaaccttgtgaaggaatattcacagttggagcagagatacgacaaccttcgggatgaaatgaccatcataaaggcaaggggggygcttctgctgtgccatggcacaggtccctggctcctgtccagcttctgaccacgtgatctcaggcactgctttctgatatgtgatgctcagtccatgtgt

SEQ ID NO: 208194 - DNA, 201 bp, Homo sapiens
agtgctgggattacaggcgtgagccacggcgcccggcctatacatgagcatttgtgaagcttgtctaagatttgtacatttgattgcgtggatattttgccttaaaaagaactgtaaatgaataatgtgtgctgatgtgttcatgggtgtagagtactaaggtctgcattaaaaagataagatggtttgatggaagaacag

SEQ ID NO: 208195 - DNA, 201 bp, Homo sapiens
gaataaaccatgtacttttatagcataaatgactttaatttggtctcattgctctttgaatttcattgtagttagcctttccaaatgatgtacatctaaayaaatagtaccttcattagatgccttgtgttgatacttttccccacctggttaacatgctttatttatatttgaatattcaaactgcctgatttctcttac

SEQ ID NO: 208196 - DNA, 201 bp, Homo sapiens
tcactgcaagctccgcctcccaggttcacaccattctcctgcctcagcctccccagcagctgggactacaggcgcccgccaccacgcccagctaatttttytgtatttttagtagagatgaggtttcaccgtgttagccaggatggtctcgatctcctgacctcgtgatccgcccacctcggcctcccaaagtgctgggat

SEQ ID NO: 208197 - DNA, 201 bp, Homo sapiens
agaaaactgtgtacaaaaatgaacactctatacatgagcattttttttttttttttttttgagacggagtcttgctctgtcacccaggctggagtgcagtrgcacgatctcggctcactgcaagctccgcctcccaggttcacaccattctcctgcctcagcctccccagcagctgggactacaggcgcccgccaccacgc

SEQ ID NO: 208198 - DNA, 201 bp, Homo sapiens
ctgaatagaaaactgtgtacaaaaatgaacactctatacatgagcattttttttttttttttttttgagacggagtcttgctctgtcacccaggctggagygcagtggcacgatctcggctcactgcaagctccgcctcccaggttcacaccattctcctgcctcagcctccccagcagctgggactacaggcgcccgcca

SEQ ID NO: 208199 - DNA, 201 bp, Homo sapiens
tgatacttaacctttcttaaatatgtagaggcaaactgaatagaaaactgtgtacaaaaatgaacactctatacatgagcattttttttttttttttttttgagacggagtcttgctctgtcacccaggctggagtgcagtggcacgatctcggctcactgcaagctccgcctcccaggttcacaccattctcctgcctca

SEQ ID NO: 208200 - DNA, 201 bp, Homo sapiens
ggaaggggtcatcttcgaagatcagcgtccgttctgccagaccccccatgaaagtctccaacaaggagcacaagaaaaccgttggccaccaggtcagcccyggaccaaaagctatgggccgaggtgcatgtgcagggctggcctctctgtagatgaaggatggcggcagggtgagagggaagccatcacagcagccttgac

SEQ ID NO: 208201 - DNA, 201 bp, Homo sapiens
atctgcagtgggaagttgtgatacttaacctttcttaaatatgtagaggcaaactgaatagaaaactgtgtacaaaaatgaacactctatacatgagcattttttttttttttttttttgagacggagtcttgctctgtcacccaggctggagtgcagtggcacgatctcggctcactgcaagctccgcctcccaggttca

SEQ ID NO: 208202 - DNA, 201 bp, Homo sapiens
atcctgcgcccactttttgatggggttgtttgtttttttcttgtaaatttgtttgagttcattgtagattctggatattagccctttgtcagatgagtagrttgcaaaaattttctcccattctgtaggttgcctgttcactctgacagtagtttttttttgtttttttttttttttttgctgtgcagaagctctttagtt

SEQ ID NO: 208203 - DNA, 201 bp, Homo sapiens
gatctgcagtgggaagttgtgatacttaacctttcttaaatatgtagaggcaaactgaatagaaaactgtgtacaaaaatgaacactctatacatgagcattttttttttttttttttttgagacggagtcttgctctgtcacccaggctggagtgcagtggcacgatctcggctcactgcaagctccgcctcccaggttc

SEQ ID NO: 208204 - DNA, 201 bp, Homo sapiens
acaatggttgaactagtttacagtcccaccaacagtgtaaaagtgttcctatttctccacatcctctccagcacctgttgtttcctgactttttaatgatygccgttctaactggtgtgagatggtatctcattgtggttttgatttgcatttctctgatggccagtgatgatgagcattttttcatgtgtcttttggctg

SEQ ID NO: 208205 - DNA, 201 bp, Homo sapiens
cttaaaccaagcagggtactatgtaggataactttttagttgacaaaacaatatcgtctcccttatgatacaggagagtccatgttgtcttccaaaaaaaatgaagtactgagacttttcctccaaagcctatttaaaacccttttaaaatattcatctaaatgtcagagatttttccctccaaagggtaccattagtcat

SEQ ID NO: 208206 - DNA, 201 bp, Homo sapiens
atacaaattcaccagactgaaccttggtcatgttggtacccaaattacagcacaggagtcgcaggaacagctcacacaaggcccaggtgttcactccccttctccctcctgctgcttatggcttgacttcagcttgtcaaggaatgacaagtacacacgtccattgctttccacactgatgtgtttttaaaaggttatata

SEQ ID NO: 208207 - DNA, 201 bp, Homo sapiens
aaagagatgcctctttaaaacatgacttcaagttattaacagagtcattttctttaaatactaaaggatggaggttttcctttttttttttttccagttttccagtttttatttattgtgaaaaggaataatttatcaaccaggagaaaaagaaaactttaaaaggagaatgtttttcctctgaagattgcctattcctgg

SEQ ID NO: 208208 - DNA, 201 bp, Homo sapiens
taaagagatgcctctttaaaacatgacttcaagttattaacagagtcattttctttaaatactaaaggatggaggttttcctttttttttttttccagttttccagtttttatttattgtgaaaaggaataatttatcaaccaggagaaaaagaaaactttaaaaggagaatgtttttcctctgaagattgcctattcctg

SEQ ID NO: 208209 - DNA, 201 bp, Homo sapiens
aagtaaagagatgcctctttaaaacatgacttcaagttattaacagagtcattttctttaaatactaaaggatggaggttttcctttttttttttttccagttttccagtttttatttattgtgaaaaggaataatttatcaaccaggagaaaaagaaaactttaaaaggagaatgtttttcctctgaagattgcctattc

SEQ ID NO: 208210 - DNA, 201 bp, Homo sapiens
taagtaaagagatgcctctttaaaacatgacttcaagttattaacagagtcattttctttaaatactaaaggatggaggttttcctttttttttttttccagttttccagtttttatttattgtgaaaaggaataatttatcaaccaggagaaaaagaaaactttaaaaggagaatgtttttcctctgaagattgcctatt

SEQ ID NO: 208211 - DNA, 201 bp, Homo sapiens
aaggaaacttgaaaagattcaggaaggcatcatggtacagaataaccaatttaccagaacaaaacgtttgtaatgcactcgactagtatttatggcctttkgtaactatctgaatttgtatctgtaaaaaactgagtggatctgttctaaattatagttatatatattgctcctaatattcctttaaactgcaaatttctc

SEQ ID NO: 208212 - DNA, 201 bp, Homo sapiens
cacccttttccttgttctttagtaaagttgtattctgtgccttaaaaaatctccttcatccaccacagtaccacttttctaattgtatctcacactgtgcmctggcttcctatgtactgccatattcctaatactactagtccattagttcaaactttgattaactggattattttagcctttagttaatctagtattttt

SEQ ID NO: 208213 - DNA, 201 bp, Homo sapiens
tatgaaattagattctatctatctcagcagacctctagtagtataattatcctgtgtaagtggccataggcatgggagagatggaggaagggaagaagtgrattaaaaagatagacaaaagagtgaattaatctcactactaaacaattagtaatctgagtaattaaatctttaacgtgacttatagaagttttatttctg

SEQ ID NO: 208214 - DNA, 201 bp, Homo sapiens
ttcatacaatgtctggaaattacagataacacaagtagtttaggtcagggattgatattattattattattattattattattattattattattattattattttaactaccagggccgggtggtggcaccaggccatctggctatttatcttacttctgtttctttttaactttttgcttttttcttttcctcctgttt

SEQ ID NO: 208215 - DNA, 201 bp, Homo sapiens
cagtgtgttgccattttttcctgcccctttctacctgatgccgagggtggggcagctcctcccttattaactcacctcttggtgccttgagcttaatttamagccaggagaggaaggaaagttggcatttaagcattgtaaccagttgaaattcaaacctcatgcatttggaggaaatgaacgtccaaaccatatcaattt

SEQ ID NO: 208216 - DNA, 201 bp, Homo sapiens
ttaagtaaagagatgcctctttaaaacatgacttcaagttattaacagagtcattttctttaaatactaaaggatggaggttttcctttttttttttttccagttttccagtttttatttattgtgaaaaggaataatttatcaaccaggagaaaaagaaaactttaaaaggagaatgtttttcctctgaagattgcctat

SEQ ID NO: 208217 - DNA, 201 bp, Homo sapiens
tttcatacaatgtctggaaattacagataacacaagtagtttaggtcagggattgatattattattattattattattattattattattattattattattattttaactaccagggccgggtggtggcaccaggccatctggctatttatcttacttctgtttctttttaactttttgcttttttcttttcctcctgtt

SEQ ID NO: 208218 - DNA, 201 bp, Homo sapiens
aaggcataacttcacagggggtactatagttgcccagtcattcatatatatatatgaatacacacacacacacacacacacacacacacacacacacacayataaatacatacacacatatatgtctgtgtatatatatagtctatacacacacacatacacacacacacatgtctgtatatatatagtctacacacacac

SEQ ID NO: 208219 - DNA, 201 bp, Homo sapiens
ttttcatacaatgtctggaaattacagataacacaagtagtttaggtcagggattgatattattattattattattattattattattattattattattattattttaactaccagggccgggtggtggcaccaggccatctggctatttatcttacttctgtttctttttaactttttgcttttttcttttcctcctgt

SEQ ID NO: 208220 - DNA, 201 bp, Homo sapiens
ggtcggtgccagtggcccaggaagacagggacgagaaaagaagcagacatagaataactggccttggggtctggttttttttttttttttggctttttttrttttgttttgttttgttttgttttgagacagtgtcttgttctgtcacccaggctggagtacagtggtgtcatcacagctgtcactgcggccccaacctac

SEQ ID NO: 208221 - DNA, 201 bp, Homo sapiens
tttttcatacaatgtctggaaattacagataacacaagtagtttaggtcagggattgatattattattattattattattattattattattattattatwattattttaactaccagggccgggtggtggcaccaggccatctggctatttatcttacttctgtttctttttaactttttgcttttttcttttcctcctg

SEQ ID NO: 208222 - DNA, 201 bp, Homo sapiens
gtgaccaggaaggtcggtgccagtggcccaggaagacagggacgagaaaagaagcagacatagaataactggccttggggtctggttttttttttttttttggctttttttgttttgttttgttttgttttgttttgagacagtgtcttgttctgtcacccaggctggagtacagtggtgtcatcacagctgtcactgcgg

SEQ ID NO: 208223 - DNA, 201 bp, Homo sapiens
ttgcagtgagccaagattgcgcctctgcactccagcctgggtgacagagtcagaccatgtctcaaaataaataaataaataaataaattaattaattaatwaaattaaataagtaaaatgttacatagttctgacttttttcaaaaatgcaaaattcctaaaaggaaacccaccaagatataactggtggtcaatatgaat

SEQ ID NO: 208224 - DNA, 201 bp, Homo sapiens
ttagttctcaacatatgtttctagcattgtgaagcatcagagaacaagaaagttgtctaaccagaatggctttacatcacagtgtagcaggacgagccacrgtcaaaactcctcagacactggattaaagaaggaagaggctttatttggcttggagcatccaccaacttgcgtcttaagagccgagctccctcaaaaaga

SEQ ID NO: 208225 - DNA, 201 bp, Homo sapiens
gggagacagaggttgcagtgagccaagattgcgcctctgcactccagcctgggtgacagagtcagaccatgtctcaaaataaataaataaataaataaatwaattaattaattaaattaaataagtaaaatgttacatagttctgacttttttcaaaaatgcaaaattcctaaaaggaaacccaccaagatataactggtg

SEQ ID NO: 208226 - DNA, 201 bp, Homo sapiens
ctgggagacagaggttgcagtgagccaagattgcgcctctgcactccagcctgggtgacagagtcagaccatgtctcaaaataaataaataaataaataaattaattaattaattaaattaaataagtaaaatgttacatagttctgacttttttcaaaaatgcaaaattcctaaaaggaaacccaccaagatataactgg

SEQ ID NO: 208227 - DNA, 201 bp, Homo sapiens
tgttctgtgggctctcattagtggggccactgccgtccatttggtgcattgggcagtatagaatgagaagaggtgtgtgtgtgtgtgtgtgtgtgtgtgtktgtgaaaagaagtgtgtttgtatgaaaagaagtgtgtgtgaatgagaagagatggaaaatgtccatctcttcttcataggcttctgcccttctcacccct

SEQ ID NO: 208228 - DNA, 201 bp, Homo sapiens
ctcagtagtttttatttttaattaaagcatgagaatgtgctccatgactgccagggttgccttggagatgcaacagcattcaatttgtttcttgaatttarcaatatgggcccataaaactgatctgctacttattatattggctatttttaatggatttagcatcatttaattttgcctaaatgtaattgtacgatgtta

SEQ ID NO: 208229 - DNA, 201 bp, Homo sapiens
agcaaggactctaagtcgagatggccaaggttcatatcctgattcttcttgctggatgtgtgacttacggcaagtgtgctaacctctctgtttcctcttcwgtaaagtgtggataaccacctgcctcagggctggagtgaagatcccagaaagccctgtgtggaaaggttttagcacagagctcgtggttgagagagtctt

SEQ ID NO: 208230 - DNA, 201 bp, Homo sapiens; identical to SEQ ID NO: 36521

SEQ ID NO: 208231 - DNA, 201 bp, Homo sapiens
ctggtctcccttttctcttccttattcaccttgttccagatcctcttttcttgcctgaaatactaccttaaacctttaaaaaacatcctctcactcagctstgcagtctcttctgctctgggccttcacgcatgctgttccctctggccagaggaggtgtatttttaaattttttaagcaccttattcccatctttccttc

SEQ ID NO: 208232 - DNA, 201 bp, Homo sapiens
ctatggaggaccagaaccagaaagggaattgtcttcatgttctgttgccttgcaaatcgccggaataccctctattgagcaagcttgacattctaccagtwggcaaaggagaaatgtttacagggcccagcttcagtttgataaagcagggcaaaggggatgctttgaagctgagagataagttgataactggcatccctg

SEQ ID NO: 208233 - DNA, 201 bp, Homo sapiens
tttgtcctttcttacctgtgtcttggctctctggccctggtccatggagcccccaggcccagctctcctctcctcctctcctcctcccctcctcccctccwccagcccattctgctcctgccactctcagtgtttagttcacctgaacactgttcatctatggctttctgccatagacagtgaggacaaacaaatgggcct

SEQ ID NO: 208234 - DNA, 201 bp, Homo sapiens
aatgtcacacttggagaatttgaagtgatctgatttgtctggaactcctggtgggggcaggtaaggttggaaagtagggaccatgggagaatgagaagccrtgtccaccctgagcaggcacttgggcttcaccctgaagctcaaggtatcagcccacaggggagaagcaggggagaggggttcagatgtgaatgatcagat

SEQ ID NO: 208235 - DNA, 201 bp, Homo sapiens
ggggtggctggcaggtgaggaggaaggagctgcctccattctagagagcagtgaggactgcagagtcctggggggggccagctgggcttctgtgatggcaragaggggaggggccagagggtactccttaaagaggctggggatccagaggtatttatggtacagtgatttgagaggtcagcaggggtacaaggcctgaag

SEQ ID NO: 208236 - DNA, 201 bp, Homo sapiens
caccttgtgatcctgtgagtcaattctccttaataaactccctccctccctcccctccctcccttcctttctttcttttgcttttttttttttttttttttgagacggggtcacagagtctcgctctgtcaccaggctagagtgcagtggcaccatcttggctcactgcaacctccgcctcctgggttcaagtgattctcc

SEQ ID NO: 208237 - DNA, 201 bp, Homo sapiens
tgctggatgcttccttccattcctcctgcccttggacatcagactccaggttcttcagcctttggacccttggacttacaccaatggcttgccaggagctstcaggcgccctttggccacagactgaagactacactgttggcttccctacttttgaggcttttggacccagactgagccattcctggctgagcctgctga

SEQ ID NO: 208238 - DNA, 201 bp, Homo sapiens; identical to SEQ ID NO: 36533

SEQ ID NO: 208239 - DNA, 201 bp, Homo sapiens
agaggtatgagccaccatgcccggccaaaacatcaacaaacttctaaataaagaccaaaacacttctagaattaaacactgaaatgaaagctatatatacwtttgagaaagattaataaaaacaaatgagaaagttgcccacttattccatttaagagtcactgagggcccacctctcctggcagctcagggtgccaggga

SEQ ID NO: 208240 - DNA, 201 bp, Homo sapiens; identical to SEQ ID NO: 36537

SEQ ID NO: 208241 - DNA, 201 bp, Homo sapiens
ttttttttttttttgaaacagagtttcgcttttgttgcccaggctggagtgcaatggcacaatctcagctcaccgcaacctccgcctcccaggttcaagcrattctcctgcctcagcctccctagtagctgggattataggtatgtgccaccatgcccagctaattttgtatttttagtagagacaaggtttctccatgtc

SEQ ID NO: 208242 - DNA, 201 bp, Homo sapiens; identical to SEQ ID NO: 36539

SEQ ID NO: 208243 - DNA, 201 bp, Homo sapiens
gagaaagtgggaagctttccttagcaggcattgagacttacaaaatttcagtaattaagatgtgtgaggatgacagacatggaaattttttttttttttttgaaacagagtttcgcttttgttgcccaggctggagtgcaatggcacaatctcagctcaccgcaacctccgcctcccaggttcaagcaattctcctgcctc

SEQ ID NO: 208244 - DNA, 201 bp, Homo sapiens
ataccctaaatctactctataaccctaaatccactcatctcctttttagtttgcctccctcttctggtgtttgtttttgttctttgttttttgttttttttgattaaaaactttcagctttccaaagtctgttgcctgttgtaattataccaaaattgaggactggggaaaagattgagcagatgagctgaataaggatga

SEQ ID NO: 208245 - DNA, 201 bp, Homo sapiens
tctcaaaaaaaaaaaaaaaaaaaaaaaagaaagaaaggaggctagagtgaagctagcaaaaatgatgatgaagaccagatatgttattttcaggatttgcyttttttttttttttttttttttttttaaagacaggaccttgctttgtcacccaggcggaagtgcaatggcatgaacacgatcactgcagtctcttcctcc

SEQ ID NO: 208246 - DNA, 201 bp, Homo sapiens
gaacagaacccaagtttaggccagagatatcacatcatttcttggggtgactggactttgcaggcagacaactctgagagccacagagaatgcccctattytgggagaaagaaaggagacgagatcatgccattgcactccagcctgggcaacaagagggaaactccatctcaaaaaaaaaaaaaaaaaaaaaaaagaaag

SEQ ID NO: 208247 - DNA, 201 bp, Homo sapiens
tacatgctcaactaaaaagcttagacttgatttgataagcaatgagtagttatttaacttttttgagtgggaaaaatacgattaggactgtgctttagcartttaatctggctggagtattaaaatgaattagagacctaggtatcttaatcatggtgactacttagaagagcttgggcttcagggatcagagttctaaca

SEQ ID NO: 208248 - DNA, 201 bp, Homo sapiens
ggggatccagaggtatttatggtacagtgatttgagaggtcagcaggggtacaaggcctgaagtatggaatggaaggagacagtgagtgaccaggaaggtyggtgccagtggcccaggaagacagggacgagaaaagaagcagacatagaataactggccttggggtctggttttttttttttttttggctttttttgttt

SEQ ID NO: 208249 - DNA, 201 bp, Homo sapiens
ataaaaaagccctttagcagctattctccattgcccccctccagccccaggcaaccactaatctactttctttctgtatggatttgcctattctgggcatytaatacagatgggacctttactttttgatgtgatcagtggccagtaccacaaggtcagagggatttaggcctctgagggacagaacctgcctagacgagg

SEQ ID NO: 208250 - DNA, 201 bp, Homo sapiens
gtactttcaggtggtcctgcaggctgtgactctgctcctgtgaccttggctttcaccctcatcctccctagcacttccagtgtctgccaaccagcaggctyagctgctcccacaggtcccaagggagccagcccacatgggatgagggcacgccgtggccggatcctgaacatgtatggttgaatcattctttgcaccgtc

SEQ ID NO: 208251 - DNA, 201 bp, Homo sapiens
  misc_feature (1)...(201): n = A,T,C or G
cggcactccagcagccagcacttccagaagccccgcatgtccaacacggccttcatcatcgtccactttgcagacaaggtggctctcctctctgttggctngggtattcccttggcccctctctaagtagactcaatgggctctagacctagagagaaatctgtcccttctgaattcaaatggcctgaagcctcagctagg

SEQ ID NO: 208252 - DNA, 201 bp, Homo sapiens
aagcaaggagtgtaggggtagggggagaaaactgggaaagatgcctgctaatggaggggataggggagcatgggaggtgacaggaagagaggacggtgagygcagtgatggaaatgtggctggtgtccatcatgtcatctgtcctccgtctcctgcctgcagatgtaagattatttaaaccccatcacatctagtatctgc

SEQ ID NO: 208253 - DNA, 201 bp, Homo sapiens
ctgccctaaacacaccattttcacacaaagatgagcaagacagagtctgcactctggttgctccccttctaatgggctgtgagtgggcagatgaagacacmcacaggtaactgtgaaaggagagaaggagcacggggagagggtggtagagtcaggggaagcgtgtgcactggcattctaaaagccgactctgatgcagat

SEQ ID NO: 208254 - DNA, 201 bp, Homo sapiens
tctgatgcagatgccgttactggctttagccctgcagaggaaacccagggccgggggtgggggaaattcccaggatttaggaggctttctcccagaccacwtgatactgaactcactgcaggggcctgataacattggagaaatggcagattaatttctctttgtgataagctttagatgaatgcaataggatgagatgat

SEQ ID NO: 208255 - DNA, 201 bp, Homo sapiens
aaagagagtagatggaagtgttctgagcactaggatccccttcctcacgatggtctcttacgatgcctggaggcctgtgacaacttatagggccagaaaaytctgttgtctcagtagaagtttgtcctttcagattagaagcagaaacgagggatggagagaagagaggtgggtacttttcatttaatacagagtctggtt

SEQ ID NO: 208256 - DNA, 201 bp, Homo sapiens; identical to SEQ ID NO: 36502

SEQ ID NO: 208257 - DNA, 201 bp, Homo sapiens
tcactctccagcaggttatcttttattaatagctgagctgcttttcccttatttttatttatcagctttattgaatatttgtgtagtatatagtggtaacygacacatgtagttaatctcatggaacttagtgaaaaagatgcacagtttaattacaaactgtggtaacgctaagaaggtcaagaagaaggtgctatggaa

SEQ ID NO: 208258 - DNA, 201 bp, Homo sapiens; identical to SEQ ID NO: 36503

SEQ ID NO: 208259 - DNA, 201 bp, Homo sapiens
tttatttggggttgattatgtaggcacccttagcctagcacaaaccaaaattccaaactcccagaaggaaagcagatgctcaacataaattattgtttgcrtgaacaatttaggcacagtgaactgttcttatcagggaatggtaaaaatccaagttcccctgacaccagccaggggtcaagcagcctttctaaggatagc

SEQ ID NO: 208260 - DNA, 201 bp, Homo sapiens; identical to SEQ ID NO: 36504

SEQ ID NO: 208261 - DNA, 201 bp, Homo sapiens; identical to SEQ ID NO: 36505

SEQ ID NO: 208262 - DNA, 201 bp, Homo sapiens; identical to SEQ ID NO: 36507

SEQ ID NO: 208263 - DNA, 201 bp, Homo sapiens; identical to SEQ ID NO: 36509

SEQ ID NO: 208264 - DNA, 201 bp, Homo sapiens
ggaggaacaaaggagcatattataaaactgataacagcaaatacagcacttactatgtgccagtgatggtactctgtgttctttacacctgttaactcttyaaatcctcacaaccttatcagaagggtactcttctccatcccatggttttggggtatgtgtgttccattttaaccatttttaagtgtatagttccgtggc

SEQ ID NO: 208265 - DNA, 201 bp, Homo sapiens; identical to SEQ ID NO: 36513

SEQ ID NO: 208266 - DNA, 201 bp, Homo sapiens
ggtcctgtccctgctatcagtggggcactgaagaaagcaggactgagtcttaaggacatggatttggtagaggtaagtgttttttttttttttttttttttaacaacatgaataaaccatgtacttttatagcataaatgactttaatttggtctcattgctctttgaatttcattgtagttagcctttccaaatgatgta

SEQ ID NO: 208267 - DNA, 201 bp, Homo sapiens
gttctcctaagggcaatgacagaaacacagtcgattgttaaagacacaggccgcagaatggggcaggcagagtgagtctctctactcaccaacatgtatayaacaatggggttgtgggtggcgctgacagaaaggatccagttaggatgctcatagtcagctgctgaatgggaagagtttgatgacagaagccactgagat

SEQ ID NO: 208268 - DNA, 201 bp, Homo sapiens; identical to SEQ ID NO: 36515

SEQ ID NO: 208269 - DNA, 201 bp, Homo sapiens
ataccaatgagcatagtggggaggggcaggtgggtttacaggagacatgagttcggtgagagggctcagatccacctgacaaagctgtgggctctagtttmctggatgcaggctccaagtgtaaatgtcagtccagctccatctgtgttgtgggccttgtctaaagaggatcatactcttgtaccaatgtcacatattctt

SEQ ID NO: 208270 - DNA, 201 bp, Homo sapiens; identical to SEQ ID NO: 36516

SEQ ID NO: 208271 - DNA, 201 bp, Homo sapiens
aataacaaaatccaaactcagtacagaaaaacacatcttaatatagcaaagtgaacacctttccttacctcctctgcttactattaaaatattaaatatckaactctttaaaaaactgcttccttctgtaaacatttccagaaagtcttcaaacatttttcttctctttaaatacatttcacttaaagtaagtttccttct

SEQ ID NO: 208272 - DNA, 201 bp, Homo sapiens; identical to SEQ ID NO: 36517

SEQ ID NO: 208273 - DNA, 201 bp, Homo sapiens
taagtttaggtaaaaacttctttaaatataatgaattctggaatgtttcttacatagaaatccacaaattttcagaaattggcagcatcaggtatttgctytctttacaaatataactgtaagaaaaaccttttctttaaaactaattgcaatatggtcatattttcactcacactcatttatattgttttaaatgaagtc

SEQ ID NO: 208274 - DNA, 201 bp, Homo sapiens
attattatataggtcctgtccctgctatcagtggggcactgaagaaagcaggactgagtcttaaggacatggatttggtagaggtaagtgttttttttttktttttttttttaacaacatgaataaaccatgtacttttatagcataaatgactttaatttggtctcattgctctttgaatttcattgtagttagcctttc

SEQ ID NO: 208275 - DNA, 201 bp, Homo sapiens
agtctattttctttaaaatttttagttttcatagtagccctatgaggcatatgtttctaactccatattaaagaaaaatgaaaacctagaaagatacaagkttctatgtcattacattaaaattgtaacgcttaattttttattggttttcatttagcacagctaaatctcaaatcctatttgtaaattcataattttacc

SEQ ID NO: 208276 - DNA, 201 bp, Homo sapiens
cccaaattacagcacaggagtcgcaggaacagctcacacaaggcccaggtgttcactccccttctccctcctgctgcttatggcttgacttcagcttgtcmaggaatgacaagtacacacgtccattgctttccacactgatgtgtttttaaaaggttatatacacacaccttgttttgaccaaataagtttgctttttaa

SEQ ID NO: 208277 - DNA, 201 bp, Homo sapiens
agatgtgctggtatttgaaaagcttctaccaatacttaaaccaagcagggtactatgtaggataactttttagttgacaaaacaatatcgtctcccttatratacaggagagtccatgttgtcttccaaaaaaaatgaagtactgagacttttcctccaaagcctatttaaaacccttttaaaatattcatctaaatgtca

SEQ ID NO: 208278 - DNA, 201 bp, Homo sapiens
cccagcgttgaacatggtatctcttagtctttcagtcctgtcatcaaactagatctcttatgttcatttgagtttataaaacaaattttgaatagaatacraagcatactgtacctccttttgagaactaatattccaacacagtcatctccctctaaatcccagatcctgccacttccaaatgcagtctcaacagcagga

SEQ ID NO: 208279 - DNA, 201 bp, Homo sapiens
gcgctaacctactttctatttctatagatttgcctagtttggatttttcatataaatggaatcacataatatgtgtccttttgtgtctggctcttttcackcagggctgttttcaagatgtatccatgcgcagcaaccgtcagtagtttattcctttatattgctgaatattatttcatcagatagatacagcacatttta

SEQ ID NO: 208280 - DNA, 201 bp, Homo sapiens
cagatcctgccacttccaaatgcagtctcaacagcaggaacttaaacgaaaacctagcttttcaaataacatacaaattcttcagactaaaccttgattaygtttgtatccagattatagcacagtgccagcttaggtacaaatctgccttggacagtttttactttctgttcttaagttacaaagtccctgtttaatgta

SEQ ID NO: 208281 - DNA, 201 bp, Homo sapiens
aagaggatggaaccacatgacctcacagtcccacccaatatcacatctttttgaaaatgtgaactgttttcaaatgtccttttaaaacacttttctgtccrttaatgtgaataagttttggcaggggagtagcccatccttctctatttgccttctttccttttaccccagtcgcctttaatctccctgcactcctaagaa

SEQ ID NO: 208282 - DNA, 201 bp, Homo sapiens
ccagcttaggtacaaatctgccttggacagtttttactttctgttcttaagttacaaagtccctgtttaatgtataaaattaaaagcatagatagcctttstaatggaagcaggagaaaggggctgaaatcttaaaattctcccattggtgattctgatttccaagttcctagtgtgatttttcatacagatcaagcatca

SEQ ID NO: 208283 - DNA, 201 bp, Homo sapiens
ccagctcctgggctgccatcagtccccatgtgccactcggctgtggaggagcagggagagtccacagaccccagtttctgcttcaactcactgtgattttsagcaaatccccttctcccatactcaggttcctcattcatgtcacaagaggatggaaccacatgacctcacagtcccacccaatatcacatctttttgaaa

SEQ ID NO: 208284 - DNA, 201 bp, Homo sapiens
ttttgagcaccaatatgacactcaaaggaaatgcatctacggccataccaccctgaacgtgcctgagcttatctgatctcagaaactaagcagggtcgggyctggttagtgcatggatgggaggaaatgctcactggagtatttttgcattttggattttcagattagggatgctcaaccagtaagtataatgtaaattct

SEQ ID NO: 208285 - DNA, 201 bp, Homo sapiens; identical to SEQ ID NO: 36485

SEQ ID NO: 208286 - DNA, 201 bp, Homo sapiens
cagacatcggggggctcatgggaggaatgaggaagaggctgcacgtgaagtgcttaggagggtgcatgacactcagcgagcgctcaggagctgtcgtcatygctgggtttcacatttgtctttcatgtccatccacgcatcatggtttcttctacccagtgggtcatctgttaatgtttactgaagaaacagtcttgaatc

SEQ ID NO: 208287 - DNA, 201 bp, Homo sapiens
tgcatctacggccataccaccctgaacgtgcctgagcttatctgatctcagaaactaagcagggtcgggtctggttagtgcatggatgggaggaaatgctyactggagtatttttgcattttggattttcagattagggatgctcaaccagtaagtataatgtaaattctccaaaatctgaaacacttctggtctcaaaat

SEQ ID NO: 208288 - DNA, 201 bp, Homo sapiens
ccaccctttatatacccctaatgagacaattttgaagtgcagctgatgggatattcctagatgaaccaaaaaccatttggtctgtgaaacaagatgccacrgatactgttttctagtaactctctatccctcttactcacttaaaaagataaggtagcaaactcacaaaacgttaagtttaggtaaaaacttctttaaata

SEQ ID NO: 208289 - DNA, 201 bp, Homo sapiens; identical to SEQ ID NO: 36489

SEQ ID NO: 208290 - DNA, 201 bp, Homo sapiens
tctgtcttgttttaatgggatttttctttcagtacacaatttttccttgaaaacaaaagaagctttaaccaaatcgattttcttaaaaagagcatttacaygtatccagttaaaattcaaatcccacaagaggagcctctcctcttcccagcatcatgagacatttttcccctattgctctcttccagcgagttgcagacc

SEQ ID NO: 208291 - DNA, 201 bp, Homo sapiens
cttagggcttaatatttttttttttacagtaaaagctactatgaatgatttctgtaaatttaaccccctccccactacccaatagtatagttatgcagatkggtaacttctacccatgcctcaaacatcttgaaaattcacttcagaaagtatatgaattagaattatttaataagccagtgttttgctttgccatgacag

SEQ ID NO: 208292 - DNA, 201 bp, Homo sapiens
ccctgtgtacctccctcagcacccagcaggtacagtcactttgcacctctgtcaacatggtattccaaggaagccctgagtccattccaagtctgttctcrttggtggttatttgttagtgttgcactcccaccctttatatacccctaatgagacaattttgaagtgcagctgatgggatattcctagatgaaccaaaaa

SEQ ID NO: 208293 - DNA, 201 bp, Homo sapiens
atttttaggggtactcaaactttacatggtcttattcttccccataggcacaactacaagagcggaatgaccctcagcaactgctattagatgccaagcamatgtttcctgttttgtttccatttaatccatcttctctaaccatggactcaatccacatcccagcgtgtctcaatctggaattcctcaatgaagtctgaa

SEQ ID NO: 208294 - DNA, 201 bp, Homo sapiens
atgaccataaatagtgctgagctcatctgtcttgttttaatgggatttttctttcagtacacaatttttccttgaaaacaaaagaagctttaaccaaatcrattttcttaaaaagagcatttacacgtatccagttaaaattcaaatcccacaagaggagcctctcctcttcccagcatcatgagacatttttcccctatt

SEQ ID NO: 208295 - DNA, 201 bp, Homo sapiens
atgtggctactggataaggtttgcatccagagaaaactctggctgttggttggaatgtgtttgggtgaaggtgtgcccggaggtatgccctcacgctttcrgtgactgtagtgatccaggagagagctgggtagtcctgagctggagcagcagctccagctccagattaatgaaaaaaaaaaggactgcatgatactcccc

SEQ ID NO: 208296 - DNA, 201 bp, Homo sapiens
tattagacacttgctttgaaccaagcagtgtacttgggcactgaacatgaaatcagaattgagaaatgagagcagttacattttcaatcggaagaaaaatkatgtgtagatgcattactcactgtgctctgcaaaggctgggaaggaaagtgtacctggacctattcataatgctttccccaggttcttacaacacaagta

SEQ ID NO: 208297 - DNA, 201 bp, Homo sapiens
atttgaggataccttatacagtcagccctccatatccacaggttccatatctgcagattcagccaaccacagattcaaaattcagtattcacaggatgcaraacctgtagttatggagggacaactttttctatctataggttctacagggccgacagcagtacttgcatatccatggatctgggtatctgtgggaattcc

SEQ ID NO: 208298 - DNA, 201 bp, Homo sapiens
aatagcaagttatctcttttccagaatttgaactgtgctggtccaataagacaggtaaagcaagtgggttgaagaccagagatcatttgttcattgtgagmttttggccttcctaagaccagatttgagagcccaaaatttagcaagacaggcaaacaaatacaaaaacatgaaagctgacgtggacccaatccctgttgg

SEQ ID NO: 208299 - DNA, 201 bp, Homo sapiens
ttacagggtctttatctggctttgatattagggttatactggcctcatagaatgagttaaagtgtgccttcctctttgatttttaggaagagtttgagaastggtgttaattcttctttaaatgtttgatagtcttcaccagtgaagcccatcttgggctttcctttgttgggaaatatttaattactaattcaatatgct

SEQ ID NO: 208300 - DNA, 201 bp, Homo sapiens
atggcctgcttttattataaaagagatgggccaaaggttaaagaaatagccatttcaaaccccatgacttctgttacaaaatcataatatccaagcatttmcttgaagcatagaactacatgtaatgttatttcattgaggtccatcactttacccaatgttatacacattctaaatgggaggttatataaggctagggca

SEQ ID NO: 208301 - DNA, 201 bp, Homo sapiens
atccagttgtctcagcaccatttgtcaaagacactgccctttccctcattgaatggacttggcacccttgtcaaaaatcaattgaccaaaaatatgagggktttttttttttctgggcccttatattctattggtctgtatgtctgtccgtataccagtaccatactgttttgattcccatagctttgtaaaaagttttca

SEQ ID NO: 208302 - DNA, 201 bp, Homo sapiens
gcatgccaagcagcagcaccggggtggggaaggggggcctgcctgatctatttggctgtgaagctgggcaagcacggctgggtaatttgttcctgaactgwtgggccagagattgttccaacctccctagccctcagcaggctggccctgtctttgggcacatacaatttgtctaattctggagccagcccttgccttctg

SEQ ID NO: 208303 - DNA, 201 bp, Homo sapiens
agactcacaaggcccttccagtccagccagagcagcccttgcccaggcagggacaggagtgtgggatacagaggagagcagttgggggaagtaagagagcygctggagagatgcatgccaagcagcagcaccggggtggggaaggggggcctgcctgatctatttggctgtgaagctgggcaagcacggctgggtaatttg

SEQ ID NO: 208304 - DNA, 201 bp, Homo sapiens
tctgctggacctataaaatgcccaaatgtcaaccatgtactcaagagtattatggcctacagttatcatttaactagaaggatgcgttggagcagggacartgtaacccaagtaccaactggagctgctggcagcagagcccagcccaggaccagcctggtagaaggtttgcaaggatactgcccacctgcaggtgggagg

SEQ ID NO: 208305 - DNA, 201 bp, Homo sapiens
ggaagtctgggcctacaaaatacattttcctggataaatgactggcattctaactagagccaatggccaatccacagccatctgctggacctataaaatgsccaaatgtcaaccatgtactcaagagtattatggcctacagttatcatttaactagaaggatgcgttggagcagggacaatgtaacccaagtaccaactg

SEQ ID NO: 208306 - DNA, 201 bp, Homo sapiens
acaggaaaggggatcatgccgctggcatggagttgtgagaatgaaagttcgtatttcgttgctcatacatggtccctggaccagcagcatcagcatcagcrtcagtatcacccctgggaaggggtgagagatgcagagtctcgggctccgtgccaggcctcctcaattgcaaggcacataacaagatgccaggtgacattc

SEQ ID NO: 208307 - DNA, 201 bp, Homo sapiens
gctttggcaatgatggaagctcatgcttttggagcacatcctctaccagactcatccctcctttaatcctcacaacctccctttaagtcagaactgctgcyttctcattttacactgaaggaaacagagactcactctagtaacttgcccaggtcacacagctgggaagcagtggatcaaggattcagactccttctgttt

SEQ ID NO: 208308 - DNA, 201 bp, Homo sapiens
ggcatagagattccctgctccactgccaagataactgttccagccagggaagtcccaagggcccctggagagccccccacagacttgggtcattgctgttytgcctcccaccaccgccccacctcccaccaccatctctacaagccacaagggaaatagcatgttgcccgctttttcagtgtttgtccatcaatggggagt

SEQ ID NO: 208309 - DNA, 201 bp, Homo sapiens
aaatattgaaaacacgtctattcagatgaggattctgacagcctccattgtcccccatagatctaacttgccatttgctgctctcgttgcccttagacttraagccccagatgctgtcgggcacagtgccctgtctccccgcctacatcctctacatgtgcatccggcacgcggactacaccaacgacgatctcaaggtgc

SEQ ID NO: 208310 - DNA, 201 bp, Homo sapiens
ctttatgccagtatcacgctgtctgtattactttatcttctagtaagttttaaaatttagaagtgtgattattccagctttgttcatcttcttcaagatcstttgggtattctggatccctagatattgtatatgaatttaaggaacagctcatgaatttctgcagagaagccatgcaggatcttcataatgattacattg

SEQ ID NO: 208311 - DNA, 201 bp, Homo sapiens
tgttgtctttgccatataccacacttaggatgtgatcacaagagattattctgtggggaatggtgacggatcagccagccgtgggggaagggagatctcakgtctggaagcctgaattttgaggggccactggcatgtgttcctcattctctccctgcctgttttttgcaatgctcagctatgtcctcatccatgtcacaa

SEQ ID NO: 208312 - DNA, 201 bp, Homo sapiens
atctgggagggatggttggagccatggcctaggggagactgtccccagggactgaggtaagtggtgaggatgaggctctggaaaatggcaatgcaaaggayggaagtgcaggaaaaagctccgtgggaggttctgggaagggtgccgggcagggagaagattggaggaagcagaactgctaagtgtcaggaagggaccttt

SEQ ID NO: 208313 - DNA, 201 bp, Homo sapiens
ggtgaggatgaggctctggaaaatggcaatgcaaaggacggaagtgcaggaaaaagctccgtgggaggttctgggaagggtgccgggcagggagaagattrgaggaagcagaactgctaagtgtcaggaagggacctttacaaggaggcgtgggccagtggcacagaggcctttgaagaggtcgggtaggatcaaaaatga

SEQ ID NO: 208314 - DNA, 201 bp, Homo sapiens
catatctaaagttcaggtctcctgacccagccccatgcccttcctgctatacctcattacttctgagctcactgctaggttgtaagctcttctggtctccmtggtctcccttgactcctctaggcacccaggacagggcttcatgtgcagtgggctcttccttatgctgtagccagggatctgtttagaaagaactgccat

SEQ ID NO: 208315 - DNA, 201 bp, Homo sapiens
agaatttgaactgtgctggtccaataagacaggtaaagcaagtgggttgaagaccagagatcatttgttcattgtgagcttttggccttcctaagaccagrtttgagagcccaaaatttagcaagacaggcaaacaaatacaaaaacatgaaagctgacgtggacccaatccctgttggactgaacaaaaggggatgaatg

SEQ ID NO: 208316 - DNA, 201 bp, Homo sapiens
tataacacttttgttttaccagtccctagcacaacatttgttgcatatttgagcgtcagtaagtgttgatggataatgtgtggatgaatgaatgaatgcayaaactagtcaatctagtttcttgacagtcagtgacctagtatttactttctctgctttgactgcacatggaattgagtacctaatacaaatatcggtttt

SEQ ID NO: 208317 - DNA, 201 bp, Homo sapiens
gatcatttgttcattgtgagcttttggccttcctaagaccagatttgagagcccaaaatttagcaagacaggcaaacaaatacaaaaacatgaaagctgaygtggacccaatccctgttggactgaacaaaaggggatgaatgtgggaataaagacaaagacaaaagagtatatttggaagaaggggttgggggctccttg

SEQ ID NO: 208318 - DNA, 201 bp, Homo sapiens
gaaaatttatttcaaagatgctgagaagctgagaataggaacagaattgtcacctgttggcagctaacacttgggggcatccttagtgatctcactggggwaccctccagggtacctgcctgacaacaatatcatcagtatccttagcagggatttgtctctttatctccttccatggagctatttagactctgcatgttg

SEQ ID NO: 208319 - DNA, 201 bp, Homo sapiens
cctgttggactgaacaaaaggggatgaatgtgggaataaagacaaagacaaaagagtatatttggaagaaggggttgggggctccttgcttccagtaaacragggccctgagtttttagctcccttcgtatttattgagtaaaagagatagggagaagggtgtggttgtcagtcagcaacttgactcggtgcaggcttgca

SEQ ID NO: 208320 - DNA, 201 bp, Homo sapiens
aattgttgttgcaagtacctcaaaagtcaaggctatatctgaagcccttttatatttctacttccttgatattgtgggtttaaatgacaaggctatatttmtgtattgaaacaaattctgacctgggcatccggaggccgaggttctagcccaggctcagccactgactagcagccctttgagagctggtgctgaccattg

SEQ ID NO: 208321 - DNA, 201 bp, Homo sapiens
aacaaaaggggatgaatgtgggaataaagacaaagacaaaagagtatatttggaagaaggggttgggggctccttgcttccagtaaacgagggccctgagyttttagctcccttcgtatttattgagtaaaagagatagggagaagggtgtggttgtcagtcagcaacttgactcggtgcaggcttgcacaactgcattct

SEQ ID NO: 208322 - DNA, 201 bp, Homo sapiens
attcaacacagaccttgagggggtgagggtgtcccaggacaccacagagcctgtggggagacacagacaggagtgatgggtgctttgggagagggtcacgrgaggggcagggctcaaccttgagagaggggcctctcaggataagtatagaagagaaaggggtgggggtatttcaagtaaaaatagcacagtaagcaaagg

SEQ ID NO: 208323 - DNA, 201 bp, Homo sapiens
gctgagggtggctggttgtttgggtcaaggtgatagcatttagtggacctcctgaggtccagcctacttgttctataggtgaagaaagagacaagagcagsaggtcacatagcggcaggcacacagctctttagaacaaggctgagaaggaaacatacctctggggaatcctgggcctgtgctgctttcacactacatatt

SEQ ID NO: 208324 - DNA, 201 bp, Homo sapiens
actcatttattctaatagtttttaagtgaatttcttaggattttctgtatacaagattgtgtcatctgcagatagcattcattctggatgtttttatcttycttgcctattgccctggctagaaccttcagtacaatgctgaatagaagtggcaagagcagacacccttgtcttcctgatcttaggggaaacgcattcagt

SEQ ID NO: 208325 - DNA, 201 bp, Homo sapiens
gaaaaatagaacttaaacttaggtgtattaaagcatagccacctcctaccacaccacaaggaaatgaagttctgcgcatctttgcaggtgaagattgagtragattgtatgggaaagcaacttttttcctaccatttaaaaaattgaattgtcattcatacattacaaaattcacccttttgaagcacacaattcactggg

SEQ ID NO: 208326 - DNA, 201 bp, Homo sapiens
aggcactaacatctgagacgggatgatgctgagttatgagtttgggatttgttaaagtctatgttgatgttaatgatggagaggtataatgaggcacatcsgacccccacttcctatcgtggcctgaaacagtctctcaggttaaacattaaaagagccctggctgaggaggaagtcccttcagatggtggggggccttag

SEQ ID NO: 208327 - DNA, 201 bp, Homo sapiens
tggagtaccacaaagaggacgaggccctcctcatccggaacctggtgacaggtaaggaccctctgtgccaccctatgctgcctgcccctccttcagccccygctcccatctccatccccagcacaacccccacaccccttccttcacctcctgcacagcccccaccctctgtctcctacttgcccttgcacctgcccccat

SEQ ID NO: 208328 - DNA, 201 bp, Homo sapiens
tgcaacctgaactcatttattctaatagtttttaagtgaatttcttaggattttctgtatacaagattgtgtcatctgcagatagcattcattctggatgyttttatctttcttgcctattgccctggctagaaccttcagtacaatgctgaatagaagtggcaagagcagacacccttgtcttcctgatcttaggggaaa

SEQ ID NO: 208329 - DNA, 201 bp, Homo sapiens
tgtttgtccattcatcagttggtatttgggttgttcctaccttgtggcgcttttgggagtaacgctgctgtgcaggttggtgtgtgggttttggcgtggaygtgtgttttccgttctcaggtatatgttgaaaagcagctttgagaggaaacatgtaaggtgcaggagatgtcactttcatcattcttcctgtgattgttt

SEQ ID NO: 208330 - DNA, 201 bp, Homo sapiens
agggacagattaagcatgccattgtatctgttcccatgcttaggacagcgtcccgtgtgcagtcagcactgagatgtgtttgggagtgatgctgtggttgyccactgtccctctaccatggtgtgaggctgaggagaggcctgagtgagggttgaccaggcctttataccttcaaccctgccactgaaactcttcccaaat

SEQ ID NO: 208331 - DNA, 201 bp, Homo sapiens
gatcagcgtccgttctgccagaccccccatgaaagtctccaacaaggagcacaagaaaaccgttggccaccaggtcagccccggaccaaaagctatgggcygaggtgcatgtgcagggctggcctctctgtagatgaaggatggcggcagggtgagagggaagccatcacagcagccttgacatcagtagcctcagccatc

SEQ ID NO: 208332 - DNA, 201 bp, Homo sapiens
ttcgactggccagggacagattaagcatgccattgtatctgttcccatgcttaggacagcgtcccgtgtgcagtcagcactgagatgtgtttgggagtgaygctgtggttgcccactgtccctctaccatggtgtgaggctgaggagaggcctgagtgagggttgaccaggcctttataccttcaaccctgccactgaaac

SEQ ID NO: 208333 - DNA, 201 bp, Homo sapiens
tgactgagctgtgtcatagtgtttccatgtgaatgtacagatgtgtctccttagttcgactggccagggacagattaagcatgccattgtatctgttcccrtgcttaggacagcgtcccgtgtgcagtcagcactgagatgtgtttgggagtgatgctgtggttgcccactgtccctctaccatggtgtgaggctgaggag

SEQ ID NO: 208334 - DNA, 201 bp, Homo sapiens
accctgattgatttttatgataaccaaccttgtatcgacctcattgaagccaagctgggtatcttggacctgttggatgaagaatgtaaggtaaaactgaygatgcaaattagttcaattctagggtagggatgtgatacaaggaaatcacataagatctcaaaggtggaatttcatctgtgatcagctggccttcagtgt

SEQ ID NO: 208335 - DNA, 201 bp, Homo sapiens
tccctgccctcaaacggcttgaagttgggaggcaagattgatgtgaaagaatgctgtgtaacacaaagacctaaaccccaaggtcctcactccatgctatkgagtgtcaggattaaacttccaatctgggatcttcaggtagagatttaaatcactcttccagaaagacctagaatgttctctccctctgactccctgctg

SEQ ID NO: 208336 - DNA, 201 bp, Homo sapiens
aggaccttaaagaactggtagaaaagctggaaaagaatgagaggaagctcaaaaagcaactgaagatttacatgaagaaagcccaggacctagaaggtagsggggtgtgagtgagtgtgttttgtgaatcacaggtatacttggccacgcctgtgggtgtgagctgtctgcctgccctctgcacattcttcctacatcact

SEQ ID NO: 208337 - DNA, 201 bp, Homo sapiens
tactttatcttctagtaagttttaaaatttagaagtgtgattattccagctttgttcatcttcttcaagatcctttgggtattctggatccctagatattrtatatgaatttaaggaacagctcatgaatttctgcagagaagccatgcaggatcttcataatgattacattgaatctgtagatgaatttgaggagtgttg

SEQ ID NO: 208338 - DNA, 201 bp, Homo sapiens
agcaggtggcaacagcctgtgaagagcagctctcctggcagcgtccctgactggcgcatttctgacggctgcccacgggccgcactggtcacctccaactscaagcaggattttacccccaccatcccaggccgggctgatgtctgttctcacactgcttcctctgcttccaggaccttaaagaactggtagaaaagctgg

SEQ ID NO: 208339 - DNA, 201 bp, Homo sapiens
ggagtcttgccttgagagaatggactctgactcatcatctcccacttcctgagttccagagcaggtggcaacagcctgtgaagagcagctctcctggcagygtccctgactggcgcatttctgacggctgcccacgggccgcactggtcacctccaactgcaagcaggattttacccccaccatcccaggccgggctgatg

SEQ ID NO: 208340 - DNA, 201 bp, Homo sapiens
cacaccagtgtcctgttttgccgctgggccctggataatctcacttgcccacttgctcttccaacctccctgccccctgcattctcacacctgtccgttcsttcccagggcgctgcccgccccaccctgggactcctaggctgagtgtgtctcctggggggttggcatggcaaccggaggaggcttggcttggggaggctt

SEQ ID NO: 208341 - DNA, 201 bp, Homo sapiens
tttcaaagtaatggtggaaaagacacaagaaatgctttatcttgtggatttgataatattgtacagaggagcttcggactgatggtggtcatagtaccagygtcctggtcccgatccagtctggagcagccctgggctccccattcactgggctggccaagtcttgtggccccaagagttggttaatcctttgcaagagtc

SEQ ID NO: 208342 - DNA, 201 bp, Homo sapiens
aaagtgcttggatctttttgcaagcccttaatagtattgtattgtgtatcctacttttctctatgggcccttaaaggacaaacctaatgtaaggccactayagacccatcagcagctccccagagtagctgaggcacctttaagtgagagtcgctgccttctgagttcctggggtggggagagccagtgaccccaatcctt

SEQ ID NO: 208343 - DNA, 201 bp, Homo sapiens
ccaggaggaccagggtgtgtaataagagtgtaaatacagcagaagtcaaatgtacacagagatgacctatcgccctttcatacctgggatcttgcatgggyttgggttcagcctttttgggtcagaggcagaccaagtgtgtgtcactcactttcctctctcatggctgcacccttgcctcagtccagattatcagcagcc

SEQ ID NO: 208344 - DNA, 201 bp, Homo sapiens
gtcaacaggtgcatgcctatcctctggggtgggctactgctccagcgggtgcacagctgggggctctgctcaaagccctccgtcatgggttcttgtctcgrctctgcctcttatgtggccataacccctaggcctctctaaatttcactgctcaattagtaaaagagggttaattgtatgcagtccacctggcacaggaag

SEQ ID NO: 208345 - DNA, 201 bp, Homo sapiens
tgggcctgaaaggagggctgcgatccaggaaagccaagcaggtgggggaagactgagtcctatttggatgtaccttactaagagggtccagagagtgataygacggagttgatggcagaccttaacgcatatggaaagatgatcattttgattggtttcagatcattcagtagaaaatgctgtaactgacccaggtggccc

SEQ ID NO: 208346 - DNA, 201 bp, Homo sapiens
ggccctgagtttttagctcccttcgtatttattgagtaaaagagatagggagaagggtgtggttgtcagtcagcaacttgactcggtgcaggcttgcacarctgcattctctgaacagtagtctccagatgtgccagtagataaccttaaggagcatggtgccagggagtgattgcactcagcaaaccttctggtggcagg

SEQ ID NO: 208347 - DNA, 201 bp, Homo sapiens
gcaacattgtacatgagacttggagtcagggaggcccgcacttgaagcatgattctgccgtgtgcttctgtatggccttgaataggctttcagtttgttcrtctactacatggacataaaggtccagacatcggggggctcatgggaggaatgaggaagaggctgcacgtgaagtgcttaggagggtgcatgacactcagc

SEQ ID NO: 208348 - DNA, 201 bp, Homo sapiens
ggcccgcacttgaagcatgattctgccgtgtgcttctgtatggccttgaataggctttcagtttgttcatctactacatggacataaaggtccagacatcrgggggctcatgggaggaatgaggaagaggctgcacgtgaagtgcttaggagggtgcatgacactcagcgagcgctcaggagctgtcgtcatcgctgggtt

SEQ ID NO: 208349 - DNA, 201 bp, Homo sapiens
gattttgagcaaatccccttctcccatactcaggttcctcattcatgtcacaagaggatggaaccacatgacctcacagtcccacccaatatcacatcttyttgaaaatgtgaactgttttcaaatgtccttttaaaacacttttctgtccattaatgtgaataagttttggcaggggagtagcccatccttctctatttg

SEQ ID NO: 208350 - DNA, 201 bp, Homo sapiens
cttgtgtccttagaagaaggaaactccaataccttcaccacaaggaactaacagagggaggagggaaggggccgaccgtagcctccataagtatgttaacrcctgtggtggggctgtgccacagggccaaagacacctagtgtgggaggcaagagggcctggaatttataggttagagaggaggcttaaggaagctgtgga

SEQ ID NO: 208351 - DNA, 201 bp, Homo sapiens
actttggggtcatgaagatctcagttatgagtttaaggaacattctacccaagtgtgttatctttcctgtttcctgttacgggaacattcctgtgttgagwcagtaatggggtgtgggagttctcagcttcattagtgtgtgtgtggcagagagacccacaagggcctgattgtgtctcctaatctgatgagatgcagtat

SEQ ID NO: 208352 - DNA, 201 bp, Homo sapiens
  misc_feature (1)...(201): n = A,T,C or G
tttggtcacagcaagatagcagtgtcagagctggaatcttaccccaggtctctgaaatttcttccatccttctggattaataatataatagtaacaataantaccgccacccatatatgagtttttctttatcacacatccacgacttgttaaaactaaccaagcactggcttttgtctctctagttccgtacctccctgc

SEQ ID NO: 208353 - DNA, 201 bp, Homo sapiens
gcccagctgaacaggagtaagctccctcatgccccgggtttctgttggtgaagctagggggaagtctgtggcatcatcacctacttgcaaagaggggagcwccctgccaggaggaccagggtgtgtaataagagtgtaaatacagcagaagtcaaatgtacacagagatgacctatcgccctttcatacctgggatcttgc

SEQ ID NO: 208354 - DNA, 201 bp, Homo sapiens
tgttaaaactaaccaagcactggcttttgtctctctagttccgtacctccctgcatctgctcatggagaccctgaatgccacgacacctcactatgtccgytgcatcaagcccaacgatgagaagctcccctttcagtaagtgcctgctgggcattagcctgtccagcccagccttagaggttcaggtggaacagggtggc

SEQ ID NO: 208355 - DNA, 201 bp, Homo sapiens
tgacatcagacggtgcctgatgtacaagttcttggcctatccagctgtacctaaagattcattctccaggctccccattgcagacatgccagctaattttrgaatcttggctttagaacttctctggataccaaataaaaaagggtatctttttcctccaaaataaccactgaacaatagttagaactctaggcctgggcc

SEQ ID NO: 208356 - DNA, 201 bp, Homo sapiens
ctgctgtgcagggggaatccctgtgatgatgggtatgtgctgtcatctgccttatccagtgtgggagctgcttgtcacgcatggctatcgagtgcttgaawcctgtctggtgtgagtgaggaactgaattctgaattttatttcattttaatttattttggataccccgaggtgctagtggccaccatacagcatggttta

SEQ ID NO: 208357 - DNA, 201 bp, Homo sapiens
aaagcaccagccatgaaaggccgtagtaaaatgcaggcactaacatctgagacgggatgatgctgagttatgagtttgggatttgttaaagtctatgttgrtgttaatgatggagaggtataatgaggcacatccgacccccacttcctatcgtggcctgaaacagtctctcaggttaaacattaaaagagccctggctga

SEQ ID NO: 208358 - DNA, 201 bp, Homo sapiens
atgatttctgtttcgggcctagtataatttctttctgtgaaataacttactttgacaattttgactctcagactgaatatctgaactgccttctacactckggtcatgtaataaagcttggcttccattcagatgggctctgtgtggaaaaggttaaggagacagaatgttaccagttttctatgcagtgtgctgcttgct

SEQ ID NO: 208359 - DNA, 201 bp, Homo sapiens
agtagaactcagggttcacaggagaccttcggtagccacagagattcctggctcaattttctctagacacctgggtcctttctaccaactggcctctcacrcagaggccactcttaggtcactgaataaggttttactgtctgccgcctctcctgtcatttaagctgggtttttagatgcctctcaatttaagaagtattt

SEQ ID NO: 208360 - DNA, 201 bp, Homo sapiens
gaactgccttctacactcgggtcatgtaataaagcttggcttccattcagatgggctctgtgtggaaaaggttaaggagacagaatgttaccagttttctwtgcagtgtgctgcttgcttgctcttcccttcctccaaatctctgagacatgcttaggaattgcccctgggtggcttctgtttaccggctgactccagaag

SEQ ID NO: 208361 - DNA, 201 bp, Homo sapiens
acagagattcctggctcaattttctctagacacctgggtcctttctaccaactggcctctcacacagaggccactcttaggtcactgaataaggttttackgtctgccgcctctcctgtcatttaagctgggtttttagatgcctctcaatttaagaagtatttttaaagatttgcttctttatcaagatgaataaagttc

SEQ ID NO: 208362 - DNA, 201 bp, Homo sapiens
tggaaaaggttaaggagacagaatgttaccagttttctatgcagtgtgctgcttgcttgctcttcccttcctccaaatctctgagacatgcttaggaattscccctgggtggcttctgtttaccggctgactccagaagagaagaggctgttagaagcgtagtgtgtgtgaaagactcagattctgtgtgaagggcagagt

SEQ ID NO: 208363 - DNA, 201 bp, Homo sapiens
agggtgttaacaaagtgcttggatctttttgcaagcccttaatagtattgtattgtgtatcctacttttctctatgggcccttaaaggacaaacctaatgbaaggccactacagacccatcagcagctccccagagtagctgaggcacctttaagtgagagtcgctgccttctgagttcctggggtggggagagccagtga

SEQ ID NO: 208364 - DNA, 201 bp, Homo sapiens
gttaccagttttctatgcagtgtgctgcttgcttgctcttcccttcctccaaatctctgagacatgcttaggaattgcccctgggtggcttctgtttaccrgctgactccagaagagaagaggctgttagaagcgtagtgtgtgtgaaagactcagattctgtgtgaagggcagagtgctgtgcagggcccaggggagagg

SEQ ID NO: 208365 - DNA, 201 bp, Homo sapiens
agcatctggtgtataagatgctgcaaataggcattagagcatttattgcctgtcctcccagggtgtagtgaaggttttcaaagtaatggtggaaaagacayaagaaatgctttatcttgtggatttgataatattgtacagaggagcttcggactgatggtggtcatagtaccagcgtcctggtcccgatccagtctggag

SEQ ID NO: 208366 - DNA, 201 bp, Homo sapiens
gagaccttgtctcaaaaaaaagggtgttaacaaagtgcttggatctttttgcaagcccttaatagtattgtattgtgtatcctacttttctctatgggccyttaaaggacaaacctaatgtaaggccactacagacccatcagcagctccccagagtagctgaggcacctttaagtgagagtcgctgccttctgagttcct

SEQ ID NO: 208367 - DNA, 201 bp, Homo sapiens
ggcagagtgctgtgcagggcccaggggagaggagatgagggctctataccagctgggccagaccagctgtggccttgggcctttccctcatcagagcgtgkccctgctgtgggacagatactctgctgggtctcccctctcaaaggagagaagacactggggactttctagtcctgaggtcccacttttctaagacactgc

SEQ ID NO: 208368 - DNA, 201 bp, Homo sapiens
gatcttacaatcacctctgcttgagcatttcgggaggggtattggattttctgggctttcctgagaagatgactgagatgtcagagctctcaaagacaggmgtcaaagcctggcctggattaatctttccttcttgaagcatctggtgtataagatgctgcaaataggcattagagcatttattgcctgtcctcccagggt

SEQ ID NO: 208369 - DNA, 201 bp, Homo sapiens
taacagggtgagaccttgtctcaaaaaaaagggtgttaacaaagtgcttggatctttttgcaagcccttaatagtattgtattgtgtatcctacttttctmtatgggcccttaaaggacaaacctaatgtaaggccactacagacccatcagcagctccccagagtagctgaggcacctttaagtgagagtcgctgccttc

SEQ ID NO: 208370 - DNA, 201 bp, Homo sapiens
ctcccctctcaaaggagagaagacactggggactttctagtcctgaggtcccacttttctaagacactgccttatcttcagaaccaaaatcttcctcccartacaaagaaaaggtgggaggaatactgaccatgtcatgataccgggattctagtttgagctcactgctgatttggccagtcgcaagctagtcttttgctc

SEQ ID NO: 208371 - DNA, 201 bp, Homo sapiens
tccctttatttgttctaaatttgttgatttcaagctttaaagattcccaggtggttccaatacccctacaaagtttgggaagcatagctctatataattcyccttagcacattaagaattcagccttctgggatttgtagggggttgggggttagacacccaggcatgtcttagcacaaagccaccgttagtgacatggat

SEQ ID NO: 208372 - DNA, 201 bp, Homo sapiens
tgaaagcaggaacagcgagactcctcaagactcagtccctgaactaactgttgcttctgcccattgatcaaaaccagtctcatggctaggccagatatggygagagagagattctacctcttgaggggaggagtagtggaagaagttgttggggcctctttgcagacagtcaccaaaggagccccagcaggtgccagagaa

SEQ ID NO: 208373 - DNA, 201 bp, Homo sapiens
caataaatattataggcaataaatgttattctttggcaaaataaattgccaaagaataataacttggtataattagtttgatgcatgtatatttttatcasctttatctgatttgacctcctgttgggcagaaagccaacccctttgcctgactctccataccgagagtccctgactgtgcttatcatttacttgtggggt

SEQ ID NO: 208374 - DNA, 201 bp, Homo sapiens
tggtttcatgaatcggcaactgaatgcattaataaagcacagacctatgaatcaagagtcctggtttctagaatcagccctgccactggtcgtggcctcaragctcttttggccttagttttctcacctgcacgatgaggtggctagcctaatgtttaagtaggaacagaccctggctgagtcagctacagtccacctgga

SEQ ID NO: 208375 - DNA, 201 bp, Homo sapiens
gtgtatcaggaaatgtgtgatggatgagtgacagccttgccctgtgtcatactaggggccagaactaggcttggtgagtgggtgcctctacggataaaacrtcgtcactctcggtcggtgcttcttcttctgtaccttgccctcaacaccaggtcacattttagcctctgaagacatacaacatctgttgcattaattatt

SEQ ID NO: 208376 - DNA, 201 bp, Homo sapiens
agagccccagcagcccctccctggggggtggggggctggaggctggaaaggagctttagttcaaggtctggagaccctgggtcctggcgcaggagtcagtrtctctctggtgtgggaaaggaggtgggtggagcccaggatccctgcacttgttccctttcagcgctgatgcgctctacttccggccctccccaagaatca

SEQ ID NO: 208377 - DNA, 201 bp, Homo sapiens
ttttatctttgtcaatagtgcctggcttgttacagaattaagaattctgggagtatggccctgtgaggctggtggcctgggcattcattaatcctaacttycttgtgtgagtcagcttcgcgtgccccaccctagagagctctgcagtctgtagctttacggggacgacagaggtgaggtgaacctctgagacagagcccc

SEQ ID NO: 208378 - DNA, 201 bp, Homo sapiens
ctcacctcggggtgagcacttaaagtcagagttaggtaggggcaggagtgtggccagggctctggtctggctctttgacagtgctcctttgattcctgtcmacttctacccaagccttatcaagagtgtaaaactccaaagtgagactggtgcattcccgaggtcccagaaaacctcctagcagctcctctccatccagca

SEQ ID NO: 208379 - DNA, 201 bp, Homo sapiens
ctgtctgccgcctctcctgtcatttaagctgggtttttagatgcctctcaatttaagaagtatttttaaagatttgcttctttatcaagatgaataaagtycctaacaacatctataactaggtgtgtagcttgggatggccacatccctgggactgggccaactcctgtcaacaggctgatcttaaaaagttgtcaccca

SEQ ID NO: 208380 - DNA, 201 bp, Homo sapiens
acctagttagggtttgtagccattttctagagagttaaagccatgatgcatctgacatctagataaatgggacaccaaactattttgctgttatgctcttyagcatcccttgtgttggataactggcagttcagaaacagagccagctagcccaggcggttagacgagagcccggggctgttggggcagagcctcatctgt

SEQ ID NO: 208381 - DNA, 201 bp, Homo sapiens
aaattggacgcttgccacctctgaacttgttgcctgccaagcggtccccaggcacttaactctactacatatggctttatgtttaggggagtcggggagcrggggagacaggttggcttcagagaaaaaggatcttggccaggagaagtagccatggaaactctctgctgagtgtgaaaagatgggggcttctccacaccc

SEQ ID NO: 208382 - DNA, 201 bp, Homo sapiens
taggatggagcttctattggaaaggctgtctttccatacgcagtgtgccttctgctcagtagtttttatttttaattaaagcatgagaatgtgctccatgrctgccagggttgccttggagatgcaacagcattcaatttgtttcttgaatttagcaatatgggcccataaaactgatctgctacttattatattggctat

SEQ ID NO: 208383 - DNA, 201 bp, Homo sapiens
tgcactccagcctggatgacagaggaagactatctctcaaaaaaataaaaataagtatcctgatgaaagaatctgaataggaattattcatgagagtatawaaatttatgtgattacagttattagttacatcatcctagaaggaagtttctgtgtctctccacccatttcctgtaatcggagttgctcagcctcagcagc

SEQ ID NO: 208384 - DNA, 201 bp, Homo sapiens
cagttattagttacatcatcctagaaggaagtttctgtgtctctccacccatttcctgtaatcggagttgctcagcctcagcagcactgacatattgagtyagagaattctttgctggggcaaggggtgctgtcctgtgcatcataggatgttgagaagcatccttggcctctacccactagatgctacaagcatcccatc

SEQ ID NO: 208385 - DNA, 201 bp, Homo sapiens
catgagtacatctcacagcaagtgttaaattcaggcttggaaaggttgctggagtggtcaggaaaggcttttcttgtgttgaagaatcaagacctcacatkatgtgttggacgataggacatgaacatggtcctgtttctcacattcccgtctgctgctaagcttccagaattatccacatttgctccccttttcctcact

SEQ ID NO: 208386 - DNA, 201 bp, Homo sapiens
tgtacagtcagattctgaatcttcctcagtaatcaatttcagtgtctcgcagttctagcaaaatatttttttcatgagctatagctttatgttgtttctayctatacaatgctcagaagaaatggtgaacaatcagtcctgccctcctacatttgaactcacatgtgtgataaagacaagttacttgttaaagcaaaccat

SEQ ID NO: 208387 - DNA, 201 bp, Homo sapiens
cggtggctctgtgaaagtgctgacagggcagaggcaagagagagatgaagtatccagagcagcagcggcctggggcgggtgtcataacctgggaacgcttygtggaggacctggtcactggttttccgaaggccagcccaggtctcggagtctcagagttctgagatgtgactgcaggatgctgctgagcctggggaagca

SEQ ID NO: 208388 - DNA, 201 bp, Homo sapiens
ggtcttaagagaaaaaatgccgttccccgtatagtggtggtcaggaatgtgcatgcttgaataaaatagagaacgttaaatgtagccatgagtacatctcrcagcaagtgttaaattcaggcttggaaaggttgctggagtggtcaggaaaggcttttcttgtgttgaagaatcaagacctcacatgatgtgttggacgat

SEQ ID NO: 208389 - DNA, 201 bp, Homo sapiens
cactgccctttccctcattgaatggacttggcacccttgtcaaaaatcaattgaccaaaaatatgagggttttttttttttctgggcccttatattctatkggtctgtatgtctgtccgtataccagtaccatactgttttgattcccatagctttgtaaaaagttttcaaatgggaagtgtgagtcctccaattttgttt

SEQ ID NO: 208390 - DNA, 201 bp, Homo sapiens
gttttccgaaggccagcccaggtctcggagtctcagagttctgagatgtgactgcaggatgctgctgagcctggggaagcaggtagggagcttgcagcccrtggagaaatcaattccatggcgggcaattgtggaggtagggctcggttctaacacagtgggatcctctctttgcatccagcaggctccagggtctgctaa

SEQ ID NO: 208391 - DNA, 201 bp, Homo sapiens
acttacactccccagacatcttacttgctgcagacagactgacagacacttgctgagtgccaccagtctgctgtccaggaggtcttaagagaaaaaatgcygttccccgtatagtggtggtcaggaatgtgcatgcttgaataaaatagagaacgttaaatgtagccatgagtacatctcacagcaagtgttaaattcagg

SEQ ID NO: 208392 - DNA, 201 bp, Homo sapiens
aatttgcccagggtggtgccaggattagagctcagctgtctacctaaaaaaaaaaacccatgcccttggccacttcactatagtgcctctccatatggttkgcacctgagatgtattttatattctcccttagacaattttttaaagaatgctagaattgggagagtgcttacagccctctgatctccaagaagcctaagt

SEQ ID NO: 208393 - DNA, 201 bp, Homo sapiens
tcatttggtatcccccagccctggcaaggctcctggtatagaggtgtatcaggaaatgtgtgatggatgagtgacagccttgccctgtgtcatactagggrccagaactaggcttggtgagtgggtgcctctacggataaaacatcgtcactctcggtcggtgcttcttcttctgtaccttgccctcaacaccaggtcaca

SEQ ID NO: 208394 - DNA, 201 bp, Homo sapiens
tgttttgttcagagctgtgtaaatcagtgttccgttgtgcctcacatgctcagtgccgtgggctgttggagctggaggagtcgggaagattttatggagamgatgggtgtggaaagaaggtggggcttgggagggcagaggggagcaatgaagccacagtgagcacagcctggaggggagagtgtgggtgtctcatgggat

SEQ ID NO: 208395 - DNA, 201 bp, Homo sapiens
gaagagcaggcttccggtgcacagtgaccaaatctctcctacagtatttgcccacctttcatcttatttgatccacagcactgggagttaggcacattagsgggtagtctgtcccccatgtaattcaaggaacccttaaataggaaggacttgattttggtcacagcaagatagcagtgtcagagctggaatcttacccca

SEQ ID NO: 208396 - DNA, 201 bp, Homo sapiens
ggttgaggtggcatcttgcagtcatcagttgcttggcaaatgcccactgttttccagtgccaagtgcccactgagcccaggcagctccagggcaccatctrtcaagcaccatgtcccagagtgaaaggaggaaaagaagcatgactcttagctccagctgagctgcaggacagtcagaaggaaagggagcatttgttcctc

SEQ ID NO: 208397 - DNA, 201 bp, Homo sapiens
gagaatgcttgtcaagtccctggcagccaccacctaacatttgttcctatgagtttgccattctggacatttagtataacaaattatttccaggatacccrggcatcggatgtcagggtcccaggccctcaggtttaggaagagcaggcttccggtgcacagtgaccaaatctctcctacagtatttgcccacctttcatc

SEQ ID NO: 208398 - DNA, 201 bp, Homo sapiens
tgacaggtgtggcacacgtgcacaggccttggggcatgagtaggctgggtgggtgtgaggaccaatgaggtgctcactgggctcaggtggagtaagtgagraggcaaacagcaggagcacagtgcggccaggtcaggaaggatcttctgacttcaagcgcggccttgacccatgaaacctccagagagatgagcaactctg

SEQ ID NO: 208399 - DNA, 201 bp, Homo sapiens
agggcaccatctgtcaagcaccatgtcccagagtgaaaggaggaaaagaagcatgactcttagctccagctgagctgcaggacagtcagaaggaaagggarcatttgttcctcgtcccttctgatggagtggggcagtaatcttagcaaattaaaaatagtgattaattctaggttgccttaattctttctctatgaagac

SEQ ID NO: 208400 - DNA, 201 bp, Homo sapiens
ggaaactccaataccttcaccacaaggaactaacagagggaggagggaaggggccgaccgtagcctccataagtatgttaacacctgtggtggggctgtgycacagggccaaagacacctagtgtgggaggcaagagggcctggaatttataggttagagaggaggcttaaggaagctgtggatcaggagactaaaagcaa

SEQ ID NO: 208401 - DNA, 201 bp, Homo sapiens
ctagagccagagggtggggacagaggccacgtgggtcactccatgggctctaaaaacctgagccacttctgggcatgagcctcgggacagctggggtaagsaggtgctgaggagtgtggaggattccagctgaaccagggtctacctgtgtgctctggacttgggtgctctctcctcccaggggcacctcctggccatctt

SEQ ID NO: 208402 - DNA, 201 bp, Homo sapiens
gcaccaggactcatggttcatgtggaggctgaggattattaggaaggggacactgacccatctctggaaggacgttgtcttgctgcagaaagcacagaagmtcatggtccttcattcagcaggtgtttgaatgcctgtatgtgttagaccctgttctacacactggggcaaaaggtgaatggtgtttgaaaaaacccttct

SEQ ID NO: 208403 - DNA, 201 bp, Homo sapiens
tcaagcaccatgtcccagagtgaaaggaggaaaagaagcatgactcttagctccagctgagctgcaggacagtcagaaggaaagggagcatttgttcctcrtcccttctgatggagtggggcagtaatcttagcaaattaaaaatagtgattaattctaggttgccttaattctttctctatgaagactccctgcttactc

SEQ ID NO: 208404 - DNA, 201 bp, Homo sapiens
ccccttcctcttcccctttctcccccaacccctagcaaccaataacctactttctattccctggatatttcatgtaaatggaatcacacactatacgaacrtttgtgtctggctgctttcacttggtataatttttttgaggtgtgtccatgttgtggcatggatcaggaggtcatttctttatattgaatttattaataa

SEQ ID NO: 208405 - DNA, 201 bp, Homo sapiens
agcgtgtgaacatatttagattgtaggaattcttatgtttactatatgtcatttaaaattgtgagcccagcatttccacaaggaggagtttcacagccaamcatgtttagcaacacgaacactgttgaatcactttggagactgccgctctggaggcattgtgcaggtgcttcacacttgtgacttgaagtcatgagttca

SEQ ID NO: 208406 - DNA, 201 bp, Homo sapiens
ctgtggtgggtgaggaggaaccacccacagccaggtgcctggctctcagagggggtccctggtccttgtgagagatgactagcaggcccccaggcactgarcattcggactagtggggctgggttgtgcattgtatcaagacatcagtcatagaaccactagccactagttgattgccttgggtagttcaagttataaagg

SEQ ID NO: 208407 - DNA, 201 bp, Homo sapiens
ctccctccttttcccccaacccctgcaggagtgtggtaaaagccttgtaatactttattctagccccagcattgacttccccaagggatgatgacaggacwgtgttcctgtcagactgaacttcttgatggctgggactctgtcaccagcgcctcatccaaggcctgcatcttcaccttgttacagatgaagatattaacc

SEQ ID NO: 208408 - DNA, 201 bp, Homo sapiens
tgtgcagtgtgcaccttgagccaggaggggacccagggctgcctccacacccagtgctcctctagcatgtgacactggctctcctgaggatggccttggcwgccagaagatcacccaggcactgaggggatccttaactcctgaacttagtaaatagactcaccataggcttggtgactcatcaatgatcattattaatca

SEQ ID NO: 208409 - DNA, 201 bp, Homo sapiens
attgccttcatgctttttccctggtaaaataaccttttcttcccccacttcttctcccttctccttgtttgctgatgttctccacagaacaaagagttcargacactttcagagcagttgtccgtgaccacctcaacatacaccatggaggtagagcggctgaagaaggagctggtgcactaccagcagagcccaggtgag

SEQ ID NO: 208410 - DNA, 201 bp, Homo sapiens
acagaggtgacagctcattattcagaatctgctctgaaggctgctcaatgggaccagagcaaggcttagcttggtgcagggctgtggtgggtgaggaggarccacccacagccaggtgcctggctctcagagggggtccctggtccttgtgagagatgactagcaggcccccaggcactgaacattcggactagtggggct

SEQ ID NO: 208411 - DNA, 201 bp, Homo sapiens
ggtaggtgagaaggagcagagcctagcatctgaggctgtagcatttagcctctcttctgttgagattggaattgctcaaggttagtgaatggggcctgtaygttccttttccctccctccttttcccccaacccctgcaggagtgtggtaaaagccttgtaatactttattctagccccagcattgacttccccaagggat

SEQ ID NO: 208412 - DNA, 201 bp, Homo sapiens
ctctgtttggtgaaagagaggtggcccccagggctgccctaggcacagaggtgacagctcattattcagaatctgctctgaaggctgctcaatgggaccasagcaaggcttagcttggtgcagggctgtggtgggtgaggaggaaccacccacagccaggtgcctggctctcagagggggtccctggtccttgtgagagat

SEQ ID NO: 208413 - DNA, 201 bp, Homo sapiens
tatgagacagcaacgtgaccagttggatggttttgcaaggtattgtctgagaggggtgagtgggatctgatcagggagtcctcagacactagactagggakttcagacacaatggcaggagaggggagccatgcacttaagtgggggttaaaggaagagggcacagggtaggtgagaaggagcagagcctagcatctgagg

SEQ ID NO: 208414 - DNA, 201 bp, Homo sapiens
cactgcgccgtggggactacagctgcacacatctgaaccctgaaaccccatcttgtctcaatagatgacacacgtcacccaagcatctagactttcttccyactcacttcccacatccaagcagtctccaggtcttgacagttccacctcctaaatctctgtatctcattcacatctccctctgctccctgccatgggcca

SEQ ID NO: 208415 - DNA, 201 bp, Homo sapiens
tttctactaaaggtatctgttgttttggcgcttccacggggtagtccacacccaggcccttagcctccttcccttttagcctgtgcattgtgtacatttcrttctttttgaaagcttcagcgatccctatgccggctgcttttgtacagctgtgctgttttgcatggctgctctgtttggtgaaagagaggtggcccccag

SEQ ID NO: 208416 - DNA, 201 bp, Homo sapiens
tccagagcagctctgtcgcataggttagatgacatccttttctactaaaggtatctgttgttttggcgcttccacggggtagtccacacccaggcccttakcctccttcccttttagcctgtgcattgtgtacatttcgttctttttgaaagcttcagcgatccctatgccggctgcttttgtacagctgtgctgttttgc

SEQ ID NO: 208417 - DNA, 201 bp, Homo sapiens
gagcatttttctacatgtctttgtaaacatgatttccatggttgattaaaattttatgacatgattatcacaattatccattctctaactgatgaatataytctcatgttttacttttataaataatcctgtgatgaaactaggctttttctgagagagaactggactgtccattttattaaaattcctcataattttaaa

SEQ ID NO: 208418 - DNA, 201 bp, Homo sapiens
aggaattcatctctctgtccacagagtccagagcagctctgtcgcataggttagatgacatccttttctactaaaggtatctgttgttttggcgcttccayggggtagtccacacccaggcccttagcctccttcccttttagcctgtgcattgtgtacatttcgttctttttgaaagcttcagcgatccctatgccggct

SEQ ID NO: 208419 - DNA, 201 bp, Homo sapiens
tctcactataacgagcatttttctacatgtctttgtaaacatgatttccatggttgattaaaattttatgacatgattatcacaattatccattctctaaytgatgaatatactctcatgttttacttttataaataatcctgtgatgaaactaggctttttctgagagagaactggactgtccattttattaaaattcct

SEQ ID NO: 208420 - DNA, 201 bp, Homo sapiens
agttgttatatatataattttttattctgctttttttctcactataacgagcatttttctacatgtctttgtaaacatgatttccatggttgattaaaatkttatgacatgattatcacaattatccattctctaactgatgaatatactctcatgttttacttttataaataatcctgtgatgaaactaggctttttctg

SEQ ID NO: 208421 - DNA, 201 bp, Homo sapiens
atttttaaaaaatccatattcctgccacttaaaggcagtctctgatattatttggatatttatttctaatgctttttatatgcatatttatatagttgttrtatatataattttttattctgctttttttctcactataacgagcatttttctacatgtctttgtaaacatgatttccatggttgattaaaattttatgac

SEQ ID NO: 208422 - DNA, 201 bp, Homo sapiens
tactttgaccagccaagagggggttgtgctctcagcagcaccaggactcatggttcatgtggaggctgaggattattaggaaggggacactgacccatctstggaaggacgttgtcttgctgcagaaagcacagaagctcatggtccttcattcagcaggtgtttgaatgcctgtatgtgttagaccctgttctacacact

SEQ ID NO: 208423 - DNA, 201 bp, Homo sapiens
ggttatttattcttaacagtaatggtttctgttcacttgctgataattttttaaaagagccaaccctttaaaaatcagctgccatcaagtttctgttgccraggacagggaatgtagtggctatttgataaattctttttgttgggttgatttcccaagtaccctgaagtacacagaattctacttgttgtcaatcaattg

SEQ ID NO: 208424 - DNA, 201 bp, Homo sapiens
cccttccctgctgacatcacgtgtcagaaatcagtgttccaccgaaactcttagaagctttgagggcctgctgggtcagaaaggcaattttcatgggggaygggaaagcctagatagaatattttttaacccacagtatttgggcatcttatctttttagcggggaggtaaagccaaaaggtatgtgataacctagaatct

SEQ ID NO: 208425 - DNA, 201 bp, Homo sapiens
tctaacatttggaatatccattatagcctgagtaggccgctaggctgtgggaacgcagggtgctttgacatggcagagatgaaaagcaacatgcacacacrgacatatgctcaacgtgcttcagttgctaaggtctgaaggaggagtgtgtacatgaaccagcttaatcttacatggtcatgtaaataaatgctacagtgg

SEQ ID NO: 208426 - DNA, 201 bp, Homo sapiens
aaggtctgaaggaggagtgtgtacatgaaccagcttaatcttacatggtcatgtaaataaatgctacagtggtttgagctcaaaacattaattttctgccktgtgcaaattagtactttggaaattatgtaagtcctgagggtttcttctgtcaaatggagcattttgtcatcccagagactgtcccttgagctgtcatta

SEQ ID NO: 208427 - DNA, 201 bp, Homo sapiens
acagtacctgaaactggaggacttatgggagagatgctgtttgcaggtgacaggagaggaggaagggaaaatgggagttcttgagccttgcctttttttcrtttccaaaccttggctagaatctcctcactttccaggactccctgcctgcctgtctcttccgtctacactggacaccctgtttttctgtcctttgtttct

SEQ ID NO: 208428 - DNA, 201 bp, Homo sapiens
tatcttgctcgaggtctgcacttatctttgtgtctctatccatgcaggcggaaccaccacagactgacatagatttggacccgaatgcagatctggcctayaatagtctgaaggtaagattcttgggggacaggcttcctggaacactcccctggcagagggcagatgacaaatctgggcatcaggaaatcaggccctgag

SEQ ID NO: 208429 - DNA, 201 bp, Homo sapiens
  misc_feature (1)...(201): n = A,T,C or G
aggcggaaccaccacagactgacatagatttggacccgaatgcagatctggcctacaatagtctgaaggtaagattcttgggggacaggcttcctggaacnctcccctggcagagggcagatgacaaatctgggcatcaggaaatcaggccctgagccccagtctgctaacaaggagagcagtaagcaggtagcttccctt

SEQ ID NO: 208430 - DNA, 201 bp, Homo sapiens
actacaggaatgataataaatacataacctacccaatataatttcagttaaaatatggccactaaaaatcacttaggaaaaaaatcaaggcttgcatgggyagacatagggcagagggatctgccagtgtgtcctctgctggcatgcagggagacagggcggtagaacagtgggaggtgagtgggtcccatggcagggagg

SEQ ID NO: 208431 - DNA, 201 bp, Homo sapiens
atggtcttattcttccccataggcacaactacaagagcggaatgaccctcagcaactgctattagatgccaagcacatgtttcctgttttgtttccatttmatccatcttctctaaccatggactcaatccacatcccagcgtgtctcaatctggaattcctcaatgaagtctgaagatgcatgtttccagcattagtttg

SEQ ID NO: 208432 - DNA, 201 bp, Homo sapiens
tcttttgctctctgtgtctagtttgagctcactgctgatttggccagtcgcaagctagtcttttgctctctgtgtctcatttccttacctgttaattctgrtgagggcctcgtgtggtggctcatgcctgtaatggcagtgctttgagaggccaaggcaggaggatcacttgaggcaaggagtttgagagcggcctgggca

SEQ ID NO: 208433 - DNA, 201 bp, Homo sapiens
tgctgtgtgttccctaaggcatgtatttaggaaaaccttttttctgtgcctgtcttcctttgaaggaaattggcctggagaaggcagccatggacatgacrgtcttcctgaagctgcagaagagagtacgggagctggagcaggagaggaaaaagctgcaagtgcagctggagaagagagaacagcaggacagcaagaaag

SEQ ID NO: 208434 - DNA, 201 bp, Homo sapiens; identical to SEQ ID NO: 36482

SEQ ID NO: 208435 - DNA, 201 bp, Homo sapiens
tctgtgtctagtttgagctcactgctgatttggccagtcgcaagctagtcttttgctctctgtgtctcatttccttacctgttaattctggtgagggcctsgtgtggtggctcatgcctgtaatggcagtgctttgagaggccaaggcaggaggatcacttgaggcaaggagtttgagagcggcctgggcaatatagcgag

SEQ ID NO: 208436 - DNA, 201 bp, Homo sapiens; identical to SEQ ID NO: 36487

SEQ ID NO: 208437 - DNA, 201 bp, Homo sapiens
caaaccaaagtagcttagaatctgactccaattacccctccatctccacatctgagatcggagacactgaggatgccctccagcaggtggaggtgagtgaygcaggctcttgggtactgtcctcctccagagggagtgtgtgtttttttctgtgtggaactgtccaagagaaatttactcttctgctgatggtgaccagag

SEQ ID NO: 208438 - DNA, 201 bp, Homo sapiens; identical to SEQ ID NO: 36488

SEQ ID NO: 208439 - DNA, 201 bp, Homo sapiens
tgagactcacctttgctctgcagtaggtgaggagcgtaatagattcatcaagagcctctgatgagctcgtcatgggcagcctcttaacaagagattaatcrgaaaacatgagtcaatacatgtgagggaatccatccagaaaaactgcagcttagcgtgttgctttccagatgaatttgcccagaactctgtgaaggaaaa

SEQ ID NO: 208440 - DNA, 201 bp, Homo sapiens; identical to SEQ ID NO: 36491

SEQ ID NO: 208441 - DNA, 201 bp, Homo sapiens
acattccttattttgtgctaccatcaccatcatccatctctagaactcttttcatcttgcaaaactgaaactgcggcattaacaatatttccctattctcyctcccccagtccctagcagccacctttctactttctgtaaatctggtgatcccaggaacctcatataattggattaatacagtatttgtccttttgtgag

SEQ ID NO: 208442 - DNA, 201 bp, Homo sapiens; identical to SEQ ID NO: 36492

SEQ ID NO: 208443 - DNA, 201 bp, Homo sapiens
tgagtttcagagctgaaaacttgtatgtattactttataaaggccacccacaaacctcttatgttttcatcatcttttcaaaatttagatataatttatcwactataaaattcacccctttaaagtatgcaatttcagttattttcattatatacagagttatacaaccatcaccactgtctaatttcagaatgtttttat

SEQ ID NO: 208444 - DNA, 201 bp, Homo sapiens
cacagacaggagtgatgggtgctttgggagagggtcacgagaggggcagggctcaaccttgagagaggggcctctcaggataagtatagaagagaaagggrtgggggtatttcaagtaaaaatagcacagtaagcaaaggtatagaggcaggagtagtgagcattgtgcctatgagacagcaacgtgaccagttggatggt

SEQ ID NO: 208445 - DNA, 201 bp, Homo sapiens; identical to SEQ ID NO: 36493

SEQ ID NO: 208446 - DNA, 201 bp, Homo sapiens
ccatttgtcccaggaccatttgttgaaaggatcacattgaccattgaggaaggcaaggtagacagtgacaatttcatttaagggataaagaaatatacccragaaaagttaagtaatcaggtcaagtcctccagatagaaaagggtagagccaccataccgcatgtccacaggttaaggatgcctgttcctgtgagccttt

SEQ ID NO: 208447 - DNA, 201 bp, Homo sapiens
tccttctccccagtcgcctacatcctcacctgccacatggaggtgaaagttgacctttacatttgttccagatctaaaattctatgttgtttcttcagatsaaaaatacaactttcttaagcatctgtacttacgtggttcagaaagatcattcatgtaggccgggcatggtggctcacacctttaatcccagcactttgg

SEQ ID NO: 208448 - DNA, 201 bp, Homo sapiens; identical to SEQ ID NO: 36494

SEQ ID NO: 208449 - DNA, 201 bp, Homo sapiens
tctccatacgccccatctcctgaactccctggctactaaagccctgtggtgcttgtatgaggtgggtgatgttctctccactgtacaggtagcggaggggmggcatccaggctgggactggccccagtcgcactgccggccggcatcagagccaggcttctgtcctcctgttctccaggttcatcctgtactggccttgat

SEQ ID NO: 208450 - DNA, 201 bp, Homo sapiens
atctcctacaagtctcaggagatgatgtcagctagagaaatgtttcatggaagtgttatcttatgtatttaattgttgttgcaagtacctcaaaagtcaargctatatctgaagcccttttatatttctacttccttgatattgtgggtttaaatgacaaggctatatttatgtattgaaacaaattctgacctgggcatc

SEQ ID NO: 208451 - DNA, 201 bp, Homo sapiens
aactgctatgctggaaaactctgggcttgccatctctgacgatattaattggtgggccacgtggctgccctgccttggcctgtgggaggccaagtctcccygagggcaggaattcatctctctgtccacagagtccagagcagctctgtcgcataggttagatgacatccttttctactaaaggtatctgttgttttggcg

SEQ ID NO: 208452 - DNA, 201 bp, Homo sapiens
gaaagaaaaatcagtttcaggagaatgagcatatgtatgaatcgagaccaccttaatgagaaagggacagaccctacctggaaatagcagatttgctcatyggaaagactgcatttgtttaagtagagatcatttcagaggccaaggggaaaacttaaggctttctttaaagattcccctcccacacagaccaaaacagca

SEQ ID NO: 208453 - DNA, 201 bp, Homo sapiens
tcttggcatgatgctgttgatatgaaagcctttgtaggtactcagtaaatactccactaggctggaacttaatttattgaaggtctcggcagtgcagagcrtcaccagagcatgagctgtcactgctatatgggacctgtagccatacatgaagatgatgctgcatcttcagtaggtagcttgccttagcctgaatctcct

SEQ ID NO: 208454 - DNA, 201 bp, Homo sapiens
caaaatcaggtctcacctatctctgtcccaacagatagcacttgactcatcagcttcccagccccgcgtccctgcttcctgctaaatgctacaacttgggracttcagcactctaaacacccaagtctccatcaaagggagtgcataagagtttataatatgaaaatcttcattggaggagcaaaacagagaagcagactc

SEQ ID NO: 208455 - DNA, 201 bp, Homo sapiens
cagaatattatagtaaatgtacgcatagctttaaatttgcctttttaaaaagagagcctaaatactagcccaccttgccatgccatctttttttttttttwaaacagggtaagggggtaacaggctggttaatcaagggctatagttagctggactccggttgattgaggtttttgctgtggtccacctatcagtgtccac

SEQ ID NO: 208456 - DNA, 201 bp, Homo sapiens
agactgtaatgtgaaaaagctcatactcattgccttgttttgatatgcttctaggactttttgaattcacctagaatagtgaattattttgtgaattttgracctattcttacatgattctttctttccaagctcttggcatgatgctgttgatatgaaagcctttgtaggtactcagtaaatactccactaggctggaac

SEQ ID NO: 208457 - DNA, 201 bp, Homo sapiens
ggagaaaaaacattccctgcatgtgtgtcccagtcagatgagacatctgcaaagtctgtttacccagcagatccacaaaatcaggtctcacctatctctgycccaacagatagcacttgactcatcagcttcccagccccgcgtccctgcttcctgctaaatgctacaacttggggacttcagcactctaaacacccaagt

SEQ ID NO: 208458 - DNA, 201 bp, Homo sapiens
ctgtgaagtaaaaggagtggcttggaatggattgctaagtttgctttcagcccctgcagtctgactcttggagaaaggttctcaaaagatgattgatcgaytgatcagtcaacagtcagttctaagggttagaggaagcagatctgggtgggagatgttctggagacacacagggtgaggacagtatggagatgaggctga

SEQ ID NO: 208459 - DNA, 201 bp, Homo sapiens
tgataccatgactctgtactgtcaggtatctctgactgcagaagggagatgagccagggcccactgtagactgtaatgtgaaaaagctcatactcattgcsttgttttgatatgcttctaggactttttgaattcacctagaatagtgaattattttgtgaattttgaacctattcttacatgattctttctttccaagct

SEQ ID NO: 208460 - DNA, 201 bp, Homo sapiens
ggtgacctttctacatgaataaaaaccagaaggtgaggtccaaagccagaaaggatcaagaatagaactggaaactcctgagactagtgaccctgggagaraaaacattccctgcatgtgtgtcccagtcagatgagacatctgcaaagtctgtttacccagcagatccacaaaatcaggtctcacctatctctgtcccaa

SEQ ID NO: 208461 - DNA, 201 bp, Homo sapiens
gggtgtctcagtggagcaggtgagaccctcagagaaatccttgttcagaaaaagtggccttgcagagcatatcatcccttcctgttttttttccgaaatarggaatgaagcgcaggtactgttgttgcttggatgcggtagacagcccccagcctctggctctgcttaagctggaggacccaggcttgttccctgactcag

SEQ ID NO: 208462 - DNA, 201 bp, Homo sapiens
aataaggttgcagaaactgcctttgagtgtgcgaagtcacctgaatctgacaggttctgagaacagttctagtatgctaccagcaccatcttgctactctrtctggacactgtaatgtgctgatgtgataccatgactctgtactgtcaggtatctctgactgcagaagggagatgagccagggcccactgtagactgtaa

SEQ ID NO: 208463 - DNA, 201 bp, Homo sapiens
ctaggggaagctcaccattccctggtgcctgagacaggcctggtagccaaaaggagccatgactgtgctgacctggaagctggctgggcagacagaccctscttacggccagcagcagtgttggtttttctttatcgacctgctatcagccagagctggattcaaatcaggagatggtacccactgactcagagtttgtgc

SEQ ID NO: 208464 - DNA, 201 bp, Homo sapiens
taaatgtgtctacaagtcttgtaacctacaaatcatggaattccacacttgtggtttgtctacccttgggagcagatgaatgggatggtgacctttctacrtgaataaaaaccagaaggtgaggtccaaagccagaaaggatcaagaatagaactggaaactcctgagactagtgaccctgggagaaaaaacattccctgc

SEQ ID NO: 208465 - DNA, 201 bp, Homo sapiens
atggcatcctaaagtcacacaggtggcagtggcagggccgaggtttgaaccccagctgtctggctccagagcccatgctctgcatcactttgcccttctgyctctctgtctgcctatctgtctgtctgcctcttttggaaagagtgtttgctttggaaatcagaattcagttcttctgcttaaaagttgagtggctgatgt

SEQ ID NO: 208466 - DNA, 201 bp, Homo sapiens
ggaactccagcacaaaggtacctaataaggttgcagaaactgcctttgagtgtgcgaagtcacctgaatctgacaggttctgagaacagttctagtatgcyaccagcaccatcttgctactctatctggacactgtaatgtgctgatgtgataccatgactctgtactgtcaggtatctctgactgcagaagggagatgag

SEQ ID NO: 208467 - DNA, 201 bp, Homo sapiens
cctggcacagagagggcgcaataaacatttgtcttaaactgccataagtctaaatagctgctccactctgctgctgttgacttaggccaggattctgaggrtgtgagacctggttttcccagcattgtctctgatgaaatgattttacttgtgggccttgtcacagaggctggtcccggggacccctggggttaaaattac

SEQ ID NO: 208468 - DNA, 201 bp, Homo sapiens
tgagacatgaagtggattcattctttgggagaaagcacgtggtgcttggaaactcctgttaaatgtgtctacaagtcttgtaacctacaaatcatggaatwccacacttgtggtttgtctacccttgggagcagatgaatgggatggtgacctttctacatgaataaaaaccagaaggtgaggtccaaagccagaaaggat

SEQ ID NO: 208469 - DNA, 201 bp, Homo sapiens
tttgtatgtttttagtttaaaatgcttgatgtagaagattagcccataattttcaccagcattaggtgctgttttaagcattaggcattgtaaccttgtaygtatgtgcaggtgggcacactcattctaatccactgtgatagtgaagtgttcctgcataaggtgaggcttaagtcttgctgaaaacaaacccttggatcc

SEQ ID NO: 208470 - DNA, 201 bp, Homo sapiens
ctctcatttagctgtccttgaggaagatgccccttcttgattttacaggcctcgtctccactgccaagcatggggcctggcacagagagggcgcaataaayatttgtcttaaactgccataagtctaaatagctgctccactctgctgctgttgacttaggccaggattctgaggatgtgagacctggttttcccagcatt

SEQ ID NO: 208471 - DNA, 201 bp, Homo sapiens
tcacccagaccccagggatctccaggggccagaggtgggatccaggtgtggagattaagggaagaagaaagtaagacgcaggcttcccataaaaggccacrctcctgatgtgctgctttgagggccctctgcccacaggaccctctgcccagataagtcacctgccagcctgcccaccatgagacatgaagtggattcatt

SEQ ID NO: 208472 - DNA, 201 bp, Homo sapiens
atgaggtaagaggaactaatttttttgtatgtttttagtttaaaatgcttgatgtagaagattagcccataattttcaccagcattaggtgctgttttaarcattaggcattgtaaccttgtatgtatgtgcaggtgggcacactcattctaatccactgtgatagtgaagtgttcctgcataaggtgaggcttaagtctt

SEQ ID NO: 208473 - DNA, 201 bp, Homo sapiens
aactcctcctctcatttagctgtccttgaggaagatgccccttcttgattttacaggcctcgtctccactgccaagcatggggcctggcacagagagggcrcaataaacatttgtcttaaactgccataagtctaaatagctgctccactctgctgctgttgacttaggccaggattctgaggatgtgagacctggttttc

SEQ ID NO: 208474 - DNA, 201 bp, Homo sapiens
ctagacttgcacctggctgccaccatgagattgtgtttggcttctggaaggagcagaggcccttggccctacgtgggagtccttctctcttctatttcccmctgccttttcctggcctgagccttcacatgcagctgaggaacacacagacatccgtggaggttatagagcctacagtgccagcatgtgctgggcttgcat

SEQ ID NO: 208475 - DNA, 201 bp, Homo sapiens
aaccactgtactaccctacgcatgaaactgcctcccggactcctgcattaaaatcagcgcaaaaactcctcctctcatttagctgtccttgaggaagatgmcccttcttgattttacaggcctcgtctccactgccaagcatggggcctggcacagagagggcgcaataaacatttgtcttaaactgccataagtctaaat

SEQ ID NO: 208476 - DNA, 201 bp, Homo sapiens
gttggttcagatcatctccaaggccccttctagacttgcacctggctgccaccatgagattgtgtttggcttctggaaggagcagaggcccttggccctaygtgggagtccttctctcttctatttcccactgccttttcctggcctgagccttcacatgcagctgaggaacacacagacatccgtggaggttatagagcc

SEQ ID NO: 208477 - DNA, 201 bp, Homo sapiens
ggcatcagcatcactgagcttgctggaaatgtagattctcaggtaccccacccccgagacctgctgaatcagaaggctgggatagggcccacccatctgtsttttaacaagccctgcaagggattctgttgcccactcaagtctgagaaccactgtactaccctacgcatgaaactgcctcccggactcctgcattaaaat

SEQ ID NO: 208478 - DNA, 201 bp, Homo sapiens
agaaagcctcactggccttagttccctcatctgtgtgtatatttataaaagttggttcagatcatctccaaggccccttctagacttgcacctggctgccwccatgagattgtgtttggcttctggaaggagcagaggcccttggccctacgtgggagtccttctctcttctatttcccactgccttttcctggcctgagc

SEQ ID NO: 208479 - DNA, 201 bp, Homo sapiens
ccccagcagtagatgtgggactgatggcatcagcatcactgagcttgctggaaatgtagattctcaggtaccccacccccgagacctgctgaatcagaagsctgggatagggcccacccatctgtgttttaacaagccctgcaagggattctgttgcccactcaagtctgagaaccactgtactaccctacgcatgaaact

SEQ ID NO: 208480 - DNA, 201 bp, Homo sapiens
atgagaggggcccagtagctccccagcagtagatgtgggactgatggcatcagcatcactgagcttgctggaaatgtagattctcaggtaccccacccccsagacctgctgaatcagaaggctgggatagggcccacccatctgtgttttaacaagccctgcaagggattctgttgcccactcaagtctgagaaccactgt

SEQ ID NO: 208481 - DNA, 201 bp, Homo sapiens
cactttcggggcatcaatcctacccacccttttagaagtaatgagaggggcccagtagctccccagcagtagatgtgggactgatggcatcagcatcactragcttgctggaaatgtagattctcaggtaccccacccccgagacctgctgaatcagaaggctgggatagggcccacccatctgtgttttaacaagccctg

SEQ ID NO: 208482 - DNA, 201 bp, Homo sapiens
tcctggctcagtggtctctctgcgttgctttgagaagagcagaaagaagttcatataagctgtatgtgcatttcctttttaaaggattcagttcagctgcrtattatggagctaccgatatccatgacccagaagttatcaaaatataagattttttttctttctcctgtggctgtttaaaatctatttctatggaaagat

SEQ ID NO: 208483 - DNA, 201 bp, Homo sapiens
ggtgagggcctcgtgtggtggctcatgcctgtaatggcagtgctttgagaggccaaggcaggaggatcacttgaggcaaggagtttgagagcggcctgggmaatatagcgagacccaacctctacaaaaaattttaaaattagctgggcatggtggtgcatgcctatagtcccagctactccagaggctgaggtgggagaa

SEQ ID NO: 208484 - DNA, 201 bp, Homo sapiens
gaaggaaaatctcatgaagaaagaactggaggaggagcgatcccggtaccagaaccttgtgaaggaatattcacagttggagcagagatacgacaaccttygggatgaaatgaccatcataaaggcaaggggggtgcttctgctgtgccatggcacaggtccctggctcctgtccagcttctgaccacgtgatctcaggca

SEQ ID NO: 208485 - DNA, 201 bp, Homo sapiens
acaagagattaatcggaaaacatgagtcaatacatgtgagggaatccatccagaaaaactgcagcttagcgtgttgctttccagatgaatttgcccagaastctgtgaaggaaaatctcatgaagaaagaactggaggaggagcgatcccggtaccagaaccttgtgaaggaatattcacagttggagcagagatacgaca

SEQ ID NO: 208486 - DNA, 201 bp, Homo sapiens
ctcacctttgctctgcagtaggtgaggagcgtaatagattcatcaagagcctctgatgagctcgtcatgggcagcctcttaacaagagattaatcggaaarcatgagtcaatacatgtgagggaatccatccagaaaaactgcagcttagcgtgttgctttccagatgaatttgcccagaactctgtgaaggaaaatctca

SEQ ID NO: 208487 - DNA, 201 bp, Homo sapiens
aggagctggtgcactaccagcagagcccaggtgaggacaccagcctcaggctgcaggaggaggtggagagcctgcgcacagagctgcagagggcccactcrgagcgcaagatcttggaggacgcccacagcagggagaaagatgagctgaggaaggtatgctcaggccagaggggcaggcgctggcaagcagagtgggtgg

SEQ ID NO: 208488 - DNA, 201 bp, Homo sapiens
gcactaccagcagagcccaggtgaggacaccagcctcaggctgcaggaggaggtggagagcctgcgcacagagctgcagagggcccactcggagcgcaagwtcttggaggacgcccacagcagggagaaagatgagctgaggaaggtatgctcaggccagaggggcaggcgctggcaagcagagtgggtgggcacacggag

SEQ ID NO: 208489 - DNA, 201 bp, Homo sapiens
gtgtccaggtagggccacagagggagaggtttgcatttgcagatgtctcagggttctctgcatcagggcggtcaatactctctccctgacactgcctgttycctcttgctccccaggctggctgagcacctgcggaggatcagagcggctgtggtgctccagaaacattaccgcatgcagagggcccgccaggcctaccag

SEQ ID NO: 208490 - DNA, 201 bp, Homo sapiens
ctagtggaccccagctttgggaagtcacgttctagaagcaaatgggatcggggttgcctttggcaaaactgacaaggttcatgacccttggccctatagtrggaacagagattctagaagtctccggtcaagaccccttcactggagctgaaagatctcagacagccccactcctgtgtctggggccttgtcgttggctgg

SEQ ID NO: 208491 - DNA, 201 bp, Homo sapiens
actgtggcagctcagggcagcagatcatggtggggaagatgggggtctgcctttctcagctacttggcttctctcttcctctgtgctgagagtggttcctrttggggccatgtctgcatcttggcttttcctcggcagctgggcctatccctataatcaatgccttctcacctcagggggtaggtctagtttccacatctc

SEQ ID NO: 208492 - DNA, 201 bp, Homo sapiens
ttcgagcaggccaggtggcctacctggagaagctgcgggctgacaagttccggacagccaccatcatgatccagaaaactgtccggggatggctgcagaasgtgaaatatcacaggctgaagggggctaccttaaccctgcagaggtactgccggggacacctggcccgcaggtgagccagactgtggcagctcagggcag

SEQ ID NO: 208493 - DNA, 201 bp, Homo sapiens
ggatgtcagggtcccaggccctcaggtttaggaagagcaggcttccggtgcacagtgaccaaatctctcctacagtatttgcccacctttcatcttatttsatccacagcactgggagttaggcacattagggggtagtctgtcccccatgtaattcaaggaacccttaaataggaaggacttgattttggtcacagcaag

SEQ ID NO: 208494 - DNA, 201 bp, Homo sapiens; identical to SEQ ID NO: 36508

SEQ ID NO: 208495 - DNA, 201 bp, Homo sapiens
gctggctctgtggcccgcatccttgttggcaagaaagccgtgacagaggctggggctgatcttgatgctgcctgcaggggagggcagcttctgggcacccytgcccatgatgcagcactgtgctttggtggaggtgcctcacctttgaacacttaaagtctcagcctgtcacacccaccctggtgggcttatttcttacac

SEQ ID NO: 208496 - DNA, 201 bp, Homo sapiens
aggaaacatgtaaggtgcaggagatgtcactttcatcattcttcctgtgattgtttctagttcccactagtggctgacttgtttcatgatgacaaggaccytgttcctgccaccacccctgggaaggggtcatcttcgaagatcagcgtccgttctgccagaccccccatgaaagtctccaacaaggagcacaagaaaacc

SEQ ID NO: 208497 - DNA, 201 bp, Homo sapiens
cactgccaagataactgttccagccagggaagtcccaagggcccctggagagccccccacagacttgggtcattgctgttctgcctcccaccaccgccccmcctcccaccaccatctctacaagccacaagggaaatagcatgttgcccgctttttcagtgtttgtccatcaatggggagttgcagtggatggggatctaa

SEQ ID NO: 208498 - DNA, 201 bp, Homo sapiens
ctgccctgccttggcctgtgggaggccaagtctccccgagggcaggaattcatctctctgtccacagagtccagagcagctctgtcgcataggttagatgrcatccttttctactaaaggtatctgttgttttggcgcttccacggggtagtccacacccaggcccttagcctccttcccttttagcctgtgcattgtgta

SEQ ID NO: 208499 - DNA, 201 bp, Homo sapiens
cactctggtggaaaatggaaattggatgcttctaatggttggtgtgtctgtgagaaatgaggagtgtgagggaaaagtgaaactgacacgtgttgattccmgcatgattgtccatgtaggtgcacatgaaacacagttgtttcatggctttataacccattagactagctcctgtgctgtgtaaaacaaaacactgacttg

SEQ ID NO: 208500 - DNA, 201 bp, Homo sapiens
catggtccttcattcagcaggtgtttgaatgcctgtatgtgttagaccctgttctacacactggggcaaaaggtgaatggtgtttgaaaaaacccttctcrttgttaaggagcttaaatgtgtggggatgggggaagaaagtacagagaggaatctaacgtgaattaccccccaagggctacaaacaacaatgaagcagag

SEQ ID NO: 208501 - DNA, 201 bp, Homo sapiens
gggaaccctccagggtacctgcctgacaacaatatcatcagtatccttagcagggatttgtctctttatctccttccatggagctatttagactctgcatrttgtgaataggattatcccttccatgccctcaagcagggatttgaggtgtgctttgctcagaaatatggtagcattctctagtgctaatcatggtgtcag

SEQ ID NO: 208502 - DNA, 201 bp, Homo sapiens
tatgggttattttcattagcattcaccttccatgctagaccataaactccatgatatagaagaggctaggcttcttctataacacttttgttttaccagtycctagcacaacatttgttgcatatttgagcgtcagtaagtgttgatggataatgtgtggatgaatgaatgaatgcacaaactagtcaatctagtttcttg

SEQ ID NO: 208503 - DNA, 201 bp, Homo sapiens
ggtccttcattcagcaggtgtttgaatgcctgtatgtgttagaccctgttctacacactggggcaaaaggtgaatggtgtttgaaaaaacccttctcattsttaaggagcttaaatgtgtggggatgggggaagaaagtacagagaggaatctaacgtgaattaccccccaagggctacaaacaacaatgaagcagagtaa

SEQ ID NO: 208504 - DNA, 201 bp, Homo sapiens
tcctgtcttcatttcccacatcccagacccccgatttagtcgcatctttgttgttgatttcctttaggatattcatcttcttgtcattatgtttttaattrtgggttattttcattagcattcaccttccatgctagaccataaactccatgatatagaagaggctaggcttcttctataacacttttgttttaccagtcc

SEQ ID NO: 208505 - DNA, 201 bp, Homo sapiens
aaatgtggccactcatctcttgtcttgctttttttttttttttctcctttggcagctttgacccaaagagagcagtgcagcaactcagagcctgcggggtrttggagacgattcgaatcagtgcagctggctacccatccaggtaactaacgtgcccgccagctgcctcctggggctgccctagagcagccagagtttggt

SEQ ID NO: 208506 - DNA, 201 bp, Homo sapiens
atgtgtggggatgggggaagaaagtacagagaggaatctaacgtgaattaccccccaagggctacaaacaacaatgaagcagagtaaaggggatggagggygacctgtgggggcctgaggggtatgatttcacttttgatggccacagaaggtctttctgagaagacatctgagtaaggggagaaaataagccaaggcgat

SEQ ID NO: 208507 - DNA, 201 bp, Homo sapiens
tgcctcccaccaccgccccacctcccaccaccatctctacaagccacaagggaaatagcatgttgcccgctttttcagtgtttgtccatcaatggggagtygcagtggatggggatctaagagggagagatccagtgttcagggtgttggagtaacaacttcaaaattggggcaggctggatgctgctgcaggaagggccc

SEQ ID NO: 208508 - DNA, 201 bp, Homo sapiens
atgcaggaatccaggtcagggagtgacttaaaggaatcatctggtcagctcttccatttatatagatgagcaagttaaaatctagtaagcctgagaggttwgccatgggccacacggctatcaagttgcagggtcatatctaaagttcaggtctcctgacccagccccatgcccttcctgctatacctcattacttctgag

SEQ ID NO: 208509 - DNA, 201 bp, Homo sapiens
ggcattttaaattgaagtgcattaactggatagtcctaatcaataagcacgtggtttgttgtccaaagagtattttaactacgtgacaaaataaatattayatttaggtttcattatgcctttcttgtaaagactgattttccattttataaggtaaaatgcttgtgaaacttgatgcagaatatttgactacttgaattc

SEQ ID NO: 208510 - DNA, 201 bp, Homo sapiens
aaaggggatggagggcgacctgtgggggcctgaggggtatgatttcacttttgatggccacagaaggtctttctgagaagacatctgagtaaggggagaarataagccaaggcgatttggggataacaggtgacaggtgtggcacacgtgcacaggccttggggcatgagtaggctgggtgggtgtgaggaccaatgaggt

SEQ ID NO: 208511 - DNA, 201 bp, Homo sapiens
ctgagctttgccccaaacctgagtatcagggcatagagattccctgctccactgccaagataactgttccagccagggaagtcccaagggcccctggagasccccccacagacttgggtcattgctgttctgcctcccaccaccgccccacctcccaccaccatctctacaagccacaagggaaatagcatgttgcccgct

SEQ ID NO: 208512 - DNA, 201 bp, Homo sapiens
agaagccaggggatggagtgattcaagtataagaaaatgcaggaatccaggtcagggagtgacttaaaggaatcatctggtcagctcttccatttatataratgagcaagttaaaatctagtaagcctgagaggtttgccatgggccacacggctatcaagttgcagggtcatatctaaagttcaggtctcctgacccagc

SEQ ID NO: 208513 - DNA, 201 bp, Homo sapiens
tttgaagaggtcgggtaggatcaaaaatgaaagcacaccacttctagccattggacttgacaagcactggagttgctttcaaggtacatttcagcagcatrgggaggaggccatctggtggagggaggtctgaggaggagcggcgtggaaggcggtgtctgtctgtggatgccttgctcgaggtgatcgatggtaaagtga

SEQ ID NO: 208514 - DNA, 201 bp, Homo sapiens
acctttgaacacttaaagtctcagcctgtcacacccaccctggtgggcttatttcttacaccatgaaatagaacttcctgagctttgccccaaacctgagyatcagggcatagagattccctgctccactgccaagataactgttccagccagggaagtcccaagggcccctggagagccccccacagacttgggtcattg

SEQ ID NO: 208515 - DNA, 201 bp, Homo sapiens
agactaaccactcccccagtccaaaaaaaggagctgctgaatggtgttgaatgagtcctgaaacctaaggtgttatttatcatgctcaggggatgcagccrcctgttttatgttgttaaagcatctcccactgcaccctgcagccctgacaccacaaagtgggggccatttggctgcagaagtttgttacctgctgtgtct

SEQ ID NO: 208516 - DNA, 201 bp, Homo sapiens
gtgtcaggaagggacctttacaaggaggcgtgggccagtggcacagaggcctttgaagaggtcgggtaggatcaaaaatgaaagcacaccacttctagccrttggacttgacaagcactggagttgctttcaaggtacatttcagcagcatggggaggaggccatctggtggagggaggtctgaggaggagcggcgtggaa

SEQ ID NO: 208517 - DNA, 201 bp, Homo sapiens
ctgacaggggtgagagagattccaagaccccatggagggcctccttggaagagaggatgctgaaggggtcctttgtctcaaagccagcgattagattgcarctctttgtgctggcaagtccacaggcaggagggctctgtatgaaagagcaaagaaacctaaaaagtgaaggctgcaaacccagagagccagcttctttgt

SEQ ID NO: 208518 - DNA, 201 bp, Homo sapiens
aaaaaaaggagctgctgaatggtgttgaatgagtcctgaaacctaaggtgttatttatcatgctcaggggatgcagccacctgttttatgttgttaaagcrtctcccactgcaccctgcagccctgacaccacaaagtgggggccatttggctgcagaagtttgttacctgctgtgtctgccaacagctgtgttagctggc

SEQ ID NO: 208519 - DNA, 201 bp, Homo sapiens
gcctttcccaagggaggcttagtgcctggggatgaaaatgagcatgtgaactattataggtagcactttcggggcatcaatcctacccacccttttagaastaatgagaggggcccagtagctccccagcagtagatgtgggactgatggcatcagcatcactgagcttgctggaaatgtagattctcaggtaccccaccc

SEQ ID NO: 208520 - DNA, 201 bp, Homo sapiens
ccccagggactgaggtaagtggtgaggatgaggctctggaaaatggcaatgcaaaggacggaagtgcaggaaaaagctccgtgggaggttctgggaagggygccgggcagggagaagattggaggaagcagaactgctaagtgtcaggaagggacctttacaaggaggcgtgggccagtggcacagaggcctttgaagagg

SEQ ID NO: 208521 - DNA, 201 bp, Homo sapiens
taaaaccagggtaaggctagcacccaacattcatatcctaaggccttgtacacccacctggaaagaaaagatgcaaatttggcaccaagtttctatgcaarcagtaacaggaagaaaactgagtggcttgagagttcttaatagaaaagaaccatgcagttcaagaggatttggagctgtccgtggtgctgacttgttttt

SEQ ID NO: 208522 - DNA, 201 bp, Homo sapiens
cccactgcaccctgcagccctgacaccacaaagtgggggccatttggctgcagaagtttgttacctgctgtgtctgccaacagctgtgttagctggctggraagactggggttggctggtacctggagaaatatgatcaaggaagcattctctcacccacctggggtgtggagctgagtgtgggattggtcctttcctgct

SEQ ID NO: 208523 - DNA, 201 bp, Homo sapiens
cccgtacccattaacaacttcccagttcctcctcccccaacctctggcaaccacaattgtactttctgtctttctgcattagacaattctaggttcctcaygtaagtagaatcgtatagtatttgttttttgtaattggcttatttcacttaacatttgtgtcctgatggttgatctctattgtagtatgtgtccatcttc

SEQ ID NO: 208524 - DNA, 201 bp, Homo sapiens
agccatggcctaggggagactgtccccagggactgaggtaagtggtgaggatgaggctctggaaaatggcaatgcaaaggacggaagtgcaggaaaaagcyccgtgggaggttctgggaagggtgccgggcagggagaagattggaggaagcagaactgctaagtgtcaggaagggacctttacaaggaggcgtgggccag

SEQ ID NO: 208525 - DNA, 201 bp, Homo sapiens
ctttttgctggatgcactcctaggaaccacacacgatgctgaattttaatagttcctgtcattctctgggggaacagggaaccaattaggtgccttacttagaaaaataaaatttggtgctcagtaactttgatatatcccacctacatataacctcccactgtaaggaaaagcctgccctagggtatagatttcagattg

SEQ ID NO: 208526 - DNA, 201 bp, Homo sapiens
tgtcttactgctgcacttgacttgtcaaaaaataaataacttgtcaaaaaataaataactctggtaacagctacattgcccaggagaacagtcttgaatcrttcccatggcttatttctaattttttaaagtgtggtaaaatacacaaaaaatttaccatcataattaaccctttttaagtgtatagttcaatggtattaa

SEQ ID NO: 208527 - DNA, 201 bp, Homo sapiens
ggtaatgtgggaatttagcctatctgccagtcacttacaggactacaaataactctggctggttggtctgaaggtagtgagttatttcaatggactgttcrcagtctgttacagatcgaactccttgttctattccttcccctgtcttactgctgcacttgacttgtcaaaaaataaataacttgtcaaaaaataaataac

SEQ ID NO: 208528 - DNA, 201 bp, Homo sapiens
gatgcagccattgtcatccagtgtgccttccggatgctcaaggccaggcgggagctgaaggccctcaggattgaggcccgctcagcagagcatctgaaacrtctcaacgtgggcatggagaacaaggtggtccagctgcagcggaagatcgatgagcaggtcagtgtctgcagctccctacctgggtgtcgggggcttggg

SEQ ID NO: 208529 - DNA, 201 bp, Homo sapiens
ccctctgaccctaccctcggttgttaggttttgagcccaggcctggttcaagtccagtgccctctccagaaaggaatttccttagagaagtgacaataatygccacaaagtcttgtgtttggaggccaaacagagagctagactagggaatcagatgcatttcagcaaacaggtgacacatgggctgagtgggtcactttc

SEQ ID NO: 208530 - DNA, 201 bp, Homo sapiens
ggaaccctgctgggttgtctttcctcatccaaaggggtgagcccagggaagggcaactaattttaacctaatggatgtaattaagacagtaattacaggtscaaaacaatctcatagttttatttgggggttatttgcatcctgtaattatgcatacaactgtgtggccatttgaggataatctttttaaaatgttgatca

SEQ ID NO: 208531 - DNA, 201 bp, Homo sapiens
tctgcgtggcttgctgcctgccagacgcacttagtaagccttgcataactgctggcttgagatgcttggctttgcattgcggtcttttaagtctaggcccytggaggtttcagtcagcctcaactccaggcttatcaccctggtgtttgtatgtgtgactatctacatgtagacataagcattgtcatcactggttttatg

SEQ ID NO: 208532 - DNA, 201 bp, Homo sapiens
gtctcctctctgttgtgcggttctgcgtggcttgctgcctgccagacgcacttagtaagccttgcataactgctggcttgagatgcttggctttgcattgyggtcttttaagtctaggcccttggaggtttcagtcagcctcaactccaggcttatcaccctggtgtttgtatgtgtgactatctacatgtagacataagc

SEQ ID NO: 208533 - DNA, 201 bp, Homo sapiens
ttagctggccatgttggcacacacctgtcccagctactcaagaggctgaagtgggaggattgcttgagcccaggagtttgaggctgcagtgactgtgccamtggactccagcctgagcaacagagcaagaccctctctcaaaaaaatagataaacgaagtagaaaagctactgtctagggagtatatccttcttgttccgt

SEQ ID NO: 208534 - DNA, 201 bp, Homo sapiens
ctgaaggtctcctctctgttgtgcggttctgcgtggcttgctgcctgccagacgcacttagtaagccttgcataactgctggcttgagatgcttggctttkcattgcggtcttttaagtctaggcccttggaggtttcagtcagcctcaactccaggcttatcaccctggtgtttgtatgtgtgactatctacatgtagac

SEQ ID NO: 208535 - DNA, 201 bp, Homo sapiens
ggttctggggaggtacaaagtatgattcttgcttccagggacttggaatttaaataaccagacactggaaaaatacaaaagacaacactacctgagggcaygtgtccatgctgctcacaagctaatgcttattcaattgagtggacgtaaattaacctccttctgtttgtctagagttgggggttatgagaagttcaaact

SEQ ID NO: 208536 - DNA, 201 bp, Homo sapiens
aatttagcaatatgggcccataaaactgatctgctacttattatattggctatttttaatggatttagcatcatttaattttgcctaaatgtaattgtacratgttaaatcagtttcagtcagcaccttcaatcaacagtcggaagagggtgagaaaatcaagccccgccccactgtggtggttaaaagccggtccccagg

SEQ ID NO: 208537 - DNA, 201 bp, Homo sapiens
cccgccccactgtggtggttaaaagccggtccccagggtggtttctcagacaagtctctaacttgtgctttctccactgcactcacagcgcgaggccttargcaggggagggtgcccgtgggcatgtcttgggcagtcatggtagctgctggcaggccacttaaatgtcagggaatccatctgcagtgccgtgcctagcaa

SEQ ID NO: 208538 - DNA, 201 bp, Homo sapiens
tgagggaatgaaaaacaggtgagagaatgaataacaacgatgagcaggttttctcagagtgccccaagtgggctgcaaggattatccaaggaatttgtacmttttggtgaaagaagacaagaccctgtgggaaatgtggctttccagtgactcaaatgtcaggtgatgtgattggtatttgggtaaatgagggtcaagact

SEQ ID NO: 208539 - DNA, 201 bp, Homo sapiens
caagcagcactccttcatcggggtcctggacatctatgggtaggcctgccgcctgtctcgctctatctgctacctgggagtggcttcctgctcatactttrcagccagcaggggcattggagagcttcctggtggttctcaacttagggcagtttaaaatgtgtggggccatttttagttgattagttgacacaatgatgg

SEQ ID NO: 208540 - DNA, 201 bp, Homo sapiens
tgcattagacaattctaggttcctcatgtaagtagaatcgtatagtatttgttttttgtaattggcttatttcacttaacatttgtgtcctgatggttgayctctattgtagtatgtgtccatcttcttttaaaactgtgtcccattgtgtgtatagggatcacactttgcttatccatttgttagacatctaggttgctt

SEQ ID NO: 208541 - DNA, 201 bp, Homo sapiens
ttcagcctttttgggtcagaggcagaccaagtgtgtgtcactcactttcctctctcatggctgcacccttgcctcagtccagattatcagcagcctcttgrgtctagaaaggatattgtttgaaatcttagtagccccaaaagtaatcattccatctcaaggaactactgggcacccatgctgcattcagaactatgccag

SEQ ID NO: 208542 - DNA, 201 bp, Homo sapiens
gatctgattactatacactatatatgtcaaaactaggtaccccatgtatgtacagttattatgcgtcaattaaaaaataaaaatttaaaaacttattttcrctcagaaatgtgatcctttgtatgggtcctttgtcaagtaagagcttggtgactacggctgggtgcggtggctcacgcctgtaatcccagcacttcggga

SEQ ID NO: 208543 - DNA, 201 bp, Homo sapiens
agactggagtggataatacagacgtgcattcggtgttcaaatagaatctgcttgattggatttcttctttgtgatgccttagatcaaggctgcaggcagascaggcttgaaggtgtgtcaggttgtaactgggaggttcccacagagtgctggggagcgggtagcatgtctcattctgttgtgttggtgcaggaaatggac

SEQ ID NO: 208544 - DNA, 201 bp, Homo sapiens
cctggtatcgaggggctctccgcctctcccctgccgcggccgcctcctgcttgcccggcctcagtctgttctcagaacatactccatcacctggttcccaraactcagattgcgcagtggtctcgtcatcatcggccaggactcacagtgcccgcggcagaggcctccctagacctccctcccgtccagcctcacccgctg

SEQ ID NO: 208545 - DNA, 201 bp, Homo sapiens
aaaaaaagaaagagtgttaatgtatataacccctagtaaaagtaataaaactagataatgtctgagccctatatgctgggcacttttctacatgcttacayggattctctcattcagtcctctcctcagcccttgttctcaggaggaagggaagtctcagcaagtgtagagctcaggattcaacacagaccttgagggggt

SEQ ID NO: 208546 - DNA, 201 bp, Homo sapiens
tggtgtgtgggttttggcgtggacgtgtgttttccgttctcaggtatatgttgaaaagcagctttgagaggaaacatgtaaggtgcaggagatgtcacttycatcattcttcctgtgattgtttctagttcccactagtggctgacttgtttcatgatgacaaggaccctgttcctgccaccacccctgggaaggggtcat

SEQ ID NO: 208547 - DNA, 201 bp, Homo sapiens
agtggaaacatctgtgggtttcctatctactcacagctcttttcagaaaatgctacctggatgagatgaaagtggttgagaaactgctgaagcactaacgrctgtgtctctctctggttgctgtggccccaggtggagtacctctctgatggttttctggagaaaaacagagacacggtgtatgaagagcagatcaatatc

SEQ ID NO: 208548 - DNA, 201 bp, Homo sapiens
catgtccaacacggccttcatcatcgtccactttgcagacaaggtggctctcctctctgttggcttgggtattcccttggcccctctctaagtagactcartgggctctagacctagagagaaatctgtcccttctgaattcaaatggcctgaagcctcagctaggttccccttccatcctcttttacccacccctctact

SEQ ID NO: 208549 - DNA, 201 bp, Homo sapiens
catcatcgtccactttgcagacaaggtggctctcctctctgttggcttgggtattcccttggcccctctctaagtagactcaatgggctctagacctagaragaaatctgtcccttctgaattcaaatggcctgaagcctcagctaggttccccttccatcctcttttacccacccctctacttctaggggataccaagct

SEQ ID NO: 208550 - DNA, 201 bp, Homo sapiens
gagaaatctgtcccttctgaattcaaatggcctgaagcctcagctaggttccccttccatcctcttttacccacccctctacttctaggggataccaagcktaccacaaggcataacttcacagggggtactatagttgcccagtcattcatatatatatatgaatacacacacacacacacacacacacacacacacaca

SEQ ID NO: 208551 - DNA, 201 bp, Homo sapiens
atcacccatgagtaacttactgtttacacacagaaaactcaacttttatcatctctgcctctcagattatagacatagtttaagcattatgtcatttgccrctagcatgttactgaactattagcaccaaatggaattaacaatgtcagcagaatatcagccctaaccataaatggaactaagaaatgttctttaaagaaa

SEQ ID NO: 208552 - DNA, 201 bp, Homo sapiens
tggggtgtggagctgagtgtgggattggtcctttcctgctgttcatgaaagatcaggaacatgggtctacctccaaaattgtttaggcaagcaagaaaagyaaatccccctgaggccactttaatgtatggcttagaataataaagccaagtcagagacctgcattcatgaatcaaagagcgagacagagggaagaaacaa

SEQ ID NO: 208553 - DNA, 201 bp, Homo sapiens
ctctttgattaagggaattacaatttatgccatctccaacagttcccgtgtggaagcagccaaagtgaaggagatggcaaaggaaaagaaaatgcgtcatyccaggactgcagaagcctgtgatgaattatccacagggctgctcccaagagcccgagcagagggctttttcggcagagttcctgcatccagcctaccgat

SEQ ID NO: 208554 - DNA, 201 bp, Homo sapiens
gtttaggcaagcaagaaaagcaaatccccctgaggccactttaatgtatggcttagaataataaagccaagtcagagacctgcattcatgaatcaaagagsgagacagagggaagaaacaagcctcaaaacgataggaggtgtaggtggcatacatgctgttaaccatggcactcccagactgtagccttggctcaggttt

SEQ ID NO: 208555 - DNA, 201 bp, Homo sapiens
gaggccactttaatgtatggcttagaataataaagccaagtcagagacctgcattcatgaatcaaagagcgagacagagggaagaaacaagcctcaaaacrataggaggtgtaggtggcatacatgctgttaaccatggcactcccagactgtagccttggctcaggttttagatcataggttgttgcaatgaagtcacat

SEQ ID NO: 208556 - DNA, 201 bp, Homo sapiens
gcttggtttctagacctgggggtaccaggattggggggactcctctgggagggacagacaggccacttctcttcctctgaggtgggtgggccctggctackttctgatatcccttggttttcctggtggtacctccagctttcggaaggggctctccactgctcaggagggagaactgaatgggggcaactgtgctgagag

SEQ ID NO: 208557 - DNA, 201 bp, Homo sapiens
ggctaagaaatatgtccattgttatgcacataaagccctgtgataaatgcactgcccaggaagagaggcttttccacccgtcacccagctcctaggtctcrtgcctgtgcagtcatctgtctccctctccagagagtcagcagctttgtgtcctggagaaattgtgaagcaaatactgcttaccccgaaaagtgtgtgtgt

SEQ ID NO: 208558 - DNA, 201 bp, Homo sapiens
atttgctaatttctcattttagtcttcccacacacctgtaatcccagctacttggggggctgaggcaggagaatcacttgaacctgggaggcggagattgygagcagagatcacaccactgcactccagcctgggtgacagagcaagaccccatcttaaaaaaaaaaaaaaaattgtcaattttttgaaccaactttgatt

SEQ ID NO: 208559 - DNA, 201 bp, Homo sapiens
tggattgtggagcacatcaacaaggccctgcacacctccctcaagcagcactccttcatcggggtcctggacatctatgggtaggcctgccgcctgtctcrctctatctgctacctgggagtggcttcctgctcatactttacagccagcaggggcattggagagcttcctggtggttctcaacttagggcagtttaaaat

SEQ ID NO: 208560 - DNA, 201 bp, Homo sapiens
gctccaactcggagccagtggggaggaattgtgtttccttccctctgcaacaaagttctgcaggcttcagatctagggccactaatggggctgagtctgtrttcccctaggaggcccaggacatagttgggggataaaaggaaaggcaaacatggagtgtttctgatggtgtgagtgctgggtgagcatgtgacaaccttt

SEQ ID NO: 208561 - DNA, 201 bp, Homo sapiens
agaaatatgatcaaggaagcattctctcacccacctggggtgtggagctgagtgtgggattggtcctttcctgctgttcatgaaagatcaggaacatgggyctacctccaaaattgtttaggcaagcaagaaaagcaaatccccctgaggccactttaatgtatggcttagaataataaagccaagtcagagacctgcatt

SEQ ID NO: 208562 - DNA, 201 bp, Homo sapiens
aaggatggcgaggggtcttggtcttctcaggtgacctactgctctgtgagccatctagatattaggagaatgttaaggagaagcaaagttttgctccatgrtaaggtctggttacttcacagcctgctgtaaaacctaccagtagttgactgattcagaggatacagccttgttcctggcaggatggggcaagacccctgc

SEQ ID NO: 208563 - DNA, 201 bp, Homo sapiens
gtgttgttcatggcctctattttcttattgatcttctatctggttctatccatgattaaaaatggggtattgaaatgtccaaccattactgtagaactatyctcccttaaagtctgtcaattctcccttcaaatattttggggttctgttgctagatgcagatgtttattatatcttcttgatgagttgaaccttttatta

SEQ ID NO: 208564 - DNA, 201 bp, Homo sapiens
ggatgtgatccctctatcatgggtattggtaagtttatagtaaaacaaactggttctataatatttctggaggtaagtcttctttggcattcagagtcctraaaaagtggccaaaccaaggtcacctgtagagaaaagaagattggtaatcagtttaaataaaaaatctttatgaagaactgtcctagacacaatagaaaa

SEQ ID NO: 208565 - DNA, 201 bp, Homo sapiens
ttaggagaatgttaaggagaagcaaagttttgctccatggtaaggtctggttacttcacagcctgctgtaaaacctaccagtagttgactgattcagaggrtacagccttgttcctggcaggatggggcaagacccctgccttcctaactgtgacatagatcatgcttcattgcaccaccctaggctttattctgtagaag

SEQ ID NO: 208566 - DNA, 201 bp, Homo sapiens
tatctataggttctacagggccgacagcagtacttgcatatccatggatctgggtatctgtgggaattcctggaaccaatcccccatggatactgagggaygactgtatgtgacaagtcacttctttctcactgccttcaagactccctctttgtcttagggttttgacaatttagtataatgtgtttcactgtgaatctc

SEQ ID NO: 208567 - DNA, 201 bp, Homo sapiens
ttaaaggtgctcctgaagtcattgagtgaactgcctccagcaatagcaaattagatgcatttgaagagtgttttcctacattgtatgtgctgcctaaattraattatttgattaaacaagctcatgtattctagatattttggtcaactataaacacatttatttaaaaaaacaattttaaagggagcccttagttgtgac

SEQ ID NO: 208568 - DNA, 201 bp, Homo sapiens
gcattaggaggtatacctaatgctaaatgacgagttaatgggtgcagcacaccaacatggcacatgtatacatatgtatacatatgtaacaaacctgcatrttgactttttttaaactgccaaatggcctttacaaagttttttcatgcttcttagtccctttttgatttgccccaggcttttaaaagctatatataggaa

SEQ ID NO: 208569 - DNA, 201 bp, Homo sapiens
tggtctgcagggcccttctattcatttgataagctttcaggtgctggcggtggcctgggttctgagggtgtgatagtctggcgatataatccctaggtccrcgttgaggactctggtccaggctgagcaggcaggtgtatgaggaagcattgctgtcccacaggctctggagggatgtgcaggccctgtcagagcaggaca

SEQ ID NO: 208570 - DNA, 201 bp, Homo sapiens
ttgagccctggaggtcaagtaaaccatgatcataccactgcactccagccatgggcaacagagtgagaccttggctccaaaaaaaagaaaaaaaaaaaaaagctaataatgaacctgaaagtggaataagcctgtcataaaaggacaaatactgtatgtttctacttctttgagatacctagcgtagtcaaattcatagag

SEQ ID NO: 208571 - DNA, 201 bp, Homo sapiens
gatcagctcctttgaacctggatgtaagagtcccacccgcccttcatcccacctcttctgtggggtccttccagccccaccaccatcagcacccacatcaycagcacccacccttcatcccacctcctccgtggggtccttccagcccatcaccaccagcacccacatcacacactcctggcttggtgcctgactgagctg

SEQ ID NO: 208572 - DNA, 201 bp, Homo sapiens
tttgccaacatgaaatgcaatgttgtgtgtgtattttccttggacttggctcattccttcctttctcattatggtcttcatgccagtgagcaaaatgagayggcagttgatttacaaagagctctgtcatcatgggttactctcccagtgctctgtcccaggcttgtccacaggaaccctgctgggttgtctttcctcatc

SEQ ID NO: 208573 - DNA, 201 bp, Homo sapiens
tccacgttgaggactctggtccaggctgagcaggcaggtgtatgaggaagcattgctgtcccacaggctctggagggatgtgcaggccctgtcagagcagracaccaagcgtgggggcaaccccaccaccccgtgtggtacaggaatgtttcccaggagagtgccggtcaagagctaataatgagaagaaagtaaccagta

SEQ ID NO: 208574 - DNA, 201 bp, Homo sapiens
ttgttacgtatgtagatagcattaggaggtatacctaatgctaaatgacgagttaatgggtgcagcacaccaacatggcacatgtatacatatgtatacakatgtaacaaacctgcatattgactttttttaaactgccaaatggcctttacaaagttttttcatgcttcttagtccctttttgatttgccccaggctttt

SEQ ID NO: 208575 - DNA, 201 bp, Homo sapiens
taacctatgaagaatgatgattcagcatttttcagggccatttgccaacatgaaatgcaatgttgtgtgtgtattttccttggacttggctcattccttcstttctcattatggtcttcatgccagtgagcaaaatgagatggcagttgatttacaaagagctctgtcatcatgggttactctcccagtgctctgtcccag

SEQ ID NO: 208576 - DNA, 201 bp, Homo sapiens
ggggagaggagctgggcccacccaggtcgagttaggagaataagaggagttcagtgtttcctgaggacaaaggaagagaagccattcacaagctgattctycctccctctacctacccagccttgacttttctcagtgcccgtgctgcaaccacacgttttggcaacgtagaactcttcacattcccaaacccgtgccctt

SEQ ID NO: 208577 - DNA, 201 bp, Homo sapiens
ggtttatcaaagacactgaagaaacgtgaggaaacatggagctttgtacaagaacctgttccctttggaatactcctgggattttatttggagctccttayagtgtttcaatgtagatccagagatttagagagccctgaaaagagctaaaaaggggtttgaaaagagccatggcaaaaaaaaagcctaaatgaactttag

SEQ ID NO: 208578 - DNA, 201 bp, Homo sapiens
caccagactgtgaacacataaatgacaagggtcctgttgtggctgtgttcctagcacaattcctggttgtcacaggaatacatgagttggtgcagctggckggggaactagccaagagctgctcatgactagaaacctgccagtaatggctcatcctatgaggaatatacagaaatcaccctcattttacagatgaggaaa

SEQ ID NO: 208579 - DNA, 201 bp, Homo sapiens
tgacttttctcagtgcccgtgctgcaaccacacgttttggcaacgtagaactcttcacattcccaaacccgtgcccttcctcctcccagacctttaggcayttgttcttcccacctagaatggccctcagctgcctgagacatcccacttgcaggcctaatccagatgacccccacctcttgtgaagccttcatggaccct

SEQ ID NO: 208580 - DNA, 201 bp, Homo sapiens
ttatacctcaacttcctcataaaaatgggtagtactttatagagttgttggaagattgaaagagatactgaacataaagcccctggtgcataggtaatggmtgcttagtaagtatgacggaccaatgaagctcttatttacatagtcagtggctggacgaggatgacacccaggttgctcaattctcaaactgtggacttc

SEQ ID NO: 208581 - DNA, 201 bp, Homo sapiens
taaatactagcccaccttgccatgccatcttttttttttttttaaacagggtaagggggtaacaggctggttaatcaagggctatagttagctggactccrgttgattgaggtttttgctgtggtccacctatcagtgtccacattttaacatcttactttttatggacaagaaaaatctctgttaaaggtcagctgattt

SEQ ID NO: 208582 - DNA, 201 bp, Homo sapiens
tgcaggcctaatccagatgacccccacctcttgtgaagccttcatggaccctgaggctaccttcttttccttctgaatcaccttattgtagtgattctcawtcggggtgattttgccattaggggacgtatggcagtgcctggagacattctggttttcacaaattgaaggtgagaggagggtgtgttgtattagcatcta

SEQ ID NO: 208583 - DNA, 201 bp, Homo sapiens
cttaacttacatgtgatttcatctgattaatacagaaagctaagaggacacagtgcggtagctatgaaatcactttagttcatctattaattctgataacsagtgatagaatctgtataaaatttctcctcatacaagcgtataatctggcccatggccacactcctttagaggctgcacatcatctaacattttaggggg

SEQ ID NO: 208584 - DNA, 201 bp, Homo sapiens
aaaaatatttggaatgaaagtatgctgggtgactgtatctttgttggtaatagcctcttagtcagtcactaaatataccacacagtggactgtgtggtctktgtataattttgtcaaaggtacaaaagatacaatttttcctctggcatttgaaaagaaaatcacaggcacatgcgcgcgtgtgtgtgcgcgcacatacac

SEQ ID NO: 208585 - DNA, 201 bp, Homo sapiens
gtcatgttttattttgtaaatgtgtcgcagccatcttcccagcatcatcttagctgctcaagtctagctatagacactgcagaatattatagtaaatgtaygcatagctttaaatttgcctttttaaaaagagagcctaaatactagcccaccttgccatgccatcttttttttttttttaaacagggtaagggggtaaca

SEQ ID NO: 208586 - DNA, 201 bp, Homo sapiens
gctaaaatagcatgtcccagccccagcagtcactttctattcaacctcatttctttttttttttttttcttttggtcgtacctcataccactctgtcattwaaataatgataacgcttacttgacagaatgagctgcgtgaagtcatcagctttaatgcagcagctgtctcatagctgtttgggttgctgagcaggctttt

SEQ ID NO: 208587 - DNA, 201 bp, Homo sapiens
aagaaaattgccccctcacttagaagctggataaaactcagaacaacaaaaaatatttggaatgaaagtatgctgggtgactgtatctttgttggtaatarcctcttagtcagtcactaaatataccacacagtggactgtgtggtctgtgtataattttgtcaaaggtacaaaagatacaatttttcctctggcatttga

SEQ ID NO: 208588 - DNA, 201 bp, Homo sapiens
ggggaagagacaccagtcaaactgttcttatactatgtcttattttaactttatgtgtctgtttcagaggaaatatcttttatattcttataaacacaaaygagtaggtgtgatttccaaggtaacagctatgtgtcagctgtaattgactttttattttattattattatactttaagttttagggtacatgtgcacaac

SEQ ID NO: 208589 - DNA, 201 bp, Homo sapiens
tcttgtgaagccttcatggaccctgaggctaccttcttttccttctgaatcaccttattgtagtgattctcaatcggggtgattttgccattaggggacgwatggcagtgcctggagacattctggttttcacaaattgaaggtgagaggagggtgtgttgtattagcatctagtgggtagaagccagggatgctgctgaa

SEQ ID NO: 208590 - DNA, 201 bp, Homo sapiens
taaaaagcttaatctcccctacagttgtccagcaattaattaaatgtggtgtaagtttatcttaaacttccttaaacagactgcatcttgttcaaatgcawttaggaacaaacctttcatctctggtgaatgaaactttcaataaataaggctgcttgtgtcagacaggtggctccctcctgccatttgccagggttttta

SEQ ID NO: 208591 - DNA, 201 bp, Homo sapiens
taaaacccttttaaaatattcatctaaatgtcagagatttttccctccaaagggtaccattagtcatgtaaaaagaattgattgaaaggaaaatgtgtttrttatgtttacagccatagatttctttttaaagaaaagattctggggaagagacaccagtcaaactgttcttatactatgtcttattttaactttatgtgt

SEQ ID NO: 208592 - DNA, 201 bp, Homo sapiens
tgggatgatgacactgacctgcctgccccatgatgtgaagtgtgacaaaggcgaaatgctgtgttaaaactgcaaaacccttctcaaatgtgaggctttcraaggagtggtagcttttgcaggaatatttgaagttcaaataagaggcaaggcaagcattattttagagaaacttatgtaagactgaagtccgactctgct

SEQ ID NO: 208593 - DNA, 201 bp, Homo sapiens
tctgatcctctggaccctgagccagcagctcccttctttatggcaccttagtgaaatgggatgatgacactgacctgcctgccccatgatgtgaagtgtgwcaaaggcgaaatgctgtgttaaaactgcaaaacccttctcaaatgtgaggctttcgaaggagtggtagcttttgcaggaatatttgaagttcaaataaga

SEQ ID NO: 208594 - DNA, 201 bp, Homo sapiens
ccagtcgtaccagctccctcccctccagtcttgtgccccatctgccacaggccactgcaacaggccacctccctgctctgtaccaacccagtccagcatcsccctgcagagccaggaagagtcttagaggagagagtcctgtgggaaagaggagaaatctttggtggtctgatcctctggaccctgagccagcagctccct

SEQ ID NO: 208595 - DNA, 201 bp, Homo sapiens
ctgtgaagagtaaatagcataagattggagaactaaagggaagctttagaagcggcctgcttcctctccctatttaatcatggttgaatttaaaacagacrcacagttacttcccttgctattaaacatcccacagaggaagaataatagagaactgattttggaatgatatgagtcattatctcaggatctcacagcctt

SEQ ID NO: 208596 - DNA, 201 bp, Homo sapiens
cttctttgttctgcccatacgatggaagtgggaggggagccacccacatgcttttcctcagcagcagccacagccccctttccttggtgcagctctctacrggccacagtgctttggcaatgatggaagctcatgcttttggagcacatcctctaccagactcatccctcctttaatcctcacaacctccctttaagtcag

SEQ ID NO: 208597 - DNA, 201 bp, Homo sapiens
agtaatggggtgtgggagttctcagcttcattagtgtgtgtgtggcagagagacccacaagggcctgattgtgtctcctaatctgatgagatgcagtatasatagagacaattttatgatattttaggatctgtcattcttttttaccccatgtaaacatttcctccagaaatgagtattcaaacaagatggagtaagtta

SEQ ID NO: 208598 - DNA, 201 bp, Homo sapiens
gagaaattgacccaagtgttaggaatttgcgtttcattaagagatgaaaagtggatgactacagtaagaactgtaggtgaaatgtttcatagggctagctytatttagccatcattccaagaagcaatgatacctattcttgttgacaaattaggcagaaggataactctagggcctgccaccatgggaggtaaattctca

SEQ ID NO: 208599 - DNA, 201 bp, Homo sapiens
tgctgtgccatggcacaggtccctggctcctgtccagcttctgaccacgtgatctcaggcactgctttctgatatgtgatgctcagtccatgtgtcatatrtgcagcacttgccattactgcagagaggcaaaggtagctggactgggtgattcattcctactgacagctccttttccaactttggggtcatgaagatctc

SEQ ID NO: 208600 - DNA, 201 bp, Homo sapiens
agtcccacccaatatcacatctttttgaaaatgtgaactgttttcaaatgtccttttaaaacacttttctgtccattaatgtgaataagttttggcagggragtagcccatccttctctatttgccttctttccttttaccccagtcgcctttaatctccctgcactcctaagaactgaaagatcaggactaggaaaggag

SEQ ID NO: 208601 - DNA, 201 bp, Homo sapiens
gcagctggagaagagagaacagcaggacagcaagaaagtccaggtacgtgaaggggctgcagtgctcttatggtgcttggatgagagaacaatctagctcwtgtgtccagggctcatgtggcatgtgtgaccacatgggattgtgctcctgctaagtctcagagggctcctacttagtgcattggagtcatgctgagtctt

SEQ ID NO: 208602 - DNA, 201 bp, Homo sapiens
ggcaagcaagaaaagcaaatccccctgaggccactttaatgtatggcttagaataataaagccaagtcagagacctgcattcatgaatcaaagagcgagamagagggaagaaacaagcctcaaaacgataggaggtgtaggtggcatacatgctgttaaccatggcactcccagactgtagccttggctcaggttttagat

SEQ ID NO: 208603 - DNA, 201 bp, Homo sapiens
ctcttatggtgcttggatgagagaacaatctagctcttgtgtccagggctcatgtggcatgtgtgaccacatgggattgtgctcctgctaagtctcagagrgctcctacttagtgcattggagtcatgctgagtcttctctgagtgcccctacaccgcccagctgaacaggagtaagctccctcatgccccgggtttctgt

SEQ ID NO: 208604 - DNA, 201 bp, Homo sapiens
aaaagcaaatccccctgaggccactttaatgtatggcttagaataataaagccaagtcagagacctgcattcatgaatcaaagagcgagacagagggaagmaacaagcctcaaaacgataggaggtgtaggtggcatacatgctgttaaccatggcactcccagactgtagccttggctcaggttttagatcataggttgt

SEQ ID NO: 208605 - DNA, 201 bp, Homo sapiens
caggatatattgattttcctttttggcaatactcccacagttaaccctattgacttttgtaaaagtacagcttctaccagcagttcatggttcagaggtcratggttaatgcatgggcaggaggaacaaaggagcatattataaaactgataacagcaaatacagcacttactatgtgccagtgatggtactctgtgttct

SEQ ID NO: 208606 - DNA, 201 bp, Homo sapiens
ttgactgtgtgtagaatgctcaaaggatggcgaggggtcttggtcttctcaggtgacctactgctctgtgagccatctagatattaggagaatgttaaggrgaagcaaagttttgctccatggtaaggtctggttacttcacagcctgctgtaaaacctaccagtagttgactgattcagaggatacagccttgttcctgg

SEQ ID NO: 208607 - DNA, 201 bp, Homo sapiens
cagccccaggatgtatacctaagcaacttctgccgactgctaggggtggagcacagtcagatggagcactggctgtgtcatcgcaagctggtcaccacctyggagacctacgtcaagaccatgtccctgcagcaggtgatcaatgcgcgcaacgccctggcgaagcacatctatgcccagttgttcggctggattgtggag

SEQ ID NO: 208608 - DNA, 201 bp, Homo sapiens; identical to SEQ ID NO: 36512

SEQ ID NO: 208609 - DNA, 201 bp, Homo sapiens
ggccactcatctcttgtcttgctttttttttttttttctcctttggcagctttgacccaaagagagcagtgcagcaactcagagcctgcggggtattggaracgattcgaatcagtgcagctggctacccatccaggtaactaacgtgcccgccagctgcctcctggggctgccctagagcagccagagtttggttcccca

SEQ ID NO: 208610 - DNA, 201 bp, Homo sapiens
gtctgtgtgtgtgtgtgtgtgtgagagagactgctgggctggcagcagggcatgtgctgggattctggagggctgggaggccttgagtttggcttgttttycctctgggcaggagggtggaagacattggtggggggcggcttgtctcccacactcctcctgaacctatctcccccatctcccacagccccaggatgtata

SEQ ID NO: 208611 - DNA, 201 bp, Homo sapiens
tttcctcgcctcccacagcaagtgcagaggactttttctatacatcacagggaggagacacttccatcgagggtgtggacgatgctgaggactttgagaakactcgacaagccttcacactcctcggtaaggagcttcttagttggggaagcaggccccgagggctgatggcacggagggtagaatgcaaggcgatgtccc

SEQ ID NO: 208612 - DNA, 201 bp, Homo sapiens
gaaagaggcttttgttgccaagcagagaaagaggcttttgcacttcccaagtctgaaaacacgacttttcgtaagtcgactctatctgggaccttgtatcrggaagcccagtcagttttgtggctgctcagagtgttataaccagcacagagcatgtcttaatcaggggacagacagctgattactgattgattgctctgc

SEQ ID NO: 208613 - DNA, 201 bp, Homo sapiens
tttcacaaattgaaggtgagaggagggtgtgttgtattagcatctagtgggtagaagccagggatgctgctgaacacccagtaatgcacaggagagtcccytactcccccaagaaagaattgtccagcccagaatgttgacagtgtcaaggctgaaaaactttgctttataggaagctgctacagcccttattgatatcat

SEQ ID NO: 208614 - DNA, 201 bp, Homo sapiens
agttggcagcagtgatgccatgagaaggactgtcatgttcagaggaggacctgtggcccagggggtggtggaggaacctccagtgcaggacaaaccttccygtaatctgagtcttcagggccagtgatgtattgtcccagtgtctttcccctgataagaaaggcatagagcatctgtgcctccccatgcatacagctcagt

SEQ ID NO: 208615 - DNA, 201 bp, Homo sapiens
tgggcaccatgcaattggctgccagcgcagctagaacaaagtgggtggaagaaggtgggataagctggcttgctgagtcttctggctttcatctttctccygtgctggatgcttccttccattcctcctgcccttggacatcagactccaggttcttcagcctttggacccttggacttacaccaatggcttgccaggagc

SEQ ID NO: 208616 - DNA, 201 bp, Homo sapiens
cttgggaattttcctaccctttgtgctttcttccgggcatgctatgttgtttttttcttaatcttcattctttctcagaaaccaattcactttttttgttwtaaagttgtcatattttaaaagtgactcttcttcttgagacaaataagtcccatgcacagttactcctctgtagctcaatgcagtgctgagttcacactc

SEQ ID NO: 208617 - DNA, 201 bp, Homo sapiens
ctccatctcaaaaaacaaaagaaacacctgtggctgcataatttataagtaaaaatgtctaattgactcacagttctatagtctgtacagaaagtgtagtkctggcatctgtcctgatgagggcctcagggagcttccagccatggcaaaagttgaagggggagcaggcatcacatggcgatagtgggagcaagagagagc

SEQ ID NO: 208618 - DNA, 201 bp, Homo sapiens
aaaatgttctcaaatgtactttgcttcctgtttaagatgtgctggtatttgaaaagcttctaccaatacttaaaccaagcagggtactatgtaggataacyttttagttgacaaaacaatatcgtctcccttatgatacaggagagtccatgttgtcttccaaaaaaaatgaagtactgagacttttcctccaaagcctat

SEQ ID NO: 208619 - DNA, 201 bp, Homo sapiens
gagacagtgccttagggttactgggaacacatcaagacttagggtaaacttaacatgagggagtttggcgtattggtgtctttattacttcctgtctacaytcccttagaataggtagctaggcagacttgggcagggcaggagaaaacctcccccaccccgcccaggaatgtcaagcgactatcaggtgatggtcaggca

SEQ ID NO: 208620 - DNA, 201 bp, Homo sapiens
tattttctgaataggagcttgagataataaacatactataaaatgttctcaaatgtactttgcttcctgtttaagatgtgctggtatttgaaaagcttctrccaatacttaaaccaagcagggtactatgtaggataactttttagttgacaaaacaatatcgtctcccttatgatacaggagagtccatgttgtcttcca

SEQ ID NO: 208621 - DNA, 201 bp, Homo sapiens
cttctccccagtcctgtgaagagtaaatagcataagattggagaactaaagggaagctttagaagcggcctgcttcctctccctatttaatcatggttgartttaaaacagacacacagttacttcccttgctattaaacatcccacagaggaagaataatagagaactgattttggaatgatatgagtcattatctcagg

SEQ ID NO: 208622 - DNA, 201 bp, Homo sapiens
agaccagcagctctcaacctctagagcctcagaattacctggacaacttttgaaaacatgcttgtcagagcctccttcttgtaactcatggaagcccatcyacagataaacggatgagacaaactgagtctgcttgaattgaagggaaagaaagattgaaaaactccttaaatttgaaggggttctagactgttaaaagtg

SEQ ID NO: 208623 - DNA, 201 bp, Homo sapiens
tagattaacagtgagcacacacataacgttccaaactactcaagatcagcaaattcacttatctcactcattcagattcatatactcatttttaaaagttrtcctaggccctactgacttcgtcagctttccccagtttccattactgaaacttctaaagccactgctgcttaagccaccgtcaatttttagtgttatagg

SEQ ID NO: 208624 - DNA, 201 bp, Homo sapiens
gtcgcaggaacagctcacacaaggcccaggtgttcactccccttctccctcctgctgcttatggcttgacttcagcttgtcaaggaatgacaagtacacaygtccattgctttccacactgatgtgtttttaaaaggttatatacacacaccttgttttgaccaaataagtttgctttttaaaaatcttatgtttactttt

SEQ ID NO: 208625 - DNA, 201 bp, Homo sapiens
tgtcactcgtcctggtcctcttccattggtcctttcccagtggatcagctcctttgaacctggatgtaagagtcccacccgcccttcatcccacctcttcygtggggtccttccagccccaccaccatcagcacccacatcatcagcacccacccttcatcccacctcctccgtggggtccttccagcccatcaccaccag

SEQ ID NO: 208626 - DNA, 201 bp, Homo sapiens
actgattaaaataataatgctacctaactgcttaatccaggagattggtatatgcctactgtgtctggggataaagcaagtgaggtttagtggatactgtstgcccaacaaggtgttagctactgaaggaaatatacaagtgtaatgtgtgctagcttcagtgtggagttgagcagttattttgttgatgtgactttagga

SEQ ID NO: 208627 - DNA, 201 bp, Homo sapiens
gtgccttgagcttaatttacagccaggagaggaaggaaagttggcatttaagcattgtaaccagttgaaattcaaacctcatgcatttggaggaaatgaaygtccaaaccatatcaatttaggcttctgctggtttagtccatatccctagggccacctctctgggttttaatgccatgaagtctagaagagtttgaaagg

SEQ ID NO: 208628 - DNA, 201 bp, Homo sapiens
taatttatcaaccaggagaaaaagaaaactttaaaaggagaatgtttttcctctgaagattgcctattcctggccaccactacatgtaggtcagagggacragctgtgggtcacgtgtttgtgccagcatgtgctgggcagtgagggtgtactgggcagtatttctgggctatgggacaggcatcccagtgccatctttcc

SEQ ID NO: 208629 - DNA, 201 bp, Homo sapiens
  misc_feature (1)...(201): n = A,T,C or G
tcatctcccacttcctgagttccagagcaggtggcaacagcctgtgaagagcagctctcctggcagcgtccctgactggcgcatttctgacggctgcccangggccgcactggtcacctccaactgcaagcaggattttacccccaccatcccaggccgggctgatgtctgttctcacactgcttcctctgcttccaggac

SEQ ID NO: 208630 - DNA, 201 bp, Homo sapiens
gatgcaaggttgtagtgcaagtgcaggaggagctgcaacttcactgaggagttgagacttgagctggactttgaagggtgtagcgactgcctgccaggaarcaacatgatgtctggtgctaggaggcacagtaagttgcagagggcttttctggccgctcactgccctgttcctactgcttactcccctagttgtagcatg

SEQ ID NO: 208631 - DNA, 201 bp, Homo sapiens
tcatgcatttggaggaaatgaacgtccaaaccatatcaatttaggcttctgctggtttagtccatatccctagggccacctctctgggttttaatgccatraagtctagaagagtttgaaaggtgcctgtctgatgggggtgcaggtgggtactcaggggtctgtatggtcatctctcctctgctccacgtggtcatctcc

SEQ ID NO: 208632 - DNA, 201 bp, Homo sapiens
tgaaaacctagaaagatacaaggttctatgtcattacattaaaattgtaacgcttaattttttattggttttcatttagcacagctaaatctcaaatcctrtttgtaaattcataattttacctaaagtacttttattttatgagagactttttttttctgttgggtgacatccttgataagaaattaacaagtcatcatg

SEQ ID NO: 208633 - DNA, 201 bp, Homo sapiens
cctccctcagcggcttgctgttctaggtctcagtgggctgatgggcttccagtggcaacagctgctagggtctggggccacaccagtgtcctgttttgcckctgggccctggataatctcacttgcccacttgctcttccaacctccctgccccctgcattctcacacctgtccgttccttcccagggcgctgcccgcccc

SEQ ID NO: 208634 - DNA, 201 bp, Homo sapiens
agaacaacatataaccagatgcaaggttgtagtgcaagtgcaggaggagctgcaacttcactgaggagttgagacttgagctggactttgaagggtgtagmgactgcctgccaggaaacaacatgatgtctggtgctaggaggcacagtaagttgcagagggcttttctggccgctcactgccctgttcctactgcttact

SEQ ID NO: 208635 - DNA, 201 bp, Homo sapiens
agaagggctctggctaaccagaccctagctggaggagggcttgagaactctctaccctgagcccctcctagcctgtttcagacgtctcaaaagacagaaarcaaagattgttgctgtatcaccataaacctgcagatgggctatacacagactgcagctgcaaatcaaagagtgattctaagtatgctctacaccatttgg

SEQ ID NO: 208636 - DNA, 201 bp, Homo sapiens
cctgggactgggccaactcctgtcaacaggctgatcttaaaaagttgtcacccaatgtgtttgtagaggctccaccatggaatactcgcttctgtcttccygtcactctctagtcaccgaagccggctctagtggtggatggagcagggctcctcttctcctctttgtgtccctggccacagaggaccactgctcagctgg

SEQ ID NO: 208637 - DNA, 201 bp, Homo sapiens
acaaatagctaacaactctgttaatgaggtgggccaagcttgtcacctcagatgaaggcctggcactccttttcccagtctaccctgcagtctcctacatyggccttttgatggaggggatggggctcaggcaatgggtgcagtagttcagttttgagttcaaaccactagtctgacaaattagactgcctttcattgcct

SEQ ID NO: 208638 - DNA, 201 bp, Homo sapiens
cctggtccgtggaaaaattgtcttccatcaaactgatctctggtgccaaaaagtttggagactgctgatgtatcagataggtgatttgaaaatattttttyccattctgtgggttgccctttcactttcttgatggtttgaagcataaaaactttaaattttaatgaagttcaatttatttttaacttggtggcttgtgct

SEQ ID NO: 208639 - DNA, 201 bp, Homo sapiens
aatttgctatttcaaataatgtagcaatgaatatcctttatgtatatctttgcatacttctgtacaattatgtctgttgggtaaaattttagaagcagatygatgatggttcaaagagtatgcacatcaaaagtgtatagatgttgctaagttggaggacaaaataggtgtgatctactcttgaaatgcaacttcctcctc

SEQ ID NO: 208640 - DNA, 201 bp, Homo sapiens
ttttccatgtagatatccatttgtcccagcacctttgattataagactattcttttcctcattgaattgttttggcacggttgtcaaaaatcaattgactrtcaatgtgaaagtcagttttgtttcattgatcagtatgtctgtctttatgccagtatcacgctgtctgtattactttatcttctagtaagttttaaaatt

SEQ ID NO: 208641 - DNA, 201 bp, Homo sapiens
aatataccctattctgcatgttggtacatctttttaagattaaaataagtacattatagacacgtagtcctctgtaatttaatttttcagttaccattgtrtcttggttgtctttccacacgagtacacatctatttctcttttttaaacaactgctgataatttgctatttcaaataatgtagcaatgaatatcctttat

SEQ ID NO: 208642 - DNA, 201 bp, Homo sapiens
tctgctggggtggtgacactgggtcatgagtaggggcctgtgctgctggccgggcaaggaggaggaggaggaggagggctccagtttgcagcctgctgagrgactccttccagaacgtggtcctcctcatttgcccagacagaggctaggacccctaaggagagccagctgcagcaggttccaggggctgttggtgatgta

SEQ ID NO: 208643 - DNA, 201 bp, Homo sapiens
ctaggaagattcacagaacttagcatatagttatggctataatttgttacagcaaaaagtaaacagcaaactcagcaaagggagaggtggatggggtgacrtctcccggagaccaggcacaagcttccaagagtcccttccacctggagtcatacaggatgcacgtaattccccctagaagcaagtcatgacacttctttt

SEQ ID NO: 208644 - DNA, 201 bp, Homo sapiens
aggatccttgtgtgaagccaggtgattcctcgtgcctctccatcagcagatcagacatggtttcatgaatcggcaactgaatgcattaataaagcacagasctatgaatcaagagtcctggtttctagaatcagccctgccactggtcgtggcctcagagctcttttggccttagttttctcacctgcacgatgaggtggc

SEQ ID NO: 208645 - DNA, 201 bp, Homo sapiens
aaaataggtactgctgttttcccccattatatggatgagggtactgaggcccaaggggacatgaagtgacttgccccaaagtagacacccagctggtaagygaccatgtcatgattgaaacccagatctgcctagtctgaaactcatccttttaatgcttgagccaaataatggggctaagcatatatgcttgggacagtg

SEQ ID NO: 208646 - DNA, 201 bp, Homo sapiens
cttctattactatcatggttattattcaataagatcagatttctgtcccaccaagtagtttgttttattggaggaaggatccttgtgtgaagccaggtgaktcctcgtgcctctccatcagcagatcagacatggtttcatgaatcggcaactgaatgcattaataaagcacagacctatgaatcaagagtcctggtttct

SEQ ID NO: 208647 - DNA, 201 bp, Homo sapiens
ctgcctcccggattcatgccattcttctgcctcagcctcccgagtagctgggactacaggcacccaccaccacgcccagctaattttttatatttttagtrgagatggggtttcaccgtgttagccaggatggtctcgatctcctgaccttgtgatccacccacctcggcctcccaaagtactgggattacaggcatgagg

SEQ ID NO: 208648 - DNA, 201 bp, Homo sapiens
aacccactggccctcagcagtgggtgagcagcttagccagacagggtaggcatgcagcaaaaggacaccatgtgatggtcacaccataggccagttgactrcaggtggcttttaagagctgtggcatagctttgcctattggagcctgactcaacaagagatggactggtagtcatcgagcttgctttccagagaggaaac

SEQ ID NO: 208649 - DNA, 201 bp, Homo sapiens
aaacccactggccctcagcagtgggtgagcagcttagccagacagggtaggcatgcagcaaaaggacaccatgtgatggtcacaccataggccagttgacygcaggtggcttttaagagctgtggcatagctttgcctattggagcctgactcaacaagagatggactggtagtcatcgagcttgctttccagagaggaaa

SEQ ID NO: 208650 - DNA, 201 bp, Homo sapiens
ggctcctacttagtgcattggagtcatgctgagtcttctctgagtgcccctacaccgcccagctgaacaggagtaagctccctcatgccccgggtttctgytggtgaagctagggggaagtctgtggcatcatcacctacttgcaaagaggggagcaccctgccaggaggaccagggtgtgtaataagagtgtaaatacag

SEQ ID NO: 208651 - DNA, 201 bp, Homo sapiens
ctacatattctagatattaatcccttatcagatacatgattggcaaatagtttctcccattctgtgggtcatctttttattctgatagtgtcttttggtgyacaaaatgtttaaattttcatgaagtccaatttgtctatattgttgcctgtgcctttggtgtcatgtttaagaaatcatcaaatctgatgtcataaggct

SEQ ID NO: 208652 - DNA, 201 bp, Homo sapiens
ctaaactacattgccctctgatccagtctgattgagtaatgtcactgagtgcagttatccttcctggagactgaatagagacactaatgctaaagatttcyctggggtcttctatttcctcctttttatttttctcctcttcttgggccacatctggacacccatacttctcatgctgagtgacctgggactttgtatcga

SEQ ID NO: 208653 - DNA, 201 bp, Homo sapiens
gtaaacccagctactttgggaggccaaggtgggcaaatcacttgagcccaagagttcaagaccaacctggccaacatggcaaaaccccgtctatactaaaratacaaaaattagccgggcatgttggcaggcacctgtagtcctagctactcaggaggctgaggtgggaggatcaccagagcctggggaggtcgaggctgc

SEQ ID NO: 208654 - DNA, 201 bp, Homo sapiens
ccattcacaagctgattctccctccctctacctacccagccttgacttttctcagtgcccgtgctgcaaccacacgttttggcaacgtagaactcttcacmttcccaaacccgtgcccttcctcctcccagacctttaggcatttgttcttcccacctagaatggccctcagctgcctgagacatcccacttgcaggccta

SEQ ID NO: 208655 - DNA, 201 bp, Homo sapiens
agcattgtctccttctaccaacattagtattttgcagagtaaacttagatccaaggaagatttgcctaaggttatgctactaaatgaaagttgagccaaakatatagaagctgcaaataactttcagacaagtagagaaaaaagaaaaacaaatatctatcttaagtttgagacagtgccttagggttactgggaacacat

SEQ ID NO: 208656 - DNA, 201 bp, Homo sapiens
tgtcctccagtgcctcatgccttatttcctcgcctcccacagcaagtgcagaggactttttctatacatcacagggaggagacacttccatcgagggtgtkgacgatgctgaggactttgagaagactcgacaagccttcacactcctcggtaaggagcttcttagttggggaagcaggccccgagggctgatggcacgga

SEQ ID NO: 208657 - DNA, 201 bp, Homo sapiens
cataacttcacagggggtactatagttgcccagtcattcatatatatatatgaatacacacacacacacacacacacacacacacacacacacacatatawatacatacacacatatatgtctgtgtatatatatagtctatacacacacacatacacacacacacatgtctgtatatatatagtctacacacacacacac

SEQ ID NO: 208658 - DNA, 201 bp, Homo sapiens
cctgaagaaaccttttattatgggaactccctttaaaacaatttcttccacaaaatgaatactcagttccctgtatgtaaatcctgaccatttattgggtktgcattttaagtggaaacatctgtgggtttcctatctactcacagctcttttcagaaaatgctacctggatgagatgaaagtggttgagaaactgctgaa

SEQ ID NO: 208659 - DNA, 201 bp, Homo sapiens
agagagggaaatgacctgcccaatgtgattttgcaagttactgtgagaaatggaacttaaattcaagttctgtatctcagtaatgttttatttcaatctascatttgacctcattgactgtaacagtcaaggtggctattttagtaccataattttgtccagggctgtgcagatttgtgttgtgtgtggtcattcctgagg

SEQ ID NO: 208660 - DNA, 201 bp, Homo sapiens
ttgaaggtggcagaggtgtggaggaaaacactgggaagagtggggggctcagcctccaccacctggagcaccctgggattacagtggcagagggaacgatsttagaggtcactgccctaaaactgcttcacttcttcctcctccaggcagatgatgagaggaattaccacatcttttaccagctctgtgctgctgccggtc

SEQ ID NO: 208661 - DNA, 201 bp, Homo sapiens
cagagggagactccatctcaaaaaacaaaagaaacacctgtggctgcataatttataagtaaaaatgtctaattgactcacagttctatagtctgtacagraagtgtagttctggcatctgtcctgatgagggcctcagggagcttccagccatggcaaaagttgaagggggagcaggcatcacatggcgatagtgggagc

SEQ ID NO: 208662 - DNA, 201 bp, Homo sapiens
ctaaaaaaggaaataatatttttactgatatcattttaatattttatcagtggttcttaccctttcttataatacagacctgtttgaaaatttcacaaatmctataaacccaaaaaggaaaaaaatgcacattgacacctgtattaaggaagtataaagtttataaatttctggtacaatttactgtagtgttagagctag

SEQ ID NO: 208663 - DNA, 201 bp, Homo sapiens
ctcattccagtcattaggctttattctattcatgactatgggaagtgattctaaggagtttttcatcctctgtggcataagaaaacccaagcgttgtttaktttttgagttttctattcatatccctggccatcaaaccctggaggagaagaccatctgtccattgtctcactccttcttagtgggggtgtggggatgcct

SEQ ID NO: 208664 - DNA, 201 bp, Homo sapiens
gaattgaaggtggcagaggtgtggaggaaaacactgggaagagtggggggctcagcctccaccacctggagcaccctgggattacagtggcagagggaacratgttagaggtcactgccctaaaactgcttcacttcttcctcctccaggcagatgatgagaggaattaccacatcttttaccagctctgtgctgctgccg

SEQ ID NO: 208665 - DNA, 201 bp, Homo sapiens
aaacccaaaaaggaaaaaaatgcacattgacacctgtattaaggaagtataaagtttataaatttctggtacaatttactgtagtgttagagctagtgatygtatttttttccatttccttattgtagcaattaggaggacactcatgtcgagagaggtaaagtggttgtgtataataacacaggtagttagtggctgtga

SEQ ID NO: 208666 - DNA, 201 bp, Homo sapiens
tagcagcatgcagactgccaagaacagacccctgcccagtgtgatctctggatatctggaacatcagagaattagtcatcactgggacaaattggccgtgrgtaaaagtgaatatcactttggagttcaatgcaagattgaccttgcagctccctaagtttttagatctccagtctgtggtggttaatgtgactttttcca

SEQ ID NO: 208667 - DNA, 201 bp, Homo sapiens
tctctggccttgggcagcacagcttattcagtctccctgcccatcagtttcttcagccacaggatgggattaataataaggcctaactcttggctgctggrggcattactcagaacttgtggagcacttgggcttagtgttctgtgggctctcattagtggggccactgccgtccatttggtgcattgggcagtatagaat

SEQ ID NO: 208668 - DNA, 201 bp, Homo sapiens
gcaagtacatccagattggctttgacaaaaggtaccacatcatcggggccaacatgaggacttacctcttggagaagtccagagtggtcttccaggtgagygggaggatttgcgcccttttgtgtatttctcatggacaattaccttacttctgctccctgccccactccctggacccaaagagaatctctcttgtgagcc

SEQ ID NO: 208669 - DNA, 201 bp, Homo sapiens
ttctgagaagtgaggggtcatttccatgtgtgcaatatgtcatttttatttctggatgctttatatatttttgttatctttggatttcaaaagtttgacartgatgtgccaagctgcaggagaacggggtgtggagtgttacgtgtggtgtttattagagttgaggtttaccaagctttaatatacaaatttatgtttttt

SEQ ID NO: 208670 - DNA, 201 bp, Homo sapiens
tctacatccttgagcatagttgtaatagaatgctattttaaaatccttgtctgctaatttcagtgtctgggtcttcttgggattggtctctgttgattgtmatattttttgtttcctcatatgtggattaactttgaattgtattatgaatattgcagatggaacattgtggagactggattctgttataatcctgcagac

SEQ ID NO: 208671 - DNA, 201 bp, Homo sapiens
agccagcatggcctgagggaggacccctgcctctgcccactacgctgcatatcatgacccccatcctcccctctaacggttccaccttcccctgcccaaarattgggccatattgcacacattggagttaagcaatgaatgatagtgttgatattctaagatacaaagcgctcaggtaagtccatttttaaagttaaaatc

SEQ ID NO: 208672 - DNA, 201 bp, Homo sapiens
agtgtaattgataggttctaagcaggtgttgtgcctgcagcacctagcacagtgcctggcctgaagaaggcagatgatgaagattggtgggaggcagggcyggggaatgggactcccttattctccaactggaatggcatagcatttgggtgcacaaaaatatgtctttcacacaaattcgtctgtttccatttatatgag

SEQ ID NO: 208673 - DNA, 201 bp, Homo sapiens
aaataactctaattgttataaatttctgtcttatattaaggacttaatgggatttctctaagtagcaattatctttaatatatttgaaaaccaattgactrtggttacacaacattatgaatgtatttaaataataccattgaactatacacttaaaaatggttacaatgatacattttgttatgtgtattttgccccaat

SEQ ID NO: 208674 - DNA, 201 bp, Homo sapiens
gaaaaagatgcacagtttaattacaaactgtggtaacgctaagaaggtcaagaagaaggtgctatggaagagaatgataagggtaggttggtggcccccargaccacccccaggttcaaccatttgctaggaagattcacagaacttagcatatagttatggctataatttgttacagcaaaaagtaaacagcaaactcag

SEQ ID NO: 208675 - DNA, 201 bp, Homo sapiens
tacagcagaagtcaaatgtacacagagatgacctatcgccctttcatacctgggatcttgcatgggcttgggttcagcctttttgggtcagaggcagaccragtgtgtgtcactcactttcctctctcatggctgcacccttgcctcagtccagattatcagcagcctcttgggtctagaaaggatattgtttgaaatctt

SEQ ID NO: 208676 - DNA, 201 bp, Homo sapiens
atctggaacatcagagaattagtcatcactgggacaaattggccgtgggtaaaagtgaatatcactttggagttcaatgcaagattgaccttgcagctccytaagtttttagatctccagtctgtggtggttaatgtgactttttccattttttcatgaggatggtggcatagggaggagccccaaggcacagggaaagag

SEQ ID NO: 208677 - DNA, 201 bp, Homo sapiens
aaattcatagagacagaaagtagaatggtgttcccagggactggtgagggaaagttagtgtttaatggatatggagtttcagttttgcaagatgaaaagcrttctggagatgggtgatggtaatggttgcatcacactatgaatacacttaaactactgagctgtatacttaaaaatggttaaaatggtaagtattatata

SEQ ID NO: 208678 - DNA, 201 bp, Homo sapiens
agctttagatgaatgcaataggatgagatgatagaatggagaaaatatatccagcaaaatggacccaggacataaagccaagtaaaccctgttctatcacrtggtgaggggtttagggaggatttgagtcagtagcagcatgcagactgccaagaacagacccctgcccagtgtgatctctggatatctggaacatcagag

SEQ ID NO: 208679 - DNA, 201 bp, Homo sapiens
acccagggctgatgtgcaacgtggagtgttgcctgggttgaggtggcatcttgcagtcatcagttgcttggcaaatgcccactgttttccagtgccaagtrcccactgagcccaggcagctccagggcaccatctgtcaagcaccatgtcccagagtgaaaggaggaaaagaagcatgactcttagctccagctgagctgc

SEQ ID NO: 208680 - DNA, 201 bp, Homo sapiens
ggataaatttttcttttgcctttttaaagggtatgtcctttattatctgctgtacatttatgccaggtattaatatctgttgattttcaagatttatattstgttaagaattactattcttagccacatgtaggtagggcctgttactcaggcaaacatgattgaaaccttttagttttctcctcctacatcttggtaatg

SEQ ID NO: 208681 - DNA, 201 bp, Homo sapiens
ggcaccaattcacccaaacatatatttactaagcacctgctttggaaggcactgccctaaacacaccattttcacacaaagatgagcaagacagagtctgyactctggttgctccccttctaatgggctgtgagtgggcagatgaagacacacacaggtaactgtgaaaggagagaaggagcacggggagagggtggtaga

SEQ ID NO: 208682 - DNA, 201 bp, Homo sapiens
tggccctcctaactgcaggatcagccaaaaatgtctgcctgatctgtgctgctggctgtgctccaaatgtaacctgtgcccccagagcctgccatcagtaygtgtgctggtcctgatctccgggactccctggagctgatggcagccaagtgcagtgcatgcgccttgacatctggcctcacagcaccttcatggggtggg

SEQ ID NO: 208683 - DNA, 201 bp, Homo sapiens
tcgcagtcatgggcagccgagcagctgcttatgactggtcattgccgcccctggtaatgaagacccccttggatcctggaactgtgcttcctcttgtggcmgagcaaccacaggaggcattggagtgagagggtgagcaggcagtgaggtgctcagcacatactccctgctgtcctgtaaggccctcgcactaaggggctt

SEQ ID NO: 208684 - DNA, 201 bp, Homo sapiens
gcaaatattgtgtccattctacaggtagaggaaagaaggcaccaattcacccaaacatatatttactaagcacctgctttggaaggcactgccctaaacasaccattttcacacaaagatgagcaagacagagtctgcactctggttgctccccttctaatgggctgtgagtgggcagatgaagacacacacaggtaactg

SEQ ID NO: 208685 - DNA, 201 bp, Homo sapiens
ggcctaaagcaagttgccaggtggaacatattcctttcttcctgtgtctgctttgtccgttgggcctgctcatgtctatgcttaaccgtttttcagctacmgtgggtgcgagagcacggggaacagttggcatgcagtctggctggtagcccctgtggttgaccatctgtcactgtgcccaggctgtacagatatggctga

SEQ ID NO: 208686 - DNA, 201 bp, Homo sapiens
gccaggtgccttctggggaccagctccaggcacgctgtgtggagactctaagagaaaaccgatgtccccaaccctgccctcaaaaactcatgctgtgctgygtgaggggaggggaccagcaccaagtgagccattgcctggcccttcaacaggaccgaactgggatgccagaggtcaggaagcatgatgtggggataccag

SEQ ID NO: 208687 - DNA, 201 bp, Homo sapiens
cagtctatagaacctctctataagcagaaacttaatggaatagaaggtgggatttaaggaacacttaaatctactactttggactctttctctgttattakcagaatttcatttatttccaagcataggaaaaaggtagcaaatattgtgtccattctacaggtagaggaaagaaggcaccaattcacccaaacatatatt

SEQ ID NO: 208688 - DNA, 201 bp, Homo sapiens
agagccctggctgaggaggaagtcccttcagatggtggggggccttaggattttatttttggtttacagatggtttgcaccctgggaatgaggacgagggsattacaggtcctcatttagggctgtttggatgcagttcttgctccattattcctgcctggaaagctggaatctggcctgcaggaggagtactccaggaac

SEQ ID NO: 208689 - DNA, 201 bp, Homo sapiens
aaggctgagttcaaaaactctgtgccaggtgccttctggggaccagctccaggcacgctgtgtggagactctaagagaaaaccgatgtccccaaccctgcsctcaaaaactcatgctgtgctgtgtgaggggaggggaccagcaccaagtgagccattgcctggcccttcaacaggaccgaactgggatgccagaggtcag

SEQ ID NO: 208690 - DNA, 201 bp, Homo sapiens
gcatttaatttgttcagcagtctatagaacctctctataagcagaaacttaatggaatagaaggtgggatttaaggaacacttaaatctactactttggaytctttctctgttattatcagaatttcatttatttccaagcataggaaaaaggtagcaaatattgtgtccattctacaggtagaggaaagaaggcaccaat

SEQ ID NO: 208691 - DNA, 201 bp, Homo sapiens
atggccctgtgaggctggtggcctgggcattcattaatcctaactttcttgtgtgagtcagcttcgcgtgccccaccctagagagctctgcagtctgtagstttacggggacgacagaggtgaggtgaacctctgagacagagccccagcagcccctccctggggggtggggggctggaggctggaaaggagctttagttc

SEQ ID NO: 208692 - DNA, 201 bp, Homo sapiens
aagtaacactacctgttagtggcagagcggaggccacactgagttctttgccccagaccacatgggaaagcagtgttgccatcacaggaggacagaacagktgtggcaaagggaggggatttgctgagctggtcacgaagagggaacaatgttaaggctgagttcaaaaactctgtgccaggtgccttctggggaccagct

SEQ ID NO: 208693 - DNA, 201 bp, Homo sapiens
tctgtcctccgtctcctgcctgcagatgtaagattatttaaaccccatcacatctagtatctgcatttaatttgttcagcagtctatagaacctctctatmagcagaaacttaatggaatagaaggtgggatttaaggaacacttaaatctactactttggactctttctctgttattatcagaatttcatttatttccaa

SEQ ID NO: 208694 - DNA, 201 bp, Homo sapiens
cctttgcaataaggttagtaattaaagatctggaagaaacctttgcgataattcagtaggctactttcactttacccgtaaagaaagagaggcccagggcrtggaggtgattagcccgggccacgggctcattacaggtggggctgggagttgccccaatgctaggttctccagccagtttcctggatgccgagcctcact

SEQ ID NO: 208695 - DNA, 201 bp, Homo sapiens
tgaggaaaatgaggtacagagagactgtgtcttgcccaaagtaacactacctgttagtggcagagcggaggccacactgagttctttgccccagaccacakgggaaagcagtgttgccatcacaggaggacagaacagttgtggcaaagggaggggatttgctgagctggtcacgaagagggaacaatgttaaggctgagt

SEQ ID NO: 208696 - DNA, 201 bp, Homo sapiens
gctggtgtccatcatgtcatctgtcctccgtctcctgcctgcagatgtaagattatttaaaccccatcacatctagtatctgcatttaatttgttcagcartctatagaacctctctataagcagaaacttaatggaatagaaggtgggatttaaggaacacttaaatctactactttggactctttctctgttattatca

SEQ ID NO: 208697 - DNA, 201 bp, Homo sapiens
acacagtgggctttttagaaccgggaaactgaccatctctgagctggcaggaaccttgtctgtttccccaggaaggcaggttcttaactgtggcggggccrtggttgatagatcctgtttttccaatatcttcacagaggccaagtaaatattatcctaggccttgtctggctttttataagatctggaagaaacctttgc

SEQ ID NO: 208698 - DNA, 201 bp, Homo sapiens
tgtatagtgtctcttagctttttctaaaagcattcttcttgtttttttgtttgtttgtttgtttgtttttgtaacatagtcattacagccaccactgcttyatagttgggcagatatgttgagctctcattgagtaaatgaggaaaatgaggtacagagagactgtgtcttgcccaaagtaacactacctgttagtggcag

SEQ ID NO: 208699 - DNA, 201 bp, Homo sapiens
atagaaagcttgggtatgaactaaagaagttaggctgtctgtggagcacacagtgggctttttagaaccgggaaactgaccatctctgagctggcaggaaycttgtctgtttccccaggaaggcaggttcttaactgtggcggggccgtggttgatagatcctgtttttccaatatcttcacagaggccaagtaaatatta

SEQ ID NO: 208700 - DNA, 201 bp, Homo sapiens
ctttctatatgaccaaaacaacaaaactgtgtccctggtgtatcttccaagtctaattagtccgggacaaaaatgatgcttcctgaaaaatagggagcaasgggttctctgggcaaataagtttaggaaatcctgcattcttgtatcttttcttggaaagtcacaaagcgtgtgaacatatttagattgtaggaattctta

SEQ ID NO: 208701 - DNA, 201 bp, Homo sapiens
tcacctaatagtgaatgcagtgaggtggattgagagatgcatttgacggtgggttttctttactgttggggagaggaagtacagaaggccagctggcctcmcatatccccttgggatatgtgaacagggaaagatgatggcaatatcttctttgtatagtgtctcttagctttttctaaaagcattcttcttgtttttttg

SEQ ID NO: 208702 - DNA, 201 bp, Homo sapiens
tcttttggcactgttgaccagaaaggatgatgagggaatggtagtgaacctgtgggggaggagaggggagtggagaggagaggttatgtgtgggggaccaktgaggtatggttaggggagatggtgtccaggaatggttagagaatgggataaatagaaatgtcacagatgtgccctgggtagaaatccttgaaaaacagc

SEQ ID NO: 208703 - DNA, 201 bp, Homo sapiens
gatttttctatgttaattgtccttgctatggtcctccaagatttaatagaaggagggctggttttccattcctagtcacctaatagtgaatgcagtgaggyggattgagagatgcatttgacggtgggttttctttactgttggggagaggaagtacagaaggccagctggcctcacatatccccttgggatatgtgaaca

SEQ ID NO: 208704 - DNA, 201 bp, Homo sapiens
ctcaagtgatccacccacctaggcctttctaagtgctggcttaccagtgcctggctaagtgttcacgctttttagggcaaagaagaaagccagacactgtwaacccatttttacaagaatctgctcccagtacaccttaccaatcttatctcctgttttctttcatgtatcaacatactttagccacttcaaacttgttta

SEQ ID NO: 208705 - DNA, 201 bp, Homo sapiens
gaggagaaatctttggtggtctgatcctctggaccctgagccagcagctcccttctttatggcaccttagtgaaatgggatgatgacactgacctgcctgscccatgatgtgaagtgtgacaaaggcgaaatgctgtgttaaaactgcaaaacccttctcaaatgtgaggctttcgaaggagtggtagcttttgcaggaat

SEQ ID NO: 208706 - DNA, 201 bp, Homo sapiens
atcagagtaacactggcctcatagaatggaattgggaagtgttccttctaatttttggaagaatttgtaaagagtagatactgtttaaatttttggtaagyggtggagtggttttaaagtgtgtatttccatttcatgcccagtaagagtaatgtagaaccatctacatatattgatcaactgctctatgcagtgacttct

SEQ ID NO: 208707 - DNA, 201 bp, Homo sapiens; identical to SEQ ID NO: 36552

SEQ ID NO: 208708 - DNA, 201 bp, Homo sapiens
gtatgtcctttattatctgctgtacatttatgccaggtattaatatctgttgattttcaagatttatattgtgttaagaattactattcttagccacatgyaggtagggcctgttactcaggcaaacatgattgaaaccttttagttttctcctcctacatcttggtaatggatactttagcatttgctttacagttactt

SEQ ID NO: 208709 - DNA, 201 bp, Homo sapiens; identical to SEQ ID NO: 36553

SEQ ID NO: 208710 - DNA, 201 bp, Homo sapiens; identical to SEQ ID NO: 36555

SEQ ID NO: 208711 - DNA, 201 bp, Homo sapiens
ttgtgtaagtaaatagtaaagactctataatttttaaaagatgcaaaatgcaactacataaacacatgatggtatcgtaaatcctccaatacggaaggtamgttgtgtaagtaaatagtaaagactcaggctgagcgtggtggctcatatctgtaatcccagcactttgggaggtcaaggagggtggatcacgaggtggtg

SEQ ID NO: 208712 - DNA, 201 bp, Homo sapiens
tgagttaaacgcatagtctcaggaagtcaaattaatattcctcttgctcaggtgagtattagcaaaataaagacttataattagattggtaaaatgctagmtggaaaaaatttggaagtccataaacatgtatagtcttggcttaaaatatttgatttagaagtagaacaaagagctttttgctggatgcactcctaggaa

SEQ ID NO: 208713 - DNA, 201 bp, Homo sapiens
aagagctttttgctggatgcactcctaggaaccacacacgatgctgaattttaatagttcctgtcattctctgggggaacagggaaccaattaggtgcctyacttagaaaaataaaatttggtgctcagtaactttgatatatcccacctacatataacctcccactgtaaggaaaagcctgccctagggtatagatttca

SEQ ID NO: 208714 - DNA, 201 bp, Homo sapiens
ccttcatctagaagtttggctgtcacttgtatatagtgatgggattaaacaaagtaactcgttgaagcatcccagatgaataagtggggagaataagttawtaagtatctagtgggaactggtttgttaatctaacttacaagaatagtggttctcagttctatgattacctaatgactagcaatccttagccctgcagaa

SEQ ID NO: 208715 - DNA, 201 bp, Homo sapiens
tgtctttggtgatttttctatgttaattgtccttgctatggtcctccaagatttaatagaaggagggctggttttccattcctagtcacctaatagtgaawgcagtgaggtggattgagagatgcatttgacggtgggttttctttactgttggggagaggaagtacagaaggccagctggcctcacatatccccttggga

SEQ ID NO: 208716 - DNA, 201 bp, Homo sapiens
gcaatgccacagaagtggctgtcggtggctctgtgaaagtgctgacagggcagaggcaagagagagatgaagtatccagagcagcagcggcctggggcggktgtcataacctgggaacgcttcgtggaggacctggtcactggttttccgaaggccagcccaggtctcggagtctcagagttctgagatgtgactgcagga

SEQ ID NO: 208717 - DNA, 201 bp, Homo sapiens
ttcgtctgtttccatttatatgaggtacctagaaggttcaaactcagagacagaaagtagaatgatggttgcagcagatgaggagcggggatggggagttwgtgtttcatagggacagagtttcagctggaaaaggtgaaaaagttctcgagatggatggtggggatggttgcacaacataaatggacttaatgtcactga

SEQ ID NO: 208718 - DNA, 201 bp, Homo sapiens
tcacaagtaactggcaatgccacagaagtggctgtcggtggctctgtgaaagtgctgacagggcagaggcaagagagagatgaagtatccagagcagcagyggcctggggcgggtgtcataacctgggaacgcttcgtggaggacctggtcactggttttccgaaggccagcccaggtctcggagtctcagagttctgaga

SEQ ID NO: 208719 - DNA, 201 bp, Homo sapiens
aaccagggaaacccttctgaagctctgcgatgaccagctcactgctttttcctggatccagcttccttccctggattttggaatctcttgacccccaccasctctgctctgtcttctgcatgacagcatttccccggcaagtcctgcttgttcttctctgaggcctttgtacctggaggcctcttgtctgcctttttcaca

SEQ ID NO: 208720 - DNA, 201 bp, Homo sapiens
ttctcttggggacaaaattgcctccagttgagaactcctgtcccacattaaatgctttgatagcatgacctatacaaaaggctttttcctctgctttcttyatttaagaaacatctatcatacctcttactaggcactgggctaggacaggtagaatgacaataagacatgtcccctatgcttaaggaattgtctgtcaca

SEQ ID NO: 208721 - DNA, 201 bp, Homo sapiens
aaaccagggaaacccttctgaagctctgcgatgaccagctcactgctttttcctggatccagcttccttccctggattttggaatctcttgacccccaccmgctctgctctgtcttctgcatgacagcatttccccggcaagtcctgcttgttcttctctgaggcctttgtacctggaggcctcttgtctgcctttttcac

SEQ ID NO: 208722 - DNA, 201 bp, Homo sapiens; identical to SEQ ID NO: 36655

SEQ ID NO: 208723 - DNA, 201 bp, Homo sapiens; identical to SEQ ID NO: 36656

SEQ ID NO: 208724 - DNA, 201 bp, Homo sapiens; identical to SEQ ID NO: 36657

SEQ ID NO: 208725 - DNA, 201 bp, Homo sapiens; identical to SEQ ID NO: 36658

SEQ ID NO: 208726 - DNA, 201 bp, Homo sapiens; identical to SEQ ID NO: 36659

SEQ ID NO: 208727 - DNA, 201 bp, Homo sapiens
tactacctagcattccctgaaataactattttaaattatttatttggataatacccctcaccttccaccaccatataagcccaggcatgcagggaccttgyctgtccagatcatctccagtgatctgagcacaatagatttttagtgataatggaacacaaggataaatcttcattaatttacatatttaaaaaaaaaatc

SEQ ID NO: 208728 - DNA, 201 bp, Homo sapiens
tagctagaagagaatcatttgaatattcctagaataaagaaaatatttaaagtcatggatgtcatgattaccctaattatatatgaatataccaaattatyacatgtaccctgaaaatatatacatctagtatcaatttttaaaattaaataaaaataaaagacaaggatgggaaaagaaaagcacaaaacaggcaggaca

SEQ ID NO: 208729 - DNA, 201 bp, Homo sapiens
gctggctgggagcttcagctggcaggtagctcaagagcccagcctctggagtcgaggagacctgggtttgagttccaactctactccctacacactgggtratcatggccaatttatgtagactttttgtacctcaatgtcctcagccataagttgggttgatgatagcatcccacagaattattgggaggatgaaatgag

SEQ ID NO: 208730 - DNA, 201 bp, Homo sapiens
gatttttagtgataatggaacacaaggataaatcttcattaatttacatatttaaaaaaaaaatctttgagaagaaagccccatctaattatgtagggaakttcaaacaggccaataggagacccagcaggtgggaagagagaggaaattatcttgttggtccacccaagattgttaaggagccttttcccatcccatagg

SEQ ID NO: 208731 - DNA, 201 bp, Homo sapiens
tatcagaagtcttcaggaagtttttggaggcagaaagctttatcttaaaaattaattcatttttaagaggggaagaagtaccatttggggaaagacagtakgcacctcccaattttcaagttaatgtgggagcttcagctggctgggagcttcagctggcaggtagctcaagagcccagcctctggagtcgaggagacctg

SEQ ID NO: 208732 - DNA, 201 bp, Homo sapiens
ctgtcttttattcatcatccccagggagcatcctgaccagaccaggactggctttggctgtgagagtcttctgcttcgaggctgcaccatcagaaacacckagatggctgttggcattgtcatctatgcaggtcattgtctgggtagtttcttttgtctgaattttcctttatccttccccctccaaatccatcttcagtc

SEQ ID NO: 208733 - DNA, 201 bp, Homo sapiens
tcatgacagcactctaggctcagtctgtgagaggtgttcctccggttcttctgggtgaagagaacacacttatcagaacctgttggcttcccctagctggraaaggctttcacaaccttcctgtttcattttctctttcacacaaataaatgtgtttttcctcctctctccttcactctgcctcaccgtaataagtgagct

SEQ ID NO: 208734 - DNA, 201 bp, Homo sapiens
aatctcatcctgcttttccaatctcaaacctattctctagaatgatattcttaaaagtcaaaactgattctatcactccccagcacaacacccttgaatarctttcactaccaccaaataaattgcaaatcctttgaggccctgacaaggctctgcccagtccagcacccctaagctccttttctggcctcatctctcacc

SEQ ID NO: 208735 - DNA, 201 bp, Homo sapiens
cttaaccatctgcaactctgtcatggtgtccacaaccaccgagcccaggcagagggtaaggaccagcgatggctgggggaggagggtaaaggaggtagagragtagaaggcagggtaggggcgaggggagaagttctgatcagggagacatgaaatttgggtcctagcaacagtgtcatttcatcacagtgaaacctagaa

SEQ ID NO: 208736 - DNA, 201 bp, Homo sapiens
tgactccactactaagtttggatgatcttgggtgagttattaaagatctcatttcagtctcctcatctctaagatcaggaatacacaccctatctaccacrcaggaatgttctgaggaacaaaggggaacttaaatgacctgtgagaaatagaaagcaccataccagcatgacgtattgtcattatctaccattatattag

SEQ ID NO: 208737 - DNA, 201 bp, Homo sapiens
ttgtaataataataagagccacattaccagtacttagagtatgctagttattttaacacattgtatcattaaatcttcaaaacatccctatgagttagaamcctaaaaaaaaaaaaaaaaaaaaaacctctgaggaaataaagtgacaggttatgtcaaagctcaaagtcacataactagtaggtagtccactagagtttg

SEQ ID NO: 208738 - DNA, 201 bp, Homo sapiens; identical to SEQ ID NO: 36662

SEQ ID NO: 208739 - DNA, 201 bp, Homo sapiens; identical to SEQ ID NO: 36664

SEQ ID NO: 208740 - DNA, 201 bp, Homo sapiens
accacatgcaaggcactctgagactttctatgctattctaccttttttttttttttttttttggacagtctcgctctgttacccaagctagagtacggtgrcacaatctgcttagtgcaatctatgcctactgggttcaagggtttctcctacctcagcctcccaagtagctggaattacaggcgtgcactaccacaccca

SEQ ID NO: 208741 - DNA, 201 bp, Homo sapiens
actgatcccttctgatctgccctccttggattctagagaggtttggatttcccagaagggagggtggggtgtcagaatccaaaaagctacccaagagtgamcacaacaaggggtctttaggactctgctggccgtaggcctagaccaaagcaacgcccttgagagagtccctctggggcactggcagccatggatggaagc

SEQ ID NO: 208742 - DNA, 201 bp, Homo sapiens
tttttttttttttttttttggacagtctcgctctgttacccaagctagagtacggtggcacaatctgcttagtgcaatctatgcctactgggttcaagggwttctcctacctcagcctcccaagtagctggaattacaggcgtgcactaccacacccagctaattttttgtatttttagtagagacagggtttttgccatg

SEQ ID NO: 208743 - DNA, 201 bp, Homo sapiens
ggttaactgagctcagattcaaactcgggcatagttctttggtttgtttgtttgctttttgtaatggaaattttttttttattatactttaagttttaggrtacatgtgcacaacgtgcaggtttgttacatatgtatacatgtgccatgttggtgtgctgcacccattaactcgtcatttagcattaggtatatctccta

SEQ ID NO: 208744 - DNA, 201 bp, Homo sapiens
acacagaaacccaagcagtccagacgaagggggcatggtgagagtgcatgttcaccttgggctcttctaagtttacccttcccatcaaagtgctgactgcrtggcaaattccttgagtatctaaaagttaagcaagacccaaaaactgtaaagatttcacttttcctggggaaggcacaaagattgatgcctgagaaggct

SEQ ID NO: 208745 - DNA, 201 bp, Homo sapiens
cccagtgcagctcagattccagcagaaacagaaacaagaacatgcccagaggggctcagcatcagtgaagaagcccagcaaaggaaagcttgcttctcccrgtctggctgccttcagaggcacccagcttcaagccagctgggctcagttagaaagaccacatgtgggatattagtttggtttcacatcccacacttaaag

SEQ ID NO: 208746 - DNA, 201 bp, Homo sapiens
ctatgagtgagaacatgcggtgtttggttttttgtccttgcgatagtttgctgagaatgatggtttgcagcttcatccatgtccctacaaatgacatgaaytcatcattttttatggctgcatagtattccatggtgtatatgtgccacattttcttaatccagtctatcattgttgggcatttgggttggttccaagtct

SEQ ID NO: 208747 - DNA, 201 bp, Homo sapiens
acagaaacccaagcagtccagacgaagggggcatggtgagagtgcatgttcaccttgggctcttctaagtttacccttcccatcaaagtgctgactgcgtrgcaaattccttgagtatctaaaagttaagcaagacccaaaaactgtaaagatttcacttttcctggggaaggcacaaagattgatgcctgagaaggcttg

SEQ ID NO: 208748 - DNA, 201 bp, Homo sapiens
gaggaagacaccaaaaccctcttcctcctcagggacttttgtgatgtcaaaggagaaaactggaattctattcacaactctttctctgtggaagagtagaygtgtcatgcccagtgcagctcagattccagcagaaacagaaacaagaacatgcccagaggggctcagcatcagtgaagaagcccagcaaaggaaagcttg

SEQ ID NO: 208749 - DNA, 201 bp, Homo sapiens
ttggtaaacattcttgactcttggtaaaaactaaatacataaatgatttctatgtttgaggaaagagttttgttggtttccctttcttcaatcgacagaayctttcgtgaatgatatttcctaatggacacggagggatttcaaagtggtctaagatgttcttctaaccctgtaagaactttatgcctatgggttccattt

SEQ ID NO: 208750 - DNA, 201 bp, Homo sapiens
caaagtgctgactgcgtggcaaattccttgagtatctaaaagttaagcaagacccaaaaactgtaaagatttcacttttcctggggaaggcacaaagattratgcctgagaaggcttgtttctggagccgctgatgcctgagaagccttgtttctggagctgttgaacttcagaaacttgggggaacctgtgattcgagct

SEQ ID NO: 208751 - DNA, 201 bp, Homo sapiens
tatttcaggtggctggggaagtcttctgagaagatcttttataaccaggaagattggatcttaggaagacttgtctgagattctccagagggcctccaggmggggaggaagacaccaaaaccctcttcctcctcagggacttttgtgatgtcaaaggagaaaactggaattctattcacaactctttctctgtggaagagt

SEQ ID NO: 208752 - DNA, 201 bp, Homo sapiens
tataaaatacttagttgattcttagtacacaacaagcattcaataagtgctgcagaataataataacaggagaggaggaataaaaggtgatgatgatgatvatgacgatgacgacaatgactttggaatctgacgatgtgaatggcaatcctgactctgttacttaccaaccatgagacactttagtctccatctgcatgt

SEQ ID NO: 208753 - DNA, 201 bp, Homo sapiens
gcattagattctcacaggagtgcaaaacctattgtgaactgcacatgcaagggatctaggttgtgtgcttcttatgagaatcaaatgcttgatgatctgtygctgtctcccattatccctacatgggaccatatagttgcaaaaaaataagctcagggctcccactgattccactatggtaagttgtataattattttatt

SEQ ID NO: 208754 - DNA, 201 bp, Homo sapiens
acagatattatgggagcagcaatgaggaaagtctttcttgaagaggtagctgctaaagctgattctcaagtggagtagacatttgccagaggaggaggatggcagagccaagtgtaggggctggatgtggcaggcagctgtgagcagaaagagagaggccactcttagccccaggaaaatcacaaagcacagaggcaggaa

SEQ ID NO: 208755 - DNA, 201 bp, Homo sapiens; identical to SEQ ID NO: 36682

SEQ ID NO: 208756 - DNA, 201 bp, Homo sapiens
cttttattatctatttaacaaatgaggcaagaacagttaagaaaccctgttctctaggttaactgagctcagattcaaactcgggcatagttctttggttkgtttgtttgctttttgtaatggaaattttttttttattatactttaagttttagggtacatgtgcacaacgtgcaggtttgttacatatgtatacatgtg

SEQ ID NO: 208757 - DNA, 201 bp, Homo sapiens
atgcttacttgaaagcacacatttattgttgccaggattctttccacatagagatagagggtggcagggataatgaaagtgggctcagcctgctccctggrgggagacatcttggctgctctttgcgaccttgcttctcccttatacttttagggcagaaagatttctgagtatggatagaactcgcttctggctaactcg

SEQ ID NO: 208758 - DNA, 201 bp, Homo sapiens
tgatgtcacctatttataaccctccaagggcttcccaagacctctgcaataaagcacaaaaaccataaacctggcccccaattcctccctgctctgcttgkgccaactcctcctaggacatattcccctactcttatcactccccaagcttcagccatcatgcctaggttttgattctcatccctttggcatggctacctc

SEQ ID NO: 208759 - DNA, 201 bp, Homo sapiens
cccaaaagcatctagacttgtatgcaagagatggcctgcgcacactatgcattgccaagaaggtaagaacaattccttcaagcgtgctttgaatatcattraatagctgaatggccttgaccctgcttctttttctttataaaagacccttagaggtggttgttttaacattttcaagattagctgttctgacttgccaca

SEQ ID NO: 208760 - DNA, 201 bp, Homo sapiens
tggggatccctgagcatttgtatgtggcctcatgcgggaaaatggctatttgacagtacctgacattaatatggaaaagaagctgagaaaaatccgagccyggacccaaaagcatctagacttgtatgcaagagatggcctgcgcacactatgcattgccaagaaggtaagaacaattccttcaagcgtgctttgaatatc

SEQ ID NO: 208761 - DNA, 201 bp, Homo sapiens
agaagacaatttttccatagaattgaggggtggaggtggtttggaatgaaactgttccacctcagatcatcaggcatttgagtctcataaggagcatgcarcctagatccctcacatccacagttcacaatagagttctcgtgctcctatgagaatctaatgtcaccactaatctgacaggagttggagctcaggcagtaa

SEQ ID NO: 208762 - DNA, 201 bp, Homo sapiens
ctgtttataccatcaatacagagaatcaggtgaggtgattctctgtattgatatctgcagatatcaacgtgtagagcaacccctcaaccaagaggacacakgcttctaggtgggatttgggtacaccagggaagcacccaacccccaacagatcactgaatcttggagtctagaggaccctggaagtcatccagcccaata

SEQ ID NO: 208763 - DNA, 201 bp, Homo sapiens
atactgtattattatgcttctttataggagacctgtgaatccatcctcaattgtgcattggaagagctaaagcaatttcgtgaactacagaagccagaccrcaagctctttggattccgcttaccttccaagacaccatccatcacctcagaagctgtggttccagaagctggattggtcatcgatgggaagacattgaat

SEQ ID NO: 208764 - DNA, 201 bp, Homo sapiens
ttagacttattgagtaatcactaaaagaatagtcccaaaattatacaaaatagtcaatatgtttaaaagaacaatagaatgactatagttaacattagccrattgtgtatttcaaaatagctagaagagaatcatttgaatattcctagaataaagaaaatatttaaagtcatggatgtcatgattaccctaattatatat

SEQ ID NO: 208765 - DNA, 201 bp, Homo sapiens
gttgctcaaattctccatttgctcatcagtaaagttcattgtaacatttgtgaaggcatttttttgaaaactgcccaagtctcttgattaccattatatcyccaatacctaacactgtgcctagaaaaaaagacacttggtaagtcctatatttgctgaatggtaaagaaaatggtaggacttattttccaaagaagaaat

SEQ ID NO: 208766 - DNA, 201 bp, Homo sapiens
ggaatttgaaagaaaaaaaaaatcataaagtttatgttctctgacaagttatttaaattagaaaccagcaataaacaggtagccacataaaacctaacaarcttagaaatttcaaaatgtacttctaaacaacttatgaaataaagagtaagtcatgatggaaattctaaataccttttgctcaatgtctataaaaatact

SEQ ID NO: 208767 - DNA, 201 bp, Homo sapiens
ctacgattgagatctctcagatgccacttagaaactttagaatctttacacttgccaggtttgtagcaacagtagcaaaagaactaatgattgataacaaygaataactgagtacttggctaggcactaaggcctgagtacttactaggtaggcacaattgcatttactcctcttgaaccccaaggagataggctgtgtta

SEQ ID NO: 208768 - DNA, 201 bp, Homo sapiens
ccgagtagctgggactacaggtgccggccaccacgcccggctaattttttgtatttttagtagagacgaggtttcaccgtgttagccaggatggtctcgayttcctgacctcatgatccgcctgcctcagcctcccaaaatgctggaattacaggcgtgagccactgtgcccggtcccagagcctcagtttttaaggctca

SEQ ID NO: 208769 - DNA, 201 bp, Homo sapiens
ttaaatgacctgtgagaaatagaaagcaccataccagcatgacgtattgtcattatctaccattatattagtattatttattatcttatgccatccttgtrtctatctccatcttgctgagctactttcactcccattcacaagcagtgtcttctattttggctgttaatttggttccaaattaatattcctttgatatta

SEQ ID NO: 208770 - DNA, 201 bp, Homo sapiens
aagaaaaaattgaaaaaggaaatactttctcactatatttcaaggcaaacaccagaaaaaaattaataagtttatttccatcaataagacttttataaccrtagtccgttcaaaccaatgtgatcaatgcttcatgccacagttcttagcacccttcatggaatacaacaattgataaacacaggtacaatgtattttttt

SEQ ID NO: 208771 - DNA, 201 bp, Homo sapiens
agacatatacaccaatggaacagagcagagacctcaaataacaccacacacctacaaccatctgatcttcaacaaaccagacaaaaactagcaatggggamaagattccctatttaataaatggtactgggaaaactggttagccatatgcaggatcccttccttacaccttatacaaaattaacaccttatacaaaaatt

SEQ ID NO: 208772 - DNA, 201 bp, Homo sapiens
gaaaataaaatattgtcattgaaattaaaactacaatttgtaggatctgctctagatcagacactggcaaaaaataaactgccaaattgaaatgtagtttygggagcttatccagaatgatacacaaatatgaaaaataagaggaaatggtggctagaacaaatggcttcagcctctctaaataggaatatcaggaggaaa

SEQ ID NO: 208773 - DNA, 201 bp, Homo sapiens
caaatacaaaagaatggaaatcataacaaacagtctctcagaccacagcacaatcaaattagaactcggcattaagaaactcacttgaaactgaacaactrcatggaaactgaacaacctgctcctgaatgaccactgggtaaataatgaaattaaggcagaaataaagaagttctttgaaaccaatgagaacgaagacac

SEQ ID NO: 208774 - DNA, 201 bp, Homo sapiens
gctcccagagccacagagcacttccacagaaccctgtggttctttcgagttctaaagttgctccccaattccaatgtccctgtttattttatagacttggycttccaaatggaagcacctttatttcaggtggctggggaagtcttctgagaagatcttttataaccaggaagattggatcttaggaagacttgtctgaga

SEQ ID NO: 208775 - DNA, 201 bp, Homo sapiens; identical to SEQ ID NO: 36665

SEQ ID NO: 208776 - DNA, 201 bp, Homo sapiens
ctgcactatgctgcttccagctccctttcctaacttctggccctgattaccaaatgtgagcttaggctcatggccagattcttggctgtagactcaaagayaactgcttcccatagacccctccatcacttttttgcagtcacgtctgtagttggatgtgcttggtttctcaatttggtgacttttatcctttaagtcctt

SEQ ID NO: 208777 - DNA, 201 bp, Homo sapiens
tgtgctttcacatgtaaggaggaattattactaaaatgctacagacgcatcacccccagaatcctcagaaggggtctcaatagtcatttggatgacatttmaccgtgtctgctgcactgagctcccagagccacagagcacttccacagaaccctgtggttctttcgagttctaaagttgctccccaattccaatgtccct

SEQ ID NO: 208778 - DNA, 201 bp, Homo sapiens
aataataataagagccacattaccagtacttagagtatgctagttattttaacacattgtatcattaaatcttcaaaacatccctatgagttagaaacctaaaaaaaaaaaaaaaaaaaaaacctctgaggaaataaagtgacaggttatgtcaaagctcaaagtcacataactagtaggtagtccactagagtttgaatc

SEQ ID NO: 208779 - DNA, 201 bp, Homo sapiens
taactcttctcccctgactgatacacaatccagagcagacactgtctcctggttttggagatggagacatgacccagaaccccatccaaacaattctaccmgaccccattcacagtgattggttcaggcatgtacatatgacccagtcctggccaatgagatcctgccttaggatttttgttggaaagcaggagcagtctt

SEQ ID NO: 208780 - DNA, 201 bp, Homo sapiens
ttgtgcaattgaatactagagcccttggaattttgctcatgacctaagcccatgcatcatccaccctagacttgtttatactgtgaggaaatgtctttttrcaaacagcagaagccttgttgacagaattacaatcccgttagagcattttcttttaatatagcaaccgtgtttgtggtctaaaggtgacccattaatcag

SEQ ID NO: 208781 - DNA, 201 bp, Homo sapiens
ataataataagagccacattaccagtacttagagtatgctagttattttaacacattgtatcattaaatcttcaaaacatccctatgagttagaaacctaaaaaaaaaaaaaaaaaaaaaacctctgaggaaataaagtgacaggttatgtcaaagctcaaagtcacataactagtaggtagtccactagagtttgaatct

SEQ ID NO: 208782 - DNA, 201 bp, Homo sapiens
ccccattcacagtgattggttcaggcatgtacatatgacccagtcctggccaatgagatcctgccttaggatttttgttggaaagcaggagcagtctttcygctgtggttgctgagccagttgtttggaagcctggagcaactggcaatttcttgccgtaatgtagaaaggactactggagaatgagaccaacagagagga

SEQ ID NO: 208783 - DNA, 201 bp, Homo sapiens
atatcttcctaatcataaaatttgtattggggccagttaggctcctccaaacttccacactgctttcctttgtggacatcccccccgccaccccacccttytgaagagaatgcaacagagaggagcgaaggaggtgtcattggacctctgcctcctttcactaatcttggtctgcctttctttctttggaagagatttatg

SEQ ID NO: 208784 - DNA, 201 bp, Homo sapiens
atcctgccttaggatttttgttggaaagcaggagcagtctttccgctgtggttgctgagccagttgtttggaagcctggagcaactggcaatttcttgccrtaatgtagaaaggactactggagaatgagaccaacagagaggaaagcaggatgaagaaagggagaggtgcagattccatgggacattgctgagtgcctgc

SEQ ID NO: 208785 - DNA, 201 bp, Homo sapiens
tacctctaggcttattatagctcaattcagtcatagttggttttttgtaccatctagtcaaaagagcctggccaatgtgtgaacaataactatctgttaartaaatgaatctcaaattgactgtggctatttaggggtttttttttatttgtttaatccattgttttctttttagaagaaaaaaagaatttagtgggttgt

SEQ ID NO: 208786 - DNA, 201 bp, Homo sapiens
cctggtttctatattggacagtgcagatatagaacgtttccctcatcatggaaagatcttgaacagtcttggtatagaaggagaccgtgtgtgtgtgtttrtgtgtgtgtgtgtgtctatgccttacctccagtttcctgaaacaactcagttcattgaatggaaactcagtgtgactaaatatatttcaaaaacatgaat

SEQ ID NO: 208787 - DNA, 201 bp, Homo sapiens
gaaaaaatacgtgcatggccaaattatatatgctggccctcctccaatggacccatagcccatgaaggactaagaaaagacacagcaaagaaacctgttcrtctttgattaactcagtgttgctttacatttactgggctttggaaatattttttaatatctaagtttgggaatttttactttttcaagtatacaaaaata

SEQ ID NO: 208788 - DNA, 201 bp, Homo sapiens
atcgcagaatcatggcctggttcttgggaataatctcagtgtggattagaccacagactcatctgtgctgggagctggcaggacctaggccaggctgctgytgttgtttccaaaatagcttccagggaacatcggaaaaccaagatgataacaatctagaaaaaagaaacattagtccaccagctcactggcagggaggag

SEQ ID NO: 208789 - DNA, 201 bp, Homo sapiens
aaatactaagggcaaccagagagaaaggtcgggttccccacaaagagaagtccatcagactaacagcagatatctctgtaaaaatcctacaagccaggagrgagtgaggaccaatattcaacattcttaaagaattttcaacccagaatttcatatccagccaaactaagcttcataagcaaaggagaaataaaatccttt

SEQ ID NO: 208790 - DNA, 201 bp, Homo sapiens
gagcacatttaaggctggttgaggacactgggagggaagaggcatcactgtatttgggggagcaatggagtattgtgttaggagaagcacaacaggagacmcactgcctgagttgaacagcctccagtacttactaactgcctgactttagacaagcaatataacctctgaaattcattttgtaattcctaaaatttgaac

SEQ ID NO: 208791 - DNA, 201 bp, Homo sapiens
aagtctcttgattaccattatatccccaatacctaacactgtgcctagaaaaaaagacacttggtaagtcctatatttgctgaatggtaaagaaaatggtrggacttattttccaaagaagaaatgacatctctcaagctaagcactatagcaatgactttctatagcactagagtaatgttaaaaggattcaattgtatg

SEQ ID NO: 208792 - DNA, 201 bp, Homo sapiens
ttgctggtgaggaactacgttcctttggaggaggagaggcgctctgctttttagagtttccagtttttctgctctgttttttccccatctttgtggttttmtctacttttggtctttgatgatggtgatgtacagatgggtttttgctgtggatgtcctttctatttgttagttttccttctaacagacaggatcctcagc

SEQ ID NO: 208793 - DNA, 201 bp, Homo sapiens
atatatatgcaccaaatacagggcacccagattcataaatcaagttcttagagacctacaaagagacttagactcccatacaataataatgggaggctttrataccccactgtcaatagtagacagatcaacaagacagaaaattaacaaggatattcaggacttgaactcagctctggactaagcagacctaatagacat

SEQ ID NO: 208794 - DNA, 201 bp, Homo sapiens
gaacacaaggataaatcttcattaatttacatatttaaaaaaaaaatctttgagaagaaagccccatctaattatgtagggaagttcaaacaggccaatasgagacccagcaggtgggaagagagaggaaattatcttgttggtccacccaagattgttaaggagccttttcccatcccataggttgtaagcgaagaggac

SEQ ID NO: 208795 - DNA, 201 bp, Homo sapiens
gctgagaaaaatccgagcccggacccaaaagcatctagacttgtatgcaagagatggcctgcgcacactatgcattgccaagaaggtaagaacaattcctycaagcgtgctttgaatatcattaaatagctgaatggccttgaccctgcttctttttctttataaaagacccttagaggtggttgttttaacattttcaag

SEQ ID NO: 208796 - DNA, 201 bp, Homo sapiens
aacgtatttcttgcattgagagaaggcctagctcagctaaacaaatgaaatgaggaacttagctaatgagatccaggcttgtagatgtcttgggacctaayttgatataagacctcaagtagaagatagagaagatgataaatagagaacagtttccaaagtcagttggccatccagagatcaactaaaaacaccttaggt

SEQ ID NO: 208797 - DNA, 201 bp, Homo sapiens
gctctgggagacctgtccttcctccacatgactgggcctcatggatgagtcctaaaagtccagttggactgcggagtagctaacccatggaatgaaggagmattccttgctgtgctcctacatccttgctgtactcagcaagaacaccctcaggcctggcacccacagatggtctccaccttcttcctgagcagacccact

SEQ ID NO: 208798 - DNA, 201 bp, Homo sapiens
gtgcatattttgcctcccctaatggactatgcattcctcaaaagcaaaaggcctacttgttccctttcgttttctctatagtgccatgcagagggactcasggaatatttgatgcttgaacaaaataatttttcattgctataagacaccatatgcatgtaatgtcaacaggagggtctaaaatgggactctgagggaaga

SEQ ID NO: 208799 - DNA, 201 bp, Homo sapiens
tgagaagcaaaactttgaaaggagggagaaaataacctcaggtttaataatatttatggtgtttaaatgttcaatttgatgctgaggttcctggcagcctwagcaagaaggtaaactccaaggcttacaagtaaaagacaaacaggtttaatctcaggagctggtgtctttaaaaataaaatattgtaaatagtgccgaat

SEQ ID NO: 208800 - DNA, 201 bp, Homo sapiens
caataatagacaaacagccaaatcatgagtgaactctcccattcacaattgctacaaagacaataaaatacctaggaatacagctaacaagggaagtgaargacatcttcaaggagaactagaaaccactggtcaaagaaataagagaggacacaaacaaatgcaaaaacattccatgctcatggataggaagaatcaata

SEQ ID NO: 208801 - DNA, 201 bp, Homo sapiens
acctgattgaaaaatggattagagatgccttcaatagaagacacacacacaatgttactataagaattgagaagcaaaactttgaaaggagggagaaaatracctcaggtttaataatatttatggtgtttaaatgttcaatttgatgctgaggttcctggcagcctaagcaagaaggtaaactccaaggcttacaagtaa

SEQ ID NO: 208802 - DNA, 201 bp, Homo sapiens
tctatccctcagcagccagtcatccaagctgccctggagatgtctctttatttgctcctcacctgattgaaaaatggattagagatgccttcaatagaagwcacacacacaatgttactataagaattgagaagcaaaactttgaaaggagggagaaaataacctcaggtttaataatatttatggtgtttaaatgttcaa

SEQ ID NO: 208803 - DNA, 201 bp, Homo sapiens
agttgaacagcctccagtacttactaactgcctgactttagacaagcaatataacctctgaaattcattttgtaattcctaaaatttgaacaattcctgargtggttgtgagagttgcaggagataattcttagaaaatacttagcacagtgtatgacatacaacaaatgctcagtaaatgcaagctgaaattgcattatt

SEQ ID NO: 208804 - DNA, 201 bp, Homo sapiens
tgggaatttttactttttcaagtatacaaaaataattggctacagggaccagataggtaattaaatggactgaatagtttataaaaagcagtattactcayggactgataaatggccaatgacagttggcatcagtgttaggaggcaatagggaatggtggtgactatggcaaagtggggaggccatgcatttatcctagg

SEQ ID NO: 208805 - DNA, 201 bp, Homo sapiens
tatagattatatatttttttaatctgactttttactgagacttggagcatctgtcttctgtaagtcaggcagctgctaaaataaacagctttctgacagcrtagcaccgagggcctagcctggcctggcctgcaacctgttttcttttgtctgttttcttttgtctgtgagtttgcacctgtgtcctcagggaaacctaca

SEQ ID NO: 208806 - DNA, 201 bp, Homo sapiens
acatgggacctgggcttttctcagagctgccatttaccaaatatgtggcctatgcagatacttggtcacttgagcctccatttcaacctatataaaatggrgccgatactagcccctgactcccagggtcatgtggatccaatgagattatctttataaattgtttagctcagtgcctgcaccataagtagtactaagtaa

SEQ ID NO: 208807 - DNA, 201 bp, Homo sapiens
cataactaagtttagttactataaataaaatttttcaaattttgtactggccaaactactgaactatgtttcccctaaactttttttttttaatgaatgcycccaaagtcatatggatctcatagctttattattcctagatgcctaccagggtatcctggaggtatgtgtgcttctgtttgagaagctcaaccctggaac

SEQ ID NO: 208808 - DNA, 201 bp, Homo sapiens
gtcttggggaaggcaaacccacaacagtcactgagaatatttcttcaccactgcatgcgatcctaaggaagagaggattatgtctaaagaaaagacaggcwattataaccagtacagcagtgacctccttgggatccagcaagtaatgtaaagaagagagagactagtctgacttaccacttgtgggtggctcctttgata

SEQ ID NO: 208809 - DNA, 201 bp, Homo sapiens
ctgaagttgcttatcagcttaaggagattttgggctgagacaatggggttttctagatatacaatcatgtcatctgcaaacagggacaatttgacttcctmttttcctaattgaataccctttatttccttctcctgcctaattgccctggccagaacttccaacactatgttgaataggagtggtgagagagggcatccc

SEQ ID NO: 208810 - DNA, 201 bp, Homo sapiens
aaacccacaacagtcactgagaatatttcttcaccactgcatgcgatcctaaggaagagaggattatgtctaaagaaaagacaggctattataaccagtasagcagtgacctccttgggatccagcaagtaatgtaaagaagagagagactagtctgacttaccacttgtgggtggctcctttgatacttagatcatgaca

SEQ ID NO: 208811 - DNA, 201 bp, Homo sapiens
tttgtgaactgcgaatgctgctgtctgattgttcctctggaagttttgtctcagagaagtacccggccatgtgaggtgtcagtctgcgcctactgaggggrtgcctcccagttaggctgctcaggggtcaggggtcacggacccacttgaggaggcagtctgcccattctcagatctccagctgcgtgctgggagaaccac

SEQ ID NO: 208812 - DNA, 201 bp, Homo sapiens
ttttgttcatctgtggcctgcccccagaggtggagcctacagaggcaggcaggcctccttgagctgtggtgggctccacccagttcgagcttcccagctgytttatttacctaagcaagcatgggcaatggcaggcgcccctcccccagcctcgctgctgccttgcagtttgatctcagactgctgtgctagcaatcagcg

SEQ ID NO: 208813 - DNA, 201 bp, Homo sapiens
ttagggtgggagtgacccgattttccaggtgccatctgtcacccctttctttgactaggaaggggaactccctgaccccttgtgcttcccgaatgaggcartgcctcgccctgctttggctcgtgcatggtgcactgcacccactgtcctgtgcccactgtctggcactccctagtgagatgaacccggtacctcagatgg

SEQ ID NO: 208814 - DNA, 201 bp, Homo sapiens
tgaagttctggccagggcaatcaagcacgagaaagaaataaagggtattcaaatagaaagagagaaagtaaaattgtctgtttacagatgacatgattgtrtatttagaaaaccccattgtcagggcaggtgcggcggctcacacctgtaatcctagtgctttgggaggctgaggtgggcagatcacaaggtgagaagttc

SEQ ID NO: 208815 - DNA, 201 bp, Homo sapiens
tcagaccgacactgtttataccatcaatacagagaatcaggtgaggtgattctctgtattgatatctgcagatatcaacgtgtagagcaacccctcaaccragaggacacaggcttctaggtgggatttgggtacaccagggaagcacccaacccccaacagatcactgaatcttggagtctagaggaccctggaagtcat

SEQ ID NO: 208816 - DNA, 201 bp, Homo sapiens
accccatctctactaaaaatacaaaaattagctaggcatgatggcatgtgcccgtaatcccagctactcaggagctcaggaggctgaagcagaattgcttmaactgagacctgggagacagaggttgcagtgagccgagatcatgccattgcactccagcctgggctatggagcaggactccatctcaaaagaaaaaataa

SEQ ID NO: 208817 - DNA, 201 bp, Homo sapiens
aatgagctcatatacccaagaaaatcctaagtaaaaagaacaaaactggaggcatcatgctacctgacttcaaactatactacaaggctacaataaccaamacagacatatacaccaatggaacagagcagagacctcaaataacaccacacacctacaaccatctgatcttcaacaaaccagacaaaaactagcaatggg

SEQ ID NO: 208818 - DNA, 201 bp, Homo sapiens
taaaatactggcaaaccaaatccagcagcacatcaaaaagcttatccacccacaatcaagtcagcttcatccctgggatgcaaggctggttcaacatacawaataaatgtaatccatcacataaacagaaccaatgacaaacaccacacaattacctcaatagatgcagaaaaggccttcgataaaattcacctcttaatg

SEQ ID NO: 208819 - DNA, 201 bp, Homo sapiens
gaccccagccagaccaagctacttttagttctcaaataccctattcttgcttctaggcctctgcatttgctaatttctctcccatttcctctggctctctyctcatccttcaggcctcatctcaaatgttgtctcctccaagaggccttccttggtgtctaggctggattctgtaaccccttggggctcccattgtgtctt

SEQ ID NO: 208820 - DNA, 201 bp, Homo sapiens
tgaagggaaaaaaaacacaccattaggacattattggatcaattaacaaaatatgaatgtaaaaaaattttagctatgttaaattaattttagcaatgttaagtttggtaaaatttaccaaaatccagtcaagatcactcagcaagcctgaataagccaaatcctatccccaaaaacattagacccaaaggatttaaagtt

SEQ ID NO: 208821 - DNA, 201 bp, Homo sapiens
ttattaatctcaataattcctttggaaatctgaaagatagtggtacatgcatgtgtgagacttatttttactctgtctacagacagcatttgggagcatayaggggatttgtagacaagatgcagtagcttaatctaccaatcaggaaccactagcttacagaaacagcttggtagcaggaattacttaacagtctccttc

SEQ ID NO: 208822 - DNA, 201 bp, Homo sapiens
acaccttggttccctcatctggaaaatggggacaaaaatagttccctttccatagggtagttttgaagactaaatggtaggtacatgacttacttagcatraagataggcacatagtaaaagaccagggaacagttggtattaatatcaatgctttcataggcaatatgtgttgactgactgaagctgggtgtgatatccc

SEQ ID NO: 208823 - DNA, 201 bp, Homo sapiens
aaaaattttagctatgttaaattaattttagcaatgttaagtttggtaaaatttaccaaaatccagtcaagatcactcagcaagcctgaataagccaaatsctatccccaaaaacattagacccaaaggatttaaagtttgatcaaacttgtaaagaacagttaatctctattatatcaattttttcatggaataaaaaaa

SEQ ID NO: 208824 - DNA, 201 bp, Homo sapiens
agagaatgacttctgcaggcggctcctggccagctgctggtctcccctgggcttcactccatgcaagagcatgctgcttttctgtatcagcaggattcggscagtcatcacctcccctgactgaacccccttgggctgtgtgcatccctgacttttccacagatatggtcctgacagtggaggagacaaagtagatgctag

SEQ ID NO: 208825 - DNA, 201 bp, Homo sapiens
tccagtcaagatcactcagcaagcctgaataagccaaatcctatccccaaaaacattagacccaaaggatttaaagtttgatcaaacttgtaaagaacagktaatctctattatatcaattttttcatggaataaaaaaatagaaaaagataagtgtcttagtcagtttatgctattgcaacagaacacctgagactgggt

SEQ ID NO: 208826 - DNA, 201 bp, Homo sapiens
aaagtctttcttgaagaggtagctgctaaagctgattctcaagtggagtagacatttgccagaggaggaggatggcagagccaagtgtaggggctggatgkggcaggcagctgtgagcagaaagagagaggccactcttagccccaggaaaatcacaaagcacagaggcaggaaggaaaatggttttgtgcagaggagcag

SEQ ID NO: 208827 - DNA, 201 bp, Homo sapiens
aaaatagaaaaagataagtgtcttagtcagtttatgctattgcaacagaacacctgagactgggtaatttacaaagaatagaaatatatttctcatagctytaggggctgataagtctaagaccaaagcaccagcaggttcagagtctggtgagcactgctccctgcttcaaatggtgtcctcttgctgcatctttgggaa

SEQ ID NO: 208828 - DNA, 201 bp, Homo sapiens
gcagttgtcatggagattaactaaaataaccacatgtgcagcacctgggacagcaacaaatgcttactgctactctgaatcagtattacacccttaccacyattttctattaaagttatttgtgcatattttgcctcccctaatggactatgcattcctcaaaagcaaaaggcctacttgttccctttcgttttctctata

SEQ ID NO: 208829 - DNA, 201 bp, Homo sapiens
taagtgtcttagtcagtttatgctattgcaacagaacacctgagactgggtaatttacaaagaatagaaatatatttctcatagctctaggggctgataastctaagaccaaagcaccagcaggttcagagtctggtgagcactgctccctgcttcaaatggtgtcctcttgctgcatctttgggaagggcacaaaaaaaa

SEQ ID NO: 208830 - DNA, 201 bp, Homo sapiens
tggaaactgaacaacctgctcctgaatgaccactgggtaaataatgaaattaaggcagaaataaagaagttctttgaaaccaatgagaacgaagacacaaygtaccagaatctctggacacagctaaagcagtgtttagagggacgtttatagcactaaatgcccagaggagaaagtgggaaagatctaaaatcaacaccc

SEQ ID NO: 208831 - DNA, 201 bp, Homo sapiens
ggcctgttcataccatgtaatagttaaaatgaacctactagagctatgtctttcaacatagataaaattttaaagcagtggtccccaacctttttggcacsagggaccacagaagacaatttttccatagaattgaggggtggaggtggtttggaatgaaactgttccacctcagatcatcaggcatttgagtctcataag

SEQ ID NO: 208832 - DNA, 201 bp, Homo sapiens
aaagttaaataacttgctgaaggcctcagagtttctaaatggggatccactctgttcaactgaggaaactatactctctgctctgaactgaggagtctaawgtctgttccatcatcactaggaccaactcctcttctgtgctcatccaatcccaactcactctgcccagctcagtcctagcaatctctcctgccacgaatc

SEQ ID NO: 208833 - DNA, 201 bp, Homo sapiens
tttaaagtataaaagcaagcgaaaaaagctgcagaattgtctgcgtcttctcaggctgtcataacaaataccatagactgggtggcttaaataacagattyatttctcatggttctggaggctagaagcccaagatcagtgcagcagctgattcagcatctggttcaggccctcttccttcctggacagctgccttccagc

SEQ ID NO: 208834 - DNA, 201 bp, Homo sapiens
gcagacagatgagcccacacctccggaacagatcttgaaactgtgtcacatgaggaataattgagggcacctggaaagttaaatttggcttggcacacccmaaagtcttcatgggacacctgatgaatgccttaaaatatttaaagaatggtagaaggtggaatagaccgtattacctggaagagcagaactgtttaaata

SEQ ID NO: 208835 - DNA, 201 bp, Homo sapiens
tctggctgccttcagaggcacccagcttcaagccagctgggctcagttagaaagaccacatgtgggatattagtttggtttcacatcccacacttaaagcrggacatttccaaatgcagacagatgagcccacacctccggaacagatcttgaaactgtgtcacatgaggaataattgagggcacctggaaagttaaattt

SEQ ID NO: 208836 - DNA, 201 bp, Homo sapiens
ccctgtgcctcctgcattatcagccatggatcagggccaagaggtttatggggattgattagtgtgtagaatgggaagggagctaattagttctctttatycccagactctggcagacaagtgaattcagtacttctgagtcaagggagccacggcactctatccctcagcagccagtcatccaagctgccctggagatgt

SEQ ID NO: 208837 - DNA, 201 bp, Homo sapiens
gtaaaatagaggagccagagcaagagaaaataagccaacaaataacatataggtcaatatgtagtgaattccaaagggatggttcaagtggtaacttctasaaagatgtgaaaatctggaaatccatgggtcagatccagcccgtcctcttttttcttccaaagaagaataggaggaaaagaaaaaaaaaaataggtcatg

SEQ ID NO: 208838 - DNA, 201 bp, Homo sapiens
tttatatatgtgtttgagtttctctacagtattcttagagcataattgctaaattggccagtatgtgcatttttttattctggttgattcttcccaagacrttgtaccagttgagacactcaccaacaacaaacagaagggcctgcttcttcccacctctgccagtgtctacatttctttagaagagcctttcatttattg

SEQ ID NO: 208839 - DNA, 201 bp, Homo sapiens
gcgatcaggatttgctcagagtggaaggtgttctccctgaatccaatctcaaatactgggtagaatgctgagattatagcagtcaactgataccccacatycccaaaggcattatccagtaggacacagaagccaaagaagggagaaaaaaaaggaagacaagacagaatgagtgatacattctttgttccttgggacaat

SEQ ID NO: 208840 - DNA, 201 bp, Homo sapiens
aagttttaaatgatctttctaaagggaagctgtctgccttgaacaaatgttcacatatctgatgtcataaagagaaaatggggagtttccatgaaatacarttgttgaactctctcccctgagatcctggtatatttggtcttgtgtgagtcctgagcacttatattttaatttctgataattctaaggagcagccaagat

SEQ ID NO: 208841 - DNA, 201 bp, Homo sapiens
caggtttttcagggcatatcagcgtgaaaaagacatttgagatcatctcactgtgtctccagaaaaagaaagttaatgattaaaaggtcacaggacaagawaaggcacagggaaaccagaatctgcttggcagattccccaaaacaataaagaaatgaagaaagttcatgaggagggtcagaattctattctgaattaaca

SEQ ID NO: 208842 - DNA, 201 bp, Homo sapiens
tcttcggagtagctggaatgaaaggtgcaatctgaggaggaggaggaggaaatagagacataagaggaactatgccatgaaggattttcttcaaagctcargaaccagggttcctgtttatttccttctctggattcctgtagcaacaaactgctatacctgaacttgggcgagttattattaaaactgaaagaagaatag

SEQ ID NO: 208843 - DNA, 201 bp, Homo sapiens
taaaagtgagggttggggggagatggggatggttaatgggtaccaaaaaaaaaaaacaaaacaaaacaaaatagaatgattaagacctagtatgtgatagyacaacggtgactatagtcaataataattcaattatatatttttaaataactaaatgagtacaattggattgtttgtaacacaaaggataaatgcttgaag

SEQ ID NO: 208844 - DNA, 201 bp, Homo sapiens
taactaaatgagtacaattggattgtttgtaacacaaaggataaatgcttgaagggatggatatcctgttttccatgatgtgattattacacattgcatgsctgtacgaaagcatcccatgtaccccataaatatatatacctactatgcacctgcaaaaatttaaaggaaaagaaaagggatgtgggtggagtggaagca

SEQ ID NO: 208845 - DNA, 201 bp, Homo sapiens
aatgagtacaattggattgtttgtaacacaaaggataaatgcttgaagggatggatatcctgttttccatgatgtgattattacacattgcatgcctgtaygaaagcatcccatgtaccccataaatatatatacctactatgcacctgcaaaaatttaaaggaaaagaaaagggatgtgggtggagtggaagcacagaat

SEQ ID NO: 208846 - DNA, 201 bp, Homo sapiens
gaagggaaaaaaaacacaccattaggacattattggatcaattaacaaaatatgaatgtaaaaaaattttagctatgttaaattaattttagcaatgttaagtttggtaaaatttaccaaaatccagtcaagatcactcagcaagcctgaataagccaaatcctatccccaaaaacattagacccaaaggatttaaagttt

SEQ ID NO: 208847 - DNA, 201 bp, Homo sapiens
tcgtgctcctatgagaatctaatgtcaccactaatctgacaggagttggagctcaggcagtaatgctcactcaccagccactcatctcctgctgtgcagcmcagttcctaatgggctatggactggtactagtccatggcccaggagctggggacccctcttctttaaagtataaaagcaagcgaaaaaagctgcagaatt

SEQ ID NO: 208848 - DNA, 201 bp, Homo sapiens
gggatatgccatctggaaactgccagcttggatggagagacaaacctcaagcaaagatgtgtcgtgaagggcttctcacagcaggtagggctctttctaakatcttcaatggtaaagtcatagaaaggatgcaagcctaccctactggaaaattgaactaaacctactgggtagaggggaaagtagtagatgcctcctttt

SEQ ID NO: 208849 - DNA, 201 bp, Homo sapiens
ctctgtgctgaagagagcagaaagaaatcagcaccaatttgccctggggaaattgtgaccacagactggcctcaggtacatatgtagcccaggttcatgtyacctgggtgagccaaactttcacctatgaattgagcttaaagtacctcaagattagcagtgcccaacgattgcaaaatacaaacacacacacacatgcat

SEQ ID NO: 208850 - DNA, 201 bp, Homo sapiens
tgcaaaatacaaacacacacacacatgcatatgcagatgtacacaattcttttctagagaaagttacctttattctaagcctcaagttgtgtctaactttkagcacaataagcatattcaaaaataatgaacctcataaaagaatgagtccatgagtgaaaaaccaaatatcagaaacaaatattttagaaactggaatta

SEQ ID NO: 208851 - DNA, 201 bp, Homo sapiens
taataataagagccacattaccagtacttagagtatgctagttattttaacacattgtatcattaaatcttcaaaacatccctatgagttagaaacctaaaaaaaaaaaaaaaaaaaaaacctctgaggaaataaagtgacaggttatgtcaaagctcaaagtcacataactagtaggtagtccactagagtttgaatctg

SEQ ID NO: 208852 - DNA, 201 bp, Homo sapiens
tgaaactgaacaactacatggaaactgaacaacctgctcctgaatgaccactgggtaaataatgaaattaaggcagaaataaagaagttctttgaaaccartgagaacgaagacacaacgtaccagaatctctggacacagctaaagcagtgtttagagggacgtttatagcactaaatgcccagaggagaaagtgggaaa

SEQ ID NO: 208853 - DNA, 201 bp, Homo sapiens
atttttaaataactaaatgagtacaattggattgtttgtaacacaaaggataaatgcttgaagggatggatatcctgttttccatgatgtgattattacasattgcatgcctgtacgaaagcatcccatgtaccccataaatatatatacctactatgcacctgcaaaaatttaaaggaaaagaaaagggatgtgggtgga

SEQ ID NO: 208854 - DNA, 201 bp, Homo sapiens
ccacttcatacaccacaatcatctcccattttttagatgaggaattgaagtacaaagagggtcactcacccaaagtcacatgcctcctgagttgaactctmtgcaacccaaggtcaagtatccacagagctgagctccgactctagagcccacactcttatccactgccccatacttcctccccttgaacccaactctttc

SEQ ID NO: 208855 - DNA, 201 bp, Homo sapiens
agaaactaatttagtactttgtgtgtattgatttattttcccacttcatacaccacaatcatctcccattttttagatgaggaattgaagtacaaagaggrtcactcacccaaagtcacatgcctcctgagttgaactctctgcaacccaaggtcaagtatccacagagctgagctccgactctagagcccacactcttat

SEQ ID NO: 208856 - DNA, 201 bp, Homo sapiens
aacgggtaaaacagggcctcagagtcaaaggcccaaaaaggccaaggtgagatttacagaagaaagaggtccaatgtagaggtgtgtgctcctcacagcamacactgagtcccaacttaccagaaactaatttagtactttgtgtgtattgatttattttcccacttcatacaccacaatcatctcccattttttagatga

SEQ ID NO: 208857 - DNA, 201 bp, Homo sapiens
gatcccagagcagaaagatgaaaagagcctggattcttggacacactgagcccctggctgccaaccttaagatgttttgctataaaagatgatatttcttytttgattaagctgctgtcaggcacactgtcacttgcagttgaaaatgtaacaaatgccatcacattcccaatgccatattcctcagattaccttcagaga

SEQ ID NO: 208858 - DNA, 201 bp, Homo sapiens
ttaaattgtaccacatccgcactgcctaatagactaaactcattgtaggcaaacacagaagtatcctcagctgttagcattgtgtctgatgggctctcaaygaattctgtcttcattcattccacaatggtttcacaatccccatcttggcttactcctgcaaacaccatttctaaattagtcctatcaattcctttctta

SEQ ID NO: 208859 - DNA, 201 bp, Homo sapiens
agacatttctaattgaattcatcattccaccctctatcaccggcaccaccccagaaatctgggtatctctagagtttctttcagcaaatgctacccacttrggacaaaggcaggccccagggaattaatcttgacatcacctgctaactcatgcccatatctagcctttcaccaagtactgacagttctatccactacgta

SEQ ID NO: 208860 - DNA, 201 bp, Homo sapiens
gacagctgaagtaccaagagggaccagaatgtgttcacaggcctaccacagatcatagtcagagctaggttctcccaactcaaaggccagtgttctattcygcagcccactctctctagtcagagcagtgaacttgatgatgatgttcccataggaaagacttagcctctctccatctcaccacgctgaacatcgcaatca

SEQ ID NO: 208861 - DNA, 201 bp, Homo sapiens
attggaagaaagagcttctcagcttctatcatggccacaaggaaagatcaagtcaaacattccagagcttcagcattttcccagaaattcaaattgtgcaygaaattgccagtgtttaaatactattcaaatttgtttaaacacacaccttccatacaagacctgcattagacaaataatccatgcccagggactatgtca

SEQ ID NO: 208862 - DNA, 201 bp, Homo sapiens
gggctgtgtttctttcctaaaattaccaatctccctttaataagccatttttataacccaagagtcaggagtttgacttctgctggcatccttgaggctamtgtttcagaaacagagagatgggacagaaagaacaatgaatgacaaaggaggcaaataacatggactgtggtcccaggttagccacaaagtagcaaagtc

SEQ ID NO: 208863 - DNA, 201 bp, Homo sapiens
agggaaacaaatctggggtgactgcccctattattcatagaaaataaaagtgagggttggggggagatggggatggttaatgggtaccaaaaaaaaaaaamaaaacaaaacaaaatagaatgattaagacctagtatgtgatagtacaacggtgactatagtcaataataattcaattatatatttttaaataactaaatg

SEQ ID NO: 208864 - DNA, 201 bp, Homo sapiens
tgcatgtaaaatgcttagctttgtgcctgtggcactcataaaatgttagcttaaatattgctaaggagagttcggtagccttgataggcagaagtcatcaygagcttaacccaaggggagtaagaaagaatgaccacaggctcgagtttggaactgcatgaaagaagacaaaaaaatctttaaccatagaactcgactcca

SEQ ID NO: 208865 - DNA, 201 bp, Homo sapiens
ctattccgcagcccactctctctagtcagagcagtgaacttgatgatgatgttcccataggaaagacttagcctctctccatctcaccacgctgaacatcrcaatcaagccattttatcattttaagcgatagcaaatagacaattatacaaaactttttatcccaaaattagagacctatcaacaggccttacttccttt

SEQ ID NO: 208866 - DNA, 201 bp, Homo sapiens
agagatcccagagcagaaagatgaaaagagcctggattcttggacacactgagcccctggctgccaaccttaagatgttttgctataaaagatgatatttyttctttgattaagctgctgtcaggcacactgtcacttgcagttgaaaatgtaacaaatgccatcacattcccaatgccatattcctcagattaccttcag

SEQ ID NO: 208867 - DNA, 201 bp, Homo sapiens
accctgaaaatatatacatctagtatcaatttttaaaattaaataaaaataaaagacaaggatgggaaaagaaaagcacaaaacaggcaggacaaaatacratcaaaaaacagaatactgcgctgctttgaaaatgaataaactactgccatgtggaaaaaatgggctcatcacacaaacataatattgagggaaaaaaaa

SEQ ID NO: 208868 - DNA, 201 bp, Homo sapiens
gatgtgtggcactgcagccactgttttgggcaatgagtttaaggacaaagccaactactgctagagatcccagagcagaaagatgaaaagagcctggattyttggacacactgagcccctggctgccaaccttaagatgttttgctataaaagatgatatttcttctttgattaagctgctgtcaggcacactgtcacttg

SEQ ID NO: 208869 - DNA, 201 bp, Homo sapiens
ttctttctctctttccagcccctatttaacaagacttaatcaaaacagaagtaatcctcatgccaatctcctcttgtaaaacaaacttaatgcctatcaarggattgaaatgtatacgaagaaccactttagagcaacatgaacacatgcacatacacaaacacacacacacacagagctacattgtatggaagaaggagg

SEQ ID NO: 208870 - DNA, 201 bp, Homo sapiens
ttggcaccattgacattttggcccatattattctttgtgacgggggctgtcctgtagggtatttagcagcatctctggcctctacccacaagatgcattarcaccccccaccaagtgagataacccaaatttctcaagacgttgccaaatgtcctctggggagtaaaatcactcctggtgagagcaatggtccagaattct

SEQ ID NO: 208871 - DNA, 201 bp, Homo sapiens
tttatttattttatggctccatatatggaggcctatctctccttcccactttgatcctgctttccaatgaaaaaagataatagcagcgcttctcacaatgraatctaaagtcttggagggcaatcttggagctgctgtatctctagtacttaacaccagtgctcgtaggtacgcaacgcacctgttgttacatgaacacct

SEQ ID NO: 208872 - DNA, 201 bp, Homo sapiens
agtggtaaatgaaattttaatttattaatctcaataattcctttggaaatctgaaagatagtggtacatgcatgtgtgagacttatttttactctgtctayagacagcatttgggagcatataggggatttgtagacaagatgcagtagcttaatctaccaatcaggaaccactagcttacagaaacagcttggtagcagg

SEQ ID NO: 208873 - DNA, 201 bp, Homo sapiens
ggacacagtaatcgatttatttgggcaagtttcttcagcttcctcatttataaagtagggctaataaaatgtaaagcctaccctgcccactttaacgggaygccaatgaaatgaaaatgcaagagaaaatctcctaaaagtagtatgtgttctttaactattcagaatatcatctgatatttatttggtcaagaaatattt

SEQ ID NO: 208874 - DNA, 201 bp, Homo sapiens
aggccatgctctctgcctgcagtgctacgtcaacctgctcttctggtatcagttcttctgtggtttctccagctccaccatgattgattactggcagatgrtattcttcaatctcttctttacctccttgcctcctcttgtctttggagtccttgacaaagacatctctgcagaaacactcctggcattgcctgagctata

SEQ ID NO: 208875 - DNA, 201 bp, Homo sapiens
ggaggcatcagagaaagagctgtatgctggggtcagaagcctgcattctgaccactgttccatcatttactttgagtaactcctctctcctttcctgaccmgtttcttacttgctattgagggtgttgggccagactagtgggtatttttaattttttttttattgttattatactttaagttttagggtacatgtacaca

SEQ ID NO: 208876 - DNA, 201 bp, Homo sapiens
ggattagaattctctctcatccttacataaccctgtgtgttataaatgaggcaactgccactccagcagctcccagaggtcccaagcaggagctggtgacyggctgcacatggagccccactcacaaggccatgctctctgcctgcagtgctacgtcaacctgctcttctggtatcagttcttctgtggtttctccagctc

SEQ ID NO: 208877 - DNA, 201 bp, Homo sapiens
attctaccagagcctcatctgtttctttatcccttacctggtaagtcatgtagtcccattctaaccacataaattgcagagaagaactggtcctttttatrtaaagttccagaccagtagtgtccttctggacactttagagcagaggctcaaacaggtagcctgcaggttacatccaacccaaggtgtttgaaaagtcag

SEQ ID NO: 208878 - DNA, 201 bp, Homo sapiens
tcaggaggcaaacccaagccagaacacctcttttcctcatgcaggccctaaggtatgctaaggagtggggaagaggagctttcatctcctgtaacttccawcaacacctgcgctcacacacccccaacaaaacataattgcttactaggtaattaaaacaccaagacaagtctctagtgcccctgtccaagcactgccctg

SEQ ID NO: 208879 - DNA, 201 bp, Homo sapiens; identical to SEQ ID NO: 36676

SEQ ID NO: 208880 - DNA, 201 bp, Homo sapiens; identical to SEQ ID NO: 36678

SEQ ID NO: 208881 - DNA, 201 bp, Homo sapiens; identical to SEQ ID NO: 36679

SEQ ID NO: 208882 - DNA, 201 bp, Homo sapiens; identical to SEQ ID NO: 36681

SEQ ID NO: 208883 - DNA, 201 bp, Homo sapiens
tagtagatcataaactctgaagagttatttgaaaacagctagaggaatgtaaagtactcatttttttggcacaattctaagtacatacctcagaaacactyttgcacacatatatgtggagacatgtacaggaatgttacatcgttcttaatagccaaaagggggcctaaatattcatcgatcagaaaaataagttgcggc

SEQ ID NO: 208884 - DNA, 201 bp, Homo sapiens
tgcttgggttgaaaattcttgcttttagaaccaggtaggttttaggacccagagttggtacacctgttcttggctgcccagggtggaaaaggaagacaccygtaggtgacgtctacattccaacaggtggagtctcaaacaagtagaaggaagtggcctggtggatacacacctgttctctgcaggctctttccttgtcat

SEQ ID NO: 208885 - DNA, 201 bp, Homo sapiens
agcttggatggagagacaaacctcaagcaaagatgtgtcgtgaagggcttctcacagcaggtagggctctttctaatatcttcaatggtaaagtcatagaraggatgcaagcctaccctactggaaaattgaactaaacctactgggtagaggggaaagtagtagatgcctccttttccctagcactttagatacactaaa

SEQ ID NO: 208886 - DNA, 201 bp, Homo sapiens
tgggagtgtgttaaagatgttaaagcataaccaaggaacttccctatcctgttagtagatcataaactctgaagagttatttgaaaacagctagaggaatktaaagtactcatttttttggcacaattctaagtacatacctcagaaacacttttgcacacatatatgtggagacatgtacaggaatgttacatcgttctt

SEQ ID NO: 208887 - DNA, 201 bp, Homo sapiens
atcagggtaatcacctccctctgccctgcatcaaacttttcactggcatttgctttctcttccttaatgaggacttaacttttttttctgacacattacarctatcaaagtgtgacaaagcatggattaccttatttgcaatggttctaacagtgattagctctcccagtgatcctattaaaactagatccctctgaatta

SEQ ID NO: 208888 - DNA, 201 bp, Homo sapiens
caatgtcacctttctgattagatttttctagtcagtaataactataaaaactaatagcttacaattctgtctataccaagtgtctctctatatgattagcrtgtattatttaacctctagagccctttgtgttaggtgtttttatattcccattttacagatttagaaatatggtagatgcaataaggtttaacttgcccc

SEQ ID NO: 208889 - DNA, 201 bp, Homo sapiens
tctaagaaggcaatgtcacctttctgattagatttttctagtcagtaataactataaaaactaatagcttacaattctgtctataccaagtgtctctctayatgattagcatgtattatttaacctctagagccctttgtgttaggtgtttttatattcccattttacagatttagaaatatggtagatgcaataaggttt

SEQ ID NO: 208890 - DNA, 201 bp, Homo sapiens
gttattatcttaactgatggatgctaaaagacatatccttttgccatatcaaggacacatgacagatgtcaggaaaagaatacaagatttaagaggacaatttttttttttctgggaagcaacataagaaattacatctcatgccctagccctatccattttatttatttcacctcaaatttacacatttgagcaactgat

SEQ ID NO: 208891 - DNA, 201 bp, Homo sapiens
catttactcatgtaacttcccatttctcaactaagcaaacggaggctgggaatcacagcagttcactcactctacaggagacatgatgagattccaagttratatcacccatctgcactagatagggaaagggattcacactcaatcatcccggtggttttgtgctactaactaaagccagaatgaagtgtatcttcttaa

SEQ ID NO: 208892 - DNA, 201 bp, Homo sapiens
cctgtaagtagccttatacttggatatttaacaggttttcccagggctactttgaagaaggaaaaatattatcccctgagtcagcagagagaccacgaggkgactgttacaatggcactcttagtgaaggagttcccaccctaaatatataaataaacaacaaaatgtttaaataatcaaatgtatttccaaaatggcaca

SEQ ID NO: 208893 - DNA, 201 bp, Homo sapiens
aaaaaagaccctttgtgactataaaaaaaagaggttgtcctttcaatgtccattatttaagaatatatattaaaaccaaaagctacagtgaatctagtgawgtggtaaatgaaattttaatttattaatctcaataattcctttggaaatctgaaagatagtggtacatgcatgtgtgagacttatttttactctgtctac

SEQ ID NO: 208894 - DNA, 201 bp, Homo sapiens
ccttgggggcttctacatgttcctcacaatgatcatcctgctccaggtaggaagccctccctaactaggggcccaataagatatgtggccaaaactcctayaactttgtaaaataaagaaaaaacagtgctggccactagaaagtacaaactggattgagatgaggagatggtcatcgctttcttgtgcgtctttgaaagt

SEQ ID NO: 208895 - DNA, 201 bp, Homo sapiens
ccaaaatggcacagggaaacaaatctggggtgactgcccctattattcatagaaaataaaagtgagggttggggggagatggggatggttaatgggtaccraaaaaaaaaaacaaaacaaaacaaaatagaatgattaagacctagtatgtgatagtacaacggtgactatagtcaataataattcaattatatattttta

SEQ ID NO: 208896 - DNA, 201 bp, Homo sapiens
tttgactagcttgcatgccaccaatggttagtgcttttaagccatttgctcaattacgaatagctgctatagcttggatcctctgcagtgaaagtatgtaytgattttaaggtacttagaggagcattttgccaacaaagagttgagatccaatagggagaaatttattaccttcccagttcagtgatgtcaaacctcagt

SEQ ID NO: 208897 - DNA, 201 bp, Homo sapiens
caaaatggcacagggaaacaaatctggggtgactgcccctattattcatagaaaataaaagtgagggttggggggagatggggatggttaatgggtaccaaaaaaaaaaaacaaaacaaaacaaaatagaatgattaagacctagtatgtgatagtacaacggtgactatagtcaataataattcaattatatatttttaa

SEQ ID NO: 208898 - DNA, 201 bp, Homo sapiens
ccagaaacacttatcctaataatggggagaaaactaccatctaggtactttttactatatactagttcttttacatgcattgtctattttaagcctaagaycaccatgggaggtgggcattactatccctattttacacatgaaacctctgaggcactgaaagagcaaatctcactaatcatctcagagattttgaacacc

SEQ ID NO: 208899 - DNA, 201 bp, Homo sapiens
ctcatggtttcatatccactcaaagtggaatccaaagtccttactgtggctgatgaagccctaagtgatctggaccctgactccctccctgacctcccctcgcagccctctccccctcctcactcacctgcaaggcctgctccctattactccccaaacgccacccccactgccaggcctgtgcctggctttctcctctgc

SEQ ID NO: 208900 - DNA, 201 bp, Homo sapiens; identical to SEQ ID NO: 36668

SEQ ID NO: 208901 - DNA, 201 bp, Homo sapiens
gaagaactggtcctttttatataaagttccagaccagtagtgtccttctggacactttagagcagaggctcaaacaggtagcctgcaggttacatccaacmcaaggtgtttgaaaagtcagaacactacccaaacattttgatttctgctggctcttgaaaaactgaaagctatatttatactgggtcattttttccctca

SEQ ID NO: 208902 - DNA, 201 bp, Homo sapiens
actttagagcagaggctcaaacaggtagcctgcaggttacatccaacccaaggtgtttgaaaagtcagaacactacccaaacattttgatttctgctggcwcttgaaaaactgaaagctatatttatactgggtcattttttccctcatagcaaaaatctggacttgactttgcagctgggctcaccttgtgagcatgttc

SEQ ID NO: 208903 - DNA, 201 bp, Homo sapiens
ttctccattgacaactgccttcattgatgctttataatcactgtgtcaaagccaaagttagtccacagacatacctgacaatgcctgtctgttcctcctcygcaggcctataagggctctgatatagatgtctttacctttgggacaccaatcaacaccatctccctcaccacaatccttttgcaccaggcaatggaaatg

SEQ ID NO: 208904 - DNA, 201 bp, Homo sapiens
tgaagacatgggtaagtgtcccagagcccctttggcttcaaaactgtgctcctgcccattgactatactcaaatttctgaattgtttcattctgtgttatsaatccactcaataaatacatactaagctcctaccctatgtcctacctgtacagggatgaaaggggtgaaaaagataaaattctggaatcaacttgctttt

SEQ ID NO: 208905 - DNA, 201 bp, Homo sapiens; identical to SEQ ID NO: 36672

SEQ ID NO: 208906 - DNA, 201 bp, Homo sapiens; identical to SEQ ID NO: 36673

SEQ ID NO: 208907 - DNA, 201 bp, Homo sapiens
agattgttaaggagccttttcccatcccataggttgtaagcgaagaggacttccggagatgggccagtttccggcgtgaggctgaggcatccctcgacaamcgagatgagcttctcatggaaactgcacagcatctggagaatcaactcaccttacttggtagctaaaaataagtcattattataggaaaaaaggaatgca

SEQ ID NO: 208908 - DNA, 201 bp, Homo sapiens
atacctgaggctgtgttagggaggaattctccccatttaattttagggtgaatgattagaaacgtgcctccaggtaaccatatctcaagcatatccaaatrtcacattttgatatctaagaaggcaatgtcacctttctgattagatttttctagtcagtaataactataaaaactaatagcttacaattctgtctatacc

SEQ ID NO: 208909 - DNA, 201 bp, Homo sapiens
ggcggaggttgcactgagccaagatcatgccaccacactccagcctgggtgacagagtgagactccatctcaaaaaacaaaaaacaaaaacagttcaggcrtgtttcagagacaaggaaaacactgaccatacatacctgaggctgtgttagggaggaattctccccatttaattttagggtgaatgattagaaacgtgcc

SEQ ID NO: 208910 - DNA, 201 bp, Homo sapiens
tcttctgaaaaaacagggaggagagggatcatgttcactcaccacttctagttctgtgacagtacccagtgacagcaaggaaaggccaccaaaccaccccstgtcttttattcatcatccccagggagcatcctgaccagaccaggactggctttggctgtgagagtcttctgcttcgaggctgcaccatcagaaacaccg

SEQ ID NO: 208911 - DNA, 201 bp, Homo sapiens
cggggcaagttcaggttaaagagtgaagcctctcttttatcttaagctcctgtgagaagagctgagggaatggtgtaagacataggcaaacaggaactaasggactgatttcctcattttctctcaaaggccatgagacgaaagccatgctgaacaacagtggcccccggtacaaacgcagcaagattgagcggcgcatga

SEQ ID NO: 208912 - DNA, 201 bp, Homo sapiens
aaatggcacagggaaacaaatctggggtgactgcccctattattcatagaaaataaaagtgagggttggggggagatggggatggttaatgggtaccaaaraaaaaaaacaaaacaaaacaaaatagaatgattaagacctagtatgtgatagtacaacggtgactatagtcaataataattcaattatatatttttaaat

SEQ ID NO: 208913 - DNA, 201 bp, Homo sapiens
tgtgtcaggttttcatctcagctaccccatgtactagctctgtgactttggtgggcttactgaaatggaagcctcaacctacccattgttaaaatgaagamaattgttctggctcatgagtttattttgaggatttaattcttaaaattgtgtgttctagacagatacctaatggaagttttaaatgatctttctaaaggg

SEQ ID NO: 208914 - DNA, 201 bp, Homo sapiens
ctttcacatgtaaggaggaattattactaaaatgctacagacgcatcacccccagaatcctcagaaggggtctcaatagtcatttggatgacatttaaccrtgtctgctgcactgagctcccagagccacagagcacttccacagaaccctgtggttctttcgagttctaaagttgctccccaattccaatgtccctgttt

SEQ ID NO: 208915 - DNA, 201 bp, Homo sapiens
ctcatggactatctgctgagccttaaggattagatatacaaacgcatctattgtgtttgagatgcccagacactaaagaccctgggtggtagcaagtctcraaggccacttctttcacatgcaggatcttgcctgatataggtgttaagattatgaattctagggtcagactaactgaaatcaactgaaagaattcctccc

SEQ ID NO: 208916 - DNA, 201 bp, Homo sapiens
tgtttctgggctcagaactctgtagcctgcccttcgaccagaggctttcaagtcttttcaacagtaacaatgagaaatgtataaaatattacacatagatacacacacactcacacatgctgacacacatacacgtgtgtatatgcgtgtgaatgagtatgtaagaatgacaccttagcctcaccacatgcaaggcactct

SEQ ID NO: 208917 - DNA, 201 bp, Homo sapiens
ataggatctcacggacaagcgggacttcccatggttattgaagtctaggtaggattttggtaggtagaagaggatttttcaagcaaagtgtgatcagaggmatacaggagtatacatccaagaggcagcaaacagaccaccaggctgagctgagggtccatgttgagaagcatgggaataaagagtgaaaatgcaaactgt

SEQ ID NO: 208918 - DNA, 201 bp, Homo sapiens
gtttctgggctcagaactctgtagcctgcccttcgaccagaggctttcaagtcttttcaacagtaacaatgagaaatgtataaaatattacacatagatacacacacactcacacatgctgacacacatacacgtgtgtatatgcgtgtgaatgagtatgtaagaatgacaccttagcctcaccacatgcaaggcactctg

SEQ ID NO: 208919 - DNA, 201 bp, Homo sapiens
acccagcctgcggtgagtcctgccttaccagggttccaggcacagagagttctatagtttaagaagcagtgtggaatggtaataagaagctcaagttgtastgtcacctggtatggcaggtcccaactggaatacagacctacaagatgttttcctcaaatatccttaaaacatgctgcattttacatctcctggacctag

SEQ ID NO: 208920 - DNA, 201 bp, Homo sapiens
tttctgggctcagaactctgtagcctgcccttcgaccagaggctttcaagtcttttcaacagtaacaatgagaaatgtataaaatattacacatagatacacacacactcacacatgctgacacacatacacgtgtgtatatgcgtgtgaatgagtatgtaagaatgacaccttagcctcaccacatgcaaggcactctga

SEQ ID NO: 208921 - DNA, 201 bp, Homo sapiens
tacaaggcaatctcatgacaggctgacttggtggatagttaggtgctggtgggaccttcctctattctttcattagtgttctgaggaaacttaaagctcaytcacaccctgtctttctctcacccaagaaaagagcagacctatgtgcagaagtgctggaaggatgtgcgtgtgggagacttcatccaaatgaaatgcaat

SEQ ID NO: 208922 - DNA, 201 bp, Homo sapiens
tgtttgggaacagtaccttagaccacctaccttccttacatagcactttactcagccaggcttttgatgaaaagatgtagagagcagacagcttaaggacyccctgcattatcttccagggcaacctgacagccaggagagctccttcaggtttctaaggtgggctgtaagggattccttctctaaagtatttgtagtcta

SEQ ID NO: 208923 - DNA, 201 bp, Homo sapiens
ttctgggctcagaactctgtagcctgcccttcgaccagaggctttcaagtcttttcaacagtaacaatgagaaatgtataaaatattacacatagatacacacacactcacacatgctgacacacatacacgtgtgtatatgcgtgtgaatgagtatgtaagaatgacaccttagcctcaccacatgcaaggcactctgag

SEQ ID NO: 208924 - DNA, 201 bp, Homo sapiens
acacatacacgtgtgtatatgcgtgtgaatgagtatgtaagaatgacaccttagcctcaccacatgcaaggcactctgagactttctatgctattctaccttttttttttttttttttttggacagtctcgctctgttacccaagctagagtacggtggcacaatctgcttagtgcaatctatgcctactgggttcaaggg

SEQ ID NO: 208925 - DNA, 201 bp, Homo sapiens
tgtcccagcagacatactcctccttttttcctctgaccccaatgggatatgccatctggaaactgccagcttggatggagagacaaacctcaagcaaagaygtgtcgtgaagggcttctcacagcaggtagggctctttctaatatcttcaatggtaaagtcatagaaaggatgcaagcctaccctactggaaaattgaac

SEQ ID NO: 208926 - DNA, 201 bp, Homo sapiens
cacatacacgtgtgtatatgcgtgtgaatgagtatgtaagaatgacaccttagcctcaccacatgcaaggcactctgagactttctatgctattctaccttttttttttttttttttttggacagtctcgctctgttacccaagctagagtacggtggcacaatctgcttagtgcaatctatgcctactgggttcaagggt

SEQ ID NO: 208927 - DNA, 201 bp, Homo sapiens
cattagtgttctgaggaaacttaaagctcactcacaccctgtctttctctcacccaagaaaagagcagacctatgtgcagaagtgctggaaggatgtgcgygtgggagacttcatccaaatgaaatgcaatgagattgtcccagcagacatactcctccttttttcctctgaccccaatgggatatgccatctggaaactg

SEQ ID NO: 208928 - DNA, 201 bp, Homo sapiens
acatacacgtgtgtatatgcgtgtgaatgagtatgtaagaatgacaccttagcctcaccacatgcaaggcactctgagactttctatgctattctaccttttttttttttttttttttggacagtctcgctctgttacccaagctagagtacggtggcacaatctgcttagtgcaatctatgcctactgggttcaagggtt

SEQ ID NO: 208929 - DNA, 201 bp, Homo sapiens
atgtaagaatgacaccttagcctcaccacatgcaaggcactctgagactttctatgctattctaccttttttttttttttttttttggacagtctcgctcygttacccaagctagagtacggtggcacaatctgcttagtgcaatctatgcctactgggttcaagggtttctcctacctcagcctcccaagtagctggaat

SEQ ID NO: 208930 - DNA, 201 bp, Homo sapiens
aagcttgcttctcccagtctggctgccttcagaggcacccagcttcaagccagctgggctcagttagaaagaccacatgtgggatattagtttggtttcamatcccacacttaaagcaggacatttccaaatgcagacagatgagcccacacctccggaacagatcttgaaactgtgtcacatgaggaataattgagggca

SEQ ID NO: 208931 - DNA, 201 bp, Homo sapiens
atctaattatgtagggaagttcaaacaggccaataggagacccagcaggtgggaagagagaggaaattatcttgttggtccacccaagattgttaaggagmcttttcccatcccataggttgtaagcgaagaggacttccggagatgggccagtttccggcgtgaggctgaggcatccctcgacaaccgagatgagcttct

SEQ ID NO: 208932 - DNA, 201 bp, Homo sapiens
accaagtgtctctctatatgattagcatgtattatttaacctctagagccctttgtgttaggtgtttttatattcccattttacagatttagaaatatggyagatgcaataaggtttaacttgcccccaagcagtttaagatagaagcaagttttgaaccctggcagtttaacgtgagcctttaacatccatgctaatagt

SEQ ID NO: 208933 - DNA, 201 bp, Homo sapiens
tcatgagtttcctgggacaggcatggataattcccagagctgaaggtttctcccctttttaaaccatatagggtaacttcctgacgttgccatggcatctrtaaactgtcatggctctggtgggagtgtaacagtgaggacaaccagaggtcactctcatcaccatcttggttttggtgggttttggctgacttctttgct

SEQ ID NO: 208934 - DNA, 201 bp, Homo sapiens
ttagtacgtcgtttgtaggtgtattggtgtctcaactaggaaaacagtttttttgttgttgttttgggtttttttgtttgtttttttgagacagagtctcyctctgtcggccaggctggagtgcagtgacgcgaacttggctcaccgcaaccttcgccttccaggttcaagcgattctcctgcttcagcctcccaagtagc

SEQ ID NO: 208935 - DNA, 201 bp, Homo sapiens
agtttttttgttgttgttttgggtttttttgtttgtttttttgagacagagtctccctctgtcggccaggctggagtgcagtgacgcgaacttggctcacygcaaccttcgccttccaggttcaagcgattctcctgcttcagcctcccaagtagctgggattacaggcaggcaccaccactcctggctaattgttgcatt

SEQ ID NO: 208936 - DNA, 201 bp, Homo sapiens
tattttctttctcttccccacaggcaattactaaagatatgtttgaagaagcactgcgtgccctggcagatgatgatttcctgacagtgactgggaagacygtgcgcttgctctgaagccttgtgagcaaggaaggctccctgcatgtcctgcttgctgcacgccacatgggtgtggtctgcatctcagttggccgccatc

SEQ ID NO: 208937 - DNA, 201 bp, Homo sapiens
aagcgattctcctgcttcagcctcccaagtagctgggattacaggcaggcaccaccactcctggctaattgttgcatttttagtagagacaaggtttcacygtgttggccaggctggtctcaaactaccaacctcaggtgatccacctgcctcggcctcacaaggtgctggaaaaacagtatttttactttgttttcttag

SEQ ID NO: 208938 - DNA, 201 bp, Homo sapiens
cgggctgggcgctgccgcttggtgcgcacagacacccacagcaggctgtggcctgggtgctgcttaattcgattgccatttgcctctgtttggtttggttyagtggtgagtcataatgccccaaggaaaagacaaatccaggaaggccggccctgaaagttaatggctgtcttttctgttttgtgtgacacaagctcggag

SEQ ID NO: 208939 - DNA, 201 bp, Homo sapiens
gtgagacagaggcctgacctgggctctgcacagaagggcctgcaagtggatctgcagtctgacggggtgagtatgcagtctcctgaaaccatcttatggcsggtatcatgtgggtaactctgttttcatgattctgtcatgtttttctgtgtaggcagcagcagaagatatagtggcaagtgagcagtctctaggccaaaa

SEQ ID NO: 208940 - DNA, 201 bp, Homo sapiens
tttttctgtgtaggcagcagcagaagatatagtggcaagtgagcagtctctaggccaaaaacttgtgatctggggaacagatgtaaatgtggcagcatgcraagaaaactttcaggtgagctacatgtattaaaattcttactttgggctctgaaaatgttgggagaccgtgtttataatctatatctaagtagccataat

SEQ ID NO: 208941 - DNA, 201 bp, Homo sapiens
aaactgaaaaagtcatccagtttctgtaagcttccttttgcttgtaaaaaacagaatgagctgtcttttaggttcacttttcagcatcctggtacatgagstgaagtgcatgatggcacatttaggttattcaagcattgtgatattaagaaggttcctggtgctttgatgagctttgcatcctaactgagctcctaaaaa

SEQ ID NO: 208942 - DNA, 201 bp, Homo sapiens
ctggggaacagatgtaaatgtggcagcatgcaaagaaaactttcaggtgagctacatgtattaaaattcttactttgggctctgaaaatgttgggagaccrtgtttataatctatatctaagtagccataatgactagaagggccacctgtggtggctcacacctataatcccagtactttgggaggccaaggtgggagga

SEQ ID NO: 208943 - DNA, 201 bp, Homo sapiens; identical to SEQ ID NO: 36687

SEQ ID NO: 208944 - DNA, 201 bp, Homo sapiens
ctttgcatcctaactgagctcctaaaaattctaagatgaaagttacagacattatgtaatttttttgtgtgtcatagtcttgggggttgttaatgaagaawtaagactgtgtcatctgtatgtgaaattgatacaacttacctttgcagcattctcccagcaatccttatgagccccattgtgccccatgtgagcactttt

SEQ ID NO: 208945 - DNA, 201 bp, Homo sapiens; identical to SEQ ID NO: 36688

SEQ ID NO: 208946 - DNA, 201 bp, Homo sapiens
cacgggcgctgaaagaagcggcactgtccccccctgccgatgcgcagtggcgcctcccggaggcggagccacgtacgagcgccgctgtgattggtgaggcyccgccaggggcggagacgaccttgccgccggcgggaactctgggtctcgcggtttgggagcgctactcgccaggtggactcggagtccgcgagcgtcgtc

SEQ ID NO: 208947 - DNA, 201 bp, Homo sapiens
tctatacatgcaacgacttggggaggtaatcaaatactctttaaattcaagttacgtgttttaaaatagttaaattagcaaaatataacttgttcattttyattttctagattaatgttattggtgagccatttttaaatgtgaactgtgaacacatcaaatcatttgacaaaaatttgtacagacaactcatctcttacc

SEQ ID NO: 208948 - DNA, 201 bp, Homo sapiens
gactcaatcttagaacatcagattcaagtaagaccattcaacgcattgaagactaagaatatgagaaacctgaatccagaaggtaatgtatttttcatagkattacttttgttgaaggaaaatgccttacatgaaaatagccttgttttcattgagaaattatgaaagaagtaattggcggtggtagtcaaggtgacggat

SEQ ID NO: 208949 - DNA, 201 bp, Homo sapiens
tcacttcattatagaaggaaaataaagtgtgaggtcaaaatctttttcccttctaatagaaagcaaagaatatgccagtatacatcaagaaggcactttcrtataaattatgaaatttaacccaattgaaaatatgcagaaatagatagttcagcatacctaaatttgaaaacagcacgtgcatgattctgtagggtaata

SEQ ID NO: 208950 - DNA, 201 bp, Homo sapiens
agaaaggtcgccctaggcagagtcttgggcacctagctcctgtctgtgatcccagctattcctggacctccacacctcaggtcaggtgtgctgacctctcytctcccctcacagacattgaccagctcatcaccatcagcggcatggtgatcaggacatcccagctgattcccgagatgcaggaggccttcttccagtgcc

SEQ ID NO: 208951 - DNA, 201 bp, Homo sapiens
agactgtggggtatatccctgctttatctgccacctttttaactgagtaccatggcccagcagtatgaaattgttcagttcttcccaaacttgaatgttgkagctcatggttcgtgtggtcactcgcctcttgatacctcagtatcctggagctgtgtgtgtctcaagtcagtactgttggcatcatgagagagcagcctc

SEQ ID NO: 208952 - DNA, 201 bp, Homo sapiens
tggacacgaaggccctttccacaccaggcaaagatgcttctccctgatggcgctcacagggtgcacattgactgcacatctgtggtgctcaagcagtcttyagtacgtcgtttgtaggtgtattggtgtctcaactaggaaaacagtttttttgttgttgttttgggtttttttgtttgtttttttgagacagagtctccc

SEQ ID NO: 208953 - DNA, 201 bp, Homo sapiens
aatattcagtttgctgttgcgattagatggtatagatcaacagacaacatgctgtaatttcaggtttgatatgccaccagaatttcctaattttgtttttrtagctatccctcttgactttgatgttagttcaccactgacatacggcactcccagctctcgggtagagggaaccccaagaagtggtgttaggggcacacc

SEQ ID NO: 208954 - DNA, 201 bp, Homo sapiens
ctctggtctaaacttaggtttctaaacagaagaggccacacagtgtcagaatagggacttgcatggccaccattctggtgtaatgataggtgctgatgaaytggtcagtgataacttaaagcatatcaagcactttcacgagcctttttataccttcctgtgatttcttaattgtagttctttataagagagaaaagtacc

SEQ ID NO: 208955 - DNA, 201 bp, Homo sapiens
caaactaccaacctcaggtgatccacctgcctcggcctcacaaggtgctggaaaaacagtatttttactttgttttcttaggtttgatttgatcttcctcwtgctggaccctcaggacgaagcctatgacaggcgtctggctcaccacctggtcgcactgtactaccagagcgaggagcaggcagaggaggagctcctgga

SEQ ID NO: 208956 - DNA, 201 bp, Homo sapiens; identical to SEQ ID NO: 36686

SEQ ID NO: 208957 - DNA, 201 bp, Homo sapiens
tgtaatttttttgtgtgtcatagtcttgggggttgttaatgaagaaataagactgtgtcatctgtatgtgaaattgatacaacttacctttgcagcattcycccagcaatccttatgagccccattgtgccccatgtgagcacttttcccagacaggcctgattctccctatgagtgctcacagccttctcctctccccac

SEQ ID NO: 208958 - DNA, 201 bp, Homo sapiens; identical to SEQ ID NO: 36689

SEQ ID NO: 208959 - DNA, 201 bp, Homo sapiens
acgctggttgctgagccactcggaggaagatatgggaaggtaaaagtgcatctcctggttgtgccctcaggcatctatcgagctgtgcctattcgagtcartccaagagtgagtaatgtgaagtctgtctacaaaacccacattgatgtcattcattatcggaaaacggatgcaaaacgtctgcatggccttgatgaagaa

SEQ ID NO: 208960 - DNA, 201 bp, Homo sapiens
agacaccacacacagttatcctgtttgctcacaatgatctcgttgacaaggtccagcctggggacagagtgaatgttacaggtaagagtgtaggtttgcaycagcacttgagcatgtctggcttgctttcaatgctgtgctttagtgagtcattggacttggtcacaggtccagttctacctccagttgtcactgcttgtc

SEQ ID NO: 208961 - DNA, 201 bp, Homo sapiens
caccactcctggctaattgttgcatttttagtagagacaaggtttcaccgtgttggccaggctggtctcaaactaccaacctcaggtgatccacctgcctyggcctcacaaggtgctggaaaaacagtatttttactttgttttcttaggtttgatttgatcttcctcatgctggaccctcaggacgaagcctatgacagg

SEQ ID NO: 208962 - DNA, 201 bp, Homo sapiens
gggcagatgggttctggacacatctttttttttaatccatgtaacctgcacagtactgcacagatcttggcaataaaattaacaggacttgctgaactgcrtgggaggctgagaacataaaagccatctagaacagcagctgggggaaggagctggtggcttcttggagagattgtgactataggatgccagagccatgtc

SEQ ID NO: 208963 - DNA, 201 bp, Homo sapiens
ttttgaattcttgaataactgaattcaagattttccccagattctggaaccttatttatttacccagtcatctgagccctttcagggggctcccacaagakacttacagctccatggagatctattcatatctgtacatgttataacagaaaacacgtctacacaaggcacataagatagcctatggaattttaaaggcag

SEQ ID NO: 208964 - DNA, 201 bp, Homo sapiens
accagtaacactagttattccataaattctcctggcaatttatgtcactttcagagcatttatcatacctaccctgtgtgatatttcaatgtgatgtggtrcagtggaaagaacattcactttccagtccccgaattaaacctagctatgcttcctgtagctgggcaaccctgggccagtgacttagcctctctctgcctg

SEQ ID NO: 208965 - DNA, 201 bp, Homo sapiens
ttgtaattaaggggaatatactatgtactaatgttgaagtggtaagttccctcatgctattcattctcacattatctgacagaggtttaatatcactattrttcactcaaaatttaaaatatcctgcagcatccctgtgagtatgccatgatgccctggagtgctttggtgcataaattgggaattataggttgaacagtt

SEQ ID NO: 208966 - DNA, 201 bp, Homo sapiens
taaagagggtgtggctaggtccctctgaagtcataattttacaatgaacaccatgaataaattggggttggcattctatcccagtaagctgctttcatatytgaatggttgaaaaataatacaccatctccacagcaggggaaggaggaaaaacacaaatcatcttaatactaggaatcaagcaagtgggaaggaaaattg

SEQ ID NO: 208967 - DNA, 201 bp, Homo sapiens
aactacaattgggtttaaatcccagctccacgactagtcttacaaacatgagcaagttatttatcctgtctgagccaccattttcccaactgaaaaatggrgaaagatactaaaactcatggagtttgagtgacaattaagtgatataacataaaacacaaagcacagatcatgaccaaagtcagtatccaatatatgacg

SEQ ID NO: 208968 - DNA, 201 bp, Homo sapiens
ttgcatgcagccctgtagagaggtaccagtttgcagaggataccactcaacagtaaagaccagcagctgctaactcagatgcctacagaggcaaagtagcrtaaaagatgaaagcagagaggtagaggaaaacctcaggagggtaaatgggagctggcacttgacactaaggctgggggtacactaggaaatgttaggagg

SEQ ID NO: 208969 - DNA, 201 bp, Homo sapiens
ttgtctgggaataatagcatccactgcatatggcgtaaatgtcattaaaatctaatgttgtaaaagctgtaagatagtacctaacatatagcaggtcttcrgtaaatagtatctggaggtagtaaagttgagtggtttatagcaaaaagctctcaagttagactgcctatgttagaaggctggttctgccaaaggctagct

SEQ ID NO: 208970 - DNA, 201 bp, Homo sapiens
tgtaaaaacacactgagaacttgttcctcagtgttctcccttcctaactgtcaaaaccctattgagcggtgttctccctttcctaactgtcaatcatcctmttaaggtcaaaagttttaagagaagcactaggaattatgatgattaaagaattatgtaagctagaactaaggtaaaatgtgtttgcatgtaactcccaga

SEQ ID NO: 208971 - DNA, 201 bp, Homo sapiens
aggttaaattctggctgagagaacaaagaaacaaggagacaggttaggaagccactataatatagataagcatttcttaacagtacaccattgaatcttgygctacatagatttttgtttcggggaaggggctgtcctatacattgtaggatgtttagcagcatctgtggccttacccactagatgccaataacccaagcc

SEQ ID NO: 208972 - DNA, 201 bp, Homo sapiens
gctgagagaacaaagaaacaaggagacaggttaggaagccactataatatagataagcatttcttaacagtacaccattgaatcttgcgctacatagattkttgtttcggggaaggggctgtcctatacattgtaggatgtttagcagcatctgtggccttacccactagatgccaataacccaagcccagttgtataacc

SEQ ID NO: 208973 - DNA, 201 bp, Homo sapiens
ggagttgggggttgagataggggaagggggagcaattgggtatgggaagatgtcattcaaagcatataacatttcaattacacaagaagaagaagttttaragatctgcacaacttggtgattatagttaataatgtattatatatctcaacattgctaaaagaatagattttgggtattttgtttattttttataatttt

SEQ ID NO: 208974 - DNA, 201 bp, Homo sapiens
ctggcagagaccagcgaccctgggggaggtgctgaccacaacagattttctttgaagccttatttttctttctaaaaattcatgtgaattttacattttamcccatataaaatctattttcactttaatttaataattatgtttctacccccactcccaaattttaaacaaaactggtgtttccaaaagatgtaacattta

SEQ ID NO: 208975 - DNA, 201 bp, Homo sapiens
gggtatctcttcagcaacaccccactcctggtaccaatttgctgtattagtctgttttcatgctgctgataaagacatacctgagactggaaataaaaagrggtttaattggacttatatggttccacatggctggggaggcctcagaatcatggcaataggcaaaaagcacttcttacttggtagcggcaagagaaaatg

SEQ ID NO: 208976 - DNA, 201 bp, Homo sapiens
gtgaattttacattttaccccatataaaatctattttcactttaatttaataattatgtttctacccccactcccaaattttaaacaaaactggtgtttcyaaaagatgtaacatttatcctatggcttcctgtactttttagtatacccccatatcctcccctcttcctaacgcccaaggatatatacaggtaccccggt

SEQ ID NO: 208977 - DNA, 201 bp, Homo sapiens
ggaaagtctctaactctctcccagagagtgaagggttgggactcagtaccggacatgctgtgggtgaggtgacatgagctgtctaaggaggcagggcctcyctagtgagtgaaggcagaaccgggctttctgggccaccaacccagggtggaggccagggatggcacgggaagccctggcatccccatagcccagtgtggc

SEQ ID NO: 208978 - DNA, 201 bp, Homo sapiens
ggtgacatgagctgtctaaggaggcagggcctctctagtgagtgaaggcagaaccgggctttctgggccaccaacccagggtggaggccagggatggcacrggaagccctggcatccccatagcccagtgtggctgacactagcctcagctttggagtcagacagatccacatgcattctggatattggggaatcaactga

SEQ ID NO: 208979 - DNA, 201 bp, Homo sapiens
attaagcctgaactcctttccaacgtgccccgtaaatctggtctctgccaacatttccaggctcagctccctgtagcctggccacactggcttgcttcctrcacctccaatacatccagccctttcccacctcagggcctttgcacatgcttttctgcctggaattctccctgccccccacacactctacctgtctggcct

SEQ ID NO: 208980 - DNA, 201 bp, Homo sapiens
ccacactggcttgcttcctacacctccaatacatccagccctttcccacctcagggcctttgcacatgcttttctgcctggaattctccctgccccccacrcactctacctgtctggcctgtactgactttttaagtttctgagaaaatgtcacttcctaagagttaacttctctgtccaccccatctgcacctaccatct

SEQ ID NO: 208981 - DNA, 201 bp, Homo sapiens
gtgtgggatgtcaaggcttctgcaaatgccaatcgcacgcctcactgtacatcaggcccagggttcagatcttatgataggaaatccaagaatcaaccgcyagcagagtaatccgttttctggaaacaagatgtggacagtctcgtttccagcatccagccccttcagtctcccatgttatctctgaaagagttaaaatca

SEQ ID NO: 208982 - DNA, 201 bp, Homo sapiens
accttatagggtgcttgtgaggattaaataacacccgtggagccttagaatgatgcctggcacatagtataagcatcgtgttatggttggagtgaagatgstgtcttgcttccctaccacatgtgtcttttaagtgtgggagcaggaagagcagaagcaatcataaaagtagtaatgtcaacagccgtattcacagctaac

SEQ ID NO: 208983 - DNA, 201 bp, Homo sapiens
gctcccagactgagctgagctgagatggtcccgctgggccatctaggcacccactcttcccagctcatgacaactcatatagttgcctgggccacagcaakagaaatatgacggaggcagctgtgggatggcagatgttcttttgcacataaatatgtagatgtctgaggcttcactttggccagagtggctctccagctg

SEQ ID NO: 208984 - DNA, 201 bp, Homo sapiens
cttattcaactaagattgattaaacacctgctggtttctgcctttaaggaccatactttcttgtggggagggatgagagaaaacacaaatgtacaaataamcgaggtcatttcagacatgataaaaaagctgtaagaaaattagcagggtcaggaagtagtggtatgtggcaaagcctttgaattaagacctgttatcaga

SEQ ID NO: 208985 - DNA, 201 bp, Homo sapiens
cgaggtcatttcagacatgataaaaaagctgtaagaaaattagcagggtcaggaagtagtggtatgtggcaaagcctttgaattaagacctgttatcagamggatccaaagagaaagccaacatctaagtgtgaaggccctaacagaggaggaaacttgtgtgttcaaagaatagagaaaaaagatcagtggatggataca

SEQ ID NO: 208986 - DNA, 201 bp, Homo sapiens
aaaagggagaatctaagataactcgtaggtttggtgcttgagttactgtacggtaccatacactgaaacgaggagactggggaaggaacagttttggcatsgaaagaccaagcattctcttttggatgtgtccagattgagatgtctgtgattcatccaattagagaagtctggcagacaattagataacatgagtctgga

SEQ ID NO: 208987 - DNA, 201 bp, Homo sapiens
attataatttgttattaataaaatgtattaacgggattatgataatagccagcatttattaagtggggattctgcaccaggcactgtgctaagcatttgtmcatccctttcactctcatagcacccttattaagtaggtaattgtaatatttccattttatgggtgagtgaataaagctcagtcttttaacataagtgcct

SEQ ID NO: 208988 - DNA, 201 bp, Homo sapiens
gaaaaccaacacatgtaagctgagagaagacagtgatttagaaatacattaggatcaattatgtcaaatgcttctgagagggcaagaaagatgagaggggkgaagtgatcatgggatgtgggcttatggaagtctttgtccattaattagttactttaagtaaaagcagttagcacactgcctgacacatagtaggttccc

SEQ ID NO: 208989 - DNA, 201 bp, Homo sapiens
ctcacctgcccctcgagcttccatcttattgagaggtaatgtctagtgctggggaattgcagaagctgaatctggccagagaaggtcttgagggccagggygaggagccagggttcacctcagcagtagcgatggggctgccctgcagcaccaatccttgcactggctctaccagcaagtccactgcctgtagacactctc

SEQ ID NO: 208990 - DNA, 201 bp, Homo sapiens
cgatggggctgccctgcagcaccaatccttgcactggctctaccagcaagtccactgcctgtagacactctcttctagcagcaaggcccttctgcattggyaagtctgcagcccaaggattggccacagaaatcccctccttcggatgacaccaaagcagccttcctgtccaggggcagtctgactttttcatgctgaggg

SEQ ID NO: 208991 - DNA, 201 bp, Homo sapiens
cttcttacatggtggcggcaagagaaaatgaggaagaagcaaaagtgaaaacccctgataaacccattagctctcatgagacttattcactattatgagamtagcacgggaaagactggccctcatgatgcaattacctctgcctgggtccctcccacaacatgtgggaattctgggagatacaattcaggttgagatttg

SEQ ID NO: 208992 - DNA, 201 bp, Homo sapiens
ggaatgcagagaatatcttttggctacatttcctggtcagactcctcatgccaattcaggcttccctgatcacctctctttttaatgatataagtttaatytccctgtattagtccatttttatgctgatgatgaagacatacccaagactaggaataaaaagaggtttaattggacttacagttccacatgtctggggag

SEQ ID NO: 208993 - DNA, 201 bp, Homo sapiens
attgggaggccaaggcaggaggaattcttgagcccgggagttcaagaccagcctgggcaatgtagggaggccccatctctacaaaaaaataaaaacattakccaggtatggtggtgtgcatctgtagtcccagctacttgggaggcgaaggtgggaggatctgcttgagccagggaagttaaggctgcagtgagctgtgat

SEQ ID NO: 208994 - DNA, 201 bp, Homo sapiens
taccatcctgcagttctgcaggtcagaagtctgacattggtctcactgtctaaaatcaaggtgttgatcaagttgtgttccctgctagaggctctaggggrgaatgtttcctcaatttcttcagctttcagaggctgcccacattccatggctaatggccccttcttccattgtcaaagctagcagcaggaagatgagtcc

SEQ ID NO: 208995 - DNA, 201 bp, Homo sapiens
tgctagaaaaaaaatatggctgtgaacttcacattttattaatttgaaaaagtgcagaatgaatagtgtgtgaatatctctgtgaaagtcaaataaatacraatagcccaaacaatctccttaagagaaactctagaactaatttaagagcttcaacaatttctgggcttcttaggggatagaaccatcctaattagaaaa

SEQ ID NO: 208996 - DNA, 201 bp, Homo sapiens
ctttaaattccatttagatgcacttcttcccaagtacagtggctcacacttgtaatcccagcactttgggaggccaaggcaagaggattgtttgaaccccrgtgttccagaccagcttgggcaacatagttgagaccctgtctttacataaataaaaactatttgggtgcagtggtgtatacctgtagtcctagctactca

SEQ ID NO: 208997 - DNA, 201 bp, Homo sapiens
tagttgacccactgtttgctcatttctagcattaagaatacattacacacacacacagtataataaaatacctaccttgttatatttaacttacatgaacrttaaaattaaatcgcattcctaggcaccacaagtgggaaaatggcaataaaaaagcacaaaataagattttaaaagttgcaatatttttacaaattggaa

SEQ ID NO: 208998 - DNA, 201 bp, Homo sapiens
tctttcctccccatcctttgccctttggccaggctgactctcattggtcttttaacactgggtttggaatgctttctccacgatgcttcccctaatttctytaaattccatttagatgcacttcttcccaagtacagtggctcacacttgtaatcccagcactttgggaggccaaggcaagaggattgtttgaaccccggt

SEQ ID NO: 208999 - DNA, 201 bp, Homo sapiens
ccaaatgtaccatgttctatgagtcttcatatgagttgtcccccacccctggcattctttcctccccatcctttgccctttggccaggctgactctcattkgtcttttaacactgggtttggaatgctttctccacgatgcttcccctaatttctttaaattccatttagatgcacttcttcccaagtacagtggctcaca

SEQ ID NO: 209000 - DNA, 201 bp, Homo sapiens
tgctattctccctgtgtgcatacccatctctgtgtttcagtttcccctttttataaggacactagtcatattgaattaggacccaccctaatgacctcatygcaactacttctgcaatgactcttatttccaaataaagtcacattccgagatattgggggttaaaacttcatataaattttgggagggcacaattcaacc

SEQ ID NO: 209001 - DNA, 201 bp, Homo sapiens
cccactcttgttttcatcctccaggtagaatcctgagactgggggctgtgtgtttataatgaaggaagcttgtattatatcataaggtaattttttatccrtaccttcagggaagggagtagacatttgggatcacccttgaattgagactgagggtggtatttttcatagacattgatatctcatagacttttttttaca

SEQ ID NO: 209002 - DNA, 201 bp, Homo sapiens
aagtagatagcctgcttaaaggaaaagcaagctctaagctattctcaataagatccacaaacaatttcttgcagtaaaatgtgttgttctttgtttctcasatatgaggaatgaggaggaacccttcttaggctcttctgatgattttttaggttaaggctgagtccctgagtacaaatgattgcctggctcatatcccag

SEQ ID NO: 209003 - DNA, 201 bp, Homo sapiens
  misc_feature (1)...(201): n = A,T,C or G
gtaattttttatccgtaccttcagggaagggagtagacatttgggatcacccttgaattgagactgagggtggtatttttcatagacattgatatctcatngacttttttttacagttggacatttccctttaaaaatttattggtggcaaaaggaaatggtccactgagaaatcttttcttcctcgtggagaaaaactta

SEQ ID NO: 209004 - DNA, 201 bp, Homo sapiens
  misc_feature (1)...(201): n = A,T,C or G
ttatttaaaaatattctgtttataggagtcacacagtggaatggataatactgagaagaaaacatttttccccttcctgattctgagatctcataggtaanatttgctacattggtatctctccattccctgtccttgctttccttttgctgggaaatcattgcatctgaaaaaaaaaaaaaaaaaaaaaaaagtaagtgt

SEQ ID NO: 209005 - DNA, 201 bp, Homo sapiens
atgtggaatctaaaaaaagtcaaactcatagaagtataaagtaaaatggtggttacccggggctggttttcggagttgggggttgagataggggaaggggragcaattgggtatgggaagatgtcattcaaagcatataacatttcaattacacaagaagaagaagttttagagatctgcacaacttggtgattatagtta

SEQ ID NO: 209006 - DNA, 201 bp, Homo sapiens
caaataggtcagaagtaaatttgcccagccctaatcaaatacccacaagttccaaataagcagatacaaaatcttagtgtcagtcttggtgccgtgtcctrtactagacagtaggggagataatgttcagaccaggcaactcagagagcacggtggcatgggacagcctgagggaaggaataagcggaaagcctgtactgg

SEQ ID NO: 209007 - DNA, 201 bp, Homo sapiens
agcagcacctaggacagtcatatctagtttggcatagatgctgaatactccctagttggcttaaattggccaaaatcctagttttcttcctgcttgtttgrcgcccagtaagtgcttggctccaggctctgagaggtggggatgcagtggtggagaaggaggctttagaggatggtgcctgctttttgttcctcctcctct

SEQ ID NO: 209008 - DNA, 201 bp, Homo sapiens
gagcccataaaggcttaaaaattattccatcagattttcaaggcacacttttattttatttttaaaaatctttctcagggaaatgttggttttcttttatrgacatttaaatcatttccttgtgcctctgaatgcagcatgaaggacatttgactctttctcttcattatatacaatagtgtctttgacagaacttataaa

SEQ ID NO: 209009 - DNA, 201 bp, Homo sapiens
tgctttcttgccttccagtgataaggtttccaaagtcattattatttcatggaccaaaaccaaaccaattccccatcccaaattacttatatcttgtggtkggtcatgtccttaaataatatcagtctatctgtctctgtctctgcctctgtctctctttttctctctctctctcatttgaaatctcagtgagagttttgg

SEQ ID NO: 209010 - DNA, 201 bp, Homo sapiens
tcaactcaattctctggcattgcatagactccagcctagcatgatactgcaagagactagggatgaactaggagattcctctgtttccgtaagcctcacawtcattagcctcacatgcgtatcattgttaagtcaatatctattattcaggtaaataatactttatgtatgaaattaccagtctagaacttttgtaggatg

SEQ ID NO: 209011 - DNA, 201 bp, Homo sapiens
tactttctggtggacctaatttggcaccaggcactggagggcctgttattgttatctaagaaatcagtagggacgctttcttttcctaaagggacaagggyactgtgacttgccacgtgcttcttcctttcccgaaattgtctttatctcatttccatgctgctattctctacccatgcttgaaaactcagcttgagtcaa

SEQ ID NO: 209012 - DNA, 201 bp, Homo sapiens
taaatcttcccatattaaatcagaagctgggagtggtaacccatttgcaggagtttctagtataatccataaggaacttagcagagggaggacgcagactsaagtttaataaaaaccaactgagcaccaggcattctccctgtgttatcacaggaggatgattatcctaagtctgcatggtattatccacattttacaggt

SEQ ID NO: 209013 - DNA, 201 bp, Homo sapiens
gttggtgttctttggcccataagaatcattcattaatgtaatgacattaaatatggtggtcatgtcacccttgtcttgcagtataattttcttactcttaytagaataaagatgaactaaagccataatcactctaaatcacattaagcaggtttttttaaaaaattttttctttccataaaaaggtctgtattattcagc

SEQ ID NO: 209014 - DNA, 201 bp, Homo sapiens
aaatggaaaatggtacaagaagcaggtgaaattaattttaataatatattttctttaacttaatatattcaaatattatcactttgttatggaatcaatayaagaatatattaacgagctactttatgtcttttttcacatccattctttcaagtctattgtgtattttacacttccaacatatctcaactcagacaatat

SEQ ID NO: 209015 - DNA, 201 bp, Homo sapiens
cctgtcggaatggcatcctgcgctatcttctgtcctcaccacaatcagccaaggagcctcttgcctttcctggtcttccctttaggcctctgtccctgcarcgcccccttcctgtgttactcatcctgtctcctgctacagtgtaactcggctggtcttcttagaagtagattgtctctttaaatttaatcagctgcataa

SEQ ID NO: 209016 - DNA, 201 bp, Homo sapiens
ctaggcacttgacaagtatttgtgaactaataaaatgttcaaagaaagtggttgcttatgaaataaaattggacctaggtgtggccatatagagggaagargtatttgggttcactatgaggaagacaagcagtaagaactcttaatccaaaaggcaatagtctcccatgtgaagaagtgtcttcctcgtccctggctagg

SEQ ID NO: 209017 - DNA, 201 bp, Homo sapiens
ctgtattaagagaaaatccaggagggcttggtgtaaagaggatgattgattatacttttaatatgtcactctgtggctatttaagaatgaagcctcaggargaagagtagatgctgggagaagagtcagaaagctatcaaagtgctccaggtaagagatgagcatggcttagactaagatggtgacagtggaaatggtgag

SEQ ID NO: 209018 - DNA, 201 bp, Homo sapiens
tggaaatggtgagattgaattgatttgggccgtactttgagtgtaaagttaatagaactgtttttttaaaaaaaagatgtagagggtgaagtaaaggaaarcaccaaggacagctcccagctttttggcctgagcacacacctagatgaaggtgccatagagcgagttcacaacaacagtttgcaggggaaatttacaaat

SEQ ID NO: 209019 - DNA, 201 bp, Homo sapiens
agttcagagaagaaagtgattgtttccaactcaacttttcagaaagaatatcaaggggtggtggaagggggagagggagcagagcctggaatatgggaacrattttgccttttagagaatttcaaatcctactgagcaacttccagccactaggtggctttcagatactctgttgaggttcataaattataaaggccggtt

SEQ ID NO: 209020 - DNA, 201 bp, Homo sapiens
acaccagggtccctccaggcagtgcttggcccatgccaagatgggctgtcgtactcagctgtgaactgctcaccttgctctgcagggagatcactgtcagkggggagctgctcctctctccctttctgtgcctgtgcctctcattgcagtgattatgtagacagccttggaaacggggcagcttgggagttcagcactggc

SEQ ID NO: 209021 - DNA, 201 bp, Homo sapiens
ttggtggcaaaaggaaatggtccactgagaaatcttttcttcctcgtggagaaaaacttagtaagtccttatccatattgaggggaggagaggaatgaaaraatggcatggactaaaatctccaggagaacttttcaaatactaaagatctaaagccatagagaaactgcctagatgacttttgtatttctgattggtcct

SEQ ID NO: 209022 - DNA, 201 bp, Homo sapiens
agcactggcctctgcggtgccatggcaaccagcttcccagcaatcacccctaataatagccactcgagagctcttccacctgggcagaggctccccaggghgttcgggcttctcttggagtaactgcacaaagctacctgttgggaacaaattatgagagggaaggagggaggggagagcatgctatctcagggggagaga

SEQ ID NO: 209023 - DNA, 201 bp, Homo sapiens
tgccttccctgtccagctgtataggggcagctgctgaaagggaactggccctggggtgcagggaaataataacagcggctttgcagagttgaagggggaaytcatgaactttgagccctccctttgttgacaaacggaggaggatagttttctatcactgctgtaacaaattatcacatacttaatgaacttagtggctta

SEQ ID NO: 209024 - DNA, 201 bp, Homo sapiens
atgaatagccaccatttagatgtgctgctttttaaaatcactaattatcagttcaagcagctttgcccaagagtgaaagaaatccaaacaacaaaatatayttctcatgcttcttagaagaaatggggatagcaggggtagcgcaaggaagaaaattccaaaagattttataattgtagtgagaaattgaggagcagacag

SEQ ID NO: 209025 - DNA, 201 bp, Homo sapiens
taagtggggccacttggagcactaactcatcttcgaatttgggcttagctctggagaagttgttattgcaattataatttgttattaataaaatgtattamcgggattatgataatagccagcatttattaagtggggattctgcaccaggcactgtgctaagcatttgtacatccctttcactctcatagcacccttatt

SEQ ID NO: 209026 - DNA, 201 bp, Homo sapiens
cttcgtatcgtcctaatttttttcatgctgctcttgggccaaaaaaaaattcacaactgttctgtttactaagtagttaggttcaaactacttaataagtrtgtttgcactaacaatgtagtaactgtttgaaacatagtaacataaattgaagaaataattttatttcattcttaactacaattgcttacaatggaatta

SEQ ID NO: 209027 - DNA, 201 bp, Homo sapiens
gcaatgcctacttctgcattactgctgccttccctattgttttgggtacagacgctttgctaagtgattcacaagcaagatctcgtctattctcacaaccrccctagaacataggtactactattatctccattaaatgaagcttggaaggagtcaagctgcttgttcaaagctccatcatttataagcagcaaagctgga

SEQ ID NO: 209028 - DNA, 201 bp, Homo sapiens
actcttgagttttgtaacttttctccctttgcatcaatatcctaactagacaagtaaaacagctgtcagtgaaatcacgcacagtagatatttttgtttaktattgaagcaaatcaagggcaagactaaggtcacaatagaacctgaatagtcaaaaggaatgattccttgagagtgggcatgaccgaacattcctacgtt

SEQ ID NO: 209029 - DNA, 201 bp, Homo sapiens
agcatggttaagtggggccacttggagcactaactcatcttcgaatttgggcttagctctggagaagttgttattgcaattataatttgttattaataaamtgtattaacgggattatgataatagccagcatttattaagtggggattctgcaccaggcactgtgctaagcatttgtacatccctttcactctcatagca

SEQ ID NO: 209030 - DNA, 201 bp, Homo sapiens
gccactgtgtttggaaccacctatactgttagtcaccacaccatctaagacagagtgaacaggccttcaggatcagctgttagtggtcttgggcccctccyaacccctctacatgggcatgagttcctgtgaaattaatgaaggtccagtgtaaggtcaagagaaaggagccacacccagcaacagcctgcacctgtggtt

SEQ ID NO: 209031 - DNA, 201 bp, Homo sapiens
atttgctgatgtctctccctacagtggtacccattgaaatgaataccttctacaagatgaaacctaggaaatgtcgtttccaattggctttctactgattrgggttgatgtcttttccaaattggctttctagtgatttgggttgcttcattaaatgtttttggttgtttcataacaatagtaatctcattttctttcaaa

SEQ ID NO: 209032 - DNA, 201 bp, Homo sapiens
tatgtgcacacaaaaacctatatacaaacctgtacacaatgtttatagcagcattattcataattaccaaaaaactggaaacaacccagatgttcttagaygtgtgaacagcacatcaaactgtggtacgtccataccatggaatactattcagcaattaaaaaggaatgagctattgatacaatcaacaatctgaatgca

SEQ ID NO: 209033 - DNA, 201 bp, Homo sapiens
cctcctaacccctctacatgggcatgagttcctgtgaaattaatgaaggtccagtgtaaggtcaagagaaaggagccacacccagcaacagcctgcacctrtggttacctaatctctctcttctcctatccccagagtccacaaccagctcactgcatgcctcctttctgcccttgctccagttgtaatgaatgctgtttc

SEQ ID NO: 209034 - DNA, 201 bp, Homo sapiens
ttgtggccccagcctcaacacagagtgtagctttttctatagacaggtcatttattccttctttccacaaataatgactgcctgtgtgtcagaaactgggyaagtactggggatacaacatttaaaaaggcaggcactgctcctatttaatcttaatatgaatactgattactatggaaacatatagcttgaaagtaaaac

SEQ ID NO: 209035 - DNA, 201 bp, Homo sapiens
acaaagactagttaccaaaatatataaagaactctcaaaacagcattaaaaaaatgcaattagaaaatgggcaaaagacctgagatatttcaccaaagacratagacagatgaccaataagcacagcaaatgatgtttaacactatcagccattaaggaaatgcaaattaaagcacaatgagatacatatctatcacagtg

SEQ ID NO: 209036 - DNA, 201 bp, Homo sapiens
aagtactaaaacctatgaatagtgagtgagttaatacatgtagagcacacagcacaaaagctcagtagatgataggtattatcaaaagccagcctggactwgtgcccagcctggattccagcccagcatccctgagtctgatgttctttccagtgtacctggatgggcacaggaagaggtgaggagcaacagaggcaccaa

SEQ ID NO: 209037 - DNA, 201 bp, Homo sapiens
gtcctaaaataaaaaagtgtttataaaggcataggacttgtctacccaacgaggcaaagatgttaattcttcccaaattgatatataggtttaatgtgatygctatcaaaatcccaccaagatttttataaatacagatctgattattctaaaatgtatatggaaaaccaaaggaaccaaaatagctaaaaatcattttta

SEQ ID NO: 209038 - DNA, 201 bp, Homo sapiens
tcttgcatttcagtggggaatccggatgataaatgagtcaaataaaatgaataagataatttcagatatgtgttaagttctgagaaataaaatgagcagcrctgataggatgaggggtggtcagggaagatgtctccaaagagaagacattcgatggagacctgaatcatgataaggagccaacattgtgatgttacaggc

SEQ ID NO: 209039 - DNA, 201 bp, Homo sapiens
caagcaatattcttgtattctttccttcccccatatcgcatgtttgtacagatttcagagatccatatattaaatttgggacactccagggaagacccctrtgtcctctgtgcaagacacatagcaactagtgaggccatctatgttttccagacacccctgcatgtccaaaacaatgtcctcttcaaagtcacctcaaat

SEQ ID NO: 209040 - DNA, 201 bp, Homo sapiens
caaagaatcattagacaatccatagtttaatgtaattggagaagcagtaagaacatttgccaaggacattttagagccacgttaggtaacccctaggatgkgcatggaagtggcagtcacttcttaatcataaagagagaacctgattcacatgatgagttatctttaatttccctgcagtgttatgtgaaaacaaataca

SEQ ID NO: 209041 - DNA, 201 bp, Homo sapiens
tggagtgtcacccaagctggcacaatctcggctcactgcagcctccgcctcccaggttcaaggattctcctgcctcagcctcctgagtagctgggattacrggcatgtgccaccacgcctggctaacctgatgcttttttaaattttttattttaagttccgaggtacatgtgcaggatgtgcaggtttgttacataggta

SEQ ID NO: 209042 - DNA, 201 bp, Homo sapiens
aaggtctttgtggaatactgtatcttttcatggtgggggttgcagttgtgtttaaaaaaaatcaataatctcaaatacttaagccctcctacttcattatrctttttaaagaagcagtgtatcttagcagttagaaaacttggattctggaggcagtttacttaatcctacaaggggataatttggccctagatcagacca

SEQ ID NO: 209043 - DNA, 201 bp, Homo sapiens
agtgttctctctcccttcctcttcctccccccaccccacacctccctccttctaccaccatcactgattaccaaaagggttgttttaaaaaagtttcagtyatcagttatccaaagtctatcttatcattacctggttcctaaagttcacttgagaaagtaaaatgaaatactggttagctttgtggtcttgagaaactaa

SEQ ID NO: 209044 - DNA, 201 bp, Homo sapiens
ttaactccttagtgcctcaaagacaagtaatgatcaaggctccaggtaggactgactatcaaaaccaatagctgctgctaagatttgagtatttataatgkacatgagattccatctctatccagcacaccagcccactgatgctttacaagaaaatcctcagtgcctcagagttagctttcatagttttcttgttataat

SEQ ID NO: 209045 - DNA, 201 bp, Homo sapiens
caccagcccactgatgctttacaagaaaatcctcagtgcctcagagttagctttcatagttttcttgttataattttcagcttcccatgtgccatgctagrcacaaggtacaacagtgaacaggacagacatgggccctgcccttttagagtctagtgaggaagatggacatagtggatagtaagtacatgtgataaattc

SEQ ID NO: 209046 - DNA, 201 bp, Homo sapiens
gctcggactaccaaagaggtaggaatatcacacaaaatttggtggagcaaaatagacttgtgggaagaaaccattttaagacaaaccttaaataatttttwaaaacataatgtttattcttttatttttctgattacttaaacaatatattctcagtgtagaaaagtttaaatttaaccaataaaaatcagaaaataaatg

SEQ ID NO: 209047 - DNA, 201 bp, Homo sapiens
gatatgtcttgtaactcagtgttttatggtcaacttataacaccttcaacttatagaagaattaagattatcttctaaggcaggctttccaacatttagawgcatgcatgcatatcctagcttccagatacctgcatccatttccctatggctggttatttttttctgaaacggattttttttccagccttctgacagtgt

SEQ ID NO: 209048 - DNA, 201 bp, Homo sapiens
aacttacactgttatgctggtggttaggatgccatctaaacattcttgacttagttgagttattgcaagacacttacacatttaaaagttctgatttaccrtgtgcaatgcttgtatttgatttgcttagcaggcatatttcatataacatatgatttcattgcatgaaattttacattatttcctcattagaagtacttt

SEQ ID NO: 209049 - DNA, 201 bp, Homo sapiens
taaaatcttcctttcctcccaccttcatgttggtggtggatattgtatacatacattccactccaaacatatttttggtactaataaattgcaaggatgawcttattaactttcttctgttttggttgataaaacagttccaagtaacaatttattctgaatcttttctattttaatttgcttttcttgacctcagcagat

SEQ ID NO: 209050 - DNA, 201 bp, Homo sapiens
gagaagagcatttgcctttttgtaaatgttgctcattaagcaggctcagcatcatcctacttactgcctatgctattagttaatggaatttaaaagccaakaataaataattaagcacgtggacattgtggggtggttcctggttttttgctcaaggtttcaagtaaggattacgcctttttcttagtatatttattttta

SEQ ID NO: 209051 - DNA, 201 bp, Homo sapiens
cagtcaaataatactatatttacggttccatatctcagggtaactaaggttgctagtttggtgtatgtctttccatacctttctctgtatctatgaatacrtatattaacattaatgaatgaacagatatgactttgttttgtttacaaaactgagatcacactagacatattactcagtaatatacacatccctccaggc

SEQ ID NO: 209052 - DNA, 201 bp, Homo sapiens
tttgtaaatgttgctcattaagcaggctcagcatcatcctacttactgcctatgctattagttaatggaatttaaaagccaataataaataattaagcacrtggacattgtggggtggttcctggttttttgctcaaggtttcaagtaaggattacgcctttttcttagtatatttatttttagtctattatatagagctt

SEQ ID NO: 209053 - DNA, 201 bp, Homo sapiens
aatcagtcttccatacagccatgagaattctctatgggcaaaccatactcctatttagggatcttcaggagctgcctagtgccaacagggtaacaatcccrtcttctcagtgtggtgctgaagttgttccatttccctaaatccaccttgctcttccacttctatttccttacactttcttccatgcaaactatagcccac

SEQ ID NO: 209054 - DNA, 201 bp, Homo sapiens
taagctatgccccataatgacttcctcttaaactcaattttttcccagttatttaaagcaaagcccaaattgtcttctgtgaaggcttccccgtctgccarctagaaatacttttttcctctctgatgacctgagagcattttatctgtgaatctgtcataggcctagcttaattaataactgcatgagaatatgcttctg

SEQ ID NO: 209055 - DNA, 201 bp, Homo sapiens
ggctgacgcaggagaatagcttgaacccgggaagcagaagttgcagtgagccgagattgcaccacttcactgtagcctgggagacagagcacgactgtgtmtcagaaataataataataataataataataataataataataataataaatttttttaaaaatgaaacttttaggtaaaagcttaggagagaagctttat

SEQ ID NO: 209056 - DNA, 201 bp, Homo sapiens
aactaaatgaaataaaacatgtaaagcacagggcctgcagtattataagcttcccatcaaaagtaattattaatactattaaatgctattacccaaggaakgaaaataattcctggagctgctattaaaacttgaatatacatagatatgtcatgaactacaaagtgctgtgctggtatgttatctgtaccttgccctctg

SEQ ID NO: 209057 - DNA, 201 bp, Homo sapiens
acaaaaaaaaattagccaggcatggtggcacacgcctgtaatcccagctactcaggaggccaaggcaggagaattgcttgaacccaggttgtggtgagccragatcgtgccactgcactccagcctgggcgacagagggagactctgtctcaaaaacaaaaaaaaaaagaaaaaagaaaagttgaaagaacaagagatcgt

SEQ ID NO: 209058 - DNA, 201 bp, Homo sapiens
gtacaggctataagtgccacaggatttaagataacggtacatgtggagaggctagaattcaatttaattgatatggacagagcacttcatgtggaatggayactatagaggtaaacaaatggtcctgctctcatgcagcttaccatctggtggaaaagtcagatgatgaacaaggaattgagtgtgcatctctgcaagaga

SEQ ID NO: 209059 - DNA, 201 bp, Homo sapiens
catgtggaatggatactatagaggtaaacaaatggtcctgctctcatgcagcttaccatctggtggaaaagtcagatgatgaacaaggaattgagtgtgcmtctctgcaagagatggtccagccaggtgagaaaggttttcccaaagaagtgacccttaaactgagtcttaactgccatgaactagtcaggaaatgcatgc

SEQ ID NO: 209060 - DNA, 201 bp, Homo sapiens
tccacttgaaatctatataattgctttaaagggaaattaacctgtatgattttatgtttcttcccagccacattcacctgcttggtacaggtaaacaaagsgtagaaagtaagatttaaccagtgatggagttttgccaaatgagtacaatggaaagagagagcaagaaaggcaagcttgttgaatatatatgctaaagga

SEQ ID NO: 209061 - DNA, 201 bp, Homo sapiens
aacagaaaattaaacacttttaagtgggagctgaatgaaatgaactcataaatacagggaggggaacaacaacacactggggggtgtccagtgcatggggrtggggcacggggagaggggggcattaggaaaaatagctaatgcatgcccggcttaatacctaggtaatgggttgatgggcacagcaaatcaccgtgacac

SEQ ID NO: 209062 - DNA, 201 bp, Homo sapiens
gctaatgggcgtgacttccaaagcacacatgttttgacacttatagaaacactgcaggtgagtaataagacaaaatgccgaaggtgaatggtgacagatgwggaaaggttcatcacaaagcggacatatggaactagaccttaaaaaccttgccactgcccagtttatatacctttactgctgtgccccctagcgaaggtg

SEQ ID NO: 209063 - DNA, 201 bp, Homo sapiens
agcacacatgttttgacacttatagaaacactgcaggtgagtaataagacaaaatgccgaaggtgaatggtgacagatgaggaaaggttcatcacaaagcrgacatatggaactagaccttaaaaaccttgccactgcccagtttatatacctttactgctgtgccccctagcgaaggtgaatgagttagtttatagcaga

SEQ ID NO: 209064 - DNA, 201 bp, Homo sapiens
acagatgaggaaaggttcatcacaaagcggacatatggaactagaccttaaaaaccttgccactgcccagtttatatacctttactgctgtgccccctagygaaggtgaatgagttagtttatagcagagatgcctctgtaagggcaggacacagcctcacccttgcagcccccaaatgcacctaacaatgccaagagcac

SEQ ID NO: 209065 - DNA, 201 bp, Homo sapiens
aggtacaacattttctcctctgctacctcctaaaagatttactattatggcctctcagaatcaagaggaaaactgagttaaaagtgttttcttgaaaagamgttaaaaccacttactcaaatgcctattctgtatctctaagtgttagcctacaggtcagaaaactaagatcttgccacctggattcatgtgctgcgttcc

SEQ ID NO: 209066 - DNA, 201 bp, Homo sapiens
cccacaacatgtgggaattctgggagatacaattcaggttgagatttggtggggacacagccaaaccatatcattctgcccttggcccctccaaatttcaygtctccacatttcaaaactaatcatgcctccccagtagtcccccaaagtcttaactcatttcagcattaacccaaaagtccacagtccaaagtctcatct

SEQ ID NO: 209067 - DNA, 201 bp, Homo sapiens
tgcaccacttcactgtagcctgggagacagagcacgactgtgtctcagaaataataataataataataataataataataataataataataaattttttwaaaaatgaaacttttaggtaaaagcttaggagagaagctttatgacattgaatttggcaatgatttcttggatatgataccaggcacaggaaacaaaaat

SEQ ID NO: 209068 - DNA, 201 bp, Homo sapiens
agtcatgcttgattggttccccatcctctgggagaaaagtggcagggttgagggcctcacacatacatgtttgaagcactggtccctcaaggagtagtgcmtggtatctaagtaggcagctgtctgatagccataaacttcctttgacacctagtatgccatttacatcatgagtagtccagacagtaagatcctttcctt

SEQ ID NO: 209069 - DNA, 201 bp, Homo sapiens
ggaactaatggtccatatgatatattttagattaaccaagttttgaagtattgttgtatagcacccctatcctttgtcccatatcctctaccctcagtctwaatgaaactggagaagattcagggtgagtgaatagtgaattcatgcagtcaacttctgggtaagaggctgtcctccaaggatgtgctcagcttactggtt

SEQ ID NO: 209070 - DNA, 201 bp, Homo sapiens
tcaaagttttaaaaatggtggtggtgggatggaggtagcatctctgtcctaagtggtgagcatctaggccaggtgtccaagtcagtggggaagagaaaaaygtcttaggctttctggttgatgacattgggaatgtttaccttgggaaagaggagatttgcataagtaccttaaatgtcattctgattgagttttaggatg

SEQ ID NO: 209071 - DNA, 201 bp, Homo sapiens
gtcaacttctgggtaagaggctgtcctccaaggatgtgctcagcttactggttaggccagcccttagttgtgatttgactgttttttcattccacacttgsatttgcagttttgactgttttttcattccatacttgcacttgcagtgctgacaaatgacctaacgttgtgtggataaaggtgttgctaccttgcatgcag

SEQ ID NO: 209072 - DNA, 201 bp, Homo sapiens
atctctgtcctaagtggtgagcatctaggccaggtgtccaagtcagtggggaagagaaaaatgtcttaggctttctggttgatgacattgggaatgtttaycttgggaaagaggagatttgcataagtaccttaaatgtcattctgattgagttttaggatgagtcacagctggaaggaggaggcagaaaagaaagatctt

SEQ ID NO: 209073 - DNA, 201 bp, Homo sapiens
cttttccattttttggcagagtattactatttgcttcagagaacttagaaattcccatatcattcctgaattcaaacctgcacgttcagccatagagaatcagttcttataaggcagagcctgtcagtggttacacccccaattacaatacacacttccttgtggccccagcctcaacacagagtgtagctttttctatag

SEQ ID NO: 209074 - DNA, 201 bp, Homo sapiens
tagagccaagggaatctgagtaagaacctaggagggagaattatagtcaggtaggtctagaacacagctggaggtagatgacctctactcattaagtcctraaacaatgtagtattatctaacacagccatccctacagagggttaggaaagaagggtttacaattttgcaatcaactaaaagtgatcatgacatttccgt

SEQ ID NO: 209075 - DNA, 201 bp, Homo sapiens
aaattagcagagttaattgagaaaacgtaagctaacaatatgctctctataagaaactcacttcaaatataagaatatagacaagttaaagtaaaaggatggaaaaagatatacaaacactgatcagaagaaagcagaagtggctacattaacatcagataaagtagactctaaagcaaataaatttaaagagacagagaa

SEQ ID NO: 209076 - DNA, 201 bp, Homo sapiens
gacaacccctttttaacaattgataggacaactagacagagaacatcaaggatgtggaagaatgcaataataccatcaaccgacaggatctaattgacatktatagaaccctacactcaacaacagcagaatgcacattcttttcaagtgcctgtgggacctagaccataacctggactataaatcaaacgtcatctaatt

SEQ ID NO: 209077 - DNA, 201 bp, Homo sapiens
tgtggggatggaaatgttctctgtctttattgtatcaatgtcaatatttggttgtgatagtatattatagttttgcaagaagttactattgagataagttrggaaaaggatacaagtgttctctgtgtattatttctttcaagtgcttatgaacccacaattatctcaaaggaaaaaatatttaattaaacaaaaaaattc

SEQ ID NO: 209078 - DNA, 201 bp, Homo sapiens
gtaaggaagacaagtgactggaggaatatatcatgttcacagatggaaagactcaatattgtaaagttgtttattctttcctaggtgatatacagcaacakgcaattctaataaaaatttcaggattgtttttgtggaaactgaaaagctaattcttaatttatatagaaatgtaaagcacaaaaagccagccaacacaat

SEQ ID NO: 209079 - DNA, 201 bp, Homo sapiens
tcttaacttaaacaccaatgcccttggtagcctccctctgctttcacacagttctatctccttctctctcagcctcacttgagttcattatcacagctccygtcaaggactgaggacccaccagagcaagctggaggcaggttgctagtgcagctcagagtgtgcactccagagcctgataccggggctcagttccctccc

SEQ ID NO: 209080 - DNA, 201 bp, Homo sapiens
tcctatctttttcacacaagacacctccagcactaggtcaacatgcctaaatgaagatcacttatccaccagcaaattccagcctgaacagttcagattamtgccaagtaggctttccagatcaaaaattatcccttgaagctgctagtggagacctggccaacggccctggtagttcattaactgaattctagtcaacct

SEQ ID NO: 209081 - DNA, 201 bp, Homo sapiens
aaactgaggcttagcaagataaagtaatctgcccaacctcataaagtagtaagtagtagagacaaaagtaacaagtttagagtttgaatcctaagatcaayactctttctataacatcacaactgggaagtttaatttctctttcagataaggttggtagtctttttttttttttttttggaaaataatctcttacttgtt

SEQ ID NO: 209082 - DNA, 201 bp, Homo sapiens
ctacaaacacctctatgcaaataaactagaaaatctagaagaaatggataaattcctcaacacatacattctcccaagactaaaccaggaagaagttgaawctctgaatagaccaataacaggatccgaaattgtggcaataatcaatagcttaccaaccaaaaagagtccaggaccagatgaattcacagctgaattcta

SEQ ID NO: 209083 - DNA, 201 bp, Homo sapiens
acagtccactcgagtacacagacacagttcacagtatcagtttgatgagccagagtaacaaaatctaacctttgcttaatttacctggtacaggtgacaaygtgcccaaaaacacatcccccttgctgtggcccaatcttgtcagctttttccttcacctctctacacatcccaaatcatttgagaaatacacgagagttc

SEQ ID NO: 209084 - DNA, 201 bp, Homo sapiens
acctgcaggatcgtatagtaatttatacttccctcaggtggccatttttccccatcagagagagaatattggggccaggccatagtgcagaaaaaaatgasctgcctctttttcagggtttgtgggtcaaattggtcccaatggcttaggatgcatttcaagggtgagcctgttgatacctgagtgtttcccatctgaaag

SEQ ID NO: 209085 - DNA, 201 bp, Homo sapiens
atatagagggaaagttttgggtgcagttccatttgtgaacaagatgtatttttctgtaggttctctgaccccttctggggtcagagatcagaaacttggtragcacccaccaggacctacaaatctctgtgcactgtggaaaaaaaaaaaagcaaaagcagtctgattatcgtattgtacttcagctggcaacatgcttac

SEQ ID NO: 209086 - DNA, 201 bp, Homo sapiens
agtttcaatggagatttgggggtgcaatattaaaatctacttttcatcctcttcctcttctgtcttggagccaagggtaggtgggattaattagagtagcrcagatctgtagggacatgcaaactggaactcatcaatggtgccagtttaaaaggagaagatatgacaggcagagaagagcttccctagaaccctgaacta

SEQ ID NO: 209087 - DNA, 201 bp, Homo sapiens
aaggtggctggtggaacaaataaccatctggtgagcagggtgctgctcatcttgccacactgatggggaagagcaagtgccaatcaatgaggttaagctckcaatgacatgatctgacaggcacaatagaatttctctcctgttattttatactccatggtgggggttataaactccaagggagcataattttttcagaaa

SEQ ID NO: 209088 - DNA, 201 bp, Homo sapiens
  misc_feature (1)...(201): n = A,T,C or G
gtcttctttatgacagttgcaattctctacctgtagtcatactgcaggaaaggaatgtgcagctaaaagagttttccattaaagactgatgtcctggaagngagatctacaaatcacttggaaagttcctggcaccatcacctgggtctggccatttacaatgtgtctgtaaatcttgcacagggaaaggatgagagtgta

SEQ ID NO: 209089 - DNA, 201 bp, Homo sapiens
ttacatttgttatttgtacatatggttcagtactatctgtggtttcaggcatttactgggggtcttggaacgtatcccctgtggataaagagggactagcktgtgtgtgtgtgtgtgtgtgtgtgtgtgtgtgtgtgtgtttcaaggtgggaagattcaatattggttcattggttcatttaagttttatttattgagcat

SEQ ID NO: 209090 - DNA, 201 bp, Homo sapiens
catggatgccagaaggaagaagaatagcacatccatactgcaaaaagaaaataatgtcaaacaagaattctgtatctaacaaaactatccttcaaaaatgrgggcaaaataaggacatttttggataaacagagactgagcaaatgtattgctagcagccctgttttaaaagatgtaccaaaggaaggaaggccttccgga

SEQ ID NO: 209091 - DNA, 201 bp, Homo sapiens
ccgtgtctattaaaaacacaaaaaaattagccaggtgtggtggggggcacctgtagtcccagctactcaggaagttgaggcaggagaatggcgtgaacccrtaggcggagcttgcagtgagctgagattgctacactgcactccagcctgggtgacacagccagactccatctcaaaaaaaaaaaaaaaattccttttatt

SEQ ID NO: 209092 - DNA, 201 bp, Homo sapiens
aagaggagatttgcataagtaccttaaatgtcattctgattgagttttaggatgagtcacagctggaaggaggaggcagaaaagaaagatcttgacactcyagatgatgggccaaatgtagcaacatgaattgtgtggggatcaatgccagtatctttcctgaggttttacaaagccacctgcctgcatacagggagggga

SEQ ID NO: 209093 - DNA, 201 bp, Homo sapiens
actataagaaggatttcaaaagagaggattaaataaggtatggcattataatactgagcaaaggggaaccatgcttgttgaaattgaaagatcaattctargccctagaaattactgatcctatgtgggtggtgacattacccccactaagcaggctgattatagagattaaatgaggtgatctatgtacagaccttagct

SEQ ID NO: 209094 - DNA, 201 bp, Homo sapiens
cactgccttactgatattcttcaagtgagagggtttagcaattttacttcccttttctcctgccttctcctgagtgtggtgttgtctcttctctgttcttrccacttcctgtcctggtctaaactgttgccatcttgccaggactcctcctgcttgctctctccgtttctgtcccatttattcctggattctcctcctctt

SEQ ID NO: 209095 - DNA, 201 bp, Homo sapiens
gcccggcaaaaagtaggaaccataaacaataacagcagtgattattggcattgtcattgattttttatgctataggctacacatatttttgtgctcctacrctgtgccaggcccagtgttaggtacgagggatacgtaaaggaataaggctcacatggccccacacttggctgccttccattctagttaggggcaagagaa

SEQ ID NO: 209096 - DNA, 201 bp, Homo sapiens
atcatgctttcctgctatggattttaagaagaattattatcaagataagtgcattagtgcaaagtaaattatctctgatattagggcattatatttgtacwtataatactagcattcatactaccaaatggaggatttatgcagcactcacctggaagctgacgcaaagcaagcggggccagcgacacttctgctgatacc

SEQ ID NO: 209097 - DNA, 201 bp, Homo sapiens
cttccacttttaaggacctttgtgattacgctgggcccacctgggtaatccaagatactctccccaccttaaggtcagctgattagcatcataattctatscacaatctttattccattttgccatgtaaggtaagatattcccaggttccgggcattaggattttgacatccttggggagccatcattctgcctacacat

SEQ ID NO: 209098 - DNA, 201 bp, Homo sapiens
ccaagagggagttttttaaaataataaccaccatcatcttctgttctgagtttgcctgatgtctgtctttacatgtttttaccacagtagctttacctagygttgggtctggcaccaggaggacatcactaaatatttgttttaaaagctggtagtccaaagccagcatggagcactgcctaattcagtccataacccttg

SEQ ID NO: 209099 - DNA, 201 bp, Homo sapiens
ggtggaggttgcagtgagccgagattgtgccactgcactccagcctgggtgacagagtgagactccgtcaaaaaaaagcatgtgtatgtcttttctttacrcatgtaaccagatagtatctgagtgatgaaatgccttttgtagcagaaaaaaggactagggactatcctggatactctcaatagagccaagggaatctga

SEQ ID NO: 209100 - DNA, 201 bp, Homo sapiens
taggggtccaatttcgacacttagctgagggaaagaaactaaggtatcgcgagtactgtctattccaggcattttcctaggtatttcttatgtttactcawttaatctccatcaacaacccagagagaatggttgcattaacctcatttttaaaataagaaatttcaaggtacagagaaccaaaggaacttgcataacaaa

SEQ ID NO: 209101 - DNA, 201 bp, Homo sapiens
ataagaggttacagaggtaagatgactaacactaattttatggattcctcatctttccttagaaggtaaatatgccatacccagaaagtgctcatggaggyagatctactagtgatatttccttcaaaaatggaatggaaagatctctctgggattgaaggctttggtgtgaaaatcaagacaattcaatagagtaaaggg

SEQ ID NO: 209102 - DNA, 201 bp, Homo sapiens
tagaatcctaataaatgggattaatgccctcaaaagagagactccagagagttcccttgctctttccaccatgtaaagatgtaaggacacgtgaaagatgrccatctgcaaaccaggaagagagtcctcatcagacaccaaatctgctggccccttgatcttggacttccagcctccagaactgtgagaagtaaatgtttg

SEQ ID NO: 209103 - DNA, 201 bp, Homo sapiens
gggtgaggaaaagggacctggatgtagacttcctgactatccaaaggaacctacttctctttgctgttctcaagttcaggcgtccggagaaaggcagggarctaggggctctgggtgctagcgtagacgtggcccttagctgagtggcgcgagaggggaggaggttggaagagcgcgtctatgcgttccacctgaacctgc

SEQ ID NO: 209104 - DNA, 201 bp, Homo sapiens
acctaaacccactgcaatagacacacacacacactcacaatagctcaaatcacagtggttaagagcatgggctgtagagacagatcatgggttggcgccakgctctcatctatctgactttggttatattatttacctctattagcctcagtaaaatggagatgatactgtatagaggctgttgttagaataaaatgagac

SEQ ID NO: 209105 - DNA, 201 bp, Homo sapiens
ttccaaagaactaaagcaagccatgtttaaagaattaaagaaaagtggggtaacaagagatcaacaaatagattcttaataaggatattgaatttattttwaaaataccaggtgaaaattctgtagctgaagggtacaataatggtaatttaaaatttttcactagagagttcaacaacagatttgagagacaaggaatca

SEQ ID NO: 209106 - DNA, 201 bp, Homo sapiens
ggttctatcaggtgggcacaaaagtaattgcaccaacctaatgttttttagtttttctacagatgacataaatgctgatgtggttctgaacacacccctargcaacagaagcatcatttttcaagggccccaaagactcctccttctctgaaccatcacaagtattatgaattatccagagatctgtcttattgatggact

SEQ ID NO: 209107 - DNA, 201 bp, Homo sapiens
ctaaaaatatcaggaatccaattgcgtcttatcacatccatcattcaaatgtttcttcaccagagaatcctttcctggccttcctatgtaaaatatctcacacacacacacacacacacacacatgctcattccctttctctcaagatcgatttctctctctctctgcctctcctctcacccccagctagttttaccctat

SEQ ID NO: 209108 - DNA, 201 bp, Homo sapiens
cacgtgttgtctgtggatatatatataggtgttggagattgtgtattgtgtgtgtttctctgtggatattttttagtatgtgagaaggttgtgttgtgtgygatgtgtggtgagtgacctggtgagaagccagggtgtggctgaatgtaccactgtcaaggaggcggaatgatggaaggagggaggcctattagaaggcga

SEQ ID NO: 209109 - DNA, 201 bp, Homo sapiens
gagccatgcttagctgtttcatgggagggtgggctcatgctttgagcttgatctacaaggataaatcagagcttcaagggggcattaatgggtggtatgayagtgaagaaaggaggtctcagaagataaaaatagccttaagagacatctagaaatgggagagaagagtatggtattaagggatggcaggtgggttgatgt

SEQ ID NO: 209110 - DNA, 201 bp, Homo sapiens
  misc_feature (1)...(201): n = A,T,C or G
tctttatgacagttgcaattctctacctgtagtcatactgcaggaaaggaatgtgcagctaaaagagttttccattaaagactgatgtcctggaagggagntctacaaatcacttggaaagttcctggcaccatcacctgggtctggccatttacaatgtgtctgtaaatcttgcacagggaaaggatgagagtgtagggt

SEQ ID NO: 209111 - DNA, 201 bp, Homo sapiens
  misc_feature (1)...(201): n = A,T,C or G
gctaaaagagttttccattaaagactgatgtcctggaagggagatctacaaatcacttggaaagttcctggcaccatcacctgggtctggccatttacaangtgtctgtaaatcttgcacagggaaaggatgagagtgtagggtttttttccccactctgacagacttgtttctataagatattaaggatactggtgaaag

SEQ ID NO: 209112 - DNA, 201 bp, Homo sapiens
attactcaaagttaaaaatgagctccacagtactaagcttaaagttttactctaaacttttagcttgcctatgagcagtatttgacatggttggtcacttstctgaacttcacttggtttccaggacattacgtttctttgattttcttattatctcactggtcattctctttgtttttttccctggattttcttcttctg

SEQ ID NO: 209113 - DNA, 201 bp, Homo sapiens
taataatgacaagccagcatattgggtatgcccgttattattgccactccgtgctagtgggttcaggaaggattaccttcaaaacagagaacccaggctastactctctgaaccttattcatctatttggcatctacagctgagttgctgaatgtagctggagaaaaatattcaactatgcttgatgagccttatttgaca

SEQ ID NO: 209114 - DNA, 201 bp, Homo sapiens
atatattttgaggtcctggagaactaataccaagaaaacaccttccaggagtgaggttcggaggagggagagagactggctctgatggctccccaaactgaaaaaaaaaaaaaagtctcttggtaaaaccaaactatgtgatcctctcttctacagggaaatgctgtcataatgtggtatttatagggaaaattaaattgc

SEQ ID NO: 209115 - DNA, 201 bp, Homo sapiens
gttaaaagctattacactttgattgcaactatcattaggtaaagttatctgaataagcttgggtctccactgacaaatgaaagatgtaaatttctcacacrcttttaatgagtaattagtgcaaacctaccatttgctctgcaaagttcaaggttattttatttactaacatgactaaataaaagatcaatttcagttcaa

SEQ ID NO: 209116 - DNA, 201 bp, Homo sapiens
ttagcctgtgtagtgctggctcacaaaaagcactcaatgatgttagttcccttctgttgttttagtattaataacatcatcgtcatcatggctattattamcccctactgatagtgggcctatatatatgagacaattcagttatttttctttttatactttttatactgttgtatttattctacaaactactcactgaga

SEQ ID NO: 209117 - DNA, 201 bp, Homo sapiens
tgccataagattcaaacttttaaactatacaattcagtggtttttaattatattcagagttgcgtagctattgctccaaatttattttattttattttagytttattatttatttatttatttatttatttatttatttatttttgagacggagtctcgttctgtcgcctgggctggagtgctgtggcgcagtctcggctc

SEQ ID NO: 209118 - DNA, 201 bp, Homo sapiens
taattgtccaataaatttttattaaccttcttaagaaaaagtggtgcatatgacgcaaaacaaaagttaagaagagccattgtgtgtgtgcggatgtgatmatgggattcaggacaccaggtctcatgctcgtctgtcaccaaattaccaggtaacctgggcaagtcgcatcttttctctaggctttcatcatcagcaaaa

SEQ ID NO: 209119 - DNA, 201 bp, Homo sapiens
ttctgtgccattggatttaggaaactttacactaggcagtgaggaaccataagttagaaagatcatactgacttagtgaggagcgtggcttggaaggggtraagactgaaggcctgatgatcttaagaagttacatgagataataagaaaaatcatatatgctaagcagagagaggtggtgggagggacagagaggtgctc

SEQ ID NO: 209120 - DNA, 201 bp, Homo sapiens
cttaggtggtgggttgataggtgcagcaaatcaccatggcacatatttacctatgtaacaaacctgcacatcctgcacatatacactggaacttaattttwaaaaaaaaaaggcatgaggaactttaaacggggaatggaaatgttctatatcttaactgtgttggtggttactggttacatgggtataataattatcaaa

SEQ ID NO: 209121 - DNA, 201 bp, Homo sapiens
cctaaaaatatcaggaatccaattgcgtcttatcacatccatcattcaaatgtttcttcaccagagaatcctttcctggccttcctatgtaaaatatctcacacacacacacacacacacacacatgctcattccctttctctcaagatcgatttctctctctctctgcctctcctctcacccccagctagttttacccta

SEQ ID NO: 209122 - DNA, 201 bp, Homo sapiens
tttcctcaaacacatcactttgccaccagaaactggttacacttacttaaagtttgtctggggaaaaaagtgatcagtatacatctgaggttgtgtgtgtgtgtgtgtgtgtgtgtgtgtgtgtgtttatattgttggcaatcgtgtcaccctgtagtctgtgctagaaaaaaaatatggctgtgaacttcacattttatt

SEQ ID NO: 209123 - DNA, 201 bp, Homo sapiens
tgtattgatatctaactcacatgccataagattcaaacttttaaactatacaattcagtggtttttaattatattcagagttgcgtagctattgctccaawtttattttattttattttagttttattatttatttatttatttatttatttatttatttatttttgagacggagtctcgttctgtcgcctgggctggagt

SEQ ID NO: 209124 - DNA, 201 bp, Homo sapiens
ggataagctttttgaggtgctgctggattcgttttgccagtattttattgaggatttttgcatcaatgttctcttaaccaccatgttacctggcctcccawcagcaatggcttttaaccctctgagccatgggggctttatcctactttagagacttcttgaagcagaaaagaaccattagccaatccaaaacaaatcact

SEQ ID NO: 209125 - DNA, 201 bp, Homo sapiens
atactttataatattcttcaaaataccacaactcctagccagaaactagaaggagggagggagaaagagaaaaaatactaagtgattcatggtattataaytggcacgcttgtttctaatactttccattttatttgctaagacccttgaaaaaccatcgtaacataataataccttgtgaactattagcaacatatttat

SEQ ID NO: 209126 - DNA, 201 bp, Homo sapiens
tatattgtgaacaatttcacatcattaaggattctttttaattgcaataattttttagtgttctggcctatgtctaggataatttttgaattcttcattcytttttttttttttttttttttttgagacggaatctcactctgtcacccactctggagtgcagtggtgtgatcttggcttactgcaacctccgcctgcctg

SEQ ID NO: 209127 - DNA, 201 bp, Homo sapiens
attagcaacatatttattttgtttgacatcgggacctcatgttttaggaggaaaaaatcaaatccttgcctatcatattcttcattcatttctttaggccmacctacagtttaacaaaaatatgcattgtatttagtgttcaatttgtcctttagagaaataaaagagatttattgcatgcaaggatatggctgagatgtg

SEQ ID NO: 209128 - DNA, 201 bp, Homo sapiens
tgcgtgcctaccagaagctgatgaacatcaagctgaccctggacatcgagatcgccacctacaggaagctgctggaagatggagaacatgagtatccataygaagaccaccagcggctatgcaggtggtgtgagcttggcctatgggggcctcacaggctctggcctcagctacggcctgagctccagctctcgctctggc

SEQ ID NO: 209129 - DNA, 201 bp, Homo sapiens
ttggcgactctgtttcctctgatcagcctatgctttcagctctggagaacctccatgtaagtccaccttatcattctgggtggacttggcataaatccagscttgatgctctgaatgtgcaggggttttggaggctggaaagtagcgtagtgaagagtattattgttgagtcagtccagcctgggttagaattctggctcc

SEQ ID NO: 209130 - DNA, 201 bp, Homo sapiens
taaagaccaaaagtaagaagggagacagtgaagtagatgtgaggaaaataggttcttgccctatgtttgaaagccaaaatgggatggtcattgtatgcttrattagctcacttgtttatttgtttaataattcatttattgatacatctgcttattcagcagttactttttgaatatagactctgtgctgaccaccatgct

SEQ ID NO: 209131 - DNA, 201 bp, Homo sapiens
gagtatccaggaaaatcaaagaaagatttaattttgattaggattagtccaaggcttataagtccacagaattcaccaagcctacaaaatatacagttttctctcttgttttgcttatggatactaagatattttatttccttctgtggctgacattacctattacgacgggttgcagtgggaatgtttacaggtaggaga

SEQ ID NO: 209132 - DNA, 201 bp, Homo sapiens
ccttaccaaatgtatgatttgcaaatttttttcctattctgtgggttgtattttcactctcttgatagtgtcttttgatatacagaaatttttatttcggygaagtccaattttatatatttttgttattgttacctgtgcttttggtgtcatattaaaactattgccaagtctgacataatacacatttgccattatatt

SEQ ID NO: 209133 - DNA, 201 bp, Homo sapiens
agctgtaatatctctgctagatatagctttctcctctgcccccttgctcaaggaagtcttcttgatctacttcagcatttgatatctctctgcatatactrggtggttagttttccttttctcactgctctttgaccttgtttatcatgatcacaaatgggatgtatataaagaagaagaaagctaggagaagattcagcc

SEQ ID NO: 209134 - DNA, 201 bp, Homo sapiens
ctgtagctcccatgtactgaatacctccaatctgccaggtacaaatatgctccatcatttaattttccaagcaatcctaggaagtaggtatattccccatwatatagataaggaaaatgagtcttagaagtggcataacttgcctaagttgctgggaaagatgagaactgggaatcaaacccagctctatctgagtccaag

SEQ ID NO: 209135 - DNA, 201 bp, Homo sapiens
catattataattgtacagtttgataaaatgtacagtatacatattataattatacagtttgatgaaatttcagaggttgaactcacctataaccagcattracatccagaaacagaactttgctaacaattctcaagcccccatcatgcctctttatattaataatttctacccccaaggacgtatttgataaaacaaccc

SEQ ID NO: 209136 - DNA, 201 bp, Homo sapiens
agtagagacggggtttcaccatgttagccaggctgatttcgaactgccgacctcaggtcatccgcccgccttggcttcccaaagtgctgggattacagacdtgagcaaccacacctagcctagtaaccacttttaaatctcaattgttttatccacaaatggaattttatactgtctagttcgaagaatgatttggaggac

SEQ ID NO: 209137 - DNA, 201 bp, Homo sapiens
aaacgactgtaaaaatctcaatagacatgtcttgttttttcttttttttttttttgagaaaccatccttcataactgtctagggttttttttttttttctyttcctgcttacaaggagtcttaatgctgataacaaaaagaaggtaacataggtattagcaaccactgcattaatttatttcatttacttcttatgcccac

SEQ ID NO: 209138 - DNA, 201 bp, Homo sapiens
tcatgctgctataaagacacatgcacacatatatttattgcagcattattcacaatagcaaagacttggaaccaacccaaatgtccaagaatgatagactygattaagaaaatgtggcacatatacaccatggaatactatgcagccataaaaaacgatgagttcatgtcctttgtagtgacatggatgaaattggaaatc

SEQ ID NO: 209139 - DNA, 201 bp, Homo sapiens
gacttggaaccaacccaaatgtccaagaatgatagacttgattaagaaaatgtggcacatatacaccatggaatactatgcagccataaaaaacgatgagytcatgtcctttgtagtgacatggatgaaattggaaatcatcattctcagtaaactatcacaagaacaaaaaaccaaacaccgcatgttctcactcatagg

SEQ ID NO: 209140 - DNA, 201 bp, Homo sapiens
ctagctggaacaccagtgagaatttacattcactggacacgtgaggggatctttattataatatggtgagcaattaagcttttgcaagttaaaagtaatamcatgtggtatttgctaagcattctcctggatgtttagctatttccaagagactagtctctgcattccaaaaagagaaaggtggaatgagaatacataaaa

SEQ ID NO: 209141 - DNA, 201 bp, Homo sapiens
agaccagcctggccaacatggtgaaaccccgtctctactaaaaatacaaaaattagccaggcatggtggcaggtgcctgtaatcccggctactcagggaayaggagagagtaggcaggagaatcgcttgaacccaggaggcagaggttgcagtcagccgagatcacaccactgcactccagcctgggtgacagagtgagac

SEQ ID NO: 209142 - DNA, 201 bp, Homo sapiens
ttttgcagtttaattcactaaaggatttaagagtttagcttttagtccttaaagttgaatgattgggcagcaatcaatgtatatttatggtattagagagygttcctcaaattttgcatctctcaattcagtttatgtttttcaaaataaagatgagcatacaaaccaagaaccatgccttgtggggtcctcagctaaagg

SEQ ID NO: 209143 - DNA, 201 bp, Homo sapiens
ctttgttttctcacttctcacaaagatatctttggtaattacttatatttgtaagcccattttttagatgagcaaattcatgattaagatattaagtaacttatcaaaagttacacaactattaagaggcagagctatatcagtggctgccatgatacgcaaactggtttaattaattttctaaataaacgtttaattcag

SEQ ID NO: 209144 - DNA, 201 bp, Homo sapiens
gttttaatgtgatgtttgaaaaaaaaaaacattgaaaatgagaaaatcaaaaagtaaagaggcctagaatataaatagaatttcagtcattactggaactrtatgttggcctctatttctttcaatttttactaagcatagaacttccttgcatgtttctgccttggatgtagggctactttgaaagtgtgggctaagatg

SEQ ID NO: 209145 - DNA, 201 bp, Homo sapiens
cttacctgcatgggcagacagggcctccagaggacagctgcattccaaaaaagcctgaaataaagcattaggcaagtatctgcctacagggctgaacacayagtgtttttaacaacattttctgcaagttaggtgagagtttcttggctatagataggatttgaacttaccagcatataatccccagaagagcttggacta

SEQ ID NO: 209146 - DNA, 201 bp, Homo sapiens
tttgttttctcacttctcacaaagatatctttggtaattacttatatttgtaagcccattttttagatgagcaaattcatgattaagatattaagtaacttatcaaaagttacacaactattaagaggcagagctatatcagtggctgccatgatacgcaaactggtttaattaattttctaaataaacgtttaattcagt

SEQ ID NO: 209147 - DNA, 201 bp, Homo sapiens
aacattgagtcaagaccatctacccgcaaaaagattatgattcacagaaggctcagatgatcattagtattatttagcaaaaagtattttttacttcaggyatgtaccttgttgttttaaacataatgctattgtacacttaatagactacagtatagtataagcataactttatatacactgggaaaccaaaaaaatttg

SEQ ID NO: 209148 - DNA, 201 bp, Homo sapiens
ctactgattgcaggctactgtggtgaggataaattgccaaccaaagcagaaaggtctctgctctcttggaactaacttagcatctagtggcatagagagamagtaatccaataatcagaaaaataaatccataagtaccaactgtgatttattttaaaagtcaagaggctgggcaccgtggcttacccctgtaatcctagc

SEQ ID NO: 209149 - DNA, 201 bp, Homo sapiens
cctgtgcaggcagggtgtagagcccatgtcgctggttattacaggagcaactatgatgcagcttgcttttgccactaaatttaaatcagcaaatagactcaaaggaagagattgttcatcttttctgcccagccaccttttcagaaacccaaataattcctataatatagggattatttgtaataattgctataaccttca

SEQ ID NO: 209150 - DNA, 201 bp, Homo sapiens
aggaagaaagaaatgggcttaaaaaattaaacaacaaaatgtctacgggtttatttatcattttgtaagatctcaccaccacagggcatttcaaactgaayagcttctttgagagaaaaatcatcctggtgactgtttaggtgttcttttcaaatgattatgggaattatggcactttgattctttttgataaatacttag

SEQ ID NO: 209151 - DNA, 201 bp, Homo sapiens
gccacttggagcactaactcatcttcgaatttgggcttagctctggagaagttgttattgcaattataatttgttattaataaaatgtattaacgggattmtgataatagccagcatttattaagtggggattctgcaccaggcactgtgctaagcatttgtacatccctttcactctcatagcacccttattaagtaggt

SEQ ID NO: 209152 - DNA, 201 bp, Homo sapiens
cttcaggacagagggctgaatgcctggagtgctaaaatttcacatagtggcaattgttatgaaggaatagcagtgggggaggggtatgtaaattgcacacatgtgtacgtgtgtgtgtgtgtgtgtgtgtgtgtgtacataggtagaatgacttctttggatttattgagtaggaggggaagatgatgtatgaatgagaga

SEQ ID NO: 209153 - DNA, 201 bp, Homo sapiens
cccttagtgtctcagtaattgtttaacacacccctatgccaaaaaaaaaaaaaaatctaacaatttctttattacgtagctaggcccaaacagctgtatayatatgtatgttcaaaaaatttaggagtcttttgaaaaatatacatattgaaagaaaaaaaaatttaatttttaagtaaacaccaagaacttactagtaga

SEQ ID NO: 209154 - DNA, 201 bp, Homo sapiens
atgggaacacattcattttaaccaatgtcctgaagaagctctgggagaagagctgcttgagctgagcttcaggaaaatgcacatagatggcttaaaatacrtagttgtaataatccaccagctcgcttgtgcaaaaatgcagctttatttctagattttaacttctacatctgctgatggaaaaaaaaaatgtaatttagc

SEQ ID NO: 209155 - DNA, 201 bp, Homo sapiens
aatgtacaattcaatatgttttgacaagggcatacagtgttgtaaccactgccacagtcatgaggtagaacagtactgcccaatagacgtataaggtgagscaggtacataatttaaaagttttccagtggccacatttccaaaaagtagaagaaagatacatatattgagatatcactctgtgccccataaatatgatga

SEQ ID NO: 209156 - DNA, 201 bp, Homo sapiens
ttgttgtgggtagtagcaatattattattgctattattatttatattagatgagtcgtaataaaagcttgaactaggcagagtttgagagacattttgcaraacagttcataggatgtagttgtgtgggtgtgtgggtgaggaaataaaacaatgctgagatgacaatattttgctgtttgactactatagggactcagga

SEQ ID NO: 209157 - DNA, 201 bp, Homo sapiens
gtggactggctctctctgcaaatgagcaggatagtaccaagtatgtcagcatttaaagtcttttgaacactcattttcaaacctccttttccagctttttyttaaaaaaaaaaaaaaaaaaaaaaaaccaattaagttcgcagtgatgataaagaggaaccggaggagctatttagcataaattacccaaggcagcatgtt

SEQ ID NO: 209158 - DNA, 201 bp, Homo sapiens
ttttgtactctctttaaggggtcgatgtaagtatttacgaatgccactgtgggatgactcactccaaagggtgactgcagcatctgttaggatgcaaaaaraaaatattagaacttctatttatattgattttaaaattttgttctattttaatatttctatgtatgtattatgtatactatatgatagtacagaagttca

SEQ ID NO: 209159 - DNA, 201 bp, Homo sapiens
attaaatgaggtcatgcagttacaatgcttaagagcttgcctatgtttggccaagagctcagtagatgggagctgcttttgtggctgtcactgtaccacayagagaatccagaggcaggttcagccctggaacatctcgggttaaaccatgctttgtgtagaacagaggttccccaagtacctcagttcatatcacccttc

SEQ ID NO: 209160 - DNA, 201 bp, Homo sapiens
cctatgaggtaatatatgtaaagcacttaaaacaattcctggaaatgctcaataaatgttagctgttattactaccactactattactaccaccaccactrctactactgccgttattattgtctactattactaccaccaccactactactgctgctgctgctattgtcatgactcaaattcaatacaaaatcagtactt

SEQ ID NO: 209161 - DNA, 201 bp, Homo sapiens
ctatctgtgacaaacccacagccaatatcatactgaatgggcaaaaactggaagcattccctttgaaaactggcacaagacagggatgccctctctcaccrctcctattcaacatagtgttggaagttctggccagggcaatcaggcaggagaaggaaataaagggtattcaattaggaaaagaggaactcaaattgtcat

SEQ ID NO: 209162 - DNA, 201 bp, Homo sapiens
aaagcatagtgtggctactactggggatggtaagcaatgtgcttctaagcaatacatagacttttttttggtttttatatttatgtatttatttagtgaaygtcaaaaaacataaccatcatatcctacaatttcatagatattcaaaatctatttagattacaaagtaagtgtatgtaaagtattaagtaaatagtgaga

SEQ ID NO: 209163 - DNA, 201 bp, Homo sapiens
  misc_feature (1)...(201): n = A,T,C or G
tcaaaagaagttattgaaattcttattctcatactcagccctatgtggagtgacttacctttgacctttcaccgtaagttagaagcagaataaatgagtgntgatttcagctgcctcctcctttcttgtgataatgaatgagtcagcatcaaggacttttccaggaggcctgagtcataaatatccctacattccatcaaa

SEQ ID NO: 209164 - DNA, 201 bp, Homo sapiens
gcctacttcataaaaaataaagttgctaagacaagggagttaattttccaatattcacatgtgtattgtctacttaaaggcccatatctgattgcctgagyttaggagttcgagaccagcctgggcaacatggtgaaaccctgtctctactaaaatacaaaaaattagccaggtgtggcagcatgcgcctgtagtcccagc

SEQ ID NO: 209165 - DNA, 201 bp, Homo sapiens
agcctcaactcttggcttccaggttctagcactcattactaccatggacagcagcttccttttaattcagtgggattctgccaggcaggcttccaggggarctgtggggtctagtacaagtttctcccctgttgctgcttcagtggctttcaccctgcccaatacatatttaatatgacaccatgtgtctctttgtcagtc

SEQ ID NO: 209166 - DNA, 201 bp, Homo sapiens
tagaagatattgacagaaaagtacatggagtcagattatgctaggtttgggggacatgctaatgattttatactatattctttttaaaaatatgattttayacattttcttaaaaaagtaagaaacttctgaaagactataggtaacatgatcaaattgtacaatacaatgtaatgtattattaacagtaacatcatggag

SEQ ID NO: 209167 - DNA, 201 bp, Homo sapiens
aagaaagttgcagtcatttagtgatgtgtgctagagttgtgacaggtgtaacagcatgcaggcagcatcagatatccaccactccttgcctgcaggaaagrccacaagcctaaggatagatggcaagcggtgtttagagagttcactgaatgcttttacttgccgcaagttaatctgcgtggtttatatcaatagtactat

SEQ ID NO: 209168 - DNA, 201 bp, Homo sapiens
ttcaggacagagggctgaatgcctggagtgctaaaatttcacatagtggcaattgttatgaaggaatagcagtgggggaggggtatgtaaattgcacacatgtgtacgtgtgtgtgtgtgtgtgtgtgtgtgtgtacataggtagaatgacttctttggatttattgagtaggaggggaagatgatgtatgaatgagagag

SEQ ID NO: 209169 - DNA, 201 bp, Homo sapiens
cagagggctgaatgcctggagtgctaaaatttcacatagtggcaattgttatgaaggaatagcagtgggggaggggtatgtaaattgcacacatgtgtacgtgtgtgtgtgtgtgtgtgtgtgtgtgtacataggtagaatgacttctttggatttattgagtaggaggggaagatgatgtatgaatgagagagagctggg

SEQ ID NO: 209170 - DNA, 201 bp, Homo sapiens
agagggctgaatgcctggagtgctaaaatttcacatagtggcaattgttatgaaggaatagcagtgggggaggggtatgtaaattgcacacatgtgtacgtgtgtgtgtgtgtgtgtgtgtgtgtgtacataggtagaatgacttctttggatttattgagtaggaggggaagatgatgtatgaatgagagagagctgggc

SEQ ID NO: 209171 - DNA, 201 bp, Homo sapiens
aagtattgtaacattcaaactgtcaatattggttttaaattattgcatcattttctgaaataatgaatgtcatgaattgtaattaatttacatatgcactaagtccactttcaaagaaaccctcttttctctttcaaacattggaaattaaatatttatagttgttgtgatttcatatatacatagttaatattgcctctc

SEQ ID NO: 209172 - DNA, 201 bp, Homo sapiens
aagatgagcatacaaaccaagaaccatgccttgtggggtcctcagctaaaggcaaagtggagatcaagagaccgagtgagctgttttaatgtgatgtttgaaaaaaaaaaacattgaaaatgagaaaatcaaaaagtaaagaggcctagaatataaatagaatttcagtcattactggaactatatgttggcctctatttc

SEQ ID NO: 209173 - DNA, 201 bp, Homo sapiens
aaaaggaatggggagaggagaggaatagaaagaaatggtgactttgggggcaaggaagatgatgtctgtgtttgttgattctgagatgccagtggagtgtrcacatggtgaggtctttaggtaagtcaaacatgcaaccatacatcagttcatgtccttgctgtgctttcagctcttcagagattttttcatcacactttg

SEQ ID NO: 209174 - DNA, 201 bp, Homo sapiens
atctatggacctcctaaagcaattttagggatccctagaggtgctcataccacaatttgagaattagtgcattgaaaataattagaaataaactgattccwtgtagcaaaactttgttatgtgtagagaagaagtgtgctctgaattgggaagtatagattaggaccagatcttgggaggacgattatcagcttaaggagt

SEQ ID NO: 209175 - DNA, 201 bp, Homo sapiens
taacttagcatctagtggcatagagagacagtaatccaataatcagaaaaataaatccataagtaccaactgtgatttattttaaaagtcaagaggctggscaccgtggcttacccctgtaatcctagcactttgggaggctgaggtgggaggatcacaaggtcaggagttcaagaccagcctggccgatatggcgaaacc

SEQ ID NO: 209176 - DNA, 201 bp, Homo sapiens
ccgtggctcacgcctgtaatcccagcactttcagaggccgaggtggacagatcacaaggtcaagagatcaagacaatcctggccaacatggtgaaaccctrtctctgctaaaaatgcaaaaattaggcatggtggcacatgcctgtaatcccagctactcgggaggctgaggcaggagaattacttgaacccgggaggcgg

SEQ ID NO: 209177 - DNA, 201 bp, Homo sapiens
tgaggcaggagctttgcttgaactcaggaggcagagattgcagtgagctgagatcacactactgcactccaacttgggggacaaaacaagactccatctcaaaaaaaaaagacaagaaagtgtctaacagacaatctgatctgggccctaaggaaatgatgattgaactatgatataaaagatgaggcagagttaactata

SEQ ID NO: 209178 - DNA, 201 bp, Homo sapiens
ttaattccatgttttttttttcttattctctatgttttccttctttgtatagcatccggttcttgaattgtaggtttattctccttttaaatgtttctgcrcatacaaattaggatttatttatttatttctggccctaaaagtatccctgttgtctccagtatatgtttttatatttgtttatcttgttcttttttcccc

SEQ ID NO: 209179 - DNA, 201 bp, Homo sapiens
agttagtcttggcaattctagtagagatgcaatggtatttcattgcggttttaactttcatttccttaatgactaataatgttgagcatattttcaggtgyttatttgccactcatatatatcctttggtaaaatttctgttcagatattttgcccccatttttatcaggttgtcttttaattattgatttgtaaaagttg

SEQ ID NO: 209180 - DNA, 201 bp, Homo sapiens
gctttgcttgaactcaggaggcagagattgcagtgagctgagatcacactactgcactccaacttgggggacaaaacaagactccatctcaaaaaaaaaagacaagaaagtgtctaacagacaatctgatctgggccctaaggaaatgatgattgaactatgatataaaagatgaggcagagttaactatatgaaaaggga

SEQ ID NO: 209181 - DNA, 201 bp, Homo sapiens
aaatgtttctgcacatacaaattaggatttatttatttatttctggccctaaaagtatccctgttgtctccagtatatgtttttatatttgtttatcttgktcttttttcccctcacagtgtaggtttcactcaattgagtagatgatcttccattgccaagtcatatgtgagaatgaatcagtagaactgtcaaatgaat

SEQ ID NO: 209182 - DNA, 201 bp, Homo sapiens
caaagacaatccaacctggagatgatgaagcccaggttctagccccaatatgtctgactcctaagttcattccatgtaccatcctgagagatgtagtttargaaagaaatttgcagtttaagcagaaatctcatcttccagcccttctacatgatctcatggtgctaccagtcctaggggcccactgtcccacaaaaatgc

SEQ ID NO: 209183 - DNA, 201 bp, Homo sapiens
tttgcttgaactcaggaggcagagattgcagtgagctgagatcacactactgcactccaacttgggggacaaaacaagactccatctcaaaaaaaaaagacaagaaagtgtctaacagacaatctgatctgggccctaaggaaatgatgattgaactatgatataaaagatgaggcagagttaactatatgaaaagggatg

SEQ ID NO: 209184 - DNA, 201 bp, Homo sapiens
tttctggccctaaaagtatccctgttgtctccagtatatgtttttatatttgtttatcttgttcttttttcccctcacagtgtaggtttcactcaattgastagatgatcttccattgccaagtcatatgtgagaatgaatcagtagaactgtcaaatgaatatgaataggacttaccaactggtgggtttcattatacag

SEQ ID NO: 209185 - DNA, 201 bp, Homo sapiens
ggtgaccaaaaaccaaatactctatgtttacaaagtgggagaaaacacactaaaattaataaataaatccatataaaattatatttaaaagaaattgataygattgcacatatttataaggtacagtgtgatgttttgatatgtgtatattgtgtaatgatatcaaaccaagatgattagcatatccattacctcatatat

SEQ ID NO: 209186 - DNA, 201 bp, Homo sapiens
caggggggatgttcaggtatacctgtccttagccctttctccaacttggtgatgaccaggcagcacagagatgctgttgtagactttgcccttctgtggayattaattccactttctttggctcctgggtacatgaaattttccataataggaatataagctgaactttgggaacgctcatatgggaacacattcatttta

SEQ ID NO: 209187 - DNA, 201 bp, Homo sapiens
ttttaaagagatcttgggaaaaggagatgacaaatatatgctcagttcatcattgaccttaattttctttttctgcttgttctaaatcaaggaggatcatyaccttcttaagaggctaagccagcatttcttagctggtccacttctatatcctggaactttagttttaaagtacaaaagccatctttttttgacagtctg

SEQ ID NO: 209188 - DNA, 201 bp, Homo sapiens
cttggccatgattcaaaatcatttgaactttttaaacaatagagactctgaggtctccaagagctactaagttagagtttcaagggtcagggtgatacaattttttttttttttttttttgagacggagtctcgctctgccacccaggctggagtgcagtggcatgatctcggctcactgcaagctctgcctcctgggttc

SEQ ID NO: 209189 - DNA, 201 bp, Homo sapiens
taatctgaaatgtgaaggataaagagatattaactgtgggtgaatgaagaagaaacactctggagatgcaaaggcttttcaggtggagcatacatggagcyttcggggagttgaaaggaggacaatgtattttgacatagaggacaaaggcaggaggatgtgtgaaaggaagctctaaattccttctcttgtaatacccca

SEQ ID NO: 209190 - DNA, 201 bp, Homo sapiens
tctcattgttcaattcccacctatgagtgagaatatgcggtgtttggttttttgttcttgcgatagtttactgagaatgatgatttccaatttcatccacrtccctacaaaggacatgaactcatcattttttatggctgcatagtattccatggtgtatatgtgccacattttcttaatccagtctatcattcttggaca

SEQ ID NO: 209191 - DNA, 201 bp, Homo sapiens
acttcaccccacagatcttagcctaaatgatagaaaatggagccctacttgccttgctcttcccgctcctgaatacagggtgaagggctggcaatgaaaaraattcccatttcaggcagaaggaatcctgtctttttggacagaagctttctaaatcaacaactcaagaggatttttaattaggcaccaatttgtaatcag

SEQ ID NO: 209192 - DNA, 201 bp, Homo sapiens
aagatcatgattaaggtatagccctggccccaaagagcttacaggagagaaaaagatgtcaagatgctatgcgccctagaggaagagcactatccttgacstacatttaggaagctcatgaattagcagagtgaggaggagaatgaagagaatttcaagaagtagaaaaagtgtgtacaaaggtccagaggcaggctaggt

SEQ ID NO: 209193 - DNA, 201 bp, Homo sapiens
tccctacaaaggacatgaactcatcattttttatggctgcatagtattccatggtgtatatgtgccacattttcttaatccagtctatcattcttggacayttgggttggttccaagtctttgctattgtgaatagtgctgcaataaacatacgtgtgcatgtgtctttatagcagcatgatttatagtcctttgggtata

SEQ ID NO: 209194 - DNA, 201 bp, Homo sapiens
tagcctaaatgatagaaaatggagccctacttgccttgctcttcccgctcctgaatacagggtgaagggctggcaatgaaaagaattcccatttcaggcaraaggaatcctgtctttttggacagaagctttctaaatcaacaactcaagaggatttttaattaggcaccaatttgtaatcagataatctctcactttaaa

SEQ ID NO: 209195 - DNA, 201 bp, Homo sapiens
ataaaacaagcagaatgcctgagtgcaggccagcatttgacaaaatgtttctgcagaacttaggtattgtataaaatgtaaatatgcacaaattaatatgraaaattctgatttgaacaaagttaaattaacttttttattgcaggatttctcagaagttttacatgtgcattggaaacctacaacagagggctatagcat

SEQ ID NO: 209196 - DNA, 201 bp, Homo sapiens
gctggaatgcagtgatgcaatctcagttcactgcaacctccgcttccctggttcaagagactctcctgcctcagcctcctgagtatctgggattacaggcwcctgccaccacacccggctaatttttgtacttttagtagacacggggttttgccatgctggccaggctggtctcaaactcctcaggtgatccacctgcct

SEQ ID NO: 209197 - DNA, 201 bp, Homo sapiens
gaaaggacacagaggcatgtgaatggcatgactgacagtctggaaagtgtcactctgctaatgacggtaatcgctccatgagtcttcccatccttcaaggmagagcatgtgatgtgtagtgtcttaagacccactcttagaagggtcctgtgcttggtttaatgctctgttgttgctgtcttaaaattccaaatactttaa

SEQ ID NO: 209198 - DNA, 201 bp, Homo sapiens
gatacacaggacttttctacttttaacatatatgggtcatatacatcttataacccataggacataactagaatcagtcttataatcccacattgcagacaaaaagttagtttagatattatagatagtagacctaattttcttcatagatatgaggagattaaggcagctagagataagttttaaattgtccaatgtctt

SEQ ID NO: 209199 - DNA, 201 bp, Homo sapiens
atacacaggacttttctacttttaacatatatgggtcatatacatcttataacccataggacataactagaatcagtcttataatcccacattgcagacaaaaagttagtttagatattatagatagtagacctaattttcttcatagatatgaggagattaaggcagctagagataagttttaaattgtccaatgtctta

SEQ ID NO: 209200 - DNA, 201 bp, Homo sapiens
aagcagccttcctgtccaggggcagtctgactttttcatgctgagggggaaatggcataagcactttagaccttaaaatctgagatgttaggccaggtgcrgtggcttacacctataatcccagaactttaggaggctgaggcgggcagatcactttaagtcaggagttcgagaccagcctggccaacaaggtgaaaccct

SEQ ID NO: 209201 - DNA, 201 bp, Homo sapiens
ggtatacctagaatcctttgaactctttttgcaggactaagaatgaactgacctgagttcttaccttgtccaacatgggatctattaaataggcccatatygagtaaaaataaagactagccctcaacgatgataaattgagcacctagtttgtgccaggcatgaaaatgggaaaaaacaaatttgccgctttcagagtaa

SEQ ID NO: 209202 - DNA, 201 bp, Homo sapiens
ggctacaatctgaaagatgaggagggccggctccgggatcctgccaccatcacaaccctgcgggtgagtgcaaacagctgccctggccaccacagtcaggrgcaggtctcctaaggttggccatgtgctggttgttactgtaggttgcaactataatgggccagtgagggaacgtaggcagagactcagcctaccccagtc

SEQ ID NO: 209203 - DNA, 201 bp, Homo sapiens
atgcttattgttttctttgtttaatatgtattcattgtagagatttggggaaaataaaatgaccaaaaatcttactaccaattttgctgtctatacattgkattcgcatcacagttttaacttaatgctagctaattcaacaatgtgggttcagggggaaataaaagaaattttaaaagccaaagccaaaaacaatttaaa

SEQ ID NO: 209204 - DNA, 201 bp, Homo sapiens
gtgtctcatcatcaagcaatatgtcctttcagctaataagatctttatgtttcataatcattgcttaatatccaaagattaaatttagaccatggaaaggraaaaagatctcaaagcaactcatgtccctaaaaggaaatcacactcatcaaacaaatacgctgtgttcacacaaagatattactattttctaccttcagt

SEQ ID NO: 209205 - DNA, 201 bp, Homo sapiens
gattaggaaggagtttccacgatgcatctggagggtagatgggctttcatgttgggcatctcatttgatgctcccaaggatcctttgaggcatacaggatrtgcattgccatttctttctttctagtggtgtggatgtgattatcccatttataaaagagggtaactggctctgaggggccaggtatctaatcaggatcac

SEQ ID NO: 209206 - DNA, 201 bp, Homo sapiens
agaatttgatcttttcagggagagcagaggataatttcctgagcaattaatatttaaaccacagcaggaggaaagtaagaagaggagcagaaagaatgttytaggcagaggcggtgacatgcacaaagcccatcaggtaggaggtagcacagaaaaacacagtgtggaaggagggcccaggtggctgaagctgagtgcagg

SEQ ID NO: 209207 - DNA, 201 bp, Homo sapiens
cctccagcaggtaaaaatccaaataatcccttatcaggcttgtgtcccaaattctgcttcaaaaaaaaaaaaaaaaatcttagagcacataaaaattctgrttctggaaaatgcagtcaccaaagtggtaggtaaattaagagagcacaagcctaaagccagaagagatggggctgccctctcagattagctgggggtctt

SEQ ID NO: 209208 - DNA, 201 bp, Homo sapiens
ctgaggattaacctatggaactttgaaataaccaatcaaagttttagtatcctttctttgtgatcaagaatcaactggcctgaattaagagtattcaggtrcgagtgggctgggagaaaatatggaatagaaatgcaacacctagcatttgcggagaacttgccccttttaaaatacactggcacctatgagactctttaa

SEQ ID NO: 209209 - DNA, 201 bp, Homo sapiens
ttgtcttcagaactcagtgtatattttactcttacagcacattgaattcagactggtgtcatttcaagtgagcaatagtggcccgtggttagtggctactstgttgcacagtacaggtctggagctcccaaagttagtcaaaaatagtttagatttacacttgctggaggaattctttttcaaaacaagttaatcaacatt

SEQ ID NO: 209210 - DNA, 201 bp, Homo sapiens
atttaaaatcatgaaaatcgatgaaatcaccaaaggaataagtgcaaaggttcagaagaaaaactgtcacaggagctgagcttgaggcacaagtaaaaaargacatgttcctcaggaaaccaaccccaagccttgactgatatgtggaagcacagcagatagtgcgatgaattatacatttcagctttggggacttgaagg

SEQ ID NO: 209211 - DNA, 201 bp, Homo sapiens
cctagaccacaaggaggaccaaggaaggttggatttagtggcccttactgatgcattctcgaaaacctgcacccttgcctgtcctcctagaccacaaagargaccgagaaaaatcggatttagtggcccttactgacacattctcaaaaacctgttagagtcctaagcattctcctgttagtattgggactttatccattt

SEQ ID NO: 209212 - DNA, 201 bp, Homo sapiens
aggcaggagaatcacttgaacccaggaggcagaggttgcggtgagccgagatcacgccattgcactccagcctgggcaacaagagtgaaactctgtctccwaataaataaataaataaataaataaataaataaatggaaaatggtacaagaagcaggtgaaattaattttaataatatattttctttaacttaatatatt

SEQ ID NO: 209213 - DNA, 201 bp, Homo sapiens
taatcaaaaggcccaaatgtgccaagattgcaatttaaagaaaacacattaaaatggagtcaagattaaccctgtaatgtcatttactttcttacaacctyatgggctgaatgggagagaaaagggtttagttacagcaagaatgttgataaattcaattaactatgagtactgaagctaaaagtactgcttattaccatg

SEQ ID NO: 209214 - DNA, 201 bp, Homo sapiens
acaagaagcaggtgaaattaattttaataatatattttctttaacttaatatattcaaatattatcactttgttatggaatcaatataagaatatattaasgagctactttatgtcttttttcacatccattctttcaagtctattgtgtattttacacttccaacatatctcaactcagacaatatatcttcactagaaa

SEQ ID NO: 209215 - DNA, 201 bp, Homo sapiens
tgtaattttagataataaaaatattcaccacttacagttctagcttatgctaatagacccacagtcatcagagatgctgagactaagcaacagacttgggrctcagaaaagtaacactattgattgcactgccttttgaaaatgaaacttgcaatgaaagactctaacttacaccccagaacttggaaggaggagcaatta

SEQ ID NO: 209216 - DNA, 201 bp, Homo sapiens
ccttagttttccacctcactgtttcccctttgctttccttacctagacattatcttcagaatgttcctgtcaaaggccatagtcataattcccctgcctctttttttttttttttttttaactcatttgcactcttggtagcaattgttggagccctgcaggggaataattgtgggggaattaacctctgacatttttcta

SEQ ID NO: 209217 - DNA, 201 bp, Homo sapiens
tgcgcctggcctttcctactttttaagagatttccttgaccagtatattttaaccttctaataatttaaaaataaatttgccatattttttaattccatgttttttttttcttattctctatgttttccttctttgtatagcatccggttcttgaattgtaggtttattctccttttaaatgtttctgcacatacaaatta

SEQ ID NO: 209218 - DNA, 201 bp, Homo sapiens
gtgcaatctccgcctaccaggttcaagcaattctcctgcctcagcctctggaggagctgggattacaggcacacaccactgcacccagctaatgtttgtattttttttttttttttttttagtagagacggggttttgccttgttggccaggctggcttcgaactgctgacctcaggtggaaactgccccttttatagggt

SEQ ID NO: 209219 - DNA, 201 bp, Homo sapiens
gactggctctctctgcaaatgagcaggatagtaccaagtatgtcagcatttaaagtcttttgaacactcattttcaaacctccttttccagctttttcttaaaaaaaaaaaaaaaaaaaaaaaaccaattaagttcgcagtgatgataaagaggaaccggaggagctatttagcataaattacccaaggcagcatgttgcc

SEQ ID NO: 209220 - DNA, 201 bp, Homo sapiens
gcctgtaataccagaattttgggagatcgaggcaggtggatcacttgagccctggagtttaagaccagcctgggcaacatgggaagaccccgtttctactaaaaatcacaaaaattagctgggtgtggtggcgcacgcctgtggtcccagctactcaggaggctgaggtgggaggatttcttgaacctatgaggtcaaggc

SEQ ID NO: 209221 - DNA, 201 bp, Homo sapiens
aatatttctatgtatgtattatgtatactatatgatagtacagaagttcatgtgtataattatatgtgtgtgtatatatatatatatatatatatatatatttttttttttttttttttttttcagaggtgctagtgactatcatggccctgccctcatcctcatggccctgccctcatcccacccccaatgactgctgga

SEQ ID NO: 209222 - DNA, 201 bp, Homo sapiens
gtggattatgtgccatgcattgctttaggcatttcattccatttttacaactactctacaagtggatcctattataatctttgtttcacaaatgagattaraacacaacatgattaagaaacttgcccacagtaaagatttgacctcaagtagcctggttctcaaaaatcatgcctttaaccatttgcctattacacttta

SEQ ID NO: 209223 - DNA, 201 bp, Homo sapiens
gtaataccagaattttgggagatcgaggcaggtggatcacttgagccctggagtttaagaccagcctgggcaacatgggaagaccccgtttctactaaaawtcacaaaaattagctgggtgtggtggcgcacgcctgtggtcccagctactcaggaggctgaggtgggaggatttcttgaacctatgaggtcaaggcttca

SEQ ID NO: 209224 - DNA, 201 bp, Homo sapiens
ggactagagtcacctcagtgtcctcttccagctgcataagacaaaccttacaggattcgaatccttaatgcaaaagaaagggcagtgggaactaggacccrtgtgtggctgctggggagccttaactaggaagagtagatttaggacaaagctagttttagaacacagccagctagcttttacgtgaagtaatttaaagat

SEQ ID NO: 209225 - DNA, 201 bp, Homo sapiens
ctgttgctgttttcctggggagagaaatcattaaattctcaaaaggatctatgatcctaaaatgttaaagtcatggctcagggcctatgctacttttcaawtgtaaatttataaacttgggttttcatcctttgttcagtccttgtagggctgtcagataccaaatggaaattgcaaaggtctctatttgtgggatgttta

SEQ ID NO: 209226 - DNA, 201 bp, Homo sapiens
ctgaatgtcatggtcctgagtactctgggcagttgtaacacaatgataagcatttgtgtatccaaacatatctaaacatagaaaaggtccaggaaaaatayggtattataatcttacggggacaccttcatatttgcagtccacagttgactgaaatgtcattatggcacatgactgtattatcatcatctattaaaatca

SEQ ID NO: 209227 - DNA, 201 bp, Homo sapiens
atatttctatgtatgtattatgtatactatatgatagtacagaagttcatgtgtataattatatgtgtgtgtatatatatatatatatatatatatatatwtttttttttttttttttttttcagaggtgctagtgactatcatggccctgccctcatcctcatggccctgccctcatcccacccccaatgactgctggaa

SEQ ID NO: 209228 - DNA, 201 bp, Homo sapiens
aaagagagtgtggcaaaccatgatggtgtaggtgaaggataatagaactggttaaagataatagaactgagcataaaggcttccaacctgacctctacagycgtggctcaggaggactgatacagctcctcctgcagcacttccctggcccatcacagggcttaaaagcagaggcaagggagaaaagaggaactgtgttac

SEQ ID NO: 209229 - DNA, 201 bp, Homo sapiens
taataccagaattttgggagatcgaggcaggtggatcacttgagccctggagtttaagaccagcctgggcaacatgggaagaccccgtttctactaaaaawcacaaaaattagctgggtgtggtggcgcacgcctgtggtcccagctactcaggaggctgaggtgggaggatttcttgaacctatgaggtcaaggcttcag

SEQ ID NO: 209230 - DNA, 201 bp, Homo sapiens
tttcagtagcgacggggtttcgtcttgttggctgggctggtcttgaactcctggcctcaggtggtctgcccacctcggcctcccaaacgtgctgggaggcrtgagccactgtgcccagccccaccgtagatttttaaagtaattttccaaattacttaatgttaagattgtaggttgctctgtccaacctaaacctcccta

SEQ ID NO: 209231 - DNA, 201 bp, Homo sapiens
cacattcccctttctttctctctctccttttctgcctcccttccttccccctctgtttctctctgtctctcctctcttctttctttttccttctttcttctcctgtttcctctcccttctctctctcacccttcaattaagttcaagcattttacatattgaaataaccaagaaaagtacagaaaccaaggtggtcaccat

SEQ ID NO: 209232 - DNA, 201 bp, Homo sapiens
gtttcctcaaacacatcactttgccaccagaaactggttacacttacttaaagtttgtctggggaaaaaagtgatcagtatacatctgaggttgtgtgtgkgtgtgtgtgtgtgtgtgtgtgtgtgtttatattgttggcaatcgtgtcaccctgtagtctgtgctagaaaaaaaatatggctgtgaacttcacattttat

SEQ ID NO: 209233 - DNA, 201 bp, Homo sapiens
tttactttaagttctgggatacatgtgctgaatgtgcaggtttgttaaataagtatacttgtgccatggcggtttgctgcacctatcaacctgtcttctargttttaagccccgcatgcattaggtatttgtcctaatgctctccccacctttcctcccacccactgacagcctctggtatgtgatgttgccctccctgtg

SEQ ID NO: 209234 - DNA, 201 bp, Homo sapiens
aaaatcgtttctctctccctggaaattatgttctactgctgtaataaccaaaaccaaataaatatatacagtctagttgcaatatagggatagagagtgaygggcagagatggaggtgctaatttattttatacagagtagtcaaggaaggtatcccagtgaagttgatactggaacagacaccagaagaagtaaagcact

SEQ ID NO: 209235 - DNA, 201 bp, Homo sapiens
acattcccctttctttctctctctccttttctgcctcccttccttccccctctgtttctctctgtctctcctctcttctttctttttccttctttcttctcctgtttcctctcccttctctctctcacccttcaattaagttcaagcattttacatattgaaataaccaagaaaagtacagaaaccaaggtggtcaccata

SEQ ID NO: 209236 - DNA, 201 bp, Homo sapiens
agccgagatcactccaccgcactctaccctgggcgacagagcaagactccatctcaaaaaaaaaaaaaactcaaggatttattaactactttgttggcggrgggatgggaaaaaatcagtgaaatgcaatgaagattaattatatagcataatattctgttaattgagtttttaaatagttttttgattaacaaggatatt

SEQ ID NO: 209237 - DNA, 201 bp, Homo sapiens
tagaaccatcctaattagaaaacttggcttgtcttcccaacttctccttgtcattgtttttgtttgtttgttttgttttgtttgctttttttgtgtgcgcgtgtgttttttttttttaatgcaggaaggccataggttttgaatcttagctctgttacatgtcaaatgagagatattgagaacttatttaacctctctgag

SEQ ID NO: 209238 - DNA, 201 bp, Homo sapiens
acacaaaagaaaactacgcataaccattgctaatattttgatatattccttttagcatatgcacattttttaaccaaaaaattgtagcagttggcttattytggtttatgattttttgaacatcatgaacatctatctttgtcactacttttaagcgtttctgcactgctataccttaaggatatagcatactccatactc

SEQ ID NO: 209239 - DNA, 201 bp, Homo sapiens
agattcaaacttttaaactatacaattcagtggtttttaattatattcagagttgcgtagctattgctccaaatttattttattttattttagttttattatttatttatttatttatttatttatttatttatttttgagacggagtctcgttctgtcgcctgggctggagtgctgtggcgcagtctcggctcactgcaa

SEQ ID NO: 209240 - DNA, 201 bp, Homo sapiens
cattcccctttctttctctctctccttttctgcctcccttccttccccctctgtttctctctgtctctcctctcttctttctttttccttctttcttctcctgtttcctctcccttctctctctcacccttcaattaagttcaagcattttacatattgaaataaccaagaaaagtacagaaaccaaggtggtcaccatac

SEQ ID NO: 209241 - DNA, 201 bp, Homo sapiens
agaaccatcctaattagaaaacttggcttgtcttcccaacttctccttgtcattgtttttgtttgtttgttttgttttgtttgctttttttgtgtgcgcgtgtgttttttttttttaatgcaggaaggccataggttttgaatcttagctctgttacatgtcaaatgagagatattgagaacttatttaacctctctgagg

SEQ ID NO: 209242 - DNA, 201 bp, Homo sapiens
caaacttttaaactatacaattcagtggtttttaattatattcagagttgcgtagctattgctccaaatttattttattttattttagttttattatttatttatttatttatttatttatttatttatttttgagacggagtctcgttctgtcgcctgggctggagtgctgtggcgcagtctcggctcactgcaagctcc

SEQ ID NO: 209243 - DNA, 201 bp, Homo sapiens
tcatctcattttaaacactgatctcatgagcctgtatcttccttcacccgctgccccatcacctgctcctcttttcagaaaaatgccttgaaagtgtcatccacactcactgtcaccacctctcctctgatttgcactttctatcatgccaccaaaattgctcttgtgagagtcaacaatgaccaccacattgcagagtcc

SEQ ID NO: 209244 - DNA, 201 bp, Homo sapiens
gtttttaattatattcagagttgcgtagctattgctccaaatttattttattttattttagttttattatttatttatttatttatttatttatttatttrtttttgagacggagtctcgttctgtcgcctgggctggagtgctgtggcgcagtctcggctcactgcaagctccgcctcctgggttcacaccgttctcctg

SEQ ID NO: 209245 - DNA, 201 bp, Homo sapiens
ttccttgagagtgggcatgaccgaacattcctacgttgttaggtctaggagccctataaaagcaattactcacaagtctaccatggcaatttcataaccarcctggaaaggatcagacaacgacatcaattttcctctgatggatatgggaaaccctcagggaaaggtaggattttaagagttatttaacattatggcaga

SEQ ID NO: 209246 - DNA, 201 bp, Homo sapiens
acaaagctagcatttattgtaggctcattacttaccaggccctgtgctaagtacttcacagttactatctctcaaaaatattatgagataagtactattcrttttccccattttcattttttacaggtgagcagataagacacagaaaggctgagtaacctattgaaaaccacccagccaaaatgtgatagatcagggtat

SEQ ID NO: 209247 - DNA, 201 bp, Homo sapiens
gagtctcgttctgtcgcctgggctggagtgctgtggcgcagtctcggctcactgcaagctccgcctcctgggttcacaccgttctcctgcctcagcttccbgagtaactgggactacaggggcccgccaccatgcccggctaatttttttgtattttcagtagagacggggtttcaccctgttagccagggtggtctcgat

SEQ ID NO: 209248 - DNA, 201 bp, Homo sapiens
tgaaggctggctctgagccaaacctggactaagcactttccttacctctgaagccacccaacaaccctgtgaagtagcaactattgttttcttccattttkcaaatatagaggttcagagatgttaaactactcaccaaaggtcatgaaatttataaatgcctgagctgggacacaaaccaggactgtctgacacctaaag

SEQ ID NO: 209249 - DNA, 201 bp, Homo sapiens
gtggcgcagtctcggctcactgcaagctccgcctcctgggttcacaccgttctcctgcctcagcttccggagtaactgggactacaggggcccgccaccaygcccggctaatttttttgtattttcagtagagacggggtttcaccctgttagccagggtggtctcgatctcctgacctcgtgatccgcccgcctcggcct

SEQ ID NO: 209250 - DNA, 201 bp, Homo sapiens
ctcatagtaatagcaatgtattttttccacgtattatctcatttaatccttgtaataactctatgaaacaaatactattcattttcctaatttatagatamgaaaatgatgctttagggagatcttgtaacttgcttgaggacagaaaaataagtgacagaaaatgatatcggagccttggcacttaacattgcactatag

SEQ ID NO: 209251 - DNA, 201 bp, Homo sapiens
cccgagtctgggtggcttaaacaacagtagtttattttctcacagttctggaggctgaaagtatcagatccaggtcccagcaggctggtttctcctagggyctctctccttggcttgctgacgaccgtcttctcaactgagtcctcacgtggtcttttctctgcgtttctcttcttgcaaaaacaccaccagtcctgctag

SEQ ID NO: 209252 - DNA, 201 bp, Homo sapiens
cttggtctttgaggttgtttatcttcctaagatttttcttaactatttttctctttccattctctcctatttcaaactaaactccttggcagatgtaaatractttctactttgcatgtaattttgtttcttggataacagaataaataggtcaagctaagccccaagattaaatggtcaagcaaagtcagtctttctgat

SEQ ID NO: 209253 - DNA, 201 bp, Homo sapiens
aaacaaaaccctcaggctgaagacccaggaaaaaccagtgtttccattcaattccagaagcaaggggggaaaaatacaatgttccagctcgaaggcagtcyggcagaggagttctctttcccttgcaggagggtcagcgtttttattctcttcaggccttcaactgatgagatgaggcccattgacaataggcagtacaat

SEQ ID NO: 209254 - DNA, 201 bp, Homo sapiens
ctaagatttttcttaactatttttctctttccattctctcctatttcaaactaaactccttggcagatgtaaataactttctactttgcatgtaattttgtttcttggataacagaataaataggtcaagctaagccccaagattaaatggtcaagcaaagtcagtctttctgattttcctgaacccaaagccttgagagt

SEQ ID NO: 209255 - DNA, 201 bp, Homo sapiens
gtattaaaattttggggatgttctaagccacagctgatcaagagctaatcacgtgactatataaatatggcccatgttcattttctcaccctaaaaagcasttcggtatgcagcaggatctcctttcgctccagcgcaagccagggtgacggcacaattcagagcgcacaaatcatacacttagcagccttgccagtgtgt

SEQ ID NO: 209256 - DNA, 201 bp, Homo sapiens
taaacctgtggctcattccccaggtccctgatggaatgtgtccaaagacatcagctgagacagcaactgcaatgaatcttaaagcccctgagatttggcayatcttccaaaaggggttcagtattgatctgaggtataattaacagtatttatttcaggggagcttggttaggttaaaaagacaaggtcctttattaaaat

SEQ ID NO: 209257 - DNA, 201 bp, Homo sapiens
tgacccttaaactgagtcttaactgccatgaactagtcaggaaatgcatgctcttaaaatagtgtgttcacatggacgcaggaaggggaacatcatacacyggggcctgtcagagggtggggggctcagggaggactagcattaggagaaatacctaatgtagatgacaggttgatgggtgcagcaaaccaccatggcaca

SEQ ID NO: 209258 - DNA, 201 bp, Homo sapiens
tatgtaacaaacctgcatgttctgcacatgtatctcagaacttacagtgtaataattaaaaacacagtgtgttcaaaggcctggtgtcaagagaaatgagrtgtgttcagggtgcttacaccttgaatatgaatcacaaaggcagaaggatgagcctggagatagaggcaaggggctgatcactaggccctggtaatatac

SEQ ID NO: 209259 - DNA, 201 bp, Homo sapiens
gaacagcagtagagcagtgtgaataaatgtccaattggagtgagttcaagaaactgaagatgggaacattatgaggacagacaactgtttcaacaagtttrctctgaaggagaacagagaaatggaagggtagctgaaatgggattctggctgaaggaagttattacagcatgttttctgctgataggaataagccactag

SEQ ID NO: 209260 - DNA, 201 bp, Homo sapiens
tttcttcctttccattactcctgccactgctgaagtccaggccctctttgtcactgttcttctagcctcctaactcatttttctggccctactgaaatcaktcttccatacagccatgagaattctctatgggcaaaccatactcctatttagggatcttcaggagctgcctagtgccaacagggtaacaatcccgtcttc

SEQ ID NO: 209261 - DNA, 201 bp, Homo sapiens
taaatagttccaattgcttaaaatttgttccgtgggacacaagttaatttacattttttaaatagttccagttgcttaaaatttgttccgtaggacacaarttaatttacattttttaaatagttattgtacataggaagcatagtttgatttactgttttaagaacaagaacatattttgaccaaatgtacatggggatg

SEQ ID NO: 209262 - DNA, 201 bp, Homo sapiens
tggaaacatatagcttgaaagtaaaacccactgggaagattcagaaaaatctctctgaagaagtgacatataatgtaagtcttgaagaatgttattagacrcccagatgaagatggagattattttgtacaaagggaacagaattgtggaaactcaaaggtaagacaggtgagacagtggtgacttaaatcactaacatac

SEQ ID NO: 209263 - DNA, 201 bp, Homo sapiens
ggtaatatatctctaagtgtgataaataaaccataactcataagagaaactaatacattttattacataaaatttttaaaatctatatggcaaaaacacarcagaaaaaataagaaatggtaagctgggtgaaagtttttaatttgcattacagagaaaaggcttatttctcataacaactgacaaaaataagattgatta

SEQ ID NO: 209264 - DNA, 201 bp, Homo sapiens
catagcacttgatacctatactacaatcactgtttccttctgagtctctaccagactgtaagctttctgaaggcagggattatgtctcaatccccttagaktccccagtccctgaagcttcaggcactcagtaaacacacatcggtcattaaacaattgaatgaaaacattaatgctagaaggcatgttaggtaggcaggt

SEQ ID NO: 209265 - DNA, 201 bp, Homo sapiens
taagttcattccatgtaccatcctgagagatgtagtttaggaaagaaatttgcagtttaagcagaaatctcatcttccagcccttctacatgatctcatgktgctaccagtcctaggggcccactgtcccacaaaaatgcattgatcaccccaggcatttattcatgctgattcccctgtctagataggatgccccctcct

SEQ ID NO: 209266 - DNA, 201 bp, Homo sapiens
cttgtaataattaatatgaaaaaaaattgaatggaaatttgatgggagaaaattgtggggttttttgcacttaatttctttaatcccaaagaacatgtgtmttttacctttgttctgctttctaatgactttgttgatatcccttcataactattttcttagactccttagaaagaagactattgggccaggctcagtggc

SEQ ID NO: 209267 - DNA, 201 bp, Homo sapiens
gaacttgttagaaatccagattctcaggcccacacccagacctaatgaatcaatatttataatttaacaaaatctgtaggtgattgatatgcacatcaaaracttaccagtggattcttggaccagtattgagctggatgcataagaatcatctgggggcttttaattattctgattcctaggctccaacaataatgtatt

SEQ ID NO: 209268 - DNA, 201 bp, Homo sapiens
agtgaagtttggaaatacctacactatgggattgtacctggtttattttactgattagaaaatatgtcttttggggtaagagctaagtaaaggaaacactyagtagtatcattgccactataccctcaactcaacacacacacacacacacacacacacacacacatatatacacatattcatatatgtatacatacacat

SEQ ID NO: 209269 - DNA, 201 bp, Homo sapiens
aattattattttaaatgatgccttaggccactgcctggcacagcggtgccctcaccttcccctcttctgccttccaagcatggagctcagctgccaagctggctatgccccctcctgtcctcagagctgcctccagagtcccagcagagagccagattaaccccttttgttagcagatgtaatttgcctgggctcagcatt

SEQ ID NO: 209270 - DNA, 201 bp, Homo sapiens
caattctcctgcctcagcctctggaggagctgggattacaggcacacaccactgcacccagctaatgtttgtattttttttttttttttttttagtagagrcggggttttgccttgttggccaggctggcttcgaactgctgacctcaggtggaaactgccccttttatagggtgtggacactctagtttgccacagtccc

SEQ ID NO: 209271 - DNA, 201 bp, Homo sapiens
ctgcatatggctagccagttttcccagcaccatttattaaatagggaatcctttccccattgcttgtttttctcaggtttgtcaaagatcagatagttgtmgatatgcggccttatttctgagggctctgttctgttccattgatctatatctctgttttggtaccagtaccatgctgttttggttactgtagccttgtag

SEQ ID NO: 209272 - DNA, 201 bp, Homo sapiens
caatacataatttctaggcaagtccttggtatgtctttttgttgctgttggaaactccaggacccaaggacattcatcactggagaagtgggtgcgcgcgmacacacacacacacacacacacacacacacacacaccagtgttagcagctggcatttctgcctcgaggattttacatttacaaggtaataataaaaatgg

SEQ ID NO: 209273 - DNA, 201 bp, Homo sapiens
tagccagttttcccagcaccatttattaaatagggaatcctttccccattgcttgtttttctcaggtttgtcaaagatcagatagttgtagatatgcggcsttatttctgagggctctgttctgttccattgatctatatctctgttttggtaccagtaccatgctgttttggttactgtagccttgtagtatagtttgaa

SEQ ID NO: 209274 - DNA, 201 bp, Homo sapiens
ttaaggcccaacagttgatgtccctgcagataccttggcaagtcaattctgttttatttcagagaggaaataaaacttgcctgattggactttctttcccctgatagaaatgaggagttgtcacagtgaaccatgagagccaaggctggcaaggctggcaacacacgccagagccccggcttctaggatgctgtctttgaa

SEQ ID NO: 209275 - DNA, 201 bp, Homo sapiens
gtgtcataattttgtgaacattttttggttatgattctgacattgagtttactgcagagagaaacctgaagctagccttattttccctctaatacaagagraattcatgtttaaagatctagataatccataaatcttctttatactggaaatatagtaacgtcaccagaaaaaaatgccatggtattgaccattctctgt

SEQ ID NO: 209276 - DNA, 201 bp, Homo sapiens
caccatttattaaatagggaatcctttccccattgcttgtttttctcaggtttgtcaaagatcagatagttgtagatatgcggccttatttctgagggctstgttctgttccattgatctatatctctgttttggtaccagtaccatgctgttttggttactgtagccttgtagtatagtttgaagtcaggtagcgtgatg

SEQ ID NO: 209277 - DNA, 201 bp, Homo sapiens
accccaaccacccaattcccgtcctattggcagccactttagaagggaagtgtgtgagatgggaattgtttagatggaaacaatccttctgtaatggcttyggcctcctctggcatgaattgagcatttacagtagtgaagccatgttttatttatgttatttcctcaagacctctggttagcttctcaatttgcaatgca

SEQ ID NO: 209278 - DNA, 201 bp, Homo sapiens
ctgcagcctctatctcccaggctcaagcgattatcctgcctcagcctcccaagtagctggggctactggcatgcaccaccacgcccagctaatttttgtayttttagtagagacggggttttgccgtgttggccaggctggtctcgaactccagacctcaggtgatccgcccaccttggcctcccaaagtgctgggattat

SEQ ID NO: 209279 - DNA, 201 bp, Homo sapiens
agtaccatgctgttttggttactgtagccttgtagtatagtttgaagtcaggtagcgtgatgcctccagctttgttcttttggcttaggattgacttggcratgcgggctcttttttggttccacatgaactttaaagtagttttttccaattctgtgaagaaagtcattggtagcttgatggggatggcattgaatctat

SEQ ID NO: 209280 - DNA, 201 bp, Homo sapiens
gctcacgtgcatgtgtgcatgtatattttaatcaggcactggacacttagcaagagctatttgtagcctgcagaagctagggaagggtttacaggaaattrtaaagctctttgtcaatatgaggaattattatttcaacgctattttacatttctgatgccttttgatccccctgtgtggcatgtgtgcaaacccactatg

SEQ ID NO: 209281 - DNA, 201 bp, Homo sapiens
gcctatgctttcacctataagagtctgtaatgaaattataagtctgtaatgaaatatctcaacatcccactggggtgagatcagagaattccatgtaggawgccaggactttatcccaactatgttgtaatgagagccccctgccctgaagtgtctgtgtaaaccacatgaggatgatgctgggtttccactcccccaaca

SEQ ID NO: 209282 - DNA, 201 bp, Homo sapiens
gggttttgccgtgttggccaggctggtctcgaactccagacctcaggtgatccgcccaccttggcctcccaaagtgctgggattataggcatgagtcaccrcacccagccttataatattctcttacatccattttttttttctgtaaactcagtaataatgttagtatacaaccccccactttatttttgtctctctcat

SEQ ID NO: 209283 - DNA, 201 bp, Homo sapiens
caccctgttagccagggtggtctcgatctcctgacctcgtgatccgcccgcctcggcctcccaaagtgttggggctacaggcgtgagccaccgcgcccggscgcccctatctaattttagaacattttcaacacccgcaaaagaaatcctgaaccctttagcagtcattcccaccccttttttttttatcctcagtccctg

SEQ ID NO: 209284 - DNA, 201 bp, Homo sapiens
attctctttgaagcaattgtgaatgggagttcactcatgatttggctctctgtttgtctgttattggtgtataagaatgcttgtgatttttgtacattgaytttgtatcctgagactttgctgaagttgcttatcagcttaaggagattttgggctgagacaatggggttttctagatatacaatcatgtcatctgcaaac

SEQ ID NO: 209285 - DNA, 201 bp, Homo sapiens
tagttaaattagaagaggaaatctcggtgaggataaattgcaggctacagtggggtaaatgagagggccaaacccattccttggccattaatttgtctttmattttcagctcaaatgtcacctcctccaagaagccttccctgaccatcaagcaaagcagtcactctctaatccatgtcccactttatttccttcattcta

SEQ ID NO: 209286 - DNA, 201 bp, Homo sapiens
tgcagtggtgcgatgcaacctctgcctcccgggttcaagcaattctcctgcctcagcctcccgagtagctgggactacaggcgcgtgccaccatgcctggstaattttttgtatttttagtagagacagggtttcaccatgttagccaggatggcctcgatctcctgacctcataatctgcctgactcagcctcccaaagt

SEQ ID NO: 209287 - DNA, 201 bp, Homo sapiens
gatttgcattctcttgatgattaacgatgttcaagattttttcatatacctgttggccattcgtataccttcttttgagaaatgtctattcatgttttttrcctatttttaatcctattatttagtttttgttctttctttttttgctattgaatcattgagtttcttatatattctgaataataatccattgtcagatgc

SEQ ID NO: 209288 - DNA, 201 bp, Homo sapiens
atgtgaggacacaaaggtggagtgagaatatttaagagaagatagctgggtgcggtggctcacgtctgtaatcctagcactttgggaggctgaggcaggcrgatcacctgagatcaggagttcaagaacagcctggccaacatggtgaaaccctgtctctactaaaaatacaaaaaattagctgggcgtggtggtaggcac

SEQ ID NO: 209289 - DNA, 201 bp, Homo sapiens
ggtccagtgggaaagaaattagttaatgaaagatcagttaataatgcctgccctgggcaaggagacaggtaatgctactattatacattttcatacatgcmttcacagatctcaatcacatttccgtgaataaaaggctgcagacttaagtatgattagctattttcaagtttttccatagaacaagggttggcagactgc

SEQ ID NO: 209290 - DNA, 201 bp, Homo sapiens
ttttgtctggtagtatgttttaaatacttgctttttatttttagtttatccattatagattttgctttgtagtcaccatgaggcttaaaaaaatgtatagmtataataagctattttaaactgatgataacctgactttaattgcaaagacaataaaagaaacaaaaaataaaactctttaactcatcttatccctacatt

SEQ ID NO: 209291 - DNA, 201 bp, Homo sapiens
gtctcggctcactgcaacctctgcctcccaggttcaagtgattctcctgcctcagcctcccaagtagctgggacaacaggcatgcgccacctcacctggcyaatttttgtatttttagtagagacggggtttcaccatattggccaggctggtcttgaactcctgacctcaagtgattctcccgccttggcctcccaaagt

SEQ ID NO: 209292 - DNA, 201 bp, Homo sapiens
gcttgttctgacataagcactagtgctgtgcgggcaggaagggaaagtcagcaggtggaatctcattctgccttttgtgtgtgaatagagagtagaggcatttttttcccccagtgccaaaacttttgcatttttgctttcattttctacctgtaggccttttatccttagccactcatacaaagtgttgcattatcacat

SEQ ID NO: 209293 - DNA, 201 bp, Homo sapiens
aaggattccatacatatagtcatgatggacatgtatggtctctgctctcatggggcttgtaatccagtgactaggaatctttggtttgaaaatagtcacarcgggccaggagtggtggtacacgcctgtaatcccagcactttgggaggctggggtgggtggatcgcttgagctcaggagttcaagactagcctgggcaac

SEQ ID NO: 209294 - DNA, 201 bp, Homo sapiens
ggccaacaataataagtaaacaaatattataaaacgctgtgggacatgaaaaagacaaaaaaaaaatgtggaggcagaaaacaccggaagtcaggactatsgtgtggtcagggaatgcctcaacgaagcagggacagttaagaggctgaatgccaagacatgaggaagtggcaaagaacatagcatgcggaaatgcccacc

SEQ ID NO: 209295 - DNA, 201 bp, Homo sapiens
tttgtcttttggatatttcagtttacatctttttatattgcttatcttttaacaaatcattgtaattattatttttagtagttttatcttttggtacttayactaaagatatgggtggttacagtatatacttttgtcagtggattttatttcttcagatgttttcttgttgcacatgtgtcttgttgcacatgtgtcttt

SEQ ID NO: 209296 - DNA, 201 bp, Homo sapiens
tggaacatctcgggttaaaccatgctttgtgtagaacagaggttccccaagtacctcagttcatatcacccttcgtatcgtcctaatttttttcatgctgytcttgggccaaaaaaaaattcacaactgttctgtttactaagtagttaggttcaaactacttaataagtatgtttgcactaacaatgtagtaactgtttg

SEQ ID NO: 209297 - DNA, 201 bp, Homo sapiens
tagaccaaatattctacatagatggggtgttttaaaataactgctctgttctcagtttccttagctggaaagtgggaataacaatagaacctatgccaaaraaaaattatttgatgcagagaaagcactcaagcactcgggatatgcctaatacaaagcccacccttaattcattatagctgttattgttacttaatgtac

SEQ ID NO: 209298 - DNA, 201 bp, Homo sapiens
tctctttccattctctcctatttcaaactaaactccttggcagatgtaaataactttctactttgcatgtaattttgtttcttggataacagaataaatakgtcaagctaagccccaagattaaatggtcaagcaaagtcagtctttctgattttcctgaacccaaagccttgagagtctacttattagtgggttgttcta

SEQ ID NO: 209299 - DNA, 201 bp, Homo sapiens
  misc_feature (1)...(201): n = A,T,C or G
tgtatgtatataattaactcataggtccctctgggcccatctagctaaacttgtggagcttaactgagcaaaacatttgctgatgtctctccctacagtgntacccattgaaatgaataccttctacaagatgaaacctaggaaatgtcgtttccaattggctttctactgattggggttgatgtcttttccaaattggct

SEQ ID NO: 209300 - DNA, 201 bp, Homo sapiens
tgtgtccatatgttttcatcatttagctcccacttatgagaacatgctgtacttggttttctgttcctgtgttagtttggtaaggataatggcctccaggyccatctatgtccctgcaaaggaacaaactaccatttcttctttcctgtggctgcatagtagtccacggtgtatatgtaccatattttctttatccagtct

SEQ ID NO: 209301 - DNA, 201 bp, Homo sapiens
ttctcctctggaatatgtcacttgaaagagatcaactttctggcctctgattctggctgtcacccagtggctgctttgtctaatgattgctacatatgactttttttttttaaactcccagtccaaaagctgtttcaaagtcaaagttaatacagatgttgtgtcatcccatgcgccagtgataggtgttgtttagtcaag

SEQ ID NO: 209302 - DNA, 201 bp, Homo sapiens
tttctaaaaaatattcttctgaatcaatcaatacaagggtccaatttctaccaaggatttgaaaatgaactggggggaaatggaaaggcaatgcagtatcgtaagcagttatgtggaatgcacatcagaagacctgggtaggattccagtcctgctaccataatttgtcacttttattctctgggcttcagtttcctaagc

SEQ ID NO: 209303 - DNA, 201 bp, Homo sapiens
cgctaggccatatatggccttaaacaccatagtaagaaacttagctttattttcagtgtaataggaaacctttgcagtttaaagtaggtcaaggacttaattttttttgttatttttaaggtatttggttgctgtgtggagataaatgatagggaaataagagtaggaggcaagaataccaataagaggctatcacggtgg

SEQ ID NO: 209304 - DNA, 201 bp, Homo sapiens
caaaacatttgctgatgtctctccctacagtggtacccattgaaatgaataccttctacaagatgaaacctaggaaatgtcgtttccaattggctttctastgattggggttgatgtcttttccaaattggctttctagtgatttgggttgcttcattaaatgtttttggttgtttcataacaatagtaatctcattttct

SEQ ID NO: 209305 - DNA, 201 bp, Homo sapiens
ggaagttcaggtaggagccagtgagtggtgaggcagagagcaagacaggagaaggggaaagagagaaaaaacctcacttcaccctccagatccctactccstggtggtgctaagaagaggaactctgagaataaaaatgtttgggaggaattttcacatgaaattccctaggcgatgtcagcccaatgtttcactacacaa

SEQ ID NO: 209306 - DNA, 201 bp, Homo sapiens
ttgaacctgaacttcaggggatgggccccaaatgtcaccatatttcaaggtctttccaggtgattcactgtgctgccaacttgaaacttaaattttttttwaaaaatgtgacataattttggataagtagaacaactgtcaggctctgtgctctgtctttggcagtgatatcagcaaagctattcatttttttaatggtgc

SEQ ID NO: 209307 - DNA, 201 bp, Homo sapiens
ctatttgggtgcagtggtgtatacctgtagtcctagctactcaagaggttcgggggatgggggatcacttgagctcaggaggtcaaggctgctgtgagccrtgatcacaccactacactccagcctgggcaacacagtgagatcctgtctcttaaaaaaaaataggtgcacttcttagatgttatccttatcttaattcct

SEQ ID NO: 209308 - DNA, 201 bp, Homo sapiens
ttctaaaaaatattcttctgaatcaatcaatacaagggtccaatttctaccaaggatttgaaaatgaactggggggaaatggaaaggcaatgcagtatcgtaagcagttatgtggaatgcacatcagaagacctgggtaggattccagtcctgctaccataatttgtcacttttattctctgggcttcagtttcctaagct

SEQ ID NO: 209309 - DNA, 201 bp, Homo sapiens
ccacagagagttcactgttgtggcaccggtccctagaatatgtctgctattgaggagggatttaataagtatttgttgaatgaataactaaatcactgacytcaccccagaagcacagttacccatctttatgtgtatactttgctgtctctcctctgagtttgcacactgctggtccctctgactgaagcccagttccct

SEQ ID NO: 209310 - DNA, 201 bp, Homo sapiens
aagtaggaagacaggtctcttttctgtattaattggactcctgaaattcccccagggtagcagtggctctctgtgggcacagggctcttatgcttatgttyctgtgcttcaatgtaccttccatgctgacagcaaatagaaggtgttcctgcacaagcaaaacctaacggagaggctgcaataatttgtccaaaacgaagt

SEQ ID NO: 209311 - DNA, 201 bp, Homo sapiens
ggcagtgatatcagcaaagctattcatttttttaatggtgctttaaaaagctaacagtacttctttaacataaattatctatcatgttcaaagttccctgwttgccttatttttaatttttacaggtaaaatgtaggtatatatatttatgaggtacatgagatattttaatacaggcatacaatgcataataatcacatc

SEQ ID NO: 209312 - DNA, 201 bp, Homo sapiens
agaggctgaggcaggagaactgcttgaacccgggaggtggaggttgcagtgagccgagatcgcgccactgcactccagcctgggcaacagagtgagattcyttctcaaaaaaaaaaaaaaaaaaaaatacatagttgatcctatgttcacagagcttacagtctattgggaaaaatcaaatgattaataaagaaattgcta

SEQ ID NO: 209313 - DNA, 201 bp, Homo sapiens
tctaaaaaatattcttctgaatcaatcaatacaagggtccaatttctaccaaggatttgaaaatgaactggggggaaatggaaaggcaatgcagtatcgtaagcagttatgtggaatgcacatcagaagacctgggtaggattccagtcctgctaccataatttgtcacttttattctctgggcttcagtttcctaagcta

SEQ ID NO: 209314 - DNA, 201 bp, Homo sapiens
ttgggaattcctataggctaaacccaaccagcagtcagagagcatggaaagctgttgataaagtcaacttcaagggtctcatctgcctgaagtacagacaraagccacaaagtccgtgacagcagagttgcctcttgttaaaaagatgtcctggaagccccaaccacggacttctcttatctctcatcgcccaaaagagac

SEQ ID NO: 209315 - DNA, 201 bp, Homo sapiens
taattggactcctgaaattcccccagggtagcagtggctctctgtgggcacagggctcttatgcttatgtttctgtgcttcaatgtaccttccatgctgasagcaaatagaaggtgttcctgcacaagcaaaacctaacggagaggctgcaataatttgtccaaaacgaagtgcaaactgcaagggagagtggactttttc

SEQ ID NO: 209316 - DNA, 201 bp, Homo sapiens
gcagaaaagaaatgtttgttttaaaataaaatccatttggttaataattatccacccagttttaggttgctttcctcatttctgtaaataaattttcctayattgcctctcccagtgattgatgaaaagtggacttaaattttgaggaaggaacctgaagaacatatccaagtcctcactaccctgtttggtaatagttgc

SEQ ID NO: 209317 - DNA, 201 bp, Homo sapiens
ctcccagcttgttctgacataagcactagtgctgtgcgggcaggaagggaaagtcagcaggtggaatctcattctgccttttgtgtgtgaatagagagtakaggcatttttttcccccagtgccaaaacttttgcatttttgctttcattttctacctgtaggccttttatccttagccactcatacaaagtgttgcatta

SEQ ID NO: 209318 - DNA, 201 bp, Homo sapiens
gtacagaaaattctaaaagagaaaatcaaatttacttctagctgtgccagagacagtcattataaacatttttgatgtgctatatttccttccaggctcakgtgtgtgtgtgtgtgtgtgtgtgtgtgtgtgtcagagacaaagagagagatgaatggagaatgctaggattctatgcaaaacaacatcatctatagggtt

SEQ ID NO: 209319 - DNA, 201 bp, Homo sapiens
tcttggctcattgcaacctccacttcctacgttcaagcgattcccctgcctcagcctcccgaatggctgggactaaggtgcatgctaccacacccaacaatttttttttttttattttagcagagacagggcttcattatgttgaccaggatggtctcaatctcctgacctcgtaatccacccacctcgacctcccacaag

SEQ ID NO: 209320 - DNA, 201 bp, Homo sapiens
tgaagaacatatccaagtcctcactaccctgtttggtaatagttgcatctaatgtcttctatttttcttcctgaattaactagatagtatagtgtgtaggragtacaaagcaggtattcatcaggagttacagagatttaacatgggtcattaaagtgctgtatgttggcctaatttgaaaaataattccccaactatggc

SEQ ID NO: 209321 - DNA, 201 bp, Homo sapiens
caagctgagaaaatgcccagagtggagctatgtgtacaggagtgtcaattgtgaagtgaagaaatcagttaaaaatggcattctttattgttttcagggcsctggatattaccgttgttcttatttttattccatttttgaaaactctgattctggatagaatatctaggttcacatagtcaaaaatagatatgagtttat

SEQ ID NO: 209322 - DNA, 201 bp, Homo sapiens
taggtaacttcaaagaatgattgacccagtatgacaaccagtatggttgtttaatgagctagtctctcatggggtacaaatttgacatttcggaaagctgwgcttttttttttttttttttttttttttggttaatactatgtgtggttgaatgaaatttgaacccaggcaaatctgaaaaaaattagactttaactatca

SEQ ID NO: 209323 - DNA, 201 bp, Homo sapiens
cattgcaacctccacttcctacgttcaagcgattcccctgcctcagcctcccgaatggctgggactaaggtgcatgctaccacacccaacaattttttttyttttattttagcagagacagggcttcattatgttgaccaggatggtctcaatctcctgacctcgtaatccacccacctcgacctcccacaagtgctggga

SEQ ID NO: 209324 - DNA, 201 bp, Homo sapiens
atggcattctttattgttttcagggccctggatattaccgttgttcttatttttattccatttttgaaaactctgattctggatagaatatctaggttcayatagtcaaaaatagatatgagtttatagcaatgagatttctggcatgtgagaatcaacctctcagatttctttctctttctcaaacacacacacatacta

SEQ ID NO: 209325 - DNA, 201 bp, Homo sapiens
tgaaataaaaatattaagctctttgaggcatttttttaatttaaaaaagtttatacaatattttaaaaattatacgcaggataagcacataaaatttaaadgatggatggatggatggatggatggatggatggatggatggatagatggatggatgggcagttgaatggataaatatttgtggtggttagtaggtgaccc

SEQ ID NO: 209326 - DNA, 201 bp, Homo sapiens
agagagttcactgttgtggcaccggtccctagaatatgtctgctattgaggagggatttaataagtatttgttgaatgaataactaaatcactgacctcaycccagaagcacagttacccatctttatgtgtatactttgctgtctctcctctgagtttgcacactgctggtccctctgactgaagcccagttccctcccc

SEQ ID NO: 209327 - DNA, 201 bp, Homo sapiens
agccccctatttgtctttgtaggtaaattttattaagacacagccatgtacagtcatttacatatcttctatggctgcttccatgcacaatggcagagttkagtagctgtcacagagaccatatggcccacagagcttaaaatatttactatccggccctttggagaaaaagtttgtcaacacttgaaatataagaacgga

SEQ ID NO: 209328 - DNA, 201 bp, Homo sapiens
ttctgttaacatacactaccaattctgtgtgtcaaagaagctcacaagtttttcagtgactataagaattaatgacaatatagcatatagaatatcataayagacctggaaaatttagttatacagttctcgaactaaaatactttcctaagcccttggtattcatggaatttgcttggtttgatgtggaaaatgttttca

SEQ ID NO: 209329 - DNA, 201 bp, Homo sapiens
tcagatcattccacattgcagtgttctatttaaagctgaaaggtttttgctgtgtagttagtgtgaaggactctaaactcaatttgcattgtaagtggtgrctgcaggcaagttcatccagctaagagcaatgcaaatgctaaaggacactttcacccaagctcccctctctcagtctctttctctctctctgtctttctc

SEQ ID NO: 209330 - DNA, 201 bp, Homo sapiens
cagcctagagcctcctcctgaggggcacaggctcttgctccacagcatgtgatgctaactgcaatcatatttataactctggcagaagttgagttgaaggrtagtattttgtgaatccaggagactcacatgccccggagacccaagtaatatttgcatctgggtttggtaggagaaattgtagtaacatgtactgttagc

SEQ ID NO: 209331 - DNA, 201 bp, Homo sapiens
taaattttattaagacacagccatgtacagtcatttacatatcttctatggctgcttccatgcacaatggcagagttgagtagctgtcacagagaccatayggcccacagagcttaaaatatttactatccggccctttggagaaaaagtttgtcaacacttgaaatataagaacggaccaatagagttggctctttgttt

SEQ ID NO: 209332 - DNA, 201 bp, Homo sapiens
ctttttattagcttccagcctcttagcatttttgacattcctatctatgatgcttaacgcttctaagtgtgtgtgtgtgtgtgtgtgtgtgtgtgtgtgtscgcatgcatgtgtgtgtcgtagactataattcatctgggcctggaagatttcctacatgcaaaactacatggtcctgtctttatcatcttctaacttatc

SEQ ID NO: 209333 - DNA, 201 bp, Homo sapiens
gtcataaaggaatagagttacttgttagaagatgattgtcccccccaaaactgctatcatctttttttttttgagacagagtcttactgtgtcacctaggmaggagtgcagtggtgcagtcatagcttactataaccgcgaagtcctgggttcacacaattctcctacctcctgagtagctaggactacagatgcatacca

SEQ ID NO: 209334 - DNA, 201 bp, Homo sapiens
ccaatgatatccctcccccctccccctaccccacaacagtccccagtgtgatattccccttcctgtgtccatgtgttctcattgttcaattcccacctatragtgagaatatgcggtgtttggttttttgttcttgcgatagtttactgagaatgatgttttccaatttcatccatgtccctgcaaaggacatgaactcat

SEQ ID NO: 209335 - DNA, 201 bp, Homo sapiens
atgactttagtcaccctcttttgacatttattcaagcaagagacttggtctgtcttggcatctgggagcatacaacctgtgatgttaggtccagcacttasagtctttctagggatactatgtacagcctaaacagtgactctttggctgtatatttattttcactaccttttaaaagcattaaaaagagctgtcagtact

SEQ ID NO: 209336 - DNA, 201 bp, Homo sapiens
aataattccaggtgcaccttaacttctgaggtctcttctgacttgcagctcctcagtctcttcctcctttaaatctagagcatatttgctttaaattgttyagtttgataattcatcacatacagtcttatcacctcacatcttccacttgggtatcttgcctgtcttttccagcaagagtatgagttgctggagagcaga

SEQ ID NO: 209337 - DNA, 201 bp, Homo sapiens
tatgaacaattatgtttctagatgataggaataaatttccttctaaaatcgctgttccaaggaatacctttgtaattgctatggcccttttccacttttgytctgtccatattttcagtgagcgatttttagtccactttcaaagtatattggctgtctgcatttcagcagtctttgggggttacagttgggagtcggtgt

SEQ ID NO: 209338 - DNA, 201 bp, Homo sapiens
aatacataatttctaggcaagtccttggtatgtctttttgttgctgttggaaactccaggacccaaggacattcatcactggagaagtgggtgcgcgcgcrcacacacacacacacacacacacacacacacacaccagtgttagcagctggcatttctgcctcgaggattttacatttacaaggtaataataaaaatggt

SEQ ID NO: 209339 - DNA, 201 bp, Homo sapiens
aagcaccaggtttggtaaaaatactcttgaaaaatcccataaatcacccataagatttgtttgtttttattaactctatatagaataatatatacatatawatatataggatataaagaataatgtagaatataaactatgcaaacaatatgaggggccatttgtgaaaaatatacttccttaaaccttagtaacttattc

SEQ ID NO: 209340 - DNA, 201 bp, Homo sapiens
acaatacataatttctaggcaagtccttggtatgtctttttgttgctgttggaaactccaggacccaaggacattcatcactggagaagtgggtgcgcgcrcacacacacacacacacacacacacacacacacacaccagtgttagcagctggcatttctgcctcgaggattttacatttacaaggtaataataaaaatg

SEQ ID NO: 209341 - DNA, 201 bp, Homo sapiens
ttatttattcagcttactagttttaggggaaaatgcagattggattcaaaattactattctgcataatatatatatataggtatgtctgtatatattttcrtcttcagtttgtataactttaaatagttttgaggcttatcagattaatgttatttggtttggttttagcattacattcaagtttctagtaggtaaaaatt

SEQ ID NO: 209342 - DNA, 201 bp, Homo sapiens
aaggaagaacaagtttactattccaagtagctcctttcgattattgattcattctgcctttaattccttcaacaaatactgacgttttgcagaggtgataygggatgttccaatacagacgtggtctctgtcctcagggatctttcaatctagcaaaggagatagtatgagacaaataattttgcaaataaatatatagtt

SEQ ID NO: 209343 - DNA, 201 bp, Homo sapiens
ttgcttgaggacagaaaaataagtgacagaaaatgatatcggagccttggcacttaacattgcactatagtctgtcgatatagaatgcatttgctgtattkctaagaaagttcacgttattaaaattagatgatagaatttaagttctatgaagaaagaaattctgttttatataaatctatatccttggcacctagagca

SEQ ID NO: 209344 - DNA, 201 bp, Homo sapiens
agagcggttaacccaaaacccttgggtgagcttcccaaaaccacacagagaattagtgtaaactaccaggactgaaccagcctgtggactccagagtggtsttttggcctctgtacttacatgcaaagtggtttgactgtttctgacattcctgggaataccttagaacaatgtgctgacctgagtagtaactctgtgaag

SEQ ID NO: 209345 - DNA, 201 bp, Homo sapiens
ccctgctgcatggtagcagctgctctaaatggagccgacccccatcttcaaagtcctcttcagtcttatctgtagcttcccacctctctcttgctttaatmacatgccaagagagctggctgaatcatcagtccagactgccaatcagaaatatgaatcaagtcactcctgactgctctgctaggtctaagggatgcaatg

SEQ ID NO: 209346 - DNA, 201 bp, Homo sapiens
agcttttccccaactcaactgtgaacttcttcaagtaggagcctatgtctaaccagtggtaggctggagttgacaaatacccgctggctggcgccacttgktaaacgtcctgaattgttttgaactggttgttaagcatagccattataaaatatcaaattatataagtaaatattgtatattcaaaatgaaaataataaa

SEQ ID NO: 209347 - DNA, 201 bp, Homo sapiens
cccattctctcttctgagagaaaaaataaacacacctattcaatgtttttgctgcttaataagtgataatctctcttattactaaacatggggaaaaggtyttatttaaaaatattctgtttataggagtcacacagtggaatggataatactgagaagaaaacatttttccccttcctgattctgagatctcataggtaa

SEQ ID NO: 209348 - DNA, 201 bp, Homo sapiens
aatttttaaaattaacataaaccttcaatcagtatagaactataaaaatcattttaaacccatagtcttagtctattttgtgtttgtataatagaataccmcagactgggtaatttataaagaaaagaaatttatttctcacagtattagaggctggaaagttcaatatcaaggtgccagcatcttgtgagagtcttcatg

SEQ ID NO: 209349 - DNA, 201 bp, Homo sapiens
tcccctgctgcatggtagcagctgctctaaatggagccgacccccatcttcaaagtcctcttcagtcttatctgtagcttcccacctctctcttgctttartaacatgccaagagagctggctgaatcatcagtccagactgccaatcagaaatatgaatcaagtcactcctgactgctctgctaggtctaagggatgcaa

SEQ ID NO: 209350 - DNA, 201 bp, Homo sapiens
tgaaatgcctcaaaagccaagaaggaaggaagatgacatctgagtaaatctcgataagcaaacagtcaacccttgaatctttgaattggtgctatagggtrcccttgactggggttaagttgatcaaaacagcactgcccatttagaaagaagagattattgagagagggtgctatttccggacagttccaagaaggccta

SEQ ID NO: 209351 - DNA, 201 bp, Homo sapiens
catccactaggtggcagtgttcaataataaacaatgacaacattaacgagcctctggccaacactaatatcgcaggcagccaaaggaccattagctaagarcaccaactacggttttcctttctaatgggtgtacaggattccaattcctggctttggtatggtgacaattttcttctcaatctccttgcattttatgtct

SEQ ID NO: 209352 - DNA, 201 bp, Homo sapiens
caccacgcccgtctaattttttttatttctagtagagacggggtttcaccgtattagccaggatggtctttatctcctgaccttgtgatctgcctgcctcrgcctcccaaagtgctgggattacaggcatgagccaccgtgcccaaccagcttaactatataattattacctgatttcctcacaacaactacatgaagcaa

SEQ ID NO: 209353 - DNA, 201 bp, Homo sapiens
atctgcacaacttggtgattatagttaataatgtattatatatctcaacattgctaaaagaatagattttgggtattttgtttattttttataattttttwaaaatttctttttgacttacgggtacaagtgcagttgtgttccatggatctattgcatagtggtgaagtccgggctgttactgcacctatctaaatagag

SEQ ID NO: 209354 - DNA, 201 bp, Homo sapiens
gggtcattaaagtgctgtatgttggcctaatttgaaaaataattccccaactatggctaacgtatactagaagtcagtttgtctatctgtgtaaatgaggkttttgcaaatcttaagttagaacatatttgtcaaagagtcaacacagtaagttacaagagggcatctttggttaaataacagaagctgatctaatcacta

SEQ ID NO: 209355 - DNA, 201 bp, Homo sapiens
tagatatttctcaaacctcactttggacaatttcagtcctttctaccacccacccaacttatccccaggtttttcccatacctgctaataagaagctaaargtgacttcaattttattcccagtgcctcttgtttaccctcgactagagttgctaggaataatgaaatgcctcaaaagccaagaaggaaggaagatgacat

SEQ ID NO: 209356 - DNA, 201 bp, Homo sapiens
aataaaaatattaagctctttgaggcatttttttaatttaaaaaagtttatacaatattttaaaaattatacgcaggataagcacataaaatttaaaggatggatggatggatggatggatggatggatggatggatggatagatggatggatgggcagttgaatggataaatatttgtggtggttagtaggtgacccagt

SEQ ID NO: 209357 - DNA, 201 bp, Homo sapiens
aacttggtgattatagttaataatgtattatatatctcaacattgctaaaagaatagattttgggtattttgtttattttttataatttttttaaaatttytttttgacttacgggtacaagtgcagttgtgttccatggatctattgcatagtggtgaagtccgggctgttactgcacctatctaaatagagtacattct

SEQ ID NO: 209358 - DNA, 201 bp, Homo sapiens
tttaatccatccacaatgtaaatgtatattgaaatatcacattgtaccccataaatatgtacaattattcatcaattaaaaataaaatttttaaataagtaaaaaaaaaacacctctcataatcctaccctttaagacttcatccacatccttcctgtccttttttttttttaaataaatgtttaacatagctgtaggaat

SEQ ID NO: 209359 - DNA, 201 bp, Homo sapiens
gttcaaggacagcctctcagacagctgaaactgagaactaaaggatgaatttgcaattaacaagacctgaaagcattttaggtagaagggacaataggtayaaaagcccagagagataaaatagcctaactgattcaaggaatggaaagatgactatggctaggaacagggagaagagtgataaaaatgagaatggagtct

SEQ ID NO: 209360 - DNA, 201 bp, Homo sapiens
gttttttttttttttttttccaattacttgacaagcaggttgcctttgagtcactcatatgaatggccttgatgtagacattggcacatgctgaaaaggcaaaaaaaaaaaaaaatttacttttctttgaccctttaagaagattagtctgttcacagttttctcctgtgcttataaaccttcatgtttcctgcctatcct

SEQ ID NO: 209361 - DNA, 201 bp, Homo sapiens
acacacccctaagcaacagaagcatcatttttcaagggccccaaagactcctccttctctgaaccatcacaagtattatgaattatccagagatctgtctkattgatggactaccttaaagaatttcaggccggtttgtcataattttcatgttttccctcaaccatattaaatgtgactataacaatgagctgaaaggaa

SEQ ID NO: 209362 - DNA, 201 bp, Homo sapiens
gctcatgactgtgtggattcttggcacatgttctttgctcacccatgctgctcaggatcttttggagaaatgcaagttgtgctccaccctccacatatatmccattggcgcctggtcggtgctgctggatttacttgatctatcttctcctagcacagcagtgcacgtctctgggccttttccattatcccacagggagga

SEQ ID NO: 209363 - DNA, 201 bp, Homo sapiens
ttttttttttttttttttccaattacttgacaagcaggttgcctttgagtcactcatatgaatggccttgatgtagacattggcacatgctgaaaaggcaaaaaaaaaaaaaaatttacttttctttgaccctttaagaagattagtctgttcacagttttctcctgtgcttataaaccttcatgtttcctgcctatcctc

SEQ ID NO: 209364 - DNA, 201 bp, Homo sapiens
actgcagcctcaacctcctgggctcaatctgtcttcccacctcagcctcctgagtagctgagactataggcgtgtgccaccatgccaggctaatctttgtwttttttgtagagataggattagaaaaccatactttccttgaacaatgcttgcatgtctactatgtgtcaaacattgggctaggggccaggaataccgttg

SEQ ID NO: 209365 - DNA, 201 bp, Homo sapiens
accatattaaatgtgactataacaatgagctgaaaggaaaattaggtcccaagtgttttggtattttttcagtatcgaaggtcaaccacatagcagttagmcagaatgcattgtgaacagacatatggcatttgttggggagaagaaagggtgggaggaggagtgtcctgttttccagctgccttccaaagtcaggcttga

SEQ ID NO: 209366 - DNA, 201 bp, Homo sapiens
ttgcttatcacactggtatgaatccttgctaagcaatgaacctgaagtggtcaaagaatggcaggccgcctcctccacttgacgtagaaggatcagcttgwtgtccctctacagacacacaagggtgtagagggtggcaaagctgtaaatgtctctaatagggaatattgtagcaagatgctgctgagagttcccaggtgg

SEQ ID NO: 209367 - DNA, 201 bp, Homo sapiens
cctgtctccacaaaaaatacaaaaaaattagccgggcgtggtggcgggcacctgtagtcccagctactcaggaggctgaggcaggagaatgacatgaaccygggagtcagaggttgcaatgagccgagatcgcgccactgcactccagcccgagcgacagaggagactcagtctcaaaaaaaaaaaaaaaaaaaaaaaaaa

SEQ ID NO: 209368 - DNA, 201 bp, Homo sapiens
agaagtaccatgaaaataagatgcagaatttcacaaatataagtacatgcatatttatggggaaaggatttatagcttttattggatcctcaaagatgtcygagatctcctaataaaggttaagagctaaattgtattattagagaaaggttcagattttacattcttttattcatcaaacattaattgtgcttagtagag

SEQ ID NO: 209369 - DNA, 201 bp, Homo sapiens
aagtataagcctatagtcttgttctcaaatgtctttccatctatttgggcaggtgacactccgtccttctcaaaatataattaaccacagaagccagggtrcgtgaaactgtgtcctgtttatctctctgttatcatgaggtggccgaagtggtggaatcagagcccacctggctctagacacacctctggctatgctagt

SEQ ID NO: 209370 - DNA, 201 bp, Homo sapiens
tgaacccgggagtcagaggttgcaatgagccgagatcgcgccactgcactccagcccgagcgacagaggagactcagtctcaaaaaaaaaaaaaaaaaaaraaaaaaattcagtttgaatgctggaagaggagtgataagtgaacactgtgactgtcagcttctatagcaagaatcctttttaaggtctgtcacctgaaga

SEQ ID NO: 209371 - DNA, 201 bp, Homo sapiens
ggcaggtcacttcatcttgctgagtgttttcttgccaacaaaaatatggcaggggatgaggcaacatgttactatttatatgtgataaataaataaatacraaagaatccctctctactccatgcatttgggaccaatagttgacagtaaacttgaaaagttaaggcaaggagtcataaaaaataacataccatttaaatt

SEQ ID NO: 209372 - DNA, 201 bp, Homo sapiens
gaacccgggagtcagaggttgcaatgagccgagatcgcgccactgcactccagcccgagcgacagaggagactcagtctcaaaaaaaaaaaaaaaaaaaaraaaaaattcagtttgaatgctggaagaggagtgataagtgaacactgtgactgtcagcttctatagcaagaatcctttttaaggtctgtcacctgaagat

SEQ ID NO: 209373 - DNA, 201 bp, Homo sapiens
tcacttcatcttgctgagtgttttcttgccaacaaaaatatggcaggggatgaggcaacatgttactatttatatgtgataaataaataaatacaaaagawtccctctctactccatgcatttgggaccaatagttgacagtaaacttgaaaagttaaggcaaggagtcataaaaaataacataccatttaaatttactaa

SEQ ID NO: 209374 - DNA, 201 bp, Homo sapiens
aatgtgctcatgacagtcccaggaaaatagtaggtagtaattgctaaatgttaagctgtatttttattaatgttagtacagttggctgggcatggtggctyatgcctgtaatcccagcactttgggaggccaaaggcaggcggatcacctgaggtcgggagttcgagaccagcctgaccaacatggagaaaccctgtctct

SEQ ID NO: 209375 - DNA, 201 bp, Homo sapiens
atttttctgtacaaagttattggacatatactttggatctcatattgcctatgaatattctaatagaatgaaactttggtattatctccattttgtaaaaktatgtcgatgttctagagcagggatcagtaaactcttcctgtagagggtcagatgataagtattttagcctttgctgaccatacagcctttgtcccagct

SEQ ID NO: 209376 - DNA, 201 bp, Homo sapiens
gcttgaacctgggaggcataggttgcagtgagccgagatcacaccactgcactccagcctggttgacagagtgagactccgtctcaaaaaaaaaaaaaaaraaaaagaaaaagaaaatatttgcaaactatacatctgataaagggttaatatcccaaatatataagaaattgaaacaactcaatagaaagaaaacaaaga

SEQ ID NO: 209377 - DNA, 201 bp, Homo sapiens
tcactactccaggccattcctgcttccccttccctggtacctgcaaggcctgcctccagtccacattttcctgtgaagtttttcctgaattcctcaagttstttgatcaccacagcaatcctatgagcttatagatattttccccatttcacgaatgtggcaactgaggtccaagttcagacagctagatctaaagacaca

SEQ ID NO: 209378 - DNA, 201 bp, Homo sapiens
tcactgcaacctcagtcttccgggttcaagtgattctcctgcctcagcctcccgagtagctgggcttacaggcacctgccaccacactcggctaatttttrtatttttagtagagatggggtttcgccatgttgcccaggctggtctcaaacttcttaccttaggtaatccacctgtctcagcctcccaaagtgctgagat

SEQ ID NO: 209379 - DNA, 201 bp, Homo sapiens
actactccaggccattcctgcttccccttccctggtacctgcaaggcctgcctccagtccacattttcctgtgaagtttttcctgaattcctcaagttctytgatcaccacagcaatcctatgagcttatagatattttccccatttcacgaatgtggcaactgaggtccaagttcagacagctagatctaaagacacaga

SEQ ID NO: 209380 - DNA, 201 bp, Homo sapiens
aaattagccaagaatgtttgaacccgggagtcggggattgcagtgagccaagatcatgccactatactccagcctgggcgacagagtgagactccatctcaaaaaaaaaaaaagccaatatacagaagatactattggttaaaaatactatgtgatacatgcaggtggctaaccaagatgcaggaagagtgaggtaacatt

SEQ ID NO: 209381 - DNA, 201 bp, Homo sapiens
gccacttacccaaatttcccaatagtcatttaaccttttcgagctttcaacatgcaagttaattttaatttctccatctgcaaaacagtgaacacagtacstactgctcgtggacttatgaggaagaagtgcaaggatggaaaacccttcctctatggctggtcctcaatatatgatctctactcagtctgagtggcttcc

SEQ ID NO: 209382 - DNA, 201 bp, Homo sapiens
cgcctgttcctgtgttgaatagtaagcaattataacacaatggtatttgtgtatataaacatatctaagcatagaaaagacacagtacaaatacagtattrtaatcttatggaaccagtgttattgaccaaaacatcatgtggcatgtggctatatttgaataccttgtgcctccaatgtctcatctatataacggggatg

SEQ ID NO: 209383 - DNA, 201 bp, Homo sapiens
acaagaaatctctgcagacaatgtacggtaactgaggaggcccggggaagagtttaggaggagccacaggaagtcctgcagattccatttcttttgtgacycttggggtcctgctttgagctctggtacctcttgacggcagaggaaccaggtagcaaccaaaagcttcaggtggggagctcctttgtgacaaactataaa

SEQ ID NO: 209384 - DNA, 201 bp, Homo sapiens
cctgaatctgcagccaggagggcagggctctgagacttgtagctctattaagacaaagtggagtggaaagatcaacatggagttctgctatccagagaaasaagaaaatgatgcaagaaagacagacagtagatgcccactagaatacttttgttcaccaaatgctaactcatctcttcttgacctagacttccatggcac

SEQ ID NO: 209385 - DNA, 201 bp, Homo sapiens
tgggcacaaaagtaattgcaccaacctaatgttttttagtttttctacagatgacataaatgctgatgtggttctgaacacacccctaagcaacagaagcrtcatttttcaagggccccaaagactcctccttctctgaaccatcacaagtattatgaattatccagagatctgtcttattgatggactaccttaaagaat

SEQ ID NO: 209386 - DNA, 201 bp, Homo sapiens
agcaacagggatagcaatgacaggtacagggatagcaatgacaaggttcataatatgaccaaggaagcaaaggacaaaacacattgaatagatgagaccaygtaagagagagactagagtgcctgaataactaaaaatagtggcaggaatagtaatggaagagagacagagatacaaacttgcttcaagggatgaggatta

SEQ ID NO: 209387 - DNA, 201 bp, Homo sapiens
gtgcctgaataactaaaaatagtggcaggaatagtaatggaagagagacagagatacaaacttgcttcaagggatgaggattagggactcagaacttttgrtggctgaaagaaggacaggtagcaggaagcttagtttgatggcatgacttcaaaggagttgaagactttaaataggaatagttgtctggagcaacaagga

SEQ ID NO: 209388 - DNA, 201 bp, Homo sapiens
gggtgggggaggaggatgggatggggaagggcagggggagagagacagaaaaagaagagacacggcccgcctgacactccaatgaccatctcattaatacycattcaccagagcttaatatgaaaatgcctcagagaatggagaaactgtttcaacatgtcattcccacagtaggtgaggtgtcaagatttcataaccacg

SEQ ID NO: 209389 - DNA, 201 bp, Homo sapiens
ggtcattgatacagaagtttctcttttatgatgttaaatggatctgagtattaatctaagaactatatgtgaaacagcaagagaatgtctttttttttttwaaaaaaagtaaaagtaatattttagggtataatagaaaattccattacaacaaagaaaagggaaaataaaaccttcaactagagaatgtgcattatggat

SEQ ID NO: 209390 - DNA, 201 bp, Homo sapiens
atttttgctttttatcttatgagtaacaggaagccatttaaatgcttaaatgtagggaagattggggaaagtgaccaagtttgcttttcaaaaatactatkctggctgcagtgcaaagaatagattggaaagggtctagaatagatctaaagagacacgtgatttactcacatgaaactgacacaaaatgtacataatata

SEQ ID NO: 209391 - DNA, 201 bp, Homo sapiens
acagacaggttttgtttcaaggcagcctaagagctttgtttgcttagatccttgcatgtactcttgctgtgactagtgaaaggcttaaagatgacaatgawattattagtaaaccttccatgagaaggaaaggagcacagcacaatctctcttctacttggggatgtagataaaaattccctttgtagaaagtgttcactt

SEQ ID NO: 209392 - DNA, 201 bp, Homo sapiens
gggctgctcctaacctccttgagttgcaactattgcagcagccaggacgccaccatgaaagaaagcgtacatgattgtctgtctctgtctctgtctctgtctctctctctctctctctctctcttcaactaggccatggagactcccaattctttttcccctgagcaaggcagagattgctctctttctcaaggaactgtc

SEQ ID NO: 209393 - DNA, 201 bp, Homo sapiens
aactgcctgagttctttctcaacattttcttctctactctgtgatctcacttcctctcattattttcagggagtgagagttctgcaacattcaattaaataaggacactgactatttaatgcgaaaacatccagatacaaagcgaaaactctgtccaattatcttgccagttcaaaaccaaatatacagatgtttagaaac

SEQ ID NO: 209394 - DNA, 201 bp, Homo sapiens
tctggagcctcttatagaaccagaaagtaaagaagtactgaaaaaaaaggaaaaaagcctgcactgatggaggtatgtcaaaaggacaccgaaatcaactrgaagagctcctaatggccaaagtggaacaatccgagcaataaaatatagcattgaattctatcccaaagtataaaatcaatatgcataaattcatactgg

SEQ ID NO: 209395 - DNA, 201 bp, Homo sapiens
gtatctcaacatagaaaaagcatagtaaaaatatgatataaatgattaaaaatggccgggcacagtggctcatgcctgtaatcccagcattttgggaggcygaggcaggtggatctcctaaggtcaggagttcaagaccagcctggccaatatgaaactctgtctctactaaaaatacaaaaaaactagctgggtgtggtg

SEQ ID NO: 209396 - DNA, 201 bp, Homo sapiens
ggctgctcctaacctccttgagttgcaactattgcagcagccaggacgccaccatgaaagaaagcgtacatgattgtctgtctctgtctctgtctctgtctctctctctctctctctctctcttcaactaggccatggagactcccaattctttttcccctgagcaaggcagagattgctctctttctcaaggaactgtct

SEQ ID NO: 209397 - DNA, 201 bp, Homo sapiens
gagtaactttacagtggagaaacctgacaaacatttcttcagccaggtgatcaagtccaacatgaaaataaggcatgttgatataggtacctttgattgaygtgataggatggaaatggcactttatctctgtggtcttcaatcacgagaaaaacatcaaataaattccactggaggagcatcctacagtataccttactg

SEQ ID NO: 209398 - DNA, 201 bp, Homo sapiens
gcggaggttgcggtgagccaacatcgcttcactgcactccagcccaggcaataagagtgaaactctgtctcaaaaaaaaaaaaaaaaaaaaaaaaaaaaakattaaaaatggcacacttacttgtgtagggcacttaccatgaatggagctttcaggactgaaagttgttctgggtgagtcactgactagtgagtgaatgt

SEQ ID NO: 209399 - DNA, 201 bp, Homo sapiens
gctgctcctaacctccttgagttgcaactattgcagcagccaggacgccaccatgaaagaaagcgtacatgattgtctgtctctgtctctgtctctgtctctctctctctctctctctctcttcaactaggccatggagactcccaattctttttcccctgagcaaggcagagattgctctctttctcaaggaactgtctt

SEQ ID NO: 209400 - DNA, 201 bp, Homo sapiens
gattttctgtgtggttacttggtatcattttactaaataatggttgttaactcatctggatgtttttggttttataacctgtgtaaggagttatttgaacrtcagaaacagtgataaatcaaatgtgatttagaaccagacctaagaattccaaagagggggaaaaaaattcttcagagagtttggcttgcaataaaacag

SEQ ID NO: 209401 - DNA, 201 bp, Homo sapiens
ttaaggcagcttgcaagctcttgaaagggttcatgcaaatttcttctcagctctgtgctgaagcataatgcctcagtctttacataagacattttgaaaawaaccgatgtgttctgggtgctctttcccttttattcgtattgtattttaccttactctatgccttgatctatggtctgtgctacattttttgttgtagct

SEQ ID NO: 209402 - DNA, 201 bp, Homo sapiens
ttcatcacaatttatgttgtataaaataccaagtatcggcggggtgcagtggctcacacctgtaatcacagcactttaggaggctgaggcgggtggatcaygaggtcaggagattgaaaccatcctggccaacatggtgaaatcccgtctctactaaaaatacaaaaattagctgggtgtggtggcgcatgcctgtaatcc

SEQ ID NO: 209403 - DNA, 201 bp, Homo sapiens
acgcactcactgtatggtcatggagcatcaactacgttagcatgagtgatggttcacacactggagctctaatcatgagctgaccacgcacagtgtctgtycttcagcttacacctttatggaggagacatgaataaaacagaaaatgaaatagtcataaattggccaggtgtggtggctcacgcctgtaatcccaacact

SEQ ID NO: 209404 - DNA, 201 bp, Homo sapiens
tactttgcataaatgggaatttacaatgtggcatcatacttgaatatgctttttatgacactgaaccagctgaaagttaaatccattcatgtaattaagcttttttttttttggcagagtactaggcacatgaggtctaaatagttttaataatagttgccattttattgagtcttaactgagtgttagttagaatttttt

SEQ ID NO: 209405 - DNA, 201 bp, Homo sapiens
cagtggctcacacctgtaatcacagcactttaggaggctgaggcgggtggatcatgaggtcaggagattgaaaccatcctggccaacatggtgaaatcccrtctctactaaaaatacaaaaattagctgggtgtggtggcgcatgcctgtaatcccagctacttggaggctgaggtgcgagaatcacttgaacccaggagg

SEQ ID NO: 209406 - DNA, 201 bp, Homo sapiens
ctctacatatagcatatatacatatatatacacacacacactatatatatagcttcattcatagtatatgtatatgtagatatatatatgtcctggctggrtgattcaccagatgtgtgactttgggcaaattacttgctctatctgagtttccccatctggtatggtttggctgtgtccccacccaaatctcatcttgaa

SEQ ID NO: 209407 - DNA, 201 bp, Homo sapiens
ccccacaagatcgaatagactaggtaggcacatgatatctgaatgaagaagagtatttaggaaggcacaattagaacaagcttctaattggaagttataaraagggaaggttggaaatcagtatgtggacgaattttctagtgttcagcctatcaaagagtggcagggactgtcttgggagatggttttctcacagggagg

SEQ ID NO: 209408 - DNA, 201 bp, Homo sapiens
aatgaaaaagtcaaaggagaaaagacaccagctccccagaattatatcagacatattaatcatggaaggtccaaacggaattcctggaatgcaaacggctrtgcagtatggccatttcccataatttccaagttgctctccatcagctggataatactgtttaatcccttacgctgatttaaaattccatcagagggaagt

SEQ ID NO: 209409 - DNA, 201 bp, Homo sapiens
taatatatgaggaactatttaagatttgatggacaaattcgtacctattaatcattaatgtgttagcatatcactttcttaactcacttgtgtagctcacycttctgtctagtctatcctcattcctctttttgtatgctttccttcccattatgtaactctgtcccattcttctctcccttccttcttttttttcttttt

SEQ ID NO: 209410 - DNA, 201 bp, Homo sapiens
gcagaagttgcagtgagccgagattgcaccacttcactgtagcctgggagacagagcacgactgtgtctcagaaataataataataataataataataatmataataataataataaatttttttaaaaatgaaacttttaggtaaaagcttaggagagaagctttatgacattgaatttggcaatgatttcttggatatg

SEQ ID NO: 209411 - DNA, 201 bp, Homo sapiens
tttaagatttgatggacaaattcgtacctattaatcattaatgtgttagcatatcactttcttaactcacttgtgtagctcactcttctgtctagtctatmctcattcctctttttgtatgctttccttcccattatgtaactctgtcccattcttctctcccttccttcttttttttcttttttttttttttgagatgga

SEQ ID NO: 209412 - DNA, 201 bp, Homo sapiens
acaaggtgaacatcaccagtgataagtcatgttgataacacctaccatctgatatgacatgaggagggaactttacctgtgaagtgttccttccaaaaackaaccccattctaatcataagacacatatttgacaaacccaaattgagagacattctacaaaccactgaccaggacttctcaaaactcttaaggtcatgaa

SEQ ID NO: 209413 - DNA, 201 bp, Homo sapiens
tcccccttttgaacttcctagaattgtgctattcgacaagatagccatcagaagatatgtgagtcttgtgcatgtgaaatgttgctatttcatttgagatrtgctgcaagtgtaaaatacacaccagatttagaagacttagtacaaaaaaatatataaaatatctcaacaataatgttttgatattgattacatgtggaa

SEQ ID NO: 209414 - DNA, 201 bp, Homo sapiens
ggactgatctagtcaaaacctggatttgattatatcacaatcattgcaaatcctttcatttttttccctattcacttggaataatggcaaaactttttggsgggggtgttgcctcctacctagcctgtcacctcatctcccacaatagctcccttcactacttctgtctcaactacagtgacctatcagtttttcactctt

SEQ ID NO: 209415 - DNA, 201 bp, Homo sapiens
atccaaataaaatttgaagtttaggtaatagtaatatattaatgttagttgcttagttttgatgagtgtaccatggagatatgagatgttgccaagagggkaaactgagtaaggaatatacagggattttccatactatctttgcaacttttctataaaatctagaattattccaaaataaaaaaagtatgttaaagatgt

SEQ ID NO: 209416 - DNA, 201 bp, Homo sapiens
tagaaaaaacatttatgaagaattatgaatgacttacaaaacaaaagttgtgaatttgtagcagtgtgactcttagagatggaggatttaccatttaagcratggcaaaagttgaagcctaagcttgacttctgctcatcaccctctttcccactcgcaggaccttgaacgtgacttgcatgtgctcagggtctcacagtt

SEQ ID NO: 209417 - DNA, 201 bp, Homo sapiens
ttttgaacttcctagaattgtgctattcgacaagatagccatcagaagatatgtgagtcttgtgcatgtgaaatgttgctatttcatttgagatgtgctgmaagtgtaaaatacacaccagatttagaagacttagtacaaaaaaatatataaaatatctcaacaataatgttttgatattgattacatgtggaaatggta

SEQ ID NO: 209418 - DNA, 201 bp, Homo sapiens
gtagcgtgacataaagtgcaaaagcaagactgccctggccccatcccagctctgccacttactacctatctatctgtggggaagttactagtaaccccccyttttttttttttctgagacggagtctcactctgtcacccaggctggagtgcaatggtatgatctcggctcactgcaagttctgcctccctggttcaatcg

SEQ ID NO: 209419 - DNA, 201 bp, Homo sapiens
tagaaactaatataagttcaatacataattgtagggaaaataaataaatgcataaattaatcaatggtaactgatggagtatgaatgctttgcagtagaaragtgataatttcccatctttttttccataccaaaggcaaattctatcttctccatcattctacattcagattacccctccttatttacagacattatcag

SEQ ID NO: 209420 - DNA, 201 bp, Homo sapiens
caaagtctccccaggcaccaaacacgttctttttttttttttttttttttttttttttcttatgaaaaactacctcttctaactctaggacacctcagaayttccgtttgtccaaccccatcaaaaagtgggcgaaggacatgaacagacacttctcaaaagaagacatttatgcagccaaaaaacacatgaaaaaatgct

SEQ ID NO: 209421 - DNA, 201 bp, Homo sapiens
tctccccaggcaccaaacacgttctttttttttttttttttttttttttttttcttatgaaaaactacctcttctaactctaggacacctcagaacttccktttgtccaaccccatcaaaaagtgggcgaaggacatgaacagacacttctcaaaagaagacatttatgcagccaaaaaacacatgaaaaaatgcttatca

SEQ ID NO: 209422 - DNA, 201 bp, Homo sapiens
acattctacgtgctcataagttttatataggcaaggatttttgtctgtggttcactactttatccccactccctaaacagtacctgacatataaatcatcwataaatgtttgctgttttaggggataaattatcctgcagcttgcttttatgatcagcaataggtcttggagatctttccatgatagcccatatagaacct

SEQ ID NO: 209423 - DNA, 201 bp, Homo sapiens
gctgggtgtggtggcgcatgcctgtaatcccagctacttggaggctgaggtgcgagaatcacttgaacccaggaggtggaggttgcagtgagctgagatcrtgccactgaactccagcctggcaacagagcgagactccatctctaataataataacaataataataatataataccaccaagtatctagctgaatgtgaa

SEQ ID NO: 209424 - DNA, 201 bp, Homo sapiens
tggcttttttgaaatagaatttgtatctctgaaggtacacacattctgatctcctctaggtttgtggattcctttctcttctcctgcaagtgaaaagagcwtggaatactttttatgggccaggatattgggtatctcatccccacccacattgcattggctagaaattagtcacatgccctcttttaactgcagtagggg

SEQ ID NO: 209425 - DNA, 201 bp, Homo sapiens
ttaaaaaaaattagtagcacctgttcgcaagggatttattgtgtttagtgatcagaagctgagactttatcatctgtctccagattgtcaagtcacttaayatggcctttgaaatttctgtgctggtgctgagtgatgaacaagcatcaaagaggtatttcactgctcattcagtcttcttggccactgatgagagccaga

SEQ ID NO: 209426 - DNA, 201 bp, Homo sapiens
acaatatttgagaaattagcacagatagtaagagtttaatacaatgagttagggagttaatgtcattaaacaaagccagaattttagaagtcagaccaatrtggatttgaatttaggctgtgcaaggtgttagcagtgtgacttttggcaagttactctaattgaccttcagacttcttaaaatggggataataacattag

SEQ ID NO: 209427 - DNA, 201 bp, Homo sapiens
ggtttgtatcctgataaacccatcattaagttgaaaatatcttaagtcaaaaaatgcatttaatacacgtaatcttctgaaaatcataactaagcctagcytactttaaatgggctcagaacaacttacattaaactacaactcatctactacaaaatcatctcatgcaaagcctatttttaaagttcgaatagctcatgt

SEQ ID NO: 209428 - DNA, 201 bp, Homo sapiens
aaagggctccaaggacccagataagggctagagacagtggcagctgagcatcctcaagggaaaataaaaggtacttctcttcatagatggtgcctggaatytgaaagggtggggccttcgggagatctgcgattaatgtctgctcgttgttgtatctgaggaacactggatatgggttgtttgattaatgtcttggcagca

SEQ ID NO: 209429 - DNA, 201 bp, Homo sapiens
agaacctcaaagtctctgtctctctgaaaggtgagtccagacacagagagcagcagttgctaaagtattcatcccggaaaagcaggcaaacagcactcttytaggagctgagccgggtcagctcaactttacaaaatacaagtggagtccagttcgttgcaatttgggacagtgccatctcttaatctgactcagcacctt

SEQ ID NO: 209430 - DNA, 201 bp, Homo sapiens
atcctcaagggaaaataaaaggtacttctcttcatagatggtgcctggaatctgaaagggtggggccttcgggagatctgcgattaatgtctgctcgttgytgtatctgaggaacactggatatgggttgtttgattaatgtcttggcagcaacatttggagaaaaaaaaaaatagatgtttgatgatcctcctccaactc

SEQ ID NO: 209431 - DNA, 201 bp, Homo sapiens
agtataaataatagaaatcacctcatgaagtacttacaaggattagtgaaattactcagggaaagtactgagcacaacactagctataataatggctgctrtgttatcagaaggaattatgtgttttttacctcagtcttggtcagactttaacttggttcttttcacctgcctggagccttttcccactccccactcact

SEQ ID NO: 209432 - DNA, 201 bp, Homo sapiens
cctggttttcttacccacctgtatgaaaccttaacctgcgcctcttttacataagtcagttttgctttgcaggactctttatatggtgtctctatgaaatrggccactgcaggtacttaacatacattctctgtttgccagaaacttccttaaagcatgacagcagagtgttccccatcacagccccaccttatctgtgcc

SEQ ID NO: 209433 - DNA, 201 bp, Homo sapiens
tgtacctggtttattttactgattagaaaatatgtcttttggggtaagagctaagtaaaggaaacactcagtagtatcattgccactataccctcaactcaacacacacacacacacacacacacacacacacatatatacacatattcatatatgtatacatacacatatgtactggtgcgtgtgtttctctaaagatct

SEQ ID NO: 209434 - DNA, 201 bp, Homo sapiens
ccacttgggtatcttgcctgtcttttccagcaagagtatgagttgctggagagcagagagttcatttcatcccataatagcacatggtggccacaaagacmcttaataaatgctgcttgtttgcttaaatagaggcagtatagtttgctgaactctggaggcagacaagcttaattttctacttactagctatgcagtgaa

SEQ ID NO: 209435 - DNA, 201 bp, Homo sapiens
aggactctttatatggtgtctctatgaaataggccactgcaggtacttaacatacattctctgtttgccagaaacttccttaaagcatgacagcagagtgytccccatcacagccccaccttatctgtgcctcttgcctttagctgtgcttggcttcagaagaacaatgtgattttactcatgttgcaaatgaaacaaaat

SEQ ID NO: 209436 - DNA, 201 bp, Homo sapiens
tggcctggttaaatccctacccatctttcacattccaatacatacattctcagggaagcctcttcagttctccctgagcaggttaaatccctcttggcagkatatcctctcttttgcgcacctagcccttttaattatgtctatctcccctgacaagaacaggtatatgatgccaggacctgtgtctggttctgcttacca

SEQ ID NO: 209437 - DNA, 201 bp, Homo sapiens
tacctggtttattttactgattagaaaatatgtcttttggggtaagagctaagtaaaggaaacactcagtagtatcattgccactataccctcaactcaacacacacacacacacacacacacacacacacatatatacacatattcatatatgtatacatacacatatgtactggtgcgtgtgtttctctaaagatctcg

SEQ ID NO: 209438 - DNA, 201 bp, Homo sapiens
cagacatggatatgctgctggaggttgggggaatccattcactcacacatgtgcatgcatccacacatatgccatgcgtgcactcacacacaattctcttytaaattagtcttctacattatataggaaagtaacttctttattaattgttaagagaattaagaagtgttttccatttatagtcaactcactgtaaactat

SEQ ID NO: 209439 - DNA, 201 bp, Homo sapiens
atttcccccagcagactagtgtaggcagtgccagcatgcacatccttcagggatgatatgaaggagattccagctctgcagaagtaggatagatggcttcygtgtctccttctactgtaagtgttagcagcggaacgtatctgagtcacgtggcaccaaagtatgttaccagaggcaaatctgtacaggtctacagcaacc

SEQ ID NO: 209440 - DNA, 201 bp, Homo sapiens
atctacctacctacactagcataagccactgttgtctctcaccactgtgactgcaataatctcatctggtctccattcattcttgctcttttatacagtaygaacccttcaacatgtaattcaaatatcattccttccctgataaaaaacattccaggagcttcccactaaactcagaataaaatccaagttatttaactt

SEQ ID NO: 209441 - DNA, 201 bp, Homo sapiens
cctgttgatcctgatccaatcactagagggcagactgcacagatgtctaaaccacatattcaggctttggaaattatgaagtaggcgcaaagcacatgcaggtagaataatgaagagatagaccccaaagtagaattggggtgctgttgtcacaagaagagagcataaatgctgtgcagaaatataacaaatatccactga

SEQ ID NO: 209442 - DNA, 201 bp, Homo sapiens
agcatagaagagctcaactatagaagtatagagtatagaactatagagtatagaagagcactaaaaaaaaaattatctttggcacaatagcaaacaaaatwttcaggcaactagctggaacaccagtgagaatttacattcactggacacgtgaggggatctttattataatatggtgagcaattaagcttttgcaagtta

SEQ ID NO: 209443 - DNA, 201 bp, Homo sapiens
aggttctatcaggtgggcacaaaagtaattgcaccaacctaatgttttttagtttttctacagatgacataaatgctgatgtggttctgaacacacccctaagcaacagaagcatcatttttcaagggccccaaagactcctccttctctgaaccatcacaagtattatgaattatccagagatctgtcttattgatggac

SEQ ID NO: 209444 - DNA, 201 bp, Homo sapiens
aatcaaagggtagaggtggcattcagtctctaagggctcattaaatatgtgtcactgtgctccctttttagatatgttctccttgggcagtagccttatgtttttttttttttcccctagcaaatgttcttccatctggacttcttccatctggccagaacaagtaggtataactcctgactggcattcttatggctcaca

SEQ ID NO: 209445 - DNA, 201 bp, Homo sapiens
atcacaccactgcactccagcctgggtgacagagtgagactccatctaaaaaaaaaaaaaaagaagaaagtatggctacaaggtctcatcttctgatccayataatggctgcctggagttctgtctgaggaagattctgagaccatgtctagggttagtggggaagaaagttgcagtcatttagtgatgtgtgctagagtt

SEQ ID NO: 209446 - DNA, 201 bp, Homo sapiens
acaagctatttcctggaggtatgttttagtcctaggcaacctaaaattaatgacagctcttattaggaaaggtggaaatgaagcatcaaactatcagggaraagaatacatttccttggtaggcctgagatgcacagtttcttaaaacaacttggtgggagagattgaaacttagcacaattcatagccctatcactgact

SEQ ID NO: 209447 - DNA, 201 bp, Homo sapiens
ctgtgcttcctgggcagctgggcgcgtagtggcggagactcctccgggccctagggctggggcgggggctcggctggccccggcagccccagtgcacctckcatccatccgggctccgcgaggcgagctcggcgttcagcagcaggtggacccggcgcccacgggagttaaaatggccctcagggattaggctttttcagg

SEQ ID NO: 209448 - DNA, 201 bp, Homo sapiens
caatgtaactttttaaatttaaattagtatttctttaactttaattattttttacatagaaaaactgaacccacagacttagagatataattgctaggtcaaagagtttgcagaatcttttgggcttaggttgttgggcaaattgccatccagaaatgtgtaagacttctcattttctctcatgtcaaccagggaatcagt

SEQ ID NO: 209449 - DNA, 201 bp, Homo sapiens
tatatttatcttttatttggaaattacagaaaatcctctcatttccaattatcaagatgcatggacctagagctataaaaatccatattatttctttcatsattgaattgacttccttaattgttataataattcaaatttcagcttatgattatcgtcttaggttttttttcagatcgattccacacccactaatgaact

SEQ ID NO: 209450 - DNA, 201 bp, Homo sapiens
tcagtgtagacaagagagccttatgttggaagaagatccaatctaggactttcatagctggagagaagtcaatagctgtcttcaaagcttcaaaggataasctgaccctttcagtaggggctaatgcagctggtgactttaagttgaagctaatgttcacttaccattctgaaagtcgtggggcccttaagaattacacta

SEQ ID NO: 209451 - DNA, 201 bp, Homo sapiens
aagagtttagaaatagaagaaaaaatcaataaaataagatggctcccccagcagaatgcagcttactttcttctgtctactaatggtaggtggaattcctrtttggtattttcagagatacagtcggccaaactatatacttcaatctctcttaacctcaatttcctttgaactgtgtgggctgttgaaaaacttagaaat

SEQ ID NO: 209452 - DNA, 201 bp, Homo sapiens
aatgtaactttttaaatttaaattagtatttctttaactttaattattttttacatagaaaaactgaacccacagacttagagatataattgctaggtcaaagagtttgcagaatcttttgggcttaggttgttgggcaaattgccatccagaaatgtgtaagacttctcattttctctcatgtcaaccagggaatcagta

SEQ ID NO: 209453 - DNA, 201 bp, Homo sapiens
ataacaagcaggatggcctacataattctggacacaaagcaaaatgaaaagttatggtcccttattcaaaaagtatttcaaatttcaggatggtgaaagcwgatcataaacctaaacaaggaggcccttctgaccacagggtcctgtgtgactgcacaagttgttcatctatgaagctggccctaataaaaagcaagaggc

SEQ ID NO: 209454 - DNA, 201 bp, Homo sapiens
tctactgaatcaatgtctaggcatggtcacctagaaagctgcatctagtgaatttgactaagtgtggggaccactgagcaaactggtctccctgtgtttaratacctcagcccttacctttgtctcagcattgtagttgcagctcagtataaccctagagacagggaactgaattcttttggctctgttgcccacacttag

SEQ ID NO: 209455 - DNA, 201 bp, Homo sapiens
gtcttcaaagcttcaaaggataacctgaccctttcagtaggggctaatgcagctggtgactttaagttgaagctaatgttcacttaccattctgaaagtcstggggcccttaagaattacactaaatctattctgcctgtgctctaaatggaacagcaaagcctgaatgagagcacatctgtttacagcatggtttactgt

SEQ ID NO: 209456 - DNA, 201 bp, Homo sapiens
atttgtcttgtttgctgactacttagcagatgaatttgtgattttggtaattactatgtgaacattaataagacatgatatcttttattaattagcacttyatggggtttttcaaaatagcaaaatctagatgatttacaaatattaatgagtcactagtattagttttgcaaaattaacatttggaggttattcactcta

SEQ ID NO: 209457 - DNA, 201 bp, Homo sapiens
aatctcatctggtctccattcattcttgctcttttatacagtacgaacccttcaacatgtaattcaaatatcattccttccctgataaaaaacattccagkagcttcccactaaactcagaataaaatccaagttatttaacttggcctataagattctgcgtgatctggaacctgtctccatctttgttatccagtcttg

SEQ ID NO: 209458 - DNA, 201 bp, Homo sapiens
tggggctctctcccccgtagccagcctcttccttccatgtacacacgtaccagcaagccatcatgaaaagccacttcctagcagggactggcagtcatgargttatgtagcaaagaacagcatctttagtaggttaactcagtcggaaagcacttctgaacaaagcaatcaggtggcatattgttactgccctccctgaag

SEQ ID NO: 209459 - DNA, 201 bp, Homo sapiens
agtctttgattcaaagcttggcttcaccatatgctaattatgtctttgggcaagttatttaactcctcttaacctgtttcctcatctaggaaatgggaackttcatatataggttttgcatataattgatttctaattatttattcaaagtctactcgtgtcaggcattcagctagaggctagtgaaacaactgtgaatta

SEQ ID NO: 209460 - DNA, 201 bp, Homo sapiens
gctgatttcaaaattaaaaactttcatctttactttcatgaatctaagtccccacacaccccaaaattgcattctaggctagaaatggatttaataacttmtttctctcctgttttttttttctgttgaaatttattttattcctaccaatgagcggcactgaaatgaactttcagtaaagtagatttgcagagacagagg

SEQ ID NO: 209461 - DNA, 201 bp, Homo sapiens
attctcttactctgcacttaaatcttgtcgttgtgactggcttcccatcaattatgagaattctagtgtctgctctaactataggtcttaccagttgcagrtttattatttgcttaagacaaattaataagataatacagatacagcattggcgtcagtgctcaatactttgtaagtactcgatatttgtaagctattaat

SEQ ID NO: 209462 - DNA, 201 bp, Homo sapiens
ctaccattaattgtgtgcccttgggcataactttgaacctctatataaatgaagatccttatttataaaatggatttcttaaattgatagacaccaatgarcagaataaacatttttttggctctgaggctcatatataatgctgtacaaggaatgaccttttactgaggtaggcgcttggtgacaaaagcacaaacatag

SEQ ID NO: 209463 - DNA, 201 bp, Homo sapiens
gttacccattatggctataagggctaggggtgtgggtgtgggtgtgtgtgtgtgtgtgtgtgtgtgtgtgtgtgtatacacacatacatatatgtataacrtatatgtatatattatatttatgcatacatatgtgtatattgtacatatataatatataatatacaatattatacatatataataatatacaatatacaa

SEQ ID NO: 209464 - DNA, 201 bp, Homo sapiens
actccccagtctggaaggccttaacattggcagtttcttctacctgggctgctcttcttccagacatctgcatagccaatttccttacttcttcaaggctwtaagtgttgccttttcaatgaagcctttcttgagtacctatttgaaattgaagtccccttgcacctttagtctttctgatctgcattaacctattctgct

SEQ ID NO: 209465 - DNA, 201 bp, Homo sapiens
aacaatgacataatgctcctttacatatggcaacagtctaaccttgcctcaaagtcccaggagtggatggttctccctgtttctacattgtatcttctttkccctatgagctggcctgtctttgtgtgttcaaaggcccagtgatatactctggaagaagaatagcagattggctcaggtatgttttctgactgtggcact

SEQ ID NO: 209466 - DNA, 201 bp, Homo sapiens
tggaatttaccattatccccaaaatttgggcagaggagattgaagccaagctatattttttggagtctaatatggatttatttttcttcctcctccaagayaaaatatagctagactcagtagaagacactatatatccgaaccacatgagaaaactggaggcaacttgcgcaaatgctcacacaacggcatggaggaggc

SEQ ID NO: 209467 - DNA, 201 bp, Homo sapiens
ctggcctgtctttgtgtgttcaaaggcccagtgatatactctggaagaagaatagcagattggctcaggtatgttttctgactgtggcacttatttttgayacttattccttgggtcgacctattagtggatcttgtctgtgcatggcaaaaataatacttcctttaaaggagtgttaataatcacaataaagcatctagc

SEQ ID NO: 209468 - DNA, 201 bp, Homo sapiens
aagagttgttgttagcttcgttataaagaaaagcttcctgagatgattgaattaaagaaaattttacaggcctcacctttttattgctttcaggcaacttyatctttctctaaagattgatctgtaataaaaaggaacttgctagattacatcatacccaaatgtgtcttcatttttttccctaccagtttgggaggtggg

SEQ ID NO: 209469 - DNA, 201 bp, Homo sapiens
gttatatatcttttaaaataaccaatatgggtatacaaagggctccttttaatctcgaacactcctgttattcaattgggaaatagctcttcaagtatttmtttaataatttccttatttttgatttcctaattcttcctgatacttctattaattggatattagtcttcatagaataatttcctaatttgtatatctctg

SEQ ID NO: 209470 - DNA, 201 bp, Homo sapiens
ggtgggggacagtgtctagagttatcctaaagctcagaaatgacctttgaaatgagtccttctcaatagtattctacatatcttgagtgattctttttttycttccgtttattatagttttattgatatatagtaattgttcatatttatggggtacatgtgatattttgatacatgcatacaatgtgtaatcgtcatatc

SEQ ID NO: 209471 - DNA, 201 bp, Homo sapiens
acaatatacaatattatacatataatacatatacaatatacaatattacatattatatattatacatatataatacatatgtatgtaatatatatgtattrtatatatatatcaggccattaccaatagattgttataagatgttcaaattgcatcttggtgcaagatacttatgtgcatcttgggtatcaagtagcagac

SEQ ID NO: 209472 - DNA, 201 bp, Homo sapiens
atgtatttatttagtgaatgtcaaaaaacataaccatcatatcctacaatttcatagatattcaaaatctatttagattacaaagtaagtgtatgtaaagyattaagtaaatagtgagacaagggatctggagatatggttagaaaacagtcatgacttcctgtgactggcatttggtgtgactttggcattacggttgag

SEQ ID NO: 209473 - DNA, 201 bp, Homo sapiens
actaagatatgaggcaggtgccagcttaagcccattttacggtggaggaaattgagactcagaaagtttaacaacatatccatttacacaccagtctgacytcagagttgttattctcagctactgtgattgagtaatcttggaaagtaacctgacaccaagcaggggcttaataaatatttattgactgaaaatagcctt

SEQ ID NO: 209474 - DNA, 201 bp, Homo sapiens
tttctctaacttggagtttcttcaatgtggctattattttgtgtgtgataataaatgatattagcatgcacactcttttcctatggaagatctttggttcygaagtgatttgtttctcttgcatcccaggtgcctgtcctgagacccatggacctgatggtggaggccaccccacgaagagtatttgccaacgcacacaca

SEQ ID NO: 209475 - DNA, 201 bp, Homo sapiens
ctggttccttccttgactcgtctgtgccagatattgtggacattaagccagccaacatggaggagctcacggaggtgatcacagcagccgagttccacccscatcattgcaacaccttcgtgtacagcagcagcaaagggacaatccggctgtgtgacatgcgggcatctgccctgtgtgacaggcacaccaaatgtgagt

SEQ ID NO: 209476 - DNA, 201 bp, Homo sapiens
gggtcatatacatcttataacccataggacataactagaatcagtcttataatcccacattgcagacaaaaagttagtttagatattatagatagtagacytaattttcttcatagatatgaggagattaaggcagctagagataagttttaaattgtccaatgtcttatagagaccagaaagcaaagttttgaatcctac

SEQ ID NO: 209477 - DNA, 201 bp, Homo sapiens
taattaagcacgtggacattgtggggtggttcctggttttttgctcaaggtttcaagtaaggattacgcctttttcttagtatatttatttttagtctatyatatagagctttaaaaaagagtgtataaataactttataccaatttggttgcaggtaagaatattgaattttattcatccatttattcagtaaatatata

SEQ ID NO: 209478 - DNA, 201 bp, Homo sapiens
ttccatccatagccagtctgtccttgtcttgtgtaacagtttcccacataagcagtcaaactttcgtcttaataggctaactacatcaggactataacaastcattaatagattagtagttttctagggcaagagacaatagcaataaatgaaaatttatattaaaagatgttgcttctttatgaaaactatggtatacct

SEQ ID NO: 209479 - DNA, 201 bp, Homo sapiens
tagacctgaccatgtcctttcagcttatagttaaaggaacataagatctgttgttttttcattttattttttactgtgggtgatatttccataattgtatyagctgtttcttaagggtcattatcatctattgtttcatgagtgatttttctgattacgatttaaagcaacctttcccaaaattatggcacagtcgtttgt

SEQ ID NO: 209480 - DNA, 201 bp, Homo sapiens
tcattaaatgtttttggttgtttcataacaatagtaatctcattttctttcaaaagtagagtttgaaatttgggaaaacatgggtggggagggaattctayattttcttcctagttgaagtaggaagacaggtctcttttctgtattaattggactcctgaaattcccccagggtagcagtggctctctgtgggcacaggg

SEQ ID NO: 209481 - DNA, 201 bp, Homo sapiens
caatccggctgtgtgacatgcgggcatctgccctgtgtgacaggcacaccaaatgtgagtagcaactgaagggaggtggggggcatggccactggccccartgtgctgggggagagcctggaagcttatgatctccctttctacaccagacacactaggagtaaagaaactacaagtgggagtcagctccgtattttatat

SEQ ID NO: 209482 - DNA, 201 bp, Homo sapiens
cttttctcagatactctcttctcttgctcatcccatcctgtttactttttatctcctttgtgtgtgtgtgtgtgtgtgtgtgtgtgtgtgtgtgtgcacaygcctattcctgctgtctctccttggaaccagcaaaccttcttctctggagttatttcatcttcatccacttcatataacaatttattttctagaatcact

SEQ ID NO: 209483 - DNA, 201 bp, Homo sapiens
gacttatctgggagaagccagctggactctagggatacttcaactttgaccttggtcctaacaaccctgtacagtggcttcattttatttgtcaaccaagytgaagccctgttagagtcgattccctaattaagggaccaggtagcctcaactcttggcttccaggttctagcactcattactaccatggacagcagcttc

SEQ ID NO: 209484 - DNA, 201 bp, Homo sapiens
ttttaaatcaaaagctagaaatgattaagcttagtgaggaagacatgtcgaaagccaacacaggcccaacactgggcctcttgtgccaaagagttagccargttgtgaatgcaaaggaaaagttcttggaggaaattaaaaatgctacttcagagagcacacaaatgataagaatgcaaaataaccttcttgctgacatag

SEQ ID NO: 209485 - DNA, 201 bp, Homo sapiens
tcccctcacctccagcactacacacatactgtctcctttgccagaaatattttcactctctctttttctggcaacccccattcatcattcaaatctcagtkttggtttcattttcccaagtaagcctttcttaaccctgaactctgagctttgtggcccttgtagaaggtcctgaatgttctccatcatacacttaccaaa

SEQ ID NO: 209486 - DNA, 201 bp, Homo sapiens
tactctgggcagttgtaacacaatgataagcatttgtgtatccaaacatatctaaacatagaaaaggtccaggaaaaatacggtattataatcttacgggracaccttcatatttgcagtccacagttgactgaaatgtcattatggcacatgactgtattatcatcatctattaaaatcaaatcatgtttccatggctca

SEQ ID NO: 209487 - DNA, 201 bp, Homo sapiens
caacatggaaaaccgccccatcgagacttaccaggtatagaaccccaggcacccataggtatattgaacattcccttcatgagcttttaagtcagcccctrcttccaaaggtttacagtgcagcaaaatggaaggcaatgcatggtgatacattcagtaaaatggtacaggctataagtgccacaggatttaagataacgg

SEQ ID NO: 209488 - DNA, 201 bp, Homo sapiens
ttccctctatgaaaatgactgcatttttgataaatttgagtgtgtgtggaatgggtcagacaggtaagaaaggctctgtggctgaagaaccttccaaagaytgtcttgaagaggctcagggaatttatcctaagtagagtacagccaaagggaggtcaaaattgggccccaaaacctggctgaaatgcataatgtgggccc

SEQ ID NO: 209489 - DNA, 201 bp, Homo sapiens
tgcgaaaagagaaactcaccacacgggaaaaggtagaggtttcaggcagagcatttcagcgtgtgtttacaggcaggactgacttactcagcaaatcctgytcagaggagcttcagccaatgaagaggctatatcccggcttgcttgggggcttctgagtttgagctgcatgcagaaatgtaaggcagtgcttcctggcgc

SEQ ID NO: 209490 - DNA, 201 bp, Homo sapiens
caaaaatcagtaggtgctgccacatacatctgtccgagctctctgttttgtcactgtctgtttgataacttggtgcatgcccaagaaagcaattagcaaartagaattagcttagtacatcactgtggagtgttgattgttggattggttcacttggagtctgtacttgggttacagagcagtaagaacacagctgacttt

SEQ ID NO: 209491 - DNA, 201 bp, Homo sapiens
ctccatgaatatttacacattgacttttttttaagctcttaagagaggaatatcccttggagtcctctttggagatttccagtgtctcatcatcaagcaayatgtcctttcagctaataagatctttatgtttcataatcattgcttaatatccaaagattaaatttagaccatggaaaggaaaaaagatctcaaagcaac

SEQ ID NO: 209492 - DNA, 201 bp, Homo sapiens
cctttaaaaatttattggtggcaaaaggaaatggtccactgagaaatcttttcttcctcgtggagaaaaacttagtaagtccttatccatattgaggggakgagaggaatgaaagaatggcatggactaaaatctccaggagaacttttcaaatactaaagatctaaagccatagagaaactgcctagatgacttttgtat

SEQ ID NO: 209493 - DNA, 201 bp, Homo sapiens
tttgaatgtgggtactttaccctggtaaacatagattccactcttcagcttggccaatgtttataatactcagccctgcagaaaagcgtcctacttggctstcttatcctccattggcttagacaggaattggggaaatacgcatgtcagtattagcaaaatcagcagcaaagggacagaggcatatgaaagtcacctcac

SEQ ID NO: 209494 - DNA, 201 bp, Homo sapiens
gaggaggctctgggacatagtggaaaagacatgggttatgtaccaaggtaccaagaaagcagtgccaggtcacttgattgctctatgcccagttttatctrtaacaaggatgttgagatgaactgttaccactgaataaagttctttgtaatgctccacacatgataggtgccgtctgtttttgagtcccatgccccacgt

SEQ ID NO: 209495 - DNA, 201 bp, Homo sapiens
gcacctccacccacagctttccctgactactcattttctcatccatcattctcatcttataaatgcacacctacatttaaagtcttttccaagtgcacacrgcatttgtctgtaacatggaaatagtaatgctcaactcaaggagttattgtgagaattaaggaagacaaaaaccttacattgtttgatattgctttatgt

SEQ ID NO: 209496 - DNA, 201 bp, Homo sapiens
caactcaaggagttattgtgagaattaaggaagacaaaaaccttacattgtttgatattgctttatgtctgaaacatattttttgaattttatgtacaatrcatgaattatccctgctttcatctaaggccaagcctccactttaagctgggtcatctcccctctctcttactcaagcacatcactcctgcacttgttcct

SEQ ID NO: 209497 - DNA, 201 bp, Homo sapiens
gatcgatttctctctctctctgcctctcctctcacccccagctagttttaccctatttatttttccttcacagcccttatttttacctgacctgttatacwtccatttacttgttttttgcctgtcctttcccactatagaatataagtgacatgaaagcaaaggctttctctgttttatacatttctatatctccagtag

SEQ ID NO: 209498 - DNA, 201 bp, Homo sapiens
ccttaagccgaagtctaacctagagcaaggctctctcttttgttctatgaaggctgacagaggggaggaagctgcagaataaaaaatttggaagctagcaraggttggttcatgaggtgtaagaagccatctccataaaataaaagtacaacatgaagcagcaagtgctgatgtagaagctgcagaaagctatccagaaga

SEQ ID NO: 209499 - DNA, 201 bp, Homo sapiens
gcaagtctgcagcccaaggattggccacagaaatcccctccttcggatgacaccaaagcagccttcctgtccaggggcagtctgactttttcatgctgagrgggaaatggcataagcactttagaccttaaaatctgagatgttaggccaggtgcggtggcttacacctataatcccagaactttaggaggctgaggcggg

SEQ ID NO: 209500 - DNA, 201 bp, Homo sapiens
cacacacacacacacatacgcacgcacacatttagggtagtgccttgctaagcaaatgctcagtaaacaggactagcacaatcatgataattattgagagwacaaggaaactagaaaagttgaacattagaatggtagcttttattctgctaattttattatctggattgtcttttcaattctagactcttcctttggttc

SEQ ID NO: 209501 - DNA, 201 bp, Homo sapiens
aagtgtttttgtaagtaaagttttgttggaacacagccacaccctttcagttacatattatctatggctgctttcctgctgcaactgcaaagttgaatagyggtggcaaaggcccaaaaggctgaaaatacttgctgcatggtccttatggaagctcgcctagtttaggatatggactcacacttttttctatccatttat

SEQ ID NO: 209502 - DNA, 201 bp, Homo sapiens
gtagtcttttatccctcacctccttcccaccctttccccctgagtccccaaagtccattgtgtcattcttatgcctttgcatcctcttagcttccacttaygagtgggaacatacaatgccaagaaccttccttctattcaatctaggacatatagagacataatttctctctccctttcctgcttttactgcttagtagt

SEQ ID NO: 209503 - DNA, 201 bp, Homo sapiens
gcaaaatggagatagaatcaaaactgaatcccaatctctggtccccattttgttacaatcacagtatttttcacaatattatctcaaactttacccatcgmgatgaggttcctggtctcgcagctctctcacagatgattttaagccagggaaactgctattttttaatgcttattgttttctttgtttaatatgtattca

SEQ ID NO: 209504 - DNA, 201 bp, Homo sapiens
ctccagagtccaggctctttgctgccctacaagactgcctacaacatttcaggcattgttcttagcacatgggtaattaaaagataaaaaacactcatctrttctttaaggtatacagtctagcaggagggaaaaatgcatacgcacacaactctaacagtaggttttaaccctggctatgcgtgagaatcaccttggcaa

SEQ ID NO: 209505 - DNA, 201 bp, Homo sapiens
tgtgagttcaagccctgtctaaaggcaacacaattcactttttaaacaaaaaagaaagaaagaaaatatattatgcaaggaaaacagagctgccccagtcytgtagcacacctattcccatcccattagaaagaattataaaatttctatgcaagagaagacttctgaattcatctatgccagcccttcacaggtgccctg

SEQ ID NO: 209506 - DNA, 201 bp, Homo sapiens
taagtaagttgcccaaagtcacatagttagcaagcaggagaggtgggatttggacccaggtaggctggctccacacctctgttctcccgcttctgagatgkagggaaaacacaggctttactgttacagtcctgcatttgaataaaagctccaacatgtcccctggccaactgactgcccctaagtaagcctctgtttctt

SEQ ID NO: 209507 - DNA, 201 bp, Homo sapiens
cagtaacttttaacatagtgataagggctgggaacataaaaacagggtaaatcattacagtgactgaggggtgatgggctaccaggaattgggcagacagrgaaggcatctctgaagaggtgcatttgagctgaggcttgactgatgggaaagggtcagcaatgcgaagagcccagtggggagcattccaggcagagggac

SEQ ID NO: 209508 - DNA, 201 bp, Homo sapiens
ttaaagtcttttccaagtgcacacggcatttgtctgtaacatggaaatagtaatgctcaactcaaggagttattgtgagaattaaggaagacaaaaacctkacattgtttgatattgctttatgtctgaaacatattttttgaattttatgtacaatgcatgaattatccctgctttcatctaaggccaagcctccacttt

SEQ ID NO: 209509 - DNA, 201 bp, Homo sapiens
tacccataaacagtgaggccagccttttgctactatatcaatttccttacttaggtatgccactggttgtggggttgtcccacgagtctgagtaaggaccmcaagagctattcctgttctctctgtgatgtataaagaaaagtttcatcctgtgggaaggcttaaggctggagcttgagtttgtttcttccaatgcctaga

SEQ ID NO: 209510 - DNA, 201 bp, Homo sapiens
tcatgccccctgcccttgcagcactttattgaaggagaaggaatctaacaacacacacataaataagattgagatttagtgaaaatgtttcaggggaagargcaacagcaaatggagtggctctgaatctggacagtgcttggcaggtcacagggcagaaagatgaccagctgggctgtgtacagtaccataaggaggaat

SEQ ID NO: 209511 - DNA, 201 bp, Homo sapiens
tctagttcgaagaatgatttggaggactttaataaagtatatgaagcatttagtacagggactgtccattagacagcattgaagaaaaaaaaaaaaaaaawccctggctcactggtttgtctcccacaacagaacaaggacctcgggagggcttagagtatgtcttttatttctatgatccccagttacctggcaaggagt

SEQ ID NO: 209512 - DNA, 201 bp, Homo sapiens
cttgggcagtagccttatgtttttttttttttcccctagcaaatgttcttccatctggacttcttccatctggccagaacaagtaggtataactcctgackggcattcttatggctcacaatccaaaatgaaagcaaaaaagggagaaaaattctcctttctctgtgtccatatataaatattccagagaagttctctgtt

SEQ ID NO: 209513 - DNA, 201 bp, Homo sapiens
tttttaaaagcaagctatacataaatataaagctaccttgaaaaaaatgtcaaaaaggcaactcactaatttggggataaaatacaaataccaaatgcatwgttacaatttttcctattcaagcaggaatactatgtttgaccattcaaaaatgtttcctctatgaagcaggaggtccagttcacctcataaatagatata

SEQ ID NO: 209514 - DNA, 201 bp, Homo sapiens
atgagtcttagaagtggcataacttgcctaagttgctgggaaagatgagaactgggaatcaaacccagctctatctgagtccaagcatatgcagacctcaraagttaggtctcagattggcacagctttaagacatgctccctcctctagccatgttttctactacccttttccaaactttacactgaagacatatcaaac

SEQ ID NO: 209515 - DNA, 201 bp, Homo sapiens
cccttttccaaactttacactgaagacatatcaaacttcttttagtttctccaacatactatgagaactttttttctcttttcttgccctctttactttcwatcctcctttacctggctcacactttcaggcctcagataaaatgccacttcagggaatatatttcctgacagcctaccaccatccccacatattgctggg

SEQ ID NO: 209516 - DNA, 201 bp, Homo sapiens
gaccgtggtaagaaggcacagggttctgattcatttttaaagtaaaaccagcagaatttcctgatggtatgagagagaatgaagagaattaagaataactygattttttttttggtctgagcatctgagcagataaattaatatcaatcaagatggaaaaagcctataggtggaagaggccccaggtgggaacagttcagt

SEQ ID NO: 209517 - DNA, 201 bp, Homo sapiens
aatgataatgcaaatacatatttacagtataactggaaaaaagcaaattatacaactaaggtaatatttctttaaacaacaatggtaataacaataatatygttttcataagaggataaaagctggggcaagagttgtacaaaaatgttaagcctggttgactccggtgggatgaagaataatttttacttaaaattattt

SEQ ID NO: 209518 - DNA, 201 bp, Homo sapiens
tacagacacaggagcaacctctagcaagccaagtttaaaaataaaatcggagcctgtggtcccagctactcaggaggctgaggcaggagaatggcataaayccgagaggcggagcttgcagtgagctgacattgcaccactgcactgcctgggtgacacagcaagactccgtctcgaaaacaaaaaaaaagtaaataaata

SEQ ID NO: 209519 - DNA, 201 bp, Homo sapiens
aataccagcaacaaccaccataaagggaaaaaaaatatcagaattcagagtcgttgcaatgtgttatcttaaatgtcccatttttaagaaaaaaaagtgtkacccatactcaagaaaagaaaaacagttaatagaaactctgtgttaccaaatattcgtggacaaaaatttcaaggcggctattataaatatttccaaaga

SEQ ID NO: 209520 - DNA, 201 bp, Homo sapiens
accataatatgctacagagaaatctttcatgaaaggaagagtcgatcgatatggcaaacttcattgttgtcttttaaaaattgcaacagccagccaggcgyggtggctcatgcctgtaatcccagcactttgggagtccaaggtgggtggatcacaagttcaggagttcaagaccagcctggccaagatggtgaaacccca

SEQ ID NO: 209521 - DNA, 201 bp, Homo sapiens; identical to SEQ ID NO: 36691

SEQ ID NO: 209522 - DNA, 201 bp, Homo sapiens
tgctagtgcagctcagagtgtgcactccagagcctgataccggggctcagttccctccccttctgtcactttttctgtgtgatcttggacaaatgatgtcwtatctctgtgcttcatgctccattaaagtaaagagaatgaaagtacctacatcataagatggctttagagatgaaatgaggttttgacagataaagcacc

SEQ ID NO: 209523 - DNA, 201 bp, Homo sapiens
aaagtgctccaggtaagagatgagcatggcttagactaagatggtgacagtggaaatggtgagattgaattgatttgggccgtactttgagtgtaaagttratagaactgtttttttaaaaaaaagatgtagagggtgaagtaaaggaaagcaccaaggacagctcccagctttttggcctgagcacacacctagatgaag

SEQ ID NO: 209524 - DNA, 201 bp, Homo sapiens; identical to SEQ ID NO: 36694

SEQ ID NO: 209525 - DNA, 201 bp, Homo sapiens
aaccctattttaagctatttggggttagataaaaagaagtgggggattctagacagaaggatttgacttacattttttccttgagatataatgtacataayaatcagcctttcaaagtgcacaattcaatgatcttagtttactcacaaaccaccattatctaattccagatcattttcatcattgacatttttaaatgaa

SEQ ID NO: 209526 - DNA, 201 bp, Homo sapiens
taatgagtcactagtattagttttgcaaaattaacatttggaggttattcactctagaatagtttttccctctgaagtcttttactgaagaacaaagaccrgagacaacatactgtaccctgcaccctagaaaaggctaatttggtctgcccaggcagaaatggtttaatttagagatgtacttacttaacacatttttcc

SEQ ID NO: 209527 - DNA, 201 bp, Homo sapiens
atttggaggttattcactctagaatagtttttccctctgaagtcttttactgaagaacaaagaccagagacaacatactgtaccctgcaccctagaaaagrctaatttggtctgcccaggcagaaatggtttaatttagagatgtacttacttaacacatttttccattttaattctctccaaagaggttttggtggtcaa

SEQ ID NO: 209528 - DNA, 201 bp, Homo sapiens
atttatttcacatacctcaggtgccagtcacgtgtcagatattgagtttggctgtaggagtacaatagcaaccaagacagataaagaagaatgaaggaaartcacctgctttagttctctctgtcactctctgcccagcattcatacttgaaatcatttgattaaatatataatgagacctactatatactcaaagagata

SEQ ID NO: 209529 - DNA, 201 bp, Homo sapiens
ggggaggggtatgtaaattgcacacatgtgtacgtgtgtgtgtgtgtgtgtgtgtgtgtgtacataggtagaatgacttctttggatttattgagtaggasgggaagatgatgtatgaatgagagagagctgggcatgcaaagggctgtaagaagaatgttttgcattgaatgccagggtgagcaatttgaatttttctcc

SEQ ID NO: 209530 - DNA, 201 bp, Homo sapiens
ccccagaatcaaggataataactggcagatcacaggcatttatatcattgtttaatttgtaaaattgtgggagttcttactatgtattaggccctctttasttatattatcttaattctaaccccaaacctgtaatatacatactaccttattttacagataaaagagcagaggcttagagatatcaaataactcttgtaa

SEQ ID NO: 209531 - DNA, 201 bp, Homo sapiens
ccatttttaagaaaaaaaagtgtgacccatactcaagaaaagaaaaacagttaatagaaactctgtgttaccaaatattcgtggacaaaaatttcaaggcrgctattataaatatttccaaagaactaaagcaagccatgtttaaagaattaaagaaaagtggggtaacaagagatcaacaaatagattcttaataaggat

SEQ ID NO: 209532 - DNA, 201 bp, Homo sapiens
agaccagcttgggcaacatagttgagaccctgtctttacataaataaaaactatttgggtgcagtggtgtatacctgtagtcctagctactcaagaggttygggggatgggggatcacttgagctcaggaggtcaaggctgctgtgagccatgatcacaccactacactccagcctgggcaacacagtgagatcctgtctc

SEQ ID NO: 209533 - DNA, 201 bp, Homo sapiens
gcctttgtcccagctactcaattcttccattgtagtatgtggacatggctgtattctagtgaaactctatttacaaaatcaaggagtagcctgtagaccaycatttgctgacccctgttctagaagagtaccgggaacctaatagaggtccaaacagtattaatcgtctaagtgagtggctgcagtaagtgctagagggaa

SEQ ID NO: 209534 - DNA, 201 bp, Homo sapiens
aggcaaaaaaaaaaaaaaatttacttttctttgaccctttaagaagattagtctgttcacagttttctcctgtgcttataaaccttcatgtttcctgcctrtcctctcatcttttaagtctctcctaattgatcttcaaagcattgaggctggcttgtgctgggtcctcactactccaggccattcctgcttccccttccc

SEQ ID NO: 209535 - DNA, 201 bp, Homo sapiens
catcttttaagtctctcctaattgatcttcaaagcattgaggctggcttgtgctgggtcctcactactccaggccattcctgcttccccttccctggtacytgcaaggcctgcctccagtccacattttcctgtgaagtttttcctgaattcctcaagttctttgatcaccacagcaatcctatgagcttatagatatttt

SEQ ID NO: 209536 - DNA, 201 bp, Homo sapiens
ggggagatgtcaaaagatgtgatctgagatttctgcaatcacttggaaactgtactggctaattaagatcataatagattatttattctttcattcactcrtgtttatgcgtgtgttctttcactctttaaccattcagcaggtatttactgagcaactgaaacttcattcatattatatgagttattacatgataatatc

SEQ ID NO: 209537 - DNA, 201 bp, Homo sapiens
tctgaaagactataggtaacatgatcaaattgtacaatacaatgtaatgtattattaacagtaacatcatggagcatttattaagtgcttactatgtaccrggcaatattctaagtgcttaagtgaattattttattttatccttactacaccaccatgaagaaggttgctattaccatcacccttttgcagatgaggcaa

SEQ ID NO: 209538 - DNA, 201 bp, Homo sapiens
aaaagggaagtgctgggccccatccccagtttctgattcagtaggttcaagttgggtacttgaaattgtcagggatgtgtaaggcacagctgaaaggccaygtccatgggtgctgtgcttgctcagtcagtcttatacagaatgtctacctggagggcttactgccttgtgcaggcagcccagttggattccctcattcat

SEQ ID NO: 209539 - DNA, 201 bp, Homo sapiens
gtatgatttctcttatataaaattttatttgtatagacaaagaattccatggaaaaatggcaacaaaaatatattgataactcaggctgatgaaattttargtaacttctactgtttttatattgtctataatgtatgacagttttaaataaatatatacattgtttatataataaaaacagtaaggctgccattgtggtg

SEQ ID NO: 209540 - DNA, 201 bp, Homo sapiens
taaaaatccaagaatatcccagaagcaaatgaactgaattcaagaactgctctacttactgataagttacccactcttccctctgatgttagtgtgggggratgtcatggtctaggaggatggatgagctccccatggaacccctagttagtctcttaattcctcagtgtaaatttatgttgtggtaatagctggtggtca

SEQ ID NO: 209541 - DNA, 201 bp, Homo sapiens
gcagtcatttagtgatgtgtgctagagttgtgacaggtgtaacagcatgcaggcagcatcagatatccaccactccttgcctgcaggaaaggccacaagcytaaggatagatggcaagcggtgtttagagagttcactgaatgcttttacttgccgcaagttaatctgcgtggtttatatcaatagtactatataatctgt

SEQ ID NO: 209542 - DNA, 201 bp, Homo sapiens
atttgtatagacaaagaattccatggaaaaatggcaacaaaaatatattgataactcaggctgatgaaattttaggtaacttctactgtttttatattgtytataatgtatgacagttttaaataaatatatacattgtttatataataaaaacagtaaggctgccattgtggtgagaaacaattcatggagtgtctgcta

SEQ ID NO: 209543 - DNA, 201 bp, Homo sapiens
tgagccgtgatcacggcactgcactccagcctgggcaacatagcaaaaccctgggtgggaaggaaggaagggaggaagggaggaagggaggaagggagggmgggaaaggaagaaagaaggcatgagttttatattgaggggaagctggaattgaatcctaggtctgacactgactagtgtagggcctttgggaagtttctc

SEQ ID NO: 209544 - DNA, 201 bp, Homo sapiens
ctgctaaactttttctgttaatggagcccttagtgtctcagtaattgtttaacacacccctatgccaaaaaaaaaaaaaaatctaacaatttctttattamgtagctaggcccaaacagctgtatacatatgtatgttcaaaaaatttaggagtcttttgaaaaatatacatattgaaagaaaaaaaaatttaatttttaa

SEQ ID NO: 209545 - DNA, 201 bp, Homo sapiens
agactaacaaaccactgcatactatggaaatgaaaggcatgcccccaagaacctcaccatttgattgaggagacagaataaacacacaggacccaatagtkaataactcacaattgctaaacagtaaagtagtgtaggatttcaaagcagtagaaaatgaaagtggtatgggaaaagacaaaaacttagctgggccttgac

SEQ ID NO: 209546 - DNA, 201 bp, Homo sapiens
cagtagaaaatgaaagtggtatgggaaaagacaaaaacttagctgggccttgacaaatcaacagcatttatacaggataatggaaaagggggtttctcccragtagagaacttaaacagtgtgaagcacagtgtgttccacactatagctgatgggttggcctcaggggggatgttcaggtatacctgtccttagcccttt

SEQ ID NO: 209547 - DNA, 201 bp, Homo sapiens
gaaaagacaaaaacttagctgggccttgacaaatcaacagcatttatacaggataatggaaaagggggtttctcccgagtagagaacttaaacagtgtgargcacagtgtgttccacactatagctgatgggttggcctcaggggggatgttcaggtatacctgtccttagccctttctccaacttggtgatgaccaggca

SEQ ID NO: 209548 - DNA, 201 bp, Homo sapiens
gaaaagggggtttctcccgagtagagaacttaaacagtgtgaagcacagtgtgttccacactatagctgatgggttggcctcaggggggatgttcaggtayacctgtccttagccctttctccaacttggtgatgaccaggcagcacagagatgctgttgtagactttgcccttctgtggatattaattccactttctttg

SEQ ID NO: 209549 - DNA, 201 bp, Homo sapiens
cacatggacgcaggaaggggaacatcatacactggggcctgtcagagggtggggggctcagggaggactagcattaggagaaatacctaatgtagatgacrggttgatgggtgcagcaaaccaccatggcacatgtatacatatgtaacaaacctgcatgttctgcacatgtatctcagaacttacagtgtaataattaaa

SEQ ID NO: 209550 - DNA, 201 bp, Homo sapiens
tctctagataacaattgcttgcatttctaggacaatttatcttttttttttttctttgagaccaagtctctctctgtcgcccaggctggagtgcagtggcrcaatcttggctcactgcagcctccgcctcctgggttcaagcaattctcctgcctcagcctcccaagtagctgggactataggcatgcaccaccatgcctg

SEQ ID NO: 209551 - DNA, 201 bp, Homo sapiens
cctttttaaggtctgtcacctgaagatctgggtgaaaaggctttagcaatgagcctggcccttagatttatagcccctttggtccttatgtcttggctgcracaagaaagctaagactatatctctgatctcagccaatcattttataaggggactgagcaacggtctggatgagtcagtgaaaatcaattgcaatgatgg

SEQ ID NO: 209552 - DNA, 201 bp, Homo sapiens
tagatttatagcccctttggtccttatgtcttggctgcgacaagaaagctaagactatatctctgatctcagccaatcattttataaggggactgagcaayggtctggatgagtcagtgaaaatcaattgcaatgatggaaaactcatctaagaaaaaatgtcctagagccagtgggtcagagccagcccctctgcacatg

SEQ ID NO: 209553 - DNA, 201 bp, Homo sapiens
caggtgagacagtggtgacttaaatcactaacataccactgcctctagggagtctcttctgcacccacctcagtcttgggacaaggactcctcctatatakgttcccaagaattctatacttccatcattgcacctcttatcaccctgcattgtaattgcctatatactttttggtctttcccattaaataataaaatcca

SEQ ID NO: 209554 - DNA, 201 bp, Homo sapiens
agctcttatctactctgctcaacaaatataaagagtaaatttcctttattctcattttttcagtgagaaaactgagatccagtggagttaatcaacttgtytatgatcacatacctagtttatggtggagaaaagactgaggtttagagactgattcataaaaccgagctctttctatgatattggaatatcagataaatc

SEQ ID NO: 209555 - DNA, 201 bp, Homo sapiens
caacatctccctcttgagtttgggcttgacttagtgattcatatccagagataagtgtgtggcaaagggaaaaagagtaactttaccatgaacacatctgrcaaacactaccttaaatccacaaggtgaacatcaccagtgataagtcatgttgataacacctaccatctgatatgacatgaggagggaactttacctgtg

SEQ ID NO: 209556 - DNA, 201 bp, Homo sapiens
ggggtttctcccgagtagagaacttaaacagtgtgaagcacagtgtgttccacactatagctgatgggttggcctcaggggggatgttcaggtatacctgyccttagccctttctccaacttggtgatgaccaggcagcacagagatgctgttgtagactttgcccttctgtggatattaattccactttctttggctcct

SEQ ID NO: 209557 - DNA, 201 bp, Homo sapiens
ggagttaatcaacttgtctatgatcacatacctagtttatggtggagaaaagactgaggtttagagactgattcataaaaccgagctctttctatgatatyggaatatcagataaatcaataaactcccaactagatgaaatcttatagtcttggaaaaaagtgcatctgcttgctgactctctgtaagacactgaccact

SEQ ID NO: 209558 - DNA, 201 bp, Homo sapiens
tttaaccaatgtcctgaagaagctctgggagaagagctgcttgagctgagcttcaggaaaatgcacatagatggcttaaaatacatagttgtaataatccmccagctcgcttgtgcaaaaatgcagctttatttctagattttaacttctacatctgctgatggaaaaaaaaaatgtaatttagccaattcatgcttatcc

SEQ ID NO: 209559 - DNA, 201 bp, Homo sapiens
actaaaaaattaacaataatggactaattatgaaccttttgttctatattagtggtatgttgaagcttcccattaaggcctaattttttttaatcttacaygtttattttgaatatttcttcttatatcacctttttcatagtttctcgtaggatataacctcatacttctgaacgcttgcagagaaatggggccatttct

SEQ ID NO: 209560 - DNA, 201 bp, Homo sapiens
caccagctcgcttgtgcaaaaatgcagctttatttctagattttaacttctacatctgctgatggaaaaaaaaaatgtaatttagccaattcatgcttatmcaatcgttttcagacttaagctgataatttaggctctaaacattccattttacacccacaaaagcctcctgtactttcctacttccctgtcggaatggca

SEQ ID NO: 209561 - DNA, 201 bp, Homo sapiens
atagtttgatttactgttttaagaacaagaacatattttgaccaaatgtacatggggatgatataactggttataaaattaccaggagagagagtgttggytaaacaagaatagagcctgctttattgatgttaggtttgtcgaataagctagagaacaaagtagatatattaactgctcaaacaaagaaaaagagcttgg

SEQ ID NO: 209562 - DNA, 201 bp, Homo sapiens
gtacaattcaatatgttttgacaagggcatacagtgttgtaaccactgccacagtcatgaggtagaacagtactgcccaatagacgtataaggtgagccasgtacataatttaaaagttttccagtggccacatttccaaaaagtagaagaaagatacatatattgagatatcactctgtgccccataaatatgatgatgc

SEQ ID NO: 209563 - DNA, 201 bp, Homo sapiens
ccaaatgtacatggggatgatataactggttataaaattaccaggagagagagtgttggctaaacaagaatagagcctgctttattgatgttaggtttgtygaataagctagagaacaaagtagatatattaactgctcaaacaaagaaaaagagcttggggtcaagacacaaagaaaaagagcttggggtcaagaggcaa

SEQ ID NO: 209564 - DNA, 201 bp, Homo sapiens
gttaggtttgtcgaataagctagagaacaaagtagatatattaactgctcaaacaaagaaaaagagcttggggtcaagacacaaagaaaaagagcttgggstcaagaggcaaagaaagacaatatgggcatcttactttgaatataacgaagaataaaaggtatcactgaacaggtaatttccaatgagaaaatagatcta

SEQ ID NO: 209565 - DNA, 201 bp, Homo sapiens
tatattaacgagctactttatgtcttttttcacatccattctttcaagtctattgtgtattttacacttccaacatatctcaactcagacaatatatcttyactagaaatacttaatttttatttagaacttataaaattcacagctgaaaaaataggttcaaatgtccaaattgtttcaatcctgcttacaagctttcca

SEQ ID NO: 209566 - DNA, 201 bp, Homo sapiens
tttaatttaaattatatgtaattaaaatttcagtagctacatgtggcttgggagcttccatactggatagcacagagaacatttccatcatccccaaaagytgactcctgctattttgaaatcaatcccaacctaccaccactgggcactagcaaccaatgatctgccatttgactctatagttttgtcttttctataatg

SEQ ID NO: 209567 - DNA, 201 bp, Homo sapiens
aatcccaacattttgggaggtcaaggtgagatcatggctggaggatcactggaggcctggagttcaagaccaccagcctggtcaacatagtgagatcccayctctattataaaaatttaaaaatttaaaaatttcaaacttaagacaagaacattcaagtacaaatgtttgtgtggacatgcttttatttctccctaataa

SEQ ID NO: 209568 - DNA, 201 bp, Homo sapiens
gtagtggctcagaatgcagcataatatataaaccaaatagaatggtaacctggaaaggaacaaaggccagtgaatctatgagtcagtcgttaaggaaataytatgtttctttctctaactctgcacctgagtgtgacagctaaacttagggtaaaggaacaacatcttcaggacagagggctgaatgcctggagtgctaaa

SEQ ID NO: 209569 - DNA, 201 bp, Homo sapiens
tgtatatttatggtattagagagtgttcctcaaattttgcatctctcaattcagtttatgtttttcaaaataaagatgagcatacaaaccaagaaccatgycttgtggggtcctcagctaaaggcaaagtggagatcaagagaccgagtgagctgttttaatgtgatgtttgaaaaaaaaaaacattgaaaatgagaaaat

SEQ ID NO: 209570 - DNA, 201 bp, Homo sapiens
catgattataggaagcaaatgtaaaagacaatcctaccctttaccaggtttgaaagctgcagttacatatggttgagagacagaggccttcagtgtccagmcaggaatcccagctctatttgtttatgcaaataactcatcaaacccaccatttagcggttcttaatggggagaaggtatgtgaaataacactggacaacc

SEQ ID NO: 209571 - DNA, 201 bp, Homo sapiens
tgtaccccataaatatgtaacatattatgtattttaaaaattgccttgaatttctgacatgagattatgattatttaagagcagtataagacatgaagccwtgtagggctctctctgattttctaaaatccattccagtgtgaaataataatttaatgtgtgtcagcagattgggaatgaagagtctggcatccatccttt

SEQ ID NO: 209572 - DNA, 201 bp, Homo sapiens
taatcagccatcgtattgtgaacttaggaccgtctatactattgtcacataagcaggttcatgttgctggccaacacattagcagtcattgggaattgttsagaatgtttggagagaggtggtcacacaatcttttggcacaaagagcatgtctccactacaaaggcaaagactggttctacagtaggcggaaccacaatg

SEQ ID NO: 209573 - DNA, 201 bp, Homo sapiens
tggctacactaaacaacagagcttcagtgtagacaagagagccttatgttggaagaagatccaatctaggactttcatagctggagagaagtcaatagctrtcttcaaagcttcaaaggataacctgaccctttcagtaggggctaatgcagctggtgactttaagttgaagctaatgttcacttaccattctgaaagtcg

SEQ ID NO: 209574 - DNA, 201 bp, Homo sapiens
aagaggatgctgttattggtcccctttctctgtggctttggtttttgataagtgagccactttaattttaatttttttctttcagctccactctggtctcrtgcttcaaatagctaattttctcaaagcatcaccatttcttcagcaaacatttaacacataattgaggtcaaattatgctccaaatgctatcctagacct

SEQ ID NO: 209575 - DNA, 201 bp, Homo sapiens
cataagacacatatttgacaaacccaaattgagagacattctacaaaccactgaccaggacttctcaaaactcttaaggtcatgaagagcaaaggaagackgagagactgtcagaaaccaggtgagactaaggagacaagatgactaaaatgcaatattgcctcctagatgggatccaggaatattagtagaaaaactgtt

SEQ ID NO: 209576 - DNA, 201 bp, Homo sapiens
acaaaactgagatcacactagacatattactcagtaatatacacatccctccaggccaatttaccttccttgaaagagctgcagatattctaaagcatagrtaagctatgacattaaatcatttctccattgatagatattcacattgtttctaaattttgctataactaacaatgctacaatacgtgttctcagacatac

SEQ ID NO: 209577 - DNA, 201 bp, Homo sapiens
tgcaggttatcccagtgaggcatttggatcacttacaatcatgatgaagcaatgggcatgatctcactcacatggaacaggatctctttccttgttagcaytaatagcaatcagcaatcattttatttactcatttgtgtgttggttatcctctcttcttgaaggtgagcacctgtctctcttgcctagtgtgtatcccag

SEQ ID NO: 209578 - DNA, 201 bp, Homo sapiens
taacaaatattttccagtgttccattttccactcccaccagcaaagtatgagagtcccaattgctccatgtcctcaccaacacttgacatagttagtcttrgcaattctagtagagatgcaatggtatttcattgcggttttaactttcatttccttaatgactaataatgttgagcatattttcaggtgcttatttgcca

SEQ ID NO: 209579 - DNA, 201 bp, Homo sapiens
ggaaatcacattcaagttcaaaacagtcaaatagtatagaatagattcaacttggtatattacttcatttgaaaaaagacctgggaattttacttgatgayatgatatggacgattacaaagggaagtctgttttaacatacagaaacagaaagcacatgtcttctttggaataataaatgcctgtgctggtagattgtgt

SEQ ID NO: 209580 - DNA, 201 bp, Homo sapiens
gtgaccaagtttgcttttcaaaaatactattctggctgcagtgcaaagaatagattggaaagggtctagaatagatctaaagagacacgtgatttactcasatgaaactgacacaaaatgtacataatatatgcccacgtgaagcagtccctgcataaagcatgtaccctggcaaaagattcaagatgagctcccccatgg

SEQ ID NO: 209581 - DNA, 201 bp, Homo sapiens
aaaatccctgccctcttggagttcttctagttggaagacaattaacaaattacctgctatatacaggttaagtatcccttatccaaaatccttggaacaasaagtgtttgggatttgggatttttttttaatttgggaatatttgcaaatacataatgagatatcttggggataggacccagtctatgaaattcatttttt

SEQ ID NO: 209582 - DNA, 201 bp, Homo sapiens
agcaatgaaggtagccagattcttgatatatctccaaggtaaaagcaataaggcttgaggacaaatttgatgcgggatataacaggaaaagaaagaagcaycaaggattactccaaaatttttgtcctgagcaattagaaaagtagagttgccaagttatttagatgagaaaatcgaaagtttggttttggctctgttaag

SEQ ID NO: 209583 - DNA, 201 bp, Homo sapiens
ttcctagaagtgtgagattggtttttctgctgtgctattggagtgatcctccacttagactctaatctgccatggctttgtgcctgtttgtcaggaacttygaggatgtattaagatattatacagggtagaagctctattttgacaatgattatgcctattatctattttaataaatgtaaattgctgtggagaaacaaa

SEQ ID NO: 209584 - DNA, 201 bp, Homo sapiens
tttaattaatgtggttaatgtctattgacagttaaattatttattaattcaattaaaaataacaataataaactcattacatattaacatcaatggcatgyttttatgaaaaattactatatatatcccccaaaatagaagagtagcattacattatgttttttataaatctctttaacatctggcttaatagaagacagg

SEQ ID NO: 209585 - DNA, 201 bp, Homo sapiens
aaacctgacaaacatttcttcagccaggtgatcaagtccaacatgaaaataaggcatgttgatataggtacctttgattgatgtgataggatggaaatggyactttatctctgtggtcttcaatcacgagaaaaacatcaaataaattccactggaggagcatcctacagtataccttactgctattcctcaaaactgtca

SEQ ID NO: 209586 - DNA, 201 bp, Homo sapiens
agatcagttgagagattacggtggcctagatgatggtagtagctctggaagtagaattaaaggatttgaacagtagtgtaaataatgattctaaaattatrtgaagatgttttcccacccatagtctgatgtattatagtttatgatacttgaacaatgttctaagatctgcatgagataagaatactgtagaataacata

SEQ ID NO: 209587 - DNA, 201 bp, Homo sapiens
cttgtagagacgggttttgccttgttgcccaggctggtcacgaactcctgggctcaagcagtccactcacctcagcctcccaaagtgctgggtttacaggygtgagccactgcacctggccagataaaattaattttaatattttaatccaatgtatcaaaaatattattttaatatgtaatcaaaatgacaattatgaga

SEQ ID NO: 209588 - DNA, 201 bp, Homo sapiens
ccctagaggtgctcataccacaatttgagaattagtgcattgaaaataattagaaataaactgattccttgtagcaaaactttgttatgtgtagagaagargtgtgctctgaattgggaagtatagattaggaccagatcttgggaggacgattatcagcttaaggagtttgaatgttgttctcaatgcactggggaacca

SEQ ID NO: 209589 - DNA, 201 bp, Homo sapiens
tgcacatgggaaacagaatttagtgtacatactcaaattgcctatttcactccatgtatatttttcacgcactcactgtatggtcatggagcatcaactaygttagcatgagtgatggttcacacactggagctctaatcatgagctgaccacgcacagtgtctgttcttcagcttacacctttatggaggagacatgaat

SEQ ID NO: 209590 - DNA, 201 bp, Homo sapiens
tgagtaggatggattagaaagaggacagagaaaaggcaaccagttaagagcactttaacgaggccgtgtgtagttgtatatctagagccagacctcaggayttttgtgacaattaaatgtgttaatctatgtaaaatgcatataacaaagcctgatccatggtaagcattatttgtattagaagtagttgtaataattgtt

SEQ ID NO: 209591 - DNA, 201 bp, Homo sapiens
agttcatgtccttgctgtgctttcagctcttcagagattttttcatcacactttgaattgtcttctaatttcttacaatagcctacaggccccgtgaattrtggctctaattaccttttcaatttcatctttggccatcctctctcacttactttggcacagtttcagttcctgaacgctccaagcattttcccatcttga

SEQ ID NO: 209592 - DNA, 201 bp, Homo sapiens
tctcacttactttggcacagtttcagttcctgaacgctccaagcattttcccatcttgaggtgtttgcactactattccatttccttctaatgcaaccacycatcacaccgaccattacataactggattatttgaatcgactgaattgttacctcaatggaaagtattttcctgaccactctaaccaagtaaatcttcct

SEQ ID NO: 209593 - DNA, 201 bp, Homo sapiens
gggaatttgtgttgttgacacagcatctaggacctcaggtataatgaatatttgtttcatgagcttatgaatgagattcaacagataggttgaaatagcaytggaaatgtaggggagtttgtattttggtttttgtttgtttgtttgaggcagggtctcactctgtcacccaggctggagtgcagtgacacgatcacacag

SEQ ID NO: 209594 - DNA, 201 bp, Homo sapiens
aggccttctatgaccaccccacctcaaagagcatacctctcgcttgctagccccttacccaactcaggttttcctcatgtacacatacacacaagaacttmtgtaccacagagagttcactgttgtggcaccggtccctagaatatgtctgctattgaggagggatttaataagtatttgttgaatgaataactaaatcac

SEQ ID NO: 209595 - DNA, 201 bp, Homo sapiens
ggtccctagaatatgtctgctattgaggagggatttaataagtatttgttgaatgaataactaaatcactgacctcaccccagaagcacagttacccatckttatgtgtatactttgctgtctctcctctgagtttgcacactgctggtccctctgactgaagcccagttccctcccctccctaccccccacctctctttg

SEQ ID NO: 209596 - DNA, 201 bp, Homo sapiens
taagctttattgcagattagattcaggctgctcttttggggcttgggacattattcggttgatattctaatataatactgggtgtccaggcaagacacagkgctgggatgtgcatcctttgaaagcagcctaggagaatgagctgaaactcaaccagggtcagagaggagggtgaagcacctgaatcgggggacatcactg

SEQ ID NO: 209597 - DNA, 201 bp, Homo sapiens
agattagattcaggctgctcttttggggcttgggacattattcggttgatattctaatataatactgggtgtccaggcaagacacagggctgggatgtgcrtcctttgaaagcagcctaggagaatgagctgaaactcaaccagggtcagagaggagggtgaagcacctgaatcgggggacatcactgaattccagctgct

SEQ ID NO: 209598 - DNA, 201 bp, Homo sapiens
cctgcagacaggccaaggactgaccgctcagagggccaaggactgaccactgttcactcagcacatcccttgtctccgccttgatcctagccccatcaatkactctgccaacatggctcagacaaggtttgaactgagttaagatgtcctggcctgatctgaattttgtctggctctgcttttgtcatttggcaaaagggc

SEQ ID NO: 209599 - DNA, 201 bp, Homo sapiens
caggatagtaccaagtatgtcagcatttaaagtcttttgaacactcattttcaaacctccttttccagctttttcttaaaaaaaaaaaaaaaaaaaaaaamccaattaagttcgcagtgatgataaagaggaaccggaggagctatttagcataaattacccaaggcagcatgttgccagtaatattctgctctacatttt

SEQ ID NO: 209600 - DNA, 201 bp, Homo sapiens
gaccactgttcactcagcacatcccttgtctccgccttgatcctagccccatcaatgactctgccaacatggctcagacaaggtttgaactgagttaagaygtcctggcctgatctgaattttgtctggctctgcttttgtcatttggcaaaagggcattctggtcctgtggaggatggctcaggcagatggtgtgtggga

SEQ ID NO: 209601 - DNA, 201 bp, Homo sapiens
gatagagaatggttctgaggacagcatttttaggtaggtattacataagcttctctaaggttgggatgcaagcgcaagaggaaagtaaaggagcaaattayacgaaaaagagggtaaaggactttccagacagaagacacagcaagtgcaaaggccccgaggcttagtgagcttaatgtgtacctggagcagtagggaagc

SEQ ID NO: 209602 - DNA, 201 bp, Homo sapiens
tgataactgaggcctcttaggacatagatacagccttcctctaccatttttaatttttttagacttcattttgtgatttattgctgctctgggggcttcayatccaatccttttatggtttcatctttcctttccttacatttgttgcatataacaatggcgtgtttagctactgcagtgaaaaatcaatcaagcctattc

SEQ ID NO: 209603 - DNA, 201 bp, Homo sapiens
ggcttgcaacacagtggcagctgcaagctgacctcttggcaaatttaatctgtaaatggattccagtttaagatagtgaatgccttccattattaggaagscttctttctatattttggaaagcctggttaaaaatatttcatgccaggttattatgcagattgcctagctaacagggagattatgaatgcaaataaatca

SEQ ID NO: 209604 - DNA, 201 bp, Homo sapiens
atcctccccatcctgcctcggcgggtggatattgagatctctcattgattgactgccctgaaagtgaatgctggcatgtgatgtgtgtaactcagtgggaygcacatactctgtgtttatgaaaataaataataatttctgttatcattattgattgccatcattatctgattgtatctgtcagtgtcatggggtttcagt

SEQ ID NO: 209605 - DNA, 201 bp, Homo sapiens
cagtggcagctgcaagctgacctcttggcaaatttaatctgtaaatggattccagtttaagatagtgaatgccttccattattaggaaggcttctttctayattttggaaagcctggttaaaaatatttcatgccaggttattatgcagattgcctagctaacagggagattatgaatgcaaataaatcaggttttgaaat

SEQ ID NO: 209606 - DNA, 201 bp, Homo sapiens
aatttctgttatcattattgattgccatcattatctgattgtatctgtcagtgtcatggggtttcagttatgggatcagaaagccctccacgagaatttarccactaccctcactgacaagcctttgtgttttgacatgtttcgcctttgggggatgagagtttgggatgtttctgttctgctcattggctaatatttttg

SEQ ID NO: 209607 - DNA, 201 bp, Homo sapiens
gtcattgatacagaagtttctcttttatgatgttaaatggatctgagtattaatctaagaactatatgtgaaacagcaagagaatgtcttttttttttttwaaaaaagtaaaagtaatattttagggtataatagaaaattccattacaacaaagaaaagggaaaataaaaccttcaactagagaatgtgcattatggatg

SEQ ID NO: 209608 - DNA, 201 bp, Homo sapiens
tgcctcttgtactaaaatagaatgcctaatatatgcatctgaatattcagtgtaagccaaaacacatatgagtaagcaggggctggaaaacaacttttcarggagattgtaaaagttactggtgccttgggcacaggtgggctttctgtttaattttgggaaaaggcggggtaggaagggtacatgaaactaggtcatggc

SEQ ID NO: 209609 - DNA, 201 bp, Homo sapiens
aaaggcggggtaggaagggtacatgaaactaggtcatggcttaccaaagctggatgatcatcagactctgggaacatctaagtcatctccaaccaagtgaytcagaatctccaggagtgtggccaagacacccacccgtatttctcggccatattcttggccatcctgaagatcagatgggtttgagaccctttggcataa

SEQ ID NO: 209610 - DNA, 201 bp, Homo sapiens
ggccaagacacccacccgtatttctcggccatattcttggccatcctgaagatcagatgggtttgagaccctttggcataatgatctctctactcaaaagyagagattctcagatttgatttttaaaatcccttcctttttcctcttgtctcctcctgcctcaaggttctgtatagatcagtctgaggacaacattattat

SEQ ID NO: 209611 - DNA, 201 bp, Homo sapiens
taaggcccaacagttgatgtccctgcagataccttggcaagtcaattctgttttatttcagagaggaaataaaacttgcctgattggactttctttcccctgatagaaatgaggagttgtcacagtgaaccatgagagccaaggctggcaaggctggcaacacacgccagagccccggcttctaggatgctgtctttgaac

SEQ ID NO: 209612 - DNA, 201 bp, Homo sapiens
gtttaatacatatttgtcttgtttcatctctttgtttagcctccctaaaggtagatgtatatctcccttcctacagagtaagctctatcagattaaggacrtgtttgtttcttttattagtctaataccatcacaatgtctcacacattacagacaatgaatagattgttttagaatgagcagttctgatactgcagcatc

SEQ ID NO: 209613 - DNA, 201 bp, Homo sapiens
caaattggagtcaaaatagaactatttgaatggggcagtatctgagtctgattttttgaagtctgcctgtcacagctgatggacctccaaacccctttggrtattttaggagtgtctagatgtgtggaactgtctgttgattttatttttagtgatgtactagggctgtgcttttaaatcacagtttgactcaaaggagag

SEQ ID NO: 209614 - DNA, 201 bp, Homo sapiens
tttgcagggggatggatggagctggaagccatcatcctcagcaaactaatgcaggaacagaaaattaaacacttttaagtgggagctgaatgaaatgaackcataaatacagggaggggaacaacaacacactggggggtgtccagtgcatgggggtggggcacggggagaggggggcattaggaaaaatagctaatgcat

SEQ ID NO: 209615 - DNA, 201 bp, Homo sapiens
tttaagctctgtaaggacaacgtgcctggcacagaggagtcactcaattaaatgtttgttatgtatattcaagggaactcaatcaggcagcaattgacaarcctgcatttgaacccaaagctgttggtacttaaagcccatcctgttttcactactgctgctcctttaaatagaaattctcatagaaaaaaacagaatcaa

SEQ ID NO: 209616 - DNA, 201 bp, Homo sapiens
atactgcctttgtgttcccatagcaccctagacttgcttctattttcctcactacatatattgattccacaatgtatctgtatatgtgactgtctcctccytatgttttctcagacttattttagaaaagcttaggtggatattttttaactacaagtcctttttatatacaaggaaataaaataagaaaacctaatgtta

SEQ ID NO: 209617 - DNA, 201 bp, Homo sapiens
ggggatggatggagctggaagccatcatcctcagcaaactaatgcaggaacagaaaattaaacacttttaagtgggagctgaatgaaatgaactcataaayacagggaggggaacaacaacacactggggggtgtccagtgcatgggggtggggcacggggagaggggggcattaggaaaaatagctaatgcatgcccggc

SEQ ID NO: 209618 - DNA, 201 bp, Homo sapiens
aggacaacgtgcctggcacagaggagtcactcaattaaatgtttgttatgtatattcaagggaactcaatcaggcagcaattgacaagcctgcatttgaayccaaagctgttggtacttaaagcccatcctgttttcactactgctgctcctttaaatagaaattctcatagaaaaaaacagaatcaacataattaacttt

SEQ ID NO: 209619 - DNA, 201 bp, Homo sapiens
attgaatatactgcctttgtgttcccatagcaccctagacttgcttctattttcctcactacatatattgattccacaatgtatctgtatatgtgactgtstcctccttatgttttctcagacttattttagaaaagcttaggtggatattttttaactacaagtcctttttatatacaaggaaataaaataagaaaacct

SEQ ID NO: 209620 - DNA, 201 bp, Homo sapiens
gaagccatcatcctcagcaaactaatgcaggaacagaaaattaaacacttttaagtgggagctgaatgaaatgaactcataaatacagggaggggaacaayaacacactggggggtgtccagtgcatgggggtggggcacggggagaggggggcattaggaaaaatagctaatgcatgcccggcttaatacctaggtaatg

SEQ ID NO: 209621 - DNA, 201 bp, Homo sapiens
actgctgctcctttaaatagaaattctcatagaaaaaaacagaatcaacataattaacttttcattttagctctctgctcttttagctcagctacacaagwctcaagttttcaacatttggcctcaaacatcattttcctctgtttgtactatttgcccagaggtgatgctaaagatacacttgacttcctggcaacaact

SEQ ID NO: 209622 - DNA, 201 bp, Homo sapiens
gagaaagaaagggagaaaggaaaggagaaaggaaagaaaaggaagggaagctggaacaataacctttgaaatttgccaaggtagcaacaatgacataatgytcctttacatatggcaacagtctaaccttgcctcaaagtcccaggagtggatggttctccctgtttctacattgtatcttctttgccctatgagctggcc

SEQ ID NO: 209623 - DNA, 201 bp, Homo sapiens
atgggatttcgctcatcacccaggctggagtacaatggcgcaatctcagctcactgcaacctccatctcccaggctcaagcgattctcctgccccagcctyccgagtagctgggattacaggcacatgccaccatgcccggctaattttgtatttttagtaaagacaaggtttcaccacgttgcccaggctggtctcaaac

SEQ ID NO: 209624 - DNA, 201 bp, Homo sapiens
ctaagtctgtaaccttgggaaatcccctaaccaccctgtatttcacatttctctcttataaaatggtgatgttagtagctccttgaaagtttgtcacaatrtaagtattagagactatatgcaaataccaacacagggtctaccaagctgtagataactattttttaaattcttctttcatttattcattcaacatataaa

SEQ ID NO: 209625 - DNA, 201 bp, Homo sapiens
tattttaaccttctaataatttaaaaataaatttgccatattttttaattccatgttttttttttcttattctctatgttttccttctttgtatagcatcyggttcttgaattgtaggtttattctccttttaaatgtttctgcacatacaaattaggatttatttatttatttctggccctaaaagtatccctgttgtct

SEQ ID NO: 209626 - DNA, 201 bp, Homo sapiens
aatacacgtaatcttctgaaaatcataactaagcctagcctactttaaatgggctcagaacaacttacattaaactacaactcatctactacaaaatcatytcatgcaaagcctatttttaaagttcgaatagctcatgtaacttattgaatactgtactgaaagtgaaaaaacaatgatcgtgtggatactcgaagtaca

SEQ ID NO: 209627 - DNA, 201 bp, Homo sapiens
tcctttcctgtggtggagatggactttgtggttctttattttcctaatgaggtggagtccaggagctaggcagatggaattcttttgacatttatttcaasagaagccataaacatattacaaaatagtatgaaaatatgcaaatattactaaatttgtaggaacaaaattttttatctcaaccattactagttaacaact

SEQ ID NO: 209628 - DNA, 201 bp, Homo sapiens
gaatgtgcaggtttgttaaataagtatacttgtgccatggcggtttgctgcacctatcaacctgtcttctaggttttaagccccgcatgcattaggtattygtcctaatgctctccccacctttcctcccacccactgacagcctctggtatgtgatgttgccctccctgtgtccatgtgttctcattttgtatttttagt

SEQ ID NO: 209629 - DNA, 201 bp, Homo sapiens
acctttcctcccacccactgacagcctctggtatgtgatgttgccctccctgtgtccatgtgttctcattttgtatttttagtagagacgggttttcaccrtattggccaggccggtctcctgacctcaaatgatccgcccacctgagcctcccaaagtgctgggattacaggtgtgagccacagcacctggcctatggac

SEQ ID NO: 209630 - DNA, 201 bp, Homo sapiens
ccgtatttctcggccatattcttggccatcctgaagatcagatgggtttgagaccctttggcataatgatctctctactcaaaagtagagattctcagatktgatttttaaaatcccttcctttttcctcttgtctcctcctgcctcaaggttctgtatagatcagtctgaggacaacattattatcaaaatgtggttgcc

SEQ ID NO: 209631 - DNA, 201 bp, Homo sapiens
atgagcatccatgatgattctgtgattgtgagctgttagtgccttttataactcaacttctttccccttcttactcctggtcaagtcatgggggacagccyacttagttgccagtgtgctataatagtaacactattgcagacatttattaagtatgtattatgtgccaggccttctgctaggcaggtaccatctcactat

SEQ ID NO: 209632 - DNA, 201 bp, Homo sapiens
ctattgcagacatttattaagtatgtattatgtgccaggccttctgctaggcaggtaccatctcactatgcccagacggcagcctgtggagtgggtactaytgttattcccattttgcagatgaggacatttgatctagagagctatagtgacatgctcatgtctatagctactaagtggcacagccatatttttaaacca

SEQ ID NO: 209633 - DNA, 201 bp, Homo sapiens
gtgaggaaaatgctcccagatcattaggacaagaaaagggtcacattgtcattctttgaagtgtattggggttggaataaaaatccaagaatatcccagargcaaatgaactgaattcaagaactgctctacttactgataagttacccactcttccctctgatgttagtgtgggggaatgtcatggtctaggaggatgga

SEQ ID NO: 209634 - DNA, 201 bp, Homo sapiens
gctaggcaggtaccatctcactatgcccagacggcagcctgtggagtgggtactactgttattcccattttgcagatgaggacatttgatctagagagctrtagtgacatgctcatgtctatagctactaagtggcacagccatatttttaaaccaggttcaagctgactccagaataataactatactttcttacagagg

SEQ ID NO: 209635 - DNA, 201 bp, Homo sapiens
gtgggtactactgttattcccattttgcagatgaggacatttgatctagagagctatagtgacatgctcatgtctatagctactaagtggcacagccatawttttaaaccaggttcaagctgactccagaataataactatactttcttacagaggttgggctgataaagtcacttgttgaagtgtttagcataatatctt

SEQ ID NO: 209636 - DNA, 201 bp, Homo sapiens
ctcttttttcccatcttgtcttttacctagagactaggagtttcaggaaagcatgatgaatatattgaaaagttcgaagtagtattacatctagagactarcaattcattatgctttgaatctgcctttgtactgactctcctacgctgccttgcattcagagtgtattcactgacaataaaatattttctttcatcccaa

SEQ ID NO: 209637 - DNA, 201 bp, Homo sapiens
aattcattatgctttgaatctgcctttgtactgactctcctacgctgccttgcattcagagtgtattcactgacaataaaatattttctttcatcccaaargtacctttgttatgctgcacttaccatgtagtaattagatccaacatagacgtaaatataagcagaaccctatacctggtttaggatcgagttctctttg

SEQ ID NO: 209638 - DNA, 201 bp, Homo sapiens
gaaattatctgaattataagcgtaatgggaaagacattcagcccacaccaggtcccatttctgaagtgtgagctcactgttgctagagcaatgggtgtgtstccggtccccgaaactacacgtgcatgtgtgggtgcgtgcaggcatgtacatggcatacaacacccaagcagggcattgctcaagaatcctaaaaatgtt

SEQ ID NO: 209639 - DNA, 201 bp, Homo sapiens
ttatctgaattataagcgtaatgggaaagacattcagcccacaccaggtcccatttctgaagtgtgagctcactgttgctagagcaatgggtgtgtctccrgtccccgaaactacacgtgcatgtgtgggtgcgtgcaggcatgtacatggcatacaacacccaagcagggcattgctcaagaatcctaaaaatgttaaca

SEQ ID NO: 209640 - DNA, 201 bp, Homo sapiens
gaatggtttagcaacaaggaaaggaattttctacctgaaaggtgttaggtttgtgtttgtttgggtggaagaaggtgggtcatgctcttgtaatttgttgytgtgatcagatgagtttattttctttttaccagaaaactgttaaaagcagtggtacacacatgcatacacacactgtctcacacaaatgtctctggctca

SEQ ID NO: 209641 - DNA, 201 bp, Homo sapiens
tgtaagtggtttcccaggagtttatactccaagtaggtgggggatatatgtgtggtaaggatggggagtgaggtagaatttttttcaaacattggaaaacrtaaccagtgacataccaactataataaatttgttggcagctgcatggggagggcatagtaggcagaattactctgaagaccttatagggaattttctgtt

SEQ ID NO: 209642 - DNA, 201 bp, Homo sapiens
ggtagaatttttttcaaacattggaaaacgtaaccagtgacataccaactataataaatttgttggcagctgcatggggagggcatagtaggcagaattaytctgaagaccttatagggaattttctgttacaatttagcaaaatgataagataaagtaatatttattgaatatttattatgtgtcagatatatgaattat

SEQ ID NO: 209643 - DNA, 201 bp, Homo sapiens
gtaatttatcataaataacaagaatcctttttagcattcaaggtatcataaaagtatatttttccaaagaatcattagacaatccatagtttaatgtaatyggagaagcagtaagaacatttgccaaggacattttagagccacgttaggtaacccctaggatgtgcatggaagtggcagtcacttcttaatcataaagag

SEQ ID NO: 209644 - DNA, 201 bp, Homo sapiens
attacaggtgtgagccacagcacctggcctatggacaggttttaaggttgtttaggaatctgggatttataggacatgacacctgactggatgtagggtasaggaagattttcaaaatgtcttctgtgtttctggaatggggcagctaggtcgatggtgggcaccactcaaaaggcagaaaaagaagtgggtttcttaatc

SEQ ID NO: 209645 - DNA, 201 bp, Homo sapiens
gggcaccactcaaaaggcagaaaaagaagtgggtttcttaatccatgcatttattaatctgtaaagtagaccttattttaatcatcttagatggttgtctrcatcacaataaaagctacataactgacacaaagaaagcattcattaatgctcaggaatcatttttgtatatgaagttctttagaggtgttaaccactgga

SEQ ID NO: 209646 - DNA, 201 bp, Homo sapiens
ccatttcagctcttctgttctgtggttgtgtctctctctgcatactcccatcccaccccagtgttctatttactccagatgatttcttgagaatgtgctcwtccttaggttttgtagtattttgcagagaatcttttcatgacaaaaggagaactctccatgtagcccactgagaaactgttagtgaagaaaaaacatctt

SEQ ID NO: 209647 - DNA, 201 bp, Homo sapiens
aaagggaaaataaaaccttcaactagagaatgtgcattatggatggtagaattcatgggataatgcatgatcatgcaggagggggctgctcctaacctccytgagttgcaactattgcagcagccaggacgccaccatgaaagaaagcgtacatgattgtctgtctctgtctctgtctctgtctctctctctctctctctc

SEQ ID NO: 209648 - DNA, 201 bp, Homo sapiens
cactcaaaaggcagaaaaagaagtgggtttcttaatccatgcatttattaatctgtaaagtagaccttattttaatcatcttagatggttgtctgcatcamaataaaagctacataactgacacaaagaaagcattcattaatgctcaggaatcatttttgtatatgaagttctttagaggtgttaaccactggaagtagg

SEQ ID NO: 209649 - DNA, 201 bp, Homo sapiens
gaattcatgggataatgcatgatcatgcaggagggggctgctcctaacctccttgagttgcaactattgcagcagccaggacgccaccatgaaagaaagcrtacatgattgtctgtctctgtctctgtctctgtctctctctctctctctctctctcttcaactaggccatggagactcccaattctttttcccctgagca

SEQ ID NO: 209650 - DNA, 201 bp, Homo sapiens
acttgggttttcatcctttgttcagtccttgtagggctgtcagataccaaatggaaattgcaaaggtctctatttgtgggatgtttaatattattattttyactctatatttattccttaaatatttattgagttttaaaatatatacaaccttgcttacaagttcaaggtccatctaactcttgaattctggcttctgta

SEQ ID NO: 209651 - DNA, 201 bp, Homo sapiens
aggccatggagactcccaattctttttcccctgagcaaggcagagattgctctctttctcaaggaactgtcttaatattactaaagtgtaggaagacgacrgaaaaagggcttaatgtctatttctgggccctctttctccatgatcccctttccttcccagtatttaccgacagaattaaaggatttattaaatcagatt

SEQ ID NO: 209652 - DNA, 201 bp, Homo sapiens
aaattcagagggtttctaaaattattctcagttttgataattcactagaagaactcacagaactcactgaaagtgattatactcaaggttatgacttatasggaaaggttacagattaaaataaaccaaagaaagagatgcataaggcaaagcctgggagagttccaattgcaacgtttcaattgttggatgcattaccct

SEQ ID NO: 209653 - DNA, 201 bp, Homo sapiens
taccctcctgccattgacctcatgcattacccccctgccattaacctcctgccatgtgacaatatgcataaagtattgtcaaccaaagaaacttatctgarcctcgtatttagagtttttattagagctcaattatgtagacatgatggattgactgattatatacaagattgaacttagtgttcaggtcacctgataacc

SEQ ID NO: 209654 - DNA, 201 bp, Homo sapiens
tccaagaagcctagggcaaaacccaggcctctcttcaggcaagggtaaaccctttactacataagcatcctaggtttgttgttcattaattttcccttgtrattcatccttattattgagcaaacacatattcactcttttattcttttaaaagatatattagcataactagtagtgccaggcactgttccaggtactgca

SEQ ID NO: 209655 - DNA, 201 bp, Homo sapiens
gataatctaaaaaatctaaaatgatgcatgttctaaaatattttaacgaaaacatgaacacaaaagaaaactacgcataaccattgctaatattttgatayattccttttagcatatgcacattttttaaccaaaaaattgtagcagttggcttattctggtttatgattttttgaacatcatgaacatctatctttgtca

SEQ ID NO: 209656 - DNA, 201 bp, Homo sapiens
acaaatgtttccttctgtctaacctaacattaatcttacctgccacttatttaaaaaggattccatacatatagtcatgatggacatgtatggtctctgcyctcatggggcttgtaatccagtgactaggaatctttggtttgaaaatagtcacaacgggccaggagtggtggtacacgcctgtaatcccagcactttggg

SEQ ID NO: 209657 - DNA, 201 bp, Homo sapiens
agtttttttggttgcattagtggaatgcattccactaaaaagaattcaaattcacaaatgcattcctataaacatggaaacacagaagaatatagacaaaraagttgttatcccctctttgaccccactcccctctctagagattaccaccatgaacaatttggtgggtctcattctggatcttctctctgtatttagaaa

SEQ ID NO: 209658 - DNA, 201 bp, Homo sapiens
ctctatagcttgtactcaatttttctgtgaacttaaaactgctctaaaaaagtctactaaatatatatatataggtgtgtgtgtgtgtgtgtatgtatgtrtgtattggagtcataatttaaacatcagccatttcaaagcttcttgccttgtgttggcttcagcagcatgggaacttgttagaaacacttcctactgaaa

SEQ ID NO: 209659 - DNA, 201 bp, Homo sapiens
aattaatatttaaaccacagcaggaggaaagtaagaagaggagcagaaagaatgttctaggcagaggcggtgacatgcacaaagcccatcaggtaggaggyagcacagaaaaacacagtgtggaaggagggcccaggtggctgaagctgagtgcaggggatgtgtggtaccagtaagatgcaggtggtgaggcagcttatg

SEQ ID NO: 209660 - DNA, 201 bp, Homo sapiens
ccgattagtcctggggcaggaggaagccaagatagagtgcacctgtcagaactgcttacgacatataaatcattacctcaattttctgtgcaagcagtggrccagagagagagagagagaagtgactgaggttggttaacagtgcagaaccataaaaaagagctgctgctttcctccaaagcaggatttcctctgctgtcc

SEQ ID NO: 209661 - DNA, 201 bp, Homo sapiens
aaggactctaaactcaatttgcattgtaagtggtgactgcaggcaagttcatccagctaagagcaatgcaaatgctaaaggacactttcacccaagctccyctctctcagtctctttctctctctctgtctttctcaaaagaatgcatggtgtgcatttaataaataaatttcctaggacttttttttaattctgagcatg

SEQ ID NO: 209662 - DNA, 201 bp, Homo sapiens
taatctcgaacactcctgttattcaattgggaaatagctcttcaagtatttctttaataatttccttatttttgatttcctaattcttcctgatacttctrttaattggatattagtcttcatagaataatttcctaatttgtatatctctgatattttggctttatctttttctcctacttttttatttattattattat

SEQ ID NO: 209663 - DNA, 201 bp, Homo sapiens
gagcgagactccatctctaataataataacaataataataatataataccaccaagtatctagctgaatgtgaaagcctgaaagatcctagttggagaagygccaacactgagtaactactaacttgtacagcaaagctcaagaaatactaagtcttgtgcttcttctgggctactctaaacagagtggataacactttgg

SEQ ID NO: 209664 - DNA, 201 bp, Homo sapiens
aagactcatttagatttagaaggctgtaggcatgatggttgagaatttgaattcagaataatccgatgtcaagttttgtctctgccaccctttattatgtygggcaggatatttaattattcctagatcatttaaagagaatgtgttcagattaaatcatgactggggcatttttaaaaaagaaatgccaagtaccgagga

SEQ ID NO: 209665 - DNA, 201 bp, Homo sapiens
catctcagtgcacgttctgctcgttatgtggtgtgccgtctaagtaaactctgggccaggtgcagtggctcacgcctgtaatcccagcaatttgagaggcygaggagggcagatcacgaggtcaggagatcaagaccatcctggctaacatggtgaaaccccgtctctatcaaaaataaaaaaaattaggcgggccttgtg

SEQ ID NO: 209666 - DNA, 201 bp, Homo sapiens
agagacttttatgcaacaaattggagccttttcaaatcctgttccaggatctacattaaaagggaaaaggctcacaataaaaaaaaattgtgtgagatgayggaaatatcaatttgcctgatttaccatttcacaatgcacacatatattaaaagatcacactgtacactataaatatatgcaaatttatttgcatataaa

SEQ ID NO: 209667 - DNA, 201 bp, Homo sapiens
ctcaggccccacccaaactgactgtattcaaatcttggggagaagggataaggaattagaacatggattttggaatcagctcctccatatgggtctctgaytttaaaaactgacaaaagactcttcaatgttaaaggagctacaatcttaaatttttaatttctgaaatcatgtttaataaaaaacctgtgtttttatttg

SEQ ID NO: 209668 - DNA, 201 bp, Homo sapiens
tttcccccagcagactagtgtaggcagtgccagcatgcacatccttcagggatgatatgaaggagattccagctctgcagaagtaggatagatggcttccrtgtctccttctactgtaagtgttagcagcggaacgtatctgagtcacgtggcaccaaagtatgttaccagaggcaaatctgtacaggtctacagcaacct

SEQ ID NO: 209669 - DNA, 201 bp, Homo sapiens
atgtggcctgcttcagctcactgaggacccggacagctgccagtgcctacttggatttgtctccatggaaccgagcgacacactgattcatacctctaagygttgcttccacttgacttctacaaagaagggtctgttggttttggaggggcatactatttggtacaaagtttataggtaactgtgcttgaagaagctgct

SEQ ID NO: 209670 - DNA, 201 bp, Homo sapiens
gctccgcctcctgggttcacaccgttctcctgcctcagcttccggagtaactgggactacaggggcccgccaccatgcccggctaatttttttgtattttyagtagagacggggtttcaccctgttagccagggtggtctcgatctcctgacctcgtgatccgcccgcctcggcctcccaaagtgttggggctacaggcgt

SEQ ID NO: 209671 - DNA, 201 bp, Homo sapiens
ttcaagtttcatctatgttgtggcatgtttcaatacttcgttcctttctgcagctgaataatattctattgtatggacatataacattttgtttatccatytatcagttgatggacattttgggttgtttccactttttggctattataaataatgctactacatgaacatttgtgttcaagttttggtgggaacacgtgc

SEQ ID NO: 209672 - DNA, 201 bp, Homo sapiens
atatatgaacagacccaaaaagtgcatcaagacagtacacaaagggatgtaggagctgagggaatgagtcacatggatactttaaaacagaataattgttygttcaaaattgtgagcaaaatgttcttactgccaggagaaatgttgggcagacttatttctacttattgtgtaataggggcagaaatcccatagttgaaa

SEQ ID NO: 209673 - DNA, 201 bp, Homo sapiens
aagggatgtaggagctgagggaatgagtcacatggatactttaaaacagaataattgttcgttcaaaattgtgagcaaaatgttcttactgccaggagaartgttgggcagacttatttctacttattgtgtaataggggcagaaatcccatagttgaaatcgtcatgggagagagtctagggctttagagtgacaactcc

SEQ ID NO: 209674 - DNA, 201 bp, Homo sapiens
ttcttactgccaggagaaatgttgggcagacttatttctacttattgtgtaataggggcagaaatcccatagttgaaatcgtcatgggagagagtctaggkctttagagtgacaactccaggttcatatcctagctctgtctttgtatgactctgagccttttacttaagctctcaccatatcagttttatcatcaaccaa

SEQ ID NO: 209675 - DNA, 201 bp, Homo sapiens
acatcatctttggcatttctaaatcctaactctctctaggtttttgcaagatagatgggggccctccttggctgtgccctcaatctgtcatcattcctccrcttacctgtcttctctcagaaacacatgaaatgcatcgttcacttaatgaccctctttatattcttttcattgttctggggctgtatctgctttgcttct

SEQ ID NO: 209676 - DNA, 201 bp, Homo sapiens
gggctttagagtgacaactccaggttcatatcctagctctgtctttgtatgactctgagccttttacttaagctctcaccatatcagttttatcatcaacmaagtagggataatattatttaaagtatctcataggacttgttatcagaaaaaaatattagcacagtatctgacttttagtactaaccattcaataatatg

SEQ ID NO: 209677 - DNA, 201 bp, Homo sapiens
ctctcaccatatcagttttatcatcaaccaagtagggataatattatttaaagtatctcataggacttgttatcagaaaaaaatattagcacagtatctgrcttttagtactaaccattcaataatatgtagctagctccaagatggaaatcaggaatgctcagaacagagagataactgggagactccagttgctacttt

SEQ ID NO: 209678 - DNA, 201 bp, Homo sapiens
acctatgccaaagaaaaattatttgatgcagagaaagcactcaagcactcgggatatgcctaatacaaagcccacccttaattcattatagctgttattgktacttaatgtacttcctggttatattctggcaacaagtgggttccaccttccctcagaagcctttttaaaaaactgtcttgtttatacatattaaaggaa

SEQ ID NO: 209679 - DNA, 201 bp, Homo sapiens
ggagactccagttgctacttttggatggaagaatacatttataaaaggacagataagagggaagagacttctaacttggtcgtatggtcagagtttatttrcctaagacatactgacctcaacatgtaagacttcttagtgaatatttctatcccttgctggaagaaaattcccctgagaatgggaaactgcaagtgcaga

SEQ ID NO: 209680 - DNA, 201 bp, Homo sapiens
atgtaagacttcttagtgaatatttctatcccttgctggaagaaaattcccctgagaatgggaaactgcaagtgcagataagatgatgatgaaaaaaatcstcagtttgagattctgtggataaagggaggtaagtgagttcaccctctaatgcctgtttttgaaagctcagtaaactttcaagttctcactgagctaaga

SEQ ID NO: 209681 - DNA, 201 bp, Homo sapiens
aaattcccctgagaatgggaaactgcaagtgcagataagatgatgatgaaaaaaatcgtcagtttgagattctgtggataaagggaggtaagtgagttcamcctctaatgcctgtttttgaaagctcagtaaactttcaagttctcactgagctaagaaaggttacatgctcaggagtcactcctttctagggaagaagct

SEQ ID NO: 209682 - DNA, 201 bp, Homo sapiens
cctctaatgcctgtttttgaaagctcagtaaactttcaagttctcactgagctaagaaaggttacatgctcaggagtcactcctttctagggaagaagctrcagttaagtctcatgtgaggggcctctgggctgatggcaggtacagttgtctggaaagctgttaaagtcaagggtctagttttgaatcttcctttagatt

SEQ ID NO: 209683 - DNA, 201 bp, Homo sapiens
gaatcttcctttagattctctgcttcaatcattagtcaccaaaaatgcagaattctcagcctgggccatgcatttcccctcaggttaaaggatccactatygaatattagactttatgtctattttctagtagcaataaaaaaaaatcttctaaataggttacttttccttagataaaaacaaacccaaaaaaagttctgt

SEQ ID NO: 209684 - DNA, 201 bp, Homo sapiens
tagcagctggcatttctgcctcgaggattttacatttacaaggtaataataaaaatggtattagaaacctgcagacggtctgtcctatagagataaatgtkgattgcaaactccaacatgaaagtagaattgactagaagagttaccaggtaatttaaggcccaacagttgatgtccctgcagataccttggcaagtcaat

SEQ ID NO: 209685 - DNA, 201 bp, Homo sapiens
atgatctatctgctttccattttcaaaaccattgatttttgttgcaattagacaacaaagagctagaccaggcaggatcctttctctacttttgaaaacarcattcaaggatcccagctgttttattgactttctctaatgccaagagttggggggaggggtgaatgttccttgagtcagcatgccatcattgctgggtaa

SEQ ID NO: 209686 - DNA, 201 bp, Homo sapiens
agcctggccaacatggcaaaaccccatctctactgaaaaatacaaaaattagctgggtgtggtggtccatgtcttagtcccagctactcaggagtctgacrcatgagactcacttgaacctgggaggcagaggttgcagtgagccttgatcgtgtcactgcaatccagcctgggtgacagagagactctggctcagaaaaa

SEQ ID NO: 209687 - DNA, 201 bp, Homo sapiens
cacttcagtttaagctttctaagggactcctcattgcttctaaacagattctgattttgtctttctaaacaacatcagaagagtcagtaatccatccggcraatatttattgagtgacaagtcacaaccctggctctcaaggtgtttatgttgttattgaaaatatagtcaatttaaaaggcaatggatcagagcagggtt

SEQ ID NO: 209688 - DNA, 201 bp, Homo sapiens
cagaaaaataaaataaataaaataaaaaaagaaaataaaaataaaagatctagtgaaaatggccaacaataataagtaaacaaatattataaaacgctgtrggacatgaaaaagacaaaaaaaaaatgtggaggcagaaaacaccggaagtcaggactatcgtgtggtcagggaatgcctcaacgaagcagggacagttaa

SEQ ID NO: 209689 - DNA, 201 bp, Homo sapiens
aaataaaaataaaagatctagtgaaaatggccaacaataataagtaaacaaatattataaaacgctgtgggacatgaaaaagacaaaaaaaaaatgtggasgcagaaaacaccggaagtcaggactatcgtgtggtcagggaatgcctcaacgaagcagggacagttaagaggctgaatgccaagacatgaggaagtggca

SEQ ID NO: 209690 - DNA, 201 bp, Homo sapiens
aactcatgagtggacatgtgttgtctcaggctagattggcaccatgccattgtgcagcatggcagagtgactgtagcctgtcgatacctccttacaaaacygtatattttgggtgtgcaatatgcatatcttccagcagccagaagctgagaaaccctaattggtttcacacctcttttactgaccttggactcttacagc

SEQ ID NO: 209691 - DNA, 201 bp, Homo sapiens
ttcccaaatactattccaaggcctcctgaaacaattttaagatcattccaaccgaaggcacaatgtcttctcatcattttgattcactaagagatgaactwagcttttccccactctgctcctactccaaattgtgccaatatccaagagaagctgcaatgtgtaactacaaaaggactgaatgttggaacctcggtgata

SEQ ID NO: 209692 - DNA, 201 bp, Homo sapiens
gagagggatgggtaaatggatagacatatgataaagcaagtataaaatgttagtcactggccagccatggtggtgtatgcctgtaatcccagctactcagsaggctgaggcaggaaatcgcatgaacccaggaggcagaggttgcagtgagccgaggtcgcgacaccgcactccagtctggtgacagagcgagactccatc

SEQ ID NO: 209693 - DNA, 201 bp, Homo sapiens
ccccagagatggggcatgtcaaggcccttgtgttgtgattacattttacctctgcatttcagtcaacttccctgagactttgcccctctacccattatccytgcagacctagttatgttctctgtctccctgatctggcccctgcctgcctgaccatctgctacatccggccatttgcacatctctcttttttcttcttgg

SEQ ID NO: 209694 - DNA, 201 bp, Homo sapiens
cccattggcgcctggtcggtgctgctggatttacttgatctatcttctcctagcacagcagtgcacgtctctgggccttttccattatcccacagggaggragctgaattctacgacccagtaacagaattcttagctgacttactcctgtagatttcttctgttatataataagaacagaaaaaaatgtttatggaattg

SEQ ID NO: 209695 - DNA, 201 bp, Homo sapiens
taaggttttatttctttggctgtttcacctgagactgctccagagattttgttgtatttttgtatttatatttgcttctctatgttaagcatgtgtgatarctatattattaatactgaccatgttactcgattctaaaatcattgatgatagtgaacatgttactgaaagttttatggagagactgaaagggttatgtca

SEQ ID NO: 209696 - DNA, 201 bp, Homo sapiens
atcccacagggaggaagctgaattctacgacccagtaacagaattcttagctgacttactcctgtagatttcttctgttatataataagaacagaaaaaartgtttatggaattgagcaatcaagatgtgagaactagctggagttttttgaatagctttctccatgtcactcatccccagtgtaggacagtaagcatgca

SEQ ID NO: 209697 - DNA, 201 bp, Homo sapiens
agctgagctgagatggtcccgctgggccatctaggcacccactcttcccagctcatgacaactcatatagttgcctgggccacagcaagagaaatatgacrgaggcagctgtgggatggcagatgttcttttgcacataaatatgtagatgtctgaggcttcactttggccagagtggctctccagctggttcccctcatc

SEQ ID NO: 209698 - DNA, 201 bp, Homo sapiens
gtagacttcctcagagccatctttctattcatacatttaaatatacatgtacagatatatagttggggaggatgtttgcataaatgagtacacactgcccrttttatttgcactttgtttttctactagtgatacgtcttcaagatttttccatatcagaacacctacatctgtctcatgccttttaatggctgcacggtg

SEQ ID NO: 209699 - DNA, 201 bp, Homo sapiens
tgataagtattttagcctttgctgaccatacagcctttgtcccagctactcaattcttccattgtagtatgtggacatggctgtattctagtgaaactctrtttacaaaatcaaggagtagcctgtagaccatcatttgctgacccctgttctagaagagtaccgggaacctaatagaggtccaaacagtattaatcgtct

SEQ ID NO: 209700 - DNA, 201 bp, Homo sapiens
tattttctcctttgtcttgaccactaagggaaaaaaataatcttttcttccagcacaagttcattattaacccagttaacgtttgcaaattaagatacaayattagacatttgtactttacagaaattttcctcttaattggactgctttcctataaaaatcatcccgccagcatctgtggtaagatagattctggaaaaa

SEQ ID NO: 209701 - DNA, 201 bp, Homo sapiens
ctctatatttctgtttgataacaacactgtgcctttgcataattcttgctgattatcagaaggaaaaaaccataactcagacagatgagctttattggcaytggtcccttctaggaaagaaagaaaaatgtatgaacagaagcatttgcaagtgccatatatgttgagagaataaaattccaaacagtctgtaaacttagc

SEQ ID NO: 209702 - DNA, 201 bp, Homo sapiens
aagtgccatatatgttgagagaataaaattccaaacagtctgtaaacttagcttccctgcaaccttaaaaaataaaaatgcctccctatatttggtgtcayatctcaggatctgggtttatcccattttctatatttcaagacaaaaaaatgtacatgcctataaatatatctagaatagaatgtcattttaaactagaga

SEQ ID NO: 209703 - DNA, 201 bp, Homo sapiens
ttaaaaaataaaaatgcctccctatatttggtgtcacatctcaggatctgggtttatcccattttctatatttcaagacaaaaaaatgtacatgcctataratatatctagaatagaatgtcattttaaactagagagttctcgtgaaggaaaaaataaatcgtcggagagagttgtgagtcagagtctttatagaacttg

SEQ ID NO: 209704 - DNA, 201 bp, Homo sapiens
tgagtcagagtctttatagaacttggaaattaacaagaaagtgttaaatgaatactcaaatagaacagctgcatatactacttatagagggagggaggttrgtctgccatctttatttgtttgcatgctgaaccaaactatggtgtccattttctctagctgtctttatccatctcagtttctgcaagcagttttctgtga

SEQ ID NO: 209705 - DNA, 201 bp, Homo sapiens
tgactctcagtttctatgaggcattatttctgtatttgtgatcatctaggtctctttgatatgttctgatgttcacctcaggggtgagactgggaaaacayggccataggctttaaatgaccccagaaattccaggtctggctgtacttcctgggtcaaatcatccttctggcaagaaggttctggtgcagccaagaggca

SEQ ID NO: 209706 - DNA, 201 bp, Homo sapiens
ggtctgccatctttatttgtttgcatgctgaaccaaactatggtgtccattttctctagctgtctttatccatctcagtttctgcaagcagttttctgtgwtgggatagataatgtaactttaatctggtacatgcgaacaaagtctgcttaccctttatgtgtctttcaagcattccccccacccccatgtctccagcag

SEQ ID NO: 209707 - DNA, 201 bp, Homo sapiens
gtttcctgtaccccaaacagcttcagatgtctgtcagtacccaggggcaattgtgtggtttgatccttgttcaacatcaaaaaccaatgctttgccttttraggactcgaaaacaagaatgttgcttcataatcttcttcccctgggaaatttacatctcctcttgcctccttggatgtctcccattgtgaaagcagcagc

SEQ ID NO: 209708 - DNA, 201 bp, Homo sapiens
cgtgtttttctattctcaagacccaatattttgcctgacacagtacattttctataaatacttaaaatcaacatacatgaatcacctaacatactaccttkgtgtatatcattgtgtttcccaaagtctaggatatgtgtttctgttgatgtaagacacaactgtaagtaatattgaatcacataattgaggaagttattc

SEQ ID NO: 209709 - DNA, 201 bp, Homo sapiens
ctgatttttttaaaagccagtttaggaatctctgaatgagaaaaatctgattttgtttttaaattcttttaaattcattcaacaaacatttgttgaatatytgttctgtgtaatgtcctgtgtcctggatgccaaggatatgatggaaaataatacagatactgtgttcactgagtttttgcctgcttatgagctttactc

SEQ ID NO: 209710 - DNA, 201 bp, Homo sapiens
ttgtagcagtgtgactcttagagatggaggatttaccatttaagcgatggcaaaagttgaagcctaagcttgacttctgctcatcaccctctttcccactygcaggaccttgaacgtgacttgcatgtgctcagggtctcacagtttgcctcagactaagattacatcataaagatctcattccccagaccctctggtacc

SEQ ID NO: 209711 - DNA, 201 bp, Homo sapiens
ctgggtgacacagtgagactccatctcaagaagaaagagaagacaagagagaagggagaggggagaggcgagaggggaggagaaaagagaggagaggagaraagagaaaagagaggaaaggaaggaagagctctggtggcccaagatctgaactctccctacagaaggcttttgttcagccagttaaaatattttaaatga

SEQ ID NO: 209712 - DNA, 201 bp, Homo sapiens
gagcactttgctctgaagacccaactcccacacttgtgaccttagtccaccccagaccattttagttttctttcaaaaggaagaactttttattgtatccrcccagggtgtgatgagaagagttaaacagtgggaacggggggcaggtaaatcccttttcacacccgctccatttttcacccttcatcccacatcatcttt

SEQ ID NO: 209713 - DNA, 201 bp, Homo sapiens
gtttcaggaagtggcagcatctgtcttccttatcaggatgtgggataatcaggaaggtgccaacttcataattggcacctggctgactgtctccaggagcrcttcacttggcaacctgggtgaaccatgataatgcatttaaagtagtgtttcctgatgtgtgtatcacagaaaagtggggtgggggacagtgtctagagt

SEQ ID NO: 209714 - DNA, 201 bp, Homo sapiens
ggacagtgtctagagttatcctaaagctcagaaatgacctttgaaatgagtccttctcaatagtattctacatatcttgagtgattctttttttccttccrtttattatagttttattgatatatagtaattgttcatatttatggggtacatgtgatattttgatacatgcatacaatgtgtaatcgtcatatcagggta

SEQ ID NO: 209715 - DNA, 201 bp, Homo sapiens
atgtatcagtgagaacatgcatatatcactatttcttgatatatacatttaatatatttctattaactcctcaactgtgaaaaataaggatttacttccawaacttatctgactttttaaaaattactccattctgatttttgctagttattattttagttccgttgcttgcctttgtaagtttaaatgtcaccatgaaac

SEQ ID NO: 209716 - DNA, 201 bp, Homo sapiens
gtgagagagcaagaccttgtctcaaaaataaaaataaaaataaagtccagaggcaaaagaatgtttggcaaggcctataaatcacaataggctctgcaagscttcctgtgtagactatgagatcctaattaataacaaaatataggtgaaaagcagagagtagctaatccttaaagatctgttacattgtattaagggcct

SEQ ID NO: 209717 - DNA, 201 bp, Homo sapiens
tgagggtttattcaatgagttatctcataaagttgaaaagcaataaataatatttaaacaatttactttttatttattgctaagtaaaatggagtgctacrattgtactttattctccatgggtgtgatgcactcttgggtgactcttattttctgtttgcttttttcttcgcaatcatatattccaaaagttgatactcc

SEQ ID NO: 209718 - DNA, 201 bp, Homo sapiens
aaagtttcctgtgtaggaagcattagcctaaggaaggaagagtgggtatgtgagtgttgggggaggggaccatgacaagggtggttaaaaaaacgaatgtrtccacatgctgtcaatactgaactgggtaacataagaaggctgtgtatttgtaattggccttttctatgtaaagcacaagcctgaaataggtcagtcttt

SEQ ID NO: 209719 - DNA, 201 bp, Homo sapiens
ggtgactcttattttctgtttgcttttttcttcgcaatcatatattccaaaagttgatactccatctattttattcctttgtaaattggtatctaacttaygtatgtctaatcctacaatttcatgattctgacaagtcaagtatgtctgattctgaactcaccaggaaactgatattctgtaaagttaacataatagaac

SEQ ID NO: 209720 - DNA, 201 bp, Homo sapiens
gtgccaagttttgtaggtctgggaattacgtgctaagctcatatagacaggtacacacacaaagatatatacatactctgatcttccttgatattctaatrtgataagttaataacatcattctccgaggcagaagcacagccttcttgctcttcctatcccccgatcagacagtagcaaaatttctgcagtgctctggga

SEQ ID NO: 209721 - DNA, 201 bp, Homo sapiens
ccacagtttttcaaatatccagatttttgtgttaacgtaaactaaatatccaggtggtcgagtgactacacaaatttgggtagttggcatcagacaggcaratggaatattcaagttgccttcttcaaggatacagttcaatatacacactttcacatctgtttgtcattagctgagaattatgagagaggcaggataatg

SEQ ID NO: 209722 - DNA, 201 bp, Homo sapiens
caaacaatatgaggggccatttgtgaaaaatatacttccttaaaccttagtaacttattcaacatcccacgatgctcagagatgagatccacccagaccaytggtctaaagaaagagcaaattaactcccctcccccatctcatactccctgggacctctgacccattatttaaatttgcttctttccttttttcatatta

SEQ ID NO: 209723 - DNA, 201 bp, Homo sapiens
tatgaggggccatttgtgaaaaatatacttccttaaaccttagtaacttattcaacatcccacgatgctcagagatgagatccacccagaccattggtctraagaaagagcaaattaactcccctcccccatctcatactccctgggacctctgacccattatttaaatttgcttctttccttttttcatattattctaag

SEQ ID NO: 209724 - DNA, 201 bp, Homo sapiens
tttgtgaaaaatatacttccttaaaccttagtaacttattcaacatcccacgatgctcagagatgagatccacccagaccattggtctaaagaaagagcarattaactcccctcccccatctcatactccctgggacctctgacccattatttaaatttgcttctttccttttttcatattattctaagcatatatagttg

SEQ ID NO: 209725 - DNA, 201 bp, Homo sapiens
cagaattacaggtttctgcatgagttggtaattagcgagtttatcttctgagaaaaaggtatctttcctctcctttttatagtcaggccaaaagaagtcartgacacaaagagcatgaaattttttgccatgcaaaccatttttgacgcactgaatttaaaatatatacattaattccccaggcagcttttatgcatttat

SEQ ID NO: 209726 - DNA, 201 bp, Homo sapiens
tctgagaaaaaggtatctttcctctcctttttatagtcaggccaaaagaagtcaatgacacaaagagcatgaaattttttgccatgcaaaccatttttgaygcactgaatttaaaatatatacattaattccccaggcagcttttatgcatttattattcttacagctggccataggggataagtctttcaaatatatatt

SEQ ID NO: 209727 - DNA, 201 bp, Homo sapiens
cattcttcctactgaaaatgaaaagtaatttaatttgttagtggtttattttatttgacagtcattgtacatactctatttggtttgttacactgaattayccttcaataatgggtacacacaatgccagactctgccccccaggttgctttgataattggatgagcgtccatattgttcaagattttcatgacaatgagg

SEQ ID NO: 209728 - DNA, 201 bp, Homo sapiens
agactttttcttttatgaatatatgactgtaagactttaaaattatcttctgggtttagttgttgctttgactattaatagaacacaatacatcaaaacarcataaacatataattctgacaaatgatgaataaatataaaaagtaacattttattagaaatgcatctcataatgatctggggatgggggcgtctatgcgg

SEQ ID NO: 209729 - DNA, 201 bp, Homo sapiens
aaacctgtggtcccagagcaccagggtcagggtttccgtatacctaggatgaggtggacacccaggacttccgctctcatctttgtcttttctaggtcaarcagccttcccaaaaggggtggtttgagtaagaagaaggagggggttacatattgcctacctcctctaagcttctcaaggatactctgtgtggcaacttct

SEQ ID NO: 209730 - DNA, 201 bp, Homo sapiens
aaggtcctctgctttggctattggagaaaataatttatattccttccttcaggaagaaaatgaattaatggagtctacagtcctcaaaggcaataacctcygtccatgccacccgtgccctgcttccttccattctatggcaatgcagttcacaacatttgggggcaaagaggtcagaaagcagtacagaaatggatgaca

SEQ ID NO: 209731 - DNA, 201 bp, Homo sapiens
gtactcctgagatctgattttaggaaggagaatgtggatgctccttccataacataattgattatgcttgtacgtaacaagcaatggtattcaaaggtttrtctgttcacctcaatgagatttgacctagagttactaaacagctaaaatccatccacatcctacagacagacatctctcttttcttccttctccatgact

SEQ ID NO: 209732 - DNA, 201 bp, Homo sapiens
aagacagacaaagagagaaacagaaaaacaaagcacatttttcgaggttcctaacagcttgccaagtccctgttctatttcatatgctccatttcagtctygatgatctgtaatatttttctgtacttcagtaatccttttgggttttttttttaagtaagtttaggaaggtttctgttcttaaaatctaaagagcccaga

SEQ ID NO: 209733 - DNA, 201 bp, Homo sapiens
taattgcatgtctctgaagcaaggcactgtgacccgccaacccccacttaggtgtcatggaagattgtgaagaatcgctggtgtggtcaccaaataagccwaatgacagcaacattcattttgttagtaaatgcgttctgggaagtgaaagatgatctggtatttcccaagaggagaggcgggaaagataataagaacctg

SEQ ID NO: 209734 - DNA, 201 bp, Homo sapiens
gtttttataggatggatttcattaaagtaaggtttactaagttaaaagatgtatatgttattttaacagctacttccagattaccttctgaaaatcttgtkgtagtttatgcttccatgagtaaatgcttgttgtttattccatctccaggatagaatgttatatttttctttttatacttccaactgagaggcagcatag

SEQ ID NO: 209735 - DNA, 201 bp, Homo sapiens
taagacttataacagtgactggcatagagtaaattctttatgcataaaggttaaaaattaaaagattcatcagattaatcttttataagattaaagatttwaaaaatcttaatttacatctctttactaatgagttgggcatatttctatctatgtcttggtcattttcttttccctttttctgaatttttcattcctatt

SEQ ID NO: 209736 - DNA, 201 bp, Homo sapiens
gctgtttgtctttttactaattttcatgaactctttgtatatcataaatagtaacccttttcctgtcatttttatcttccataagtgattttctttttatkattataaaaataatcagaatttttaaaattaacataaaccttcaatcagtatagaactataaaaatcattttaaacccatagtcttagtctattttgtgt

SEQ ID NO: 209737 - DNA, 201 bp, Homo sapiens
gggaatcagacaatgtaaccctgaaatgtcaatcttaagtcaatttgtttctaaatcaaagtgttgctagtaattactactgccatctgttggtgggaggyagaactgacattctatggatatctatgaaaggccatgttttttaaattcttagaaatgcatctttgtgtttatccagacctttttaatgtaaatgacttc

SEQ ID NO: 209738 - DNA, 201 bp, Homo sapiens
atatctatgaaaggccatgttttttaaattcttagaaatgcatctttgtgtttatccagacctttttaatgtaaatgacttctcaggtaacttccagctgyaagattcttgaagttaatatcaaatttgtatttatcttcttggttctgtatattccacggtaataaatgacagaatgcagtgtgatacttcggaggcttg

SEQ ID NO: 209739 - DNA, 201 bp, Homo sapiens
acctttttaatgtaaatgacttctcaggtaacttccagctgcaagattcttgaagttaatatcaaatttgtatttatcttcttggttctgtatattccacrgtaataaatgacagaatgcagtgtgatacttcggaggcttggtcaatcctcggtgatcaaagattcagtgatatttatcctaatagtaggaaaaagtaat

SEQ ID NO: 209740 - DNA, 201 bp, Homo sapiens
acaagtgggttccaccttccctcagaagcctttttaaaaaactgtcttgtttatacatattaaaggaagaacaagtttactattccaagtagctcctttcrattattgattcattctgcctttaattccttcaacaaatactgacgttttgcagaggtgatacgggatgttccaatacagacgtggtctctgtcctcaggg

SEQ ID NO: 209741 - DNA, 201 bp, Homo sapiens
gctctgatatgtcgctgtaagccagagccagcctatcactcctgctttctgaacaccatccaccattgatccatggaagaaacaggttttttgaccaaagygaggtttaacgctccactaattctttgagggaaaatgccccaggaccaggagaaatatatctatagaaaataaacatcagtatagatagcacaagaggcc

SEQ ID NO: 209742 - DNA, 201 bp, Homo sapiens
ttagaggtaaatgacttgatcgcttacaacaaatgttaaatgaagtggggtgggggtctgtgtgtaaggggaaaaaagatgtatggagtttaggaatctasaggggcccttatgaacaggttttaacctgagaaggatggggtctgttggacggagcgtggcgaagagtaccttacctgtgggaggatgtgtttcaggtgt

SEQ ID NO: 209743 - DNA, 201 bp, Homo sapiens
gaagattcaataacatgatgtgcataaatgattagcacaatcctggcacaaatcatgtctccataaatgtttcttcgttagatggtatgtgtcaatcgtcrtgctaagttctcttaacagtgctactgaaaatgttacatatccccaacattaaggaggggaatactgataccaagaaagactaagcagcaaacccaaggc

SEQ ID NO: 209744 - DNA, 201 bp, Homo sapiens; identical to SEQ ID NO: 36692

SEQ ID NO: 209745 - DNA, 201 bp, Homo sapiens
ctttattatggccttgctacttatgtcatatccctgggtgttctccttggaaacacttttgtgaagacaattagggttaggagaactttattttccatatwacaatttcatagaggaatctgttccactctgaatttttaaaagccattttaaggtgatctgctttatgaaacctgataagctctatggaaatttcaggca

SEQ ID NO: 209746 - DNA, 201 bp, Homo sapiens
tatttttcctgcctaattgctctggctaggtctttcagtattatgttgaatataagtgataaaagcaggcatctttgttgaatataagtgataaaagcagrcatctttgtcttgttcctaatcttaggggctacatggcttttatcaaattgaggatgttcccttctatttctaatgtattgagggttttatcatgaaagg

SEQ ID NO: 209747 - DNA, 201 bp, Homo sapiens
gcatgcaccaccacgcccagctaatttttgtacttttagtagagacggggttttgccgtgttggccaggctggtctcgaactccagacctcaggtgatccrcccaccttggcctcccaaagtgctgggattataggcatgagtcaccgcacccagccttataatattctcttacatccattttttttttctgtaaactcag

SEQ ID NO: 209748 - DNA, 201 bp, Homo sapiens
cagttttctctcttgttttgcttatggatactaagatattttatttccttctgtggctgacattacctattacgacgggttgcagtgggaatgtttacagrtaggagaaacaaggatgaggtatttgggagaagagatggtctgtgaaggtaggctgtcaataagtgctaagaaaaacagattaattatataaataattca

SEQ ID NO: 209749 - DNA, 201 bp, Homo sapiens
ctgtgaaggtaggctgtcaataagtgctaagaaaaacagattaattatataaataattcacattaaacaaaaaactcatggcaattaaaattggcctctayggtaaaaatatttcaggaaaagatggataaattgggagactattttatctgaaatagctgttgagttgtgccttaatttaaacatgcagaaaaaaagaga

SEQ ID NO: 209750 - DNA, 201 bp, Homo sapiens
  misc_feature (1)...(201): n = A,T,C or G
ccctataatctgtcagacaatgtttatttttgtagataggccataattcattattttgtgcatgtgctaatacaatggagaatgcattctgtttcaaccanatactaaaagtggagttgtagaattgtgaggccatttccactgctttaattcaaatctagatcataataaaccacagtctgaaagaagagcatgaagcct

SEQ ID NO: 209751 - DNA, 201 bp, Homo sapiens
aggttggttactgagggcgctggaggagataacaccttggagttgggtggggcagggagtcaggggttctaaactcagtgactggcacaagaagctctccrtgtatgtttccagagacaaccttaacaattgactgtggacctgactcagggaatagtgtccggatctccttcctgcctggccttaaagggagaatgtggc

SEQ ID NO: 209752 - DNA, 201 bp, Homo sapiens
tctccttgtgaggggagtcactgggcagcagacaagccttgacgtaggcctgggactgatgttggaataccacgagcggcattcagctctccatccccccygtcttatctgagcaaagcattagaggctccatccccagatacctacacggagcccttccccattaagtagtacatcatggaatatgtcagcctaaattag

SEQ ID NO: 209753 - DNA, 201 bp, Homo sapiens
ggcaagttaatgtctccatgcttcagttttcctcaggtgtggaatggggataatcgtatagttacccattatggctataagggctaggggtgtgggtgtgkgtgtgtgtgtgtgtgtgtgtgtgtgtgtgtgtgtatacacacatacatatatgtataacatatatgtatatattatatttatgcatacatatgtgtatat

SEQ ID NO: 209754 - DNA, 201 bp, Homo sapiens
tagctgaatactgtgatttttattttcttctctgtattttctaattttcctacaggaaaaaaaaaacattgcttttatgattagaaaagaatgttagtaawttcattgtgactgtaagttttacggggcaactcctcaattacctaatttgtggtgagggagtttttaagaaggtgaccttcttatgagccgcaagttcct

SEQ ID NO: 209755 - DNA, 201 bp, Homo sapiens
gttagtaaattcattgtgactgtaagttttacggggcaactcctcaattacctaatttgtggtgagggagtttttaagaaggtgaccttcttatgagccgmaagttcctcaccaccacacctccctttaccatctcctttgtaaattcctcttcctgtgacttaaatattcatttctgaggggtctaaccttctggtcttc

SEQ ID NO: 209756 - DNA, 201 bp, Homo sapiens
ctttgtaattactgtaggcgttttccacttttgttctatccatattttgcttccacctcacattgtcacaaattttcaaggtgcttaagtttatcctaggraacttatgtggggtgaagatcagagaaaaaattcttaaagatacagccattgaattttaatttgatcccattgcccttctaccccgcaaagctccaggta

SEQ ID NO: 209757 - DNA, 201 bp, Homo sapiens
catgatgtgcataaatgattagcacaatcctggcacaaatcatgtctccataaatgtttcttcgttagatggtatgtgtcaatcgtcgtgctaagttctcytaacagtgctactgaaaatgttacatatccccaacattaaggaggggaatactgataccaagaaagactaagcagcaaacccaaggccacatggttggta

SEQ ID NO: 209758 - DNA, 201 bp, Homo sapiens
aagtttatcctaggaaacttatgtggggtgaagatcagagaaaaaattcttaaagatacagccattgaattttaatttgatcccattgcccttctaccccscaaagctccaggtacttcgaccctttctgagaggagaggcaggctcaattctcagcctctgccattaagcacatgggtgagtagtttgtaccctgggatt

SEQ ID NO: 209759 - DNA, 201 bp, Homo sapiens
aaatcatgtctccataaatgtttcttcgttagatggtatgtgtcaatcgtcgtgctaagttctcttaacagtgctactgaaaatgttacatatccccaacrttaaggaggggaatactgataccaagaaagactaagcagcaaacccaaggccacatggttggtaattagcacagccaggatccaagcccaagtccacata

SEQ ID NO: 209760 - DNA, 201 bp, Homo sapiens
tcttcgttagatggtatgtgtcaatcgtcgtgctaagttctcttaacagtgctactgaaaatgttacatatccccaacattaaggaggggaatactgataycaagaaagactaagcagcaaacccaaggccacatggttggtaattagcacagccaggatccaagcccaagtccacataactctaaaaaccctcttatacc

SEQ ID NO: 209761 - DNA, 201 bp, Homo sapiens
ataactctaaaaaccctcttataccattcaaattgtgtgcttgtgtacctccagaagaattttgaatagctatgtactttcctgagctttttaaagtaggyaactaagcatttccattgtaatgttaaataattgcagaaaatgtgatttcaaagtattttaaacattggcagtttaaaataaagcttttatatcatcttt

SEQ ID NO: 209762 - DNA, 201 bp, Homo sapiens
tcttctatatctttcttttgaaaaaggaagaaggagaacctaggctgtgggtactcctgagaagatctgattttaggaaggagaacatggaagttaggaaygaagaaatgaatttccttaaaactttttcacatagttcttaggaagtcatccaccactgctgttcctaggggaatggtattctcattgaagacggctgct

SEQ ID NO: 209763 - DNA, 201 bp, Homo sapiens
gcaaaagtaaggagaacctaccctgtgggtactcctgagatctgattttaggaaggagaatgtggatgctccttccataacataattgattatgcttgtaygtaacaagcaatggtattcaaaggtttatctgttcacctcaatgagatttgacctagagttactaaacagctaaaatccatccacatcctacagacagac

SEQ ID NO: 209764 - DNA, 201 bp, Homo sapiens
tccttctccatgacttcatcttttctgttctttatctcctatctggccatctcttctctcttctccgagtcttgccttgaatctgtcaatttactgagctrctggaggttgccatggtaaacacagctgttgttttttctctgtgaaaaactcctctcatgaaggcgcattgaggggagtcctccccatggcctccccttg

SEQ ID NO: 209765 - DNA, 201 bp, Homo sapiens
tctctcttctccgagtcttgccttgaatctgtcaatttactgagctgctggaggttgccatggtaaacacagctgttgttttttctctgtgaaaaactccyctcatgaaggcgcattgaggggagtcctccccatggcctccccttgctgtgccttttcacatatgttttttaaagtggaggcttcaggggcttcctgttt

SEQ ID NO: 209766 - DNA, 201 bp, Homo sapiens
tactgagctgctggaggttgccatggtaaacacagctgttgttttttctctgtgaaaaactcctctcatgaaggcgcattgaggggagtcctccccatggyctccccttgctgtgccttttcacatatgttttttaaagtggaggcttcaggggcttcctgttttctagggctctactctgctttaattgcatgtctctga

SEQ ID NO: 209767 - DNA, 201 bp, Homo sapiens
cttaggtgtcatggaagattgtgaagaatcgctggtgtggtcaccaaataagccaaatgacagcaacattcattttgttagtaaatgcgttctgggaagtkaaagatgatctggtatttcccaagaggagaggcgggaaagataataagaacctgagggaggaagactcaaagcgggtgagcagagacagaaggaatggtg

SEQ ID NO: 209768 - DNA, 201 bp, Homo sapiens
tttatacttccctcaggtggccatttttccccatcagagagagaatattggggccaggccatagtgcagaaaaaaatgagctgcctctttttcagggtttrtgggtcaaattggtcccaatggcttaggatgcatttcaagggtgagcctgttgatacctgagtgtttcccatctgaaagacaaaaccacctgcagttttg

SEQ ID NO: 209769 - DNA, 201 bp, Homo sapiens
aagctgtgggctggcagctcccactctgtaatgcctcttgttcctggctgcatgctccctcccatgtcgccacagccacaagaaatctctgcagacaatgyacggtaactgaggaggcccggggaagagtttaggaggagccacaggaagtcctgcagattccatttcttttgtgactcttggggtcctgctttgagctct

SEQ ID NO: 209770 - DNA, 201 bp, Homo sapiens
ggcccggggaagagtttaggaggagccacaggaagtcctgcagattccatttcttttgtgactcttggggtcctgctttgagctctggtacctcttgacgscagaggaaccaggtagcaaccaaaagcttcaggtggggagctcctttgtgacaaactataaaagcatggcacacatttctgaaaaaatagatgccctgtt

SEQ ID NO: 209771 - DNA, 201 bp, Homo sapiens
agccacaggaagtcctgcagattccatttcttttgtgactcttggggtcctgctttgagctctggtacctcttgacggcagaggaaccaggtagcaaccamaagcttcaggtggggagctcctttgtgacaaactataaaagcatggcacacatttctgaaaaaatagatgccctgttcaaataccatgaacacctccaac

SEQ ID NO: 209772 - DNA, 201 bp, Homo sapiens
accaaaagcttcaggtggggagctcctttgtgacaaactataaaagcatggcacacatttctgaaaaaatagatgccctgttcaaataccatgaacacctmcaacacctaattgaggtttcttaactaccacactactatgaataccactaccattataactaccagtaacactagttattccataaattctcctggcaat

SEQ ID NO: 209773 - DNA, 201 bp, Homo sapiens
atttttctcttctctttctctttgcattcctaatatgcttcctctgtaggctcctcctcctctgctttaaatgctgtgttcaccagaattctgttctctamgtaaacttcatccttgagttagtttacacactcccatggtttgaaccactctgttttctaatgataacaaatgttatctccagctcgaatctctccctcc

SEQ ID NO: 209774 - DNA, 201 bp, Homo sapiens
agaagttgaagtcttaatctaccacctggtatcaaatcagtcggggctcagttgcaagaaatgatttgcttgaaaagaaaatagctttggttattttattwtcttgtttctattaagtgaccacacctgtgttgtggggttttgtctgtcttgggtgtttttttagtttgttccctctcgggcattagtgttcttattctc

SEQ ID NO: 209775 - DNA, 201 bp, Homo sapiens
gcaggcagcctcctccaatcagtaattcagaaactcgggcctctttcatttgcagctccccaatgttaccatgtttatagcaggactgtaaaaggggaagktcatggaagatcacaagtgggagattcctctgagccatgccctaaaaaagtatgcattccattggctagaattcagccacatggctaactcttaactgca

SEQ ID NO: 209776 - DNA, 201 bp, Homo sapiens
taaaatcactagaaaaattgttttcctgatttttgtgtttttgctcttataccttttggttgaatctctccaataagatggaaaaacacttaatagtgctwaataccatattttcttcatctctccaaggtaaacttcagatagaatttcttttttttccctacacaaaactgtccttcatactacctcctttccctgatg

SEQ ID NO: 209777 - DNA, 201 bp, Homo sapiens
gaggattatgaaaattaaacacacacacacacacatacgcacgcacacatttagggtagtgccttgctaagcaaatgctcagtaaacaggactagcacaawcatgataattattgagagtacaaggaaactagaaaagttgaacattagaatggtagcttttattctgctaattttattatctggattgtcttttcaattc

SEQ ID NO: 209778 - DNA, 201 bp, Homo sapiens
tcttactccctcttaaccatcaaaacaactgatcaaacaattcagttgtctttggcactgctgatagttttcaactcttaagaattgccccttcctcttgmttttaaattagttcttcaataaaccaacttctccaaacaggttgatacattagcagctaaatattaggcaaggaaggagttatgtaaaatagtaatgtca

SEQ ID NO: 209779 - DNA, 201 bp, Homo sapiens
aatggtagcttttattctgctaattttattatctggattgtcttttcaattctagactcttcctttggttctgcagttgggtgtcctttgcaagatgctgycccctagttactaaatgttttcaggaactctgaggtctagggccttgtgtttagcaccagatcagagcaaggcatttctaaacctcatgataactggtca

SEQ ID NO: 209780 - DNA, 201 bp, Homo sapiens
cttggcaaagaggtgtggagacatgtgttcagtgtgtacagaggtcctgtggcaggagagagtatgacatgttggaggaattctaagaaggccactatttwtgaagcccagagagtgaagtggagcatggagtaagcaaggctgggaagggtagcagaagcctcacctttcagaagtccagtctctgaatatgagatagag

SEQ ID NO: 209781 - DNA, 201 bp, Homo sapiens
aacccagagagataaaatgactttcccaaattctcttagcaaaatggagatagaatcaaaactgaatcccaatctctggtccccattttgttacaatcacwgtatttttcacaatattatctcaaactttacccatcgcgatgaggttcctggtctcgcagctctctcacagatgattttaagccagggaaactgctattt

SEQ ID NO: 209782 - DNA, 201 bp, Homo sapiens
cctcatacttctgaacgcttgcagagaaatggggccatttctaacgagtgaggtgacttacttctgctcctgaatagttcctattgcatagaagttgttckgcaccagagcattctctttcacccactgctcctagccctgcaccataaaaccctaccccaaacgctgagtatcctgtccacaggaccctactttggctat

SEQ ID NO: 209783 - DNA, 201 bp, Homo sapiens
ggtatcactgaacaggtaatttccaatgagaaaatagatctagaaatcactgtgtaggaaaaacaacttctcacctgtatcaaatattctaaagccctttmattattaactcctaagtagttacacttgatttggatgaagtagcatgaaggcttctgctaggcttttttattcatttctcgatacagtgtgtggtgaggc

SEQ ID NO: 209784 - DNA, 201 bp, Homo sapiens
ttcaacaatgtgggttcagggggaaataaaagaaattttaaaagccaaagccaaaaacaatttaaaactcctgatttacccaagaatctttcttcttcttytttttttttttttttttttttttttgaaactttcctaagggaagaagttcaggttcctaatccacttttttttgcattacgatattcttttattgatatt

SEQ ID NO: 209785 - DNA, 201 bp, Homo sapiens
aagaatctttcttcttcttctttttttttttttttttttttttttgaaactttcctaagggaagaagttcaggttcctaatccacttttttttgcattacratattcttttattgatattatttttaatacaaataatacatgaatacaagttattttttggtaaattactttagcaataaacaattcacctcttactctg

SEQ ID NO: 209786 - DNA, 201 bp, Homo sapiens
agctgggggtcttttcaaaggaaccaaaattgtcacattttggccagctttgtgaggccattcctcaagggaggcagagtggcatggtgagaaagaacccrggctctggagtcagacaagcttgggttcaaatcccagctctgcccactgtgtcacataaccttgagtaatttatctgagttccctcggctgtaaaatgga

SEQ ID NO: 209787 - DNA, 201 bp, Homo sapiens
ttacctccttaaagaccctttatccaaatattgtcacattgggaggttagggttttaatatataaatttgcaggggggcacagttcagtctagaacaccayctattaagatatcttataaagcatcaataattaagatattgggtattggatacaggacaaacaaacaaatcaatggaatataataaagtccagaaacaca

SEQ ID NO: 209788 - DNA, 201 bp, Homo sapiens
gtgaatcaatttaaagttgatctgaaagaaaaatgttaagtaaaaagtactatctgatgatgcacagatagggcaaaaatcacaaaggtggctcacgagtrggaaaatctaggaaaagtgggagtcctgttggtcagctttactgtgtaacagcatccacatcacaaggcttgttctttgcaggatgttgctgggtcctca

SEQ ID NO: 209789 - DNA, 201 bp, Homo sapiens
catcagaaaagggtttaaataacagtgtgatgtgatccaaattatgtgttaaggaaatcatgcttgctgccatggggagaatgactttgaggaatagcagrgggaccagttaggagaccgttgaagggtggcctggacaaagaggtgagtggaaattgagagggcagatgggttctggacacatctttttttttaatccat

SEQ ID NO: 209790 - DNA, 201 bp, Homo sapiens
agaggtgagtggaaattgagagggcagatgggttctggacacatctttttttttaatccatgtaacctgcacagtactgcacagatcttggcaataaaatkaacaggacttgctgaactgcatgggaggctgagaacataaaagccatctagaacagcagctgggggaaggagctggtggcttcttggagagattgtgact

SEQ ID NO: 209791 - DNA, 201 bp, Homo sapiens; identical to SEQ ID NO: 36723

SEQ ID NO: 209792 - DNA, 201 bp, Homo sapiens; identical to SEQ ID NO: 36719

SEQ ID NO: 209793 - DNA, 201 bp, Homo sapiens
gattgcatgcagccgggagggtaggcctgcgggacaccgaggcgggggtggcccggcgggtccggcgggcaggtcggccgcttgctgcagaagccaggcaygtgtcgcttaagcgtctcggtggccttaagtttatctcccatctgcgtgcatcgttgagaccccaaatggggaggcctttagtttactaaatggaccgtt

SEQ ID NO: 209794 - DNA, 201 bp, Homo sapiens
caacatgataatttaaggggaaaaatatatatatttttctcccaaagtgttgagattacaggcatgagccaccacgcccagggattttttttgtttgtttkttttgagactgagtcttgctctgttgctcaggctggagtgcagtggcgtgatctcagctcactgcaacctctgcctcctgggttcaagcaattctcatgc

SEQ ID NO: 209795 - DNA, 201 bp, Homo sapiens
tctctgatttgagacatgttcgtcatatcacttgatattgtcctatagggtccctaagactgttaacttttcagccttttttaaactgttctttttttttwcttcttatttttttgagacggagtcttgctctgttgcccaggctggaatgcgatggtgcgacattggctcactgcaacctccgcctcctaggttcaagca

SEQ ID NO: 209796 - DNA, 201 bp, Homo sapiens
ttctgttgggatccctggctctgcggccgcttctcccccttaagtagcgggaggacccgcgagtagcctttgccctagggattgcatgcagccgggagggkaggcctgcgggacaccgaggcgggggtggcccggcgggtccggcgggcaggtcggccgcttgctgcagaagccaggcacgtgtcgcttaagcgtctcggt

SEQ ID NO: 209797 - DNA, 201 bp, Homo sapiens
gtgatccgcccgccttggcctcccaaaatgctgagattacaagtgtgagccaccgtgcccagccaattagagtgcttttgacccaagtattaggttggtgyaaaagtaattgctactcagaggctgagacaggagaattgctggaacttgggaggcggaggttgcagtgagccgagatcccatcactgtactccagcctgg

SEQ ID NO: 209798 - DNA, 201 bp, Homo sapiens
cctcctgggttaaagcgattcttgtgtctcaggcacgtgccaccacgcccagctaatttttgtattgtagagacagagtttccccatgttggcaaggctgktctcgaactcctgacctcgagtgatccgcccgccttggcctcccaaaatgctgagattacaagtgtgagccaccgtgcccagccaattagagtgcttttg

SEQ ID NO: 209799 - DNA, 201 bp, Homo sapiens
gtgttcttaggatcttagaatgatccatgccatgaattttgtttacattgaatagtaatttgtttgtaccctggattaattagagtgcttttttttttttkgagacagtcttgctttgtcacccaggctggagtgcagtggcaccatctcggcccactgtaacctctgcctcctgggttaaagcgattcttgtgtctcagg

SEQ ID NO: 209800 - DNA, 201 bp, Homo sapiens
cacccaggctggagtgcagtggcaccatctcggcccactgtaacctctgcctcctgggttaaagcgattcttgtgtctcaggcacgtgccaccacgcccarctaatttttgtattgtagagacagagtttccccatgttggcaaggctgttctcgaactcctgacctcgagtgatccgcccgccttggcctcccaaaatgc

SEQ ID NO: 209801 - DNA, 201 bp, Homo sapiens
ggtctcaaactcctgacctcaagtgatccacccgcctcggcctcccaaagtgctgagattacagtcgtgcgtcaccgcgccaggccaacaattttctttaygcccaaatgtttgagacactgactgctcctctgcttcgattgcgtagatcagtgatggctcttgtctcattagctcattgttttagaaacctgtttggag

SEQ ID NO: 209802 - DNA, 201 bp, Homo sapiens
acctctgcctcctgggttaaagcgattcttgtgtctcaggcacgtgccaccacgcccagctaatttttgtattgtagagacagagtttccccatgttggcmaggctgttctcgaactcctgacctcgagtgatccgcccgccttggcctcccaaaatgctgagattacaagtgtgagccaccgtgcccagccaattagagt

SEQ ID NO: 209803 - DNA, 201 bp, Homo sapiens
tcttgcctcagcctcccgagtagctgggttcactggcgcccgtcaccacctccagctgagttttgtatttttagtagagacagggtttcgccacgttaggmtggtctcaaactcctgacctcaagtgatccacccgcctcggcctcccaaagtgctgagattacagtcgtgcgtcaccgcgccaggccaacaattttcttt

SEQ ID NO: 209804 - DNA, 201 bp, Homo sapiens; identical to SEQ ID NO: 36735

SEQ ID NO: 209805 - DNA, 201 bp, Homo sapiens; identical to SEQ ID NO: 36738

SEQ ID NO: 209806 - DNA, 201 bp, Homo sapiens
tcaagcgattctcttgcctcagcctcccgagtagctgggttcactggcgcccgtcaccacctccagctgagttttgtatttttagtagagacagggtttcrccacgttaggatggtctcaaactcctgacctcaagtgatccacccgcctcggcctcccaaagtgctgagattacagtcgtgcgtcaccgcgccaggccaa

SEQ ID NO: 209807 - DNA, 201 bp, Homo sapiens
gagcctcgctctgtcgcccaggctggagtgcagcggcgtgatctcggctcactgcaagcgccacctcccagattcaagcgattctcttgcctcagcctccygagtagctgggttcactggcgcccgtcaccacctccagctgagttttgtatttttagtagagacagggtttcgccacgttaggatggtctcaaactcctg

SEQ ID NO: 209808 - DNA, 201 bp, Homo sapiens
cctgactgagagtagtttttacatgtttaaaggattttaaggaaaactcaagaatgtagcccctccagtataaaatatatactaaatcttcattatagggrattcagtgtttggcttattctgtttactggagggtttagttataacttcttagagatttttggttttgtcttgttttatttaggaagcgttgggagatgt

SEQ ID NO: 209809 - DNA, 201 bp, Homo sapiens
actttttgagcaccaacgtgactcttaaagaaaatgctcattggagcgttttggattccagaatcttggatgaggagtgctcatgtattaagtataatgcragtattccaaaatctgaaatccaaaacacttctgctcccaagcattttggacaagtgatactaactatattataatttcatgggaccactgtcatatatg

SEQ ID NO: 209810 - DNA, 201 bp, Homo sapiens
ttgagcatctctaatccctgaaatactccaaaaatctgaaactttttgagcaccaacgtgactcttaaagaaaatgctcattggagcgttttggattccasaatcttggatgaggagtgctcatgtattaagtataatgcgagtattccaaaatctgaaatccaaaacacttctgctcccaagcattttggacaagtgata

SEQ ID NO: 209811 - DNA, 201 bp, Homo sapiens
cgctctgctctcgggtaagcgcggcgggcacgtgggcggctgctccctccccgcctgggctgcttgtcccgggcccagcgggacacggaggacgccggggyaccgctcctgagccaccggggcggagcgagcgcggaccctgcccccttcttatttctgttgggatccctggctctgcggccgcttctcccccttaagtag

SEQ ID NO: 209812 - DNA, 201 bp, Homo sapiens
tgtatacacttaaataaaccttcctagtcaaatagatgacctcttctctcgtttctacaccataggtttattttgcctattctttatatgaaaggaatcamacagtgtgtgttacgtttggctgcttttgggatttaccaagcttcttgaatctgtagattgaattttttttcgattaaatttggagacttcttattttag

SEQ ID NO: 209813 - DNA, 201 bp, Homo sapiens; identical to SEQ ID NO: 36725

SEQ ID NO: 209814 - DNA, 201 bp, Homo sapiens; identical to SEQ ID NO: 36726

SEQ ID NO: 209815 - DNA, 201 bp, Homo sapiens; identical to SEQ ID NO: 36727

SEQ ID NO: 209816 - DNA, 201 bp, Homo sapiens
ctaactcaaacggacttgaaataactgggaaacctgcccatgaatgtttcggccatttgtgctacttcagcacaattattgcaggggaaaaacaattttctttttttttttttttctttttattgagacggagcctcgctctgtcgcccaggctggagtgcagcggcgtgatctcggctcactgcaagcgccacctcccag

SEQ ID NO: 209817 - DNA, 201 bp, Homo sapiens
tgtttggcttattctgtttactggagggtttagttataacttcttagagatttttggttttgtcttgttttatttaggaagcgttgggagatgttgtttaytgtagtctccctgaagttgggacaaaattgaacaaacaaggtgagtgttcttaggatcttagaatgatccatgccatgaattttgtttacattgaatagt

SEQ ID NO: 209818 - DNA, 201 bp, Homo sapiens; identical to SEQ ID NO: 36729

SEQ ID NO: 209819 - DNA, 201 bp, Homo sapiens
taactcaaacggacttgaaataactgggaaacctgcccatgaatgtttcggccatttgtgctacttcagcacaattattgcaggggaaaaacaattttctttttttttttttttctttttattgagacggagcctcgctctgtcgcccaggctggagtgcagcggcgtgatctcggctcactgcaagcgccacctcccaga

SEQ ID NO: 209820 - DNA, 201 bp, Homo sapiens; identical to SEQ ID NO: 36716

SEQ ID NO: 209821 - DNA, 201 bp, Homo sapiens
tattctgtttactggagggtttagttataacttcttagagatttttggttttgtcttgttttatttaggaagcgttgggagatgttgtttattgtagtctscctgaagttgggacaaaattgaacaaacaaggtgagtgttcttaggatcttagaatgatccatgccatgaattttgtttacattgaatagtaatttgttt

SEQ ID NO: 209822 - DNA, 201 bp, Homo sapiens
tttgagacactaactgctccttgttaaggagaattgtactaattacaattagtaattgctcggttgctaaaatgagggtcacagcagccttactcctaaarttatcttcacaggtaggcaagatggcaaggtcaaagaaggtagtctcaggtggtgtttatagttgtccagtgcttactttgaaaaggtgttttagcttca

SEQ ID NO: 209823 - DNA, 201 bp, Homo sapiens
attcttgtgtctcaggcacgtgccaccacgcccagctaatttttgtattgtagagacagagtttccccatgttggcaaggctgttctcgaactcctgaccycgagtgatccgcccgccttggcctcccaaaatgctgagattacaagtgtgagccaccgtgcccagccaattagagtgcttttgacccaagtattaggttg

SEQ ID NO: 209824 - DNA, 201 bp, Homo sapiens
atttttggttttgtcttgttttatttaggaagcgttgggagatgttgtttattgtagtctccctgaagttgggacaaaattgaacaaacaaggtgagtgtkcttaggatcttagaatgatccatgccatgaattttgtttacattgaatagtaatttgtttgtaccctggattaattagagtgcttttttttttttggaga

SEQ ID NO: 209825 - DNA, 201 bp, Homo sapiens; identical to SEQ ID NO: 36717

SEQ ID NO: 209826 - DNA, 201 bp, Homo sapiens
tatcttcacaggtaggcaagatggcaaggtcaaagaaggtagtctcaggtggtgtttatagttgtccagtgcttactttgaaaaggtgttttagcttcaamctgctcataattggcatataaccggcgatttgtagcagagtgagagaattaagtgttaaagacaaataactatatactatctattttcctcagaatcctc

SEQ ID NO: 209827 - DNA, 201 bp, Homo sapiens
tcttgtgtctcaggcacgtgccaccacgcccagctaatttttgtattgtagagacagagtttccccatgttggcaaggctgttctcgaactcctgacctcragtgatccgcccgccttggcctcccaaaatgctgagattacaagtgtgagccaccgtgcccagccaattagagtgcttttgacccaagtattaggttggt

SEQ ID NO: 209828 - DNA, 201 bp, Homo sapiens; identical to SEQ ID NO: 36733

SEQ ID NO: 209829 - DNA, 201 bp, Homo sapiens
aaaaaatcacgtcattctgcaactttttttttttttttttggagatgaagtttcgctagtcgcccaggcaatggtgcaatctcggctcactggaatctccrcctcccaggttcaagtgattctcctgcctcagcctcccaagtagctaggattataggcgtgtaccactacacctggctaatttttgtatttttagtaggg

SEQ ID NO: 209830 - DNA, 201 bp, Homo sapiens; identical to SEQ ID NO: 36734

SEQ ID NO: 209831 - DNA, 201 bp, Homo sapiens; identical to SEQ ID NO: 36736

SEQ ID NO: 209832 - DNA, 201 bp, Homo sapiens; identical to SEQ ID NO: 36737

SEQ ID NO: 209833 - DNA, 201 bp, Homo sapiens
aaaccttcctagtcaaatagatgacctcttctctcgtttctacaccataggtttattttgcctattctttatatgaaaggaatcacacagtgtgtgttacrtttggctgcttttgggatttaccaagcttcttgaatctgtagattgaattttttttcgattaaatttggagacttcttattttagtcatgatttctttct

SEQ ID NO: 209834 - DNA, 201 bp, Homo sapiens
tgtagtctccctgaagttgggacaaaattgaacaaacaaggtgagtgttcttaggatcttagaatgatccatgccatgaattttgtttacattgaatagtratttgtttgtaccctggattaattagagtgcttttttttttttggagacagtcttgctttgtcacccaggctggagtgcagtggcaccatctcggcccac

SEQ ID NO: 209835 - DNA, 201 bp, Homo sapiens
cactcgtgtcacttaatgatggagctatgttctgataactgcctcctcggggattgcgtccttctgtgagcctcctagggtgcccttacacacacctagayggtacagcctattacacaccttggctgtatggtacagcctttgctcctgggctacaaacctgtacagcatgttactgtactgaatactgtaggcaatcgt

SEQ ID NO: 209836 - DNA, 201 bp, Homo sapiens
caacagaaaatggcattggaacagtgggaatcagcaattttgcacaggtattggattatattgaaatatttgtcccagtgtgctcttgcatgatttgcttyatctctacctttttaaaagtgtttaggctgcgtgaggtggctcatgcctgtaatcccaacactttgggaggctgaggcaggaggattgcttgaggccagg

SEQ ID NO: 209837 - DNA, 201 bp, Homo sapiens
aacatagacccccccatctctacaaaaataaaaaataaaaataataattatacactctacttacgttgtgctgcgtatcagagctgtaaccaaagcaattraatgctgttttaagtactactatcctttgggtaaggggtaaaatgagccagtgaggcctctttaaaacagtatttgagttaaccatttttctatgaactt

SEQ ID NO: 209838 - DNA, 201 bp, Homo sapiens; identical to SEQ ID NO: 36718

SEQ ID NO: 209839 - DNA, 201 bp, Homo sapiens; identical to SEQ ID NO: 36740

SEQ ID NO: 209840 - DNA, 201 bp, Homo sapiens
taaaatcaactcactaaattatgatggaagctaaggaagcaattatagagtttgtaattttcctttaaaacacgcctgattatattttaaaagagtcctcrgtggcacaagaatactaacatttaaattcaccatttctcatgtttatccacacactctaaatctgggtatccctcagaggatcctgtaattccccaaagg

SEQ ID NO: 209841 - DNA, 201 bp, Homo sapiens
gagaaattggccacaacgaaggggctacaggccccatgcaagtctaaaatccagcggggcagtcacatcttgaaactccaaaatgacctcctttgactccrtgtcccatatccaggtcatactgatgcaagaggtggtttcccatagtcttgggcagctccacccttgtggttttgcagggtacagccccacttttggctg

SEQ ID NO: 209842 - DNA, 201 bp, Homo sapiens
tatcactgcctaacccataataaataataagtgtagccatggttgttgctgtttttattttagggcggaggaaacagaggttcagtgaattgcctagggtmacacagggaattggtggaagagccaagtctaatgcccagatttccaaactgggagtcttaacccttcatcagtgctacctgtgccacatgggagaagatg

SEQ ID NO: 209843 - DNA, 201 bp, Homo sapiens
gtgtgtttggccttttggttttttgttttttgttttttttgagatggaatctccctctgtcgcctagactggagtatagtggtgcagtctgcactcactgsaacctccatctcccaggttcaagcaattctcctgcctcaaccttctgagtagctgagattacaggtgtgcatcaccacgcctggcgaattttttctgttt

SEQ ID NO: 209844 - DNA, 201 bp, Homo sapiens
acaatgggggtacaggtattgggtaagtatactcattccaaaaaggagaaattggccacaacgaaggggctacaggccccatgcaagtctaaaatccagcrgggcagtcacatcttgaaactccaaaatgacctcctttgactccgtgtcccatatccaggtcatactgatgcaagaggtggtttcccatagtcttgggca

SEQ ID NO: 209845 - DNA, 201 bp, Homo sapiens
ctgtatattctcttttctcccttctggcttaggattcatgtgaattttgggtgggggcaggtctgcaaaatgcgtttgctgagatttttctgtgcttatcratgttggggatcaggaagggaggaggcggctcccagcagtgcagcagatggctaccatcctgtgaaggctttactggcctggtggataagctttttcctt

SEQ ID NO: 209846 - DNA, 201 bp, Homo sapiens
taataagtgtagccatggttgttgctgtttttattttagggcggaggaaacagaggttcagtgaattgcctagggtcacacagggaattggtggaagagcsaagtctaatgcccagatttccaaactgggagtcttaacccttcatcagtgctacctgtgccacatgggagaagatgggccacctccaattcattttctct

SEQ ID NO: 209847 - DNA, 201 bp, Homo sapiens
taggggaattttcttttataaaatcatcagatgttgtgggacttactatcatgagaatagcacaggaaagacccgcccccatgattcaattacctcctacygggtccctccaggacacgtgggatttacgggagctacaattcaacaagaggcttgggtggagacacggccaaaccatatcactgcctaacccataataaa

SEQ ID NO: 209848 - DNA, 201 bp, Homo sapiens
agtctcatctgaggcaaggcaagccccttccacctataagcctgtaaaatcaaaagcaagttagttacttcctagatacaatgggggtacaggtattgggwaagtatactcattccaaaaaggagaaattggccacaacgaaggggctacaggccccatgcaagtctaaaatccagcggggcagtcacatcttgaaactcc

SEQ ID NO: 209849 - DNA, 201 bp, Homo sapiens; identical to SEQ ID NO: 36754

SEQ ID NO: 209850 - DNA, 201 bp, Homo sapiens
gattttctgcacactttgggagaacgattacctcctctttatcacttggttctggtttgccacttaaaagtggcagtgacaggttcccatttaaactgcaygtatttgttgggaaaaggtaagtaggtttaaacaaaaccttataggctagtcataataccagatgaatcagatgtgacagaaattgtggaggtggagtga

SEQ ID NO: 209851 - DNA, 201 bp, Homo sapiens
caccattctttgaagataaggcctctctctttgtaatttaagtagatgagaggattctcacttttgaaaatttgaagaagcgaggcttgcaccaaggaacmtgcatagtgaggggctcaggatgagccaagaagacttggatcagccccaccttgattggtaaattactttatacacttcccctaggcacagcttaagagt

SEQ ID NO: 209852 - DNA, 201 bp, Homo sapiens
ggtattcagaagaacttacaaaactctttgtaaccctgtgcttttgagagatgtagtcatgtcatgtggaaatgtaataaaatagttggatctctaaactstggagtgtgaaaaaagggcagctcaaggaatgacatctgtggagtgcccatacggtgtcaggtgttttgttggacattttttgcacattatcccatgcag

SEQ ID NO: 209853 - DNA, 201 bp, Homo sapiens; identical to SEQ ID NO: 36756

SEQ ID NO: 209854 - DNA, 201 bp, Homo sapiens; identical to SEQ ID NO: 209843

SEQ ID NO: 209855 - DNA, 201 bp, Homo sapiens; identical to SEQ ID NO: 36757

SEQ ID NO: 209856 - DNA, 201 bp, Homo sapiens
aacaataggtatgcggttaaaagcgaatgttaatatatgataggaaatttttgatcatttccttaataggtccaagaaatagtatttctgtctttattgcytatacgttgctgaaagccttgctggtggttagtagattgtagtcacttaggtgttaaagataatgataaacatgatagtgaattatacaattttaaaatg

SEQ ID NO: 209857 - DNA, 201 bp, Homo sapiens
gtctggatctccttgtgatcagcctgcctcggcctcccaaagtgctgggattacaggcgtgagagccagttctttataaaagtttgctctgttctccaacsccaatggaatagagcaatccaagaccatttcaaatgaaaagacataattggggaaagtagtagcagatagagcaaggtgttgagtaggctcagaaatgag

SEQ ID NO: 209858 - DNA, 201 bp, Homo sapiens
tctgatcagtgctacaaagtaagagtctggacaaggtcaaattccataatctcagtttggatttcctcaaaatagaaattttagtaaatattggaagacayaatgggggccatatttttcttatgtttaaggtcacattctgttgatttttgacctaagttttcataaataggttgacaaaagccatgatagttttcacga

SEQ ID NO: 209859 - DNA, 201 bp, Homo sapiens
ccgatgtgtagtgtaaataatgccactataagactcttgtaatttagtttttgtgcacctctcagattatttccgtaggattcctagaagtagaattactkggttaaggagtataaacattttaaggttttgatgtatagtattcataaaagttgtctcattaagtgacatatcagataggatacaataaaaaaatagctt

SEQ ID NO: 209860 - DNA, 201 bp, Homo sapiens
cacctcgcctcactgcaacctccccctccagaattcaagcaattctcctgcctcagcctccctagtagctgggattacaggcgcccgccactacgcacagstaattttttgtatttttagtagagatggggtttcatcatgttggccaggctggtctcgaacttctgaccttgtgattcacctgcctcggcctcccaaagt

SEQ ID NO: 209861 - DNA, 201 bp, Homo sapiens
ttagaaagcttattattaaactttgtctttatttgcctccagagaacacagtttagagatgtattcagttttccatatttagataggttatctaaagataycctcaaaagaatggtagtgcaatgaattacataattttatccttatcattttgcttgaagaaaaattacttaaatttatttaaatttaacttacaaataa

SEQ ID NO: 209862 - DNA, 201 bp, Homo sapiens
tataggtctaaatatctcatgcaaggtatatctttcgtttattttattggtttatcgtcgtcgtcgtcatcatcatcatcatcatcatcatcaatttttgytgttgctgctgctgctgctactactactactactgcttagtactacttttgttattgagaagcagtgtaggattgaggttgaattcctgaattctggagc

SEQ ID NO: 209863 - DNA, 201 bp, Homo sapiens
aggtctaaatatctcatgcaaggtatatctttcgtttattttattggtttatcgtcgtcgtcgtcatcatcatcatcatcatcatcatcaatttttgctgytgctgctgctgctgctactactactactactgcttagtactacttttgttattgagaagcagtgtaggattgaggttgaattcctgaattctggagctga

SEQ ID NO: 209864 - DNA, 201 bp, Homo sapiens
tctaaatatctcatgcaaggtatatctttcgtttattttattggtttatcgtcgtcgtcgtcatcatcatcatcatcatcatcatcaatttttgctgttgytgctgctgctgctactactactactactgcttagtactacttttgttattgagaagcagtgtaggattgaggttgaattcctgaattctggagctgaaat

SEQ ID NO: 209865 - DNA, 201 bp, Homo sapiens
cttataaagtttaacattttataaggctttgtctttgactttcgtacatgctctccctggggatccactcccatggttttacctaccacctatatactgaygcctcctaaattgacctctctgtatccttctcctaagcactatactttcatatcccattgccttcggagtctttttgcttaagtatctcacaggcagttt

SEQ ID NO: 209866 - DNA, 201 bp, Homo sapiens
gtttgttcacttttctgtattcagaataaaaaatgatggaacagccggtgtggtggctcacgcctgtaatcccagcactttgggaggccgaggagggcggrtcacaagatcaagagattgagaccattctgaccaacatggtgaaaccccgtctctactaaaaatacaaaaattatcagggtgtggtggtgcatgcctgta

SEQ ID NO: 209867 - DNA, 201 bp, Homo sapiens
ttggccactgcctgtgaagacttaaaaatagttttaaatagtctcattgttttccatagcctcctgtactagacagagcaagtcccctttatgaaatcatrtttgtaacctcatggcaagatctggaacttcacaaaaacattagtgggcttccatgaccttttaacaaagtatatgagtcagcccagctagaaaatgaag

SEQ ID NO: 209868 - DNA, 201 bp, Homo sapiens
aaaagcagagcttaatttctgctggagagtatgttggcacctctctctctactttctttcctttctcctaccttttcttcctcctgtcctcccttgatccyttcatgcaccccttcgctcttcattgttcagtataccttcatgtgacaaaaaatattgccattataattatgttttgaagacaactatatttttttctca

SEQ ID NO: 209869 - DNA, 201 bp, Homo sapiens
taattttgttactattttatttaataaaatgatgttttggaaagaggatttgctttatgattatgactctttaagaagggtatttcttattggggaatttrctgtctgtcagataatttttcttcccttcaaactatttgaaaatacattttcaaattctgctgcttattagctgtgcaaggttgggcaaattacttaccc

SEQ ID NO: 209870 - DNA, 201 bp, Homo sapiens
attatatatataagattaatctgaatcttaattttaagaagtacaagctcattgtattctttcctattaattccttattctacaattccttggatttattkgcttaaatgataggattttaaagaaataactctgtttttcagctgtattttgggaacgttgcaatgaattacaggacattgagaaaattatggctcaaat

SEQ ID NO: 209871 - DNA, 201 bp, Homo sapiens
ggatcacaagatcaagagattgagaccattctgaccaacatggtgaaaccccgtctctactaaaaatacaaaaattatcagggtgtggtggtgcatgcctrtagtcccagctacttgggaggctgaggcaggagaatagcttgaacccgggaggcggaggttgcagtgagccgagatcgcacccctgcacttcagcctggc

SEQ ID NO: 209872 - DNA, 201 bp, Homo sapiens
cataagtttacaattacaggccagattcttccctatgcctaatatttccctaaagcaaattagtcacttagaactctttctggtcaccattgttatctaaygtaataccactccatataaactttgcatttctaaagtattgagcttttgctaaaattatttcttaaagattaaaagcaaaagataaatatctaggtttgt

SEQ ID NO: 209873 - DNA, 201 bp, Homo sapiens
gttttttttttttttttttttttttttttttttattcctctatgtcctcagcctctctctagaacagcttttttcctttggctctcccctgtgaataatgkggtcctctccaatagagaggctgttcctgctcccacaccccacagttcctcaggatggtatcggtattctcctagttcacccactgccacttctaagcta

SEQ ID NO: 209874 - DNA, 201 bp, Homo sapiens
gttaatcatcttaaaaagctcccttttaaggatgatgtgatatataaccgttagacatatcttctcaaggcatagctagcattgctttatttcccccttgyaccttcagaaaactcatcagggccacaaagtaaatagagcactagtttatcctcaaatgaacaaaacaaaattgctttagtggagttacctggtattctg

SEQ ID NO: 209875 - DNA, 201 bp, Homo sapiens
cgtgtcagcgagccaaagattccaaaggtaaaactgtacaaggccagtttttatgtcctaaagtagatttctgttgcaacatgatctatgggtcagatttwcttgtatcattgccaaatcatagtctctaaaatataacagtacaaaaaagtatctgatttggcccagccatataaatggattttattgtatttattgttc

SEQ ID NO: 209876 - DNA, 201 bp, Homo sapiens
cacctttaatgttttatcgagatgtttaactctaaatgtatccaatagttacaaaaaattcaaagcagagctaatttaaattaaaaatatgcatttgttgyatgaaacttgtaggcgaaaccatgaaactgagagcttcacaaaatcaaataaggataaggtgttagcacgactgaatggggtctggcactctacttctct

SEQ ID NO: 209877 - DNA, 201 bp, Homo sapiens
acacatgtagttttcttcaaaggagattacttttaataaaagttgaccaaaatttgaaaacttagaggaaaaattgaaacatcactgtgtatcccatgagwctgtacaattgttatgtatcacctaaaaataaaaggaaaaaatttaaaaatgctaattgaggctgggtgaggtaggtcatgcctgtaatcccagcacttt

SEQ ID NO: 209878 - DNA, 201 bp, Homo sapiens
atgcaaggtatatctttcgtttattttattggtttatcgtcgtcgtcgtcatcatcatcatcatcatcatcatcaatttttgctgttgctgctgctgctgrtactactactactactgcttagtactacttttgttattgagaagcagtgtaggattgaggttgaattcctgaattctggagctgaaatctcaactcttgt

SEQ ID NO: 209879 - DNA, 201 bp, Homo sapiens
gcaaggtatatctttcgtttattttattggtttatcgtcgtcgtcgtcatcatcatcatcatcatcatcatcaatttttgctgttgctgctgctgctgctrctactactactactgcttagtactacttttgttattgagaagcagtgtaggattgaggttgaattcctgaattctggagctgaaatctcaactcttgtca

SEQ ID NO: 209880 - DNA, 201 bp, Homo sapiens
gcttgccaatccctttaccaacattagcttaattttcttgccactccttttaggaaatgaatgtcaggagagtatctctgttcattgagtgacgactaaaygtgactgggagattctggaagaatctaagaagtccaaaagatctagcacattagtcagtttactgcaaaggacatgtggaaagagtacccaaaattcaat

SEQ ID NO: 209881 - DNA, 201 bp, Homo sapiens
aagcctaagtgagagtacttgggaagcaccatttaaatatttgaaatacttgggcaagtaaaatttgcacttcaggtttgatgttagcattgcattcatamcttgtaaattagcagactggatatttcatgtcaaaacctgactattaaaaaggtagagaatccacagacttttacaagtaattcagtgataattttctca

SEQ ID NO: 209882 - DNA, 201 bp, Homo sapiens
gaaattaaaaactacagatcttcgaactatgtatcaacattctctttgtaatagaaaagcagttatttctataacaactctcactcaacttttgattccarcataaaatatgtgcaattttataaggagaaacattttaagtcttttaaagtgttttttaatgtatcattgtatagaagtaaatagggcaataaatggatt

SEQ ID NO: 209883 - DNA, 201 bp, Homo sapiens
gtgtgtgaagattttctatatgtattttaaatgtttttatttgtttcttaaggaccctgatggtctaattttatttttctctttttcttctatccctttaycaataaaaaataaaggaagcaatagaggcttttaatgctcctaatagtagcaaattcatctttatgctaagtaccagggctggaggtctcggaattaacc

SEQ ID NO: 209884 - DNA, 201 bp, Homo sapiens
gctctctctttctctctctctgtgtgtatgtgtatacatacgtagcacctatatatacgtgcagaatctatattttgtattaaaaaatacggggacatctrtattctatattctgaaatgcgtatctatattttataagtatacttaactatatttatgaaccatttgaaaattacagacaatgtgagtgttcatctctaa

SEQ ID NO: 209885 - DNA, 201 bp, Homo sapiens
actcctgatctcatgtgatccacctgcctcagcctcccaaagtgctgggattataggcgtgaaccaccgcgcccagcaaacatgacatttaatagggatamatgtaaagtgctatacttgtacaaaagaatatgaaaagatatatatgttagcaaggtacagtaggaagaattaagaaaagaataaaaaagataaagaggt

SEQ ID NO: 209886 - DNA, 201 bp, Homo sapiens
tatgatcaacttagctttttaagctcagagcatatgaattgccctaccattttctttctaagaaaaccatcttagaatgaggtcatagtcttaggatagtmaaaaacttatcagagttaaaaggacccttatcaaataaccataagaggaagtaatactttgtatttatgtagtaccttttatataatgcttgccaatccc

SEQ ID NO: 209887 - DNA, 201 bp, Homo sapiens
tatgaaaaatatgaattaatacatcattggtaaaattaataaactgtaaaatgtactgatgggttcttcttgactatagaattaaaatatttaaaaccacrtatttatgcacttaggagtttattacctcctcatgcacttaaaagactaaaatgttcttttcttattaaattttttttttgaaacagggtctttttcttg

SEQ ID NO: 209888 - DNA, 201 bp, Homo sapiens
agccatacgttttaagtataactttcttattttcactgacatgtgttttaaaacattatagattgaaatttatggtactttttaatttgtaattttttatytgcatgttttggttttcttaggaaagagttctttaatagagttttaaaatgaggatctttggagaaatagtatgcttcttgtctttgagatcaacttgcc

SEQ ID NO: 209889 - DNA, 201 bp, Homo sapiens
cagtttactcttagtttatctcttgatttataggttccaaggaatcctgatatcccaaatccagctctggctcaaagagaagagcaaaaaaagattgatgsagctgaacctcttacaccagaagagactgaagaaaaggaaaaacttctcacacaagtaaaatattttcaatggctgtaatacttacagtcaatcaataga

SEQ ID NO: 209890 - DNA, 201 bp, Homo sapiens
tctagagctaaggtagagtggatttagcataatttttaagagccctaggattttcagaataataaatgagcgttggtttcaatttaaagtcaccagctgcwttagcccctaatgaataaacctgtcatttgaagctttgaagctgggcatccgcttttcctctctagttatgaaagtcctagatggcatcttcttctaata

SEQ ID NO: 209891 - DNA, 201 bp, Homo sapiens
tttagagcctaaaattcatttgcctggatagttgatcttattttgtatcttacatttcctatgttgtatgccattttttttggattttatttggaaagatraaactgaattttaaacaattttccattcttaaaaagttacagattgcccaacacttaaatgttcattgcagaaaatttggagaattcaggctagtatcaa

SEQ ID NO: 209892 - DNA, 201 bp, Homo sapiens
catgtattttgtgccatgaagtcatgaatgcctactttaggtcccctattctgattttctaatggactcttacttggtggttctttaccaagaaagttcgsaactggtattggtagtatttgtcagactatgcagtgggaagtaaatttcacattaatgttgttaatgaaatacattattaatcatattaaatgtttcata

SEQ ID NO: 209893 - DNA, 201 bp, Homo sapiens
tgaggcaggaggattactggagcccaggaagtcaaggctgcagtgagccatgtttgtgccactgcactccagggtaggcaacagagtgagaccgtgtctcaaaaaaaaaagcattcttgctttttccttcagtgaaaataattataaccatattactagtgttgatgaaaatgttggtgattgtggatattacaaaaatag

SEQ ID NO: 209894 - DNA, 201 bp, Homo sapiens
atagactcctacagttggaccagatttggatagaatgcgagcaaattatgccagtgggttggagttcattttacttttcctttaatctacctttttctaargttagactttatttggctatcatccctgcagcttttatttattcataagcttgaatagccagttataaatgtcatatgttttattatgcagcaatagtgt

SEQ ID NO: 209895 - DNA, 201 bp, Homo sapiens
atattatattgtactttttaatgtccataaaaaataattgtaaaagtaattttaggataatatttcaccctatggatgtactataagtaattcatccccckattcttgatcgtttaggttgtttcaaaattttcactattataaataatgctatagtgaaagtccttatacataaatctttgtgcacatctctgattattt

SEQ ID NO: 209896 - DNA, 201 bp, Homo sapiens
cccacctcagcctcctgagtagctgggaccacaggcatgtaccaacatgcacatctaattaattttcttttttagagacagggccttgctgtgttgcccaractgatcttgaacctctggccccaagtgagcctcccacctctgcctcccaaagcactgagattataggcatgagccaccatgcctgaccaggactgtatt

SEQ ID NO: 209897 - DNA, 201 bp, Homo sapiens
aacttccgcttctaaatatgcctcactttgaaagccttcagctaaaggttgcagatttctttgaggctctttttcattaaaaaatgctagctatacaaaaragaaaatgagtttcagttcaatttctctgtgctaaaaggattgtgatttctttctctgagaatttgtgtggtctttaagtaagtaatcagtctctattga

SEQ ID NO: 209898 - DNA, 201 bp, Homo sapiens
gtaacattttgcaaaactatagtaaaatatcacaaccaggaaattgacattcgtgtaatctatagagcttgttcagatttcatcagttatacatgcgctcktgtgtgtgtgtgtgtgtgtgtgtgcagttcaatgcagttttgtcatgtgtagagttgtgtaacctccaccaccataagactccattgtgctatctcttta

SEQ ID NO: 209899 - DNA, 201 bp, Homo sapiens
gaacctctggccccaagtgagcctcccacctctgcctcccaaagcactgagattataggcatgagccaccatgcctgaccaggactgtatttttataatcttttttttttttttttttttgcactggactagaaatcatctactgatacattggttaattgaaaatcttttataaaacatttcatgaaatgctaaatcact

SEQ ID NO: 209900 - DNA, 201 bp, Homo sapiens
ctattataataccctgctctagagtgaaatttgatataggtctaaatatctcatgcaaggtatatctttcgtttattttattggtttatcgtcgtcgtcghcatcatcatcatcatcatcatcatcaatttttgctgttgctgctgctgctgctactactactactactgcttagtactacttttgttattgagaagcagt

SEQ ID NO: 209901 - DNA, 201 bp, Homo sapiens
cattatccagagtcatattttgtttatgattttttaaagtaacatttacatagagtgaaatatataaaccttaagtgtaccattcaatgttttttcacaartgcatacacttatgtaactcgaactcctcctataaagatatagaccatttctgtcaccccagaaagtgccttttcccagtgaccatatgcactcctcaga

SEQ ID NO: 209902 - DNA, 201 bp, Homo sapiens
gaaaaattgacataaaaataggatggggcataagcatttttgatgtatgataaaattgcataactaatggtttatgtgtggattttttcctatttacgagkagtcatatcgcaattttaaaaaggtgggtaattatgctttagagatctcaagtggctttgtctgaatcattatatgatactatacgaccaaatgaaaagc

SEQ ID NO: 209903 - DNA, 201 bp, Homo sapiens
gagttgcttgatgctggtggctctgtaattctagggtccctgcaacacccccaattccactaggcagtgcccttgttggggactttgtgtaggagttccarcctcacatttccactcagcattgccttagtagagtcgctccacagggcagcgcccctgtggcaggcttctgcctggtaatccaggctttccaatacattg

SEQ ID NO: 209904 - DNA, 201 bp, Homo sapiens
tgagaaagataaaatattggttatttataaaatatctctttcattactgtcgcttcacattaatccatctgaaggaaaagcgaaatttgtttcattgctgygggaatttctcattttacttaataatctcattataatatcggtatctcaggctcttagagttagaaggtcatttatgttaagtttcttgtaattaagaaa

SEQ ID NO: 209905 - DNA, 201 bp, Homo sapiens
acttattttactgaaaaatgagaggtgagacattttggttttgcactgtagctagtatgctgataatgctttgtttctgttactgcttctgatagcttttrgtttcttgatttgtatttgtcaggttgtcctatctctaatcttcacttagacggcttatattttatcctgctgagatggaggtgatggcctatctgcaca

SEQ ID NO: 209906 - DNA, 201 bp, Homo sapiens
tttgcctttctcttagctttagctatttgtcccatttaaattatgcaagagcaattataatgtgggtacaacttcactgacaaaagattttaaagaaagcytaagtgagagtacttgggaagcaccatttaaatatttgaaatacttgggcaagtaaaatttgcacttcaggtttgatgttagcattgcattcataccttg

SEQ ID NO: 209907 - DNA, 201 bp, Homo sapiens
gttttatgaagtggaaaaattttaaacaatgaagtctaaataccagtggagcttcttatccacatttttagagaaaaattagtaaaatacttggctatctstaactggtttccttgtgcttctaattttagcaaagtaatgatgcgtaaagagaattttaataaccatgatgacttgtatttttataattaaatgtctgac

SEQ ID NO: 209908 - DNA, 201 bp, Homo sapiens
tcgcttcacattaatccatctgaaggaaaagcgaaatttgtttcattgctgtgggaatttctcattttacttaataatctcattataatatcggtatctcwggctcttagagttagaaggtcatttatgttaagtttcttgtaattaagaaatctcatctttagcatccaagacagatatgcagcctctgaacactgtagt

SEQ ID NO: 209909 - DNA, 201 bp, Homo sapiens
ttaggcatattcaaaagctgcattgctctttcgacttaaaggagttgttatttaatgcatgcaatcacttggtcactaaaacctttatattggaagaggaygacttaattgaaatttcaattacagcataaaaaatccagaatatctggacgttccattgagtctaaaacctggaatgcaagagttttgccacattcgaag

SEQ ID NO: 209910 - DNA, 201 bp, Homo sapiens
ggttatactatatgattcagactggaacccacaggttgatctacaagctatggttagtaatctttaatggtgtcagaaatttatcatagctctgaatactrttgctatttacacacataaaggtcatttatgataaaaaggtaacaatttttgagagattttatagaagttacagtagattatcctggaaaacacagttgc

SEQ ID NO: 209911 - DNA, 201 bp, Homo sapiens; identical to SEQ ID NO: 36759

SEQ ID NO: 209912 - DNA, 201 bp, Homo sapiens
ctggcacttacctattataataccctgctctagagtgaaatttgatataggtctaaatatctcatgcaaggtatatctttcgtttattttattggtttatygtcgtcgtcgtcatcatcatcatcatcatcatcatcaatttttgctgttgctgctgctgctgctactactactactactgcttagtactacttttgttat

SEQ ID NO: 209913 - DNA, 201 bp, Homo sapiens
tagctgggattacaggtgcccgtcaccacacctggctaattttttgtatttttagtagagacagggttttgccatgttggtcaggctggtctcgaactccygacctcaagtggtctgcccacctcagcctcccaaagtgctgggattacaggtgtgagccaccgtacctggccccattatgactgttaattgataataaaa

SEQ ID NO: 209914 - DNA, 201 bp, Homo sapiens
ggtgggggatggggctgtgcaggaaaaagcctccgcctctccctctcctctcgctcgctccctctccccccgccttcccgtcggcctctgcctgggaaatytgggcccttcaatcccacactcgcgctaaaggggttttgctggggctttttttgtaatttgaatttcaaggtgctggtggttgctgggtggagggtgaca

SEQ ID NO: 209915 - DNA, 201 bp, Homo sapiens
gcacttacctattataataccctgctctagagtgaaatttgatataggtctaaatatctcatgcaaggtatatctttcgtttattttattggtttatcgtygtcgtcgtcatcatcatcatcatcatcatcatcaatttttgctgttgctgctgctgctgctactactactactactgcttagtactacttttgttattga

SEQ ID NO: 209916 - DNA, 201 bp, Homo sapiens
aaaacttttttttttttttttgagacggactctcactctgtcgcaaaggcttgagtgcagtggtgacatcttagctcactgcagcctccccgcctcctggrttcaagcgattctcctgcctcagcctcccaagtagctgggattacaggtgtgagccaccatgcccagctaatttttgtattttttagtagagatggggtt

SEQ ID NO: 209917 - DNA, 201 bp, Homo sapiens
attataataccctgctctagagtgaaatttgatataggtctaaatatctcatgcaaggtatatctttcgtttattttattggtttatcgtcgtcgtcgtcrtcatcatcatcatcatcatcatcaatttttgctgttgctgctgctgctgctactactactactactgcttagtactacttttgttattgagaagcagtgt

SEQ ID NO: 209918 - DNA, 201 bp, Homo sapiens
gcacttttatgttatggaaacagcatctttctataaacttcatgaaccaacctccaccaactttaaacttttcttctgcaccttccttacctctctcagcyttcatagaattgaagagttaggatcttgctctggatgaggctttggcttaagggaatgttgtggctggtttgatctgtccagaccactaaaactttctcc

SEQ ID NO: 209919 - DNA, 201 bp, Homo sapiens
taggtagatcccatttttttacataattaaaatgcctatattatgtttaatgccatagtgatagctattaataaaagctggttttatgaaatgctaatttkttttggacagaagaagaattgcttcacaaccatgtttcttatttgtttgtagaacatatggttaggaactccctagtaactaggctcagtattttaaaaa

SEQ ID NO: 209920 - DNA, 201 bp, Homo sapiens
gggatacatgtgcagaatgtgcaggtttgttacataggtatacacgtgccatggtggtttgctgcacccatcaatccagcatctacattaggtatttctcytaatgctatccctcccctagtcccccacccccccaacaggccccagtgtgtgatgttcccttccttgtgtccatgtgttctcattgttcaactcccactt

SEQ ID NO: 209921 - DNA, 201 bp, Homo sapiens
actgaattggttgatctctttatatgaaaatggagtcaatggcattttggctgatgaaatggtaaggaattggtagctaaaaacacattctcagttatcartgatttttatgtaaatttgaaaaacctgagcttacctgcccccctgatgcctggaggctttttaaaagttgttatcatgtaaaaggtattttgtagtctt

SEQ ID NO: 209922 - DNA, 201 bp, Homo sapiens
aaatttaaagtagttttttctaattctgtgaagaaagtcaatggtagcttgatggggatagcatttaatctataaattactttgggcagtatggccatttycacgatatagattcttcctatccatgagcatggaatgtttttctatttgtttgtgtcctctcttattttcttgaggagtggtttgtagttcttcttgaag

SEQ ID NO: 209923 - DNA, 201 bp, Homo sapiens
cttttcttcctcctgtcctcccttgatcccttcatgcaccccttcgctcttcattgttcagtataccttcatgtgacaaaaaatattgccattataattaygttttgaagacaactatatttttttctcactagaggctgatcagtaaaaatgtaggctggttctactgatttctaagcaagaccttggacaactcattct

SEQ ID NO: 209924 - DNA, 201 bp, Homo sapiens
tgaggcaggagaatggtgtgaacccgggagatggagcttgcagtgagccgagatcgtgccactgcactccagcctgggtgacagagtgagactccgtctcaaaaaaaaaaaaaaaaaaaaaatggagctggtatctatagagaacatgacatgacctgtgtgataggaaggtaacacccatacttgtccattccttgatgt

SEQ ID NO: 209925 - DNA, 201 bp, Homo sapiens
gttggccactgcctgtgaagacttaaaaatagttttaaatagtctcattgttttccatagcctcctgtactagacagagcaagtcccctttatgaaatcayatttgtaacctcatggcaagatctggaacttcacaaaaacattagtgggcttccatgaccttttaacaaagtatatgagtcagcccagctagaaaatgaa

SEQ ID NO: 209926 - DNA, 201 bp, Homo sapiens
atttccatgacataaaggagtgtttcttagaattaatatttactttctttgaattatttggtttgtggttgatattagccttttctagattttaaaatctyttatttaatgtttacacattttcttacactataaattaaagaatggatgagaaagctcagtgtcttgccttttgggttttattccaattaatatttcttt

SEQ ID NO: 209927 - DNA, 201 bp, Homo sapiens
ttgcatctattaatttaattctcacaacactcccatgaggtagatatatcacctattaataatagacaatccattattatgcttcatctacatttgcttthgttcattaacctaagcatttttgaattgtactttgagtgacttttcattaaaaacatcttattttattgacagtatatcttaccagtgactctcatttgt

SEQ ID NO: 209928 - DNA, 201 bp, Homo sapiens
ctcctgggttcaagcaattctccttccttagcctcccgagtagctgggattacaggtacccattaccacgcccggctagtttttatatttttaggagagayggggtttcatcatgttggccaggctggtcttgaactcctgacctcaggtgatccacccgccttgacctcccaaagtgctgggattacaagtgtgagccac

SEQ ID NO: 209929 - DNA, 201 bp, Homo sapiens
ggatcacaatgtggttttaagtcatactgtggtttcaatgacaaatttcagatgcaaaataagagaaggaacacgaagcctttggcttttcctttatgaaytttgtaaaacatttaatatcaccagtggacacatgttctagtagctactaaacaagtttggctattcgagaatgattgttgaataacctctataatctac

SEQ ID NO: 209930 - DNA, 201 bp, Homo sapiens; identical to SEQ ID NO: 36765

SEQ ID NO: 209931 - DNA, 201 bp, Homo sapiens; identical to SEQ ID NO: 36766

SEQ ID NO: 209932 - DNA, 201 bp, Homo sapiens; identical to SEQ ID NO: 36767

SEQ ID NO: 209933 - DNA, 201 bp, Homo sapiens; identical to SEQ ID NO: 36768

SEQ ID NO: 209934 - DNA, 201 bp, Homo sapiens; identical to SEQ ID NO: 36769

SEQ ID NO: 209935 - DNA, 201 bp, Homo sapiens; identical to SEQ ID NO: 36770

SEQ ID NO: 209936 - DNA, 201 bp, Homo sapiens; identical to SEQ ID NO: 36771

SEQ ID NO: 209937 - DNA, 201 bp, Homo sapiens; identical to SEQ ID NO: 36772

SEQ ID NO: 209938 - DNA, 201 bp, Homo sapiens; identical to SEQ ID NO: 36773

SEQ ID NO: 209939 - DNA, 201 bp, Homo sapiens; identical to SEQ ID NO: 36774

SEQ ID NO: 209940 - DNA, 201 bp, Homo sapiens; identical to SEQ ID NO: 36775

SEQ ID NO: 209941 - DNA, 201 bp, Homo sapiens; identical to SEQ ID NO: 36776

SEQ ID NO: 209942 - DNA, 201 bp, Homo sapiens; identical to SEQ ID NO: 36777

SEQ ID NO: 209943 - DNA, 201 bp, Homo sapiens; identical to SEQ ID NO: 36778

SEQ ID NO: 209944 - DNA, 201 bp, Homo sapiens; identical to SEQ ID NO: 36779

SEQ ID NO: 209945 - DNA, 201 bp, Homo sapiens; identical to SEQ ID NO: 36780

SEQ ID NO: 209946 - DNA, 201 bp, Homo sapiens; identical to SEQ ID NO: 36781

SEQ ID NO: 209947 - DNA, 201 bp, Homo sapiens; identical to SEQ ID NO: 36782

SEQ ID NO: 209948 - DNA, 201 bp, Homo sapiens
ctaccaaaaatataaaaaattagccaggcgtgatagcatgcacctgtaattccagctactcgggaggctaaggcaggagaatcacttgaacccaggaggtrgaggtcacagtgagcccatgccactgcactccagcctgggcaacagagcgagactctctcaaaaaaaaaaatcactttatagagatggagtggaaaatcc

SEQ ID NO: 209949 - DNA, 201 bp, Homo sapiens
gtgtgaaggcactgctgggagccattagaacacagatacaagagaagccaggaggtctatgatggtgacgatttttaaaatcaggaaataaaagatcttgmctctaacactgagagatccttaattactaaccccagagatgcgctatgactgaccccacagatcccaccatcattcacttattccagacccccatcagca

SEQ ID NO: 209950 - DNA, 201 bp, Homo sapiens
tctatttgtccaggtttttctgttccttttttttttttttttttaacttcctgcctatacacacgcagccatcagcccacaaagacatgactaccaacgckggccccttgcacccatactggcctcagcacctaagactggacaactttgtacctaatgaccgccccacctggcatatactggctggcctcttctctgtca

SEQ ID NO: 209951 - DNA, 201 bp, Homo sapiens
taatcttttctctttttctttctttccttacaagaaaaccaaagaagccattttcttttttgagacggggtctcgctctgtcacccaggctagagtgcagwggcatgattatagctcactgcaaccttgaactcctgggcaatcaagcaatcctcctgcctcagcctccctagtagctgggattataggcatgtgccaccc

SEQ ID NO: 209952 - DNA, 201 bp, Homo sapiens
tgtcaggtcgtgctgcggttgtcccattggggacttggcggcgactgtccctgtgctggtttgcagtgtgtgggttcattcacctggtgatcgagggctgsttcgttctctactacgaagacctgcttggagaccaagccttcttatctcaactctgtgagtcctgatttctttcatatgctgtgggatgggatttgctgg

SEQ ID NO: 209953 - DNA, 201 bp, Homo sapiens
acatttctcatgataataaactatttgaatttgattttattatctcattctgtactttctatttgtccaggtttttctgttccttttttttttttttttttaacttcctgcctatacacacgcagccatcagcccacaaagacatgactaccaacgcgggccccttgcacccatactggcctcagcacctaagactggaca

SEQ ID NO: 209954 - DNA, 201 bp, Homo sapiens
acctgtaggaagagcacaccgataccagtgtcccctcatgctttctcctgcaggggtgacaacttcacagtgtgcatggaaaccatcacagcttgcctgtrgggaccactcagcctgtgggtggtgatcgcctttctccgccagcatcccctccgcttcattctacagcttgtggtctctgtgggtaaggaaagggcacta

SEQ ID NO: 209955 - DNA, 201 bp, Homo sapiens; identical to SEQ ID NO: 36805

SEQ ID NO: 209956 - DNA, 201 bp, Homo sapiens
gtccccttcctcactggggcttctccttcccctcctgccacccacaggccagatctatggggatgtgctctacttcctgacagagcaccgcgacggattcyagcacggagagctgggccaccctctctacttctggttttactttgtcttcatgaatgccctgtggctggtgctgcctggagtccttgtgcttgatgctgt

SEQ ID NO: 209957 - DNA, 201 bp, Homo sapiens
gcacaccgataccagtgtcccctcatgctttctcctgcaggggtgacaacttcacagtgtgcatggaaaccatcacagcttgcctgtggggaccactcagsctgtgggtggtgatcgcctttctccgccagcatcccctccgcttcattctacagcttgtggtctctgtgggtaaggaaagggcactagaggggcactggg

SEQ ID NO: 209958 - DNA, 201 bp, Homo sapiens
gccatcttccacctggcctacctgggctccctgtttgatgtcgatgtggatgacaccacagaggagcaggtgaggtggggccctgggctgtgtggttaacmaagggtggcgctatctggcggggggaaaccatgaggacaaaggctgggaagctgaggcctgagctcctcagactgtgctgcttcgcctgggcagccagtg

SEQ ID NO: 209959 - DNA, 201 bp, Homo sapiens; identical to SEQ ID NO: 36809

SEQ ID NO: 209960 - DNA, 201 bp, Homo sapiens; identical to SEQ ID NO: 36810

SEQ ID NO: 209961 - DNA, 201 bp, Homo sapiens
ctcttctctgtcacaggggtcttagtcgtgaccacatggctgttgtcaggtcgtgctgcggttgtcccattggggacttggcggcgactgtccctgtgctrgtttgcagtgtgtgggttcattcacctggtgatcgagggctggttcgttctctactacgaagacctgcttggagaccaagccttcttatctcaactctgt

SEQ ID NO: 209962 - DNA, 201 bp, Homo sapiens; identical to SEQ ID NO: 36812

SEQ ID NO: 209963 - DNA, 201 bp, Homo sapiens; identical to SEQ ID NO: 36813

SEQ ID NO: 209964 - DNA, 201 bp, Homo sapiens; identical to SEQ ID NO: 36814

SEQ ID NO: 209965 - DNA, 201 bp, Homo sapiens
agggacaaagctaattgatctgtcacactcaggctcatgggcaggcacaagaaggggaataaaggggctgtgtgaaggcactgctgggagccattagaacmcagatacaagagaagccaggaggtctatgatggtgacgatttttaaaatcaggaaataaaagatcttgactctaacactgagagatccttaattactaac

SEQ ID NO: 209966 - DNA, 201 bp, Homo sapiens
atggctgttgtcaggtcgtgctgcggttgtcccattggggacttggcggcgactgtccctgtgctggtttgcagtgtgtgggttcattcacctggtgatcragggctggttcgttctctactacgaagacctgcttggagaccaagccttcttatctcaactctgtgagtcctgatttctttcatatgctgtgggatggga

SEQ ID NO: 209967 - DNA, 201 bp, Homo sapiens
tgccacccacaggccagatctatggggatgtgctctacttcctgacagagcaccgcgacggattccagcacggagagctgggccaccctctctacttctgrttttactttgtcttcatgaatgccctgtggctggtgctgcctggagtccttgtgcttgatgctgtgaagcacctcactcatgcccagagcacgctggatg

SEQ ID NO: 209968 - DNA, 201 bp, Homo sapiens
agagaaataaaccactagaatccaaacagttaccccatttcacggatgaggaagcagacgcatgggaaggttatgaagtctgtcttcttgcagggaccccmagctctcacaagtgtgtgttcctttcactgcctttattcttcatatctctctcttcttttcttcagggaaagagtatgccaagggagacagccgatacat

SEQ ID NO: 209969 - DNA, 201 bp, Homo sapiens; identical to SEQ ID NO: 36818

SEQ ID NO: 209970 - DNA, 201 bp, Homo sapiens
attctgtactttctatttgtccaggtttttctgttccttttttttttttttttttaacttcctgcctatacacacgcagccatcagcccacaaagacatgrctaccaacgcgggccccttgcacccatactggcctcagcacctaagactggacaactttgtacctaatgaccgccccacctggcatatactggctggcct

SEQ ID NO: 209971 - DNA, 201 bp, Homo sapiens
ggcgaaagtgtccccttcctcactggggcttctccttcccctcctgccacccacaggccagatctatggggatgtgctctacttcctgacagagcaccgcracggattccagcacggagagctgggccaccctctctacttctggttttactttgtcttcatgaatgccctgtggctggtgctgcctggagtccttgtgct

SEQ ID NO: 209972 - DNA, 201 bp, Homo sapiens; identical to SEQ ID NO: 36821

SEQ ID NO: 209973 - DNA, 201 bp, Homo sapiens
tgacccccttacctctccccaccaccctagtcctccggaagcgcctggctcggatcctcagtgcctgtgtcttgtcaaagcggtgcccgccagactgttcrcaccagcatcgcttggtgagggttcagcctgggcaaccttgtgcccaacactccctgtcaaaaatgttccttctatctctatcttgtatgtgtctcaggg

SEQ ID NO: 209974 - DNA, 201 bp, Homo sapiens
ggaactgggcaggtggggataactaaaaaggagtgcttaaaagagttctgtctaagttggcacaagacttggggagttttaagaggtttagaagcctggcygtcaatacccacaacagttatggaggcaagggaaacaggcccttgaaaagaaggtaatgtggagtggggagcctccgtattgattaagaaggggatgaac

SEQ ID NO: 209975 - DNA, 201 bp, Homo sapiens
tggggagttttaagaggtttagaagcctggccgtcaatacccacaacagttatggaggcaagggaaacaggcccttgaaaagaaggtaatgtggagtgggkagcctccgtattgattaagaaggggatgaacttactttccactgtgagagttacctaaagctcggcgtccgtgatggtctacggggcttccgaggcaata

SEQ ID NO: 209976 - DNA, 201 bp, Homo sapiens
ttacctaaagctcggcgtccgtgatggtctacggggcttccgaggcaataaggcagcgtcagtcttcagccgctaagccgagaagggatcagtcagagagscttgggccagagttccaggggctctgggagtggctgccaggtgagttggacagtccgatttccagtggagtcccgcacagatgggacgcggcttaggagg

SEQ ID NO: 209977 - DNA, 201 bp, Homo sapiens
agccgagaagggatcagtcagagaggcttgggccagagttccaggggctctgggagtggctgccaggtgagttggacagtccgatttccagtggagtcccrcacagatgggacgcggcttaggaggaatcctgggctgcaggcattccttggcctggtagtcagatttctggcacttgtagcaagctcctgggggagaagg

SEQ ID NO: 209978 - DNA, 201 bp, Homo sapiens
agaccctatttccaaataaggtcacattcctgggtactgaggattaagatttccaattttttccctgactcgattttttttttgagtcagggcctcacccygtcacccaggctggagtacagttatgtgattatagcttactgcagcctcaaactcctgggctcaagggatcccctgacctcagccttccaagtggctgag

SEQ ID NO: 209979 - DNA, 201 bp, Homo sapiens
acacatttgtaattcatgtgcggtgagctcactgggatgagtcagtttggatatatattcctccctgggtctgccccattttatggggtgttgcttaatcrtttgcgttattccattgacatgaaatatttgcactcagagatcatttctggtcaggagaaatttgtgcgtttttaaccctaaatagaaaccttcctaaaa

SEQ ID NO: 209980 - DNA, 201 bp, Homo sapiens
agtttggatatatattcctccctgggtctgccccattttatggggtgttgcttaatcgtttgcgttattccattgacatgaaatatttgcactcagagatmatttctggtcaggagaaatttgtgcgtttttaaccctaaatagaaaccttcctaaaagcatcataggtctccattcaatattgactataattgttcacat

SEQ ID NO: 209981 - DNA, 201 bp, Homo sapiens; identical to SEQ ID NO: 36829

SEQ ID NO: 209982 - DNA, 201 bp, Homo sapiens; identical to SEQ ID NO: 36830

SEQ ID NO: 209983 - DNA, 201 bp, Homo sapiens
ctggtctgtctttacctatgtggatcccaagccaacatttgagaaaaggcccccttcagtgaaggaatgtgtgaccttaagtgctgagcgagagaaacttsctttctagccaggcccttcctggggcctaactccatgtgtctgcctccttaacgccagcacctctcctccatttgccccttagtatcattcccagggtct

SEQ ID NO: 209984 - DNA, 201 bp, Homo sapiens; identical to SEQ ID NO: 36832

SEQ ID NO: 209985 - DNA, 201 bp, Homo sapiens; identical to SEQ ID NO: 36846

SEQ ID NO: 209986 - DNA, 201 bp, Homo sapiens
agagaaacttcctttctagccaggcccttcctggggcctaactccatgtgtctgcctccttaacgccagcacctctcctccatttgccccttagtatcatycccagggtctttgcccttgtcaacaggttgcttcccacctgcttcctgcatagggctttgttttctggggtcagagacagcatgagcccacagggccatc

SEQ ID NO: 209987 - DNA, 201 bp, Homo sapiens
cagtcctcaaagaacacctgacagggctgggtgtggtggctcacgcctgtaatcccagcactttgggaggccgaggctggtggatctgaggtcaggagttygagaccagcctggccaatatggtgaaaccctgtctctactaaaaatacaaaaattaggctgggcgtggtggctcatgcctgtaatcccagcactttggga

SEQ ID NO: 209988 - DNA, 201 bp, Homo sapiens
tgcagtggcacaatctccactcactgcaaactctgcctccgggttcaagtgattctcctgcctcagcctcctaagtagctgggattataggtgtccaccascacaccttgctaatttttgtgtttttagtagagatgggattttaccatgttagtcatgctggtctcgaactcctgactttaggtgttctcctcgcctcag

SEQ ID NO: 209989 - DNA, 201 bp, Homo sapiens; identical to SEQ ID NO: 36823

SEQ ID NO: 209990 - DNA, 201 bp, Homo sapiens
agtgagccaagatcgggccattgcactccagcctgggcaacgagagtgaacctctgtctcaaaaaaaagtacaaaaattagccagacatggcggcacgtgyctgtactcgcagctacttgggcgactgaggcaggagaattgcttgaacccaggaggcagaggttgcagtgagccaagatcatgccactgactccagcctg

SEQ ID NO: 209991 - DNA, 201 bp, Homo sapiens; identical to SEQ ID NO: 36824

SEQ ID NO: 209992 - DNA, 201 bp, Homo sapiens
ctgaggcaggagaattgcttgaacccaggaggcagaggttgcagtgagccaagatcatgccactgactccagcctgggtgacagaactgaaaaaaaataasataaaacatagatacagaaaaccacaaaggacaaacacagcatattgaatcatcacaaggcagccaccccttcatagccacacccggcccctggccacca

SEQ ID NO: 209993 - DNA, 201 bp, Homo sapiens; identical to SEQ ID NO: 36825

SEQ ID NO: 209994 - DNA, 201 bp, Homo sapiens
tttcacgactttttaaaggcagtaatcgttctggtcactgcgacacagctgccctcgcccattctaaaaagtcagcgccctcaggaccgcaggtaaccacrtcctcctgagtgcggtgaccaggtcacaggctgtccctcgtgcctcagtgttctcatctgtatgtcgagcactgcacagaatcggctcatgcgctgaggc

SEQ ID NO: 209995 - DNA, 201 bp, Homo sapiens
accacttctgggatgaggacagggcacttgagagaaggtggtgtttggctgggccaccgaaaacccctcgcccctgccagcacactcagtcccctctctgrtggaacagagctctgcctgtggtcctgggtcccagccctgaaaaccacaggtccagcggtggccagggacacaggcccacccctgcaagccagcagacaa

SEQ ID NO: 209996 - DNA, 201 bp, Homo sapiens
agttggacagtccgatttccagtggagtcccgcacagatgggacgcggcttaggaggaatcctgggctgcaggcattccttggcctggtagtcagatttcyggcacttgtagcaagctcctgggggagaaggttctggagtaacgcctggccgctgcggttcaggcatttggaagttcttgtgtgctggagatgtggctgg

SEQ ID NO: 209997 - DNA, 201 bp, Homo sapiens
acagtccgatttccagtggagtcccgcacagatgggacgcggcttaggaggaatcctgggctgcaggcattccttggcctggtagtcagatttctggcacktgtagcaagctcctgggggagaaggttctggagtaacgcctggccgctgcggttcaggcatttggaagttcttgtgtgctggagatgtggctggggtttg

SEQ ID NO: 209998 - DNA, 201 bp, Homo sapiens
gggacgcggcttaggaggaatcctgggctgcaggcattccttggcctggtagtcagatttctggcacttgtagcaagctcctgggggagaaggttctggartaacgcctggccgctgcggttcaggcatttggaagttcttgtgtgctggagatgtggctggggtttgtctcacagtggaggtaaggaattacagcttttt

SEQ ID NO: 209999 - DNA, 201 bp, Homo sapiens
gaggattaaggagacaagatcgtgggaagcacagggtaaaggctgcgtgcccctccccatccaccatcccccaaccacacagacacccagggtcccaggcrgtacctgttatcacacagacgagagaaggaaggttgtgtccgtcaagagtcagttgttcaaactctgtgtttaaaaaaagaaacaattctacacggaatt

SEQ ID NO: 210000 - DNA, 201 bp, Homo sapiens
cttgtgcctcccccagaaaagcagagaaggggtagagacatggagagaaggggttggggtacttacccctcccccagaaaagcgggacttgccgctaaggktgaaggaccaaggcaggcgtccctgcgtggtctgacacctttgaaacatgggggaatattcagagaggcatccctgtaatgattaaacaccaagggaagg

SEQ ID NO: 210001 - DNA, 201 bp, Homo sapiens
tgacacccagggcaggctggctcagcccctttgacttcagatttcagagaaggccagggagctggattgggtgcctagattttctgagaattatgtttctsagaggattttgaaacctaaacaggaatactttacacacaggtcatcaagcaggaactgggaagttccgaagctgccctccttcacgccacctcctccctt

SEQ ID NO: 210002 - DNA, 201 bp, Homo sapiens
gggtgcctagattttctgagaattatgtttctgagaggattttgaaacctaaacaggaatactttacacacaggtcatcaagcaggaactgggaagttccraagctgccctccttcacgccacctcctcccttcagaggccaagggcggccaagctgtctcccacacacctcagtgaaaagtcactggctctcctcccagc

SEQ ID NO: 210003 - DNA, 201 bp, Homo sapiens
tgcatcattccagctgcacacggctgtcttccctctgtgtctcttcttttcttcttataaggataccagtcatatggtgtgaagggcccaccttactccastatgtcgccaagttaatttgttacatctgcaaccacccaatttccaaatgtcacattctgaggttcctgattgaaggggtgggttgcccctccacacctg

SEQ ID NO: 210004 - DNA, 201 bp, Homo sapiens
atatggtgtgaagggcccaccttactccagtatgtcgccaagttaatttgttacatctgcaaccacccaatttccaaatgtcacattctgaggttcctgaytgaaggggtgggttgcccctccacacctgtgggcgtttctcgttatgtggaatgagagacctggaaaagaaagagacacagagacaaagtatagagaaag

SEQ ID NO: 210005 - DNA, 201 bp, Homo sapiens
aatagggcccaggggaagggcgttcagcatacggaggacccctgccggtaccggcctctgagttcccttagtatttattgatcattatcgggtgtttcccrgagagggggatttggcaggacaatagggtaatagcggagagaaggtcagtaggaaaacacgtgaacaaagctctctgcatcttaaacaaggtaaagaatt

SEQ ID NO: 210006 - DNA, 201 bp, Homo sapiens
gatttgacgtgtggtcagctgctcatttagcacagtccggggaatgctggggtgacggacaagaaggttttcatgaggaggttgaagagatctaagtatasgggtgccagcctgggcacttcagaaggggcactggcctaggggtagaagcagggtgaccctgatttccctggggtagggtgtggctcacgacggggtgct

SEQ ID NO: 210007 - DNA, 201 bp, Homo sapiens; identical to SEQ ID NO: 36827

SEQ ID NO: 210008 - DNA, 201 bp, Homo sapiens; identical to SEQ ID NO: 36828

SEQ ID NO: 210009 - DNA, 201 bp, Homo sapiens
tcacacagacgagagaaggaaggttgtgtccgtcaagagtcagttgttcaaactctgtgtttaaaaaaagaaacaattctacacggaatttctggtagaattttttttttttttttttttttttttccgacagactctggctctgtcacccaggctggaatgcaatggcgtgatgtcagttcactgtaacctctgcctccc

SEQ ID NO: 210010 - DNA, 201 bp, Homo sapiens; identical to SEQ ID NO: 36831

SEQ ID NO: 210011 - DNA, 201 bp, Homo sapiens
cacacagacgagagaaggaaggttgtgtccgtcaagagtcagttgttcaaactctgtgtttaaaaaaagaaacaattctacacggaatttctggtagaattttttttttttttttttttttttttccgacagactctggctctgtcacccaggctggaatgcaatggcgtgatgtcagttcactgtaacctctgcctcccg

SEQ ID NO: 210012 - DNA, 201 bp, Homo sapiens; identical to SEQ ID NO: 36833

SEQ ID NO: 210013 - DNA, 201 bp, Homo sapiens
acacagacgagagaaggaaggttgtgtccgtcaagagtcagttgttcaaactctgtgtttaaaaaaagaaacaattctacacggaatttctggtagaattttttttttttttttttttttttttccgacagactctggctctgtcacccaggctggaatgcaatggcgtgatgtcagttcactgtaacctctgcctcccgg

SEQ ID NO: 210014 - DNA, 201 bp, Homo sapiens
tccctccctagcttttccgccagaccccacatggtcccaccccgactgtgggaagcagggatcagggagcgtggctcggtgccagtctccagaaccctgcscaccctggcttagtggcagatgtggctacctgcagctgagctgccagttcctctgagtcctcaaagaccaagccgttttcttgatgtttcaccagctcat

SEQ ID NO: 210015 - DNA, 201 bp, Homo sapiens
cacagacgagagaaggaaggttgtgtccgtcaagagtcagttgttcaaactctgtgtttaaaaaaagaaacaattctacacggaatttctggtagaattttttttttttttttttttttttttccgacagactctggctctgtcacccaggctggaatgcaatggcgtgatgtcagttcactgtaacctctgcctcccggg

SEQ ID NO: 210016 - DNA, 201 bp, Homo sapiens
tcgcaccccacgctcaagccaggctggggattggaacagggggtgtggtttctgggagctggttcttagatttggcatctgaagggtataaaggcctgggrgagtgcacatcaaaatggccaaaccgatttgaggagggagccttaaggagggtttgtaccttctgtgctggatgctcttcaaggactgaagaattatttt

SEQ ID NO: 210017 - DNA, 201 bp, Homo sapiens
gaaggaaggttgtgtccgtcaagagtcagttgttcaaactctgtgtttaaaaaaagaaacaattctacacggaatttctggtagaattttttttttttttktttttttttttccgacagactctggctctgtcacccaggctggaatgcaatggcgtgatgtcagttcactgtaacctctgcctcccgggttcaagtaatt

SEQ ID NO: 210018 - DNA, 201 bp, Homo sapiens
tttgtaccttctgtgctggatgctcttcaaggactgaagaattatttttgtatgtttttcttaattccatggctgtggaacaagtaaggcaaccccctggrgactggttcagcacataaaagatgacttttctagggcaccagatttgatcaagacgttccctgagctcagctcacacgaggggcttgaatccctgaatcc

SEQ ID NO: 210019 - DNA, 201 bp, Homo sapiens
cacttgaagttcacaacgcacacacaggcaaacagctcctgaacatgtccaccaccttcatgggcaggtccaggccactggaggacgtgtctagacagacrcccaggtccaccgaccctgctaggcaagaggggtgcggtcagagagctggtctctgccctgggaacacaaatcctcccagcacagtgaggcagcatcccc

SEQ ID NO: 210020 - DNA, 201 bp, Homo sapiens
gccccccgcagccccaagcacaagtggcttaagctggccaagcagccacatggtctggctgggacatctgaaaatgtaagttgacactttttctacgtaaycacaatttggtttttttgttgttgttgttttgttttgagacagagtctcactctgtcacccaggctggagtgcagtggcacaatctcagctcactgcaac

SEQ ID NO: 210021 - DNA, 201 bp, Homo sapiens; identical to SEQ ID NO: 36826

SEQ ID NO: 210022 - DNA, 201 bp, Homo sapiens
ggcacaatctcagctcactgcaacctccacttcccaggttcacctcccgcatgtaatcccagcattttgggaggccaaggtgggcggatcacctgaggtcrggagttcaagaccagcctggccaacgtggtgaaaccccatctctactaaaagaaacacaaaattagcgaagcgtcgtggcaggtgcctgtaatcccagct

SEQ ID NO: 210023 - DNA, 201 bp, Homo sapiens
aagttggaggctgagcttggtgaggtgtgtttttaaaagaccattagtctgttctacttttcctgaagactgaggactgtaagggatataaagatttcackgaatactaagagcctgaaaaactgcttggctgatttgactaataaaggctggtatgttgtcagactgtatagaggtgggaaggctaaactgaggaattat

SEQ ID NO: 210024 - DNA, 201 bp, Homo sapiens
gacttctttaactgaatgtaatgtttcagaggttcatccatgttgtagcatgtatcatatcagtacttcacttttttttttttttggagttgaagtctcaygctgtcacccaggctgggatgcagtggtgcgatcttcgctcactgcaacgtctgcctcccaggttcaagcaattctccctgcctcagccacccaagtagc

SEQ ID NO: 210025 - DNA, 201 bp, Homo sapiens
ttctgaatatttcatacaaatggaattatgcaatggatgttttgtgtgtgtgtgcacggctgacttctttaactgaatgtaatgtttcagaggttcatccrtgttgtagcatgtatcatatcagtacttcacttttttttttttttggagttgaagtctcacgctgtcacccaggctgggatgcagtggtgcgatcttcgc

SEQ ID NO: 210026 - DNA, 201 bp, Homo sapiens
tccattgcccagggacaagcaggagacagatgccttccttttatctcaactgcaaagaggccttcctctttcactaatcctccccagcacagaccctttaygggtgtccggctgggggacattcaggtctttcccttcctaggaggccatatatcaggctatcacatggggagaaaccttggacaatacctggctttccca

SEQ ID NO: 210027 - DNA, 201 bp, Homo sapiens
caccatcacctctctgcacagggcacctgcctgtctttccttgccagcaccaagacagagccaagagtgatttcttgaaatgaaactgcatcctctcatcycaataaggcatggcctccctagtgggagatgagcaaatgaaagcctccctcaggatggtcatccacacgtccatgggacactcaccccaattttttttcc

SEQ ID NO: 210028 - DNA, 201 bp, Homo sapiens
ttgaaatgaaactgcatcctctcatcccaataaggcatggcctccctagtgggagatgagcaaatgaaagcctccctcaggatggtcatccacacgtccaygggacactcaccccaattttttttcctggtttataaaggtgcttcaggacctcttggctcctggccaatacgttagtgcttcctgaaggggaaagagccc

SEQ ID NO: 210029 - DNA, 201 bp, Homo sapiens
gccctccaaaccattcattgggccatcccagaccaaggtttctgacccaaacattgaaacaggaggagttcccttatcccccttgcagggcatgatacagsggcatggctcacttctcagtaccctgttgctcaaacccctagagggagcgtgcagatgggcaggtcgtggggagcgtttctgggctctggccccacagca

SEQ ID NO: 210030 - DNA, 201 bp, Homo sapiens
aaagcctgccagcatctgctgatgtccatcagtgtgctcttctgcttctctgctcctctggatgtccagccacttgtgtctgtgcccactagggtcttggkttttttatgggcacaggatgggggtcatagcaggccagagtattcttggaaaatgcaacatttggacatgaaaacaggagtgcctgttctcactaaggtg

SEQ ID NO: 210031 - DNA, 201 bp, Homo sapiens
ctattgtagagccccctttgtacacttcaatatgaatttatttgtaggtttactccttacttcagtatagcaaagtacaaccaggatagattccaacctcyaggcccatatctcccataaatactcctgtagaaagagaaggtgggttctttaatggaaaccacaagtatctctttgaggcagacatctgaactcatgacc

SEQ ID NO: 210032 - DNA, 201 bp, Homo sapiens
aacagagcaagactccgtctcaaaaaaaaaaaaatcaaatcattattaaacatttttgctaattaaatggttttggagtacattcttttaaaaaaacaattaactatgttttcttcaacactgcacacgtaacgccaactttgcatgacattgcaaagaaagattttactatattaagcagattaaacaaacaaacttttc

SEQ ID NO: 210033 - DNA, 201 bp, Homo sapiens
acagagcaagactccgtctcaaaaaaaaaaaaatcaaatcattattaaacatttttgctaattaaatggttttggagtacattcttttaaaaaaacaattaactatgttttcttcaacactgcacacgtaacgccaactttgcatgacattgcaaagaaagattttactatattaagcagattaaacaaacaaacttttcc

SEQ ID NO: 210034 - DNA, 201 bp, Homo sapiens
cagagcaagactccgtctcaaaaaaaaaaaaatcaaatcattattaaacatttttgctaattaaatggttttggagtacattcttttaaaaaaacaattaactatgttttcttcaacactgcacacgtaacgccaactttgcatgacattgcaaagaaagattttactatattaagcagattaaacaaacaaacttttcct

SEQ ID NO: 210035 - DNA, 201 bp, Homo sapiens
agagcaagactccgtctcaaaaaaaaaaaaatcaaatcattattaaacatttttgctaattaaatggttttggagtacattcttttaaaaaaacaattaactatgttttcttcaacactgcacacgtaacgccaactttgcatgacattgcaaagaaagattttactatattaagcagattaaacaaacaaacttttcctt

SEQ ID NO: 210036 - DNA, 201 bp, Homo sapiens
aagagtagctgggaccaggcgtgatgggtcacgcctggaatcccagcacttagggaggccaagacaggaggatcacttgaggtcaggagttcaagaccagyctggccaacatggtgaatccctgtttctactaaaaatacaaaaataagccaggtgttgtggagggctcctgtaatcccgtaatctactcgggaggctgag

SEQ ID NO: 210037 - DNA, 201 bp, Homo sapiens
aggtcaggagttcaagaccagcctggccaacatggtgaatccctgtttctactaaaaatacaaaaataagccaggtgttgtggagggctcctgtaatcccrtaatctactcgggaggctgaggtgggagaatcgcttgaacccaggaggcggaggttgcatgagctgagatcgtgcactccagcctaggcaacggagcgag

SEQ ID NO: 210038 - DNA, 201 bp, Homo sapiens
taatcccgtaatctactcgggaggctgaggtgggagaatcgcttgaacccaggaggcggaggttgcatgagctgagatcgtgcactccagcctaggcaacrgagcgagactgtctaaaacaaagactagctggagagtcctgccaggaaaaggcctcagcctccaactgctctgctcactagaagctggaagatgcggctc

SEQ ID NO: 210039 - DNA, 201 bp, Homo sapiens
aggcggaggttgcatgagctgagatcgtgcactccagcctaggcaacggagcgagactgtctaaaacaaagactagctggagagtcctgccaggaaaaggcctcagcctccaactgctctgctcactagaagctggaagatgcggctctagagacgcatcaggaccaagacacaactccccacttggagaaaacaacgggg

SEQ ID NO: 210040 - DNA, 201 bp, Homo sapiens
tagctggagagtcctgccaggaaaaggcctcagcctccaactgctctgctcactagaagctggaagatgcggctctagagacgcatcaggaccaagacacractccccacttggagaaaacaacggggaaagagacggaggcaaagcagaaccatctcactgggagaggcgacgctgtttgacacatcgtccctgtacctc

SEQ ID NO: 210041 - DNA, 201 bp, Homo sapiens
acaacggggaaagagacggaggcaaagcagaaccatctcactgggagaggcgacgctgtttgacacatcgtccctgtacctcccaaagccactgccttccyacacctgggcaacagtggccccaaccccaggcccagccctcctgcaggaaggaagaggactgaatggagggcgtggcaggctgaaaggatgtgacctcct

SEQ ID NO: 210042 - DNA, 201 bp, Homo sapiens
agagtggctctaaagccaataaaacagggaaatggtgaatggagcaactggggagaagagtcaccaaagtcggggaatcagggaagccttccccaaagagrtggcatttaaactggggcctgagtggtgaagcagccagccatgggaagggcttggggaacaggatatgcaaaggccctgtggtggaaacaagccagctgt

SEQ ID NO: 210043 - DNA, 201 bp, Homo sapiens
acagggaaatggtgaatggagcaactggggagaagagtcaccaaagtcggggaatcagggaagccttccccaaagaggtggcatttaaactggggcctgastggtgaagcagccagccatgggaagggcttggggaacaggatatgcaaaggccctgtggtggaaacaagccagctgtggttgaggaacaacagcaaggca

SEQ ID NO: 210044 - DNA, 201 bp, Homo sapiens
taattcctggctgaccagtgcaaccagggagctggcccatgacctgggtggcagctaagtagccaggactaatgcggccaagagtcactcttctagccttyttcctgtgactcatccaggtgcaccttgcggcatctgaatgtcaggctttcagctgctgtggcttccacttccaactggctccacgtccccagggagaga

SEQ ID NO: 210045 - DNA, 201 bp, Homo sapiens
aggttgtgtccgtcaagagtcagttgttcaaactctgtgtttaaaaaaagaaacaattctacacggaatttctggtagaattttttttttttttttttttktttttccgacagactctggctctgtcacccaggctggaatgcaatggcgtgatgtcagttcactgtaacctctgcctcccgggttcaagtaattctcgtg

SEQ ID NO: 210046 - DNA, 201 bp, Homo sapiens
gggagctggcccatgacctgggtggcagctaagtagccaggactaatgcggccaagagtcactcttctagcctttttcctgtgactcatccaggtgcaccytgcggcatctgaatgtcaggctttcagctgctgtggcttccacttccaactggctccacgtccccagggagagatcacacagtgctttgccaacacattc

SEQ ID NO: 210047 - DNA, 201 bp, Homo sapiens
aatttctggtagaattttttttttttttttttttttttttccgacagactctggctctgtcacccaggctggaatgcaatggcgtgatgtcagttcactgyaacctctgcctcccgggttcaagtaattctcgtgcatcagcctcccaagtagctgggattacaggcccccaccaccatacccagctaatttttgtatttt

SEQ ID NO: 210048 - DNA, 201 bp, Homo sapiens
ggctggaatgcaatggcgtgatgtcagttcactgtaacctctgcctcccgggttcaagtaattctcgtgcatcagcctcccaagtagctgggattacaggyccccaccaccatacccagctaatttttgtatttttagtagagacaggtttcgccatgttggcctcgaactcctgccctcaggtgacctgcctgcctcggc

SEQ ID NO: 210049 - DNA, 201 bp, Homo sapiens
agcctcccaagtagctgggattacaggcccccaccaccatacccagctaatttttgtatttttagtagagacaggtttcgccatgttggcctcgaactcckgccctcaggtgacctgcctgcctcggcctcccagagttctaggattacaggtgtgagccaccatgcccattcagaaaaaaacttttaaataaacaatagc

SEQ ID NO: 210050 - DNA, 201 bp, Homo sapiens
gcccattcagaaaaaaacttttaaataaacaatagccagagtcacctgttcaggtggagaaagagcactgctctggtggggaggccaccagcctctgtgaratactctcctggagggggcatttcagcctgagggcctggtcactcaatgacccaactggggattcaaggcggcccacctccaccatccccactgtcccca

SEQ ID NO: 210051 - DNA, 201 bp, Homo sapiens
cggctgtagacaactcagaagttaatgagtgtgctgtgtcccaatgacacttgatttacaaaagcaggagactggcctgtagccttactttgccaaccccygggtgagtgggttcccaggtctgcagtgagaaggggacaggccagggcagtggcgagcaggagagaaggcagctgaggatgggaggcctaccgggccctg

SEQ ID NO: 210052 - DNA, 201 bp, Homo sapiens
ctgcagtgagaaggggacaggccagggcagtggcgagcaggagagaaggcagctgaggatgggaggcctaccgggccctgaacggagagtgtgtgccgctsagcttcatgaagagctggcgctgcaggtccagaggtgtgtcttgaaagaaagatgccggcttgtcatagacggtcacagccctgcaatgaaatcatggca

SEQ ID NO: 210053 - DNA, 201 bp, Homo sapiens
tgaatatcactgtctttaggatgggaaaatccatttgttcccttccgcagtggagtggaagaccagcacctgaagttggaaccaacacttaaaacaatttstaatcctttttgtactttaatattttcggggactgcttattatttaataagtgctcttcctgggttaaacttctataatttatccagaggcccatttgtt

SEQ ID NO: 210054 - DNA, 201 bp, Homo sapiens
ccagcctgggcaacaagagtgaaactccatctcaaaaataaataaataaataaacaattaaaataaaataaagcgagatgttattaagcctccaaggggcrtgatgaatatcactgtctttaggatgggaaaatccatttgttcccttccgcagtggagtggaagaccagcacctgaagttggaaccaacacttaaaacaa

SEQ ID NO: 210055 - DNA, 201 bp, Homo sapiens
acaggccagggcagtggcgagcaggagagaaggcagctgaggatgggaggcctaccgggccctgaacggagagtgtgtgccgctgagcttcatgaagagcyggcgctgcaggtccagaggtgtgtcttgaaagaaagatgccggcttgtcatagacggtcacagccctgcaatgaaatcatggcagggctattgggagggc

SEQ ID NO: 210056 - DNA, 201 bp, Homo sapiens
tggcatggtgtgcattcatatattcccaggtacttgagaagccgaggcgagaggatcccttgtgcctaggtttgagcccaagagttcaaggctgcagtgarctatgattgcaccactgcactctagcctgggtaacagagtgaaagcctgtctctaaaaaactaaactaatgcttggcgcggtggctcactgctgtaatcc

SEQ ID NO: 210057 - DNA, 201 bp, Homo sapiens
cagtgagtggagatcgcgccattgcactccagcctgggcaacaagagtgaaactccatctcaaaaataaataaataaataaacaattaaaataaaataaarcgagatgttattaagcctccaaggggcgtgatgaatatcactgtctttaggatgggaaaatccatttgttcccttccgcagtggagtggaagaccagcac

SEQ ID NO: 210058 - DNA, 201 bp, Homo sapiens
cgggccctgaacggagagtgtgtgccgctgagcttcatgaagagctggcgctgcaggtccagaggtgtgtcttgaaagaaagatgccggcttgtcatagayggtcacagccctgcaatgaaatcatggcagggctattgggagggctgaagaaaggcctcaggaatggaggactcagaggctccaggaaaagaaggacgct

SEQ ID NO: 210059 - DNA, 201 bp, Homo sapiens
aataaaaatacaaaaatttgctggtcatggtggcatgtgcctgtaatcccagctactcaggaggctgagggaggagaatcgcttgaacccaggagatagargttgcagtgagtggagatcgcgccattgcactccagcctgggcaacaagagtgaaactccatctcaaaaataaataaataaataaacaattaaaataaaa

SEQ ID NO: 210060 - DNA, 201 bp, Homo sapiens
tgcctggacaccctggctggctgggaaagaaactctgccccctcctctcccggcttctccaaattttcccatagtgttgccaagcattagtccagcgtggaagctactttttgctcaaaccactcatttgggtcccgcgccccatgtaacccatcctcagcaaaacaacctttatttctttcttcctggtttccagaaagt

SEQ ID NO: 210061 - DNA, 201 bp, Homo sapiens
agaaatgactgtggtggccttctcagaccctgtaggaaaggcctgtacttatccagtgaaagtgtctacttagattaagaggtactttagttatctgactsggggtacgttgagtaaaactaatttgccagtcctgggtgcgggcaaatccctgagcttgatgtgtagggaagggagggagcctgaataatccctgaggag

SEQ ID NO: 210062 - DNA, 201 bp, Homo sapiens
gaggcctgtcctgcccactcctgtctcttctaaacctaaatgggcccttgctttgcccagggtggggtttggactcaagagcatctgcatgcaggtgagasgcaggatcaccacccggcccagccgcagcctgaccttggccttgagggccaagtgcagatcaccctgcatcctgggtcttcaccttcgaagggccatcag

SEQ ID NO: 210063 - DNA, 201 bp, Homo sapiens
cctgaagggcctgtgtattgcgtggggtacttttctgcccttgggcagaatctgcatccctcccagccagcaggtgctgcggaccatctcctccctctccytccagactcctgttttcccaccgtccccactcctgctgcaccagtccctctgccctcctttccatgtgctaggccgtggatacctcagagcttacaccgg

SEQ ID NO: 210064 - DNA, 201 bp, Homo sapiens
atacctcagagcttacaccggctgttcccactgcctggaacttgctcgtcctgcacttggcttctcttggctttagctggagtgtcaccctgagcgtcccytcccctccatcctgtccccagggacagatgctccaagagagcagttgctgagtgggccttcccgcctcttccatagagccagacagttggcgactgtcct

SEQ ID NO: 210065 - DNA, 201 bp, Homo sapiens
actgcctggaacttgctcgtcctgcacttggcttctcttggctttagctggagtgtcaccctgagcgtcccctcccctccatcctgtccccagggacagaygctccaagagagcagttgctgagtgggccttcccgcctcttccatagagccagacagttggcgactgtccttactgcaaaccctggttcacactggctcc

SEQ ID NO: 210066 - DNA, 201 bp, Homo sapiens
cctgcacttggcttctcttggctttagctggagtgtcaccctgagcgtcccctcccctccatcctgtccccagggacagatgctccaagagagcagttgcygagtgggccttcccgcctcttccatagagccagacagttggcgactgtccttactgcaaaccctggttcacactggctcccctgggagggaggtggtttg

SEQ ID NO: 210067 - DNA, 201 bp, Homo sapiens
ctcagctgcgctgaggaacaaacaaaaataagcaattttatgcaggaggaatattcggtttccactcccttctcccagcctgcggcagtgcttggcctgcrgaattcttgctctgccctctgtttcagcgggtgttgtcatctgccagctgctttgcctgggggttctgacatctcagggcttattcttagcgtcagtctc

SEQ ID NO: 210068 - DNA, 201 bp, Homo sapiens
aggccctcccatccaggtttccctaccaagtgaattttttttttagagataaggtctcttgcccaggctgtcctcgaactcctgggctcaagcagtcctgycatgtcagcttctagagtagctggaactattcggcacacaccaccacgcccaatgaagtgaatattttatatggcagctggccggtattacaccattcca

SEQ ID NO: 210069 - DNA, 201 bp, Homo sapiens
tcatctgccagctgctttgcctgggggttctgacatctcagggcttattcttagcgtcagtctcagcagagtcttaaaccacgttcaaaggattcggtccygctgccatcctctctgcatctttctgtagttctttctgataatatttagcaaatcactttaacacagagtcttcgaattctttccagatttacgatggaa

SEQ ID NO: 210070 - DNA, 201 bp, Homo sapiens
agactttgatggccaaggagtccacccagggccactggagctatttgctggtatgagaagggcaccctcctccccctcacagcccagatacccttcctgcacagacaaagtgaaaacgtgggtgtgggttcaaatcctgactcacccattctgcagtcttagatatgaggtccattaaccttctttagcctcagtttccct

SEQ ID NO: 210071 - DNA, 201 bp, Homo sapiens
gacatctcagggcttattcttagcgtcagtctcagcagagtcttaaaccacgttcaaaggattcggtcccgctgccatcctctctgcatctttctgtagtyctttctgataatatttagcaaatcactttaacacagagtcttcgaattctttccagatttacgatggaaacacagaggcaaagagcttggggtagaaagc

SEQ ID NO: 210072 - DNA, 201 bp, Homo sapiens
gactttgatggccaaggagtccacccagggccactggagctatttgctggtatgagaagggcaccctcctccccctcacagcccagatacccttcctgcacagacaaagtgaaaacgtgggtgtgggttcaaatcctgactcacccattctgcagtcttagatatgaggtccattaaccttctttagcctcagtttccctg

SEQ ID NO: 210073 - DNA, 201 bp, Homo sapiens
aacaaaaccgtgtgtgaagacaaggagctgaaactgcactgccatgaatccaagttcctcaacatctactctgtgacctatggcaggaggatccaggaaarggacatgtgctcctccaaggcagagcggctcccccccttttcagtttgtgcttttgtatgggtattagccggggttctctagagggacagaactaatagg

SEQ ID NO: 210074 - DNA, 201 bp, Homo sapiens
actttgatggccaaggagtccacccagggccactggagctatttgctggtatgagaagggcaccctcctccccctcacagcccagatacccttcctgcacagacaaagtgaaaacgtgggtgtgggttcaaatcctgactcacccattctgcagtcttagatatgaggtccattaaccttctttagcctcagtttccctgt

SEQ ID NO: 210075 - DNA, 201 bp, Homo sapiens
gctgaaactgcactgccatgaatccaagttcctcaacatctactctgtgacctatggcaggaggatccaggaaagggacatgtgctcctccaaggcagagsggctcccccccttttcagtttgtgcttttgtatgggtattagccggggttctctagagggacagaactaataggatatataatgggatatatatatatga

SEQ ID NO: 210076 - DNA, 201 bp, Homo sapiens
ctttgatggccaaggagtccacccagggccactggagctatttgctggtatgagaagggcaccctcctccccctcacagcccagatacccttcctgcacagacaaagtgaaaacgtgggtgtgggttcaaatcctgactcacccattctgcagtcttagatatgaggtccattaaccttctttagcctcagtttccctgtc

SEQ ID NO: 210077 - DNA, 201 bp, Homo sapiens
gcctggacaccctggctggctgggaaagaaactctgccccctcctctcccggcttctccaaattttcccatagtgttgccaagcattagtccagcgtggargctactttttgctcaaaccactcatttgggtcccgcgccccatgtaacccatcctcagcaaaacaacctttatttctttcttcctggtttccagaaagtt

SEQ ID NO: 210078 - DNA, 201 bp, Homo sapiens
tatttttatttctttctttattttttgagacagggtctcactctgtcgcccaggctggagcgccttggtgcaatctcagctcactgcaacctcgcctcccrggttcaagtgattctcctgcctcagactccggagtagctgggatttcaggcacccaatacaaaccccagctaatttttgtatttttagtagagatgggat

SEQ ID NO: 210079 - DNA, 201 bp, Homo sapiens
agcgccttggtgcaatctcagctcactgcaacctcgcctcccaggttcaagtgattctcctgcctcagactccggagtagctgggatttcaggcacccaayacaaaccccagctaatttttgtatttttagtagagatgggatttcaccatgttggccaggctggtctcgaactcctgacctcaggtgatccacccacctc

SEQ ID NO: 210080 - DNA, 201 bp, Homo sapiens
ggtatgttgtcagactgtatagaggtgggaaggctaaactgaggaattatgtctgacagaagggaagaaatgactgtggtggccttctcagaccctgtagraaaggcctgtacttatccagtgaaagtgtctacttagattaagaggtactttagttatctgactcggggtacgttgagtaaaactaatttgccagtcctg

SEQ ID NO: 210081 - DNA, 201 bp, Homo sapiens
gtgggatgggatattggcgttgagtggggtaagggtgattaggttttaatcagatggtaaggggtgcatgataggtcaacaaggagggagtagaggtatcytatacttgcggattaaggtggggagatacaagaggaggatgtgaagggggctttgaactgggggaaaaggtcacaatgcggtgtggctgtagcccaggaa

SEQ ID NO: 210082 - DNA, 201 bp, Homo sapiens
caggaatagtcagggaagcagataatttagttaaagtgtttcggcctaataagggaactgggcaggtggggataactaaaaaggagtgcttaaaagagttytgtctaagttggcacaagacttggggagttttaagaggtttagaagcctggccgtcaatacccacaacagttatggaggcaagggaaacaggcccttgaa

SEQ ID NO: 210083 - DNA, 201 bp, Homo sapiens
gctactggggaggctgaggcaggagaatggcgtgaacccgggaggcggagcttgcagtgagccaagatcacgccactgcactccagcctgggtgacagagygagactccgtctcaaaaaaaaaaaaaaaaagcaacagtatgttcccctgggagaacggagggggcggctgtttacagttgccccagggcaggacctgcac

SEQ ID NO: 210084 - DNA, 201 bp, Homo sapiens
tcagcctcccaagtagctgggactacaggcacccgccaccacgcccagctaattttttgtatttttagtagagactgggtttcactgtgttagccaggatkgtctcgatctcctgaccttgtgatccgcctgccccggcctcccaaagtgctgggatgacaggctaccacgcccagccctggcacggtcacattttaatta

SEQ ID NO: 210085 - DNA, 201 bp, Homo sapiens
aggcaggaggattgactgagcccaggcattcgagaccagcctgggcaacatggtgagagcttgtctctagcaaacatacagaaactttaaagtttttaaastagctgggcgtggtggtgggtgcctgtggccccagctactcgggaggctgaggcaggaggatcgcttgaccccaggagttcaaggctgcagggagaaatg

SEQ ID NO: 210086 - DNA, 201 bp, Homo sapiens
cccaaacatcccatccccaaaatggcagcttctgactgtgtccagaccatgcaggcctctcctgaaaccgtcctgccagacgctgtctcaaggtggtgagrggttccgtgcaatgtccctgagggcttttaaagccaccctgtctcctgtccatcggccccctcccctcctctccctctgtctttccagatgctccaccca

SEQ ID NO: 210087 - DNA, 201 bp, Homo sapiens; identical to SEQ ID NO: 36889

SEQ ID NO: 210088 - DNA, 201 bp, Homo sapiens; identical to SEQ ID NO: 36908

SEQ ID NO: 210089 - DNA, 201 bp, Homo sapiens
agccaccctgtctcctgtccatcggccccctcccctcctctccctctgtctttccagatgctccacccatgcagggttgttgtctcttctttgaacagccyggacgcactgccgctaccccacggcctccgcacctgctgttccctctggcagagacggtctttcctgggagcacccacccggtccctcctgcctcggatt

SEQ ID NO: 210090 - DNA, 201 bp, Homo sapiens
gccagtcaccccacaggcatctcagactccacacatccccgccaaaccccagccctgggtcttctgcattctggggacatggggacaccacgctggtcggkagggtcccaggctcttctcaatctctctcgggcccctcctctcctgctgccgctgccccggtgagactccgaggcctgtaggaagcttcaggtgcctgag

SEQ ID NO: 210091 - DNA, 201 bp, Homo sapiens
tgaggcaggagaatggcgtgaacccgggaggcggagcttgcagtgagccaagatcacgccactgcactccagcctgggtgacagagcgagactccgtctcaaaaaaaaaaaaaaaaagcaacagtatgttcccctgggagaacggagggggcggctgtttacagttgccccagggcaggacctgcacactggaccatccag

SEQ ID NO: 210092 - DNA, 201 bp, Homo sapiens
gtctcttctttgaacagcctggacgcactgccgctaccccacggcctccgcacctgctgttccctctggcagagacggtctttcctgggagcacccacccrgtccctcctgcctcggatttcaaagacttccaaaaccaccttcaccccaaaatccagctctccctcccctccccttctgtccacacccccaaatcacctt

SEQ ID NO: 210093 - DNA, 201 bp, Homo sapiens
atcctgatgatcgatgaggacgtgggcacagcctctgagtgtgtgatggggacggtgccctgactgtcctctgaggtctggctgtccttatggttcactgkgactttggcacagtctgtctgtgtgtttgtgtgtgatgtggactgtgcccctccctttctaggtggtggcattctggtaattgaaagcctcctggatgaa

SEQ ID NO: 210094 - DNA, 201 bp, Homo sapiens
ctggggacatggggacaccacgctggtcgggagggtcccaggctcttctcaatctctctcgggcccctcctctcctgctgccgctgccccggtgagactcygaggcctgtaggaagcttcaggtgcctgagcctccagtacagcccttcccctactccagccaagcctccaggccacccctgtccctactgcagccaaatc

SEQ ID NO: 210095 - DNA, 201 bp, Homo sapiens; identical to SEQ ID NO: 36887

SEQ ID NO: 210096 - DNA, 201 bp, Homo sapiens
tccctctggcagagacggtctttcctgggagcacccacccggtccctcctgcctcggatttcaaagacttccaaaaccaccttcaccccaaaatccagctytccctcccctccccttctgtccacacccccaaatcaccttctaacatcttcatctttttttttctttgttttgagatggagtctccttctgtcgcccagg

SEQ ID NO: 210097 - DNA, 201 bp, Homo sapiens
aaacatcccatccccaaaatggcagcttctgactgtgtccagaccatgcaggcctctcctgaaaccgtcctgccagacgctgtctcaaggtggtgaggggktccgtgcaatgtccctgagggcttttaaagccaccctgtctcctgtccatcggccccctcccctcctctccctctgtctttccagatgctccacccatgc

SEQ ID NO: 210098 - DNA, 201 bp, Homo sapiens
tgggtggatcacctgaggtcatgagtttgagaccagcctgaccaacatagtgaaaccccatctctactaaaaaatacaaaaatgagccaggcatggtggcrggtgcctgtcatcccagctactcgggaggttgaggcaggagaatcgcttgaacccaggaggtggagattgcagtgagccaagatcgcgccattgcactcc

SEQ ID NO: 210099 - DNA, 201 bp, Homo sapiens
caccgcgcccgacctcagtattttcttatctttctcctaagcctttttgttttctgaggctaggtctgcaggtgactagcctggaagacctgggaaaggcrtgacccatccaggtgaccttttgtgcccagaataggtttagtcaaatgggattggattgcaggctgacctcggtgtgcctgccctgtgttccaggggatt

SEQ ID NO: 210100 - DNA, 201 bp, Homo sapiens
tttccggccaactctgtgtcccaaacatcccatccccaaaatggcagcttctgactgtgtccagaccatgcaggcctctcctgaaaccgtcctgccagacsctgtctcaaggtggtgaggggttccgtgcaatgtccctgagggcttttaaagccaccctgtctcctgtccatcggccccctcccctcctctccctctgtc

SEQ ID NO: 210101 - DNA, 201 bp, Homo sapiens
ggcacctgcccctcctcactagctcatcctccttcccacctggtggaggacacgcacaccctcctggtggcgtcctcgagccccgtccacccgcccaggakctggggcatcctgtgtttcccgccttgctctcctgcacagcctgactcagagcgggagctcgaccccctaccctccccgctgtacgctgccccagcaaac

SEQ ID NO: 210102 - DNA, 201 bp, Homo sapiens
cctctcccgtcttctttctctcatcttctctgttttcatgccccgtatttcacctccttttctcctcctctcttctcctcggtctgctttcctttcccccrtttctctctttctttctctctctctctttctttctttccttctttctccttccttccttcgttccttcctctttccttctgcctgccttccttccttccc

SEQ ID NO: 210103 - DNA, 201 bp, Homo sapiens
gatgtccaggtggtgatgtgttgccctggcccgccccgcaggcctccagcatctccaacagcggcttcccaggggatgctgaagctgcggccggaccggcmagctcgggcaggggtgagcggagctgcatcacccaggcgtcccgtctgggacctcctcccatgcctccttcctgggcacctgcccctcctcactagctca

SEQ ID NO: 210104 - DNA, 201 bp, Homo sapiens
tctctcatcttctctgttttcatgccccgtatttcacctccttttctcctcctctcttctcctcggtctgctttcctttcccccatttctctctttctttytctctctctctttctttctttccttctttctccttccttccttcgttccttcctctttccttctgcctgccttccttccttccctccctcctttctttct

SEQ ID NO: 210105 - DNA, 201 bp, Homo sapiens
aatcttttttaaagccaaggagctgtttttaaagcaaatttaaaagacggtcgttctttttttttttttgagccggagtctcgctctgtgacccaggctgsagtgcagtggcacgatctcagctcactgcaagctccgcctcccgggttcacaccattctcctgcctcggcctcccgagtagctgggactataggcgcccg

SEQ ID NO: 210106 - DNA, 201 bp, Homo sapiens
tcttctctgttttcatgccccgtatttcacctccttttctcctcctctcttctcctcggtctgctttcctttcccccatttctctctttctttctctctctctctttctttctttccttctttctccttccttccttcgttccttcctctttccttctgcctgccttccttccttccctccctcctttctttctttctttt

SEQ ID NO: 210107 - DNA, 201 bp, Homo sapiens
cgggttcacaccattctcctgcctcggcctcccgagtagctgggactataggcgcccgccaccgtgcccagccaatttttttgtattttttagtagagacrgggtttcacggtgtcagccaggatggtctcgatctcctgacctcgttatccgcccgccttggcctcccaaagtgttgggattacaggcgtgagccaccgc

SEQ ID NO: 210108 - DNA, 201 bp, Homo sapiens
ggcggatcacgaagtcaggagatcgagaccatcctggctaacacggtgaaatgccgtctctactaaaaatacaaaaacaaaattagccgagtgtggtggcrggtgcctgtagtcccagctactggggaggctgaggcaggagaatggcgtgaacccgggaggcggagcttgcagtgagccaagatcacgccactgcactcc

SEQ ID NO: 210109 - DNA, 201 bp, Homo sapiens
ctcctgcctcggcctcccgagtagctgggactataggcgcccgccaccgtgcccagccaatttttttgtattttttagtagagacagggtttcacggtgtyagccaggatggtctcgatctcctgacctcgttatccgcccgccttggcctcccaaagtgttgggattacaggcgtgagccaccgcgcccggccaaagacg

SEQ ID NO: 210110 - DNA, 201 bp, Homo sapiens
tgtgcgtgtgtgtgtgcatgcatgcttgtgagcttgtgtgtgtacctgtgtgcattggacgcacgtgtgcctgtgaaccggtgtgtgtactttgtatgtcyctatgtgcgcccgagtgtgtgcctgagcatctgtgtgcacgtgtgcctgtgtgtgcgtgcatgtgtgtgagctcgtgtgtgtacctgtgtgtgtatgtgc

SEQ ID NO: 210111 - DNA, 201 bp, Homo sapiens
gtaggaagcttcaggtgcctgagcctccagtacagcccttcccctactccagccaagcctccaggccacccctgtccctactgcagccaaatctccaggcygcccctgtcccctactcaaaccaagcctccagaccgcccctgtcctctactccagccaagcctccaggccgcccctgtcctctactccagccaagcctcc

SEQ ID NO: 210112 - DNA, 201 bp, Homo sapiens
atgtgcctgtgtgcatgcgtgtgtgcctgtgaacccgtgtgtgtacttgtgtgtgcacgtatgggtgtgtgtgcaggcctgtgggtgctcagctgtgcacrtgaggacctgcgtgagtggctgtttgagacgcagcagaatatgaatgtttctctttttcttgtcacacgtcgtggtctgacacgatctctgccggctccc

SEQ ID NO: 210113 - DNA, 201 bp, Homo sapiens
gtgcctgtgaacccgtgtgtgtacttgtgtgtgcacgtatgggtgtgtgtgcaggcctgtgggtgctcagctgtgcacgtgaggacctgcgtgagtggctrtttgagacgcagcagaatatgaatgtttctctttttcttgtcacacgtcgtggtctgacacgatctctgccggctcccaggaccgcgccttgcccgaaga

SEQ ID NO: 210114 - DNA, 201 bp, Homo sapiens; identical to SEQ ID NO: 36890

SEQ ID NO: 210115 - DNA, 201 bp, Homo sapiens
ttggaatgtttcaaacagatttcaggctgcaaacttgttttataatcgtttgcttctccaagtgaagctcagaaatacctaaaaatagctgtaacgttcgygttaggaaagatggtgtttattccagtttgcatttttatggtgaaataaaatccttttccaatgaactaaaatttttcacgcttacgatttttgtgtttt

SEQ ID NO: 210116 - DNA, 201 bp, Homo sapiens
aaagcaaatttaaaagacggtcgttctttttttttttttgagccggagtctcgctctgtgacccaggctgcagtgcagtggcacgatctcagctcactgcragctccgcctcccgggttcacaccattctcctgcctcggcctcccgagtagctgggactataggcgcccgccaccgtgcccagccaatttttttgtattt

SEQ ID NO: 210117 - DNA, 201 bp, Homo sapiens
atacaaaaatttagccgggtgtggtggcacgtgcctgtaatcacagctactcgggaggctggggcaagagaatcacttgaacgcgggaggcgtaggttgcmgtgagccgagattgcaccgctgcactccagcctgggtgacagagcgagactccgtctcaaaaaaaagaacaaacaaaaagatagtggtaggtgtaatctg

SEQ ID NO: 210118 - DNA, 201 bp, Homo sapiens
cgtgatcgtgccactgcactccagcctggcgacagagcgagactctgtctcaaaaaaataatgataataataataaacaaataaagataccaaaaaaaaaatacaaaaatttagccgggtgtggtggcacgtgcctgtaatcacagctactcgggaggctggggcaagagaatcacttgaacgcgggaggcgtaggttgcc

SEQ ID NO: 210119 - DNA, 201 bp, Homo sapiens
atgcaccaccacaccaggctaattttgtatttttagtagagatggggtttctccacgttggtcaggctggtcacgaactcacaacctcagttgctccacckgcctcggcctcccaaagtgctgggatgacaggcgtgagccaccgcacccggcctatttattttttttgagacggagtctcactctgtccagcccaggctg

SEQ ID NO: 210120 - DNA, 201 bp, Homo sapiens
agaccagacatggcggaaggacccaagttcctgggttggacccttcatgagtccatggtgtgtggagggtgagcgatgtctctcaggttcatctctgaggktcaaacgggctgtgtccccttccaggtggggctggagctctggctaaggaatgcatgtctctgtaccctggatgtaagatcaccgtttttgacatcccag

SEQ ID NO: 210121 - DNA, 201 bp, Homo sapiens
ttctctgttttcatgccccgtatttcacctccttttctcctcctctcttctcctcggtctgctttcctttcccccatttctctctttctttctctctctctctttctttctttccttctttctccttccttccttcgttccttcctctttccttctgcctgccttccttccttccctccctcctttctttctttctttttc

SEQ ID NO: 210122 - DNA, 201 bp, Homo sapiens
ctgaggacatgtgcccagggtggtctggggacagcttggtttgatacattttacagagacatgagacatcaatcaatgtatgtaagtacattgggccagtygtggtggctcacacctgtgatcccagcactttgggaggctgaggcgggcggatcacctgaggtcgggagttcgagaccagcctgacccacacagagaaac

SEQ ID NO: 210123 - DNA, 201 bp, Homo sapiens
gtattttttagtagagacagggtttcacggtgtcagccaggatggtctcgatctcctgacctcgttatccgcccgccttggcctcccaaagtgttgggatkacaggcgtgagccaccgcgcccggccaaagacggttcttttccccgcctaaagtagtggtcgcaggtagcgtaggcactgcctgcttgacccagggtgga

SEQ ID NO: 210124 - DNA, 201 bp, Homo sapiens; identical to SEQ ID NO: 36886

SEQ ID NO: 210125 - DNA, 201 bp, Homo sapiens
tgttttcatgccccgtatttcacctccttttctcctcctctcttctcctcggtctgctttcctttcccccatttctctctttctttctctctctctctttytttctttccttctttctccttccttccttcgttccttcctctttccttctgcctgccttccttccttccctccctcctttctttctttctttttctttct

SEQ ID NO: 210126 - DNA, 201 bp, Homo sapiens
ttctcgctctgtcgcccaggctggagtgcagtggcgcgatcttggctcactgcaacctcagcctcccgggttcacacccattctcttgcctcagcctcccragtagctgggactacaggcacccgccaccacgcccagctaattttttgtatttttagtagagactgggtttcactgtgttagccaggattgtctcgatct

SEQ ID NO: 210127 - DNA, 201 bp, Homo sapiens
acacaccgagctcagaagagccatcatacacatagttatatttacaacaatgaaagaatacagatgcatatcagcgaaggagaaaggagcatgggatagakttcgggagaaaccacatgtgagcttcttgttgtcttctcccagtggagctgtggacagcaatcaattcccccaacaacaaggtttgacaacacacaccac

SEQ ID NO: 210128 - DNA, 201 bp, Homo sapiens
ctttctttctctctctctctttctttctttccttctttctccttccttccttcgttccttcctctttccttctgcctgccttccttccttccctccctccyttctttctttctttttctttcttccttcttccttctttcctttctttatatatatatatatgtgtgtatacatgtgtatgtgtatgtgaatatatgtatc

SEQ ID NO: 210129 - DNA, 201 bp, Homo sapiens
ctgggcaacatagtgagacaccccccccccaccccgatctctacaaagaattaaaaaattagtcaggcacattggctcatgcctgtcttcccagcactttkggaggccgaggtgggtggatcaccttaggtcaggagttggagaccagcctggccaacatggtgaaaccctgtctctactacaaatacaaaaattagccag

SEQ ID NO: 210130 - DNA, 201 bp, Homo sapiens
ttctttctctctctctctttctttctttccttctttctccttccttccttcgttccttcctctttccttctgcctgccttccttccttccctccctccttyctttctttctttttctttcttccttcttccttctttcctttctttatatatatatatatgtgtgtatacatgtgtatgtgtatgtgaatatatgtatctg

SEQ ID NO: 210131 - DNA, 201 bp, Homo sapiens
cccccccaccccgatctctacaaagaattaaaaaattagtcaggcacattggctcatgcctgtcttcccagcactttgggaggccgaggtgggtggatcaycttaggtcaggagttggagaccagcctggccaacatggtgaaaccctgtctctactacaaatacaaaaattagccaggtgtggtggtgtgtgcctatagt

SEQ ID NO: 210132 - DNA, 201 bp, Homo sapiens
atcacctgaatagtgaccgtggtacctaagaggcaatttttcagccctcgctactctgaggcaaacccctacagcaggctctgcagagaggacaggaggasagagggagctgtggggggggaggagcaggaaatgcttccaacaccagagccctgtccgcctctgtgtccacctatccttcttggctccatctcacctgcc

SEQ ID NO: 210133 - DNA, 201 bp, Homo sapiens
agaacaatcgtccgttctgaatcaactccaggtttcccggagctgggtacactttgctggctgacctatggttcccccatcccgaatgacttcctgttccmtttcacaaatgcaagccttccaggtgcacctgtggggtatagctccgttctcaacagggggttatgtacacccttgctctgggcacgtccccagatcctc

SEQ ID NO: 210134 - DNA, 201 bp, Homo sapiens
aacctccgcctcccgggttcaagtgattctcctgcctcagcctcccaagtagctgggattacaggtgtctgccaccacacctggctatttttttttttttwaatttttagtagagatggggtttcaccaggttgaccaggctggtctcaagctcctgacctcaggtgatccacctgcctcccaaagtgctgggaatatagg

SEQ ID NO: 210135 - DNA, 201 bp, Homo sapiens
aataaaaaaaaaaaatccacaaggaatttcacttccatgtggcagaacagaaaacgaatggatttattgcaaaatacgagtgagaaagtgtgattctctcrttcatacccttttatgacacttagttctgaaccgatttgcctcgtgtcttcagttgggatctcaggatctctttcagccaaaaaaatcaaacttccctgt

SEQ ID NO: 210136 - DNA, 201 bp, Homo sapiens
tccccatgctggacccctaccgggaggagatgacgggccgcaacttccacaccttcagtttcggggggcacttgaacttcgaggcctatgtgcagtaccgygagtacatgggcttcatccaggccatgagcgccctgcgcgggatgaaactcatgtacaagggcgaggacggcaaggccgtggcctgcaacatcaaggtga

SEQ ID NO: 210137 - DNA, 201 bp, Homo sapiens
ctggggggcggagattgcggtgagctgagatcgcaccattgcactccagcttgggcgacaagagtgaaactttgtctcacaaaaaataaaaaataaaaaawaaaaatccacaaggaatttcacttccatgtggcagaacagaaaacgaatggatttattgcaaaatacgagtgagaaagtgtgattctctcattcataccc

SEQ ID NO: 210138 - DNA, 201 bp, Homo sapiens
gcaggctgaggcaggagaattacttgaacctggggggcggagattgcggtgagctgagatcgcaccattgcactccagcttgggcgacaagagtgaaactytgtctcacaaaaaataaaaaataaaaaaaaaaaatccacaaggaatttcacttccatgtggcagaacagaaaacgaatggatttattgcaaaatacgagt

SEQ ID NO: 210139 - DNA, 201 bp, Homo sapiens
agaacttaaagtataataaaaagaaaaaaagaccagacatggcggaaggacccaagttcctgggttggacccttcatgagtccatggtgtgtggagggtgrgcgatgtctctcaggttcatctctgagggtcaaacgggctgtgtccccttccaggtggggctggagctctggctaaggaatgcatgtctctgtaccctgg

SEQ ID NO: 210140 - DNA, 201 bp, Homo sapiens
gcatccccagaccatggggcctccaaacaccttcccagctcctgtcccacgtgtccggccaggctcaggaaccgggctcagctgcactttcctcttcccckcaggctgtgaagctacgggaacaggagcagaaggaggagaagctgaggctccagcagcaggaggagcggcggcggctgcaggaggccgagctgcggcgcg

SEQ ID NO: 210141 - DNA, 201 bp, Homo sapiens
cgggcccctcctctcctgctgccgctgccccggtgagactccgaggcctgtaggaagcttcaggtgcctgagcctccagtacagcccttcccctactccasccaagcctccaggccacccctgtccctactgcagccaaatctccaggccgcccctgtcccctactcaaaccaagcctccagaccgcccctgtcctctact

SEQ ID NO: 210142 - DNA, 201 bp, Homo sapiens; identical to SEQ ID NO: 36882

SEQ ID NO: 210143 - DNA, 201 bp, Homo sapiens
aaatgccgtctctactaaaaatacaaaaacaaaattagccgagtgtggtggcaggtgcctgtagtcccagctactggggaggctgaggcaggagaatggcrtgaacccgggaggcggagcttgcagtgagccaagatcacgccactgcactccagcctgggtgacagagcgagactccgtctcaaaaaaaaaaaaaaaaag

SEQ ID NO: 210144 - DNA, 201 bp, Homo sapiens
aattagccgagtgtggtggcaggtgcctgtagtcccagctactggggaggctgaggcaggagaatggcgtgaacccgggaggcggagcttgcagtgagccragatcacgccactgcactccagcctgggtgacagagcgagactccgtctcaaaaaaaaaaaaaaaaagcaacagtatgttcccctgggagaacggagggg

SEQ ID NO: 210145 - DNA, 201 bp, Homo sapiens
gtgggtgcctgtaatctcaactactgggagcctgagacagaagaatcacttgaacctgggaggcagaggttgcggcgagacatgcatcctcagaaatgggrtagagacctggcacggtcacttttttttttttttgagacagattctcgctctgtcgcccaggctggagtgcagtggcgcgatcttggctcactgcaacct

SEQ ID NO: 210146 - DNA, 201 bp, Homo sapiens
actgggcagacggaaagtgctcacacctgctggagaggatctaccacacttgcaagccaggtaagttgtggggtttgcatttcagcgtgtgcttgtgacayggggcagaattgtacgagtcacatttagaaggcaggcactgaaatcatcccacaggtaagggtagacatcctgcccaatatggctttccttttagataac

SEQ ID NO: 210147 - DNA, 201 bp, Homo sapiens
ccaacatggagaaaccccgtatctactaaaaatacaaaattagccgggcgtggtggtgggtgcctgtaatctcaactactgggagcctgagacagaagaaycacttgaacctgggaggcagaggttgcggcgagacatgcatcctcagaaatggggtagagacctggcacggtcacttttttttttttttgagacagattc

SEQ ID NO: 210148 - DNA, 201 bp, Homo sapiens
gtcttctgcattctggggacatggggacaccacgctggtcgggagggtcccaggctcttctcaatctctctcgggcccctcctctcctgctgccgctgccscggtgagactccgaggcctgtaggaagcttcaggtgcctgagcctccagtacagcccttcccctactccagccaagcctccaggccacccctgtccctac

SEQ ID NO: 210149 - DNA, 201 bp, Homo sapiens
acttatgccactgggctggggttactgggagtgggaaggtgtatatatttgggattttttttcccttttgtccttaaattccaagtcctggtgagttaatygaggacataatgtaccaaaatctattttttcctcctatttcttcctctccttccttcctcccttccttccttccttccctctttctttctctctctcttt

SEQ ID NO: 210150 - DNA, 201 bp, Homo sapiens
cacacgctttgtgatcccctaatacggttaatgcaaatttctagagtgatccgtctttgtttgagtactgggcaggcagcagggagagtcaggcagcagcygtgagcgggtggctcttccccaccttgccagcaggctctgtgctccttgaagcaagcgctccagaggctccggaagccacggctggattggagacaagat

SEQ ID NO: 210151 - DNA, 201 bp, Homo sapiens; identical to SEQ ID NO: 36911

SEQ ID NO: 210152 - DNA, 201 bp, Homo sapiens
cctcggtgtgcctgccctgtgttccaggggatttcttcaaagaccctcttccggaagctgatctgtacatcctggccagggtcctccatgactgggcagayggaaagtgctcacacctgctggagaggatctaccacacttgcaagccaggtaagttgtggggtttgcatttcagcgtgtgcttgtgacacggggcagaat

SEQ ID NO: 210153 - DNA, 201 bp, Homo sapiens
tgggtggagatgaggcatgtttgcttgttcagccctcacgtgtaactttgagcttgatgagagctgtcctctgaaagctgcccagcctcgaggcgtcgctktgggtcccgcctaagggcgtgctgtgtgctgggctgccctgagccgccctccgagctcgtggggcggtgacagctcacagggcggttaaaccttcagcac

SEQ ID NO: 210154 - DNA, 201 bp, Homo sapiens
tgaactcctgacctcaggagatccaccagcctcggcctctcaaagtgctgggattacaggcgtgagccaccgcgcccggctgaaatttctcttctttgctstagaggtcagtagcagtaagtagcggctgataggtgagaatggagattaattgaagcaacgctgttactgattagattttgtctttacacttgagcctgg

SEQ ID NO: 210155 - DNA, 201 bp, Homo sapiens
cttcatgttggccaggctggtcttgaactcctgacctcaggagatccaccagcctcggcctctcaaagtgctgggattacaggcgtgagccaccgcgcccrgctgaaatttctcttctttgctgtagaggtcagtagcagtaagtagcggctgataggtgagaatggagattaattgaagcaacgctgttactgattagat

SEQ ID NO: 210156 - DNA, 201 bp, Homo sapiens; identical to SEQ ID NO: 36909

SEQ ID NO: 210157 - DNA, 201 bp, Homo sapiens; identical to SEQ ID NO: 36883

SEQ ID NO: 210158 - DNA, 201 bp, Homo sapiens; identical to SEQ ID NO: 36885

SEQ ID NO: 210159 - DNA, 201 bp, Homo sapiens; identical to SEQ ID NO: 36884

SEQ ID NO: 210160 - DNA, 201 bp, Homo sapiens
tttcttctatcatggctgtggtttgccagtacgctcatggttgaagggaacaccacatcttaggaagaggtagtgaaaattagagtgaagtctcttctccytcctggtttgtagagcccgtgaattttacctctaggcccccaagggttaaaaatacctattccccagccactgatacgcagagcggcctccgcctacggg

SEQ ID NO: 210161 - DNA, 201 bp, Homo sapiens
gctggagtgcaatggcacgatctcggctcactgcaagctccacctcccaggttcacgccattctcctgcctcagcctcccgagtagctgggattacaggcrcccgccaccacgcccggctaattttttgtatttttagtagagacggggtttcaccgtgttagccaggatggtctcgatctcctgacctcatgatccgccc

SEQ ID NO: 210162 - DNA, 201 bp, Homo sapiens
tcttcgtggtttcagggttgggtcacacttagcaggacggtgtgttggaaggtcacggaggtcctcgcccggctcactccttccacctctcgggctgcttkgagtcaaccgaggtccaccttgggataaagagttaaatgcttaatcgttggaccgtggcctgttccgccgtgtgtggaaagccgcttgtatggtgtgtgg

SEQ ID NO: 210163 - DNA, 201 bp, Homo sapiens; identical to SEQ ID NO: 36888

SEQ ID NO: 210164 - DNA, 201 bp, Homo sapiens
ggtttgggatcagttctacagctgatgagtcaagggctcgggggggcctgatgcagactattttagggctgcggaggggcgcccagaaagccagggaatcsccacacgctttgtgatcccctaatacggttaatgcaaatttctagagtgatccgtctttgtttgagtactgggcaggcagcagggagagtcaggcagcag

SEQ ID NO: 210165 - DNA, 201 bp, Homo sapiens
gtctgggcgtcggcacctggcccggcccccttcttggggtggcagagcgtgggatgccttttctcccggcctgctcctccttgtccccgtgtctcctctcsccttggtgtctgcgtgggtctgtgtcaccccggcgggctttgtggcctcactaggcggttggcggcgcccacccgggcttcagaagtctccgcctccgtg

SEQ ID NO: 210166 - DNA, 201 bp, Homo sapiens
tttcttgagccacccagtttgcagaaattcgcacgacccccagaaatgaatgcaggacctgctcaatccataagacgattaatgagtgctaatgatgggtragcatattggtttgggatcagttctacagctgatgagtcaagggctcgggggggcctgatgcagactattttagggctgcggaggggcgcccagaaagcc

SEQ ID NO: 210167 - DNA, 201 bp, Homo sapiens
ctccgggtccagaaagtgcctgctggcttggcccctcctcattggcgggggaggtggggggtgctggtgctgactgtctgcgtcttatgtttcaggcccarggtcccggaggctatggcagcggctaccatcgtgcacgacacgtctgaggccgtggagctctgccctgcttacggcttgtacctgaagcccatcaccaag

SEQ ID NO: 210168 - DNA, 201 bp, Homo sapiens
ccttctcccccaggagcttgctacaagtgccagaaatctgactaccaggccaaggaatgcctgcagcccaggattcctcctaagccgcgtcccatctgtgygggactccactggaaatcggactgtccaactcacctggcagccactcccagagcccctggaactctggcccaagcctctctgactgatcccttctcggct

SEQ ID NO: 210169 - DNA, 201 bp, Homo sapiens
ctcagcctcccgagtagattacgggattacaggagccctccacaacacctggcttatttttgtatttttagtagaaacagggattcaccatgttggccagrctggtcttgaactcctgacctcaagtgatcctcctgtcttggcctccctaagtgctgggattccaggcgtgacccatcacgcctggtcccagctactctt

SEQ ID NO: 210170 - DNA, 201 bp, Homo sapiens
atgctatttttagagccagaattttcatgtctgatttatggtgattttcttaagaaccagaactgctggcagaaagggggcacccacacgcttagatagcygatgtcttattagagggcagtttgtggttcctgatttggaaattaacattctccaaacattccagtccaatgaaagttttatccgctttcccatgtaaaa

SEQ ID NO: 210171 - DNA, 201 bp, Homo sapiens
ctcgctccgttgcctaggctggagtgcacgatctcagctcatgcaacctccgcctcctgggttcaagcgattctcccacctcagcctcccgagtagattaygggattacaggagccctccacaacacctggcttatttttgtatttttagtagaaacagggattcaccatgttggccaggctggtcttgaactcctgacct

SEQ ID NO: 210172 - DNA, 201 bp, Homo sapiens
gaaaatgctatttttagagccagaattttcatgtctgatttatggtgattttcttaagaaccagaactgctggcagaaagggggcacccacacgcttagayagccgatgtcttattagagggcagtttgtggttcctgatttggaaattaacattctccaaacattccagtccaatgaaagttttatccgctttcccatgt

SEQ ID NO: 210173 - DNA, 201 bp, Homo sapiens
gagccgcatcttccagcttctagtgagcagagcagttggaggctgaggccttttcctggcaggactctccagctagtctttgttttagacagtctcgctcygttgcctaggctggagtgcacgatctcagctcatgcaacctccgcctcctgggttcaagcgattctcccacctcagcctcccgagtagattacgggatta

SEQ ID NO: 210174 - DNA, 201 bp, Homo sapiens; identical to SEQ ID NO: 36915

SEQ ID NO: 210175 - DNA, 201 bp, Homo sapiens
ccccgttgttttctccaagtggggagttgtgtcttggtcctgatgcgtctctagagccgcatcttccagcttctagtgagcagagcagttggaggctgaggccttttcctggcaggactctccagctagtctttgttttagacagtctcgctccgttgcctaggctggagtgcacgatctcagctcatgcaacctccgcct

SEQ ID NO: 210176 - DNA, 201 bp, Homo sapiens
gaggtacagggacgatgtgtcaaacagcgtcgcctctcccagtgagatggttctgctttgcctccgtctctttccccgttgttttctccaagtggggagtygtgtcttggtcctgatgcgtctctagagccgcatcttccagcttctagtgagcagagcagttggaggctgaggccttttcctggcaggactctccagcta

SEQ ID NO: 210177 - DNA, 201 bp, Homo sapiens; identical to SEQ ID NO: 36917

SEQ ID NO: 210178 - DNA, 201 bp, Homo sapiens
caggctggagtcagtggcatgatcttggctcactgcaacctctgcctcctgggttcaagcaattctcctgcctcagtcgcccaagtagctgcgagtacagrcacgtgccgccatgtctggctaatttttgtacttttttttgagacagaggttcactctcgttgcccaggctggagtgcaatggcccgatcttggctcact

SEQ ID NO: 210179 - DNA, 201 bp, Homo sapiens; identical to SEQ ID NO: 36918

SEQ ID NO: 210180 - DNA, 201 bp, Homo sapiens
aggaggtcacatcctttcagcctgccacgccctccattcagtcctcttccttcctgcaggagggctgggcctggggttggggccactgttgcccaggtgtrggaaggcagtggctttgggaggtacagggacgatgtgtcaaacagcgtcgcctctcccagtgagatggttctgctttgcctccgtctctttccccgttgt

SEQ ID NO: 210181 - DNA, 201 bp, Homo sapiens
atgaggtaagctctgctctttagtattatgcagatgcttttctcaaactttcctgatcctgcaggcaagctaaacctgttccggaagaacctgcgggagtygcagcagctccgatgggatgagagctgggtgcagactgtgctccctttggttatggacacataactcccgggccagaggctaaaaccccagggcccctgc

SEQ ID NO: 210182 - DNA, 201 bp, Homo sapiens
cacgagaattacttgaacccgggaggcagaggttacagtgaactgacatcacgccattgcattccagcctgggtgacagagccagagtctgtcggaaaaamaaaaaaaaaaaaaaaaaaaattctaccagaaattccgtgtagaattgtttctttttttaaacacagagtttgaacaactgactcttgacggacacaacct

SEQ ID NO: 210183 - DNA, 201 bp, Homo sapiens
aaaatacaaaaattagctgggtatggtggtgggggcctgtaatcccagctacttgggaggctgatgcacgagaattacttgaacccgggaggcagaggttrcagtgaactgacatcacgccattgcattccagcctgggtgacagagccagagtctgtcggaaaaaaaaaaaaaaaaaaaaaaaaaattctaccagaaatt

SEQ ID NO: 210184 - DNA, 201 bp, Homo sapiens
gccgaggcaggcaggtcacctgagggcaggagttcgaggccaacatggcgaaacctgtctctactaaaaatacaaaaattagctgggtatggtggtggggrcctgtaatcccagctacttgggaggctgatgcacgagaattacttgaacccgggaggcagaggttacagtgaactgacatcacgccattgcattccagcc

SEQ ID NO: 210185 - DNA, 201 bp, Homo sapiens
gctattgtttatttaaaagtttttttctgaatgggcatggtggctcacacctgtaatcctagaactctgggaggccgaggcaggcaggtcacctgagggcmggagttcgaggccaacatggcgaaacctgtctctactaaaaatacaaaaattagctgggtatggtggtgggggcctgtaatcccagctacttgggaggct

SEQ ID NO: 210186 - DNA, 201 bp, Homo sapiens
tggggacagtggggatggtggaggtgggccgccttgaatccccagttgggtcattgagtgaccaggccctcaggctgaaatgccccctccaggagagtatytcacagaggctggtggcctccccaccagagcagtgctctttctccacctgaacaggtgactctggctattgtttatttaaaagtttttttctgaatgggc

SEQ ID NO: 210187 - DNA, 201 bp, Homo sapiens
cagggcccggtaggcctcccatcctcagctgccttctctcctgctcgccactgccctggcctgtccccttctcactgcagacctgggaacccactcacccrggggttggcaaagtaaggctacaggccagtctcctgcttttgtaaatcaagtgtcattgggacacagcacactcattaacttctgagttgtctacagccg

SEQ ID NO: 210188 - DNA, 201 bp, Homo sapiens
tgccatgatttcattgcagggctgtgaccgtctatgacaagccggcatctttctttcaagacacacctctggacctgcagcgccagctcttcatgaagctsagcggcacacactctccgttcagggcccggtaggcctcccatcctcagctgccttctctcctgctcgccactgccctggcctgtccccttctcactgcag

SEQ ID NO: 210189 - DNA, 201 bp, Homo sapiens
aattccgtgtagaattgtttctttttttaaacacagagtttgaacaactgactcttgacggacacaaccttccttctctcgtctgtgtgataacaggtacygcctgggaccctgggtgtctgtgtggttgggggatggtggatggggaggggcacgcagcctttaccctgtgcttcccacgatcttgtctccttaatcctc

SEQ ID NO: 210190 - DNA, 201 bp, Homo sapiens
gccctcccaatagccctgccatgatttcattgcagggctgtgaccgtctatgacaagccggcatctttctttcaagacacacctctggacctgcagcgccrgctcttcatgaagctcagcggcacacactctccgttcagggcccggtaggcctcccatcctcagctgccttctctcctgctcgccactgccctggcctgt

SEQ ID NO: 210191 - DNA, 201 bp, Homo sapiens
agcgtccttcttttcctggagcctctgagtcctccattcctgaggcctttcttcagccctcccaatagccctgccatgatttcattgcagggctgtgaccrtctatgacaagccggcatctttctttcaagacacacctctggacctgcagcgccagctcttcatgaagctcagcggcacacactctccgttcagggcccg

SEQ ID NO: 210192 - DNA, 201 bp, Homo sapiens
tttccagaaagcgtgatgtcaagttggaggcggagcgctgctggggcgtgaagagtcttgagtccaagtgagggagttaagaacttggtaggggctgttgktgggtcgggcacctggggtcagccaggtggtgacctgggatgcggtggggacaggcaatgaggtaagctctgctctttagtattatgcagatgcttttct

SEQ ID NO: 210193 - DNA, 201 bp, Homo sapiens
gggaagtttccagaaagcgtgatgtcaagttggaggcggagcgctgctggggcgtgaagagtcttgagtccaagtgagggagttaagaacttggtaggggytgttggtgggtcgggcacctggggtcagccaggtggtgacctgggatgcggtggggacaggcaatgaggtaagctctgctctttagtattatgcagatgc

SEQ ID NO: 210194 - DNA, 201 bp, Homo sapiens
gggaggcagaggttacagtgaactgacatcacgccattgcattccagcctgggtgacagagccagagtctgtcggaaaaaaaaaaaaaaaaaaaaaaaaaattctaccagaaattccgtgtagaattgtttctttttttaaacacagagtttgaacaactgactcttgacggacacaaccttccttctctcgtctgtgtga

SEQ ID NO: 210195 - DNA, 201 bp, Homo sapiens
ccccaggacaccaagtgtgggaaagtgggacatgcggggaagtttccagaaagcgtgatgtcaagttggaggcggagcgctgctggggcgtgaagagtctygagtccaagtgagggagttaagaacttggtaggggctgttggtgggtcgggcacctggggtcagccaggtggtgacctgggatgcggtggggacaggcaa

SEQ ID NO: 210196 - DNA, 201 bp, Homo sapiens
cgggaggcagaggttacagtgaactgacatcacgccattgcattccagcctgggtgacagagccagagtctgtcggaaaaaaaaaaaaaaaaaaaaaaaaaattctaccagaaattccgtgtagaattgtttctttttttaaacacagagtttgaacaactgactcttgacggacacaaccttccttctctcgtctgtgtg

SEQ ID NO: 210197 - DNA, 201 bp, Homo sapiens
aggccaagaggagggtgctcgcaggggagcatacagcatgaagaggccgggaggtgccccaggacaccaagtgtgggaaagtgggacatgcggggaagttyccagaaagcgtgatgtcaagttggaggcggagcgctgctggggcgtgaagagtcttgagtccaagtgagggagttaagaacttggtaggggctgttggtg

SEQ ID NO: 210198 - DNA, 201 bp, Homo sapiens
ccgggaggcagaggttacagtgaactgacatcacgccattgcattccagcctgggtgacagagccagagtctgtcggaaaaaaaaaaaaaaaaaaaaaaaaaattctaccagaaattccgtgtagaattgtttctttttttaaacacagagtttgaacaactgactcttgacggacacaaccttccttctctcgtctgtgt

SEQ ID NO: 210199 - DNA, 201 bp, Homo sapiens
atgagctggtgaaacatcaagaaaacggcttggtctttgaggactcagaggaactggcagctcagctgcaggtagccacatctgccactaagccagggtgsgcagggttctggagactggcaccgagccacgctccctgatccctgcttcccacagtcggggtgggaccatgtggggtctggcggaaaagctagggaggga

SEQ ID NO: 210200 - DNA, 201 bp, Homo sapiens
cccgggaggcagaggttacagtgaactgacatcacgccattgcattccagcctgggtgacagagccagagtctgtcggaaaaaaaaaaaaaaaaaaaaaaaaaattctaccagaaattccgtgtagaattgtttctttttttaaacacagagtttgaacaactgactcttgacggacacaaccttccttctctcgtctgtg

SEQ ID NO: 210201 - DNA, 201 bp, Homo sapiens
aaaataattcttcagtccttgaagagcatccagcacagaaggtacaaaccctccttaaggctccctcctcaaatcggtttggccattttgatgtgcactcycccaggcctttatacccttcagatgccaaatctaagaaccagctcccagaaaccacaccccctgttccaatccccagcctggcttgagcgtggggtgcga

SEQ ID NO: 210202 - DNA, 201 bp, Homo sapiens
aattacttgaacccgggaggcagaggttacagtgaactgacatcacgccattgcattccagcctgggtgacagagccagagtctgtcggaaaaaaaaaaamaaaaaaaaaaaaaattctaccagaaattccgtgtagaattgtttctttttttaaacacagagtttgaacaactgactcttgacggacacaaccttccttc

SEQ ID NO: 210203 - DNA, 201 bp, Homo sapiens
ggattcagggattcaagcccctcgtgtgagctgagctcagggaacgtcttgatcaaatctggtgccctagaaaagtcatcttttatgtgctgaaccagtcyccagggggttgccttacttgttccacagccatggaattaagaaaaacatacaaaaataattcttcagtccttgaagagcatccagcacagaaggtacaaa

SEQ ID NO: 210204 - DNA, 201 bp, Homo sapiens
ggggatgctgcctcactgtgctgggaggatttgtgttcccagggcagagaccagctctctgaccgcacccctcttgcctagcagggtcggtggacctgggygtctgtctagacacgtcctccagtggcctggacctgcccatgaaggtggtggacatgttcaggagctgtttgcctgtgtgtgcgttgtgaacttcaagtg

SEQ ID NO: 210205 - DNA, 201 bp, Homo sapiens
tcttaagaaccagaactgctggcagaaagggggcacccacacgcttagatagccgatgtcttattagagggcagtttgtggttcctgatttggaaattaayattctccaaacattccagtccaatgaaagttttatccgctttcccatgtaaaaattcttcccatgagagtgacttgatcctcacaatcccgttgaagtcg

SEQ ID NO: 210206 - DNA, 201 bp, Homo sapiens
gttgcagtgagctgagattgtgccactgcactccagcctgggtgacagagtgagactctgtctcaaaacaaaacaacaacaacaaaaaaaccaaattgtgrttacgtagaaaaagtgtcaacttacattttcagatgtcccagccagaccatgtggctgcttggccagcttaagccacttgtgcttggggctgcggggggc

SEQ ID NO: 210207 - DNA, 201 bp, Homo sapiens
agctgggattacaggcacctgccacgacgcttcgctaattttgtgtttcttttagtagagatggggtttcaccacgttggccaggctggtcttgaactccygacctcaggtgatccgcccaccttggcctcccaaaatgctgggattacatgcgggaggtgaacctgggaagtggaggttgcagtgagctgagattgtgcc

SEQ ID NO: 210208 - DNA, 201 bp, Homo sapiens
gctagagtgcagtggtgcaatctcggctcactgccagctccgcctcctgggttcatgccattctcctgcctcagcctcctgcgtagctgggactacaggckcccgccaccacgtctggctaattttttgtatttttagtagagacagggtttcactgtgttagccaggatggtctcaatctgacctcatgatctgcccgcc

SEQ ID NO: 210209 - DNA, 201 bp, Homo sapiens
gtggcatggaacgggccccgcatgggtgatgctgactacctagctgcctggcatcgcctggtgcttcccattgcctacgaggtacagctcaggatagatcrcaggacgtatgtgacacgcctgtgcaggtggcagcctggacctgcctccttggcatgtgtgtgtgtgactaccatgtggctgatgatatgagacagcgca

SEQ ID NO: 210210 - DNA, 201 bp, Homo sapiens
tctgcttttcattcctttccaagtaatctactttcctctctgcaaggttatcttggtgttcttttttttttttttttaaattattagacagggtatcactstgtcacccaggctggagtatagtagcatgatcatagcccactgtaacctcaaactcctgggctcaagcaatcctcctgcctcagcctcccaagtagctag

SEQ ID NO: 210211 - DNA, 201 bp, Homo sapiens
gcagggaatggtggcaatcttggggtccccatccctatgcccaccccaccctgggggaagcagctgagtggatagggctgttctctcccttactccctttmtggctccccactgtctctccagaactcatactcctgtgcctgcctggcctcaggctctgtcctcaggctggtggatgcggtcctgggggctgagatccgg

SEQ ID NO: 210212 - DNA, 201 bp, Homo sapiens
tatgtgtccctgcaccgctatgatcatggcaccttcttccccatgggggatgagggtgccagcagccagatcggccgggctgcgggcacaggcttcaccgycaacgtggcatggaacgggccccgcatgggtgatgctgactacctagctgcctggcatcgcctggtgcttcccattgcctacgaggtacagctcaggata

SEQ ID NO: 210213 - DNA, 201 bp, Homo sapiens; identical to SEQ ID NO: 36939

SEQ ID NO: 210214 - DNA, 201 bp, Homo sapiens
tgaatcgttaagggtggagtcgaaaccggggtcggggccggggccggctgagtgaaagggtgggtgattatcccgggagataggccgaaagggcaggttcstgaaggaatggggtctgggctgggcttagagggtctgggaatggggcttaggagagtagaaggggcggtgattggttggaaagggcaggccctaagacgg

SEQ ID NO: 210215 - DNA, 201 bp, Homo sapiens
cttggagacccaccacccctgctgaccctgccacggcccccactatcaggggccctggcctcaatcactgagaccatccaagtccatcgcagatactggcrcagcttacgggtcatgagtgagtggatttgggggtgatggggggaacccagggaaggagggggctgaggggcagagatcagaggcaggaagggtgacagt

SEQ ID NO: 210216 - DNA, 201 bp, Homo sapiens
ccacagcccaggcgggagggtatggtaatagcagtggcagtggtgaggagagggtcacacaccagagctgatgggaggcaggactgacaccacagttttgrggtaagcagctgtggaagggtggatggggagatgtggagagaacagatgtggagctccccagtgtcctcatgcatctgtgactgtgactccatctcccca

SEQ ID NO: 210217 - DNA, 201 bp, Homo sapiens
gctgctcgccatgcccagactatcagtgggcatgccctacggtaaggactccctggggaccccccaaatcctgatccttgtggggacctggatgctccccscagcccattgtttactcatgccccatggtccagctcccaggacttccttccccagaaagaagtaagggtgcagtccttacccagagaaggaccgaggatg

SEQ ID NO: 210218 - DNA, 201 bp, Homo sapiens
tggtaatagcagtggcagtggtgaggagagggtcacacaccagagctgatgggaggcaggactgacaccacagttttggggtaagcagctgtggaagggtrgatggggagatgtggagagaacagatgtggagctccccagtgtcctcatgcatctgtgactgtgactccatctccccagcttcccggaaggccctgagcg

SEQ ID NO: 210219 - DNA, 201 bp, Homo sapiens
gcatgttcaaccacgtggctgtggcagcccgctatgctcaacagaaacaccgcatccggaggtcagcaacagagggcagatgtgatgggggtggcatgggrtggggtgtcctggtctgggctcttcccccagattcaccttgatctccttgcacagagtcccctctctctgctgctcctagggtccttatcgtagattggg

SEQ ID NO: 210220 - DNA, 201 bp, Homo sapiens
ttaaagtccttccttcaagtgtaaaatgtattgatatgggtaatatattcatgtgattcaagaatccaaaggtaaaaaagagaatataattaaaaatctgyctcccatccttgtcacccagacacctgcctcctctcatgggaggtagtcattggaaccactgactcatgtgtcctcccacaaagtcttattcaagaaata

SEQ ID NO: 210221 - DNA, 201 bp, Homo sapiens
acagggctggtctatgaccaaaatatgatgaatcactgcaacttgtgggacaggtaggcatttggagggctggatgagtaggtgttgggggtccctccccmtcaggcactaagcctctacctctcgtttccccactgctagccaccaccctgaggtaccccagcgcatcttgcggatcatgtgccgtctggaggagctggg

SEQ ID NO: 210222 - DNA, 201 bp, Homo sapiens
aggaaactggcaactgttgggttgggggtgtctatggggattgacttctccaactctcttacctctttttcttctgcccccagtgtcctctatttctccayccaccgctacgagcagggtaggttctggccccacctgaaggcctctaactggtccaccacaggtttcggccaaggccaaggatataccatcaatgtgcct

SEQ ID NO: 210223 - DNA, 201 bp, Homo sapiens
catggattaaataattaatggggaaattaatgaatgagagaatgaacgagtggttgaatggggaaatgagtggtagaggaaactggcaactgttgggttgrgggtgtctatggggattgacttctccaactctcttacctctttttcttctgcccccagtgtcctctatttctccatccaccgctacgagcagggtaggtt

SEQ ID NO: 210224 - DNA, 201 bp, Homo sapiens
tgtgggagcagctggaggaccggctggagggggtgtgggaaaatggaggtggcagtgatgagcagggagtatcctgaggccagcaggctcggggtagtaamctgtttggctgctacctgggttcccccaggtccttgggggtgggggaggggtgggcagaagttggaggacctaggggaagccttcctgtctccccatttc

SEQ ID NO: 210225 - DNA, 201 bp, Homo sapiens
cccgccgtggagccgtgtggtgtatgtgtggtaacaccatgtctgtgcccctgctcaccgatgctgccaccgtgtctggagctgagcgggaaacggccgcrgtaagggtcccctttcacccacggccagacactgtgggagcagctggaggaccggctggagggggtgtgggaaaatggaggtggcagtgatgagcaggga

SEQ ID NO: 210226 - DNA, 201 bp, Homo sapiens
attctttgtgcccaggacagaacctgggtgctgtgtggggctgatggcctggtggcctcttgggccaggagtgtgtcctgtgcctggttttgctcttgacygccgccccgatgtatgcaggcccccgccgtggagccgtgtggtgtatgtgtggtaacaccatgtctgtgcccctgctcaccgatgctgccaccgtgtctg

SEQ ID NO: 210227 - DNA, 201 bp, Homo sapiens; identical to SEQ ID NO: 36951

SEQ ID NO: 210228 - DNA, 201 bp, Homo sapiens
atccctgccaatcgaatcgtcctgggaggcttttcacaggtgaggggagaggggtgggggggatttagggggtaggggtggccggtgagtgagctgtgccmtcatgacccctctctctcctccctccagggcggggccctgtccctctacacggccctcacctgcccccaccctctggctggcatcgtggcgttgagctgc

SEQ ID NO: 210229 - DNA, 201 bp, Homo sapiens
agccctggaactgaggcagacttcttctcctgtgccctgggacttcttgcttgactattctttgtgcccaggacagaacctgggtgctgtgtggggctgakggcctggtggcctcttgggccaggagtgtgtcctgtgcctggttttgctcttgaccgccgccccgatgtatgcaggcccccgccgtggagccgtgtggtg

SEQ ID NO: 210230 - DNA, 201 bp, Homo sapiens; identical to SEQ ID NO: 36952

SEQ ID NO: 210231 - DNA, 201 bp, Homo sapiens; identical to SEQ ID NO: 36946

SEQ ID NO: 210232 - DNA, 201 bp, Homo sapiens; identical to SEQ ID NO: 36954

SEQ ID NO: 210233 - DNA, 201 bp, Homo sapiens; identical to SEQ ID NO: 36955

SEQ ID NO: 210234 - DNA, 201 bp, Homo sapiens; identical to SEQ ID NO: 36956

SEQ ID NO: 210235 - DNA, 201 bp, Homo sapiens; identical to SEQ ID NO: 36944

SEQ ID NO: 210236 - DNA, 201 bp, Homo sapiens; identical to SEQ ID NO: 36957

SEQ ID NO: 210237 - DNA, 201 bp, Homo sapiens
tgtctcacccccactttgtccccactctagagcagggaggcagtgggggaggagttgtgtctcgtcttctgtctccatgtggtttttgggtgtttttcttsttgtgtcctggattccgataaaattaaagaaattgcttcctcaacgctcaggcctggctgattctattccaggggtggatagtgaccatctgtgagaacc

SEQ ID NO: 210238 - DNA, 201 bp, Homo sapiens
gtggaggtacccagccggcggctgcggaggatgggcgtgtagggggaggtcggcctcgggagggtcccggagagcggggagggggaaccgtgatggggggratgggggtggggagtgaggtgcgaaggcgctgtccagtcttggggacttcgggagtggagcggggctaggcaagggggtgtctgagtataaagagacaga

SEQ ID NO: 210239 - DNA, 201 bp, Homo sapiens
agggtaagtgactgaggaggggtgctccttaaggaggggtcctggcccagcagcggactggagaggccttctcttcctaccacatcggagccttttctccygtccctcctacaggcacagctgggctgacgccctctccaccatccggctccctcacgtcaagtacatctgtccccatgcgtgagtgtcaccccagcaagg

SEQ ID NO: 210240 - DNA, 201 bp, Homo sapiens
ggggtagtaacctgtttggctgctacctgggttcccccaggtccttgggggtgggggaggggtgggcagaagttggaggacctaggggaagccttcctgtytccccatttcccatccttttccaggttatttttttacatggacttggagacacagggtaagtgactgaggaggggtgctccttaaggaggggtcctggcc

SEQ ID NO: 210241 - DNA, 201 bp, Homo sapiens
ggccagcaggctcggggtagtaacctgtttggctgctacctgggttcccccaggtccttgggggtgggggaggggtgggcagaagttggaggacctagggkaagccttcctgtctccccatttcccatccttttccaggttatttttttacatggacttggagacacagggtaagtgactgaggaggggtgctccttaagg

SEQ ID NO: 210242 - DNA, 201 bp, Homo sapiens; identical to SEQ ID NO: 36995

SEQ ID NO: 210243 - DNA, 201 bp, Homo sapiens
cctggcgtgtccgcgaccaccacgacttcctgccctattccacaggtacaggcttccaggggctggggtggtagtttggtggcagggagggtatagtccaygtaccctctgcccacttcagtggctgctcggcactgctctccaagccctggaggggttccaggcaggttctgtgtggggcgcaggggcagagactgaccc

SEQ ID NO: 210244 - DNA, 201 bp, Homo sapiens; identical to SEQ ID NO: 36998

SEQ ID NO: 210245 - DNA, 201 bp, Homo sapiens
gcaccctttcagagtaacatcatcactgcctcagcaccagccaggccagggcgggccttgggaggggcctgtgccctcatgactctgggcagcttttgggcaggaagcgacctcagggacctctagcccaagcccctcatttaacagatgggcaaactgagggcaaacagtggctcacttaaggtcatacaactaggaggt

SEQ ID NO: 210246 - DNA, 201 bp, Homo sapiens
tggcgtgtccgcgaccaccacgacttcctgccctattccacaggtacaggcttccaggggctggggtggtagtttggtggcagggagggtatagtccatgyaccctctgcccacttcagtggctgctcggcactgctctccaagccctggaggggttccaggcaggttctgtgtggggcgcaggggcagagactgaccctc

SEQ ID NO: 210247 - DNA, 201 bp, Homo sapiens; identical to SEQ ID NO: 37002

SEQ ID NO: 210248 - DNA, 201 bp, Homo sapiens
tcaccctgactgttggtttccctggagtccgcgtcacagatgaggcgggccacccagtgccctcgcaggtatggacacaaaatcctgctggaggggccttrgctgcttgctgaacctgctctgggccgggcacattgtctcttctgaccctgcaagggaggccttatcacctttgttttacagaagaggaaactgaggctc

SEQ ID NO: 210249 - DNA, 201 bp, Homo sapiens
cagactgcagaatgtagcccacgctgtgtctgtgggaaacacctgttggcctgcccccttcctggctcccctgggagttctggagggctgcatctcacctrcctcagtttccctcatactgaggtgcagccagtgagcaccccattccagaaggtgagtcacatggcacaagcaaagcctcttctctgtgtgcagatgcag

SEQ ID NO: 210250 - DNA, 201 bp, Homo sapiens
aggagatgtagaagcactttcacaaacctcttggcttttgtgatcttgggcagtcattcccctgtgccattctgaaaaccagctaccccatagccccatgrtagcttcttaaaaatgggccaggcaaggtggctcacatctgtaatgccagcactttgggaggccgaggtagcaggatcacttcaggccaggagttcgaga

SEQ ID NO: 210251 - DNA, 201 bp, Homo sapiens
catcacagggacctaaaatgccaggctaggcaatggacttgaccctctgggctccagagaattctctggtggctcacagtgcccagcactcaaagctttgsagccaggccttagaagctgggtcaccttgggcaagtggctgtacttctctggacctgtttcctcatcagtaaaatgggctgacagagatgtgtgaggagc

SEQ ID NO: 210252 - DNA, 201 bp, Homo sapiens; identical to SEQ ID NO: 37006

SEQ ID NO: 210253 - DNA, 201 bp, Homo sapiens
gaaaccaccctgtctccaaagggggacatttgtggtgcctcgtgcatagatagggttgctgtgaaaattcaatgagaagaagtgctctcagcctcctgccyagcacagaggcagggctcagcagatgtcctagccctctgggtgctgctgtaacagtataccacagaatgggtcattgattaggaaacgaagtttctttgg

SEQ ID NO: 210254 - DNA, 201 bp, Homo sapiens
gctgggttcagggatccaggagttctcaggtgtggccagacctcacacacatgggctggtaggatgcaacagaaagagaggccaggtcctcatcacagggrcctaaaatgccaggctaggcaatggacttgaccctctgggctccagagaattctctggtggctcacagtgcccagcactcaaagctttgcagccaggcct

SEQ ID NO: 210255 - DNA, 201 bp, Homo sapiens
cccaccttggccctgctgacctcagcccatcagccggtccctgcctcatacgacatgtgccaccgtgagctcctgcactacaggcagcttccaggctccastccctgtccgcaccatgccctctgcctgggacgcacaggtcccattcactctggccagcacctgctcaagctccccaggatgcctccccagagtcaccaa

SEQ ID NO: 210256 - DNA, 201 bp, Homo sapiens
ctgccaggtggggacttttgaggagctgtcattccaatgaacacacaggagaggcttccccaagctgtgaataggtagagaagaccaggaaagtgtccccrgcagagggaacagcccaggcagaggcagggaggctggaagtatgtgctgggttcagggatccaggagttctcaggtgtggccagacctcacacacatggg

SEQ ID NO: 210257 - DNA, 201 bp, Homo sapiens
aaattagccgggcgtggtagcaagtggctgaaatcccagctactcaggaggctgaggcaggacaatcgcttgaaccagggaggtgaaggtttcagtgagcygagatcgtgacactgcactcctgggtgacagagtgagactctgtaaaaaataaaaaataaaaaaataaactgcacacttggtgagaagtaatgagcttcc

SEQ ID NO: 210258 - DNA, 201 bp, Homo sapiens
ggaccccacctgggccctgcagcagctccagcagcttcgctgggccgtctccgaggtaacaccacatttagccacagtggcaggattggaacctcccatgmtgcgcacctcccctcccttgtcctagccaatccttccagccctggggcactagaggccccactttacagaggggaaactgaggttccctttggttacaag

SEQ ID NO: 210259 - DNA, 201 bp, Homo sapiens
atgtgaccacccctcccagtctggttcaggaccagtgggggaagaacagggaatcaaggcaaatctgggcacatcccagacgccgaggagcaggaaagcaraagcaataggaagctcccttctgagacagacagccactccctgggagggttcagccctcctgcctcctgcatgggccctgggcatcctcatcctctctgt

SEQ ID NO: 210260 - DNA, 201 bp, Homo sapiens
atctagcaggtagggatatacccgagtcaagttgggtgtggctctgtccaggtgggcgtggtgtccaggtgggcgtggtatccaggtgggcgtggtatccrggcgggtgtgggtgggcgtggcgtccaggtgggcgtggtatccaggcgggcatggtatcgtgatgaccactgaggatgtggagcccctgccagactgaat

SEQ ID NO: 210261 - DNA, 201 bp, Homo sapiens
gtttctttggctcacagatgtagaggccgggaagtccaaggtggagggctggtgtctagagagggccttctttctgcatcacccatggctgaaggctgagkgcaaaagaacagccggacaagggggttgaacttgcttttctaacaatcccagtcccatgacaatgacattaatctgttcacgagggcagagccttcatgg

SEQ ID NO: 210262 - DNA, 201 bp, Homo sapiens
aagcaaggtcagtgcaatcactttaacaagcaccaaggctggaacacagtgaggtccacggcgagccatggagatgcttgatagaaaacggcacctggccrggtgtggtggctcatgcctataatcctagcactttgaaagtctgaggcaggtagatcacctgaggtcaggagttcaagaccaacctggccgacatggtga

SEQ ID NO: 210263 - DNA, 201 bp, Homo sapiens
aagcaaaaaggaagcatctagaaggttcctggagcttcacttactgatgctcccttctcctccaggaacatgacagcacagaattacacgtatgcaatccrctcccggctcacccatgtgccgcagggccatgacggggagctgctctgccaccggatagagcaggagtaccaagccggccccctggagctgaaccgtgag

SEQ ID NO: 210264 - DNA, 201 bp, Homo sapiens
cctgcccaccctgcccacatgaaggaagggaagcaaaaaggaagcatctagaaggttcctggagcttcacttactgatgctcccttctcctccaggaacaygacagcacagaattacacgtatgcaatccgctcccggctcacccatgtgccgcagggccatgacggggagctgctctgccaccggatagagcaggagtac

SEQ ID NO: 210265 - DNA, 201 bp, Homo sapiens
acccaccactggggtacctcgcctctggcctcagcccaccgtgcctaagtgctgataccccagcgctgaccctgcaggtctgacctggcaactggaagccycagggaagctgaggctgtgtcgctctggggcaggaagagcctccagagacacaagagacagcggctgttgtgaggctccatttccaaacctgtccaagct

SEQ ID NO: 210266 - DNA, 201 bp, Homo sapiens
ggggttgctgcaggtccagcaccatgatgccatcactgggactgagtcccccaaggtgagagacatgtacgcaacgcacctggcctcggggatgctgggcrtgcgcaagctgatggcctccatcgtcctagatgagctccagccccaggcacccatggcggccagctccggtgagcagggccctgcagggaggctgtggcc

SEQ ID NO: 210267 - DNA, 201 bp, Homo sapiens
aagggtcacaccagccatgacactgtaacagttccccaaaaggagctgctggcagaacatgtcattatgttgtgggagaaatgaggtgacttcagggtccwtcagagcagggggtccagagatgggggacaatgagttcccacaagggcaggaaaagttgggcgagctcctcagcttctcttggcctcagttcctccttct

SEQ ID NO: 210268 - DNA, 201 bp, Homo sapiens
ccatccatacatctacctacccacccattcatcatccatccatctacccacccacctatgtacctacccattcatccatccatccactcacccaaccacccattcattcattcattcattcattcatgtattcattcagcagctatttgtggacatcagagtgggcagctgacctcccaagaaagacctcgtggctggttt

SEQ ID NO: 210269 - DNA, 201 bp, Homo sapiens
gaactcctcaccaccacaccaggagatgtagaagcactttcacaaacctcttggcttttgtgatcttgggcagtcattcccctgtgccattctgaaaaccwgctaccccatagccccatgatagcttcttaaaaatgggccaggcaaggtggctcacatctgtaatgccagcactttgggaggccgaggtagcaggatcac

SEQ ID NO: 210270 - DNA, 201 bp, Homo sapiens
catccatacatctacctacccacccattcatcatccatccatctacccacccacctatgtacctacccattcatccatccatccactcacccaaccacccattcattcattcattcattcattcatgtattcattcagcagctatttgtggacatcagagtgggcagctgacctcccaagaaagacctcgtggctggttta

SEQ ID NO: 210271 - DNA, 201 bp, Homo sapiens
cgcagtggctcacacctggaatcccagcacttaggggatccgaggcaggcggattgcttgagcccaggagttcaagaccagcctgggtagcataggaagaycctgtgtctataaaaataaaaatagaaaagttctctggtcatggtggcgtgtgcctgagcctgctttcccaggcacctgcagccgccttgtgaaatggga

SEQ ID NO: 210272 - DNA, 201 bp, Homo sapiens
atccatacatctacctacccacccattcatcatccatccatctacccacccacctatgtacctacccattcatccatccatccactcacccaaccacccattcattcattcattcattcattcatgtattcattcagcagctatttgtggacatcagagtgggcagctgacctcccaagaaagacctcgtggctggtttat

SEQ ID NO: 210273 - DNA, 201 bp, Homo sapiens
cacctccccacttaaccgctgaacctcaagatgcccctggcagggacccccatctgactcatctcagcacccagcatagggtctggcccagaccactgctyactgggcaaggctgggcaaggggtgggtgctgaactgccctgccctgagggtacccaccactggggtacctcgcctctggcctcagcccaccgtgcctaa

SEQ ID NO: 210274 - DNA, 201 bp, Homo sapiens
gaaaagggtggggcgcagtggctcacacctggaatcccagcacttaggggatccgaggcaggcggattgcttgagcccaggagttcaagaccagcctgggyagcataggaagaccctgtgtctataaaaataaaaatagaaaagttctctggtcatggtggcgtgtgcctgagcctgctttcccaggcacctgcagccgcc

SEQ ID NO: 210275 - DNA, 201 bp, Homo sapiens
tccatacatctacctacccacccattcatcatccatccatctacccacccacctatgtacctacccattcatccatccatccactcacccaaccacccattcattcattcattcattcattcatgtattcattcagcagctatttgtggacatcagagtgggcagctgacctcccaagaaagacctcgtggctggtttatc

SEQ ID NO: 210276 - DNA, 201 bp, Homo sapiens; identical to SEQ ID NO: 36996

SEQ ID NO: 210277 - DNA, 201 bp, Homo sapiens
cttggtctagagcagaagcaatcaagtcaccaggcagtaatgacaaggacaagaggaatccccctgcacagcatgatggggggctccccgaggaggcgacwcctgctgggaactgacttgtcctgttgccagagccccagctgcacctcctctgccccctctacaccgtgagcagtggaaaggcagggtcagactgtgcct

SEQ ID NO: 210278 - DNA, 201 bp, Homo sapiens
tgacacgtggtctgatgaagaaatgaattgctctggtgtctgcatgctggctgcgtttgcgtgtgctgtgtcacgttggttgggagctaagttcagagctgggagagagacccacagaccctggggcccacagagcacctgttcttccatgatcagagcagacgtaaggcaggcccggcatggcagccctgcggtgtcggg

SEQ ID NO: 210279 - DNA, 201 bp, Homo sapiens
gcgggatttatatatatgcagtaggtaacagaactggcgctcaagcccatgtgtgcctggcctgggctctttccttaacttgtagtccctagggcgggggmagagtgtgtgtatcagaccacccatctcagatgtcccaggcattctggctgtgaattatgtccacattgggctggttttctcagatatgttggggtaaga

SEQ ID NO: 210280 - DNA, 201 bp, Homo sapiens
ttgatgagggtcttcactgccaccttccttctgtccccaaaggccatcgaggggaagcccaggctgacctccgccgtgtcctgctgcggctctaccacctrtatgaagtgggcgaggacccagtcctgtctcagccagtaacagtgaatctggaggtgaacttccccacccccatccagaccataagccagggaagcaaac

SEQ ID NO: 210281 - DNA, 201 bp, Homo sapiens
tgcagcctctagacctctgaccttcttcttcgggtatctagggtgccaaagcatctcctcaaccaagacccactcctggctgcccgccagggcctggggcrctgggcctgcccgtaagctcacctttccagcctttacctccccaactcctgctcccggcagtcacgccaacaccaccttaattttagatgtgacatttct

SEQ ID NO: 210282 - DNA, 201 bp, Homo sapiens
tggcaggggcaggggcatgtaatgtgcagagctctgagtgccaggaggaggagttgagccccaaaccctctcctcactctgtccatctgccttgcagggamtgcgccgaagctcccaggaccccagcagcaagaggccgtgacgctgcccccgaatcttcacctgcagatcctgagcatccctggctggcgctacagctcc

SEQ ID NO: 210283 - DNA, 201 bp, Homo sapiens
ggtggcccatgcctggaccaatcagcatggcctggggtattgtaagaagatggtagctccagctgaacatctagacctgaaaggagtaggggctgaggtgycttctgagcagagagaccagtagatgacaaaacaggggtggaactggcatcccagatcttgagtagaaaacagggttctggccggacatggtggctcaca

SEQ ID NO: 210284 - DNA, 201 bp, Homo sapiens
agaaggaaaaactgaggcacagcagcccgccccaggtcccacagctggcagacgtggtggagccagcgttggattcaggccaccagctctgcagcctccaygtggtggcagcagtcagccttggtctctgtgcagtcagacggccctgggttcaaatccgcactctgccctggccaggtgcttagcctctcttggaagagg

SEQ ID NO: 210285 - DNA, 201 bp, Homo sapiens
tgttcgtctctcacctgcacttctctctgtctgcagactttccttcacctcccacctgggatgtgactctgaacagctctggggctgctctcaaagagcasctctgtcttccccactcaaaaggacctaagacttggactttccagttccaagtgcaaaagtcctagggaaagattctgattggtcctactggggtcaggt

SEQ ID NO: 210286 - DNA, 201 bp, Homo sapiens
ggcctggtgtttcgtgggtgtagaggagtgtgagaccacagctgggaggaggtcagggatcaggtccagggggtgtcaattaaggttctttggaagtaacrgagcctgaaggggcagctatttgggcagagcctggagaagctcatggaatctaaggaggagctggatacaaggtccagacaggcatggggcagggcagct

SEQ ID NO: 210287 - DNA, 201 bp, Homo sapiens
ccttcatggaggatggcaaaagcaggcttgtgttgctgtcggagcgggcacatggcatctccagccaagggaatgggcaggtggaggtaggaggcacggtstgtcctacagcagcccctcgcggccccctacaggcatgcccaggtgcaagccgggcctctcggacaatgccttcccgcaggtcatgctccaccggcggct

SEQ ID NO: 210288 - DNA, 201 bp, Homo sapiens
cactgctctccaagccctggaggggttccaggcaggttctgtgtggggcgcaggggcagagactgaccctctctgctcactccacctggacgtcctggccrccacatgcaccacctgattcccacagggttcagcctctcaccattgcccaccacatgcagtttcctgcctctggcctttgcacaggtggtgcctcctgct

SEQ ID NO: 210289 - DNA, 201 bp, Homo sapiens
agcgagactctgtctcaaaagtaaaaataaaagacaagttgggtctgaatctaggtgtgctgtcaccaggtgggggtctttctaatctatagtctaacctraaggacttattctgtacctccactgagcttctgtagatcagatcaacaaccatgtagttctgtgtctctataaagtagcagaacatgagaaacattaaac

SEQ ID NO: 210290 - DNA, 201 bp, Homo sapiens
ctggcgctgcagcacaggcccgtggtgctgttcggagacctcgctggtaaaggggcaccctttcagagtaacatcatcactgcctcagcaccagccaggcsagggcgggccttgggaggggcctgtgccctcatgactctgggcagcttttgggcaggaagcgacctcagggacctctagcccaagcccctcatttaacag

SEQ ID NO: 210291 - DNA, 201 bp, Homo sapiens
ttccacaggtacaggcttccaggggctggggtggtagtttggtggcagggagggtatagtccatgtaccctctgcccacttcagtggctgctcggcactgytctccaagccctggaggggttccaggcaggttctgtgtggggcgcaggggcagagactgaccctctctgctcactccacctggacgtcctggccaccaca

SEQ ID NO: 210292 - DNA, 201 bp, Homo sapiens
tgttagctgggcatggtggcgcatgcctgtaatcctgtaatgccagctacacgggagactgaggcaggagaatcgcttgaacccgggaggcagaggttgcrgggagctgagattgcaccgttgcaccccagcctgggtggcaaagcgagactctgtctcaaaagtaaaaataaaagacaagttgggtctgaatctaggtgt

SEQ ID NO: 210293 - DNA, 201 bp, Homo sapiens
tgggcgactacttccgtgccctgcacgctctcaatgtcacctggcgtgtccgcgaccaccacgacttcctgccctattccacaggtacaggcttccagggrctggggtggtagtttggtggcagggagggtatagtccatgtaccctctgcccacttcagtggctgctcggcactgctctccaagccctggaggggttcca

SEQ ID NO: 210294 - DNA, 201 bp, Homo sapiens
ttcacgatgagatttggttggggacacagccaaaccatatcgaggaggttacagataggaaatggagctgagtgtgtaaagcagcgggtatagaccagggrcattggggttggttgatgagggtcttcactgccaccttccttctgtccccaaaggccatcgaggggaagcccaggctgacctccgccgtgtcctgctgcg

SEQ ID NO: 210295 - DNA, 201 bp, Homo sapiens
aagctcccaggaccccagcagcaagaggccgtgacgctgcccccgaatcttcacctgcagatcctgagcatccctggctggcgctacagctccaaccacayggagcactctcagaatctccggaaaggtgaggcaggtgccctggcgtctcagacctgctcctccctccctgagtcaaacaggccaccgggcccaccacca

SEQ ID NO: 210296 - DNA, 201 bp, Homo sapiens
gggatgtgacaagcagttcttcaatgcctcggtgcagtttgccaacatggacccgctgctggaccacatcaacagccatgctgccgagctcggtgtctcgrtgcagtatgccacgctgggcgactacttccgtgccctgcacgctctcaatgtcacctggcgtgtccgcgaccaccacgacttcctgccctattccacagg

SEQ ID NO: 210297 - DNA, 201 bp, Homo sapiens
ctggctgtccacagagttcgtgtcttctgccctaaccttctgccctcgcacaggtcaggattttactggaatggcgtggctgtcttccccaagcctccccmagatggggtgtaccccaacatgagtgagcctgtcaccccagccaacatcaacctctatgccgaggccctggtggccaacgtgaagcagagggccgcctgg

SEQ ID NO: 210298 - DNA, 201 bp, Homo sapiens
gcagctcactgaaggggctggcccggcgagccagcgccttgttgtatgccggggagtccatgttcacacgctacctgtggccggccccccgtgggcatctrgaccccacctgggccctgcagcagctccagcagcttcgctgggccgtctccgaggtaacaccacatttagccacagtggcaggattggaacctcccatgc

SEQ ID NO: 210299 - DNA, 201 bp, Homo sapiens
gtgaatgagcaaacaaatctgtgacccaccgtcggtcatggagtgggagaattcagtctcagggtgaaatgatgtgccaaggtcccaaggctgggagaacrtggcacttgggtgtgagccctggctgtccacagagttcgtgtcttctgccctaaccttctgccctcgcacaggtcaggattttactggaatggcgtggct

SEQ ID NO: 210300 - DNA, 201 bp, Homo sapiens
tctgtgacccaccgtcggtcatggagtgggagaattcagtctcagggtgaaatgatgtgccaaggtcccaaggctgggagaacatggcacttgggtgtgasccctggctgtccacagagttcgtgtcttctgccctaaccttctgccctcgcacaggtcaggattttactggaatggcgtggctgtcttccccaagcctcc

SEQ ID NO: 210301 - DNA, 201 bp, Homo sapiens
cttgtgcaggatgagaatgacatcttctctctcctgcctctgcagacagagtaaccgaacggtgcgcgtgacccaggaattcctggagtaccacgtcaacrgggatgtgaaacagggccccatttccgataactacctgttcacaccgggcaaggccgcggtgcctgcgtgggaagctgtggaaatggagattgtggcggg

SEQ ID NO: 210302 - DNA, 201 bp, Homo sapiens
ctgggtagtttatgaagaaaaaaggtttaatggactcacagttccacctggatagggaggcctcacaatcatggcagaaggcaaatgaggagcaaagtcaygtcttacatggtggcaggcaagagagcgtgtgcaggggaactgccctttacaaaatcatcaggtctcatgagacttattcactatcacaagaacagcaca

SEQ ID NO: 210303 - DNA, 201 bp, Homo sapiens; identical to SEQ ID NO: 37016

SEQ ID NO: 210304 - DNA, 201 bp, Homo sapiens; identical to SEQ ID NO: 37017

SEQ ID NO: 210305 - DNA, 201 bp, Homo sapiens
ccacatgaaggaagggaagcaaaaaggaagcatctagaaggttcctggagcttcacttactgatgctcccttctcctccaggaacatgacagcacagaatyacacgtatgcaatccgctcccggctcacccatgtgccgcagggccatgacggggagctgctctgccaccggatagagcaggagtaccaagccggccccct

SEQ ID NO: 210306 - DNA, 201 bp, Homo sapiens; identical to SEQ ID NO: 37019

SEQ ID NO: 210307 - DNA, 201 bp, Homo sapiens
atttaacagatgggcaaactgagggcaaacagtggctcacttaaggtcatacaactaggaggtacagagctgggactcacccatttcaccatatgcctctkccctgtatcttctccattttcttctctgatgtatcttttcctttcttaatatgacattatgtcaccatgtcactttaggtctggaggcttagcatttaaa

SEQ ID NO: 210308 - DNA, 201 bp, Homo sapiens; identical to SEQ ID NO: 37022

SEQ ID NO: 210309 - DNA, 201 bp, Homo sapiens
gttgcatgagccgagatcaagccactgctatgggagctggtttggggcccctgttggccgccttggagactgggagggcagctggtggagggcagcgatcrgcccacccccactgggcgagcgccctgctcccacggcacaggatgttgctcccatgtccctgcagggatgtgacaagcagttcttcaatgcctcggtgca

SEQ ID NO: 210310 - DNA, 201 bp, Homo sapiens
acaagaatagtatgtgccttggcttgtgcctcggtttcctctcctgtaaaatggctccttcatcaaagggtcattctgaggatccatgagatgatgcgtgrccagggcttggccagggcctgcacccatgtcagctgagctgtatgctaggaagccacagagctggtgtctgaaccccagtctgttggtctccaaagtcag

SEQ ID NO: 210311 - DNA, 201 bp, Homo sapiens
ccacacggagcactctcagaatctccggaaaggtgaggcaggtgccctggcgtctcagacctgctcctccctccctgagtcaaacaggccaccgggcccamcaccagacaggggctcaccttagagctatcatggctctgcaaggtcacctggtttcttatctggcacatggggagagtgaggcccagggagagtcagtga

SEQ ID NO: 210312 - DNA, 201 bp, Homo sapiens
acaacaacggctaccagatgcagcggaggccctacgtttcctatgtgaacaacagcatcgcccgggtatgtcctgcaatgcccacaaggcacgctcccaayggcgcctttcctggacccattaagcatcaaattgcagcagtagaggccagtagaggcctccagtgagaatgtttttttccttttttttaagatggagtct

SEQ ID NO: 210313 - DNA, 201 bp, Homo sapiens
tggtcagacccggtgcacatccaaccatctgcctgtcccggcctgtgcgaccttgcgaggctgctttcctactctgaacccgcagccctcccaaatctacyacagtcggttaagaaaggctttgggttagtctctgcctgccagggctccacacaggcgtgtgtgtgcacttgtacgtgtgcacacgcagaccacacgccc

SEQ ID NO: 210314 - DNA, 201 bp, Homo sapiens
gggggtgccctctgctgacggctcacggttcctgtctgcaggctctgtccgtctcctcgtttgtgacccattctgggacagcatggagtctaaggccacaytggctgtgggtggggtctcagggcttctagatgagctgagtcacatggcctcgtgagtgctacgcaggccactcagatggcatctggagagagaggcttg

SEQ ID NO: 210315 - DNA, 201 bp, Homo sapiens
ggtttcgcttgcagaccacagcctgggtgagccagttccatctcttgggggtgccctctgctgacggctcacggttcctgtctgcaggctctgtccgtctyctcgtttgtgacccattctgggacagcatggagtctaaggccacactggctgtgggtggggtctcagggcttctagatgagctgagtcacatggcctcgt

SEQ ID NO: 210316 - DNA, 201 bp, Homo sapiens; identical to SEQ ID NO: 37005

SEQ ID NO: 210317 - DNA, 201 bp, Homo sapiens
cccttgtcagatttatgatttgcaaatccctcctcccattccatggcttgtctttttactcttttgatggcccctgggggagctttttaaaaggatcgtgyggggaaggggtccagggccagaggcctcaattcttttctttctcctcctccaccagcactcagtagaaccctccacagcctgcctccctttccttcccca

SEQ ID NO: 210318 - DNA, 201 bp, Homo sapiens
tcaattttagaacgttttcattactccagaaagaaacttcatgctgttgagcaatcactcccccacgggccctggcaatcctagactatttctgtctatayggatttacctgttcatacaatatgtggtccttttgcaactcacttctttcacttcacatatttttccccctttttattgattgattgattgattgagaga

SEQ ID NO: 210319 - DNA, 201 bp, Homo sapiens
ttttctgctggtgggggctatcaggtgacagcaggggactcctaggcccctgggggccttcaaggctcagatgtcaagaagcacatgggattttagcctcrctgtacaccttcttccccagaaggctttgggtgaagactcagtggggaccaggagtgtggagccatggaccaggaccccccgggggcagagaggataggc

SEQ ID NO: 210320 - DNA, 201 bp, Homo sapiens
ctgcagaaatgggagaaaccccagcatggtccaagcctgccaggttaggccaggagaggcagaatgtgccctgtccgttcctcactcaggccccatgcccyctctgtacatgccccttagggcagcccacggaccccacatgcctaagccagggtcccacccggcatttccagcactggagctcaggctgtcctgtcccgt

SEQ ID NO: 210321 - DNA, 201 bp, Homo sapiens
tcaccctaaatggtagatggttgaatacacaccaccctacccagcacaggtgacgtccatagcagcttctgtttatcacatacaatcacagctcacacctyactcgccaaggccccgtgggagtgcactgtggagcggactgaacacgcaggggcagctgggtagcagcaagggggcgggtgccctccgactcctgcagag

SEQ ID NO: 210322 - DNA, 201 bp, Homo sapiens
gccacagagctggtgtctgaaccccagtctgttggtctccaaagtcagggtcccagccccatgctgctgctgtgcctatggggagcaccagctggggtggmcagagggtgatgcctgacctaccttgccctttgccccaatcgcccacctggcgatgtttctgtctgcagaattactaccccatggttcagtcggccttca

SEQ ID NO: 210323 - DNA, 201 bp, Homo sapiens
cccagcgaccgctcctcccttccttccttgaatcagagcacggtagaaagctgctgctctatgccgaagtgttcggaaattcttggcagctgcatagaccrcggggctgtcccctaacctttgctcttgtcgcctcctccaccaggagggcccccctccctgtaccccagcttctcacagagctgcaggcacagcttggct

SEQ ID NO: 210324 - DNA, 201 bp, Homo sapiens
cttgtcgcctcctccaccaggagggcccccctccctgtaccccagcttctcacagagctgcaggcacagcttggctgcctcccgcttccagacccctatcyccatcagctgggcctgaggcggggctgactctttctttaggcccctcacagggactagagcagaatggcactcagtaagcaggggtgacaactagaggaa

SEQ ID NO: 210325 - DNA, 201 bp, Homo sapiens
atgcacctgctcgggaagtcacgtctccctggcacctgcattcaattaacatgttagtgcaacaggtgtggaccatcaggaaatgccctctccctagtgcyggctgccaatttctcacttctagagaggcaatgtgataattgccaaaccatcacccaacattcctagtgggtgggggaagagccctcccctgccccactc

SEQ ID NO: 210326 - DNA, 201 bp, Homo sapiens
tgaaaacacacttaaattgtctctcttcaaaaaaaaattttttttaacatggggtccactgtgttgcccaggctggtcttgaactcctgacctcaacatcrtaaagcaagaccctccagctcaggctgtaatggcatttattcccaccaccccctcaccccccaccacctcccactacttcaccctcagcccctgcatcct

SEQ ID NO: 210327 - DNA, 201 bp, Homo sapiens
ccccacaccccttcacaagcccactgccagggaatgtgtgacactgtaggcgtgtcccccacctgcctcctgccccgtgccagcgaggaggctctggggcygtttctcacctgtgccatttcacgcagtgctccccctcattctccaccctcctcctcaagatgcagctgagaagcccctcccgcaggaaatctctgagtc

SEQ ID NO: 210328 - DNA, 201 bp, Homo sapiens
gacacagccctacagacagagctcctcctgtggccaggagctcagcccctgcttgtccccctgcatccccacaggcccagaggtaacaggggaggacagcraggctcagagggagcaccttgccctcagccgcctgctgtggctccctgactccagagcccctgctctttcactcccccatgtgaagtgtgggcaagggat

SEQ ID NO: 210329 - DNA, 201 bp, Homo sapiens
ccaggcagagagcaatgttgtcaaaggatgtttttggcactctcccttttctcatctgtaatctggagtgttcccctgtctcagtttcttactgccttacrtctggactttgctcaaaccctagacttgcccttccatgagaaggaggcgtgatggacacagccctacagacagagctcctcctgtggccaggagctcagc

SEQ ID NO: 210330 - DNA, 201 bp, Homo sapiens
ggtgcctcgtgcatagatagggttgctgtgaaaattcaatgagaagaagtgctctcagcctcctgcccagcacagaggcagggctcagcagatgtcctagmcctctgggtgctgctgtaacagtataccacagaatgggtcattgattaggaaacgaagtttctttggctcacagatgtagaggccgggaagtccaaggtg

SEQ ID NO: 210331 - DNA, 201 bp, Homo sapiens
ctcccaccaggtccctcccacaacatgtggacattatgggagctacaattcacgatgagatttggttggggacacagccaaaccatatcgaggaggttacrgataggaaatggagctgagtgtgtaaagcagcgggtatagaccaggggcattggggttggttgatgagggtcttcactgccaccttccttctgtccccaa

SEQ ID NO: 210332 - DNA, 201 bp, Homo sapiens
cagactcaccagatggtctcagaaagctcttgggctttgagggcaacacccatgaggaattgaggccactagggccaggaccaacctatgaattgccctcrgggtgggcagaaacgccaagaggcccacaggagtcctggcagaaggggatgccataggccgttgccacggtgggagccacagcagactgtagccaggtgc

SEQ ID NO: 210333 - DNA, 201 bp, Homo sapiens
ggcaaggccgcggtgcctgcgtgggaagctgtggaaatggagattgtggcgggacagcttgtgactgagatccggcagtacttctacaggtgcttcccctrgggtgacccccacagcccggcacacagtcagcgcacgcgtgcaggcagctcagtgaatgagggtctgtctttgctctgaaccccagcttccgggccgtgg

SEQ ID NO: 210334 - DNA, 201 bp, Homo sapiens
tgggtggggtctcagggcttctagatgagctgagtcacatggcctcgtgagtgctacgcaggccactcagatggcatctggagagagaggcttgccagccrgtgtctgtaagaccttgtgcaggatgagaatgacatcttctctctcctgcctctgcagacagagtaaccgaacggtgcgcgtgacccaggaattcctgga

SEQ ID NO: 210335 - DNA, 201 bp, Homo sapiens; identical to SEQ ID NO: 36999

SEQ ID NO: 210336 - DNA, 201 bp, Homo sapiens
ggtgcaggggtgacagcagccagcatgggtggctggcaaggggggagttgggcagaggagctgcagaaatgggagaaaccccagcatggtccaagcctgcyaggttaggccaggagaggcagaatgtgccctgtccgttcctcactcaggccccatgccccctctgtacatgccccttagggcagcccacggaccccacat

SEQ ID NO: 210337 - DNA, 201 bp, Homo sapiens
attcagtaaatagtgttactgtctttaaagcaggacgggactttcaaaatcatctaatcccacccacccacctgtctacttacccatctattcacccaccyacttatctacccacccagttatccatccatccacccaattatccacccactcatccatccactcacccacttacccatccatccatacatctacctaccc

SEQ ID NO: 210338 - DNA, 201 bp, Homo sapiens
atcctgctggccttgcagatccagaactcaacagagaccccatctgcgtatgacctgcttattctgaccacaatcccaggcctcagttaccggcactacarcatcagacccactgcaggggcccaagagggcacccaggagccggctgccactgtggcgagcacccttcaatttggccgcaggctgaggagacgcaccagc

SEQ ID NO: 210339 - DNA, 201 bp, Homo sapiens; identical to SEQ ID NO: 37028

SEQ ID NO: 210340 - DNA, 201 bp, Homo sapiens
tcggccttcatggaggatggcaaaagcaggcttgtgttgctgtcggagcgggcacatggcatctccagccaagggaatgggcaggtggaggtaggaggcayggtctgtcctacagcagcccctcgcggccccctacaggcatgcccaggtgcaagccgggcctctcggacaatgccttcccgcaggtcatgctccaccggc

SEQ ID NO: 210341 - DNA, 201 bp, Homo sapiens
tgtattcgtggatctcgggttccagaagaggtcagtggatttgggtttgcttttgggagtcatcactttggttgatgaaggatgattaaaggagctggggktgttcaggagctcccagttcaggaggtgggagtaagagaagctttggggaccccaagaaccagctatcttcaggtcgctgaagggttctcccaggactga

SEQ ID NO: 210342 - DNA, 201 bp, Homo sapiens
tgggtgacagctaggggcccaggggcttctgcccaccttggccctgctgacctcagcccatcagccggtccctgcctcatacgacatgtgccaccgtgagmtcctgcactacaggcagcttccaggctccagtccctgtccgcaccatgccctctgcctgggacgcacaggtcccattcactctggccagcacctgctcaa

SEQ ID NO: 210343 - DNA, 201 bp, Homo sapiens
ctgcttttgtccacaccacccagacaccccacatgggtcaggccaactccggttccagagggcgccagacacgccacccagctgacccttcttggggaggyggaggaggggctgacatcactcattcactcagcaaagctcccgaacgcccatcctgggcccagccctgggctgggtgctgggcccctggacctgagcgag

SEQ ID NO: 210344 - DNA, 201 bp, Homo sapiens; identical to SEQ ID NO: 37004

SEQ ID NO: 210345 - DNA, 201 bp, Homo sapiens
ggtagaggcagggtcttactatgttgcccaggctggtctcaaactcctggcctcaagcaatcctcccaccttggcctcccaaagagctggaattacaggcrtgagccaccacaccaggcctgttcacactcctgtttgctgggcccccttgtatgggctgatccctagaaaggcctcacatgtgggaagctttccgtcact

SEQ ID NO: 210346 - DNA, 201 bp, Homo sapiens
gacaaagtctcaccctgtcatgcaggctggagtgcagtggcacaatcacagctcactgcagcctcaacatcccaagctcaagttgattctcccacctcagyctcctgagtagctgggaccacaggtgcacaccaccatacatggctaatttttttgtttgttttttggtagaggcagggtcttactatgttgcccaggctg

SEQ ID NO: 210347 - DNA, 201 bp, Homo sapiens
gaggctgtgacgcaccttgatgaccagatcctgcagctcacaggtttggccaccctaccctgcacccagggtccctcaggacctccagtggggctgggacrtggtatcagaacccccaggttctgagctctgtctgcccctcttagtggggtcggggaccttaaccagtgaaagcagtgatttgctagtgccatattcatg

SEQ ID NO: 210348 - DNA, 201 bp, Homo sapiens
gtcactccactacagcatgggccctgatttccccatttgtaaaacatccaggcagagagcaatgttgtcaaaggatgtttttggcactctcccttttctcrtctgtaatctggagtgttcccctgtctcagtttcttactgccttacatctggactttgctcaaaccctagacttgcccttccatgagaaggaggcgtgat

SEQ ID NO: 210349 - DNA, 201 bp, Homo sapiens
cattgtctcttctgaccctgcaagggaggccttatcacctttgttttacagaagaggaaactgaggctcagagaagcaaagtggggtttttttcccaacaycacccaattctccacttttctgacaccaactgagtgtcctaaaatcaattcattcctgaattgagtacctggagtgagcacagaccccacgagttagggg

SEQ ID NO: 210350 - DNA, 201 bp, Homo sapiens
gtcctcagcaccatcacccacagtgccgtggggcactctactcaccatttaccaaatgcctttcacagtgacaccccagccaatcctaatggcgggctgayggtgaggcatggtgatgcccagtttcattttgcagatgtagaaactgagatccaaagaaatgcagtaactctctccagggtagatggccaggacttgagt

SEQ ID NO: 210351 - DNA, 201 bp, Homo sapiens
tcatcatcaccaccaccatgaccatctccctcaccattgtgtccactgtcctcagcaccatcacccacagtgccgtggggcactctactcaccatttaccraatgcctttcacagtgacaccccagccaatcctaatggcgggctgatggtgaggcatggtgatgcccagtttcattttgcagatgtagaaactgagatcc

SEQ ID NO: 210352 - DNA, 201 bp, Homo sapiens
ctgtggagcaggagtttttccggctgtggtgggatggcgtcgcctcggaccagcagaaataccaggtaatgaggtcaccaggtgacacagttggcccagtrtcctggcaaagacccaggtggaaaactcaatggggcagttctagccagggccagggccaggctggcataaaccacagggccaaaaccccaccgggctatt

SEQ ID NO: 210353 - DNA, 201 bp, Homo sapiens
ctctcccaccctgcccaaggcccatccagggttttctgggcagttcctagtctggctatgggaggaggcctgagttgggagccgtaagccctgggctcgcygcctgcccggcctgcctccttgggtgaccctggcagaggctgcctctgcagccccagcttctcagctcttccagggctggagcttagcagacttctgggt

SEQ ID NO: 210354 - DNA, 201 bp, Homo sapiens
ttccagggaagcctggagcaggagagggtggggctggcttcagagcaggtggatgtcaggtgcccgctgggaaggggccgggctggtcccctgcggggctraatattggaggccagctcagcgtcctccgccccccaggacaggggtgaaggtggacctgtggtcacctcctggttctgctcaggaccttgggcgaggggc

SEQ ID NO: 210355 - DNA, 201 bp, Homo sapiens
cgataaactcagtggcttaacacaattaaagcttatttctccctcttgtcacagctctttgggttcctcatggttccatgtggttcttcagagcctccatyggtggctctaacctccctgaggtcctcggagtgccctccactggagcagtgggtgagtaagagagcagggctcacccacaggaggttgttaggggccagc

SEQ ID NO: 210356 - DNA, 201 bp, Homo sapiens
gatctcagacagcagggtctgcccagcccctgcagctgttctgcagttttgtttttgtttattggttttaagacaagagcttctgctctgttgcccaggcyggagtgcagtagcgcaatcttggctcactgcaacctccgcctcctgggttcaagcgattcttctgccttagcctcctgagtagctaggattataggcacc

SEQ ID NO: 210357 - DNA, 201 bp, Homo sapiens
agatgcccctggcagggacccccatctgactcatctcagcacccagcatagggtctggcccagaccactgctcactgggcaaggctgggcaaggggtgggygctgaactgccctgccctgagggtacccaccactggggtacctcgcctctggcctcagcccaccgtgcctaagtgctgataccccagcgctgaccctgca

SEQ ID NO: 210358 - DNA, 201 bp, Homo sapiens
ggctggagcttagcagacttctgggtcatgccgtctcaagctcaccatcttcccttgtctcccagaaccattccaggcctggacgggcttctacacgtccygcagctcactgaaggggctggcccggcgagccagcgccttgttgtatgccggggagtccatgttcacacgctacctgtggccggccccccgtgggcatct

SEQ ID NO: 210359 - DNA, 201 bp, Homo sapiens
tggggtagtgactgtgggtgtggccacatctagcaggtagggatatacccgagtcaagttgggtgtggctctgtccaggtgggcgtggtgtccaggtgggygtggtatccaggtgggcgtggtatccaggcgggtgtgggtgggcgtggcgtccaggtgggcgtggtatccaggcgggcatggtatcgtgatgaccactga

SEQ ID NO: 210360 - DNA, 201 bp, Homo sapiens
tctgtgggaaacacctgttggcctgcccccttcctggctcccctgggagttctggagggctgcatctcacctacctcagtttccctcatactgaggtgcakccagtgagcaccccattccagaaggtgagtcacatggcacaagcaaagcctcttctctgtgtgcagatgcaggacctgcaggacattttgcctcggtcta

SEQ ID NO: 210361 - DNA, 201 bp, Homo sapiens
gaaaacaagaacctttttgatgtcctgatgtttcatctaattgctaaatattgtttattaaatacagaagccaagcactcactcatctgcttctagtcaaytaataagcatttcggtcccataaagagtgcgtgattaaatacgtacatcagggattttaatatgcatctgcctagtgagatggattaacccaccactgaa

SEQ ID NO: 210362 - DNA, 201 bp, Homo sapiens
gcgatgacagaggcattgtcaggctgggcgcggtgactcacgcctgtcatcccagcactttgggaggccaaggcgggtggatcacctgaagtcaggagttygagaccagcctgaccaacatggtgaaaccctgtctctactaaaaatacaaaaattagccaggcgtgatggcaggtgcctgtgatcccagctactgaggaa

SEQ ID NO: 210363 - DNA, 201 bp, Homo sapiens; identical to SEQ ID NO: 37082

SEQ ID NO: 210364 - DNA, 201 bp, Homo sapiens
agcctgtgtggcactccttccgcacagtggtgggatttttcggttcggttttgttttcacgcttgcatctggctgcacagccctaactctgagctggttgkttttgtttcccccccactttgcagaattgcctgcttcgaactgttttcccagcaggcctctgaagggtgaggaaaacagcttggggaaagtgagaaaaag

SEQ ID NO: 210365 - DNA, 201 bp, Homo sapiens
aagggtgaggaaaacagcttggggaaagtgagaaaaaggtttcggatgttttagtaaagaggcagctggtgggaaggagccggttgggctgtttctggggygccgaaatctcggtggtgacgttcatttgctcgtgagtgcagaggaggcccagagaccgggttcctggcgcagccagctcctgcttttgttccgaccatc

SEQ ID NO: 210366 - DNA, 201 bp, Homo sapiens
ggttgggctgtttctggggcgccgaaatctcggtggtgacgttcatttgctcgtgagtgcagaggaggcccagagaccgggttcctggcgcagccagctcstgcttttgttccgaccatcttcctgcgccttctgcgagtctcagatgtgcttgggcagcagttctactgttttcccctctgtgatctcaggcccgccgcc

SEQ ID NO: 210367 - DNA, 201 bp, Homo sapiens; identical to SEQ ID NO: 37084

SEQ ID NO: 210368 - DNA, 201 bp, Homo sapiens
cttaccttcattattaatacatctgcaaagaccctttttccaaacaaggtcccatacacaagtaccaggtggatacagattttctttggtaggggaggackcttttcaacccactatagtcatcattgaaatatgcctccttgcactgactgtatcccaacactctgaacgtgcctgggtggtgcattttgatatttaccc

SEQ ID NO: 210369 - DNA, 201 bp, Homo sapiens
aattttgtatttttagtagaggaggggtttcaccatgttgtccagggtggtctcaaactcctgacctcaggtgatccacccaccttggcctcccaaagtgytgagagtacaggcgtgagccgctgtgcctggtgccagcataaaaatctttgctacaggtactgagacctttttcagcctaataataataacaaccgtaac

SEQ ID NO: 210370 - DNA, 201 bp, Homo sapiens; identical to SEQ ID NO: 37085

SEQ ID NO: 210371 - DNA, 201 bp, Homo sapiens; identical to SEQ ID NO: 37088

SEQ ID NO: 210372 - DNA, 201 bp, Homo sapiens
agcttcctggtccgtaaggaaaacactaaactcttctagctaaagttacaaatgcagcaagggtccattctgcaatctgtgatgcttttttttttttttttgagctggggtctcgctaccttgcccaggctgcggtgcagtggcacaatcacggctcactgtgcgttttcagggaagaccccacgggcacctccaaaacca

SEQ ID NO: 210373 - DNA, 201 bp, Homo sapiens
tcattctggccagcgtggtggctggcacctgtaatcccagcactttgggaggccgaggcgggtggatcacctgaggtcaggagttcgagaccagcctggcyaacatggtgaaacctcgagtctactaaaaatacaaaaattagccgagcgtggtggcaggggcctgtaaccccagctactcaggaggctgaggcaggagaa

SEQ ID NO: 210374 - DNA, 201 bp, Homo sapiens
ccttcctctgcttcttcacactggtctcttgcgacgtgtcgttctggtaagagtcatgtgaggcacatccactggcctctcatggatgtgcaattggaaaygtgaaatcgccggccccctgagagcgttttggggagtgtcccccccaaacccccctccccccgcactggggatgctgcaccagtcttgaagaatgaggca

SEQ ID NO: 210375 - DNA, 201 bp, Homo sapiens; identical to SEQ ID NO: 37075

SEQ ID NO: 210376 - DNA, 201 bp, Homo sapiens
gtagcattaatttcagaaatctgtatttctgacttgccctcaggaaacccctttagatgttagaaattcttctgtggatgaagttatctttttttttttttgagacatagtcttgctctgtcgcccaggctggagtgcagtggtgtgatctcggcttactgcaacctccacctcccaggttcaaacgattgtcctgcctca

SEQ ID NO: 210377 - DNA, 201 bp, Homo sapiens
gctcaccacaacctctgcctcccgggttcaagcgattctcctgcctcagcctcccgagtagctgggattacaggcatgtgccaccatgcctggctcattttgtatttttagtgagatggggtttctccatgttggtcaggctggtctcaaactcctgacctcaggtgatagtccaccttggcatcccaaattgctgggatt

SEQ ID NO: 210378 - DNA, 201 bp, Homo sapiens
tctcagctcaccacaacctctgcctcccgggttcaagcgattctcctgcctcagcctcccgagtagctgggattacaggcatgtgccaccatgcctggctmattttgtatttttagtgagatggggtttctccatgttggtcaggctggtctcaaactcctgacctcaggtgatagtccaccttggcatcccaaattgctg

SEQ ID NO: 210379 - DNA, 201 bp, Homo sapiens
gatttgccagaactccaaacaaaaggaatttttttttcttcttgatccctatttatcaacacatgcctctgtgtctttccagttgacttcatctcttgggyagcattaatttcagaaatctgtatttctgacttgccctcaggaaacccctttagatgttagaaattcttctgtggatgaagttatctttttttttttttg

SEQ ID NO: 210380 - DNA, 201 bp, Homo sapiens
tcacccttttgagctcctacaggccctgtctgcaaataaagtcacattggagtttaagggttctgatgatgagtgagggagggcacggctcagtctataaygatgtcctatatctattgcaaagaaaaaatgaaggcactattcaattcctccaaattaggaggtttgccagagcctcagacaaaaggattttttagggag

SEQ ID NO: 210381 - DNA, 201 bp, Homo sapiens
aatggcgtgatctcagctcaccacaacctctgcctcccgggttcaagcgattctcctgcctcagcctcccgagtagctgggattacaggcatgtgccaccrtgcctggctcattttgtatttttagtgagatggggtttctccatgttggtcaggctggtctcaaactcctgacctcaggtgatagtccaccttggcatcc

SEQ ID NO: 210382 - DNA, 201 bp, Homo sapiens
gaatccaggaggtggaggttgcagtgagccgagatcgcaccaccgcacttcagcctgagctacagggtgaaactccatctcaaacaacaacaacaaagaaytaggtgaaaagacctggcgtgctcctgcagcgcaaccagccgtgatcatacaaagaccagaatgctgcaggatggcatgtcatggcccatccctctcatc

SEQ ID NO: 210383 - DNA, 201 bp, Homo sapiens
gtgcaatggcgtgatctcagctcaccacaacctctgcctcccgggttcaagcgattctcctgcctcagcctcccgagtagctgggattacaggcatgtgccaccatgcctggctcattttgtatttttagtgagatggggtttctccatgttggtcaggctggtctcaaactcctgacctcaggtgatagtccaccttggc

SEQ ID NO: 210384 - DNA, 201 bp, Homo sapiens
gagtgcaatggcgtgatctcagctcaccacaacctctgcctcccgggttcaagcgattctcctgcctcagcctcccgagtagctgggattacaggcatgtrccaccatgcctggctcattttgtatttttagtgagatggggtttctccatgttggtcaggctggtctcaaactcctgacctcaggtgatagtccaccttg

SEQ ID NO: 210385 - DNA, 201 bp, Homo sapiens
ggagtgcaatggcgtgatctcagctcaccacaacctctgcctcccgggttcaagcgattctcctgcctcagcctcccgagtagctgggattacaggcatgwgccaccatgcctggctcattttgtatttttagtgagatggggtttctccatgttggtcaggctggtctcaaactcctgacctcaggtgatagtccacctt

SEQ ID NO: 210386 - DNA, 201 bp, Homo sapiens
ctaagaggtgcaccttttctcgatcctgaggctcaagtgtctaaacagcaactgtaaattttctccaatcagtgtttctcccctgtgtggaaataaattckcatccttgaagttcagctctctccttcattttacaaaaaaacaaaaaacaaaaaaacttgttttaagcaagattaaaagtgaattttctattagcagtaa

SEQ ID NO: 210387 - DNA, 201 bp, Homo sapiens
acttgtcaggtacagccctgcaaaaatgccgtgctcactcgcaaacctgtatgttgacacgtgcggcatcgctgcagtcggattaacgtggaagaaagagygtattcctgcgctaggttccctcctccactctgcaaaagtgacccgcaaggaaggtccagccgtccggccccagtgccctttggttgaaagcggagctgc

SEQ ID NO: 210388 - DNA, 201 bp, Homo sapiens
tgaagcagaaggcagatgcactgtgtttgggacgtgtgcggtgtttctgcatatgcagtacttgctcagcaaatgtaggaaccactccagcaaatgcataygaggccaaatgtcccacgtccagttccttaaagcagctccctccaggtctgaggagacaattgctgaaggtgacattggccaaagaagataccgcacgtg

SEQ ID NO: 210389 - DNA, 201 bp, Homo sapiens
atggactttgcactatttatcttagccgtctcccactggagccaaaaacatttccaacttcataagtttcactgcttctcctctcttatatattttttcastctttgctgaaaacattttcattgttttttgaaaagtgcattctaatagttaatttgggagcccatggccttaacacagaagaaagaataccgaatacaa

SEQ ID NO: 210390 - DNA, 201 bp, Homo sapiens
ctgtttgaagctctccgggcacccaagacgttcttgttcaagcctgtgcgcttcccctgctagttctcatctcccttctctcaacactttttccgtgaccstccctgaaagggagttttgggcttggctcaccctggaaagcagctaatcccacatgttgccaacaggttaatgaaggatgaggctgaaggaggaaaaatt

SEQ ID NO: 210391 - DNA, 201 bp, Homo sapiens
agccgccccttcagaaacaccttaaaatccaacctcccgggtcaaagacatttgaaaaaatgacgaagacaacatcaaactatagtctcctgttcaacgcrtgttcacttcctaagacattaaagaaaccaggccgggtgtggtggctcatacctgtcatcccagcactgtggaggccgaggcgggaggatcacctgagat

SEQ ID NO: 210392 - DNA, 201 bp, Homo sapiens; identical to SEQ ID NO: 37081

SEQ ID NO: 210393 - DNA, 201 bp, Homo sapiens
ttctgcgagtctcagatgtgcttgggcagcagttctactgttttcccctctgtgatctcaggcccgccgccccgtcctttcccagtgatttctgctccgtsaaatcgtggggctcacctgagagttttataaaatgaactcgccatgcccctgcctggtgaacagagaatgcaaactctcacaggaccgtctgcagcaaaa

SEQ ID NO: 210394 - DNA, 201 bp, Homo sapiens
ttccagccttgtgagactctaaatggagacatcctgttaatctaaacccaatcttctgacttacagaactgtgagatcataaaggggtgttgttttttaarctactacgtttggggcgttttgttacgcagcagagctagctaagatggatggctccttaagcagctcatttgagggcagagggaggcaagttctgcagac

SEQ ID NO: 210395 - DNA, 201 bp, Homo sapiens
tgttttttaagctactacgtttggggcgttttgttacgcagcagagctagctaagatggatggctccttaagcagctcatttgagggcagagggaggcaasttctgcagacagatgggcatctatattcgctaggttcaagctgttaatgctgctatgtatacccaaatgacctcactaccttctcaccaggcagcaagaa

SEQ ID NO: 210396 - DNA, 201 bp, Homo sapiens
cctcagacgaacagaagtccaacaccttagtctaagtctgtttatgttctcctgataggaaatcttttcatctcataaaaagctgctgatgtaggcctttstcaccctgtaccccacgttactgatgcctgttttgttgccaaactggactggtgtccacttgcctggtgcacttaggtcaaacctccacaatgaggcttt

SEQ ID NO: 210397 - DNA, 201 bp, Homo sapiens; identical to SEQ ID NO: 37086

SEQ ID NO: 210398 - DNA, 201 bp, Homo sapiens
ctggagtgcaatggcgtgatctcagctcaccacaacctctgcctcccgggttcaagcgattctcctgcctcagcctcccgagtagctgggattacaggcatgtgccaccatgcctggctcattttgtatttttagtgagatggggtttctccatgttggtcaggctggtctcaaactcctgacctcaggtgatagtccacc

SEQ ID NO: 210399 - DNA, 201 bp, Homo sapiens
ggctggagtgcaatggcgtgatctcagctcaccacaacctctgcctcccgggttcaagcgattctcctgcctcagcctcccgagtagctgggattacaggcatgtgccaccatgcctggctcattttgtatttttagtgagatggggtttctccatgttggtcaggctggtctcaaactcctgacctcaggtgatagtcca

SEQ ID NO: 210400 - DNA, 201 bp, Homo sapiens
atggcctccagttccatctgtgttgctgcaggagataggatttcctcctttttcatggctgcatagtattccatcaggtatagatatatattttctttatsctttcgtgtgttgttggacacctaggttgtttccatatcttggctcctgtgaatagtgctgcaatgcacataggaatgcaggcatctctttgatacactg

SEQ ID NO: 210401 - DNA, 201 bp, Homo sapiens
aggccggggttcctgcagcagctcaccaaaatgctggcctttgaaaaacttgctctttgtgcattagaaaaagggctggaatcttttttttttttttttttcccatttactgattaaacaacaacagaaggttgttaaagaggacgagcttctggtgaagtcacgtgtctgccaagggaatctgtacccgggtgtgtatcg

SEQ ID NO: 210402 - DNA, 201 bp, Homo sapiens
tactctgccccaaaggatggactttgcactatttatcttagccgtctcccactggagccaaaaacatttccaacttcataagtttcactgcttctcctctyttatatattttttcactctttgctgaaaacattttcattgttttttgaaaagtgcattctaatagttaatttgggagcccatggccttaacacagaagaa

SEQ ID NO: 210403 - DNA, 201 bp, Homo sapiens
tcaggctttcggagggcaggagagcatgtttgtttgaagtaagtaatcagttgcaaggtgaacggtttacagctgctgaacaattgtgtggagtctcgcaraagattatgtttatccgggcagttttgcttacagaaaggtccccttaaacctccttaagggcctgtgtgggccctggcagaagaggccggggttcctgca

SEQ ID NO: 210404 - DNA, 201 bp, Homo sapiens
caaactcctggcctcaagtgattgtctcaccctgacctcctaaagtgttgggattacaggtgtgacccactgcttcctgcctagactttttttttttttttccaattaaggtttttactttgagatcattgtagatttataagcagttgtaagaaataataggaaagaatcttgtgtctacttcccccagtggtaacatct

SEQ ID NO: 210405 - DNA, 201 bp, Homo sapiens
tgttgcccaggctggtcttgaactcctgggctcaagcgatctgcctgccttggcttcccaaagtgctgggattacaggcatgagccactgcgcctgacccrtttgggtctttggagaagcacacaccaagaaggaacatgatgggccagagatttactaggggaactgtgtgtgaagggtcaaacaggcgctggcagaaga

SEQ ID NO: 210406 - DNA, 201 bp, Homo sapiens
gcaggaaaattgcttgaacctgggaagtggaggttgcagtgagccgagatcccctgccctcccctcccctccccttctttttccttcaccttttttcttgyctctcccctttgctctgaagacattatgtctatctggctggttcttcctgtttcattgtcgttttgcagtgcaaatacttgaaaagatattctaaaacaa

SEQ ID NO: 210407 - DNA, 201 bp, Homo sapiens
tcaaactcctggcctcaagtgattgtctcaccctgacctcctaaagtgttgggattacaggtgtgacccactgcttcctgcctagactttttttttttttttccaattaaggtttttactttgagatcattgtagatttataagcagttgtaagaaataataggaaagaatcttgtgtctacttcccccagtggtaacatc

SEQ ID NO: 210408 - DNA, 201 bp, Homo sapiens
ggcaggaaaattgcttgaacctgggaagtggaggttgcagtgagccgagatcccctgccctcccctcccctccccttctttttccttcaccttttttcttktctctcccctttgctctgaagacattatgtctatctggctggttcttcctgtttcattgtcgttttgcagtgcaaatacttgaaaagatattctaaaaca

SEQ ID NO: 210409 - DNA, 201 bp, Homo sapiens
tattttaggttcgggggtacatgtgcaggtttgttccctgggtatattgtgtgatgttgaggtttggagcacaaggatcccgtcacccaggtagtcagcayagcactcaatagttttccaacccttgccccatcccttccttgccccattgaattgctcagtgtttattgttcccatctttatgtccatctgtacttgatg

SEQ ID NO: 210410 - DNA, 201 bp, Homo sapiens
gtgtgctcactggagttcagctccttcaagaaataatctttaaaataaaatcgaggactgcgtgcggtggctcatgcctgtaatcccagcattttgggagrccaaggtgggcagattgcttgaggtcaggagttcgagaccagcctggccaacatggtgaaatcctggttcaaaaattagctgtacgtggtggcacacact

SEQ ID NO: 210411 - DNA, 201 bp, Homo sapiens
cgaggtcaggagatcgagaccatcctggctaacacggtgaaactccatctctactaaagatgcaaaaaaaattagtcaggtgtggtggcgggcacctgtartcccagctactcgggaggctgaggcaagagaatggcatgaacccaggaggcagagcttgcagtgagccgagattgcaccactgcactccagcctgggcaa

SEQ ID NO: 210412 - DNA, 201 bp, Homo sapiens
attttaatgaattttagcatctcttgcatccttgtatccttgcatccagtaccggtccccagccttttagtaactgggctgtgcagcaggaggtgagtagmgtgtgagtgagcaaagcttcatctgtattgacagctgctccccatagctcatattacctcctgagctctgcctcctatgagatcagtggtggcattagag

SEQ ID NO: 210413 - DNA, 201 bp, Homo sapiens
tttacgaccccagggaagacgatgcggaaaattggtgtggcaccctaacaaaatgatgatagtcattaccgaatagatgcggcgacctcattcccagatcrgaacatcaggcccccggggtgtgcagctgagcgccaggcgttcacctccggacaaggagcacggtcatttctcagaggaacgaataacattaggatcttt

SEQ ID NO: 210414 - DNA, 201 bp, Homo sapiens
gtttaccggccagcatgataactaggcgtgacgctgatggccagtgtgttgcatacgtactgggctttattatccatacctggatggaactgaatatatayatatacacacacacatagacacccataatatattatacaatgtaattatatatcatcatatatcatatatattataatatatacagttgacctttgaaca

SEQ ID NO: 210415 - DNA, 201 bp, Homo sapiens
tctacagcgaagcatctggcgagacttggcatgcatgttatcataggtgatgacttttacagttacttgtgttttttgttttttcggttttttttttttttctgagacaggatcgcagtccgtcaacccgtgctggactgcagtggtgcaatcttggctcactgcagcctccacctcctgggttaaagtgattctcctacc

SEQ ID NO: 210416 - DNA, 201 bp, Homo sapiens
gcgatctcagctcactgcaacctccacctcctgggttcaagccattctcctgtctcagcctcctgagtagctggcattacaggcgcccgccaccacacccrgctaatttttgtatttttagtagagatggggtttcagcatattggtcaggccagtctggaactcctgacctcaggtgatccacccgcctcagcctcccaa

SEQ ID NO: 210417 - DNA, 201 bp, Homo sapiens
tcgtctcttctggtcagggtgcagagtggacacatttttttttttttttgagacagagttttactcttgttgcccaggctggagtgcagtggtgcgatctyagctcactgcaacctccacctcctgggttcaagccattctcctgtctcagcctcctgagtagctggcattacaggcgcccgccaccacacccggctaatt

SEQ ID NO: 210418 - DNA, 201 bp, Homo sapiens
cctgagcaggcccggccctccgagtaataactgggaacactcgccgctttgtgagaggacctcgtgtgatcatttgaaggtcgtctcttctggtcagggtrcagagtggacacatttttttttttttttgagacagagttttactcttgttgcccaggctggagtgcagtggtgcgatctcagctcactgcaacctccacc

SEQ ID NO: 210419 - DNA, 201 bp, Homo sapiens
ccacctcccgggttcaggcaattctcctgcctcagcctgctgagtggctgggattacaggcatgcgccaccacgcctggctagttttgtacttttagtagrgacagcatttctccatgttggtcaggctggtctcttaactcccgacctcaggtgattccctcgctttggcatcccaaggtgctgagattgcaggcgtgag

SEQ ID NO: 210420 - DNA, 201 bp, Homo sapiens
gccatagtgtttcaagtcgggtaaatttcaggacagaagctgctccaggcaaaatcatgaggacgaagttctgatttttttatcttgcccaaattcctatstaaagggtctagggagtcattctttacaaaccatgagttctcattagatgggttttatttaaccctatatatcgtaacttactttccaatgtgactctgg

SEQ ID NO: 210421 - DNA, 201 bp, Homo sapiens
ggggtgactttgaacagagtgggaggcaggtttgccttcagcaggttccagctggacttttcctttgagcttcccgcttttggggtgcccagatattttcygttcacagcttccatcaggatacatataccatgtggttaattcagaaaattaggccgggcacagtggctcatgcctgtaatcccagcactttgggaggcc

SEQ ID NO: 210422 - DNA, 201 bp, Homo sapiens
actcacagtctcgagtgagccgcctgcctcggcctgccgaagtgctgggattacaggcatgagacaccctacccagcccccccatttctttttttttttttattaataaacaaatctaaccaccctctctggaccttctatttcccctggggactgtccctgactacagtctccgctgcagcaaatccccatacaggaatt

SEQ ID NO: 210423 - DNA, 201 bp, Homo sapiens
atttctttctaaatatttaacaagcaaactgcaactttagccacatgaatcattctttaatcctttgatcatcatctgcaaatttggattaaaaataaccrcggggcattgctcgagtgatactgcctttatataagagacaacattgtggaaactttaaaattatagagcagaagaatatgcattagcctggaaatgaaa

SEQ ID NO: 210424 - DNA, 201 bp, Homo sapiens
cccggcctcttttaaattttttagagaccaggtcttgctctgtcaccctggctgctgtgcattttttttttttttttgtagaaacggcatcttgctgttcrcccaggttggtcttgtgcgctggaattatgacacaatcactggctgcaaccttgaaatcctggcctcaagtgattctcccacctctgcctcccaaagtgc

SEQ ID NO: 210425 - DNA, 201 bp, Homo sapiens
tcttggatattgctcaagaagtaattcaaggtaagtcataagagtacagggaagttttagtttattagaaactattccattacatgctgggtgtggtggcycatacctgtaatcccagcactttgggcggccgaggtgggcagattacctgaggtcaggagtttgagaccagccaggccaacatggtgaaatcccatctct

SEQ ID NO: 210426 - DNA, 201 bp, Homo sapiens
ggattacaggcgtgagccaccacgcccggcctcttttaaattttttagagaccaggtcttgctctgtcaccctggctgctgtgcattttttttttttttttgtagaaacggcatcttgctgttcgcccaggttggtcttgtgcgctggaattatgacacaatcactggctgcaaccttgaaatcctggcctcaagtgattc

SEQ ID NO: 210427 - DNA, 201 bp, Homo sapiens
ccgttctcctgcctcagcctcccgagtaaatgggaccacaggtgcccgccaccacgtctggctaattttttttttattttttatttttttttagtagagayggggtttcaccatgttggccaggatggtcttgatctcctgacctcgtgatccacctgcctcggcctctcaaagtgttgggattacaggcgtgagccacca

SEQ ID NO: 210428 - DNA, 201 bp, Homo sapiens
cttatctatgtaaaagctaggttatgtctgacggcgtgacatttattccttagttgatttagagagagccatcctttgcattttcgcgcccaagcacgtcmatgcatgactgtaattatctttaacagcatatgtggttacgcgatatggcgacatccagacattccgctgtcgtctgtgtttgtccttggaggcattatt

SEQ ID NO: 210429 - DNA, 201 bp, Homo sapiens
gtggtcacagctacttgggaggctgaggctgaaggatcgcctgagcccaaggaggttgaggctgcagtgagctagcatcatgccactgcactccaggttgrgcaatcgcctgggtgtgaccctgtctcaaccacaataaatttaaaaagataggaaatttcaatatgaaaatcagtgtcccccagaatgttccatttcttc

SEQ ID NO: 210430 - DNA, 201 bp, Homo sapiens
tatctatgtaaaagctaggttatgtctgacggcgtgacatttattccttagttgatttagagagagccatcctttgcattttcgcgcccaagcacgtccawgcatgactgtaattatctttaacagcatatgtggttacgcgatatggcgacatccagacattccgctgtcgtctgtgtttgtccttggaggcattattaa

SEQ ID NO: 210431 - DNA, 201 bp, Homo sapiens
tgagtgtgggagttggaggctgcagtgagctgtgaccacagcctgggcaaccaagcgagaggtgctgtgtctaaaaatacaaacataaaaattagccaaaygtggtggcacgcgtgtgtggtcacagctacttgggaggctgaggctgaaggatcgcctgagcccaaggaggttgaggctgcagtgagctagcatcatgcc

SEQ ID NO: 210432 - DNA, 201 bp, Homo sapiens
ctctgcaggggccgggaagggggtctgtgatccctgcagggttgttgggggcagggaagtggaggggtaggtttggtgggtggtgtctgtggcctggcagsaattggggtggggtctgtggtctcagtaggaactggggtgtggggtccgtgcttggggcaggttctgtggtgtcagcaggaactggggtgtggggtccgt

SEQ ID NO: 210433 - DNA, 201 bp, Homo sapiens
aataacagaaatttatttctctatagtactggaggcagaaatgtttacatccaggtggcaccatggttgggtacttgagaggttcctcttcttggtttacrgatggtctcgcagggcagagagagaggggggtggagcacgagggagcatgtgtgccctggtgtctcttcttacaagggcacgaatcccaacataaggatc

SEQ ID NO: 210434 - DNA, 201 bp, Homo sapiens
caaactccatctctactaaaaatagaaaaaattagtatgtgcttatattcccagctactcaggaggcagaggtgggaggatcacttgagtgtgggagttgsaggctgcagtgagctgtgaccacagcctgggcaaccaagcgagaggtgctgtgtctaaaaatacaaacataaaaattagccaaacgtggtggcacgcgtg

SEQ ID NO: 210435 - DNA, 201 bp, Homo sapiens
cttcatccttatcgtcttcaccttgagtagcctaagatgagagcggagaggagggattggtcttgctggctccggggtggcagaggtagaagaaaatgccygtagaagtggacccgtgcaattcaaacctgtgttgtttaagggttaactggaccatagatggggtggcataaataacagaaatttatttctctatagtac

SEQ ID NO: 210436 - DNA, 201 bp, Homo sapiens
ggcaacatggccaaactccatctctactaaaaatagaaaaaattagtatgtgcttatattcccagctactcaggaggcagaggtgggaggatcacttgagygtgggagttggaggctgcagtgagctgtgaccacagcctgggcaaccaagcgagaggtgctgtgtctaaaaatacaaacataaaaattagccaaacgtgg

SEQ ID NO: 210437 - DNA, 201 bp, Homo sapiens
gaagagaaaatatatttactatttctgaagtgggagtggatcgtcatgaaggtcttcatccttatcgtcttcaccttgagtagcctaagatgagagcggasaggagggattggtcttgctggctccggggtggcagaggtagaagaaaatgcctgtagaagtggacccgtgcaattcaaacctgtgttgtttaagggttaa

SEQ ID NO: 210438 - DNA, 201 bp, Homo sapiens
ctcccagccccacccagatcagaggttcagaacctgaatcttcggatttctggagatgcccccatcctatcagaggcttctagtgtgtttctttatattcstgtagacttgggaggatgacaggagagaaacctttgaaggtggcctgtgcagttccagggcccagggtggaaggggcttgcatccctggctgcctttgtg

SEQ ID NO: 210439 - DNA, 201 bp, Homo sapiens
gaattcctgggctgaagcgatcctcctgcctcagcctcccatgtagctgggagtacaggtgcatgccaccatacccagctaattttttgttttttttttttagagatggggtttcattctgttgcccaggcttatctcaaactcctggcctcaagtgatcctccttcctcagccttccatagcattgtgattccagacatg

SEQ ID NO: 210440 - DNA, 201 bp, Homo sapiens
taacatattcacataatcctaactctgacctatatcacctcacctagttttttttgtggggagaatatgtcaaatctacttttagtcattgtgaaagacgygatgtattattaactatcatcactgtggtgtgatagatcttggaatttatttgttttatctaactgaaaaaaattaattttaatgtaatttatgtatttt

SEQ ID NO: 210441 - DNA, 201 bp, Homo sapiens
ctggaatcctttccttggaaacttggaaccccttgtgtcatggtcatataaactgtgttgaattaagaggagacactgttaaatatatcacagctgtcctygaaactgggacttgttttgctttctgcctggaaatgcaagtcatttttatagaaaatttatttttcgttaacaaaaaataattgtatacatatatatggt

SEQ ID NO: 210442 - DNA, 201 bp, Homo sapiens
cctggccttctgtgatcctccttcctcagccttccatagcattgtgattccagacatgagccaccgctcctggcctccaactgaaatgttatgttctttgmcaaacacttcatgaagcattcttccctggcaaccaccattgcactctctgcgtttatgcgttcagcttttttagattctacctatgagatgatacgatat

SEQ ID NO: 210443 - DNA, 201 bp, Homo sapiens
cttctctcaaactcctggccttctgtgatcctccttcctcagccttccatagcattgtgattccagacatgagccaccgctcctggcctccaactgaaatkttatgttctttgccaaacacttcatgaagcattcttccctggcaaccaccattgcactctctgcgtttatgcgttcagcttttttagattctacctatga

SEQ ID NO: 210444 - DNA, 201 bp, Homo sapiens
gagcagctaatgctcacatactgtcatccagccagtggctcatttagccaattaacacgctgatttcaaaagcattgtgaaaatatcactgcacacactamctagcttctgaccatcccttcccttcccttcctggcatatttctccagcgtaatctctgctcatagcctttcttacgagctacccacacccttgagcttc

SEQ ID NO: 210445 - DNA, 201 bp, Homo sapiens
tgttttcctagaatcccagctgacatagagcagctaatgctcacatactgtcatccagccagtggctcatttagccaattaacacgctgatttcaaaagcrttgtgaaaatatcactgcacacactaactagcttctgaccatcccttcccttcccttcctggcatatttctccagcgtaatctctgctcatagcctttct

SEQ ID NO: 210446 - DNA, 201 bp, Homo sapiens
cagcattatttgcaatagcaaagacatgggaattaagctagatacccatcagtggtagactgggtaaagaaaatgtggtacatgtacgtcgtggaatactrtgcagctgtaaaaaagaacaagatcttattattttttgcaggaacatggatggagctggagatcattgtccttagcaaactaatacaagaacataaaagc

SEQ ID NO: 210447 - DNA, 201 bp, Homo sapiens
gaaaataggcggctgggtccggtgactcacgcctgtaatcccagccagggcacgcgaatcacctgaggtcaggagttcgagaccagtctagcgaacatggygaaactccgtctctactaaaaataccaatattagccaggcatggtggcaggtgcctagaattccagctacttgggaggctaaggcagggagaatcacttg

SEQ ID NO: 210448 - DNA, 201 bp, Homo sapiens
ttgtaggcttgtagatgccatcttctcactgtgtcctcgcagggtcgtcactctgtgtgtctgtgtcctcatctcctcctcttttttttttttttttttttgagacggagtctcgctctgtcgcccaggctggagtgcagtggcgggatctcggctcactgcaagctccacctcccaggttcaagcgattttcctgcctca

SEQ ID NO: 210449 - DNA, 201 bp, Homo sapiens
cttccaccacggcctcccaaagtgctgggattacaggactgaacctggccttgctgtggtctgtttcgagaagactttgtttttcgttttttgttttttgktttttttgagatggagtctcgctgttgtcacccgggctagagtgcaatggcgtgatctcggctcactgcaacctccgcctcccgggttccagcaattctc

SEQ ID NO: 210450 - DNA, 201 bp, Homo sapiens
agtttgtacctaccataagttatgatgatcattatagcattactgataacattttaaaaacttttattgagctgggtgcggtagctcacacctgtaatccyggcactttgggaggctgaggcaggtgtatcacgaagtcaggagtttgagactagcctgaccaacatggtgaaatcccatctctactaaaaatacaaaaat

SEQ ID NO: 210451 - DNA, 201 bp, Homo sapiens
aaccacagatttaggtctttataagaccttggtaagcagttgtggattctatagtttgtacctaccataagttatgatgatcattatagcattactgatarcattttaaaaacttttattgagctgggtgcggtagctcacacctgtaatcctggcactttgggaggctgaggcaggtgtatcacgaagtcaggagtttga

SEQ ID NO: 210452 - DNA, 201 bp, Homo sapiens
gggagatggaggttgcagtgagctgagatcgtgccactgcactccagcctgggtgacagggcgagactctgtctccaaaaagaaaaacaaacaaaaaaaaacaaaaactaaacacataggagagtcccttagcccctcacgaatactccacacacacatctagtccagctgcatcttgttgactcacaagacatcaagata

SEQ ID NO: 210453 - DNA, 201 bp, Homo sapiens
tgtgagcctgtagtcccagctacttaggaggctgaggcaggggaatcgtttgaacctgggagatggaggttgcagtgagctgagatcgtgccactgcactscagcctgggtgacagggcgagactctgtctccaaaaagaaaaacaaacaaaaaaaaacaaaaactaaacacataggagagtcccttagcccctcacgaat

SEQ ID NO: 210454 - DNA, 201 bp, Homo sapiens
acccccatgaatccctcagagagtgacttcagtatccaaggagagcatttgctgtttttttattttatttaatttatttattttttttgagactgagtctygctctgttgcccaggctggagtgcgttggcgcgatctcagctcactgcaagctccgcctcccaggttcatgccgttctcctgcctcagcctcccgagtaa

SEQ ID NO: 210455 - DNA, 201 bp, Homo sapiens
actaggatacatttcatccttataaaacccccatgaatccctcagagagtgacttcagtatccaaggagagcatttgctgtttttttattttatttaattwatttattttttttgagactgagtctcgctctgttgcccaggctggagtgcgttggcgcgatctcagctcactgcaagctccgcctcccaggttcatgccg

SEQ ID NO: 210456 - DNA, 201 bp, Homo sapiens
ttcaagtgattctcctgcctcagcctcctgagtagctgggactgcaggcacctgccatcaagcctggctaagtgttgtgtttttagtagggacggggtttyattatgttgcccaggctggtctcgaactcctgacttcgggtgatccgcccacctcggccttcctaagtgatgggattacaggcgtgagccaccgcgccca

SEQ ID NO: 210457 - DNA, 201 bp, Homo sapiens
aactcagctttcaaaattccttgggcgtctactgcttgttgaagtttcccacctctttctgagtcagtttagacagcttttccctttaggtaattgtctgtttcatcaagctttggaattaatgagcttggttacaaattctcttttctccctgttggactcctggcattgctcttgatttcgtctgaaagtctctcatga

SEQ ID NO: 210458 - DNA, 201 bp, Homo sapiens
gtgtggggggtccctgctggggtctgtggtcctgaagggggggtcctgactggggtcagtggtcctgggggcgtcctggctggggtctgtggtcctggggsggggggtcctggctgaagtctatggtccttgcaggggggggttcctggctggagtctgtggtcctggggggggtgtcctggctggggtcggttgtccgct

SEQ ID NO: 210459 - DNA, 201 bp, Homo sapiens
taactcagctttcaaaattccttgggcgtctactgcttgttgaagtttcccacctctttctgagtcagtttagacagcttttccctttaggtaattgtctgtttcatcaagctttggaattaatgagcttggttacaaattctcttttctccctgttggactcctggcattgctcttgatttcgtctgaaagtctctcatg

SEQ ID NO: 210460 - DNA, 201 bp, Homo sapiens
ctaactcagctttcaaaattccttgggcgtctactgcttgttgaagtttcccacctctttctgagtcagtttagacagcttttccctttaggtaattgtctgtttcatcaagctttggaattaatgagcttggttacaaattctcttttctccctgttggactcctggcattgctcttgatttcgtctgaaagtctctcat

SEQ ID NO: 210461 - DNA, 201 bp, Homo sapiens
tctaactcagctttcaaaattccttgggcgtctactgcttgttgaagtttcccacctctttctgagtcagtttagacagcttttccctttaggtaattgtctgtttcatcaagctttggaattaatgagcttggttacaaattctcttttctccctgttggactcctggcattgctcttgatttcgtctgaaagtctctca

SEQ ID NO: 210462 - DNA, 201 bp, Homo sapiens
cttctttgacatgtccagacttcaggaaacttcagagaacaacttcatcctgtgcatcgggagacacagaggaagcaggagggggaagttagagagatcttgaggcttcttcagttcagcaggacaaagcaccgtactttggggtgttggtttttaagacccagcagctgaaagctcccacatttctgcaatgatcttcgt

SEQ ID NO: 210463 - DNA, 201 bp, Homo sapiens
ggcccttgtcctgttcacctaccacctccagcggctgctggcggctgagggaagccacgtgaccgccaacgtggtggaccccggggtggtcaacacggacstctacaagcacgtgttctgggccacccgtctggcgaagaagcttctcggctggttgcttttcaaggtaagccccttctgcttctctgattcacggctgca

SEQ ID NO: 210464 - DNA, 201 bp, Homo sapiens
cagcctacgcccagagcaagctggcccttgtcctgttcacctaccacctccagcggctgctggcggctgagggaagccacgtgaccgccaacgtggtggaycccggggtggtcaacacggacctctacaagcacgtgttctgggccacccgtctggcgaagaagcttctcggctggttgcttttcaaggtaagccccttct

SEQ ID NO: 210465 - DNA, 201 bp, Homo sapiens
cggagtctcactgtgttgcccaggctggagtgcagtggcacaatctcggctcacggcaacttccgcctcccaggttcacgccattctcccgcctcagcctmctgagtagctgggactacaggcacgtgccaccacgcccatctaatttatgtatttttagtagagatggggtttcaccatgttggccaggacggtctcgat

SEQ ID NO: 210466 - DNA, 201 bp, Homo sapiens
cttgcagtcacgggaacatcccttactcagtcctctctggtcaccgatggggcatgacaggaggcgctacatgtttccaagcagccggggttccagatgcwtggaaattctgcgtgcggcctctctatgggaaaaagggaggtctgccaggagtggaaccccagtgagaaagtaaactcaaaacagaaatgaaaggtttct

SEQ ID NO: 210467 - DNA, 201 bp, Homo sapiens
agactccgtctctctgtctctctctttctttctctctctctctcacacacaaaataaataaataaataaataaataaataaataaataagtaattgattatctatatactttttccaaaccatcaaggacaatctagatcaagaatctggaaactgttgaccctggaacatatctgacccttaacttgtttttctcattaa

SEQ ID NO: 210468 - DNA, 201 bp, Homo sapiens
aagactccgtctctctgtctctctctttctttctctctctctctcacacacaaaataaataaataaataaataaataaataaataaataagtaattgattatctatatactttttccaaaccatcaaggacaatctagatcaagaatctggaaactgttgaccctggaacatatctgacccttaacttgtttttctcatta

SEQ ID NO: 210469 - DNA, 201 bp, Homo sapiens
caagactccgtctctctgtctctctctttctttctctctctctctcacacacaaaataaataaataaataaataaataaataaataaataagtaattgattatctatatactttttccaaaccatcaaggacaatctagatcaagaatctggaaactgttgaccctggaacatatctgacccttaacttgtttttctcatt

SEQ ID NO: 210470 - DNA, 201 bp, Homo sapiens
agtctggctctgtcgccctggctggagtgcactggcgtgatctcagctcactgcaagctccacctcccgggttcaagcgatcctcctgcctcagcctcccragtcgctgggattacaggtggcacacaccaccacgcccagctaaattttgtatttttagtagagatgcggtttcaccatgttggccaggctggtcttgaa

SEQ ID NO: 210471 - DNA, 201 bp, Homo sapiens
gagcaagactccgtctctctgtctctctctttctttctctctctctctcacacacaaaataaataaataaataaataaataaataaataaataagtaattgattatctatatactttttccaaaccatcaaggacaatctagatcaagaatctggaaactgttgaccctggaacatatctgacccttaacttgtttttctc

SEQ ID NO: 210472 - DNA, 201 bp, Homo sapiens
ctgtcgccctggctggagtgcactggcgtgatctcagctcactgcaagctccacctcccgggttcaagcgatcctcctgcctcagcctcccgagtcgctgrgattacaggtggcacacaccaccacgcccagctaaattttgtatttttagtagagatgcggtttcaccatgttggccaggctggtcttgaactcctgacc

SEQ ID NO: 210473 - DNA, 201 bp, Homo sapiens
acagagcaagactccgtctctctgtctctctctttctttctctctctctctcacacacaaaataaataaataaataaataaataaataaataaataagtawttgattatctatatactttttccaaaccatcaaggacaatctagatcaagaatctggaaactgttgaccctggaacatatctgacccttaacttgttttt

SEQ ID NO: 210474 - DNA, 201 bp, Homo sapiens
tgacagagcaagactccgtctctctgtctctctctttctttctctctctctctcacacacaaaataaataaataaataaataaataaataaataaataagtaattgattatctatatactttttccaaaccatcaaggacaatctagatcaagaatctggaaactgttgaccctggaacatatctgacccttaacttgttt

SEQ ID NO: 210475 - DNA, 201 bp, Homo sapiens
gtgacagagcaagactccgtctctctgtctctctctttctttctctctctctctcacacacaaaataaataaataaataaataaataaataaataaataartaattgattatctatatactttttccaaaccatcaaggacaatctagatcaagaatctggaaactgttgaccctggaacatatctgacccttaacttgtt

SEQ ID NO: 210476 - DNA, 201 bp, Homo sapiens
ggtgacagagcaagactccgtctctctgtctctctctttctttctctctctctctcacacacaaaataaataaataaataaataaataaataaataaataagtaattgattatctatatactttttccaaaccatcaaggacaatctagatcaagaatctggaaactgttgaccctggaacatatctgacccttaacttgt

SEQ ID NO: 210477 - DNA, 201 bp, Homo sapiens
cctggtgacagagcaagactccgtctctctgtctctctctttctttctctctctctctcacacacaaaataaataaataaataaataaataaataaataaataagtaattgattatctatatactttttccaaaccatcaaggacaatctagatcaagaatctggaaactgttgaccctggaacatatctgacccttaact

SEQ ID NO: 210478 - DNA, 201 bp, Homo sapiens
gtagagaggatgtttttctcaagagttaccctgttttgactatggtagccacaccccagtgatgtacatgtgtttctctattttccatttcataaccaccrttatgtaggtgaatccttgatctgacacacagtgcctgtctttccctatgaatggcttagtgatttgcctggaaatcttagcttgctgtagtgtgtgtgt

SEQ ID NO: 210479 - DNA, 201 bp, Homo sapiens
tagcataaccctagccatccaccacatgctatcacttgattctgattgctgttttgaggattctttttgtcccaatctctaattagttttttaaaataagygttttgtagagaggatgtttttctcaagagttaccctgttttgactatggtagccacaccccagtgatgtacatgtgtttctctattttccatttcataa

SEQ ID NO: 210480 - DNA, 201 bp, Homo sapiens
agggtttcaccatgttggtcaggctggtcttgaactcctgccctcgtgatccgcccaccttggcctcccaaagtgctgggattacaggcgtgagccaccaygcctggccccattataaccctcttgcatagtctatccttcactcttgcgaaatgtttaatgagatgttgaataaatgttaatatgctttgtatctttttt

SEQ ID NO: 210481 - DNA, 201 bp, Homo sapiens
atgtataattgagaacaagtggtatttaattttccgtttctgtgttaattcacttaggataatggcctccagctgcatctgtgttgctgctaaaaacatgmtttcattcttttttatggctctatactattctacggtatatatgcaccaactacattttcttcatccaacacataattgatggacacctgggctgattcc

SEQ ID NO: 210482 - DNA, 201 bp, Homo sapiens
cgatagcccaaaaggctcaagcataagagcatgagtctgatctggtgaccagggctcagcaaagagtctttccaggccttgaacctctggacatctgttgrtgctcattggacaggctaaaagtcatcatgttacgaatcgatgaagttgagatgcagataaaaggtataaggaaaaaatgaactctccacatcattgtat

SEQ ID NO: 210483 - DNA, 201 bp, Homo sapiens
agacaggatcgcagtccgtcaacccgtgctggactgcagtggtgcaatcttggctcactgcagcctccacctcctgggttaaagtgattctcctacctcarcctcccgagtagctgggtttacagacatgcaccaccacgcctggataatttttgtatttttagtagagacagagtttccatatgctggccaggctggtct

SEQ ID NO: 210484 - DNA, 201 bp, Homo sapiens
gggtcagagaggaaatatttttggctccgcggaccatgcattctctgtctctcaacaacttagttttgccgttgtgtctaaaagcatccattgctgggtgyggtggctcacatctgtcatcccagcactttgggaggccgaggcgggtggatcgcctgaggtcaggagttcaagaccagcctggccaacatggtgaaaccc

SEQ ID NO: 210485 - DNA, 201 bp, Homo sapiens; identical to SEQ ID NO: 37077

SEQ ID NO: 210486 - DNA, 201 bp, Homo sapiens
gctgatttcctttcctttgggtacacacccagtggtgggatgtctggatcctgcacaccattctttcctctgatgttttgcaggcctatggctggaccttyggaacgtcttcactatgtacaaggtggcggtcccttggccacattcttagggaacgttttcagtgtgtacatggtgtcggtcccttggctatatgcttag

SEQ ID NO: 210487 - DNA, 201 bp, Homo sapiens; identical to SEQ ID NO: 37080

SEQ ID NO: 210488 - DNA, 201 bp, Homo sapiens
gcctggtgacagagcaagactccgtctctctgtctctctctttctttctctctctctctcacacacaaaataaataaataaataaataaataaataaataaataagtaattgattatctatatactttttccaaaccatcaaggacaatctagatcaagaatctggaaactgttgaccctggaacatatctgacccttaac

SEQ ID NO: 210489 - DNA, 201 bp, Homo sapiens
agcctggtgacagagcaagactccgtctctctgtctctctctttctttctctctctctctcacacacaaaataaataaataaataaataaataaataaataaataagtaattgattatctatatactttttccaaaccatcaaggacaatctagatcaagaatctggaaactgttgaccctggaacatatctgacccttaa

SEQ ID NO: 210490 - DNA, 201 bp, Homo sapiens
ctagcctggtgacagagcaagactccgtctctctgtctctctctttctttctctctctctctcacacacaaaataaataaataaataaataaataaataaataaataagtaattgattatctatatactttttccaaaccatcaaggacaatctagatcaagaatctggaaactgttgaccctggaacatatctgaccctt

SEQ ID NO: 210491 - DNA, 201 bp, Homo sapiens
gaatatatcagcctgttggcatatgtatctatgtgtgtgagatcagcctgttggcatatgtatctatgtgtgtgagatcagcctgttggcatatgtatctrtgtgtgtgtgtgtgtgtgtgtgtgtgtgcgcgctctgaggatattggcactttttaatcttcttccattagacgacaaggctgagggcttccacttgccg

SEQ ID NO: 210492 - DNA, 201 bp, Homo sapiens
attcacttaggataatggcctccagctgcatctgtgttgctgctaaaaacatgctttcattcttttttatggctctatactattctacggtatatatgcascaactacattttcttcatccaacacataattgatggacacctgggctgattccctcatgcctcccaagattgaatcaggaagaaatcagatccagaacag

SEQ ID NO: 210493 - DNA, 201 bp, Homo sapiens
cagagttcgagaccagcctggccaacatggtaaaaccctgtctctactaaaaatacaaaaattagctgggtgtggtggcacaggcctgtaatcccagctayttgggaggctgaggcaggagaattgcttgaacctgggaggtggaggttgtagtgagctgaaatcatgccactgcactctagcctggtgacagagcaagac

SEQ ID NO: 210494 - DNA, 201 bp, Homo sapiens
gtatatatgcaccaactacattttcttcatccaacacataattgatggacacctgggctgattccctcatgcctcccaagattgaatcaggaagaaatcaratccagaacagactcatttcataacaagttatgaaattgaatcagtaatttacaaaaacctatcaatcaaaaaaaaaaaaaaaagccccaagaccagaca

SEQ ID NO: 210495 - DNA, 201 bp, Homo sapiens
acacatgggcctcccagatagtcggtgcgtttccagaaatgacggtgtgttgtggttcacagcctctttgggttttggtctccaactcccagcctcaggcratcctcctacctgagcctcccaaagtgctgggatgacaggcacagtgagccaccatacccagctattttttgaaaactcatagtctcatatttccctaat

SEQ ID NO: 210496 - DNA, 201 bp, Homo sapiens
tcttcatccaacacataattgatggacacctgggctgattccctcatgcctcccaagattgaatcaggaagaaatcagatccagaacagactcatttcatracaagttatgaaattgaatcagtaatttacaaaaacctatcaatcaaaaaaaaaaaaaaaagccccaagaccagacaaattcacagctgaattcgaccag

SEQ ID NO: 210497 - DNA, 201 bp, Homo sapiens
tgaatcacgtacattgtacccgagaggtaatttctcatcccttgctcctcttccacctcccacccttctgagtctccagtctctgttattccactctttccatgtggacacattatttagctcctgcttataagtaagaatgtaggaggtcggtcagggtggtaggaaaaattgtagaagatgcaaaccttcttgggaggc

SEQ ID NO: 210498 - DNA, 201 bp, Homo sapiens
tgcctcccaagattgaatcaggaagaaatcagatccagaacagactcatttcataacaagttatgaaattgaatcagtaatttacaaaaacctatcaatcaaaaaaaaaaaaaaaagccccaagaccagacaaattcacagctgaattcgaccagatgtacaaagaagagctggttccaatctgactgaaacgattctaaa

SEQ ID NO: 210499 - DNA, 201 bp, Homo sapiens
ttgggagcccatggccttaacacagaagaaagaataccgaatacaatgataggatatcaaacagcatggtctcttccttgtgttagagtgtgtaaattcaatacgccgtgttgactcagtattcaggaatgccaaagagagggattatttggtaatgtattttcatggagacccggggacggtgctgtactacagaacacc

SEQ ID NO: 210500 - DNA, 201 bp, Homo sapiens
tctgaagtcctaggggtgaggatctcaatgtatgaatttgagggggacaaaattcagcccatgacaaccagtgtttctttccaaggggctacctgaaaacrtttctgcaacccccagcaagctggcatcgtctcagcatcttgccatggggttccctccatgcctcccaatggctcctttgagtaagaccaaggacaaacc

SEQ ID NO: 210501 - DNA, 201 bp, Homo sapiens
tggtttaaacaaaagatacttattctctcacagctgtagaggctacatgtctgaggtcaccgtgtcggtaggcttgctttctctctggcttgtagacgccrtcttctccctgtgtcctcacagagtccttcctctgtgtgtgtctgtgtcctcatctcttcttatgaaatgtcttagtctatttcaggctgctgtcacaga

SEQ ID NO: 210502 - DNA, 201 bp, Homo sapiens
aggtatctggtctaccagataaatgtgtgagaaatcaccaacaaagcagaaattacttttaattacaaagcagagtcatcgtaaaactttgtgcaaaatctttttttttttttttccagacagggtctccatctgttacccaggctggagtgcagtggtgtgatcatggctcactgcaacttcaacttccgaggctcaggt

SEQ ID NO: 210503 - DNA, 201 bp, Homo sapiens
tgcaggtgggctggagagctgagctccctgcagcaggtgagtgtgagtcctgaacagactcgttccaaggaaacaggtgcaggaaagaacacaggtcttgraggaatcagggttgagccagccctgtgacctcgggctgtccttggccccagtgatggcttatctttacctggaacttcaacctcttatcatcacctataa

SEQ ID NO: 210504 - DNA, 201 bp, Homo sapiens
caccatcatttcctcctaaaattgtatgtgctgcatatataaaatgataaatgctttacatatactttatgaaattatatatgctttagataaaagcagakgtttcataaaactgaactgtaacatgcatggcatttaaatcccattgaagtgaagggctgggcttgagggtagcgtcaccctccctgaccgtcataccca

SEQ ID NO: 210505 - DNA, 201 bp, Homo sapiens
  misc_feature (1)...(201): n = A,T,C or G
gatggtgatggtaatgatggtacttgttggatgtgtgtatgtatgtatacacacacacacatatatatacacatacacacacacacacacacacacacacmtatatatttgagatggagtctcactcctgtcgccaggctggagtgcagtggcacaatcttggctcactacaactcnnnnnnnnnnnnnnnnnnnnnnnnn

SEQ ID NO: 210506 - DNA, 201 bp, Homo sapiens
atatattacataaatatataatgataactataaattatatttgtatgtcattataaataatttatattaaatatttatgctattctataaatagtatatawatttagtatatatttttatatcatactttataataaacacgaatttataatatataagtataaactatagttattggatgtttaattttatgtatatatt

SEQ ID NO: 210507 - DNA, 201 bp, Homo sapiens
ttttggtctccagagccagtagaggatgaattcctgttgaattaagttccccaggtgtggtcatttgtcacagcagcctcgggagacgagtagagacatakatcgggcaggaatagaatatctagttgcattgctgatagaggcatactacagctgtgtgacatggtgtgacatcagcacactgtgtcctgaccccaggtc

SEQ ID NO: 210508 - DNA, 201 bp, Homo sapiens
tattgcaccagacacaaataatatagtaatattcttacaataaagtaagccaaaggccgggcgcggtggctcacgcctgtaatcctaacactttgggaggytgaggcaggcgaatcacctgaggttgggagttcgtgaccagcctgaccatcatggggctaccccgtctgtactaaaaatacaaaaaagtagccaggcgtg

SEQ ID NO: 210509 - DNA, 201 bp, Homo sapiens
gttgggcaggtcatgatgaagtctagttgtattaggttctgatgatgtctggttgagttagatcatgctgaggtacagtttggtttggtcatgatgaagtytagttgtattagatcatgataacgtctcctttggttatgtcatgatgaagtagttgagtagaatgtaatgaagtcttgttcgattagatcatgatgactg

SEQ ID NO: 210510 - DNA, 201 bp, Homo sapiens
gtggatcacctgaggtcaggactttgagaccagcctgaccaacatggtgaaaccccatctctactaaaactacaaaaattagccgggcatggtggcgggtkcctgtaatcccagctactggggaggctgaggcaggagaatcgcttgaacccaggaggcggaggttgcagtgagccgagattgcgccactgcactccagcc

SEQ ID NO: 210511 - DNA, 201 bp, Homo sapiens
cctgtttgattattatataaaattctatattctatattcctctactgcagaagaaggaagtccttgcttctgagtcattttgtgtatcagttacatatgcygtgtaacaaaataacccacagactcagcagcgtggaagggctcatacttactatcccacagctgctgcgggtcaggaatctgggcaggtgtaactgcatt

SEQ ID NO: 210512 - DNA, 201 bp, Homo sapiens
tcctgggttcaagcaattcggcctcatcctcctgggtagctgggacctcagctacctcccagcacgcctggctaatttttacattttcagtagagacgggktttcgatatgttactcaggctgatctcgaactcacagtctcgagtgagccgcctgcctcggcctgccgaagtgctgggattacaggcatgagacacccta

SEQ ID NO: 210513 - DNA, 201 bp, Homo sapiens
accaaaggatgcttctcattaggtaacagggaagcatttgggataattcaacatccattaattagtaaacctctgaaggaattaatctcataacagcagcyggaatgcaggagatgctctacacccgaatcacaaattgaatggatggcaagtggattttccctcctaaggctgattgattggttctggctgccagcaccc

SEQ ID NO: 210514 - DNA, 201 bp, Homo sapiens
taagatacacacaaacacaagcacgtgtacaaatgcatatgcatagaaaaagatgtacgctatgcagatgtacatatacatacacaaatacatagagaaaygctagacctatagatatatacatatctccatataaaatacacacacggccgggtgcagtgtctcacgcctgtaatcccagcacttagggaggccgaggtg

SEQ ID NO: 210515 - DNA, 201 bp, Homo sapiens
tccatataagatacacacaaacacaagcacgtgtacaaatgcatatgcatagaaaaagatgtacgctatgcagatgtacatatacatacacaaatacatasagaaatgctagacctatagatatatacatatctccatataaaatacacacacggccgggtgcagtgtctcacgcctgtaatcccagcacttagggaggcc

SEQ ID NO: 210516 - DNA, 201 bp, Homo sapiens
ccagaataagacgttggtttttcctcaaggacctcacaattgtcaagcctccactggggccagggacgtgtagagccgcgggacccactgctgagtctaaygtgggccctccgcgcaatggggcatccagtgcggcctgtgcatccacagttttgaaaggcgggttggagaggctgtaaaacaggcctgcaaattcttttc

SEQ ID NO: 210517 - DNA, 201 bp, Homo sapiens
gccagaataagacgttggtttttcctcaaggacctcacaattgtcaagcctccactggggccagggacgtgtagagccgcgggacccactgctgagtctamcgtgggccctccgcgcaatggggcatccagtgcggcctgtgcatccacagttttgaaaggcgggttggagaggctgtaaaacaggcctgcaaattctttt

SEQ ID NO: 210518 - DNA, 201 bp, Homo sapiens
agccagaataagacgttggtttttcctcaaggacctcacaattgtcaagcctccactggggccagggacgtgtagagccgcgggacccactgctgagtctwacgtgggccctccgcgcaatggggcatccagtgcggcctgtgcatccacagttttgaaaggcgggttggagaggctgtaaaacaggcctgcaaattcttt

SEQ ID NO: 210519 - DNA, 201 bp, Homo sapiens
cctgctgactggtccattttacagagtgctgattggtccattttacagagtgctgattggtccattttacagagtgctgattggtccattttatagagcaytgattggtccattttacagagcactgattggtccattttacagactgctgaatggtccattttagagtgctgattggtgcctttacaattctttagctag

SEQ ID NO: 210520 - DNA, 201 bp, Homo sapiens
ttcttttgtatttgcagtaaaatacaggtgtcacaacattgaccatctttcctatgtttaagtctacagttcagcagttttttgttttattttactattttgttgaaacggagtctcactctgtcgcccaggctggagtgcggtggcgtgatcttggctcattgcagcctctgcctcccgggttcacgccattctcctgcc

SEQ ID NO: 210521 - DNA, 201 bp, Homo sapiens
acgtttctccacctgtatctgggagggtttccaggggatcgctcctgctttcagcaaatgtggagggtctgaaaatggacatcctcagtcataccgtgggyggccagatcattgtactagccgtgcactcgcttacagttatttacagttattcttttgtatttgcagtaaaatacaggtgtcacaacattgaccatcttt

SEQ ID NO: 210522 - DNA, 201 bp, Homo sapiens
aagctggctcctcccagactcagcattcccaagaaccaagcaggggccacgtgaccttattgacccaactttggaagtcacacagtgtttacaccactgtrgcattctacaaaagaattaacgagaaagttaatgagcatggccgagattcaagggaaggggcgtagactctagctcccaaggagacgagtgtcaaaagaa

SEQ ID NO: 210523 - DNA, 201 bp, Homo sapiens
aggcagttctgcctggggggtctcctgtggggctgcagctggggctgactttatctgaaggcttgaccaggttggatgtccaggatagctttctctggtgkcaagaagctggtacagcctgtcacctgggcttagctgggagggccaacaagaacaggtacctggggcctctccagcatgtcaggctgaaggtgctcagtc

SEQ ID NO: 210524 - DNA, 201 bp, Homo sapiens
ggttgattccgtatgtttgcaattgtgagttgtgctgcaagaaacagacaggtgcaggtattttgttttgtattgttttgtttgattattttattttattkatttatttatttttgagatggagtcttgctctgtcacccaggctggagtgcagtggtgcgatctcggctcactgcaacctccacctcctgggttcaagca

SEQ ID NO: 210525 - DNA, 201 bp, Homo sapiens
tcaggaatggaaaaccaaacatcgtctgttgtcactgatacgtggaagctaagctatgaggacacaaaggcatgagaatgatacaatggactttggggacktggggagagcttgggagggggcagcgagggataaaagactacaaatagtgtggaatgtgtactgcttgggtaatgggtgcaccaaaatctcacaaatcac

SEQ ID NO: 210526 - DNA, 201 bp, Homo sapiens
catgcacacgtatgtttattgtggcactattcacatagcaaagacttggaaccaacccaaatgcccatcaatgatagaatgtataaagaaaatgtggcacrtagacaccatggaatactatgcagccataaaaaaggacaagttcatgtcctttggagactattactctaagtgaagtaactcaggaatggaaaaccaaac

SEQ ID NO: 210527 - DNA, 201 bp, Homo sapiens
ctactaaaaatacaaaaaattagccgggagtggtagcgggcatctgtagtcccagatacttgggaggctaaggcaggagagttacttgaacccaggaggtrgaggttgcggtgagctgacatcacgccattgcgctccagcctgggcagtaagagtgaaactccatttaaaaacaaaacaaaacaaacaaaaaaacttcta

SEQ ID NO: 210528 - DNA, 201 bp, Homo sapiens
gggagcctagaatggtggtgtttgttcaagatggccatgctcccgctctgtcacccacaacctgaagaccgttatcatattgattttgtatctcctgtgcrtacctgatggagaatgactgaatgtttgaattaaaagactcagggagaaggcaaagttgtgtttaagttgcaagttgaaaaaaacaatccattggctctg

SEQ ID NO: 210529 - DNA, 201 bp, Homo sapiens
acatttatcatcaagagaaaaggggtaggaaaaagcttaacaaaggagcacagggatattgatgtggacaaaaaaaagtctcctggcctggccctggaggrccatcagtggtcgccatcttgcaaggaagagcctttgatatcagtggggcagagccttttgcggtggatgctgcgtaatgattacaagtgacagcaagat

SEQ ID NO: 210530 - DNA, 201 bp, Homo sapiens
accaccacctaaagatgctggggtactctgcaacaccacctgaggaaaggaacaggatgaaacacctgttgtattagtcacctagggctgccatgacaaamtactacaggctgggccgcttaaacagcagacttttattttcccacagttctgaaggctggaagtctgtgagatcaaagtgtgggcagggctggttcttcc

SEQ ID NO: 210531 - DNA, 201 bp, Homo sapiens
tactcaaagtgtactgatttagattttttttttttttttttgagacagagtttcactcttgttgcccaggctggggtacgatgcgatctcggtgcgatctyggctcaatgcaacttctatctcccaggtttgagcaattcttctgcctcatcctcccgagtagttgtgattataggcacacaccaccacgcccagctaatt

SEQ ID NO: 210532 - DNA, 201 bp, Homo sapiens
agtgtatttctagaacttcttatgaacttgagcacctccatgatctgtttacatctccctgggacctgagtaaattagagacaagatgtagggcagggggggttctgagatttagcttggagactgtgaggtggtgatggatggcaacccttggttttgaccatccatgctaggtggatatctgctgtatcattaacaaca

SEQ ID NO: 210533 - DNA, 201 bp, Homo sapiens
tatttttagtagagggggggtttcaccatgtaggtcaggatggtcttgatctcttgacctcgtaatttgcctgcctcggcctcccaaagtgctgggattasaggcgtgagccactgcgcccggcctcattctcttaatagactgggacaagttaaaactttatgacaatttcttgaaattgtcaagttcatccatgtccct

SEQ ID NO: 210534 - DNA, 201 bp, Homo sapiens
aacatcgtgtttggctatgtcataatgaggcaattgagtagaatataatgaaatcttgttggattagttaatgacttgttgagcttcggaagcaggtgagyactttttggtctatatcagtctctttctttccatcaagcagttcttttcctcaaagttgtgcctaactcccacttgagcattttttttatccattctttt

SEQ ID NO: 210535 - DNA, 201 bp, Homo sapiens
tttgctgagaataacagtttccagcttcatccatgtccctgcagaggagatgaactcatccttttttatggctgcgtagtattccatagtgtctacatacyacattttctttatccagtcttatcattgatggacatttgggttggttccaagtctttgctgttataaatagtattgcaataaacatacgtgttgaaattt

SEQ ID NO: 210536 - DNA, 201 bp, Homo sapiens
ctatgactgccagcatcaggcctgggattgtggtcgtccaatggtgcttttagggggcaaaaatgcacagctgtttattgaaacaacaaatgttccaggcygggcacggtgactcacgcctgtaaccccagcactttgggaggccgaggcgggtggatcacctgaggtcaggagtttgagaccagcctggctgttatggtg

SEQ ID NO: 210537 - DNA, 201 bp, Homo sapiens
gcactccagcctgggcaacaagagtgaaactccatctcaaaaaaaaaaaaaaaaaaatgcaatcagctataatccttccctaaactactggtgtgactgtyttctgactccttcaactattacccaaaagatgaatgacttcttagtgaccctttgtcctaggaattatttcataggcttctgtagcaaatggaaccttgg

SEQ ID NO: 210538 - DNA, 201 bp, Homo sapiens
gaacccgggaggcggagattgaggtgagccgagatcgcgccattgcactccagcctgggcaacaagagtgaaactccatctcaaaaaaaaaaaaaaaaaaatgcaatcagctataatccttccctaaactactggtgtgactgttttctgactccttcaactattacccaaaagatgaatgacttcttagtgaccctttgt

SEQ ID NO: 210539 - DNA, 201 bp, Homo sapiens
tgaacccgggaggcggagattgaggtgagccgagatcgcgccattgcactccagcctgggcaacaagagtgaaactccatctcaaaaaaaaaaaaaaaaaaatgcaatcagctataatccttccctaaactactggtgtgactgttttctgactccttcaactattacccaaaagatgaatgacttcttagtgaccctttg

SEQ ID NO: 210540 - DNA, 201 bp, Homo sapiens
ttgaacccgggaggcggagattgaggtgagccgagatcgcgccattgcactccagcctgggcaacaagagtgaaactccatctcaaaaaaaaaaaaaaaaaaatgcaatcagctataatccttccctaaactactggtgtgactgttttctgactccttcaactattacccaaaagatgaatgacttcttagtgacccttt

SEQ ID NO: 210541 - DNA, 201 bp, Homo sapiens
atcccagcaatttgggaggccaaggcaggaggatcacctgaggtcaggagttcgagaccagcctgaccaacgtggagagaccccatctctactaaaaaaaacaaaattagctgggtgtggtggtgcatgcctgtagtcccacctactcagggggctgaggcaggagaatcgcttgaacccgggaggcggagattgaggtga

SEQ ID NO: 210542 - DNA, 201 bp, Homo sapiens
cgacttcagttgatctgcctgcctcggcctcccaaagtgctgggattacaggtgcacaccaccagacccggctaattattgtatttttttttttttttttttgagacggagtctcgcacttgttgcccagggtggagtgcaatggtgcaatctcggctcactgcaaactccacctcctgggttcaagtgattctcctgcct

SEQ ID NO: 210543 - DNA, 201 bp, Homo sapiens
acaggacccattcagtctgtttgtgttttctccccgacctttcagcaatgtcaccatgatcttttcaagaatctttttctttgcttctcctgacaaatgcrtcatccttctgagcaataaacagaggaattggcaaagttaataatgtcgttattgagcacttagtgaatggtgagcattatgctaagactgttttgtggt

SEQ ID NO: 210544 - DNA, 201 bp, Homo sapiens
ttcaaaagcattgtgaaaatatcactgcacacactaactagcttctgaccatcccttcccttcccttcctggcatatttctccagcgtaatctctgctcayagcctttcttacgagctacccacacccttgagcttcacaggacccattcagtctgtttgtgttttctccccgacctttcagcaatgtcaccatgatcttt

SEQ ID NO: 210545 - DNA, 201 bp, Homo sapiens
gtgtatttctagaacttcttatgaacttgagcacctccatgatctgtttacatctccctgggacctgagtaaattagagacaagatgtagggcaggggggkttctgagatttagcttggagactgtgaggtggtgatggatggcaacccttggttttgaccatccatgctaggtggatatctgctgtatcattaacaacat

SEQ ID NO: 210546 - DNA, 201 bp, Homo sapiens; identical to SEQ ID NO: 37087

SEQ ID NO: 210547 - DNA, 201 bp, Homo sapiens
atgtcctgctcagtgctgccctgagagcagaggttattccaggattcttgctcgcctctgtaaagggtatccgttctgcagacctttctgccggtcacacygacggcatattgcagagcctgccagggactcacaggggatgacaggggatttatcaggtggttttttactgcactgtcattactgggggcgaatccactt

SEQ ID NO: 210548 - DNA, 201 bp, Homo sapiens
ataatgaaatcttgttggattagttaatgacttgttgagcttcggaagcaggtgagtactttttggtctatatcagtctctttctttccatcaagcagttmttttcctcaaagttgtgcctaactcccacttgagcattttttttatccattctttttttttttactttgacatgaagtctcactctgttgcccaggctgg

SEQ ID NO: 210549 - DNA, 201 bp, Homo sapiens
caaaaggatcttgtgattacccaatgtaattactccattacccacctagaccattaaagattcttaattctgcaaaaccccttgtgctacctaacgtaccrttttcataaattctggagattaggatatggacatgtctgtaaggagggagaaagcattattctttgtactaaagttgtaatacctgtctgtttccagctg

SEQ ID NO: 210550 - DNA, 201 bp, Homo sapiens
aaagggtatgaggcacatgctaagggttggtgttttcccaaatgttatcttacaaaaccatcaccacattcccctgagagtcattatttgggcactagaarctcattaccatttatctcttgattttaccccctgttcaacattctcacccagataggtggagtcaatatctccccttccccaccttcaatctgcccatct

SEQ ID NO: 210551 - DNA, 201 bp, Homo sapiens
cctctgtgtgtgtccgtgtcctcatatgctctccttataaggacaccagttcaattagatcggggcccactctggtgacctcattttaccttaatcaccastttaaagaccttatttccaaacacagtcacattctgaggccctgggctttaggacttcaatttatgaattttgttcaaacacaagctcctaacagaatct

SEQ ID NO: 210552 - DNA, 201 bp, Homo sapiens; identical to SEQ ID NO: 37076

SEQ ID NO: 210553 - DNA, 201 bp, Homo sapiens
gagccggctcagtgcagtttgcatgtactcgggaggatgagccctgccatggtgtgtgttaggggacagcctgatctcaccaaccctcctgagcaggcccrgccctccgagtaataactgggaacactcgccgctttgtgagacgacctcgtgtgctcactggaaggtcatctcttctggtccatgctgcagtgtggatac

SEQ ID NO: 210554 - DNA, 201 bp, Homo sapiens; identical to SEQ ID NO: 37078

SEQ ID NO: 210555 - DNA, 201 bp, Homo sapiens; identical to SEQ ID NO: 37079

SEQ ID NO: 210556 - DNA, 201 bp, Homo sapiens
gggacgtgcgcaggtaaattgcatgtcttgggggcttagtgaacagattatttcatcatgcaggtaataagtccagtaccacctgataggtagtttttcgrtcctctcatttctcccaccctccaccctccagcatgcccctgcagctgttcccttctttgtatccatgagtacccaatgtttagctgccgtttatgagtg

SEQ ID NO: 210557 - DNA, 201 bp, Homo sapiens
ccgggtttaagcaattctcctgcctcagccatccaagtagctgggatttcaggtgcctgaccccatgcccggctagtttttgtatttttagtagagatgcrgtttcaccgtgttggccaggctggtcttgagctcctgacctcaagcgatccgcccgctttggcctcccaaagtgctgggataacaggtgtgagccactgc

SEQ ID NO: 210558 - DNA, 201 bp, Homo sapiens
taatcctaacactttgggaggttgaggcaggcgaatcacctgaggttgggagttcgtgaccagcctgaccatcatggggctaccccgtctgtactaaaaawacaaaaaagtagccaggcgtggtggtgcgcacctgcaatcccagctactcggggggctgaggtaggagaatcacttgaacctgggaggtggaggttgcag

SEQ ID NO: 210559 - DNA, 201 bp, Homo sapiens
gtttggggctcccactgagtctacatggcaatgagttgtattgtagaattacttcatttaacgtatcatcatagaaataaagtgcacaataaatgtcataygctcaaatcatccccagatccttccccctgcactcacagtgactgtctttctatgaagacagtttttgtgtgtgtgtggaaaaattgtgttccatgaaac

SEQ ID NO: 210560 - DNA, 201 bp, Homo sapiens
cattcacagataactcaggcaggctcagattaattaacccttcgtttgtttgccatgtaggactaattagtcatcatccatctactgggaatcagacgtcrttggcacagttatcaaggacagggactttgccggcttatcatgtagaaggaagaattaatggtgttggtgatatatggtcttgtgtagtggtagggtatt

SEQ ID NO: 210561 - DNA, 201 bp, Homo sapiens
gttttgttcttttttcttcctctctcttgcttattttctctctctctccctctctctctctctctcacacacacacacacacatatacacacacacacacagaataatctcgctgcagcgtctttcacagtaggtcttaggggcagatggatagctgcctcatacaaagaaaataggatttcaggtctccagagaggcgct

SEQ ID NO: 210562 - DNA, 201 bp, Homo sapiens
tgttttgttcttttttcttcctctctcttgcttattttctctctctctccctctctctctctctctcacacacacacacacacatatacacacacacacacagaataatctcgctgcagcgtctttcacagtaggtcttaggggcagatggatagctgcctcatacaaagaaaataggatttcaggtctccagagaggcgc

SEQ ID NO: 210563 - DNA, 201 bp, Homo sapiens
caagtacgatttcctgtgtcctatgcgcagatcaccctggtgtcttggtccagtgggcttgaagcctcatactcttttgtttttccttgtttttttttttwttttttttatttttattactttttttttttttgagagggagtcttgctctgtcgcccaggctggagtgcagtggcacaatctcggctcactgcaagctcc

SEQ ID NO: 210564 - DNA, 201 bp, Homo sapiens
ctcccgagtagctgggattacaggtgcccgccaccacgctcagctagtttttatatttttagtagagacggggtttcaccatgttggccaggctggtctcraactcctgacatcaggcgatccacccgcctcggcctcccaaactattgggattacaggtgtgagcctgtatctgtctctctgtgtctctctggcacactc

SEQ ID NO: 210565 - DNA, 201 bp, Homo sapiens
ctgggcagaagtgatccttctgcctcagcctcccaagtagctgggactgcaggtgcatgccaccatatctagctaattttttcatttttttttatttttaragatggggtttcattatgttgcccaggcttctctcaaactcctggccttctgtgatcctccttcctcagccttccatagcattgtgattccagacatgag

SEQ ID NO: 210566 - DNA, 201 bp, Homo sapiens
cctagcaagtacgatttcctgtgtcctatgcgcagatcaccctggtgtcttggtccagtgggcttgaagcctcatactcttttgtttttccttgttttttwttttattttttttatttttattactttttttttttttgagagggagtcttgctctgtcgcccaggctggagtgcagtggcacaatctcggctcactgcaa

SEQ ID NO: 210567 - DNA, 201 bp, Homo sapiens
ctgttttctttctgtatttctcatttgctttgatctttttggttttcttttatgtgttttccttaggaaagcattttcatttttcttctccagatccttargtcaaagtttacttcatttatttcaattttctattcttttattttctttctttttttctttctttctttctttctttctttctttctttctttctttctt

SEQ ID NO: 210568 - DNA, 201 bp, Homo sapiens
ctttgtgccctaatttacgtgagctagtaggttgtgcgttatcttagagggcttgcatgaaagaaagagggtagcctttcttttccctgttttggtagcaytgctgaggtggcttttggctgacgggtggacccgtgggtgcagatgttttgatgcagaaggaacgattgccttttcacattcaggctccaactggctttt

SEQ ID NO: 210569 - DNA, 201 bp, Homo sapiens
ccaaacactctaactttcatttctctaaattatctaaatagaatgaaggtatcgttgaaggtactccaggtggaatgaaaaaacctatctcaagtcttccrgagatcctcctgtgttcggttccctggtccctctcatggtgccctgggaaagggacgcagctcctacatgggttaggttccaggtgaacgcagccactga

SEQ ID NO: 210570 - DNA, 201 bp, Homo sapiens
tgcatcactgtcgtgcagcctgggcaccagagtgagagacaccctgtctctaaataaataaataagttcatgattaagcagaagttgtgcttgttctgccrggatttcagttgggttctttgtgccctaatttacgtgagctagtaggttgtgcgttatcttagagggcttgcatgaaagaaagagggtagcctttctttt

SEQ ID NO: 210571 - DNA, 201 bp, Homo sapiens
aattgtcgaacaattgtcgaacagttgttttaacaattgtaattcctcctttttaatactctgtatctttaccatcaagatacagacatcacctttttcasaggctctgagtgtaggaggccaccattttggctttatatcatgaccagtaactgggagcgccctcgttggctgaagctgtacttcctgcttcttttctgt

SEQ ID NO: 210572 - DNA, 201 bp, Homo sapiens
cctggggtgacagagcaagactccttctcaaacaacaacaacaaaaaccaacatcagtctctgttccccagtggtatcatttatgtttacactgttttctytctgtatttctcatttgctttgatctttttggttttcttttatgtgttttccttaggaaagcattttcatttttcttctccagatccttaagtcaaagtt

SEQ ID NO: 210573 - DNA, 201 bp, Homo sapiens
cgagagatgctgtgtctaaaattataaaaataaaaattagccaaacatggtgccacgcgtgtgtggtcacagctacctgggtggctgaggtgggaggatcrctggagcccacaaagtcgaggctgcagtgagctgagattgcatcactgtcgtgcagcctgggcaccagagtgagagacaccctgtctctaaataaataaa

SEQ ID NO: 210574 - DNA, 201 bp, Homo sapiens
ttaacgttttagacttgaatcattgctgtcttgtgtgactagggccatttctacttggtttttgcttgtttggctgataaatgtgaacgttttaacaattsttgaacaattgttaaaacaattgtcgaacaattgtcgaacagttgttttaacaattgtaattcctcctttttaatactctgtatctttaccatcaagata

SEQ ID NO: 210575 - DNA, 201 bp, Homo sapiens
agtagctgggattactaaattttatataaatgttgtgtcaagaaatattattgctcttttgcctttttttcccttaaccgttgagaaattcagaaaaaaacatttatgaacgtcaacactgtttttgacaagtaaacattgttcttggcaagtgggccttccaaaaataagggctggcgtttgtggaaactgctctactgt

SEQ ID NO: 210576 - DNA, 201 bp, Homo sapiens
acatgtatacctatgtaacaaacctgcgcgttctacacatgtatcccagaactttaaaaaaaaaagaaatagtatttcaatatggtctgaattaggatgtytgttattagatataaaggagaacatatgtgttgagggccatttgagcctgttctgtatataaactcttatttttgcccttttctttgtagcatgtttggg

SEQ ID NO: 210577 - DNA, 201 bp, Homo sapiens
ccccatcgcatcagagacctctagtgtgtttctttatatccgtgtagacttgggaggatgacaggagagcaaccttagaaggtggcctgtgcagttccagrgcccagggtggaaggggcttccattcatcactgccttcgtgcacctttcattcttgatccaactgttgttgttgttgttttgagacggagtcttgctgtg

SEQ ID NO: 210578 - DNA, 201 bp, Homo sapiens
gggaacgtctccagtgtgtacaggtggccgtctcttagccatattcttagcgaatgtcttcagtgtgtacacagcagtggtcctttggccacatgctttcygaacgtcttcagtgcatacagtggcagtcccttggacccattcttagaaaacgtcttcagttcgtactcggtggcgatcccttggccacattcttctgcg

SEQ ID NO: 210579 - DNA, 201 bp, Homo sapiens
ctgccatggtgtgtgttaggggacagcctgatctcaccaaccctcctgagcaggcccggccctccgagtaataactgggaacactcgccgctttgtgagakgacctcgtgtgatcatttgaaggtcgtctcttctggtcagggtgcagagtggacacatttttttttttttttgagacagagttttactcttgttgcccag

SEQ ID NO: 210580 - DNA, 201 bp, Homo sapiens
ctggccttaatgtgttttggatgccccccacactgacagggtccttcatgagctctcctggatagaataacacaaaaaactcaaagcccattttaagaaasagcagcatcattaaaaaaaaaaaaaaaaaaaaaaaacctccactgccagcccacaggtcgctcattttcttcctagaaataaattccagttgagtggaca

SEQ ID NO: 210581 - DNA, 201 bp, Homo sapiens
aaacaccttgttattacctctgccaagggctggggtatgttgaaatttcatagccggcattgcaggatccctgtgattttcaggaacacactcccacaggrgctcccgctcagccagagccaagcccagtgtacagtgtcacagagtggcagcagcctggccagatcttttctcctcattaggatctgccttggggcaaaa

SEQ ID NO: 210582 - DNA, 201 bp, Homo sapiens
cctcagcctcccaaagtgctcggatgacaggtgtcagccacggtgcctggccgtctgttttcttttcataagaggtgctggactcacagtggctctgtgcwgtgatgaaatgacattgccaaagttttactcctcacagcttgattttgtatgctaaacaggtcttctttggcgtgattgaggagggatggggagacttaa

SEQ ID NO: 210583 - DNA, 201 bp, Homo sapiens
attgcttttatcctgcaaatatccctctgtgttcattagctttgccattacgactgagcccaagtggattaaagaaagcctgtgatgccaccagacatcayttttgtttcggcaaaacagctttctctaggaatctggccttaatgtgttttggatgccccccacactgacagggtccttcatgagctctcctggatagaa

SEQ ID NO: 210584 - DNA, 201 bp, Homo sapiens
tatgttgaaatttcatagccggcattgcaggatccctgtgattttcaggaacacactcccacaggagctcccgctcagccagagccaagcccagtgtacartgtcacagagtggcagcagcctggccagatcttttctcctcattaggatctgccttggggcaaaaggattggtttctgtgtagagggataattaaggaat

SEQ ID NO: 210585 - DNA, 201 bp, Homo sapiens
agggcttaaaaaatttcaataaaatgttcccagtagctgttacatgtagtcatgtagcgtttttttttttttttttgagatggacttttgctcttgtctcycaggctggagtgcaatggcgcgatctcggctcactgcaatctctgtctcccgcattcaagggattctcccacctcagcctgtcaggtagctaggattata

SEQ ID NO: 210586 - DNA, 201 bp, Homo sapiens
agaacagaggactccaaccccctggctgtggactggtactgagcaaagcttcatgtgtgttcacagccacttcccactgcacgcattaccgcctgaggtcrcctcctgtcagatcagcagtggcattagattatcagaagattgagaaccctattgggaagtgggcagaccagggatctgggttgcatgcttcttatgaga

SEQ ID NO: 210587 - DNA, 201 bp, Homo sapiens
attatttaattatttatttgtaccgaccccgtcggattaacatttaaaggaccgagttttgaacaaagagtttggttattttttaagtattttctggggcrgggggagctctgtgtagggggaagtatatcatagaagtgagaaacaaagacagttgtttaattgacacatgcattatattattttttattttttaaggaa

SEQ ID NO: 210588 - DNA, 201 bp, Homo sapiens
cgtgtggagagctgactgtgccgcgttcctgaggctggtgaggatgctgtgggcaccttaatcacggctgtgaacaaactgactagagctaactgccacgragctttgcagtggacgctaagctgttgtactcattgtttgatcagtgacggagccagatgtcttattaggtctcggggatttgtggaagcctagagcagg

SEQ ID NO: 210589 - DNA, 201 bp, Homo sapiens
gttgtttcttgtcctgtagaacagaggactccaaccccctggctgtggactggtactgagcaaagcttcatgtgtgttcacagccacttcccactgcacgcattaccgcctgaggtcacctcctgtcagatcagcagtggcattagattatcagaagattgagaaccctattgggaagtgggcagaccagggatctgggtt

SEQ ID NO: 210590 - DNA, 201 bp, Homo sapiens
gtcggattaacatttaaaggaccgagttttgaacaaagagtttggttattttttaagtattttctggggcggggggagctctgtgtagggggaagtatatyatagaagtgagaaacaaagacagttgtttaattgacacatgcattatattattttttattttttaaggaataatatgttttatgatttgagattatttgc

SEQ ID NO: 210591 - DNA, 201 bp, Homo sapiens
gggtgggggcggggccctggaatctgcattcttatgaggccgttaaatgatccccacgcaccttcaaatggtacacttgctgctgtcctgaaggcattcarccatcaatctggagcccaaagagaagtttctggaaactgacaagtgaggcattcttttctcatgactttttgcttttaatctgaacggcttaaaaactat

SEQ ID NO: 210592 - DNA, 201 bp, Homo sapiens
gggcagggagagcattaggagaaatacctaatgtagatgatgggttgatgggtgcagcaaactgccatggcacgtgtatacctatgtaaccaacctgcacrttccgcacatgtgccccagaacttaaagtagaattaaaaaaaagaaacagaaagaaatcctgagcacgtagtaggaaccacggtctgtgatcacgtgcat

SEQ ID NO: 210593 - DNA, 201 bp, Homo sapiens
cactcttgttgcccacgttagaatgcagtggtgtgatctcggctcactgcaacctccgcctcccgggttcaagcgattctcctgcctcagcctcccgagtmactgggatcacagacacccaccaccaggcccggctaattttttgtatttttagtagagatggggtttcaccgtgttagccaggcttgtctcaaactcttg

SEQ ID NO: 210594 - DNA, 201 bp, Homo sapiens
gtaagcaaaataaaagaagaaaccttgaacgacaaaggtaccgagagatactccaatggcttttttttgtttttttttttccttgggacaggtcgtttgcrtggttcatggctgagcttcagtcacgtgccaggtggcatttgggagagatggctctgatttttgcactcttcttttggggatttctggccccatcctaga

SEQ ID NO: 210595 - DNA, 201 bp, Homo sapiens
cctcctgagtagctgggactacaggagcacaccaccacacccagctaatttttgtatttttagtagagacggggtttcaccatgttggccaagatggtctygatctcttgaccttgtgatccacctgcctcagcctcccaaaatgctggtattacaggcgtgagccactgtgcccggccccattctctttattttatttta

SEQ ID NO: 210596 - DNA, 201 bp, Homo sapiens
tttcttcttccaccagacccccgatgaaggagcgtggacttccatctacgcagcagtcaccccagagctggaaggagttggtggccgttacctatacaatragaaagagaccaagtccctccacgtcacctacaaccagaaactgcagcagcagctgtggtctaagagttgtgagatgactggggtccttgatgtgaccct

SEQ ID NO: 210597 - DNA, 201 bp, Homo sapiens
gattctacacgatggtgagtttcataattacttcattctctattacagtgtaataataatagaaataaagtgcatgataaatagaatgcacttcaatcatycccaaaccatcccccaccccacatcagtggaaaaatggtcttccatgaaactggttcctggtgccaaaaagcttgaggaccactggacaaaggaacttgt

SEQ ID NO: 210598 - DNA, 201 bp, Homo sapiens
gggctcagcaaagagtctttccaggccttgaacctctggacatctgttggtgctcattggacaggctaaaagtcatcatgttacgaatcgatgaagttgasatgcagataaaaggtataaggaaaaaatgaactctccacatcattgtatgcattacatctatacgataaaaactgtgatatactcatgcgtttaaatagc

SEQ ID NO: 210599 - DNA, 201 bp, Homo sapiens
ttgtccctgtttcagtccggtctcctgtttctggtgtttggtgtgccgcacgttgtccctgttacagtcctgtctcttgtttctggggtcacccgtgtggwgagctgactgtgccgcgttcctgaggctggtgaggatgctgtgggcaccttaatcacggctgtgaacaaactgactagagctaactgccacggagctttg

SEQ ID NO: 210600 - DNA, 201 bp, Homo sapiens
gtgctgggattacaggtgtgagccaccacgtccggctgcactttttattcttgatccacctggtttgcaactcacagataaactgtttccacctatgacacatgagtcttccaccttccatgtcctctggactttgtccctgttataatattcctgtctcttgttctggtttttggcatctcacacattgtccctgtttca

SEQ ID NO: 210601 - DNA, 201 bp, Homo sapiens
tggttttttactgcactgtcattactgggggcgaatccactttaatacattcatgcctcctgagcctgtgggaattcaagaggaacagaaccagaaataawtgaaccataactccctttggcatcttgcctctctggaggcttaattcttacaaatatgtgctctgctttcaaatcttagtttgatgattttctcttcttc

SEQ ID NO: 210602 - DNA, 201 bp, Homo sapiens
agtagagatgaggtttctccatgttggtcaggctggtctcaaacccctgacctcaggtgatccatccaccttggcctcccaaagtgctgggattacaggtrtgagccaccacgtccggctgcactttttattcttgatccacctggtttgcaactcacagataaactgtttccacctatgacacatgagtcttccaccttc

SEQ ID NO: 210603 - DNA, 201 bp, Homo sapiens
ctggttaatttttaaattttttgtagagatggggtcttgctatgttgctcaggctggtcttgaattcctgggctaaagcgatcctcctgcctcagcctccyaagtagctgggactacaggtgcatgccaccatatccagttaattttttcagttttttttttatttgtttagagatagggtttcattacgttacccaggct

SEQ ID NO: 210604 - DNA, 201 bp, Homo sapiens
aaaattaattttaatgtaatttatatgttttttgagacagtctcatcctatagccaggctggagtacagcatcatgttcatagctctcggcagcctccaastcatggctcaggtgaccctcccacctcagcctcccaggtagctgggactacaggtgcacaccaccacacctggttaatttttaaattttttgtagagatg

SEQ ID NO: 210605 - DNA, 201 bp, Homo sapiens
caggcgtgaccgcgcccagcccagtgtggatacaccttgagcacataactggaatcctttccttggcaacttggagccccttgggtcatggtcatataaasggtgttgaattaagaggaaacactgttaaatatgtcacagctgtccttgaaactgggacttgttttgttttctgcctggaaatgcgagtcatttttctgg

SEQ ID NO: 210606 - DNA, 201 bp, Homo sapiens
atttatttatttatttttgagatgatttgcactcttgtcgcccaggctggagtgcaatggtatgatctgggttcactgcaacctccgtctcccgggttccraggattctcccatctcagcctgtaaggtagctgagattataggcatgcgccaccatgctcggctgattttgtatttttagtagtgacagggtttcaccat

SEQ ID NO: 210607 - DNA, 201 bp, Homo sapiens
agagcaggcaagcaccttctacactgaaaggaatccttctcacactcatgttggcaacgtgaagtcctgcctttggaaatccctgatttcctaagacactrccctaacattttaaaggacttaaaaaaaattcagtaaaatattcccaatagcagcacatgtagtgttttatttatttatttatttttgagatgatttgca

SEQ ID NO: 210608 - DNA, 201 bp, Homo sapiens
ttacactcctaccaacggtgtaaaaatgttcctatttctccaaatcctctccatttccttttcttctccttatacagtaaggaatatgaaactaacacacrctttctctcatttcattctctttctttttctgtctgctctctttgtctttctccctctctctctccctctctttttcctctctctctctccctctctttt

SEQ ID NO: 210609 - DNA, 201 bp, Homo sapiens
ggggatttctggaagcacagagcaggcaagcaccttctacactgaaaggaatccttctcacactcatgttggcaacgtgaagtcctgcctttggaaatccstgatttcctaagacactaccctaacattttaaaggacttaaaaaaaattcagtaaaatattcccaatagcagcacatgtagtgttttatttatttattta

SEQ ID NO: 210610 - DNA, 201 bp, Homo sapiens
gtgtctctttgtctttatctctgtgtgttttttctctcttccccttttcctccccctccttttttctctttctctcttagcctttctttctttctctctttctctctctctctctgcttctatctttctatctctctctttctcattcttacactccatctctgtctcttctctctctctgatggtgagtggagagtcatt

SEQ ID NO: 210611 - DNA, 201 bp, Homo sapiens
tgtctctttgtctttatctctgtgtgttttttctctcttccccttttcctccccctccttttttctctttctctcttagcctttctttctttctctctttctctctctctctctgcttctatctttctatctctctctttctcattcttacactccatctctgtctcttctctctctctgatggtgagtggagagtcattt

SEQ ID NO: 210612 - DNA, 201 bp, Homo sapiens
atcagtgacggagccaggtgccttattaagtctcggggatttctggaagcacagagcaggcaagcaccttctacactgaaaggaatccttctcacactcaygttggcaacgtgaagtcctgcctttggaaatccctgatttcctaagacactaccctaacattttaaaggacttaaaaaaaattcagtaaaatattcccaa

SEQ ID NO: 210613 - DNA, 201 bp, Homo sapiens
ggtgagtggagagtcatttcgttttggaatgatgatgagcattccagtaatagttttggagagtaaggctcatagagcttattaagcaaggtgtgtctgtyataaaattgattgctggcattttacacatcagtgcagacatggggggcacaggcagacccctccccccaccacacacacacactgcttatcctctgaaag

SEQ ID NO: 210614 - DNA, 201 bp, Homo sapiens
catcgtagccttcttttcttcttccaccagacccccgatgaaggagcgtggacttccatctacgcagcagtcaccccagagctggaaggagttggtggccrttacctatacaatgagaaagagaccaagtccctccacgtcacctacaaccagaaactgcagcagcagctgtggtctaagagttgtgagatgactggggtc

SEQ ID NO: 210615 - DNA, 201 bp, Homo sapiens
gtgtcccccaataccttccacctctctccagaaattaccttcccatctcaatgtaagggaacttgcttcttccctcagagatctgctgtctctgctgcaagtaatagctagttttcatgcattttgttctgtctgactttaggttgttgcattgttctcccaacctccttgaacccatggacctggaggcagaattatata

SEQ ID NO: 210616 - DNA, 201 bp, Homo sapiens
ttccgcaataaacgtatgtgtgcatgtgtctttatagtagaatgatttataaacctttggtatatacccagtaacgggattgatgggtcaaatggtatttytggttctagatccttgaggaatcgccacactgtcttccacaatggttgaactaatttacactcctaccaacggtgtaaaaatgttcctatttctccaaat

SEQ ID NO: 210617 - DNA, 201 bp, Homo sapiens
tggatcatcactcccagaagactagaggggacataacaaaggcaatatctggtctttattcctggttctgtaacaaggaggagcttctaaaactctcgcartttcacaaatgctagcaattccctggttgtataatgaggtgatatttgctgtttcctaaatggcttcaagatggggctggccaccagaaacaccaaccat

SEQ ID NO: 210618 - DNA, 201 bp, Homo sapiens
ccagcctggcgactgtgtgagactccgtctcaaaaaacaaaacaaaacaaaaaagcaaaagcaaaaacaaaacaaaacaataaccaaaaaatggggatttygagaggacacagacattgaaaccatagcacatggcgaccttgagtctttgagtttacgtgtgcagcatgaatgctcggtggtgatggatgaagagagagc

SEQ ID NO: 210619 - DNA, 201 bp, Homo sapiens
aagtaagaatgtaggaggtcggtcagggtggtaggaaaaattgtagaagatgcaaaccttcttgggaggccagaaggttttgcaaatgctcccgaataagrtttggctgaaggcagccagattctcttatccagtgcctgaaagcttaggttagataacgaggggatgtaaagaaactgatctagataagttagtttgctt

SEQ ID NO: 210620 - DNA, 201 bp, Homo sapiens
tggggtgcctgatgcactattacagatatttttttcacagtgtagatatctcagcatgaatatgtctgttttcttttcttttctttcttttttttttttttgagatggagtttctctcttgttgccaaggctggagtgcaatggctcaatcttggctcactgcagccaacatctcctgggcttaagcagttctcctgcgtt

SEQ ID NO: 210621 - DNA, 201 bp, Homo sapiens
gctccccagccccacccagatcagagattcagaacctgaatcttcggatttctggagatgcccccatcctatcagagacttctagtgtgtttctttatatycgtgtagacttgggaggatgacaggagagaaaccttagaaggtggtctgtgcatttcccgggcccggggtggaaggggcttgtgtcctggctgcctctgt

SEQ ID NO: 210622 - DNA, 201 bp, Homo sapiens
tttttttttttttttttaaagatgcggtttcattatgttgcccaggcttgtctcaaactcttggcctccagtgatcctccttcctcagccttccatagcaytgtgattccagacatgagccaccgctcctggcctccaactgaaattttatgttctttgacaaacacttcatgaagcattcttccctggcaaccaccattg

SEQ ID NO: 210623 - DNA, 201 bp, Homo sapiens
gatggggtcttgctatgttgctcaggctggtcttgaattcctgggctgaagcgatcctcctgcctcagcctcccaagtagctgggactgcaggtgcatgcyaccatacccagctaatttttttttttttttttaaagatgcggtttcattatgttgcccaggcttgtctcaaactcttggcctccagtgatcctccttcct

SEQ ID NO: 210624 - DNA, 201 bp, Homo sapiens
cctcctgagcaggcccagccctccgagtaataactgggaacactcgccgctttgtgagacgacctcgtgtgctcactggaaggtcatctcttctggtccaygctgcagtgtggataccattttttttttttaagacagtttcactcttgttgcccaggctggagtgcaatggcacgatctcggctcacagaaacctccgcc

SEQ ID NO: 210625 - DNA, 201 bp, Homo sapiens
ctgccatggtgtgtgttaggggacagcctgatctcaccaaccctcctgagcaggcccagccctccgagtaataactgggaacactcgccgctttgtgagasgacctcgtgtgctcactggaaggtcatctcttctggtccatgctgcagtgtggataccattttttttttttaagacagtttcactcttgttgcccaggct

SEQ ID NO: 210626 - DNA, 201 bp, Homo sapiens
aatgtgaaaatcagtgtcccccagaacgttccatttcttcccagctgggctatttttggagttccatggggagccggctcagtgcagtttgcatgtactcrggaggatgagccctgccatggtgtgtgttaggggacagcctgatctcaccaaccctcctgagcaggcccagccctccgagtaataactgggaacactcgc

SEQ ID NO: 210627 - DNA, 201 bp, Homo sapiens
gataggaaatttcaatgtgaaaatcagtgtcccccagaacgttccatttcttcccagctgggctatttttggagttccatggggagccggctcagtgcagyttgcatgtactcgggaggatgagccctgccatggtgtgtgttaggggacagcctgatctcaccaaccctcctgagcaggcccagccctccgagtaataac

SEQ ID NO: 210628 - DNA, 201 bp, Homo sapiens
agataggaaatttcaatgtgaaaatcagtgtcccccagaacgttccatttcttcccagctgggctatttttggagttccatggggagccggctcagtgcastttgcatgtactcgggaggatgagccctgccatggtgtgtgttaggggacagcctgatctcaccaaccctcctgagcaggcccagccctccgagtaataa

SEQ ID NO: 210629 - DNA, 201 bp, Homo sapiens
gctgggtgtggtggctcatgcttgtaatacctgcactttgggaggctaagtcagtaggatcacttgaactcaggggtttgagaccagcctggtcaacatamtgagaccttgtctctagtaacaataaaaaaattagctggacataaggtgtgcatttgtagtcccagttacacaggaggctgaggtgggaggatcacttga

SEQ ID NO: 210630 - DNA, 201 bp, Homo sapiens
tttcgggcaaaattaaccttcagaataccttgctttaataaagtaccagaaaccggagggcttaaaaccatagcttattctctcccagttctggaggccaraagtctgtaatcaaagtgtctcagggctgcgctccctccggaggcttacgcggagggtgcttcctgcctctcccagctcctgggggctcctggcgtccct

SEQ ID NO: 210631 - DNA, 201 bp, Homo sapiens
cggaaagtcgaggctgcagtgagctgagattgcatcactgtcgtgcagcctgggcaaaagagtgagaccctgtctctaaataaataaataaatgagttcaygattaagcagaagttgtgcttgttctgccaggatttcagttgggttctttgtgccctaatttacgtgagctagtaggttgtgcgttatcttagagggctt

SEQ ID NO: 210632 - DNA, 201 bp, Homo sapiens
aaaaataataataataataataaaaattagccaaacatggtggcacgcatgtgtgatcacagctacttgggagactgaggtgggaggatcgctggagcccrgaaagtcgaggctgcagtgagctgagattgcatcactgtcgtgcagcctgggcaaaagagtgagaccctgtctctaaataaataaataaatgagttcacg

SEQ ID NO: 210633 - DNA, 201 bp, Homo sapiens
gagttggaggctgcagtgagctgtgaacataccactgcactccagcctggaaaataaagcaagagatgctgcctctaaaaataataataataataataaaaattagccaaacatggtggcacgcatgtgtgatcacagctacttgggagactgaggtgggaggatcgctggagcccggaaagtcgaggctgcagtgagctg

SEQ ID NO: 210634 - DNA, 201 bp, Homo sapiens
ggagttggaggctgcagtgagctgtgaacataccactgcactccagcctggaaaataaagcaagagatgctgcctctaaaaataataataataataataaaaattagccaaacatggtggcacgcatgtgtgatcacagctacttgggagactgaggtgggaggatcgctggagcccggaaagtcgaggctgcagtgagct

SEQ ID NO: 210635 - DNA, 201 bp, Homo sapiens
gggagttggaggctgcagtgagctgtgaacataccactgcactccagcctggaaaataaagcaagagatgctgcctctaaaaataataataataataataaaaattagccaaacatggtggcacgcatgtgtgatcacagctacttgggagactgaggtgggaggatcgctggagcccggaaagtcgaggctgcagtgagc

SEQ ID NO: 210636 - DNA, 201 bp, Homo sapiens
tgggagttggaggctgcagtgagctgtgaacataccactgcactccagcctggaaaataaagcaagagatgctgcctctaaaaataataataataataataaaaattagccaaacatggtggcacgcatgtgtgatcacagctacttgggagactgaggtgggaggatcgctggagcccggaaagtcgaggctgcagtgag

SEQ ID NO: 210637 - DNA, 201 bp, Homo sapiens
ttgggagttggaggctgcagtgagctgtgaacataccactgcactccagcctggaaaataaagcaagagatgctgcctctaaaaataataataataataataaaaattagccaaacatggtggcacgcatgtgtgatcacagctacttgggagactgaggtgggaggatcgctggagcccggaaagtcgaggctgcagtga

SEQ ID NO: 210638 - DNA, 201 bp, Homo sapiens
agcttgggagttggaggctgcagtgagctgtgaacataccactgcactccagcctggaaaataaagcaagagatgctgcctctaaaaataataataataataataaaaattagccaaacatggtggcacgcatgtgtgatcacagctacttgggagactgaggtgggaggatcgctggagcccggaaagtcgaggctgcag

SEQ ID NO: 210639 - DNA, 201 bp, Homo sapiens
cagctcagatcgcacactctgggctctgtgtttctttaggtaacacacgtgaggtttttgtcactggaattcagtaatctgtgttaatattatcacaaaaraaccggggggcatttgtgtcttctcagaattgctgattaaaacagctgcatggccaggtgcagtggctctcatgcctgtgatcccagcactttgggaggc

SEQ ID NO: 210640 - DNA, 201 bp, Homo sapiens
agatcgcttgaacccgggaggcggaggttgcagtgagctgagatcacgccattgcactgcagcctgggtgacagagcgaaactctgtctcaaaaaaaaaamaaaaaaaaaactaaaggcacttgtcaggtacagccctgcaaaaatgccgtgctcactcgcaaacctgtatgttgacacgtgcggcatcgctgcagtcgga

SEQ ID NO: 210641 - DNA, 201 bp, Homo sapiens
cgtatcttttttttctttttccttttagctggaaataatgacagcaaagccaaacaagttgtaagcaaaataaaagaagaaaccttgaacgacaaaggtascgagagatactccaatggcttttttttgtttttttttttccttgggacaggtcgtttgcgtggttcatggctgagcttcagtcacgtgccaggtggcatt

SEQ ID NO: 210642 - DNA, 201 bp, Homo sapiens
actaaataaaggcccacagcagcagcttgtcaaagccgtggctgctgactctttaaaacaccctcctcagtgtctgtgagtggccccatcccctagcccaygctttcactggaaatctgtgtctgagtgcatttgttcatccgtcgctcagccaaagtctgcgagtcggacccagcaaattggactcgacctaagaagaat

SEQ ID NO: 210643 - DNA, 201 bp, Homo sapiens
acaccctccccaacacttgtaattaactgtagaaatcatcattctggccagcgtggtggctggcacctgtaatcccagcactttgggaggccgaggcgggyggatcacctgaggtcaggagttcgagaccagcctggctaacatggtgaaacctcgagtctactaaaaatacaaaaattagccgagcgtggtggcaggggc

SEQ ID NO: 210644 - DNA, 201 bp, Homo sapiens
ggaatgtcattgtacaggttctatcttcaggttacgagggatacaccagaaaacctaagcatatggaaaacttattcggcaattttctaagtgaacatacyttttcatcgattcatgcgtgtatcaagaaaaacaaaatgaaagtcttacacaccaagaggattgttcgcacaatactgacaacgaaatgtacgggctgac

SEQ ID NO: 210645 - DNA, 201 bp, Homo sapiens; identical to SEQ ID NO: 37083

SEQ ID NO: 210646 - DNA, 201 bp, Homo sapiens
tggtgcccccaatgcagacaccagaagaaagagaagccactgaaaatgcatataacccttgatcttggcagttcacacttcaagagttctgcacttctgckttttctaactctccctaatgttactttcttcccatgccagcactaacctcacctcaatccatcctacatatgactgctcatttcatttttatttttattt

SEQ ID NO: 210647 - DNA, 201 bp, Homo sapiens
gcaagggacagagaattactcacctggtgcccccaatgcagacaccagaagaaagagaagccactgaaaatgcatataacccttgatcttggcagttcacrcttcaagagttctgcacttctgcgttttctaactctccctaatgttactttcttcccatgccagcactaacctcacctcaatccatcctacatatgactg

SEQ ID NO: 210648 - DNA, 201 bp, Homo sapiens
cgtggctttgagattcccccatgctgcgatgtggggggagtctgctctgtctgtcctaactctctctgatcttctgacttgggaaaaacaaactcgaagtyaatcattcccagctcaaagccttgtgcaagtgctctctgccttcacgcttgcttcctttgggagagaaccttcctcttcttgatcggggattcaggaagg

SEQ ID NO: 210649 - DNA, 201 bp, Homo sapiens
gagccaccacgcctgaccgcttctggatctcttgatggtgctttctcagaatgcactgatagtgatttatcctgcatctggagaatgaagcatgagacccrtgattaatagatgtgctccaggctcccttgatttgatgttgccccaggcagcctcagaaggaattgtatttcattctctgcaaatcaggtgggcatcaac

SEQ ID NO: 210650 - DNA, 201 bp, Homo sapiens
cgatctcctgacctcgtgatccgcccgcctcggcctcccaaagtgctgggattacaggcgtgagccaccgcgcccggcctcttttctttctttctttctctttctttctttctttctttctttctctctctctttcttccttccttcccttctttattttttttcctttcttatatagagacagggtctcaccatgttgct

SEQ ID NO: 210651 - DNA, 201 bp, Homo sapiens
gatctcctgacctcgtgatccgcccgcctcggcctcccaaagtgctgggattacaggcgtgagccaccgcgcccggcctcttttctttctttctttctctttctttctttctttctttctttctctctctctttcttccttccttcccttctttattttttttcctttcttatatagagacagggtctcaccatgttgctc

SEQ ID NO: 210652 - DNA, 201 bp, Homo sapiens
gttgcccaggctggagtgcaatggcacggtctcagctcactgcaacctccgcctcccgggttcaagcaattctcctgcctcagcctccggagtagctgggwttacaggcacccgccaccatgcctggctaatttttgtacttttagtagagatggggtttcaccatgttggccaggctggtctcgaactgctgaccttgtg

SEQ ID NO: 210653 - DNA, 201 bp, Homo sapiens
tcacatggctggggaggcctcacaatcatggtggaaggcaaaggagaagcaaaggcatgtctttcatggcggcaggcaagagggcatgtgcaggggaactyccatttataaaaccatcagatcttgtgagactcattcactaccatgagaacagtgtaggggaaaccacctccatgattcaattacctccacctggctcca

SEQ ID NO: 210654 - DNA, 201 bp, Homo sapiens
atgtgcaggggaactcccatttataaaaccatcagatcttgtgagactcattcactaccatgagaacagtgtaggggaaaccacctccatgattcaattayctccacctggctccactcttgacacatagggattattacaattcaaggtgagatttgcatgaggacacagccaaaccatatcagtgcccaaactaatgac

SEQ ID NO: 210655 - DNA, 201 bp, Homo sapiens
ccaccatgctcagataacttttatatttttaatagagatgggttttgccatgttggccaggctggtcttgaactcctgacctcaagtgatctacccgcctyggcttcccaaagtgctgggattacaggcgtgagccactgcatccagcctcttagagagttcttcatggcaatacctaatgtatgacagaaaggacattga

SEQ ID NO: 210656 - DNA, 201 bp, Homo sapiens
gtatttaaaaaaaaaaaattgtttcctcaacaagctaggcatggaaggagaaaaagttaattgtgtgtgtgtgtgtggcagggtctcactttttgttttgtttttttttttgttttttttgttttttttttgagaccgagtctcactctgttgcccaggctggagtgcaatggcacggtctcagctcactgcaacctccgc

SEQ ID NO: 210657 - DNA, 201 bp, Homo sapiens
tgtggtggtgcgtgcctgtaatcccagctacttgggaggctgaggcaggagaatccgttgaacctgggaggcggaggttgcagtgagccaagactgtgccmctgtactccagcctgggcgacaaagcgaaactccatctcaaaaaaaaaaaaaaaaaaaaaaaaagattgtggacacccaagttcttatttgcagaggaag

SEQ ID NO: 210658 - DNA, 201 bp, Homo sapiens
tgaggcaggagaattgcttgaacctgggaggtgaaggttgcagtcagctgagattgtgccactgcactctcgcctgggtgacagagtaagactctgtctcaaaaaaaaaaaaaaaaaaaaaaaaggtagaagggtagacacctagctggccacattatattcaaacctgtattccattgtttccaaacacgccattctttc

SEQ ID NO: 210659 - DNA, 201 bp, Homo sapiens
gaggcaggagaattgcttgaacctgggaggtgaaggttgcagtcagctgagattgtgccactgcactctcgcctgggtgacagagtaagactctgtctcaaaaaaaaaaaaaaaaaaaaaaaaggtagaagggtagacacctagctggccacattatattcaaacctgtattccattgtttccaaacacgccattctttcg

SEQ ID NO: 210660 - DNA, 201 bp, Homo sapiens
ataacaaacaggaaaaaaaatgtggaacagtaattctttctcttaataattgctcaaagggatggtttccagcattggttaccgtgttcttcagtggaccrgagcatctggaggtcttccaacaaatgagacaacttttgcaaaaatactgaaagagaaaggctatgccactggactcattggtatgtacgtttttaaaag

SEQ ID NO: 210661 - DNA, 201 bp, Homo sapiens
ttagtagagatggggtttcaccatgttggccaggctggtctcgaactgctgaccttgtgatccgcccgcctcagcctcccaaagtgctgggattacagggrtgagccactgcgcctggccgacagggtctcactcttacccaggctggagtgcagtggtgcaaccgtggctcactgcaccctgccttcccaggctcaagca

SEQ ID NO: 210662 - DNA, 201 bp, Homo sapiens
tttagtagagatggggtttcaccatgttggccaggctggtctcgaactgctgaccttgtgatccgcccgcctcagcctcccaaagtgctgggattacaggsatgagccactgcgcctggccgacagggtctcactcttacccaggctggagtgcagtggtgcaaccgtggctcactgcaccctgccttcccaggctcaagc

SEQ ID NO: 210663 - DNA, 201 bp, Homo sapiens
agatggggtttcaccatgttggccaggctggtctcgaactgctgaccttgtgatccgcccgcctcagcctcccaaagtgctgggattacagggatgagccmctgcgcctggccgacagggtctcactcttacccaggctggagtgcagtggtgcaaccgtggctcactgcaccctgccttcccaggctcaagcaatcctcc

SEQ ID NO: 210664 - DNA, 201 bp, Homo sapiens
gagtctcactctgttgcccaggctggagtgcaatggcacggtctcagctcactgcaacctccgcctcccgggttcaagcaattctcctgcctcagcctccsgagtagctgggtttacaggcacccgccaccatgcctggctaatttttgtacttttagtagagatggggtttcaccatgttggccaggctggtctcgaact

SEQ ID NO: 210665 - DNA, 201 bp, Homo sapiens
tatttcctgggtttagaacaggatggaaggggaatattgcttgagtgagtcagggctgggtgagcacctgtatatgggcacagcacatccctgcctcccaraaaagaacttaggaaccgcagggtttaggtggtggtgggctgcgaatcccaggatcctcagaataattgccatcagagatttgggtgaacgacgtattta

SEQ ID NO: 210666 - DNA, 201 bp, Homo sapiens
gcttgaggttaaaaatagatattgaaataattgaacaaaataaaagtcatgtcagtaacctacagttcttttaactttgcattaagcagtagagttagaamattataatattcgggggggaaaagatgcattagatcagtgtgggtttttatttatttatttatttattttgagacaggatttcaatccggttgtccaggc

SEQ ID NO: 210667 - DNA, 201 bp, Homo sapiens
gttccatttattgataacaaacaacatgactagtggatacaatgagtataaaattcaataaactatatttctaaaaattaaaaattataaaatgttctttstttaattttttaccaaaaaaaaaaaaaaaacaaattctggggagattcagtcatcgctgtcaaacaaaggtgtattttttccaatagacttttttttttt

SEQ ID NO: 210668 - DNA, 201 bp, Homo sapiens
atatagagacagggtctcaccatgttgctcaagctggtcttaaacacctgggctcaggcgatgctcccaccttggcctcccaacgtgctcagataatgggyatgagccaccacgcctgaccgcttctggatctcttgatggtgctttctcagaatgcactgatagtgatttatcctgcatctggagaatgaagcatgagac

SEQ ID NO: 210669 - DNA, 201 bp, Homo sapiens
ctttcttccttccttcccttctttattttttttcctttcttatatagagacagggtctcaccatgttgctcaagctggtcttaaacacctgggctcaggcratgctcccaccttggcctcccaacgtgctcagataatgggtatgagccaccacgcctgaccgcttctggatctcttgatggtgctttctcagaatgcact

SEQ ID NO: 210670 - DNA, 201 bp, Homo sapiens
cgggatcttccgctggcccggggtgctcccggccggccgagtgattggcgagcccacgagtctgatggacgtgttccccaccgtggtccggctggcgggcrgcgaggtgccccaggacaggtacagaacaacccaaagaaacaattcagctttgcacagacacagcaacacttatggcaaatgaacatgtcactttggctt

SEQ ID NO: 210671 - DNA, 201 bp, Homo sapiens
tcttcttcagtcaggcatggtggctcattcctgtaatcccagtgcttttggaggctgaggtgggaggatcgcctgaggtcaggagttcgagaccagcctgrccaacatggtgaaaccccgtctctactaaaaatacaaaaattagcccaatgtggggctttacaggtgcatgcctgtaatcccagctactcgggaggctga

SEQ ID NO: 210672 - DNA, 201 bp, Homo sapiens; identical to SEQ ID NO: 37122

SEQ ID NO: 210673 - DNA, 201 bp, Homo sapiens
tcctcagaaaccttctttatctcattgccattgacgttaatgtatcctctacccaatctggttctctgtgccatcaagaatgtcagtattataaactggcrgagctttaaacaacaggaatttatcctgtcccagccctggagaccaggagtttgagatcaacgtgtctcagggaaatgttcccgccagaagctctagggg

SEQ ID NO: 210674 - DNA, 201 bp, Homo sapiens
cggagctttaaacaacaggaatttatcctgtcccagccctggagaccaggagtttgagatcaacgtgtctcagggaaatgttcccgccagaagctctaggrgaggctcctccctgcctctgccaactcctgggggccccaggtgtccctgagcttgtggccacatcactccagtctctgcctccgtctctatgtggccttc

SEQ ID NO: 210675 - DNA, 201 bp, Homo sapiens
atccaatgcacactaaccaataacaaggttaataaaaaatataaaatcaaacctctacaggggaactacatgagattgaatgttttaatgtcactaaaacrgagagagagagagagagaaattgagagactcagggagagagaaacttcaaacaagtgaaacaagcagaaaagttaaatcagccaggctgagcatctattt

SEQ ID NO: 210676 - DNA, 201 bp, Homo sapiens
atgctggagggacaaatgtccagagtccctgttccaaccctgagccatgccatgttccttcctgcagagtgattgacggccaagaccttctgcccttgctyctggggacagcccaacactcagaccacgagttcctgatgcattattgtgagaggtttctgcacgcagccaggtggcatcaacgggacagtgagtagggga

SEQ ID NO: 210677 - DNA, 201 bp, Homo sapiens; identical to SEQ ID NO: 37113

SEQ ID NO: 210678 - DNA, 201 bp, Homo sapiens; identical to SEQ ID NO: 37115

SEQ ID NO: 210679 - DNA, 201 bp, Homo sapiens
cctcctgcctcggcctcctaaagtgctgggattacaagtgtgagccactgtgcccagcctgcatgctgcacttttaagtttttgatattttgtccttgtasgttgcctaaaattctgaccaaaggatggggtgcatataaagtcatacatcaatctccaacaaaggatatcaaaattatccaacagctgacttccattatg

SEQ ID NO: 210680 - DNA, 201 bp, Homo sapiens
ccttctgcccttgctcctggggacagcccaacactcagaccacgagttcctgatgcattattgtgagaggtttctgcacgcagccaggtggcatcaacggsacagtgagtaggggagccccttcctaacacccttagggaaagagtccctctgtgcaggaaagcaccatgccctagaacaggctagggatggagctgcatt

SEQ ID NO: 210681 - DNA, 201 bp, Homo sapiens
ttttaggaataagcatgggcctttcctcctctttgtttcctttctacacgttcacatccctcttatcactatggagaacttcctcgggaagagtctccacrggctgtatggggacaacgtagaggagatggactggatggtaggtaagtgcacttccagggaaaatgggctgcttcccttccagcaatagaagcaggaaag

SEQ ID NO: 210682 - DNA, 201 bp, Homo sapiens
ttcgtcacagtttctagttcttacattttggtttttttattttttatttaaatagagactggggggtgttctctctatcttgcccatgctggtcttgaaakgctgggctcaaaagatccccgctccttgacctcccagagtgctgggattacaggcatgagccaccgtgcccaggcagcttttatattctgatgctttgac

SEQ ID NO: 210683 - DNA, 201 bp, Homo sapiens
gtgttctctctatcttgcccatgctggtcttgaaatgctgggctcaaaagatccccgctccttgacctcccagagtgctgggattacaggcatgagccacygtgcccaggcagcttttatattctgatgctttgacatcttagggctttgctgaccttggcaggactggccctcccagggctagccaattcttagagatag

SEQ ID NO: 210684 - DNA, 201 bp, Homo sapiens
acaaaataatctgcttccggacactgggattctctcatcactttgtgatcactcatgggctatgaaagctgataaaggggatggagaccctatgaccactytcttcctctttctctgaagaccatctggctgtgtattgaaacacgttttacattcttaacatagtattaaacatttttgaagccttttcactcgggaaga

SEQ ID NO: 210685 - DNA, 201 bp, Homo sapiens; identical to SEQ ID NO: 37120

SEQ ID NO: 210686 - DNA, 201 bp, Homo sapiens
ctgccctgggctcgggaagcagaagacaaaataatctgcttccggacactgggattctctcatcactttgtgatcactcatgggctatgaaagctgataarggggatggagaccctatgaccactttcttcctctttctctgaagaccatctggctgtgtattgaaacacgttttacattcttaacatagtattaaacatt

SEQ ID NO: 210687 - DNA, 201 bp, Homo sapiens; identical to SEQ ID NO: 37121

SEQ ID NO: 210688 - DNA, 201 bp, Homo sapiens
ggtcagccctttcggccgtcctcctcctcgcaagctcctattttgtgggtgctctgattgtccatgccgattgctttctgatgagaaaccacaccatcacrgagcagcccatgtgcttccaaagaacgacaccccttattctgcaggaggttgcgtcctttctcaaaaggtcagcagaaaagggtcagcttcctccaagca

SEQ ID NO: 210689 - DNA, 201 bp, Homo sapiens
accaccaatcctggctaatttttctatttttgtagatttttttgtagagacagggtctcgccatgttggcccggctggtcttgaactcctggccctaaackatcctcccgctgtggctttccaaagtgctgggattacaggcatgagccaccgcgtccagccactcattcctatttaaatgagttgatgtttcctcgaaag

SEQ ID NO: 210690 - DNA, 201 bp, Homo sapiens
aatctgcttttattgtgtcactaaatacataaatacatcagttcagaggtaggccacagacttgatatctaaccgtacgtcatatgactgttcaaacatgwttgagggtcctatatttagacaccaatataaccagcccgataaaacaaacacaaccagtcatgttccccaggcaagtcagaagcagcccataatatgctt

SEQ ID NO: 210691 - DNA, 201 bp, Homo sapiens
atggtttccagcattggttaccgtgttcttcagtggaccggagcatctggaggtcttccaacaaatgagacaacttttgcaaaaatactgaaagagaaagbctatgccactggactcattggtatgtacgtttttaaaagtggtaagcacatgacttttatatggaagggacattcagctaaagagtttggaaaggaaagt

SEQ ID NO: 210692 - DNA, 201 bp, Homo sapiens
agaaaaatctgcttttattgtgtcactaaatacataaatacatcagttcagaggtaggccacagacttgatatctaaccgtacgtcatatgactgttcaamcatgtttgagggtcctatatttagacaccaatataaccagcccgataaaacaaacacaaccagtcatgttccccaggcaagtcagaagcagcccataata

SEQ ID NO: 210693 - DNA, 201 bp, Homo sapiens
aggaagactgtaagcagggagggggcttccaggtcacagataggtgagagaggaacagttgccttcttttgagtttctgatgagcctttccaaaggaggcratcagatacgcatctatctcagtgagcaaaggggggactttgactagaatgggaggcagaggccctaagcagttccccgcttgacttttccctttagctt

SEQ ID NO: 210694 - DNA, 201 bp, Homo sapiens; identical to SEQ ID NO: 37134

SEQ ID NO: 210695 - DNA, 201 bp, Homo sapiens
aaaattagcccaatgtggggctttacaggtgcatgcctgtaatcccagctactcgggaggctgaggtgggagaatcccttgaacctgggaggtggaggttkcagggaggtgaggtcacatcactgcactccagcctgggtgacacagggagaacctgtctcaaaaaaaaaaagtcgttttctttaattgacgtttgaagaa

SEQ ID NO: 210696 - DNA, 201 bp, Homo sapiens
cgctgtactgctaagtttggcaccatcagcttccagcgacatttccgcctcccgaccgaacatccttcttctgatggcggacgaccttggcattggggacrttggctgctatggcaacaacaccatgaggcaagggacagagaattactcacctggtgcccccaatgcagacaccagaagaaagagaagccactgaaaatg

SEQ ID NO: 210697 - DNA, 201 bp, Homo sapiens
agttctgcaaatgagatggacaggagcatgacgcagtctctgacagtttgtgtttcaggagctggctgccagcgatgctcgctgtactgctaagtttggcrccatcagcttccagcgacatttccgcctcccgaccgaacatccttcttctgatggcggacgaccttggcattggggacattggctgctatggcaacaaca

SEQ ID NO: 210698 - DNA, 201 bp, Homo sapiens
cagcatggcgaaaccctgtctctacgaaaaagaaaaagaaagaaagaaaaggaacatcaacttaatgaaatatttggcatctcaaacaatgttctcgtagrccatgataaaaaaaaataagaaaaaatatattcttgcatcaaaaatttctgtaatgctacctatttttccccttggtgtgtatgaaaatgtctttactag

SEQ ID NO: 210699 - DNA, 201 bp, Homo sapiens
gatgtcctcaaagctattctgaaatgtgatgataatatcaatacctcttaaaatagtgatgccaacttcccccatacacaagttctgcaaatgagatggayaggagcatgacgcagtctctgacagtttgtgtttcaggagctggctgccagcgatgctcgctgtactgctaagtttggcaccatcagcttccagcgacat

SEQ ID NO: 210700 - DNA, 201 bp, Homo sapiens
aggaaagtgggtgaggtgctgtgggatttcccactagacagaaagctgcatgtatctaggaaccatgttcctttccaggttgttttctgcaaagtagatastcaagaaataccagctcaggcaaggtggctcatgcctataatcccagtactttgagaggccgaggcggaaggattgcttgagcccagaagtttgaaaccc

SEQ ID NO: 210701 - DNA, 201 bp, Homo sapiens
ttttagtcctttttcactgaattatattgcttataacctgcacataacaggaaagtccatcttctcgctaaggttttcaataaattaatcatttactttgytgccaaaaatgcaatccactaggcaaagtcatataggaagtccattttcaatttaattttaagtaagagagatttttaccaagtgttctatttttgaata

SEQ ID NO: 210702 - DNA, 201 bp, Homo sapiens
ggtggctcacgtctgtaatcccagcactttgggaggtcgaggcgggtggattgcttgagcccaggagtttgagaccagcctgagcaaaagaggaaaccccmcctctacttaaaaaaaaaaaaatcaatagccaggcatagtggcatgtgcctgtagtttcagctacttgggaggctgaggtaggaggatcgcttgagccca

SEQ ID NO: 210703 - DNA, 201 bp, Homo sapiens
gggggactttgactagaatgggaggcagaggccctaagcagttccccgcttgacttttccctttagcttattgacttgcgggccttgagatttattttccyttcacaaagctcattgtctttctcagaagactggttttgtgcctgaatcctgctaggagcaaacacccctcccagcatccccgaaaaggcgttgagggga

SEQ ID NO: 210704 - DNA, 201 bp, Homo sapiens
cccgggaggcggagcttgcagtgagccaagatcgcgccattgcactccagcctgggcaacagagcaagactccgtctcaaaaaaataaaaaagaaagattaaaaaaaaaaaaaaaaaaccctgggatccctagaaaagaaatcttcaggttaagagaaaagattgtggagaccaaggttattttgaagtcttgtagcggct

SEQ ID NO: 210705 - DNA, 201 bp, Homo sapiens
tttttttttttttttttttttttttgagacggagtctcgctctgtcgcccaggctggagtgcagtggcgcgatctcggctcactgcaagctccgcctcccrggttcacaccattctcctgcctcagcctcccgagtagctgggactacaggcgcccgctaccacgcccggctaattttttgtatttttagtagagacgggg

SEQ ID NO: 210706 - DNA, 201 bp, Homo sapiens
ggagtgcagtggcgcgatctcggctcactgcaagctccgcctcccaggttcacaccattctcctgcctcagcctcccgagtagctgggactacaggcgccygctaccacgcccggctaattttttgtatttttagtagagacggggtttcaccgtgttagccaggatggtctcgatctcctgacctcgtgatccgcccgcc

SEQ ID NO: 210707 - DNA, 201 bp, Homo sapiens
gtgcagtggcgcgatctcggctcactgcaagctccgcctcccaggttcacaccattctcctgcctcagcctcccgagtagctgggactacaggcgcccgcyaccacgcccggctaattttttgtatttttagtagagacggggtttcaccgtgttagccaggatggtctcgatctcctgacctcgtgatccgcccgcctcg

SEQ ID NO: 210708 - DNA, 201 bp, Homo sapiens
gatctcggctcactgcaagctccgcctcccaggttcacaccattctcctgcctcagcctcccgagtagctgggactacaggcgcccgctaccacgcccggstaattttttgtatttttagtagagacggggtttcaccgtgttagccaggatggtctcgatctcctgacctcgtgatccgcccgcctcggcctcccaaagt

SEQ ID NO: 210709 - DNA, 201 bp, Homo sapiens
ctcgatctcctgacctcgtgatccgcccgcctcggcctcccaaagtgctgggattacaggcgtgagccaccgcgcccggcctcttttctttctttctttctctttctttctttctttctttctttctctctctctttcttccttccttcccttctttattttttttcctttcttatatagagacagggtctcaccatgttg

SEQ ID NO: 210710 - DNA, 201 bp, Homo sapiens
tcgatctcctgacctcgtgatccgcccgcctcggcctcccaaagtgctgggattacaggcgtgagccaccgcgcccggcctcttttctttctttctttctctttctttctttctttctttctttctctctctctttcttccttccttcccttctttattttttttcctttcttatatagagacagggtctcaccatgttgc

SEQ ID NO: 210711 - DNA, 201 bp, Homo sapiens
gatgcttgtcacatcaacatcctttttgcctctcaggaaaatggcatctgggtctcaactgtgagtcagccagtgatcattgccaccaccctctccatcayggctttgaccatttctacggaatgcctttctccttgatgggtgattgcgcccgctgggaactctcagagaagcgtgtcaacctggaacaaaaactcaact

SEQ ID NO: 210712 - DNA, 201 bp, Homo sapiens
ctctatgccaactctgtaatgattatctttccaccaggaggaacaatgtggaaagtccactttgtgacgcctgtgttccagccagagggagccggtgcctrctatggaagaaaggtctgcccgtgctttggggaaaaagtagtccaccacgatccacctttgctctttgacctctcaagagacccttctgagacccacatc

SEQ ID NO: 210713 - DNA, 201 bp, Homo sapiens; identical to SEQ ID NO: 37117

SEQ ID NO: 210714 - DNA, 201 bp, Homo sapiens; identical to SEQ ID NO: 37156

SEQ ID NO: 210715 - DNA, 201 bp, Homo sapiens
cctcatcctataaggacaccggccattgcagcaaggcctgcccgctgtaaagatctcatcttctgttgatgacgtttgcaaacaacgtctgttgtgggccraattctggcctcctccaaatttgtaggttgaagccctaaccgccggtacttcagggtgtgaccgttttcagagatggggtctttgaagaggtaattaagt

SEQ ID NO: 210716 - DNA, 201 bp, Homo sapiens; identical to SEQ ID NO: 37158

SEQ ID NO: 210717 - DNA, 201 bp, Homo sapiens
tggctcataggtaagtcaaggtaccatggagcctcactccaccctcggcctcaggtttgaacatagggcgtaacagactggccatctgaatatgaaccaasttgcaataaagaataagggcggtggctcacgcctgtaatcccagcactttgggaggccaaggcgggcggatcacctgaggtcaggagtttgagaccagcc

SEQ ID NO: 210718 - DNA, 201 bp, Homo sapiens
tattctcaaggaagttttcttctttcagacacaagcatgggccatttctcctcttcctttctttgctgcatgtgcacattccccttgtgaccacgagtgcrttcctggggaaaagtcagcatggcttatatggtgataatgtggaggagatggactggctcataggtaagtcaaggtaccatggagcctcactccaccctc

SEQ ID NO: 210719 - DNA, 201 bp, Homo sapiens
actagtggatgctgctttgttttcttggtcctgaaactttccattttctgtaaaggtaaggttcttaatgccatcgaagacaatggtttaaagaactcaayattcacgtatttcacctctgaccatggaggacatttagaggcaagagatggacacagccagttagggggatggaacggaatttacaaaggtgagttgtgg

SEQ ID NO: 210720 - DNA, 201 bp, Homo sapiens
tccaagacacgccccgtcctgtccccttccgcggccattgccctgctggccacaccggatccctccccatggccttattcctcccctgccccccagtagarccgtgtcccctcacacaccctgagacacacccctcgttcgcgtcctccccggagagcacagccacgatcccccaacactaagacaccacctatccactgc

SEQ ID NO: 210721 - DNA, 201 bp, Homo sapiens
tgcttctgaagacgtgtgaacctaaaactgcaaatgcctttaaaccaaatatcctactgatcatggcggatgatctaggcactggggatctcggttgctaygggaacaatacactgaggtacagttggttgttgctattggtgatgatgttatgtgagtttgacggaatggtgcatttaaaatctgcctggagaaattagg

SEQ ID NO: 210722 - DNA, 201 bp, Homo sapiens
cgaacaccctgagcaggcctggttgtaattcacagaacatgcggttcatctgtttacagtgtacagttcagggacttttattctattcatggagctgtgcrtctgtcaccacaaaccatattagagcatttgcatacccccaaagaaactctgcatccccttagccatcacctccagcgaggagcgaatctgtgtccccta

SEQ ID NO: 210723 - DNA, 201 bp, Homo sapiens
gatataacctttttttctgagacagggttggctctgtcacccatgctggagagcagtggtgtgatcatggctcactgcaacctctgtctccaaggctcagrcaattctcgtgcctcagcctcttgagtggccgagattacaggcacctgccaccccaccctgttaatttttttatttttagtagagatggggtttcaccat

SEQ ID NO: 210724 - DNA, 201 bp, Homo sapiens
tggttgtaattcacagaacatgcggttcatctgtttacagtgtacagttcagggacttttattctattcatggagctgtgcgtctgtcaccacaaaccatrttagagcatttgcatacccccaaagaaactctgcatccccttagccatcacctccagcgaggagcgaatctgtgtcccctaaacgcctacgtcgaagtcc

SEQ ID NO: 210725 - DNA, 201 bp, Homo sapiens
gaaaggagggagatgttggtttatgccgccaagcaccaggcagtctgctggttacctccttcattccttacccagcctgtgtgtttagaggtgctgtcccygtcatacacatgagaacgtgggagcgcagtggtgaggccacccgccccgacctggtggtgggatctctgtgcagggtccccagttcccctctgtgctttt

SEQ ID NO: 210726 - DNA, 201 bp, Homo sapiens; identical to SEQ ID NO: 37166

SEQ ID NO: 210727 - DNA, 201 bp, Homo sapiens
gtgacaacatgcagtattggtcattctgtgcctggcttattttagttaacatagtgacctcctgtttcatctgtattgctgcaaatgacaggatttcattytttttgatggctgaatagtattccatcacgtacatataccagatataacctttttttctgagacagggttggctctgtcacccatgctggagagcagtgg

SEQ ID NO: 210728 - DNA, 201 bp, Homo sapiens
acagggttggctctgtcacccatgctggagagcagtggtgtgatcatggctcactgcaacctctgtctccaaggctcaggcaattctcgtgcctcagcctyttgagtggccgagattacaggcacctgccaccccaccctgttaatttttttatttttagtagagatggggtttcaccatttcaccatgttggccaggctg

SEQ ID NO: 210729 - DNA, 201 bp, Homo sapiens
gagtggccgagattacaggcacctgccaccccaccctgttaatttttttatttttagtagagatggggtttcaccatttcaccatgttggccaggctggtyttgaaatcctgacctcaactgagctgccaggctcagcctcccgaagtgctgggattacaggcttgagccactgtgcccagcctccattcttttttatggc

SEQ ID NO: 210730 - DNA, 201 bp, Homo sapiens
tgagacagggtctggctctgtcacccatgctggagtgcagtggtatgatcatggctgactgcaagctccacctcccgggctcaagccgtcctcccacctcrgcctcccaagtagctgggaccacagactcaagccaccacgcccagctaatttttctatttttggtagagatggcatttcaccgtgttgcccaggctggcc

SEQ ID NO: 210731 - DNA, 201 bp, Homo sapiens
aagcttactgtatgtttgtactctttaaaccacttctctttgtccttcacccttcccagcctctggtctctatcattctattctctatcttcatgtgatcratttttttttagctctcccatatgagtgacaacatgcagtattggtcattctgtgcctggcttattttagttaacatagtgacctcctgtttcatctgta

SEQ ID NO: 210732 - DNA, 201 bp, Homo sapiens; identical to SEQ ID NO: 37176

SEQ ID NO: 210733 - DNA, 201 bp, Homo sapiens
ggatccccttaggtcaggaattcgagaccagcctggccaacgtggtgaaaccccatctctacaaaaaatacaaaaattggccgagtgtggtggcttgtgcytgtagtcccagctactcagggggctgaggcatgagaatcacttgaccaggaggcagaggttgcaatgagctgagattgtgccactgcactgcagcctggg

SEQ ID NO: 210734 - DNA, 201 bp, Homo sapiens
catctgtattgctgcaaatgacaggatttcattctttttgatggctgaatagtattccatcacgtacatataccagatataacctttttttctgagacagsgttggctctgtcacccatgctggagagcagtggtgtgatcatggctcactgcaacctctgtctccaaggctcaggcaattctcgtgcctcagcctcttga

SEQ ID NO: 210735 - DNA, 201 bp, Homo sapiens
ccaccgatattcaagaggccagggagtagcatgattctggaaatattgctgtggctgtttttgggaagctgaggctgccccagtgtgcatgtgtgcatccrggtggctgtgcgtattcacatacctatgcacaaatacatccagatgtgtgtacagactgggcagtttccggcaaaatcctaacgatgtcttctacttaca

SEQ ID NO: 210736 - DNA, 201 bp, Homo sapiens
ttctgcacaaaatcaaccttctacacagccagtgacttcatgtcatcatcagaagttaccgaaagtgaagcgataaagttaatgttcaggacaatgcagasacgctgtcttccttctatggccttcaagaaaccctggagaggaccagtgaggctgcagattcttaaaagagcatagacattaaaattcttgcagaatctg

SEQ ID NO: 210737 - DNA, 201 bp, Homo sapiens; identical to SEQ ID NO: 37169

SEQ ID NO: 210738 - DNA, 201 bp, Homo sapiens
aaccaatatctggtgttgaagcggccaggtgtgtaggactttgttatggcagccccagctaacactcctccaactctctcagcaccctaaccctcagcctytggcagccactaatatactttccatctctatagattcccctgttagggacatttcatacagatggaattatgtaacctgtggtcttttatgtcaggaggc

SEQ ID NO: 210739 - DNA, 201 bp, Homo sapiens
ctgtctattagggaagctcccgggagaatcagtgcccaggggtttctgttgggggctggtcctgcaggcactcactgcctggcacccacccgaattccagrctcccagaaccaaaggaggtgtttagcatgaaccacgttgcttttgcatatagtttaggcacagtcagcttattattttaatggtgtgacttctccattg

SEQ ID NO: 210740 - DNA, 201 bp, Homo sapiens
tgcgccaccatctcctttacccatgtggccatgtgtcttggggtctgttatgattaaaaagtaaggacaggtcggatgcaatggctcatgccgataatccyagcactttgggaggctagatgggcggatccccttaggtcaggaattcgagaccagcctggccaacgtggtgaaaccccatctctacaaaaaatacaaaaa

SEQ ID NO: 210741 - DNA, 201 bp, Homo sapiens; identical to SEQ ID NO: 37154

SEQ ID NO: 210742 - DNA, 201 bp, Homo sapiens
ctacttacaggtgggaagggcatgggaggatgggaaggtgggatccgcgtgcccgggatcttccactggccgggggtgctcccggccggccgagtgattgragagcccacgagcctgatggacgtgttccctactgtggtccagctggtgggtggcgaggtgccccaggacaggtacgtggagataaggctgcctgttccc

SEQ ID NO: 210743 - DNA, 201 bp, Homo sapiens
aacaaataattagctagatgtcgtggcgcacagctgtagtctcagctacttaggaggctgaggcgggaggattatttgagcctgggaggtcaaaactgcartgagctaagattgcactactgcactccgggctgggagacagagtaagaccctgccttaaaaaaaaaaaaaaaaaaatgccttaaagaaaataataagaga

SEQ ID NO: 210744 - DNA, 201 bp, Homo sapiens
ctcctttctgcacggagaggaaaggagggagatgttggtttatgccgccaagcaccaggcagtctgctggttacctccttcattccttacccagcctgtgkgtttagaggtgctgtccccgtcatacacatgagaacgtgggagcgcagtggtgaggccacccgccccgacctggtggtgggatctctgtgcagggtcccc

SEQ ID NO: 210745 - DNA, 201 bp, Homo sapiens; identical to SEQ ID NO: 37159

SEQ ID NO: 210746 - DNA, 201 bp, Homo sapiens; identical to SEQ ID NO: 37161

SEQ ID NO: 210747 - DNA, 201 bp, Homo sapiens
actcccttcttgtctgcatccaggtggaagcgtctggaaggttcattacacgaccccgcagttccaccccgagggagcgggggcctgctacggccgaggcrtctgcccatgctccggggagggcgtgacccatcacagaccccctttgctctttgacctctccagggacccctccgaggcacggcccctgacccccgactc

SEQ ID NO: 210748 - DNA, 201 bp, Homo sapiens
aagcgcattgaactagtggatgctgctttgttttcttggtcctgaaactttccattttctgtaaaggtaaggttcttaatgccatcgaagacaatggtttraagaactcaacattcacgtatttcacctctgaccatggaggacatttagaggcaagagatggacacagccagttagggggatggaacggaatttacaaag

SEQ ID NO: 210749 - DNA, 201 bp, Homo sapiens
aacgtcttaatttagtggtaagaccttcgccttcccagcgagctgccttgaaatgcctacttcccttgccaaattgtagatagtcatttctgtgtttcgcytttctctccagggactctttgccggtgctactgtttttatgcttgcttctgaagacgtgtgaacctaaaactgcaaatgcctttaaaccaaatatcctac

SEQ ID NO: 210750 - DNA, 201 bp, Homo sapiens
aatcctagcactttgggaggctagatgggcggatccccttaggtcaggaattcgagaccagcctggccaacgtggtgaaaccccatctctacaaaaaatayaaaaattggccgagtgtggtggcttgtgcctgtagtcccagctactcagggggctgaggcatgagaatcacttgaccaggaggcagaggttgcaatgagc

SEQ ID NO: 210751 - DNA, 201 bp, Homo sapiens; identical to SEQ ID NO: 37113

SEQ ID NO: 210752 - DNA, 201 bp, Homo sapiens; identical to SEQ ID NO: 37167

SEQ ID NO: 210753 - DNA, 201 bp, Homo sapiens
gaggtggaggttgcagtgagcccggatcatgccattgaactgcagcctgggcgacaagagtgaaactccatctcaaaaaataataataaaaattaaaattaaaaaaaaaaggaaagttaggattttcctttcaatttacttctaggaagtcggcatggaaagccttaggttccctgcctccagaccctattctcctgcctc

SEQ ID NO: 210754 - DNA, 201 bp, Homo sapiens
ttggggaacaggtggtatttggttacataaataagcttttttttttttttttttttgagacagagtctcacactcttgcccaggctggagtgcaatggcaygatctcggctcactgcagcctccgcctcctgggttcaagcaattctcctgtctcagcctcccgagtagctgggattacaggcatgcgccaccatctcctt

SEQ ID NO: 210755 - DNA, 201 bp, Homo sapiens
cggaggtcccgagagccaggagatgacgcggatgaaggaggggcgggcgcccggcccagatcccgcagctgagagggcggaagccttggcactagcggcgyccgggcgcggagtgcgcagggcaaggtcctgcgctctgggccagcgctcggccatgcgatccgccgcgcggaggggacgcgccgcgcccgccgccaggtg

SEQ ID NO: 210756 - DNA, 201 bp, Homo sapiens
aagtgatcctcccgcctcagcctcccaaagtgttgggattacaagcatgagccaccacgcctggcccaccatttattctttctgtgttcacccactgatgractcagaaggtgatcccctgccttggctcttgtgaatagtgctggagtgaacgtatgggtgcaggggtccctttggtgtactgtatattctgtgtattct

SEQ ID NO: 210757 - DNA, 201 bp, Homo sapiens
gggtgggggcctggggagggggtcgcgagcacggcgaggggcgccccgggcgagcctgggcccctgtaaagggcgtggttgtgtccggcgccttgtagtcyccaaaatgtagctggaggcgcgttctgtgcccgggaaagacgccagacagcagagcccagggatggggggcgactgaggggacgaagggcgggtggagga

SEQ ID NO: 210758 - DNA, 201 bp, Homo sapiens
ggacgcggcccatactaaggcctagggtgggggcctggggagggggtcgcgagcacggcgaggggcgccccgggcgagcctgggcccctgtaaagggcgtsgttgtgtccggcgccttgtagtctccaaaatgtagctggaggcgcgttctgtgcccgggaaagacgccagacagcagagcccagggatggggggcgactg

SEQ ID NO: 210759 - DNA, 201 bp, Homo sapiens
tgcacaaaatcaaccttctacacagccagtgacttcatgtcatcatcagaagttaccgaaagtgaagcgataaagttaatgttcaggacaatgcagagacrctgtcttccttctatggccttcaagaaaccctggagaggaccagtgaggctgcagattcttaaaagagcatagacattaaaattcttgcagaatctgaat

SEQ ID NO: 210760 - DNA, 201 bp, Homo sapiens
atgtatacactgaataacgatcaaacagcatacttacagtgtccatctcctgagtacaatacattttgttagctttggtcaccctactctgctatcagacrttgaatgtactcctttaagcttactgtatgtttgtactctttaaaccacttctctttgtccttcacccttcccagcctctggtctctatcattctattct

SEQ ID NO: 210761 - DNA, 201 bp, Homo sapiens
cctccaagacacgccccgtcctgtccccttccgcggccattgccctgctggccacaccggatccctccccatggccttattcctcccctgccccccagtasagccgtgtcccctcacacaccctgagacacacccctcgttcgcgtcctccccggagagcacagccacgatcccccaacactaagacaccacctatccact

SEQ ID NO: 210762 - DNA, 201 bp, Homo sapiens
cccgacctggtggtgggatctctgtgcagggtccccagttcccctctgtgcttttctcacactcaaagccactgtcccattcacaggagccgcaacacccyaacttgtccgaagctgtggttttctaaaggacaaccattgttcctccttttcaagtttcctgccactttatttttattttgaatttttttaaagtttttt

SEQ ID NO: 210763 - DNA, 201 bp, Homo sapiens
aatatatgccacaatatatctttgttgaagtgtaagtttgttccacttttctatttttcattttccaacttttattttaggttcgggggtacatatgaaartttgttacaaggataaattgtatggggctggtataactgctagccatatgcagaagattgacactggatcccttccttttgccatatatgaaaatcaact

SEQ ID NO: 210764 - DNA, 201 bp, Homo sapiens
ttcttctgattatccacttggcaaaattttaacactttgtaaactgcttccttgaaaataaataagctgtgtttcatcataacgctctgacttctgttccracagaccacacctgtgtggttcaccgttatatttctagagccaagcatgtattctactatctccattttttaaagctccccagatgattccaatgtgcag

SEQ ID NO: 210765 - DNA, 201 bp, Homo sapiens
cctagtataaattagaccttttccaaacttcatgcatagaccaaggggaagattattggcatcctgtttacctccaccaaagcaaaattttacttatgtgrtactgatttctctttctctcatttctccacttgatctttgtcacgactcacagagctctgagtcagcatccaaccttaaatgatgacctgccaaatcgta

SEQ ID NO: 210766 - DNA, 201 bp, Homo sapiens; identical to SEQ ID NO: 37207

SEQ ID NO: 210767 - DNA, 201 bp, Homo sapiens
tgtagattcttagatccagattgtgaggaggggaggagagaggtataggtgagccgggggcggaagtgggggcaggatcatcttaaggaaggagaccactrctactactgctgccctcctcccaccaccttgcctcgttcacaagacaggaggagagaaaaagcaaaaagttggaaaaaaaaaaaaaagtaagataaatag

SEQ ID NO: 210768 - DNA, 201 bp, Homo sapiens
tgctactactgctgccctcctcccaccaccttgcctcgttcacaagacaggaggagagaaaaagcaaaaagttggaaaaaaaaaaaaaagtaagataaatwgccagacaaccttggcaccaccacccggccctaggagttaaaaaaagtaataataataacatcaacccctgacctaaactacttgtgttatctgtgaatt

SEQ ID NO: 210769 - DNA, 201 bp, Homo sapiens
acccaggcaaaaactccattctttgtcctcctttgctcctcaaaaatattcaagggacagtctctctttcatatattttggctgcagatacaggaagccasctggcagagtgttttcattaccttcatttcacattatttgattgcaataaacagatgaagggaaatgttttccccattacagaagggaactgataggtat

SEQ ID NO: 210770 - DNA, 201 bp, Homo sapiens
cagcgaatctcatcatatctgtccatgtaattggttctgaaaactgccaccaacttagccacacctcctttgtcttcctagtgaacctgtgtgaaggcaaygtcgtgcaggtcttcctgtggactagacatcccaatcttacctcacccttgataatgcagtaagggacccccattttgggacacagggcaggcaggaaga

SEQ ID NO: 210771 - DNA, 201 bp, Homo sapiens
tgagacccaggcagaatccgcaaggctacttatgacttggtcttggaagccattcagtgtcatttcaactgtatgctgttggtcaaaagcaagtcataaarataactgagattcaaggggaagggactacataagggcacaaatactggaaggtgtgtgtgtgatttaattgacacttctttcagaaaactttttcagatg

SEQ ID NO: 210772 - DNA, 201 bp, Homo sapiens
ccatctgacaaagagggtgaggtctctttggggctgtatgtcctgtccaatgccaaaattcttaggctttttctcaaacagaggattcacaacttttttgkcttcctgcttcttcactgatagcaggggcgggggccgccttctttcccttagccttctttcctattggcatcttgggtggctagaggagaacgggtttgc

SEQ ID NO: 210773 - DNA, 201 bp, Homo sapiens
gtcccagacattctcttcatgtggtgaggctggacttcctcaagctatggtggtctcatggtagttggatttctcatatggctgctagcttctaccagagygagctttctgagacccaggcagaatccgcaaggctacttatgacttggtcttggaagccattcagtgtcatttcaactgtatgctgttggtcaaaagcaa

SEQ ID NO: 210774 - DNA, 201 bp, Homo sapiens
gatagaatagaataggtagaatttttggggactggccatatattttctgtcccagacattctcttcatgtggtgaggctggacttcctcaagctatggtgrtctcatggtagttggatttctcatatggctgctagcttctaccagagcgagctttctgagacccaggcagaatccgcaaggctacttatgacttggtctt

SEQ ID NO: 210775 - DNA, 201 bp, Homo sapiens
catttcactcagtgatcccaacagacctgctgtggataggatggctctactctttgtaaacgttgaacttttggaatacacatacagacttgcatttatcrgtacctcataaagtattttattacagagggactttctaaatatctcttgaatgaataaatgaaatgaaattcagaagttaggaacatgcctcacctgctc

SEQ ID NO: 210776 - DNA, 201 bp, Homo sapiens
cctcattgttactcatttaaaagactattactcagtgttagtaactttctgttcacatgtttagaacttcagctgggatagaatagaataggtagaatttytggggactggccatatattttctgtcccagacattctcttcatgtggtgaggctggacttcctcaagctatggtggtctcatggtagttggatttctcat

SEQ ID NO: 210777 - DNA, 201 bp, Homo sapiens
cgcggctagtagcgcccgcgcgctccatcgggccggtagaggccccgccccgcgcggccaagcgcgcacctccctcccaacttcccaacgcgcgggggcgsgcgactgcgcgctggggcccacctacgagcgaggcgccgccagagggcgcgtcctgccaagatatccggagcggagctggtgcagtcacccttccggaca

SEQ ID NO: 210778 - DNA, 201 bp, Homo sapiens
atcgggccggtagaggccccgccccgcgcggccaagcgcgcacctccctcccaacttcccaacgcgcgggggcgggcgactgcgcgctggggcccacctaygagcgaggcgccgccagagggcgcgtcctgccaagatatccggagcggagctggtgcagtcacccttccggacaggcagttcttgcagtgcggagcgtgg

SEQ ID NO: 210779 - DNA, 201 bp, Homo sapiens
ggagcaggcaggagccccaccctcctgggtgcagctatagctgctcaaaccacagctgcagacctgggcatctctgcactcttgggggccctgtaagaccycccaccccattcctgcaggctaagaagtgtctcctcccattgcctggcctctttctgctcccagcacccactccattcccagagcaaggttggagctgag

SEQ ID NO: 210780 - DNA, 201 bp, Homo sapiens; identical to SEQ ID NO: 37202

SEQ ID NO: 210781 - DNA, 201 bp, Homo sapiens
gtaatctcatttgcttggggtgtctacaggcatagtgttttccccatatgtgtggcccacagatatgggtcataaaagtaaacagaaatacacacacacayacacacacacacacacacacacacacacacacacacagtgtgggatatctactccatggtgggctctaaccagctttgatagattgtattactgttccta

SEQ ID NO: 210782 - DNA, 201 bp, Homo sapiens
ttctacctcaaatttattttctatcatttttttcctgtccctgttcttggattcttcaatctcaattggcttgacttggcttttctcttcctctctgtccyacagttctttcttttcattacagaaagtaaaaagtgaaagtcactcattagctcaccaaatcccactccaccacacagatatcactgttaatcaaccaca

SEQ ID NO: 210783 - DNA, 201 bp, Homo sapiens
acccgggaagcacaggaggtcagggaattccctttgctagtcaaagaaaggggcgacagacagcacctggaaaattgggtcattcccaccctaatactgcrcttttccaatggtcttagcgaacggcacaccaggagattatatcccatgcctggctccgagggtcctacacccacagagtctcactgatacaggagcacc

SEQ ID NO: 210784 - DNA, 201 bp, Homo sapiens
ccttccggacaggcagttcttgcagtgcggagcgtggaagggctgcccagttctcaccagtcgtgcttctgaagcgctaggcgtctgatcacgcacaggamgtctgattgcctgaactgcccgtcaaggaggtggcatgtgttcatcattcatttattatttaatcaacatcgactatcatgtgtcagacactccgctggg

SEQ ID NO: 210785 - DNA, 201 bp, Homo sapiens
atcagacccaacaccagatcctgggggtgacaaagtccggtagagtcaaaggattgagaaaaccacagtttgagaagtaaagtgggagcagggggccatcrcaattgtggaggctgcgaaggctccgagctctgggagcccacgctgtttattggtaatccaacagagaatcaggtggtgagaatgtgggggtcaaaagag

SEQ ID NO: 210786 - DNA, 201 bp, Homo sapiens
gtagtattcacagtagcaaagacttgaaaccaagccaaatgtccaacaatgatagactggattaagaaaatgtggcacatatacaccatggaatactatgyagccataaaaaatgatgagttcatgtcctttgtagggacatggataaagctggaaaccatcattctcagcaaactattgcaaggacaaaaaaccaaacac

SEQ ID NO: 210787 - DNA, 201 bp, Homo sapiens
gtttattggtaatccaacagagaatcaggtggtgagaatgtgggggtcaaaagagcaggctcatgatctacagctgtgacggtttagcatttatttatttwttttttttattgatcattcttgggtgtttctcgcagagggggatttggcagggtcataggacaatagtagagggaaggtcagcagataaacaagtgaaca

SEQ ID NO: 210788 - DNA, 201 bp, Homo sapiens
cttcagagcgaatgggtaggagtttgccctaagggtgggatttacagtaagtacatactattaaacaacagattaactggaaatctcagaggtattcccgraaccagggttgatcagaagtcaatatggtagattaacttctaagatggagttgctttggcctccacaatttttgatctacattttacaaatataaaaact

SEQ ID NO: 210789 - DNA, 201 bp, Homo sapiens
gttattaatgtctgtgttgaatcaaactctattggcaataggtaaatgtcttggttgttctttagtaactttaattaagccatgcttctctataaagatgktttaaattgttttattttaattagaagcttagtgctacaattctgttaaatgactcttactcagcaactttgtttgaaaaacacttcttctcattgctat

SEQ ID NO: 210790 - DNA, 201 bp, Homo sapiens
aaatgttgtagtaacaggtggcaaagtggcagacatggctcttcattatgcaaacaaatataatatgatgttagtgaagctaaactcaaaatgggatgtcygaagactctgtaaaacagttggtgctacagctcttcctagattgacacctcctgtccttgaagaaatgggacactgagacagtgtttacctctcagaagt

SEQ ID NO: 210791 - DNA, 201 bp, Homo sapiens; identical to SEQ ID NO: 37199

SEQ ID NO: 210792 - DNA, 201 bp, Homo sapiens
ctttgggaggccgaggcgggcggatcacgaggtcaggcgatcgagaccatcctggctaacacggtgaaacctcgtctctactaaaaatgcaaaaaaattasccgggcgtggtggcgggtgcatgtagtcccagctactcgggaggctaaggcaggaggatggggtgaacttgggaggcagagcttgcagtgagccgagatc

SEQ ID NO: 210793 - DNA, 201 bp, Homo sapiens
gccccaaacagttcttatttgtggagtatgaaaatcaaatatccctgcatgggtcctattatgtgatagtgtctgtgatatcagccctttgtgtaacactrtgcaaggagagtcatgtcagggatgtcccctgtggttatcacttttcttttcagaccactgtgtgcagtgtgaagaagcagcctgattttgccacttcag

SEQ ID NO: 210794 - DNA, 201 bp, Homo sapiens
ccagcaagtctacacacattccagaggacattatgtcagacatgcaagccctgcctcagctttcttcccaacactcagctttttcccaacagacactgtgstagaaatgactcttggactagtcaggattgacttattaaggtttactactgaacaaatagctctccacattttaattcagcaaaaagtatatttctcact

SEQ ID NO: 210795 - DNA, 201 bp, Homo sapiens
tagctgagtaaagagaacacttggagaatatatgcttaaacttaagtctgcaaaaaaaacaaatgacttgacaaatgatatctatcatgtaaaccattacycaataattattttcccttctcttgcaggaattgagaagttcaaagggcagtacttccacagtcgagactataagaacccagagggattcactggaaagag

SEQ ID NO: 210796 - DNA, 201 bp, Homo sapiens
cagggtccaacttcagatctgatcttgatctgtgccaacctagtataaattagaccttttccaaacttcatgcatagaccaaggggaagattattggcatyctgtttacctccaccaaagcaaaattttacttatgtggtactgatttctctttctctcatttctccacttgatctttgtcacgactcacagagctctgag

SEQ ID NO: 210797 - DNA, 201 bp, Homo sapiens; identical to SEQ ID NO: 37204

SEQ ID NO: 210798 - DNA, 201 bp, Homo sapiens
ccatatttcatttcccaactgaaagactacattagggaggaggcaggtattggttggaagtcagagtaggggaaatcccttccaaagacaaagaagaatargtagagtaagctgcagatgttaatattatattgtggtggtggtaaggtgatcaagtgaattgtaacctccttgagtacaggaaacttaccctgtatttct

SEQ ID NO: 210799 - DNA, 201 bp, Homo sapiens
ttttcttctgattatccacttggcaaaattttaacactttgtaaactgcttccttgaaaataaataagctgtgtttcatcataacgctctgacttctgttmcaacagaccacacctgtgtggttcaccgttatatttctagagccaagcatgtattctactatctccattttttaaagctccccagatgattccaatgtgc

SEQ ID NO: 210800 - DNA, 201 bp, Homo sapiens
agaagtggataataatagtatccactttatagagttattgtcaggagtaagtgaatggataattatgccaatcacttacaacagtgccaggaacatagtgytacatgttggttattattcagtaggcctaggatgggactcacacatgtggtgtctttactaagcatcttagccagttttggcagttactgaaaaggcatg

SEQ ID NO: 210801 - DNA, 201 bp, Homo sapiens
tttaactggaagaggagtcaaatcagatctccagtttagaagatatgttagagaggagtgaaatgggaaataggtcagtacgagcctgtggtaaaagtctmagtaagacagcatgagagctttaaaccaaggtaatgacactctaaaggaattggaggagccagacttaaatgaaatttcacaggcaaatctgaagaattt

SEQ ID NO: 210802 - DNA, 201 bp, Homo sapiens
gtgtctttactaagcatcttagccagttttggcagttactgaaaaggcatgaaatcaattgaggatgggaggaggttgggagggcatccatcatcttgtckgattatcaagtttctggtttttatctccaatgtggtttaaacttattctctgctaaagacttaacgtggaggtttttcttctgattatccacttggcaaa

SEQ ID NO: 210803 - DNA, 201 bp, Homo sapiens
cagctacataaaagtggctttatagcatttcttagttgaaccgaaatacaatccttttgcaccctgactctgttttggggactaattttatgtgacaatcrtccttattcagatctggagtggatccccttagctgacctgcatacgtgtatcatcatcagtcttggacatgggctaaaagcctgttgtttttagtaaaca

SEQ ID NO: 210804 - DNA, 201 bp, Homo sapiens
gtgaccaacttcattttccttcttctcactactgagtttggtgcttttaaacatttcttccttcttgcagtgctttcttttctggctctaaagtatcttaytttaactttcctcctctctttcctttgacttatttttgtctaaccacctcctgaacctgagtagtcagtaacccaaggatataatgtaaccttttttttt

SEQ ID NO: 210805 - DNA, 201 bp, Homo sapiens
aaaagcattgtagcccccagtcacgtttcccactcttgtttgatgtatcacgaccctttcacgtggaccccttaaagttgtaagcctttaaaaaggccaaraatttctttttcggggagctcggctcttaagacgcgagtctgccgacgctcccggccgaataaaaacctcttccttctttaattcggtgtctgaggagtt

SEQ ID NO: 210806 - DNA, 201 bp, Homo sapiens
tctaagtttagtgtttgggaaggaaaatggcaggaaacaaacataaaaacccacaaagattgtgcaggggctaaaaagccagactaatgagtttgaactctttttttttttttttttttttttgagacggagtctcactctgttgcccaggctggagtgcagtggtgcgatcttggctcactgcaagctccgcctcccagg

SEQ ID NO: 210807 - DNA, 201 bp, Homo sapiens
tgaggtgccctagataagttttacgtttcatatttcataaaaactaacacattgttggccagctacataaaagtggctttatagcatttcttagttgaacygaaatacaatccttttgcaccctgactctgttttggggactaattttatgtgacaatcatccttattcagatctggagtggatccccttagctgacctgc

SEQ ID NO: 210808 - DNA, 201 bp, Homo sapiens
tacaatccttttgcaccctgactctgttttggggactaattttatgtgacaatcatccttattcagatctggagtggatccccttagctgacctgcatacstgtatcatcatcagtcttggacatgggctaaaagcctgttgtttttagtaaacagcagaaaattctgctcttaaaatccagccacaatatggtatggagg

SEQ ID NO: 210809 - DNA, 201 bp, Homo sapiens
gctggcatgggatccaggctggtagcatgagccatgtgcagcctgccaggctgaatggaccaaacaagcccaataggcttgagcaaaacttgtgcaaaagyaccaatggccacagaggtttctgtctcacaaagcaacaccccaagaatcccgtgacaatatttccatgtaggggacaggttgtctcaataatataccata

SEQ ID NO: 210810 - DNA, 201 bp, Homo sapiens
tggctaattttttgtatttttagtagagacggggtttttcagtagagacggggtttcactgtgttagccaggatggtctcgatctcctgacctcgtgatcygcccgccttggcctcccaaagtgctgggattacaggcgtgagccaccgcgccgggcctgaaatgattcttgaagaaaatgggggtgcttttgaaggttta

SEQ ID NO: 210811 - DNA, 201 bp, Homo sapiens
ccagtgccagccatgaaatctgcttgtggcacccctggtccagctggagcctcacagggagtcagtgcccatactggcacctggagctgcctgccttgccrcagctggcatgcctggctgtgcatagtggctggacctcatatttgctcacacacccctctctgctctgcatctggctggcccttggctggcatgggatcc

SEQ ID NO: 210812 - DNA, 201 bp, Homo sapiens
cagattcagtttcttagaaacatttcatagggacttatgaacagaagccatgtctgtctcaggcagtggtgagacaagatggtagatccccataccattayctcctgacccagggatgatataccacaggggaggggcacacatacttcagagcgaatgggtaggagtttgccctaagggtgggatttacagtaagtacat

SEQ ID NO: 210813 - DNA, 201 bp, Homo sapiens
taggttagaattaggtccgtgcccatgggtggaagatttttgtgctgggatgaaaaacacttaacttgggttttctttcttgcaagaaatgaaaaactgtrttttgacttttgatgccagtatacctctttgtcatgaaataacatgtaataaatttagaacccagaaagccagggaaaatataccacagtatagaagtat

SEQ ID NO: 210814 - DNA, 201 bp, Homo sapiens
gaccttctaaagtatattcgatttaaggtagaaaattgtgtgggtatctttgtgtttgaagttgtttgccaagtaaatgaataacgtggtttcagttaccwatgtttacttctaaagattggcttgatttgcacatgtatttatcctacccaggcaaaaactccattctttgtcctcctttgctcctcaaaaatattcaag

SEQ ID NO: 210815 - DNA, 201 bp, Homo sapiens
ttgtataagaaaaagggcattctcctacataaccatcatataattatcacacgtgggaaatttaacattgataaaatacattaatacattggcaatatccycagttgccccaatagtattttttatagctttaaaaaaatctttttaaatctagtatcctgtcaggtaatcaatcacaccattacatttagttgtcatgtc

SEQ ID NO: 210816 - DNA, 201 bp, Homo sapiens
ctagtgagtcagatacggaaattggataaaagctgtgaccaaagtaaacatttattcagacctcttgagtaaatgaacttggaactttgagcttaggttasaattaggtccgtgcccatgggtggaagatttttgtgctgggatgaaaaacacttaacttgggttttctttcttgcaagaaatgaaaaactgtgttttgac

SEQ ID NO: 210817 - DNA, 201 bp, Homo sapiens
tgttcctgcacagacttcaaaatcatagtttttggtgtctccaaattcaatttccataattcattaactaattcatttcaaagcatttattgcacatccartacacaccaggtcctgataatagagatttaaagaaggatatggctactctcgggtttctcacagtcatggaaacaaatgcctgataatatagtgtgttta

SEQ ID NO: 210818 - DNA, 201 bp, Homo sapiens
aaaagggcattctcctacataaccatcatataattatcacacgtgggaaatttaacattgataaaatacattaatacattggcaatatccccagttgcccyaatagtattttttatagctttaaaaaaatctttttaaatctagtatcctgtcaggtaatcaatcacaccattacatttagttgtcatgtctctttaatct

SEQ ID NO: 210819 - DNA, 201 bp, Homo sapiens
agggagcgaaacacttttcagaattagaagaggctgtgtatagaaacatacaagcttgcaaggagcttgcccaaaccactcgtacagcatatggacgaaawggaatgaaaaaaatggttatcaactacttggagaagttgtttgtgacaaatgatgcagcgactattttaagagaactagaagtacagcatcctgctgcaa

SEQ ID NO: 210820 - DNA, 201 bp, Homo sapiens
caattatccctctgtagacaggtcattttagacaaaaagactatgaagcaatgtgcgtatataacttaaaatctggaagccatctccagagagtttcatartgtaggaaaagtgattcttttgccaggtaactgcatatcaaatctttatcagttctgaacatgaactttagccagaggaggacacagaaagactgactag

SEQ ID NO: 210821 - DNA, 201 bp, Homo sapiens
agggatgtgaagtacctcctcaaggagaactacaaaccactgctcaatgaaataaaagaggatacaaagaaatggaagaacattccatgctcatgggtagraagaatcaatatcatgaaaatggccatactgcccaaggtaatttatagattaaatgccatccccatcaagcaaccaatgactttcttcacagaactggaa

SEQ ID NO: 210822 - DNA, 201 bp, Homo sapiens
aatgacttaaaggtcacaaatcccaataaatggaagtgatgataatctgctgtggatgtgtaggctttatctcctatccttgagaaaacacatttgaagaracagaaattaggagtgtagaaagtttaatatcaataaaaatgataaatagcaggggtttttgtaataatgccaacaatgtcaatggcaaaagaatgaggg

SEQ ID NO: 210823 - DNA, 201 bp, Homo sapiens
agagaacgccacaaagatactcctcaagaagagcaactccaagacacataattgtcagattcaccaaagttgaaatgaaggaaaaaatgttaagggcagcsagagagaaaggtcgggttacccacaaagggaagcccatcagactaacagcagatctctcggcagtaactctacaagccagaagagagtgggggccaatat

SEQ ID NO: 210824 - DNA, 201 bp, Homo sapiens
ccagaggtacaaagaggagctggtaccattccttctgaaactattccaatcaatagaaaaagaaggaatcttccctaactcattttatgaggccagcatcatcctgataccaaagcctggcagagacacaacaaaaaagaattttagaccaatatccttgatgaacattgatgcaaaaatcctcaataaaatactggcaaa

SEQ ID NO: 210825 - DNA, 201 bp, Homo sapiens
gcccctcccatgacacatggggattgtgggacccaaaattcaagataagatttgggtggggacacagccaaaccatatcaaagacagacaagtaaacagaygcttaatgatttgttcattcagcagatatttaactatatcctaaacaagtgctccagtagcaatgcagaagagctgccatgagagcagtgggcaataagt

SEQ ID NO: 210826 - DNA, 201 bp, Homo sapiens
cactgaaatatgcaggagcaagtcaggattacacagatacaacctgctttaggctgacagcagactgaaggcctaccaccacagaactctaattcagactstcttccttcccaccttgtcttggaacccttggaagatctctgaacttcagttcctcactgttcttcaacattcttcagataacatatactgaccttttag

SEQ ID NO: 210827 - DNA, 201 bp, Homo sapiens
cacctaatgatacattttaaaagtgaagctggagtgcgtttaataaggagagagagaaaaattttttaagggatttgaaaacatgccatctgaagtacaaytgaaaaagccggagagagatttagcctggagaagataaacttcaggagagatatgagaatttccttcaaatatctgaagggaaggcacatggaagaagga

SEQ ID NO: 210828 - DNA, 201 bp, Homo sapiens
tggggcagtcataacatctttgagaaaaatattccccagtaattccaatgtgtactccaaattagaatttactcatctagattttaggcaactggcatatrtttctgaagtaaaatagttttatcttctttcattatagataaaaataaaatatagaaatagtatgactttatttcggccgaaaattaagacctggttgca

SEQ ID NO: 210829 - DNA, 201 bp, Homo sapiens; identical to SEQ ID NO: 37200

SEQ ID NO: 210830 - DNA, 201 bp, Homo sapiens
ccaataggttggcccgcctggccgaagtccgcccggagcccgctcacctgtcagcccccactgccgtaagtcctgctcctgcacccgcgccgcctcggctsggccctcagtatgaagccgcagtaagaagccaggggcttggcccccgcggctagtagcgcccgcgcgctccatcgggccggtagaggccccgccccgcgc

SEQ ID NO: 210831 - DNA, 201 bp, Homo sapiens
gattataaatcatgctgctatgaagacatatacacatgtaagtttattgtggtagtattcacagtagcaaagacttgaaaccaagccaaatgtccaacaaygatagactggattaagaaaatgtggcacatatacaccatggaatactatgcagccataaaaaatgatgagttcatgtcctttgtagggacatggataaag

SEQ ID NO: 210832 - DNA, 201 bp, Homo sapiens
aatgctcatgtgacagcacactcaagtcacagtggctcatggtatgaatagtcactgtgagttgggaacatggtaacagccagctgcttagtgttttgatkaacacaatcatttagcagtctgaatttcagaacttaagctcaatcgctgggtgttttttatttggacaaagtggaaattgatggtaagtctctaaatttc

SEQ ID NO: 210833 - DNA, 201 bp, Homo sapiens
atttatttaaacaatacttattgaacaagtttgctaccatactaagcattgaatatgcaaagacaaaaaagaaaaatcagtaactttatagtctagttaargggataaaaatgaagaaaaattttattataaatataattaataaaaatagagagttacatggggacaaatgctagagatctatacgttgcagctcggagg

SEQ ID NO: 210834 - DNA, 201 bp, Homo sapiens
catttcaaagcatttattgcacatccagtacacaccaggtcctgataatagagatttaaagaaggatatggctactctcgggtttctcacagtcatggaawcaaatgcctgataatatagtgtgtttaagttatctttatagaaatatgaacagagagttttgggagcttggaggatgaataggggaatctaattctctgg

SEQ ID NO: 210835 - DNA, 201 bp, Homo sapiens
gaaacaaatgcctgataatatagtgtgtttaagttatctttatagaaatatgaacagagagttttgggagcttggaggatgaataggggaatctaattctmtggagaaattagaaaagtcttgttgaaggaagtgacatttgatgtaactcttgaaggacaggaaattttccagatgaagaaatagtaatatttacgaagg

SEQ ID NO: 210836 - DNA, 201 bp, Homo sapiens
tccgccggccccgcgcgccgcgcaggcgggggccgtggccaccaagcccgggcgcagtttctctccgcccacggcaggagcgaaggaaggccctggcgcgrgcgggtaaactgcccaccgggcggcccacccgctgcgcccccggcccgcaagaggcagtcccaataggttggcccgcctggccgaagtccgcccggagcc

SEQ ID NO: 210837 - DNA, 201 bp, Homo sapiens
gagcccgctcacctgtcagcccccactgccgtaagtcctgctcctgcacccgcgccgcctcggctcggccctcagtatgaagccgcagtaagaagccaggsgcttggcccccgcggctagtagcgcccgcgcgctccatcgggccggtagaggccccgccccgcgcggccaagcgcgcacctccctcccaacttcccaacg

SEQ ID NO: 210838 - DNA, 201 bp, Homo sapiens
tttgatgtgcatacacataaacatctcaatgccttaaagagcagtattgctgcccacatgtcccacctccaggcctaaggtggttttctcctatctcagtmaatggaatatacaatcgggttttacaccgagacattccattgcccagggatgagcaggagacagatgccttcctcttatctcaactgcaaagaggccttc

SEQ ID NO: 210839 - DNA, 201 bp, Homo sapiens
ttgtaagcctttaaaaaggccaaaaatttctttttcggggagctcggctcttaagacgcgagtctgccgacgctcccggccgaataaaaacctcttccttytttaattcggtgtctgaggagttttgtctgtggctcatcctgctacaatctgtttgaacagatcacctgaaaggtaggtgttcatttaagcatttggagt

SEQ ID NO: 210840 - DNA, 201 bp, Homo sapiens
ccaggatactgcattacatttaatagtcatatctccttaggctctttttggctatgaaatttcttagactttccttgtttttgatgcccttgatagttttrgggccaggtatgctgtagaatatccctcagttgggatttatcttatttttttctcatggttaaattggggttatgacttttggggaggaatattataagg

SEQ ID NO: 210841 - DNA, 201 bp, Homo sapiens
agatagggatgccctctctcaccactcctattcaacagagtgttggatattctggccagggcaattaggcaggagaaggaaataaagggtattcgattagraaaagaggaagtcaaattgtccctgtttgcagacgacatgattgtatatctagaaaaccccattgtctcagcccaaaatctccttaagctgatgagcaac

SEQ ID NO: 210842 - DNA, 201 bp, Homo sapiens
tgaggcaggagaattgcttgcacccgggaggcaggggttgtggtgagccgagattgtgccactgcactctagcctgggcaatagagcgagactctgtctcaaaaaaaaaaaaaaaagcaattaacatttgtatgttaaccatgtatcctgcaaccctgctgtactcacttgttgactctaggagtttttttctttttttct

SEQ ID NO: 210843 - DNA, 201 bp, Homo sapiens
tgggaggtggaggttgcagtgagccaagatcatgccactgcactccagcttcggcaaaagagtgagactctgtctcaaaaaaaaaaaaaaaaaaaaaaagmctgctttttagaaagctccacgatactagaaaccagccttattattattaaaagtaatggcaaaaaaataagcaattacttttgcaccaacccaatgttt

SEQ ID NO: 210844 - DNA, 201 bp, Homo sapiens
caatggcaacaaaagccaaaattggcaaatgggatctaattacactaaggagcttctgcacagcaaaagaaactaccatcagagtgaacaggcaacctacmgaatgggagaaaatttttgcaatctactcatctgacaaagggctaatatccagaatctacaatgaactcaaacaaatttacaagaaaaaaacaaacaacc

SEQ ID NO: 210845 - DNA, 201 bp, Homo sapiens
ctatgtgtatacattgttttatatgagtttatttaatctgcataatcaaggcaggagctagtgaacctcttttgtgaaaccttcatgaatactatagctcttttttttttttttttttttttgatatggggtctcactctgttacccaggctggagtgaagtggtgtgatcttggctcactgcaacctccacttcctggag

SEQ ID NO: 210846 - DNA, 201 bp, Homo sapiens
ttaacccctactcttatcaaagaaacatgtttagaaaatgaagcttatcttccacaggactttaggcataaaatgtgattaagatttattttggctgggcrtggtggctcatgcctgtaatcccagcaccttgggatgcagagacgggtggatcatctgaggtcaggagttcgagaccagcctgaccaatatggtgaaacc

SEQ ID NO: 210847 - DNA, 201 bp, Homo sapiens
acatatacaccatggaatactatgcagccataaaaaatgatgagttcatgtcctttgtagggacatggataaagctggaaaccatcattctcagcaaactvttgcaaggacaaaaaaccaaacaccgcatgttctcagtcataggtgggaattgaacaatgagaacacatggagacaggaaggggaacatgacacactggg

SEQ ID NO: 210848 - DNA, 201 bp, Homo sapiens
ggatggggtcctcagagaaccagggagggaaaacatttctagaggctgattttaaatttattttccctccaactttttatttttgaaaatgttcagatctrcagaaaagttgcaaaataataagtacaatgagcacccatatatccttcacctggattcacctgttaagtttgctatatttgcttcctttccccatctctg

SEQ ID NO: 210849 - DNA, 201 bp, Homo sapiens
agttcccttagtatttattgatcattatcgggcatttctcagagagtgggatgtggcaggacaatagggtaatagtggagagacggtcagcatgaaaacakgtgaacaaatgtctctgcatcataaacaaggtaaagaaaaaagtcctgtgcttttgatgtgcatacacataaacatctcaatgccttaaagagcagtatt

SEQ ID NO: 210850 - DNA, 201 bp, Homo sapiens; identical to SEQ ID NO: 37208

SEQ ID NO: 210851 - DNA, 201 bp, Homo sapiens
cctccctcccaacttcccaacgcgcgggggcgggcgactgcgcgctggggcccacctacgagcgaggcgccgccagagggcgcgtcctgccaagatatccrgagcggagctggtgcagtcacccttccggacaggcagttcttgcagtgcggagcgtggaagggctgcccagttctcaccagtcgtgcttctgaagcgcta

SEQ ID NO: 210852 - DNA, 201 bp, Homo sapiens; identical to SEQ ID NO: 37205

SEQ ID NO: 210853 - DNA, 201 bp, Homo sapiens
catgcaagcagcttgccctggcctttgcatacagttaggtaactcagataacattcattctaaagcaattatatctccttggctttttgttttgtttgttktggtttttgtatagcagactttgaactgagaagcaagtgtcttcactataaattcctggaaaaagacatgccaatattgtattttgttattaatgtctgt

SEQ ID NO: 210854 - DNA, 201 bp, Homo sapiens
aaaatagagagttacatggggacaaatgctagagatctatacgttgcagctcggaggaaagatgttgaacccatcaggacatgaaatatcaggttccaggraagttttcttaaagaagataaagttttcttaaagctgagtcttgaaggatgagtaggagtctaccaaataaggaataaaagggtgatctcggcagaggca

SEQ ID NO: 210855 - DNA, 201 bp, Homo sapiens
cttgtggaaattttctcattctgactacagccccaaacagttcttatttgtggagtatgaaaatcaaatatccctgcatgggtcctattatgtgatagtgyctgtgatatcagccctttgtgtaacactatgcaaggagagtcatgtcagggatgtcccctgtggttatcacttttcttttcagaccactgtgtgcagtgt

SEQ ID NO: 210856 - DNA, 201 bp, Homo sapiens
aggaaattgacaaaaggtaagaaactctcccaggaagatatatggttacatttctacttatttcttaataaaagaaatattgtactgtatttaactgcctsatgttagcttaaggatttagattctattatgaagaaaaaaggaaaaataatttgtgacaatagaatggagaaatagcactagtagtctaaatatgggtaa

SEQ ID NO: 210857 - DNA, 201 bp, Homo sapiens
gaagaataggcatttagtgcatggagtgtcataaaagcacaggagaagcccaggctttactcaggtgttacagtgccttaggacctggaccaagagacctrgtgacttgcacttttctagaagaggagggtacattagcctgccaacactatgttatttttttctgtcttgtggaaattttctcattctgactacagcccc

SEQ ID NO: 210858 - DNA, 201 bp, Homo sapiens
tatgtctttgaggaaggggctgccagtgaaagagccaagatgaagtctgtctggctctcttagctaagggacagtcaattcaggtggaaacaaggctaggkgattaaaggaaagagagaatctaaaaacagggttagtaaaaacaaggttaggcattacaatagtatgccctcaataaatattgttgaatgtttgaatgag

SEQ ID NO: 210859 - DNA, 201 bp, Homo sapiens
attttcttttatactttggtttagaaaggggagggggggtctagttaaaacaattttccagaagtaaagtaggcagaaagttaaaaggataaatgattacmagaaagtaaacagttctaggtgcaggggctttaagactcttacaaactgatagacgtggggctttgggcgttatcaattggacgaattcctgggaactgc

SEQ ID NO: 210860 - DNA, 201 bp, Homo sapiens
aaagacagacaagtaaacagacgcttaatgatttgttcattcagcagatatttaactatatcctaaacaagtgctccagtagcaatgcagaagagctgccrtgagagcagtgggcaataagtacccaattctccctacaactacataggaatttactaaaaggacaaggaaatattgaccatagaggggaaataatcacta

SEQ ID NO: 210861 - DNA, 201 bp, Homo sapiens
gtcccttaatacttgaaaccctccctgcaactaggtgcatacgacagtttatcttaacagtgtcaggtggccgggcgcggttggcacacgcctgtaatccyagcactttgggaggccgaggcgggcggatcacgaggtcaggcgatcgagaccatcctggctaacacggtgaaacctcgtctctactaaaaatgcaaaaaa

SEQ ID NO: 210862 - DNA, 201 bp, Homo sapiens
tctgcatctggctggcccttggctggcatgggatccaggctggtagcatgagccatgtgcagcctgccaggctgaatggaccaaacaagcccaataggctygagcaaaacttgtgcaaaagtaccaatggccacagaggtttctgtctcacaaagcaacaccccaagaatcccgtgacaatatttccatgtaggggacagg

SEQ ID NO: 210863 - DNA, 201 bp, Homo sapiens
ccaaatctctggatcacaagaagtcattatgtcataggctggcattaaagttcctccacaaattggatacaacctccaatttcaggcccatctttctttcytttttttttttttttttttttttgagatgcagtctcgctctgtcgcccaggctggagtgcagtggcgctatctcggcccactgcaagttccaccttctgg

SEQ ID NO: 210864 - DNA, 201 bp, Homo sapiens
aactcttgaaggacaggaaattttccagatgaagaaatagtaatatttacgaaggtttaaagttgtgcaagagcctagagtgtttcaggaacaatttaatracttagaaatttgagattaaataaggacaacactggatgaagattaaaagataaaccgggctagattgtgaaatgtgctaaatttcaaaataaggaattt

SEQ ID NO: 210865 - DNA, 201 bp, Homo sapiens
tatctgttcatttctagaataaaaagggaggaggagatccaaattgattaaggtgattttccatagtcaaaacaatttttgaaaatctaaaaatttgaaarctcctcatttgtgaaatctcggtgacaggctgggtagattgcatcattgcattactttatgtgatcaccacaacaatgctataagatagttaataggaag

SEQ ID NO: 210866 - DNA, 201 bp, Homo sapiens
gggaggcaggggttgtggtgagccgagattgtgccactgcactctagcctgggcaatagagcgagactctgtctcaaaaaaaaaaaaaaaagcaattaacwtttgtatgttaaccatgtatcctgcaaccctgctgtactcacttgttgactctaggagtttttttctttttttcttactttttttttttaatcctttggg

SEQ ID NO: 210867 - DNA, 201 bp, Homo sapiens
aacctccttgagtacaggaaacttaccctgtatttctttgaattctccatagcatagtaattgtttataggattattgttccttctgaggtaattttacarttaaaatgttaatttttgtttttaggtctaaagacattgccctcacagagtgaaatgatggcagaaatatctaaagctcaagaggaaattgacaaaaggt

SEQ ID NO: 210868 - DNA, 201 bp, Homo sapiens; identical to SEQ ID NO: 37201

SEQ ID NO: 210869 - DNA, 201 bp, Homo sapiens
aggccgaggtgggtggatcacgaggtcaggagatcgagaccagcctggccaacatagtgaaaccccatctctactaaaaatacaaaaaattagctgggcakggtggcatgcgcctgtagtcccagttactccggaggctgaggcaggagaattgcttgcacccgggaggcaggggttgtggtgagccgagattgtgccact

SEQ ID NO: 210870 - DNA, 201 bp, Homo sapiens
taaacttaagtctgcaaaaaaaacaaatgacttgacaaatgatatctatcatgtaaaccattacccaataattattttcccttctcttgcaggaattgagragttcaaagggcagtacttccacagtcgagactataagaacccagagggattcactggaaagagagtcattataattggcattgggaattctggagggga

SEQ ID NO: 210871 - DNA, 201 bp, Homo sapiens
ctcaacatgcgttaaaaagttaaatgtaaaatctaaaactataaaaaccctagataatatcactattgatgttaaccttgatgtcctggcttgaaatagcrtttgtcagtttttgccacactgtaaagttgctccttttttctccattgccatactatactctttggaacaaagtcactatgcacagcccactattaagga

SEQ ID NO: 210872 - DNA, 201 bp, Homo sapiens
ttacaggcgtgagccaccgcgccgggcctgaaatgattcttgaagaaaatgggggtgcttttgaaggtttacgaatctgagtgacaaaagcaaacaatttyttccatgccccaggttttcctcagcaccaggagaggggcttggatcctgaatcgtgtaggggactacggatatcctgctgatgtgttgttctcttctcga

SEQ ID NO: 210873 - DNA, 201 bp, Homo sapiens
tcaatcctcccactttagcttccccggtagctaggactacaggtgtgtaccaccacgcctggataattttttgcatattttgtagagacagggtttcgccrtgtttcctaggctggtctcaaacttctggcctcaagtgatccacccgccttggcctccccaagtgctgggattataggagtgagccactgcactcggtcc

SEQ ID NO: 210874 - DNA, 201 bp, Homo sapiens
gtctgtgcataaaaaaagaaagatccttttatccccatatttcagtattataaagtcatgttggataaatgtgctgagagaaatttgcattttattgcacrcaaaagaaaactggacacaataatataggatataaaattaagtcaagagttggcctttaacaattgtttgtagcttgttatgtagttaaatcttgatgtt

SEQ ID NO: 210875 - DNA, 201 bp, Homo sapiens
gacgtgagcccaagggagggaggtggggtaggcagactagttgtgactggatgatcactgggcgaagggtggaaaagtggccacagatggaaaggcgggcwgcggagtagtgaccggcaagggaggtggcgcgaaaagggaagtagggacatgacgtagttggaacgcagagacgtgcctcgaacgtggggggcgcggtcc

SEQ ID NO: 210876 - DNA, 201 bp, Homo sapiens
tgactttagcccttacgtgaaaggcgtggcgtagtcgcaagggtgtaaaaaagaaattcgaattcgcgggacggtcggcctcaggcggagtagggacgtgrgcccaagggagggaggtggggtaggcagactagttgtgactggatgatcactgggcgaagggtggaaaagtggccacagatggaaaggcgggctgcggag

SEQ ID NO: 210877 - DNA, 201 bp, Homo sapiens
tacacttgtaaccaagaataaccccagattcttgagggttagaagctcagttatgaggccgggcacggtggctcatcccagcacttttgggagaccgaggmaggcggatcacctgaggtcaggagttcaagaccagcctgaccaacatagtgaaaccttgtctctactaaaaatacaaaaattagccaggcgtcgtggtgc

SEQ ID NO: 210878 - DNA, 201 bp, Homo sapiens
ttttctggtctaactgtactggctacttctagaatgtaatttaatataaaacttacggtaacactgaaaatttagtaaggaaaacagtgctacctgtcatytataatattatcctagttgcctataattttaccactatcattgtttggggaaatccttctggtctcttgtctgtccagatgcacataagtccttatggtc

SEQ ID NO: 210879 - DNA, 201 bp, Homo sapiens
tacttctagaatgtaatttaatataaaacttacggtaacactgaaaatttagtaaggaaaacagtgctacctgtcatctataatattatcctagttgcctrtaattttaccactatcattgtttggggaaatccttctggtctcttgtctgtccagatgcacataagtccttatggtcttttatctatataaatatacaca

SEQ ID NO: 210880 - DNA, 201 bp, Homo sapiens
aggagcgcaggcagcaaggcttagcggaagaggcgtgacccaggcgtaccgcaggggcgtggcccgaacgagctgactttagcccttacgtgaaaggcgtkgcgtagtcgcaagggtgtaaaaaagaaattcgaattcgcgggacggtcggcctcaggcggagtagggacgtgagcccaagggagggaggtggggtaggca

SEQ ID NO: 210881 - DNA, 201 bp, Homo sapiens
gtaactgagcaactatttttcctgctccttgggttctagattcttgcataaatttaagggtgtactttaagcattaatcttaaccatttcagttcatattrttgtaaccactcaagggattcttcctgcctgctgcacaaagaaagaccacggggcattgtaaccgcccagtgggttcacattgcccgctgcctggacaga

SEQ ID NO: 210882 - DNA, 201 bp, Homo sapiens
gccttgttgctctgaggggcgtaacaaagatggtggagcaggcggagggcagaggcgtcggcaagttagcgtgcaggcgcgtggcagcgacaggagatgtrtagccagagcgcagagcaggtgtggactccggcgctggggaagcgtggccagggcgagatttcagcctgggtcggggacagaatggggactgataggggc

SEQ ID NO: 210883 - DNA, 201 bp, Homo sapiens
ggcatgataccatcctaagcagcgattcttcaggtagctgcccagaaaggcctggagctgctctggaccactgctgatctccagatactccctgagaaccrtcacctcggcgtccaattcctgagtggttttcactactaaataatgactcagttatctcttctcttggccaggacgcccttgtggaatttgggtcatttg

SEQ ID NO: 210884 - DNA, 201 bp, Homo sapiens
tgtgatgctagatagtagacagtcttgataatagcctgacctgctttctcctagtgcatccactctgggagagcgtggacctggttcctgggggcgatcgmcagtcacccatcaacattcggtggagggacagtgtttatgatcccggcttaaaaccactgaccatctcttatgacccagccacctgcctccacgtctgga

SEQ ID NO: 210885 - DNA, 201 bp, Homo sapiens
tagctctcaacatatgtatactctgtgacccaaatttctattcctaagtaaatacccaagaaaaagcatacagaaaaaacacgtacaagaaggtccatagsagtttagccacctgttgtgcatgtatctgacacataataggtgctcaataaatgtatataattgaacatatctttatatcccacatatggtttcacaggc

SEQ ID NO: 210886 - DNA, 201 bp, Homo sapiens
aagtacagtagacaggcttttttttttttcttttgagacatggtttgggtctgttgcccaggctggagtgcagtggtgctatcatggctcacaacagcctygacctcccgggctcaatcctcccactttagcttccccggtagctaggactacaggtgtgtaccaccacgcctggataattttttgcatattttgtagaga

SEQ ID NO: 210887 - DNA, 201 bp, Homo sapiens
tcccttgcccttgcccattcgctcctgccttctccctggggacaggaggcatgcttctccccagtttccacaataaaatatttgttgttaataataatagrtgtctttattatcatagagattgtcatattctttctttcaaagacgacaccatggtttctccagcttggcactactacttgggccagatggttctttctt

SEQ ID NO: 210888 - DNA, 201 bp, Homo sapiens
caggcccacctctcctctcccttaaagcccttcccttgcccttgcccattcgctcctgccttctccctggggacaggaggcatgcttctccccagtttccrcaataaaatatttgttgttaataataataggtgtctttattatcatagagattgtcatattctttctttcaaagacgacaccatggtttctccagcttgg

SEQ ID NO: 210889 - DNA, 201 bp, Homo sapiens; identical to SEQ ID NO: 37235

SEQ ID NO: 210890 - DNA, 201 bp, Homo sapiens; identical to SEQ ID NO: 37237

SEQ ID NO: 210891 - DNA, 201 bp, Homo sapiens
catactaaatattaaatttaattgaattaacctctggcaggagccaataaagttaggccaaaaaacataaagaacattagagaaacactaaaaactcctasaaagataattcagcaattagtggagtaccatgtcaatttatagaaatcaattccgttggcatatataactcacagttagttaaaagacataacagaagaa

SEQ ID NO: 210892 - DNA, 201 bp, Homo sapiens
caccatccctttaaaaatttttttaataaaacagaaatgaagaattccctaactggatgaagtagatttatctcagctcaaaaataaatagtatgtttaaygtggaaaggatatcattaactccatggttattagcatactaaatattaaatttaattgaattaacctctggcaggagccaataaagttaggccaaaaaac

SEQ ID NO: 210893 - DNA, 201 bp, Homo sapiens
atacttacaattaatggatttcatcccatcaacaaatctatatgatcatttccatggatttcctaaaatacgttagacaaaacccaccatccctttaaaawtttttttaataaaacagaaatgaagaattccctaactggatgaagtagatttatctcagctcaaaaataaatagtatgtttaatgtggaaaggatatcat

SEQ ID NO: 210894 - DNA, 201 bp, Homo sapiens
gtcagttgtttgaaacttgggatttatttttctcttagaaactaagtctaagtggtggttactacatcagcacacaaaatcctgtttaattcataaactamactgtaataataactgcgtttacttgttcatattgggtttttattgactaaaagcttccagcctctttttcatgcagccaggataacagtgataccaaaa

SEQ ID NO: 210895 - DNA, 201 bp, Homo sapiens
ctttcaacactgccttagaaggagacctgtaatttatgaatgaccctggccctgggtcacattgcaggggacagaagtgatcatgtgggtgggccagtgarctttctggttttgctgcagtgccgctgaggacttggggactcaggaacatattgctgtcccctcctctgttcctgacaccggctccttctaagtccttgt

SEQ ID NO: 210896 - DNA, 201 bp, Homo sapiens
tttgtgtagcacaatgccatttattcaaataatatattttattacataatatagtgcttataatttaattcatatttatattttatttatatacttatatrgcaattgttcattatatatgaattaaaatattcataaaattgaggtattttgaaatcttaatatgtaatatattctatattaagtttaatataaagattt

SEQ ID NO: 210897 - DNA, 201 bp, Homo sapiens
tggtcttttatctatataaatatacacaatttttgtatgaaaatggaatcattctgtacataccattttgctgctcttttcactcagtgatgcctggaacrttttttttttttttttaagacggtctctagctgttgcctgggctggagtgcagtggcacgatctcggctcactgcaacctctgccttgcaggttcaagca

SEQ ID NO: 210898 - DNA, 201 bp, Homo sapiens
gcctggaacgttttttttttttttttaagacggtctctagctgttgcctgggctggagtgcagtggcacgatctcggctcactgcaacctctgccttgcasgttcaagcaattctcctgtctcagcctcccaagtagctgggattacaggcgcccgccaccacgcctggctaattttttgtatttttagtagagatggggt

SEQ ID NO: 210899 - DNA, 201 bp, Homo sapiens
ccttgcaggttcaagcaattctcctgtctcagcctcccaagtagctgggattacaggcgcccgccaccacgcctggctaattttttgtatttttagtagaratggggtttcactgtgttggccaggctggtctcgaactcctgacctcgtgatccacccgcctcggcctcccaaagtgctgggattacaggtgtgagccac

SEQ ID NO: 210900 - DNA, 201 bp, Homo sapiens
aaaaattataatatgaagtgatcatattataagagagtagccagaggtcactttgtcaaggaggtaacaattaagcccaagacctaaagataatgggagcyagccctgagccaaatgaggggtagttgatttctgtggaggaggagcacgaagaaagggactaaggcaggaatgagctttccgtgtttcaagggctgaaag

SEQ ID NO: 210901 - DNA, 201 bp, Homo sapiens
ttttttttgagacggagtctcgctctgtcacccaggctggagtgcagtggtgcagtggcatgatctcggctcactgcaacctacacctcccgggttcaagygattctcttgcctcagcctcctgagtagctgggactacaggtgcacgccaccacgcccggctaattttttgtatttttagtagagatggggtttcgccat

SEQ ID NO: 210902 - DNA, 201 bp, Homo sapiens
aaatcaatgaaatcaaaagttggttctttgggaagatcaacaaagttcacaaacttttaattgggggagaccaagaaaaaaataaaagaagactcaaattrctaaactctggaatgaaagagaggacaacatgacctacctaccttgataggattataagagaaggtatgtgaacatctcataccgcagtcctctcctggg

SEQ ID NO: 210903 - DNA, 201 bp, Homo sapiens
taagctggggaggaaaaatggcaggagggggggtagaagatgtataaataaaacttgattggccatgaacagacaattgttgaaatggaatattgggtacrtgggtggttttattatagtgttctcactatacttgtataaaatttaagttttccataataaagtttttctttgttaagaaaaacaaagcagagtgagatt

SEQ ID NO: 210904 - DNA, 201 bp, Homo sapiens
tcctgagtagctgggattacaggtgcctgccactacaccctgctaattttcggtatttgtagtagagacagggtttcaccatgttggccaggctggtctcraactcctgacctcaggacctcaggtgatccacctgcctcggcctcccaaattgctgggattacaggtgtgagccactgcacctggccttttttttttttt

SEQ ID NO: 210905 - DNA, 201 bp, Homo sapiens
tcttctggggatccttggtattggtcagctttctaaagcccttgacagtatagggactgtctgttgccaatatatcattgcttcattgagttggaagtctyagaaagttgcttaatgagtttcttaactaagtgacttgagcccaagaactttcagggtaaatagctgttttatcttttagtcctctctttttcttttgaa

SEQ ID NO: 210906 - DNA, 201 bp, Homo sapiens
gtacaccacttccttaaagagaacaaaaagggctccagcctgagtgacagagtgaaatctcatctcttagaaaaaaagagaaaagaaaagagggagcaagygtgcaagagcaaaaatactcatctttataataatcacacatgttaaacatttgtagctatgctgtctttggctttccagtgtaggattatatgccttatg

SEQ ID NO: 210907 - DNA, 201 bp, Homo sapiens
ccttggtaaatggataatatgtggggacagggcctttgccccaagtctttggatcccaagtgccctcctggtttcaccacctcttgctgctctcctccccrcaggaccaccatcaggatcaccaccaccactgggcattttattccctgtcaagtggtgaaggcgttcttacccagaaataacttctccttctgtatctaa

SEQ ID NO: 210908 - DNA, 201 bp, Homo sapiens
gctcttcccccttccctcgcctgccaccatgtaaaaacgtggctttgcctctctctcgccttccaccacaattgtaagtttcctgaggcttccccagccaygtggaactgtgagtcaattaaacctccttcctttgtaaaatacccagtttcaggtggctctttatagcagtgtgagaacggactaatgcatgtgtatatc

SEQ ID NO: 210909 - DNA, 201 bp, Homo sapiens; identical to SEQ ID NO: 37232

SEQ ID NO: 210910 - DNA, 201 bp, Homo sapiens
atctaatttgcaacgaatgctcagaattgtaaaaatgaaagtaatttattcacgaggtaaagcgagttttctgttgaaattatttatgctttctgtttctrtttctagcttgagcaatttcggaccctgcttttcacttccgaaggggagaaagagaaaagaatggtggacaacttccgcccccttcagccactgatgaat

SEQ ID NO: 210911 - DNA, 201 bp, Homo sapiens; identical to SEQ ID NO: 37230

SEQ ID NO: 210912 - DNA, 201 bp, Homo sapiens
caaaaattttctaacaaccatctatagttattcagcaagggctggtaattattcattcatttatttgggcttcatattactttcttatttttttcatattrctttcttcttgtgaattatttcacttttagaaattttattctttgtatagttttagagtttacacaataattagttctttgaaatgctgtcttgctcatt

SEQ ID NO: 210913 - DNA, 201 bp, Homo sapiens; identical to SEQ ID NO: 37231

SEQ ID NO: 210914 - DNA, 201 bp, Homo sapiens
agaggctgagcgttttaagggtacctgggatttgttttagtcgggtacagtaagacatgcagacatgggaatgactgtcatgaaggaagaagttgatcctrtttccagatccctagaagctggaggcatggcacactgtgcagagccacatgaggaagcaccagggttggtcaagaggcagagaatgtgaggggaaaatgc

SEQ ID NO: 210915 - DNA, 201 bp, Homo sapiens
ttggaaccatttggatatgtatatatatgttttcaagtataaattttttgaaatctaaatatagatcaagtatttttgatgaaaaaggtagcatccaaatkgagatgtgctgaagtgtaaaatacacaacagatttttaaaacttagtatggaaaaaatataaaccatctcattaataacttttcgtattgattacatttt

SEQ ID NO: 210916 - DNA, 201 bp, Homo sapiens
gacttgggggaatggtgatgccagaaaataagttcatgagtggtggacaaggaatgatttgtagagaagttatcttaatccatttgtgttgctgcaaaggwatatctgaaactgtgtaatttataaagaaaagaggtttacttggctcatggtgctacaggctgtacaagaaacatggtgctcacatctgcatctggtgag

SEQ ID NO: 210917 - DNA, 201 bp, Homo sapiens
gcacttagtgcattggaacgcagtcagatttgaaaactttgaggatgcagcactggaagaaaatggtttggctgtgataggagtatttttaaaggtaaaawatctcaccaactttaaatgacgtgttgtattctaggatgaaaagatagaacagtataatattgttatttactttaagaatgttgggatccatacattggt

SEQ ID NO: 210918 - DNA, 201 bp, Homo sapiens
catactaagaaaaatgaaaacattgggttcaacctgttgggtattatgctcactggctggggtgataggactgttgggaccccaagcctcagtgtcactcyatataccaaacctgcatgtgtaccctttatagttaaagttgaaattaattttttaaattaggtttaaatctctttagagataagagaatactatgttata

SEQ ID NO: 210919 - DNA, 201 bp, Homo sapiens
gccgctatcggccctggagccagagaagcttttggtgcggcgaggttggccggggccctggcggggcttctctgaggaatgggagtgggaggctggcggcrgggaaatagccacttccccactctagccctctttctccgctatggggatcaccagacatccttttaggattctgtctattaaaaagtagaacagctttcc

SEQ ID NO: 210920 - DNA, 201 bp, Homo sapiens
atgggagtgggaggctggcggcggggaaatagccacttccccactctagccctctttctccgctatggggatcaccagacatccttttaggattctgtctmttaaaaagtagaacagctttcccagagacattgcgggatgagaggagtgtccagaaaccaaggagcagcaagctgggactccctcgggtctgcattgttg

SEQ ID NO: 210921 - DNA, 201 bp, Homo sapiens
ctgttgtgccttgccccagagccggaggagaggaacctccaaaatgcagacattcttggtggctgggattctgtgtgatattcagcgttaaatgctgctgytctgaggctgctggaaacgcgttagtattaatatctgtgtacttctctcacatttacttttgctggaaaagcttgggaaatgacttaacgaagatgcgta

SEQ ID NO: 210922 - DNA, 201 bp, Homo sapiens
gtgagggcctcaaactgtttcccctcatgttggaaggccaaggggagccaacgtgcagagatcacatggtaagagggagaggaggaggtaccaggctcttytcaacaatcagttctgtggctgaatgtgatggctcacacctgtaatcccagcactttgggaggccaatgcgggaggatggcttgaggtcaggaattggag

SEQ ID NO: 210923 - DNA, 201 bp, Homo sapiens
gagatcacatggtaagagggagaggaggaggtaccaggctcttttcaacaatcagttctgtggctgaatgtgatggctcacacctgtaatcccagcacttygggaggccaatgcgggaggatggcttgaggtcaggaattggagaccagcctgggcaatatagtgagaccttgtctatacaaaaaaaaattttaattaaaa

SEQ ID NO: 210924 - DNA, 201 bp, Homo sapiens
tctgtaaagaatctctgggccaggcgcgatggcttacgcctgtaatctcagcactttgcgaggccgaggcgggcggatcacaaggtcaggagatcaagacyatcctggctaacacggtgaaaccccgtctctactaaaaatacagaaaattagccaggcgtggtggtgggcgcctgcagtcccagctactaaggatgctga

SEQ ID NO: 210925 - DNA, 201 bp, Homo sapiens
gcccacgaggcagaggttgtagtaagccaggatcgtgccactgcactccagcctgggcgacagaacgagactgtctcaaaaaaaaaaaaaaaaaaaaaaaraaaaacttttaagaatgtttggaaccatttggatatgtatatatatgttttcaagtataaattttttgaaatctaaatatagatcaagtatttttgatga

SEQ ID NO: 210926 - DNA, 201 bp, Homo sapiens
atctcagcactttgcgaggccgaggcgggcggatcacaaggtcaggagatcaagactatcctggctaacacggtgaaaccccgtctctactaaaaatacaraaaattagccaggcgtggtggtgggcgcctgcagtcccagctactaaggatgctgaggcatgagaatggcgtgaacccgggaggcggagcttgcagtgag

SEQ ID NO: 210927 - DNA, 201 bp, Homo sapiens
atccagtccgccgctgatgggcacctaggttgattctgtgtctttgctattgtgaatagtgtgacagtgaacatatgagtgcatgtgtctttttggcaaartgatttattttcctttgggtttatatccagtaatggtattgctgcattaaatggtagctctgtttttagttatttgagaaatctacaaactactttccat

SEQ ID NO: 210928 - DNA, 201 bp, Homo sapiens
tcctaagcagcgattcttcaggtagctgcccagaaaggcctggagctgctctggaccactgctgatctccagatactccctgagaaccatcacctcggcgyccaattcctgagtggttttcactactaaataatgactcagttatctcttctcttggccaggacgcccttgtggaatttgggtcatttgacccttcctgcc

SEQ ID NO: 210929 - DNA, 201 bp, Homo sapiens; identical to SEQ ID NO: 37238

SEQ ID NO: 210930 - DNA, 201 bp, Homo sapiens
ctattttaaaaatacaaaaattagccaggcatggtggcacgtgcctgtaatccaaggtacttgggaggctgaggcaggagagttgcttgagcccaggaggyggaggttgcagtgagcggagatcacaccactgcactccagcctgggcaacagagtgagactgtctcaaaaaaaaaaaaaaaaaaagatgattttggataa

SEQ ID NO: 210931 - DNA, 201 bp, Homo sapiens; identical to SEQ ID NO: 37239

SEQ ID NO: 210932 - DNA, 201 bp, Homo sapiens
atactttaaaaagcatatgaaataaacactttatggataaataatctgaatcatgcatatttgtggtgagaagttctctgaaaacttctcatttcttccayggtcatttgtatcagatttcatgaatctttctaaatccatttagactctacaatttccaagacaatcctttaattcattcagatttttcagtattctcat

SEQ ID NO: 210933 - DNA, 201 bp, Homo sapiens
gctgttgtagtcttgaaattcttaatgatttaacaaggggtcctccattttcattttgcactgggccctgcaaattacatagcccatcctgatttctacarctatagaatagcacaatgggaattccatatggattaataatatgtgacacttacggctttttctatacgcttccaagtacttcatataaattacttcatt

SEQ ID NO: 210934 - DNA, 201 bp, Homo sapiens
tggcgtgaacccgggaggcggagcttgcagtgagccgagatcgcgccactgcactccagcctgggcgacagagcgagactctgtctcaaaaaaaaaaaaaatctctgttaacatagctagatcttttttttccagaccctcccaatcctaaagagattaactaagatctgaataggaaatatttctcatctattgtctcta

SEQ ID NO: 210935 - DNA, 201 bp, Homo sapiens
gaattccatatggattaataatatgtgacacttacggctttttctatacgcttccaagtacttcatataaattacttcatttcattcaatggtagaattgrtagatgcttaacttttaatgaaagacaaagtcagattcactctaaggattaaaaaatatatgtaacattacattttaaagattttcaaaaacaatttgtt

SEQ ID NO: 210936 - DNA, 201 bp, Homo sapiens
caggcgtggtggtgggcgcctgcagtcccagctactaaggatgctgaggcatgagaatggcgtgaacccgggaggcggagcttgcagtgagccgagatcgygccactgcactccagcctgggcgacagagcgagactctgtctcaaaaaaaaaaaaaatctctgttaacatagctagatcttttttttccagaccctccca

SEQ ID NO: 210937 - DNA, 201 bp, Homo sapiens
gcctgcccaacatggtgaaaccctgtctccactaaaaacacaaaaattagccgggcgtggtggcgggcgcctgtaatcccagctacttgggagtttgaggstggagaattgcttgaacacgatctcatcactgcactccagcctgggccacagagtgaaacttcatctcgaaagaaagagagagagagagagagggaggga

SEQ ID NO: 210938 - DNA, 201 bp, Homo sapiens
caggaaccggggaggcagagcttgcagtgagccgagatcgcgccactgctctccagcctgggcaacagagtgagactccgtctcaaaaaaaaaaaaaaaaagtttttaaaaaccaaagtagatggccgggtgcagtggctcacacctgtaatcccagcactttgggaggccaaggcgggtggatcacgaggtcaggagttc

SEQ ID NO: 210939 - DNA, 201 bp, Homo sapiens
ggcaatttgtgattctgcgatcatcctcaaccaagtcatatggagggtccctgtgtatacacccatcactgcattaaggccaaggcctacacggatatctkcagtaacatgaggaagtagcacatccctcataaaaagggcagtgcatagcaagggaccagataaaaagcacatgagggtataaggcaatgctttccggta

SEQ ID NO: 210940 - DNA, 201 bp, Homo sapiens
ggagttcgagaccagcctgcccaacatggtgaaaccctgtctccactaaaaacacaaaaattagccgggcgtggtggcgggcgcctgtaatcccagctacytgggagtttgaggctggagaattgcttgaacacgatctcatcactgcactccagcctgggccacagagtgaaacttcatctcgaaagaaagagagagaga

SEQ ID NO: 210941 - DNA, 201 bp, Homo sapiens
gccagtaccgatgctcctaaacaccctacaatgcacacagcattcccccacaaccaagagtcatctgatcaaaaatgtcaacagtgccaagactgagaaaycctaacttagagaaagaacccttgcagtagcccagaagtcttgatctgtcatccattacctgtgaacctcatctcctactgccttcctcctggttcactc

SEQ ID NO: 210942 - DNA, 201 bp, Homo sapiens
ccatttcctccgggctccactccctactccctccctgcctgtgctcccctccaccatgcttcattctcctcacttagggacaggaaagcaaaatgatgggrgtgtgagatagacaaggaaagaccaaattcttcttcctggaccagggcccttgtggttctccctgctgtgaggggtcctctgtggtggtggtccagatgc

SEQ ID NO: 210943 - DNA, 201 bp, Homo sapiens
ctacccaactctgctgttgtagcaagaacacagcctgttagcagcagatactcaaatgaccaagcctctattccaatgacacttggtgtgtggacactgarattggaattgcagataattgttaggcatcacaaatctttttcattttccaactgtttaaaaatgtaaaaatcattgttagcttgtgagctgtataaaaac

SEQ ID NO: 210944 - DNA, 201 bp, Homo sapiens; identical to SEQ ID NO: 37236

SEQ ID NO: 210945 - DNA, 201 bp, Homo sapiens
agtttagttttgttttgttacatggatatattgtgtagcggtgaagtctgggcttttattatacccctcatcatgcatctttcttaatttccccaaaactmtagagtgtgcccccttctcaactggaagtccataatattaccttgtttatacggattccagaaatcttcaaaacaacaagctaaattcctgtgttctgga

SEQ ID NO: 210946 - DNA, 201 bp, Homo sapiens
gttcttgtttctaagttactagaaaaacacaggtggaagtcaacatttgattttgtttgtggtatgtttcactgttccaacctgttttccccaaggagaayattgtggtctttcttgccctgggcctttgagcaggtcctattcctatattctggaccctcatctgctcaattgtaaacacagttctcattgtttctgaca

SEQ ID NO: 210947 - DNA, 201 bp, Homo sapiens
gcaggtcctattcctatattctggaccctcatctgctcaattgtaaacacagttctcattgtttctgacagctcagtaccccagcagaaggctagtgtacrcttgtaaccaagaataaccccagattcttgagggttagaagctcagttatgaggccgggcacggtggctcatcccagcacttttgggagaccgaggcagg

SEQ ID NO: 210948 - DNA, 201 bp, Homo sapiens
aatcccagctacttgggagtttgaggctggagaattgcttgaacacgatctcatcactgcactccagcctgggccacagagtgaaacttcatctcgaaagaaagagagagagagagagagggagggagggagggagggagggagggaagaatagcagttaccaggaaaagaggtcacaacatccttttggaatagaaaaca

SEQ ID NO: 210949 - DNA, 201 bp, Homo sapiens
agcgtatcatctagtgaaatttagcgtgatgatcgcataaaaagatttaggtggccgggcatgatggctcacgcctgtaaccccagccctttgggaggccwtgaggggcggatcacgaggtcaggagaacgagaccatcctggccaacatggtgaaaccccgtctctactaaaatacaaaaaattagccaggcatggtggc

SEQ ID NO: 210950 - DNA, 201 bp, Homo sapiens
cccagctacttgggagtttgaggctggagaattgcttgaacacgatctcatcactgcactccagcctgggccacagagtgaaacttcatctcgaaagaaagagagagagagagagagggagggagggagggagggagggagggaagaatagcagttaccaggaaaagaggtcacaacatccttttggaatagaaaacaaaa

SEQ ID NO: 210951 - DNA, 201 bp, Homo sapiens
gtatatacataaattcttaaaaacaaaacgaatcatgctattatacagctttgtcatcttctttgctgaacttaactgtgttctgtttttgtttttttttktttttttttttttgttgttgttgttgtttttatagagataggatcttactctgttgcccaggctggagtgcagtggcaccatcatagctcagtgcagcct

SEQ ID NO: 210952 - DNA, 201 bp, Homo sapiens
ccttgaattgtccctgcacatctctcaggagtggccactcttcttgggtatgttggaagtggaaaaccgtaaagctttctaggaatattttttactgaggtttttttttttttttaacctcagcatcagggttggaattcactgaaatgccaaaagcagcaagggcaccgttctctgtgcctgtacacacctgccctcttc

SEQ ID NO: 210953 - DNA, 201 bp, Homo sapiens
cttgaattgtccctgcacatctctcaggagtggccactcttcttgggtatgttggaagtggaaaaccgtaaagctttctaggaatattttttactgaggtttttttttttttttaacctcagcatcagggttggaattcactgaaatgccaaaagcagcaagggcaccgttctctgtgcctgtacacacctgccctcttct

SEQ ID NO: 210954 - DNA, 201 bp, Homo sapiens; identical to SEQ ID NO: 37233

SEQ ID NO: 210955 - DNA, 201 bp, Homo sapiens
tgtgtctctgccatgattcagaaggtatttgagtctgtctaagaatttaggtgtttccatgtccccaactttcctttctcctccatggtatgacgcagccycaaaaccatgaacatcttactttcatatctcaaagtaggaagttctttttcccccagattcatgggcatctttcttttcccccctttttttgcgttgtta

SEQ ID NO: 210956 - DNA, 201 bp, Homo sapiens
tgagcaatggcatggaactcattgatcttaactttttgaatgtgtgaaaaaaaattccttctagtttttatgcatattttcttcaactagtataggtagtrtttttaattaataaatatatctctatctctctatgtatagatttataattggtatagagcataggtgtgcaatggaagttttaccagaaatttattttgt

SEQ ID NO: 210957 - DNA, 201 bp, Homo sapiens
agtcaaatttgaaaactttgaggatgcagcactggaagaaaatggtttggctgtgataggagtatttttaaaggtaaaaaatctcaccaactttaaatgaygtgttgtattctaggatgaaaagatagaacagtataatattgttatttactttaagaatattgggatccctacactggtaagataaatagtgattgttaa

SEQ ID NO: 210958 - DNA, 201 bp, Homo sapiens
catctaaggaaatcctcgtctccccttttaaaacaaggctgggctcagactgtggcatcagttttaacatcttgtaatgcttatacatttttattgaagtrtaccaacgtcttatctcagtttggacatgaatttagagatatttcaaattagctagagagaagagttaaaacatagaagaacataagctttttacatcta

SEQ ID NO: 210959 - DNA, 201 bp, Homo sapiens
caaattgctgtggagaagcttccagattccaaggcccaggccattctgcagcctctgtacttgtacttacaaaatccagaaataagcctgagagtacaccrtttcattaaagagaggagaaaaggcttgttggttttataaaaatcacgcgtgttaagcgtttgtagctgtgatgtcatgggcattccagtgtgagattat

SEQ ID NO: 210960 - DNA, 201 bp, Homo sapiens
gaatggggactgataggggcgtaacctggaatgacgaaatgacgtttgctgcgtagggacgtggctaaacgtgagggggcgtggccaagatggccgcgtgygggatcctcgggtaccgggagcgaacgaggaggttctggctcaggtaagtcgttcgggtaagggcgggcggcagtaaggagcgtgggcagcagcagggcg

SEQ ID NO: 210961 - DNA, 201 bp, Homo sapiens
tctcctcacttagggacaggaaagcaaaatgatgggggtgtgagatagacaaggaaagaccaaattcttcttcctggaccagggcccttgtggttctccckgctgtgaggggtcctctgtggtggtggtccagatgctctccactcagaatgctcctgtggagccttcaagggcccctccagggacctctgcactgcatct

SEQ ID NO: 210962 - DNA, 201 bp, Homo sapiens
taaatagcagtcataaaaatatacctttagagatgtgtttatattttgttcacatacatgcagttgaactaggaattaataagcccacttcccacagtagsaatgttgtgggaagggggccaggggaaagcctagccctgctctgaaagcagcaaaggctgtatatgaagatggagacacactctgggctggtgcttccta

SEQ ID NO: 210963 - DNA, 201 bp, Homo sapiens
gaatgctcctgtggagccttcaagggcccctccagggacctctgcactgcatcttcccctgacatgggtgacatgctctcactgacttcctccaccccacstcagctctgcgcccaggggtgtacacctccagcctcactcgctgccttgtccttgccctgtctcacttgaggacatgggcctaacaggcaatgactccat

SEQ ID NO: 210964 - DNA, 201 bp, Homo sapiens
gtaccgcaggggcgtggcccgaacgagctgactttagcccttacgtgaaaggcgtggcgtagtcgcaagggtgtaaaaaagaaattcgaattcgcgggacrgtcggcctcaggcggagtagggacgtgagcccaagggagggaggtggggtaggcagactagttgtgactggatgatcactgggcgaagggtggaaaagtg

SEQ ID NO: 210965 - DNA, 201 bp, Homo sapiens
agacaggagccactgcgcccggcctatcttccattctgcttttaaggaaaaccagcaaataacaagaaaaccatttaatgtaaagatttgtaaataatcayttcaaaagaagtgccttgttgctgtcacatttagtccatcttcatataattcttatctgggccagtttcttgggcatgggacatgtgcagttacacaagc

SEQ ID NO: 210966 - DNA, 201 bp, Homo sapiens
tctctagaagtacagtagacaggcttttttttttttcttttgagacatggtttgggtctgttgcccaggctggagtgcagtggtgctatcatggctcacarcagcctcgacctcccgggctcaatcctcccactttagcttccccggtagctaggactacaggtgtgtaccaccacgcctggataattttttgcatatttt

SEQ ID NO: 210967 - DNA, 201 bp, Homo sapiens
tcttgaattgactcagtcagcctttcctcaccgctactccaggttcactaatgatctccctgttgcccaaccaatggttatttgttagttcacatttcagktaccctctcagaagcctttggcacagctaatcacttctttcttgaagcactttcgtccctcagcttctgggatatactttctcttctccatctgctcctt

SEQ ID NO: 210968 - DNA, 201 bp, Homo sapiens
ctccactgcatagtctctgcctgactgtctactctagtgtgggctttggagctggttttgggggttcatttctcttaacttccataagttgaagtgtgtartattttctgactcctaatgtagtaggcatggattggggtggttttgttgtccttgttgatctgtatagtttttgtgggataggtggaaaagttggaattt

SEQ ID NO: 210969 - DNA, 201 bp, Homo sapiens
cccctgctccgctcattctgttccattcagtaataaaaattttcccatcaggcaataagaggtcaggtagcacttctcaccgctggaacaaggctttggarttaggggtgtgggtccatttgaaggatgaagccaattgttttgactgatttcagtttatcagtctgacccactctagccttgtgcttattttctagctcc

SEQ ID NO: 210970 - DNA, 201 bp, Homo sapiens
cttcaagaactctttcttgttctctgcttattgttttaattgtaactctgttctcatttcaaggacatactgtcttctctggggacatttattatggcttyttaatatgtattccagggagaatattacatctttttaaaaagtatttctcttcccattgcattgacttttacttctacttctttaaaaaaaaatatatat

SEQ ID NO: 210971 - DNA, 201 bp, Homo sapiens
ctttgaaaaatcattcttccacaagtcccttttgtgtgcctttgtttttctaaattgtgcactggacttcacctcctatagatgaaaattttctctttctycaaacagatgactctggccactggggcagaggtggtttatttacagctctggaaaagcgatccgctgagccaagaaaaatatatgagctggctgggaaaa

SEQ ID NO: 210972 - DNA, 201 bp, Homo sapiens
gcctctgcatgtactgaaatgtctgctcttcggatttgctgtattttttgtttctagggattcacctacgctcttaccagctggagggagtaaactggctygcccagcgcttccattgtcagaatggctgtatcctgggagatgagatgggcctggggaagacctgccaggtgtgttactatgcgacgagtactgctcacc

SEQ ID NO: 210973 - DNA, 201 bp, Homo sapiens
taaaagaattccctgagactgggtaatttacaaagaaaagagatttatttgctcatgcttctgcatgctgtacaggaagcctgatactgacatctgctcckgctgggggcttcaggaagctcacagtcatggtggaaggcaaaggggaagctagtgtatcacacatggcaagagcaggaacaagagagagtgggggaaggt

SEQ ID NO: 210974 - DNA, 201 bp, Homo sapiens
ctctctgctagtgtattagtttgttagggctgccataacaaaaagacacagactaggtagcttaaacaacagaaatgtatttccttatagttctggaggcygaaagtccaagatcaaggtatcggcaggtttggtttctcccgaggattctctccttggcttgcagatggcggtcatcttgctgtgcatgcacaaccctgg

SEQ ID NO: 210975 - DNA, 201 bp, Homo sapiens
gaactcgctctgaggttcaaccatttttttagataagattcagagccccaagactctggttgtaggacctcatgagttctgtacattgcaatcctcccatkaaatgtaattttccagatatgcacatcctgtcacatggatctagtatttatgtttatctacttcttttcttggattcagatttgctccaggtctttcctg

SEQ ID NO: 210976 - DNA, 201 bp, Homo sapiens
tgtccggaagggtgactgcaccagctccgctccggatatcttggcaggacgcgccctctggcggcgcctcgctcgtaggtgggccccagcgcgcagtcgcscgcccccgcgcgttgggaagttgggagggaggtgcgcgcttggccgcgcggggcggggcctctaccggcccgatggagcgcgcgggcgctactagccgcg

SEQ ID NO: 210977 - DNA, 201 bp, Homo sapiens
tgggctaagaacaagtcatgattccagaaaaaagatgatcccaatgaaggaagaaatactataaaaaaatgatcatactggcctagaatgcaaaataagcstgaaataagaaacaaaaataaatttctttaagttctctagggttcattgccttggttctacttttgtcccacacttcttgtatttttttttcttatgtag

SEQ ID NO: 210978 - DNA, 201 bp, Homo sapiens
tgtctctttattcttctataatctagaaacattcttcagcgttttttttctttcattacatgaagagtcaagaccagtggttttgtggaatgcatgataakctgggttcttaaaaatcatttcttcttgattagatttcccattgtcttgaattgactcagtcagcctttcctcaccgctactccaggttcactaatgatc

SEQ ID NO: 210979 - DNA, 201 bp, Homo sapiens
tttgaatgctgcattctcaccttgatgttccaaggttccatcttttatcatttcctttttttccaagggcttcctttagccattctttgagggtaggtttrttgatgataaattctctttgttttccttcatctgagaatttcctcttcattcctgaataccatttttcttgattacaggagtctggattgacagttcttt

SEQ ID NO: 210980 - DNA, 201 bp, Homo sapiens
ctgactgaggctagtgggaagcttcacctgctggataagctactagcattcctgtattctgggtaggtggtaggttcacatttgctgctctgagctaatgrctgttaaaacctgactattgaggaactcactgagttgttcaggccaattccagttttctttttttttcttaacactgattcaggttctgccttctctgtg

SEQ ID NO: 210981 - DNA, 201 bp, Homo sapiens
aatattgttttgacagtgctgtgcttctttgtttatgcaaatttaaaataacagccagtaacaagggactctaggcttgactttgttcttgacttactccmtcattttgccgcctttcttccctcctctcgctatacaaaaattttctcgtgttatggaaaatgagacatcacttaccccttgcttctctaaagtaatgct

SEQ ID NO: 210982 - DNA, 201 bp, Homo sapiens
agcaaagttgaaactatcacacaggatagatgctcagggttgcttgagaatagtcaaaactgagtattaacttcataagtgccaaagacttcaactgcatrtatttaaaaaatccagaggagtatgttatggtgagttattttgtaaaatgataattgtccctgttaatttaaatttttccctttgggatttgcttaaagt

SEQ ID NO: 210983 - DNA, 201 bp, Homo sapiens
tgtttatgcaaatttaaaataacagccagtaacaagggactctaggcttgactttgttcttgacttactccatcattttgccgcctttcttccctcctctygctatacaaaaattttctcgtgttatggaaaatgagacatcacttaccccttgcttctctaaagtaatgcttctcagacttttcaacccatatagctgta

SEQ ID NO: 210984 - DNA, 201 bp, Homo sapiens
accagctctaacgaccctggcaagagggagtctgttttgtacttgttttcacattaatcaaagagaaggctgcaatgtaccttcacggttctcttaattarttcctgtaactcaaggtacctcctcagctctcttcctgcagcactgaagaaagaccagcaagagtgttctgagcaagcctcagaacactcagagtaaatg

SEQ ID NO: 210985 - DNA, 201 bp, Homo sapiens
atatagagagagtgcttagaataatgcctggcaagtagtaagcacagcgtaagtgtcattatcattattattaggtataatttagcatctctcagtaatcrgtcatgattacctccttgttccaacttcaacttgatacgaagactttaattagaatattcctgcctgatttgtctggagatccagcttatggtcagtagt

SEQ ID NO: 210986 - DNA, 201 bp, Homo sapiens
ttcttgtacctttgcccctctgtgttgtaggattatccatctatccctgtgatattatcctgggatgatttttcaaaacaggtaggaggtatgccaactartgagtttgtatgtgttgggtaagtatgagtttgagggggcttctcatagcaaaaatctccagaccatagactgaagatcacctggcgaacctgctctgat

SEQ ID NO: 210987 - DNA, 201 bp, Homo sapiens
actgccgggaaaacagttttatttatgctttaatgatttcatcatcctcatattcagagagcagcattatgtttgaaatgtctaaaattaggaaaaaagakatctctgcttttcagttaatctccttggaggactcagagtagatctgggagctgaagcagtcctggacattagtcttctccaaacactgttgtgtttgct

SEQ ID NO: 210988 - DNA, 201 bp, Homo sapiens
gagagtgcttagaataatgcctggcaagtagtaagcacagcgtaagtgtcattatcattattattaggtataatttagcatctctcagtaatcggtcatgrttacctccttgttccaacttcaacttgatacgaagactttaattagaatattcctgcctgatttgtctggagatccagcttatggtcagtagtccttctt

SEQ ID NO: 210989 - DNA, 201 bp, Homo sapiens
ttttgttgagagcacacacttttctgggcagggagtctaccttcatcagattctcaaaagagggctgtaaccaaaagaagtgaaggatcattgtgcttcarattagttcgatcttttcctttcttggtggatcaagggggaaggcttctcaaggaagtggcacttgagctgcctcttggttgatgaacagaagtcaggcag

SEQ ID NO: 210990 - DNA, 201 bp, Homo sapiens
tcaggtttatggaacaagccctttcaggcttgcttgtttcagcaaccagctctaacgaccctggcaagagggagtctgttttgtacttgttttcacattartcaaagagaaggctgcaatgtaccttcacggttctcttaattaattcctgtaactcaaggtacctcctcagctctcttcctgcagcactgaagaaagacc

SEQ ID NO: 210991 - DNA, 201 bp, Homo sapiens
ataatatcatccactcttctcattaactttttatcagagatcttgctacctagttgtaacttgcaagcgacattcggcactcttctcttgacagtgcgcaytgcagacctctcatatttagatctgttttctgaaagagcatgtgtccttttcctcagactactctaatcaaaatctaatcaaggtttttaagcagaagag

SEQ ID NO: 210992 - DNA, 201 bp, Homo sapiens
tacagagtgctttcatttactgttacataatttgaaatcagctcttggagatgaaatgattctctaagtcattgtggtgtctggaaaaaaaaaaaaaaaaaggccggcacggtggcccatgcctgtaatcccagcactttgggaggctgaggtgggtggatcactggaggtgaggagtttgagaccagcctggccaacatg

SEQ ID NO: 210993 - DNA, 201 bp, Homo sapiens
agtggataaaagcacgggctctggaccaagactgcaagggaatgaatcctggctctttcaccttctaggcttgcaacttcagagaagtcccttaccctccytttcaacatctataaagtggggaaaatcgtagcaactactcaacttcccgacagggttgttgtgagggttaaaggagttaatatagagagagtgcttaga

SEQ ID NO: 210994 - DNA, 201 bp, Homo sapiens; identical to SEQ ID NO: 37265

SEQ ID NO: 210995 - DNA, 201 bp, Homo sapiens
ctccttgttccaacttcaacttgatacgaagactttaattagaatattcctgcctgatttgtctggagatccagcttatggtcagtagtccttcttaaaarttagtccttaattcaggtttatggaacaagccctttcaggcttgcttgtttcagcaaccagctctaacgaccctggcaagagggagtctgttttgtactt

SEQ ID NO: 210996 - DNA, 201 bp, Homo sapiens
tccattcagtaataaaaattttcccatcaggcaataagaggtcaggtagcacttctcaccgctggaacaaggctttggagttaggggtgtgggtccatttraaggatgaagccaattgttttgactgatttcagtttatcagtctgacccactctagccttgtgcttattttctagctcctcgtctttgtgctgctgatta

SEQ ID NO: 210997 - DNA, 201 bp, Homo sapiens
aatagagtatttcaaaatggaatcaggatctggtgggcctcagaaattgtctcttttctgagtttcagtttggttctcctggatgttttgctctgttttgrtacctgtaatatagggaaacacaactttttttgggaaagccctttgaccccagcttgctagttgcataataataaattttctgttcctaatggttttatt

SEQ ID NO: 210998 - DNA, 201 bp, Homo sapiens
gagtgatgtgtgaaggcaaggatggacagcagagaacaggcacgtgggcagaaataaacacccacgttcccatcagttacatgatttaaaattatgggccrtggagcaaatgttgtggaaatgtttttgaaaatgtgtgataaagtttcagtgactagagcttttagcgtcttgtaacattcacctcaacagttgagcact

SEQ ID NO: 210999 - DNA, 201 bp, Homo sapiens
ctttgtggaggagaatgtaaatgaaaagaaccagcactcaccctctccccagctacacatttgttccttggcctccctcacacctgccacagtgctggctrtgtgcagggtctgtaggaagtaaggattagttccaagcctcatcacttcttggctgtttgggtttgagcggctttcttaacttcttagatctactctttt

SEQ ID NO: 211000 - DNA, 201 bp, Homo sapiens
gggggttgtggagctgactcaggcatcaaagggctgggatacaggagcctctaagatcttttccatgcctacaattcagaaaaattctcttttttttttttaacccttgagagcttttggaaagtatatgttttggactcattctctggttttaaagtattttaaaaagaagaagaaaaccctgtataaagtgaccacaaa

SEQ ID NO: 211001 - DNA, 201 bp, Homo sapiens
agtcaagagggccgatcactccgaaataaaggcagtgtaagaactgttaatttatttaaaagttgttcttccaaactctcattctaaaacaaacaaacaaaaaaatgatgctggcatcgttttgttctcttaggatgatttgtcaagaaataagtatgtgtttgctgaaatgttattataattaactataccctagtataa

SEQ ID NO: 211002 - DNA, 201 bp, Homo sapiens
aggcatgagccactgcgcctgggggattttttttttttttttaaataccaagaaaccaaaagtaaaagatgtggttctgatttggtaaatctaagcagtasgtatggagttctgaagtcctgaaagaaggaaacaggttttttatcctgcagggaggacacagtagaaacaggcaggcagatgcaggtgtagtgaacactt

SEQ ID NO: 211003 - DNA, 201 bp, Homo sapiens
gttctgatttggtaaatctaagcagtaggtatggagttctgaagtcctgaaagaaggaaacaggttttttatcctgcagggaggacacagtagaaacaggmaggcagatgcaggtgtagtgaacacttattggatactgtgtgctgagtgttgtctgaggtgctcttttccagttgtttcagtaaataagaataacagcag

SEQ ID NO: 211004 - DNA, 201 bp, Homo sapiens
gttgttactgatctttgccaaggtggtttcgatagaccactgtgttaggaaaacaaattgccaaagaaaaggagtcagttcatgatagaggtaaagttccyagtgtagccttccctttctaaggagtctggcagtggagaggttggaaagtagctaacagggtctctgatctcaagtggctgctgggaatgcttatgaaaa

SEQ ID NO: 211005 - DNA, 201 bp, Homo sapiens
tgccacaaagctgagggcagctctggcatgggccctggggacttattcctggttggtgagtcagcttttacatggagggcaccttctctgatccatatttsatgtcttttcactgggcaacccattttctccagagaccaatcttctagtattttccctgggagaggtgagaatggagttcacctggttgctgaaactgaa

SEQ ID NO: 211006 - DNA, 201 bp, Homo sapiens
caaagctgagggcagctctggcatgggccctggggacttattcctggttggtgagtcagcttttacatggagggcaccttctctgatccatatttgatgtmttttcactgggcaacccattttctccagagaccaatcttctagtattttccctgggagaggtgagaatggagttcacctggttgctgaaactgaaaaggc

SEQ ID NO: 211007 - DNA, 201 bp, Homo sapiens
gtatgattacaaagaatataagtggataggaaagactagtaactaacgtggccccaatcagaattaaataaaaaacagggttgctttatcttaaatgccarcatttttttaaaaagcatgtttggaagttgagaattgcatgcagtatgaagctacatatgttgatcatatttgacacttctcagctctatttttttctac

SEQ ID NO: 211008 - DNA, 201 bp, Homo sapiens
agtggataggaaagactagtaactaacgtggccccaatcagaattaaataaaaaacagggttgctttatcttaaatgccagcatttttttaaaaagcatgkttggaagttgagaattgcatgcagtatgaagctacatatgttgatcatatttgacacttctcagctctatttttttctacttgttgatagagtgcctcat

SEQ ID NO: 211009 - DNA, 201 bp, Homo sapiens
acagattttgtatgaaaataaatcttcatttctctgtaataaatgcctaggagtgctgtgagtgggtcatatggtagttgcatgtttagtttttaaagaarctgccaaactgtttccagagtagctgtactattttacattcccaccagcaatgtatgactgagtttggattctttgcatccttgccagcatttgatattg

SEQ ID NO: 211010 - DNA, 201 bp, Homo sapiens
tcagaacttttttttacttagtgaacaaatgagacttagataaatcctatagtttaagagagttcacagaaaactagcttatcaatatcagagtttatcartgccagcctttataacgtgtcttcctaatttttcagatttgcttgaaagatgcatcatttctaaaatcgtgagtaggttgtactatttaagaacttgggt

SEQ ID NO: 211011 - DNA, 201 bp, Homo sapiens
ggacttcacctcctatagatgaaaattttctctttcttcaaacagatgactctggccactggggcagaggtggtttatttacagctctggaaaagcgatcygctgagccaagaaaaatatatgagctggctgggaaaatgaaaggtaagaagcaaagcagagggaaaggttaagggtggaataagagagaagaggacacct

SEQ ID NO: 211012 - DNA, 201 bp, Homo sapiens
caagcagctgccagggctcatcgcattggccaaaacaagtaagtgatttttttctgcttccttggcttgcccagcagcagttctgggttgtgaaaaaggtraagaatatagtcctggtgacagtcccacactgggagctgagagaccaccaggttttagctcatctgtgctattgactcctagggtagtattgggtgggtc

SEQ ID NO: 211013 - DNA, 201 bp, Homo sapiens
gatggttgagagatacttggcattttgtcctcatgggaattgttcgaacagagatggaatgactgcttgtcctgggggttgtggagctgactcaggcatcmaagggctgggatacaggagcctctaagatcttttccatgcctacaattcagaaaaattctcttttttttttttaacccttgagagcttttggaaagtata

SEQ ID NO: 211014 - DNA, 201 bp, Homo sapiens
agccctagaagagggcctgaagaagatatttttagcagcaaaaaagaagaaaggtaagctcttccacctgtgctcaagagtagatgaatttgtttctaggsatgtgatacgacttttgaagggaggtaagaaatgtcaagatcccacttaatatgcacggtaaaggcaaaccacagaagtgatcaccccaccgtcttgtag

SEQ ID NO: 211015 - DNA, 201 bp, Homo sapiens
ggtgtgtggagatgcagtgttctgtggaatattaagcatgttgcttccgtacagtgtgtgttagggataatgaaattcggggaggaatcttcttgaccctsgtgatggatcttgttcttcctctaggttctcatcccaggccttgtggagggatctaccaaaaggaagcgggttctgagtccagaagagctggaggacaga

SEQ ID NO: 211016 - DNA, 201 bp, Homo sapiens
tggggtggtggtcccagtgtagtattgtacagtcaaaaaagtgtgaattttagagtcaggagatattccagaatcatttcactcttggctttctcatttayctggtttagttacccaacctttcaacttcaacttccttatccatatgatgggacaatatctgtcttatcctctgcacaaggtttttaagagggtgaaatg

SEQ ID NO: 211017 - DNA, 201 bp, Homo sapiens
tagtcaagagggccgatcactccgaaataaaggcagtgtaagaactgttaatttatttaaaagttgttcttccaaactctcattctaaaacaaacaaacaaaaaaatgatgctggcatcgttttgttctcttaggatgatttgtcaagaaataagtatgtgtttgctgaaatgttattataattaactataccctagtata

SEQ ID NO: 211018 - DNA, 201 bp, Homo sapiens
gcgcggggcggggcctctaccggcccgatggagcgcgcgggcgctactagccgcgggggccaagcccctggcttcttactgcggcttcatactgagggccsagccgaggcggcgcgggtgcaggagcaggacttacggcagtgggggctgacaggtgagcgggctccgggcggacttcggccaggcgggccaacctattgg

SEQ ID NO: 211019 - DNA, 201 bp, Homo sapiens
ctttttacttcatctgcctaaaaccctttcttcccaaataaccacatcaagtgttgttcaaatgtctgtttctcagagaggtcttctgtgattacctcatataaaacaggccccatcccccctgttattctctgtcccttctcccatattttcctttatcacacctgtcccacctgacacattacctatgtatttgtttat

SEQ ID NO: 211020 - DNA, 201 bp, Homo sapiens
ctagtcaagagggccgatcactccgaaataaaggcagtgtaagaactgttaatttatttaaaagttgttcttccaaactctcattctaaaacaaacaaacaaaaaaatgatgctggcatcgttttgttctcttaggatgatttgtcaagaaataagtatgtgtttgctgaaatgttattataattaactataccctagtat

SEQ ID NO: 211021 - DNA, 201 bp, Homo sapiens
gctagtcaagagggccgatcactccgaaataaaggcagtgtaagaactgttaatttatttaaaagttgttcttccaaactctcattctaaaacaaacaaacaaaaaaatgatgctggcatcgttttgttctcttaggatgatttgtcaagaaataagtatgtgtttgctgaaatgttattataattaactataccctagta

SEQ ID NO: 211022 - DNA, 201 bp, Homo sapiens
agtgtgtgttccctacagggttgtgggaacttcatggttgtttctcatggggaaatgtgatcaaaactgcctttctttttctgtgttccagactattgctytcttcatttatttggcaggaagattaaatgatgaagggccatttctgattctttgtcccttgtctgttttgagcaactggaaagaagaaatgcagaggta

SEQ ID NO: 211023 - DNA, 201 bp, Homo sapiens
ccagtgcatatctttacatatcagtgttgcaaaagacagggatcctgttgtttttgttagggagttagtaattacaggaaaggctcaaggttttattaatyttgggactagaactagaaagagtaacactgggtttgttctttgtttatcttagggggtaggtgtggcttttttctttttctgactttccttgtgttgctg

SEQ ID NO: 211024 - DNA, 201 bp, Homo sapiens
tatggctttttaatatgtattccagggagaatattacatctttttaaaaagtatttctcttcccattgcattgacttttacttctacttctttaaaaaaawatatatatatttatttatttattgaaattggcagataaaattgtatttatcatgtacaacatgatttcttgaagcacatgtacattgtggaatcattaaa

SEQ ID NO: 211025 - DNA, 201 bp, Homo sapiens
gagtaaactggctcgcccagcgcttccattgtcagaatggctgtatcctgggagatgagatgggcctggggaagacctgccaggtgtgttactatgcgacragtactgctcaccgccactgcgatacttccttataactcattctggagctgagagctctggagctaaaacaaagctcagtttcacaaatgtccctgggat

SEQ ID NO: 211026 - DNA, 201 bp, Homo sapiens
aattcaccagtactttcttttaattatacacaatagtgctgtttcttcactagatggtagctcctttttattttgggtagtggtagtggcatgatttctgsttttgtagttctcttttgtttctataggaccgtgaatttccatcgctcgctttctctctgtgccacaaacttgtcaaaggatgtcttcccacttctaagt

SEQ ID NO: 211027 - DNA, 201 bp, Homo sapiens
aagaaatactataaaaaaatgatcatactggcctagaatgcaaaataagcgtgaaataagaaacaaaaataaatttctttaagttctctagggttcattgycttggttctacttttgtcccacacttcttgtatttttttttcttatgtagcaagtgaactgcacaaactcttgcagccatttctgctgaggcgagtgaaa

SEQ ID NO: 211028 - DNA, 201 bp, Homo sapiens
gcctcagcctcctgagtagctgggactacaggcgcgcaccaccacgcctagctaatttttgcatttttagtagagacggggtttcaccatgttggccagamtggtcttgatctcctgaccttgtgatccgtccacctcggcctcctaaagtgctgggattacaggcatgagccactgcgcctgggggattttttttttttt

SEQ ID NO: 211029 - DNA, 201 bp, Homo sapiens
aacataagtgtttaagagagaaaaagtgacacaatattagaagcagagttactaagtttgtaattagtctgaaaaaacagcagttttcttacatggttacygtatctgcaaaggccagtgcatatctttacatatcagtgttgcaaaagacagggatcctgttgtttttgttagggagttagtaattacaggaaaggctca

SEQ ID NO: 211030 - DNA, 201 bp, Homo sapiens
gctgaaatgttattataattaactataccctagtataaaaactatgtaaaaaagtcagcatgaaaaacataaaggagagaatatattgtacgatgtcatgyaggtgaaagcagccttgtccatccaagtcacccctaaaggcattcctatattataccaaaataccatatcctgctgttggtaatgatgaccctatgacaa

SEQ ID NO: 211031 - DNA, 201 bp, Homo sapiens
cttgaaccgggaggaggaggttacagtgagccgagatcatgcctctgtactccagcgtgggtgacagagcaagaccctgtctcaaaaaaaaaaaaaaaaaaagatatacatacacaagatgtcaagatatggcttcctcattttgatgtattgtttaattctactaaattcttgtgaatgtcagtttagagaatatctttt

SEQ ID NO: 211032 - DNA, 201 bp, Homo sapiens
gttggcacctattgattatcttttttcgttcagtttgaaatcttcccagttcttgatataatgaatgatttttataagaattggagccaggcatttttttwaaatcatgtttaaacctcctgtttgactgtctttgtctgatgctgctctggcaggggaagagggtctgctgccttgttagtgccaggtggggatagaagt

SEQ ID NO: 211033 - DNA, 201 bp, Homo sapiens
tccagtgttatggaatttttattttatttatttatgtatttgagttctcagtagtcttcagtctcctgttgaccggaactcccatccagaacagcctccargagctctactccctcctcagttttgtggagcctgatctcttttccaaggaagaggtgggagattttattcaacgctaccaggatattgagaaagaatctg

SEQ ID NO: 211034 - DNA, 201 bp, Homo sapiens
tctgccttgacctccaaagtgctgggattacaggcgtgagctaccatgcccggccaaaaccagaagattttaagattttattgtagctatctgacaaagartaatttacttcaacaatctcttttagtcttaaaaacaggaacattcagggagtgctcattattgaattgtagtcaggaagcagttagcctaatcagtaag

SEQ ID NO: 211035 - DNA, 201 bp, Homo sapiens
  misc_feature (1)...(201): n = A,T,C or G
acatatgcaggcgacaaggaggaaagagcctgccttcagcaagacctgaaacaggagtcacgttttcatgtgctactgactacctatgaggtattcattcntttctctatagcgagaactcctaacctgtgaccttagaagttgtagagtctgctgaaattatatttaagttttgttgagagcacacacttttctgggcag

SEQ ID NO: 211036 - DNA, 201 bp, Homo sapiens
tgtttacaaataagtagaaaacttcaatcagggtgagtttctaattgcatttctacttggcagatattgtttgtgaacagcagtataaaatgtgctccaarggaaattgtgattgtctgggttaatttccttttgtctctggcctgctaaaggatggcctggtgggaatccaacaattaccagtccttctgcctgccctct

SEQ ID NO: 211037 - DNA, 201 bp, Homo sapiens
tgtagtattgtacagtcaaaaaagtgtgaattttagagtcaggagatattccagaatcatttcactcttggctttctcatttacctggtttagttacccawcctttcaacttcaacttccttatccatatgatgggacaatatctgtcttatcctctgcacaaggtttttaagagggtgaaatgaagcaacattgataaga

SEQ ID NO: 211038 - DNA, 201 bp, Homo sapiens
ggctccgggcggacttcggccaggcgggccaacctattgggactgcctcttgcgggccgggggcgcagcgggtgggccgcccggtgggcagtttacccgcycgcgccagggccttccttcgctcctgccgtgggcggagagaaactgcgcccgggcttggtggccacggcccccgcctgcgcggcgcgcggggccggcgga

SEQ ID NO: 211039 - DNA, 201 bp, Homo sapiens
tgacaagaactcgggtttggtgctgagtggaatgaagatgtgttaagaggtcagcacaaccttgggtataacactccctggagacagaaataaagctgttkggtgccaggggaacttagaagcctgaacaatattgtcctttggcacagagaagggaaaaaggcacctccttttacatccagaaataacaaagtggcaaga

SEQ ID NO: 211040 - DNA, 201 bp, Homo sapiens
tttttgttgttttgtttttgtttttgagatggagtctcattgtctggagtgcagtggcccgatcttggctcactgcaatatccacctcccaggctcaggaratcctcctgcctcagcctcccaagtagctttgtaccacaggcgcacaccaccatgcccggccactcttttgaatttttggtagagacagggttttgccat

SEQ ID NO: 211041 - DNA, 201 bp, Homo sapiens
ctctctgtgtgggtaaaggttgtgatgggtaactcagccttgcattccagtgttatggaatttttattttatttatttatgtatttgagttctcagtagtyttcagtctcctgttgaccggaactcccatccagaacagcctccaagagctctactccctcctcagttttgtggagcctgatctcttttccaaggaagagg

SEQ ID NO: 211042 - DNA, 201 bp, Homo sapiens
cgttgggaagttgggagggaggtgcgcgcttggccgcgcggggcggggcctctaccggcccgatggagcgcgcgggcgctactagccgcgggggccaagcscctggcttcttactgcggcttcatactgagggccgagccgaggcggcgcgggtgcaggagcaggacttacggcagtgggggctgacaggtgagcgggctc

SEQ ID NO: 211043 - DNA, 201 bp, Homo sapiens
catagctcaccacagcctcgaactcctttgctcaagagatcctcccacctcagcctcccaagtagctaagactacaggttcacaacaccaaacctaacttwttcttattttttgtagagactgggtcttgcgccttgttgcccaggttagtctggaactctggcttccagcaatcctcccacctcagcctcccaaagcact

SEQ ID NO: 211044 - DNA, 201 bp, Homo sapiens
tgatttttgttgacagtgactttaatcctcagaatgacttgcaagcagctgccagggctcatcgcattggccaaaacaagtaagtgatttttttctgcttycttggcttgcccagcagcagttctgggttgtgaaaaaggtgaagaatatagtcctggtgacagtcccacactgggagctgagagaccaccaggttttagc

SEQ ID NO: 211045 - DNA, 201 bp, Homo sapiens
cacctcagcctcccaaagcactgggattatagtcatgagtcactgtgctcggccatatatgtcagtttttaacacaagcatctctattttgattctaaccrctttcacatcagcttatgtaaagccatagaattaaattagcacatttttcttcactatcagttttacttgatttggatggggtaggaaaatatattatac

SEQ ID NO: 211046 - DNA, 201 bp, Homo sapiens
gtaaacctgagagatggagctggcagtgagccgagattgcgccactgcactccagcctgggcgacagagcgagactctgtctcaaaaaaaaaaaaaaaaaatagttggaagcaacctaaatgtaaaatatagggaattggttgtacaatttatgcgacattcatgcagtgcatttgcaaaaggtaaggctaccaagaacaa

SEQ ID NO: 211047 - DNA, 201 bp, Homo sapiens
ataaaatgtctttttctgtcttttgcccattttaaaataggatcctttgttgttgttgttttttcactgttgagttttgacatactctagtctttatatamtctagatactaatattttctcagatatatgtcttacaaaagttttaaattttggctaaaatttatcagtttatcaattttttctcttatggatagttttc

SEQ ID NO: 211048 - DNA, 201 bp, Homo sapiens
agcaagaccctgtctcaaaaaaaaaaaaaaaaaaagatatacatacacaagatgtcaagatatggcttcctcattttgatgtattgtttaattctactaarttcttgtgaatgtcagtttagagaatatcttttgcttgacctaatatcttttcttctttttcctgaccttctacttcatgtctctcttactcttggtgtt

SEQ ID NO: 211049 - DNA, 201 bp, Homo sapiens
gcctgatttgtctggagatccagcttatggtcagtagtccttcttaaaagttagtccttaattcaggtttatggaacaagccctttcaggcttgcttgttwcagcaaccagctctaacgaccctggcaagagggagtctgttttgtacttgttttcacattaatcaaagagaaggctgcaatgtaccttcacggttctctt

SEQ ID NO: 211050 - DNA, 201 bp, Homo sapiens
tttatttaacaggtttccttccaaatttcaaatatttctgtgatgagtcatgttgccaccagatggcagtgatagctcatgaatatgttcctattcatggrtgtgggtgtggcttatttataaaaatctcacccctcggtgaagagctgcacttagacaacatgaattcaagaagataattttatggaacacattttaaaa

SEQ ID NO: 211051 - DNA, 201 bp, Homo sapiens
gaagttacctcatccaactttccattcagtgctggatttcccccatcttttcctcttcaggggacatcatttagagtatcctttgataagtgatttgaccyacttcctttcatgagccaaaatccaccactctgtagcctgtttcactgaacaagcattttttggacacctaaatgtctagttcttcacaagggaatagga

SEQ ID NO: 211052 - DNA, 201 bp, Homo sapiens
atgttattttgaaatactagaggctaggtcatagatttcatgacttctatctagtatttcatttaagtgagcatattatcttatttttcttaagatatacrttccctctctttttattattaatattcaacttaatatttgttgaaagtcagtcactggaaagacattgttctgagagttattggcaatatcaggaaagta

SEQ ID NO: 211053 - DNA, 201 bp, Homo sapiens
cagctactggggaggctgaagtgggaagatcacttgaaccgggaggaggaggttacagtgagccgagatcatgcctctgtactccagcgtgggtgacagagcaagaccctgtctcaaaaaaaaaaaaaaaaaaagatatacatacacaagatgtcaagatatggcttcctcattttgatgtattgtttaattctactaaat

SEQ ID NO: 211054 - DNA, 201 bp, Homo sapiens
ccagctactggggaggctgaagtgggaagatcacttgaaccgggaggaggaggttacagtgagccgagatcatgcctctgtactccagcgtgggtgacagagcaagaccctgtctcaaaaaaaaaaaaaaaaaaagatatacatacacaagatgtcaagatatggcttcctcattttgatgtattgtttaattctactaaa

SEQ ID NO: 211055 - DNA, 201 bp, Homo sapiens
catgtacaatccatgtgttgttgctctttgttaagttgcatcagtaatgcctcatttcccagaatggacactggtgtgagtctcaggcagtatagaggccrgatcccaagttgactttctcatttatcaagtgaatcaggtaacaatgacaggctactttggggctttgaatataaaggtgaataagtctgctcaaaaagt

SEQ ID NO: 211056 - DNA, 201 bp, Homo sapiens
tatacattcaaaaagtaatgtatatatgcatatatattatttaaaaagtcaaaatgtatattaaatatcaaaatattgtgtatatacgtgtatacatacaygtatgtaaatgtgtatatacatatgtatgtatgtgcatagatacacttacatacatacatatgtatatatacgtttacatactatgttttgacatttaaa

SEQ ID NO: 211057 - DNA, 201 bp, Homo sapiens
agaaaactttgagctgatagagtgtaggtagacactgaggatataataggggaagagtaatattattactatttggcaatttaaaggtcagcaatcgtttrtagtaagtattgatgaacttagtagaagccattgttttttgtttgtttgttttgagacagagttttgctcttgttgcccaggctgaagtgcaatggcacg

SEQ ID NO: 211058 - DNA, 201 bp, Homo sapiens
atggcaaaaaaaaaaaattgtttacatctgttttcattgattgtgttattcatttatcattttttgtattataaaagcagtgtcttcctatggccccccctccaaatcaaaatatagaaagacaagaagaaaaggaaaacatcccagtaatcctactcctacattaacactttaatggtttaatggtgtatgtgctgccat

SEQ ID NO: 211059 - DNA, 201 bp, Homo sapiens
tctataacctctgtagttattacatggttaggtggatattctgtattttaatattcaaaaatctttgttttcaaagtattttatcaatattttaaatgttmtttcttatccaggttcctgtgagctggatttctattttcatgttattttgaaatactagaggctaggtcatagatttcatgacttctatctagtatttca

SEQ ID NO: 211060 - DNA, 201 bp, Homo sapiens
taggatcatgtcaagataacagttacaatgcagattaaataagggctagagtttaggtaagaaagatatgttgacagggtttcattctctataacctctgtagttattacatggttaggtggatattctgtattttaatattcaaaaatctttgttttcaaagtattttatcaatattttaaatgttatttcttatccagg

SEQ ID NO: 211061 - DNA, 201 bp, Homo sapiens
aaaatgtgctctggcaacagccactaatgacttccatgtcaacaaattcagtggatatatcttcctggacatctctgtgagatttgactctgctcaccacytacccattttaaagtcacacttcttaagttcctacaacaccactgtctatcttgatttttttcttctgtttgaacatcagctctgtctttatgaccttca

SEQ ID NO: 211062 - DNA, 201 bp, Homo sapiens
ataggatcatgtcaagataacagttacaatgcagattaaataagggctagagtttaggtaagaaagatatgttgacagggtttcattctctataacctctgtagttattacatggttaggtggatattctgtattttaatattcaaaaatctttgttttcaaagtattttatcaatattttaaatgttatttcttatccag

SEQ ID NO: 211063 - DNA, 201 bp, Homo sapiens
ctgtccccacacttgtacagcttcacccattatcaacataccccaccagagtggcacagttgttgcaactgatgaacctacattgatacatcgctatcacycaaagtccatagtttacattcgggttcactcttggtggtgtgcattctgtaggtttggacaaatgtacaataccatgatatctactgttatagtatcata

SEQ ID NO: 211064 - DNA, 201 bp, Homo sapiens
gtttggtttctcccgaggattctctccttggcttgcagatggcggtcatcttgctgtgcatgcacaaccctggtgtctgtgtgtccagatttcctttcttrtaaggatagcactcagaatggatcaggccccaccctaaacccttgttttaacttcattgcccctttaaagactctgtctctaaatacagtaaacatgagg

SEQ ID NO: 211065 - DNA, 201 bp, Homo sapiens
tgagggcacattactgggagtgggttctttcttttctaggtgtggagccggagccttttgaagttggagaccacctgactgaggctagtgggaagcttcasctgctggataagctactagcattcctgtattctgggtaggtggtaggttcacatttgctgctctgagctaatgactgttaaaacctgactattgaggaac

SEQ ID NO: 211066 - DNA, 201 bp, Homo sapiens
tcttggtggtgtgcattctgtaggtttggacaaatgtacaataccatgatatctactgttatagtatcatacagagtagtttcactgccctaaaaatcctmtgtgctccacatattcatcttttcttcgtaactccctttaaaaaatactagtttaggcctatatagagtcaattaaattgaaaccttttttcgagttcga

SEQ ID NO: 211067 - DNA, 201 bp, Homo sapiens
cctaagttttttcctttagcattgatggcatatttaaatgggtgcaattaaacaagcagacacatgtacaatccatgtgttgttgctctttgttaagttgyatcagtaatgcctcatttcccagaatggacactggtgtgagtctcaggcagtatagaggccagatcccaagttgactttctcatttatcaagtgaatcag

SEQ ID NO: 211068 - DNA, 201 bp, Homo sapiens
gccctgaatatgttgtatggtccatggcacttgaaaacaatgtgtattctcctgtctttgggtatcagcagagctgcattcctttctggaggctctaggggagaatatatttcccagcatccagaggctgcccacatcacttgactcctggcccctttcctccaacttcaaagccagaaacattgcatctctttgatcctt

SEQ ID NO: 211069 - DNA, 201 bp, Homo sapiens
ttggagataggtttactaatatctggtgaataagaaccctaccccaatagaatgcattttatttcagatgtttcaactctcttttgattatcttcaaaggracaatttctcttaaaaaatcttattataattcttctttgtgcaatagtagatatatcagacatgttgtacccttccccccaatttacctgttgaaaaaat

SEQ ID NO: 211070 - DNA, 201 bp, Homo sapiens
tatagaggccagatcccaagttgactttctcatttatcaagtgaatcaggtaacaatgacaggctactttggggctttgaatataaaggtgaataagtctrctcaaaaagtagtttggaagtcagcagatgtttagatatccataactcctcagcaaaagatacgtccagtgaggtttagggttatgtgaatttaggctgt

SEQ ID NO: 211071 - DNA, 201 bp, Homo sapiens
gagccttcttaactgcatcctcacatgacagaaggtggacgggcaagagggagcagaagagcaagctatccaaatgctgcatgacacttttttttttttttatatataaaggccttaatcttattcacgagggaaaagttcttatgaactaaccacctcttaaaggcgctacctcttaataatattacattgacaacacct

SEQ ID NO: 211072 - DNA, 201 bp, Homo sapiens
aaagtatatgttttggactcattctctggttttaaagtattttaaaaagaagaagaaaaccctgtataaagtgaccacaaagtaagaattatgacgggatrtgaagtcatacatatagtaggacattgctgttcaggcatagcatccgaaagagacagagccaagcccaagtgacccatcaagggctgtgccgcctccatg

SEQ ID NO: 211073 - DNA, 201 bp, Homo sapiens
aggctgagatgggtggatcacgaggtcaggagatcgagaccatcctggctaatacggtgaaaccccgtctctactaaaaaattcaaaaaattagctgggcrtggtggtgggcgcctgtagtcccagctacttgggaggctgaggcaggagaatggcgtaaacctgagagatggagctggcagtgagccgagattgcgccac

SEQ ID NO: 211074 - DNA, 201 bp, Homo sapiens
tcctcgtctttgtgctgctgattacattcctttttgcattgttttcaggtggagttggcatgaacttaacagcagcagatactgtgatttttgttgacagygactttaatcctcagaatgacttgcaagcagctgccagggctcatcgcattggccaaaacaagtaagtgatttttttctgcttccttggcttgcccagca

SEQ ID NO: 211075 - DNA, 201 bp, Homo sapiens
gataattgaagtttggtccttgtcctataataaaccaattaataaatttagaggtcacttggaggaaagtcttagatatgaattctatttttactggtctraaagttgtagtttttagagtcttaatgtagatacgatcactgtgtattattagcccagtctcaaaggtcgctgtcccctggtggggccccctctatccct

SEQ ID NO: 211076 - DNA, 201 bp, Homo sapiens
tggggcagaggtggtttatttacagctctggaaaagcgatccgctgagccaagaaaaatatatgagctggctgggaaaatgaaaggtaagaagcaaagcaragggaaaggttaagggtggaataagagagaagaggacacctaagactgtatcgtgagggttacacagcactagataaggaattagaataaccagttgggg

SEQ ID NO: 211077 - DNA, 201 bp, Homo sapiens
tcttccacaagtcccttttgtgtgcctttgtttttctaaattgtgcactggacttcacctcctatagatgaaaattttctctttcttcaaacagatgactstggccactggggcagaggtggtttatttacagctctggaaaagcgatccgctgagccaagaaaaatatatgagctggctgggaaaatgaaaggtaagaag

SEQ ID NO: 211078 - DNA, 201 bp, Homo sapiens
ccccatcctggctaacaagagaggggtactttttcaagtaatctgaagccccgcatgagacattctaatttaataaccagtagtcagtcaatgtgtctttttttttttttttttaagaaagtcacttttgcatttgcagtggaggagttaccaattgggaatcttctcatccccttagtatgtaatttactccgttttgtt

SEQ ID NO: 211079 - DNA, 201 bp, Homo sapiens
cccatcctggctaacaagagaggggtactttttcaagtaatctgaagccccgcatgagacattctaatttaataaccagtagtcagtcaatgtgtctttttttttttttttttaagaaagtcacttttgcatttgcagtggaggagttaccaattgggaatcttctcatccccttagtatgtaatttactccgttttgttt

SEQ ID NO: 211080 - DNA, 201 bp, Homo sapiens
cactaattgcaatacttagggcagagtactttgaaattgtgccagtggataaagatgctcagttataaagaggtgtgaatttaacttacttgaagggtaaygaaagctctgctggcaagagaagaggcagaaaataatgggttgccctgtgttttgaaggttggtctactttatttaaagggcttcctccctaagtgatta

SEQ ID NO: 211081 - DNA, 201 bp, Homo sapiens
gtgtttatcttgaatgagtgttggattttgtcaggttcttttttgcataaattaatataaaatgtgggtttttttctttaacctattatggtggatcacgttgtttgtttgtttgtttttttttttttttgaatgttgaactagccttgtatacctggaataaatctcacttggtcatggcatatttttctatattgctga

SEQ ID NO: 211082 - DNA, 201 bp, Homo sapiens
tgtttatcttgaatgagtgttggattttgtcaggttcttttttgcataaattaatataaaatgtgggtttttttctttaacctattatggtggatcacgttgtttgtttgtttgtttttttttttttttgaatgttgaactagccttgtatacctggaataaatctcacttggtcatggcatatttttctatattgctgaa

SEQ ID NO: 211083 - DNA, 201 bp, Homo sapiens
gtttatcttgaatgagtgttggattttgtcaggttcttttttgcataaattaatataaaatgtgggtttttttctttaacctattatggtggatcacgttgtttgtttgtttgtttttttttttttttgaatgttgaactagccttgtatacctggaataaatctcacttggtcatggcatatttttctatattgctgaat

SEQ ID NO: 211084 - DNA, 201 bp, Homo sapiens
tttatcttgaatgagtgttggattttgtcaggttcttttttgcataaattaatataaaatgtgggtttttttctttaacctattatggtggatcacgttgtttgtttgtttgtttttttttttttttgaatgttgaactagccttgtatacctggaataaatctcacttggtcatggcatatttttctatattgctgaatc

SEQ ID NO: 211085 - DNA, 201 bp, Homo sapiens
gagctgtgatcgtgccactgccctccagcctgggtgacagagtgagaccttgactcaaaaataaacacagtattagtatactgtatttaaaagtcaggaasaggccaggtgtggtggcttacgcctgtaatcctagcactttgggaggccgaggcagttggattatctgaggtcaggagttcgagaccagcctggccaaca

SEQ ID NO: 211086 - DNA, 201 bp, Homo sapiens
aattttcctgcctcacccccctcccctcccgccccgcaaggtagttgggactacaacaggtacgcaccatcatcactggctaatttttgtatttttttttrgagacagggcttcctcatgttgcccaggctggtctcaagctcctgacctcaagcagttgacgcaccttggcctcccaaagtactgggattacagacatga

SEQ ID NO: 211087 - DNA, 201 bp, Homo sapiens
catcacccttattcctccccgcattcttcccagcctctggcaaccactaatctgctttacatctctatgagtttgccttttctgttttgttttttgaggtraagttttgctcttgttgcccaggctggagtgcaattgcgccatctcggctcaccgcaacctccgcctctcgggttcaagcgattttcctgcctcagcctc

SEQ ID NO: 211088 - DNA, 201 bp, Homo sapiens
accgtactaatacagtttgtactgtggttaaaatatacatgaccttgaccatgagagagctaaatcttctgttccaaccgcctcattttgcagaggacaaygtcaaggctctggcctgtggaatctgatggctctgcctgaggggaggggtgttgacaacacacaagacagttggagttgtgtagccttcagaaagccctg

SEQ ID NO: 211089 - DNA, 201 bp, Homo sapiens
ggcctcctgctaatgtatacaccctgaagtggctggtgagccccgctcttggcggggactttagcgtaatagtaagacgggcaggatcgctcactgggctyctgcaagcggtaggtcaactccctggagtaaaaagtttatggtagaactcagcctcttaagtccctggagtaagatttaccataggaagctgcttatctt

SEQ ID NO: 211090 - DNA, 201 bp, Homo sapiens
gctaatctactttatgcacatggggctgcataccatgtggatcagtgattaaatagcagtacaagaccatgagggaaggaaggaactgatgttgattctgsgttctatataggaaccctacaaagtagtgtttctactttatgaggaagttaggtctgtaagtgaaaagtcctggccagtgagtttggttggggtaggctc

SEQ ID NO: 211091 - DNA, 201 bp, Homo sapiens
ggccccaggggcagcccgaacagagcctcaagcagcgctttgccatcttcctggctcctagagcctggtatttctgtaagtaagtgtgttattacggttgsggggagcccaggtcccttctctactctgtttctggagagctttcacgaaacactcgtgcatttcccccagaaattgaggtcacagggcctggacatctgg

SEQ ID NO: 211092 - DNA, 201 bp, Homo sapiens
ctgttttgtaatgtgccaacagaaccatcttgaggccatttaccaggagtgatgatttgttttatatgctttcaaaacagaaaacatctgttctagccaargagggattgcttaatttcagaatggctcttcagattcagggaaagttctgcctggctcagtacactcaagccacctccacagtgggctggccaaccacac

SEQ ID NO: 211093 - DNA, 201 bp, Homo sapiens
aactaggtaattgtttaaccttctgtagttaaagaggaaagcaggaaactgaaagtgaaaagaagacgccacagtatagaactatttttttgagatctgtwagagcactcaggctcttttggagcacccaagctcagtttagggtccccagccatgtctcttacccttcaccttcctttaaaaacacatccacacccatat

SEQ ID NO: 211094 - DNA, 201 bp, Homo sapiens
gtaattttcttggcaaatcacactgcaatcagctgtgactctttgtttttttcttttacctctgttcaggtcacagagatgtttcattttgatatttttcycctcacaggagccagccttcagagggctggtgggaaagtaaagagtaattcctcttgtcatatcttggttctttgttttacatttattagggaatgcctg

SEQ ID NO: 211095 - DNA, 201 bp, Homo sapiens
tcaactcactgcagccttgacctccagggctcaggcaattttcctgcctcacccccctcccctcccgccccgcaaggtagttgggactacaacaggtacgyaccatcatcactggctaatttttgtatttttttttggagacagggcttcctcatgttgcccaggctggtctcaagctcctgacctcaagcagttgacgca

SEQ ID NO: 211096 - DNA, 201 bp, Homo sapiens
aaccttctgtagttaaagaggaaagcaggaaactgaaagtgaaaagaagacgccacagtatagaactatttttttgagatctgttagagcactcaggctcktttggagcacccaagctcagtttagggtccccagccatgtctcttacccttcaccttcctttaaaaacacatccacacccatatacccataccacttttt

SEQ ID NO: 211097 - DNA, 201 bp, Homo sapiens
ccagggctcaggcaattttcctgcctcacccccctcccctcccgccccgcaaggtagttgggactacaacaggtacgcaccatcatcactggctaattttygtatttttttttggagacagggcttcctcatgttgcccaggctggtctcaagctcctgacctcaagcagttgacgcaccttggcctcccaaagtactggg

SEQ ID NO: 211098 - DNA, 201 bp, Homo sapiens
gggatggcggagtcggtgcacacctggcaggaccatggctatttagcaacctacacaaacaagaacggcaggtgagcagtctccagtgctgttcttcatayctggtcacttatgagcagagagggtgacagagtggaggatgggggtggcatccggcatttttttttctcctttgacatcttttaggatgggaatggaact

SEQ ID NO: 211099 - DNA, 201 bp, Homo sapiens
agcacccaagctcagtttagggtccccagccatgtctcttacccttcaccttcctttaaaaacacatccacacccatatacccataccactttttggacawttcatcttttcctgttggcagggttttccttatctgcacccatttggaatgaacaggttccccactgtcagaaagggtcttaactttatgataatgaatt

SEQ ID NO: 211100 - DNA, 201 bp, Homo sapiens
gatgaaacataagctgttaatattttaattcccagtctgttcttaaagatgagaaagctttgatggcaaggcgaacattctagaaagaactattacgtgtrtgtgggggggtggggaatgtgtgtatgtatgcatctgtcagaccttgagtcattacaagtgttctgggcgtaagaactccgattcatattgcattctctt

SEQ ID NO: 211101 - DNA, 201 bp, Homo sapiens
tctccagtgctgttcttcatacctggtcacttatgagcagagagggtgacagagtggaggatgggggtggcatccggcatttttttttctcctttgacatmttttaggatgggaatggaacttggtgcttctcaaccgtagctgcacatcagaatctcctggtagcgttactgaccacaggttcttaagctctcatgtata

SEQ ID NO: 211102 - DNA, 201 bp, Homo sapiens
cattcagtgcttagtataaaagaaaaattaggctgggtacggtggctcatgcctctaatcccagcactatgagagtctgaggtgggcagattgcttgagcycaggagttcaagaccagcctgggcaacgtagtgagaccctgtctctagaaaaactttttaaaaatagtttattaattaaaaaaataaaaattaaaagaag

SEQ ID NO: 211103 - DNA, 201 bp, Homo sapiens
gcccagattgtgccactgcactccagcctgggcgacagagagactgtgtgtcaaaaaagcaaaacccgcacacaaaaacagtggtgagtgagctgctgtarcctcttcttgccatgttggagtggaaggtctctaacaggccagccagctctgaaaaggtctagcaatcctatgtccatttttttcccctgggctgggcgt

SEQ ID NO: 211104 - DNA, 201 bp, Homo sapiens
tgcagtgagccgagatcatgtcactgcactccagcctgggcaagacagagtgcgactccatctcagaaaaaaaaaaaccaacatgcatataactaaaacaraagtttcatcaaatacatcttggtgcatgtgatacactcaaatatgtttatttcattaagaaaaagggctggtcagaaaattttgtgtaaaggttgctgt

SEQ ID NO: 211105 - DNA, 201 bp, Homo sapiens
caagacttatgtgcctgtgggcattccaaattcctttgctggccttacagtgcagaggtgaatatagaactgttcctcaatcctttttcttagagtacagsttgagcatccctaatccgaaatgctccaaaatctgaaactttgagcaccgacataacacaaaaaaatgctgattcgggatttccagattagggactttga

SEQ ID NO: 211106 - DNA, 201 bp, Homo sapiens
ggggagttgcagactggctctattgccagccagctcgcacaccatcttcccgtggagagagtgcagatccctgaaaggagcaggcaagaaggggccgggtwtaagcctgaccaaaggtgggcccttggacttaggtggcaagtggtaagcatgggcggggaaggcgtgagtgactgtctgtgtgtacatccgtgtgtgtgt

SEQ ID NO: 211107 - DNA, 201 bp, Homo sapiens
taacttctcctttctgttgggttgtagcatgacccccaccccctgcttttctgtgggttctgatctcttttcctaatcctctgccttggttctcttccacmgctctgggccagagttccttcctcttctcaaaaaacatggtccttaagctgacggggcccactgaagagcatcgtaggataccttacgttgtttgcatga

SEQ ID NO: 211108 - DNA, 201 bp, Homo sapiens
acaaagagttaagttaccttttaagcatttcgtgggggcagggggagatctgtgcaggggggagcatattacagaagcaagaaacaaagacagttattcarttaattgagacatgcattacatcatttcttactttttaaggaaaaacatgttttacgacttgagtttgtctagtgaccttgcagctgcacagctagagaa

SEQ ID NO: 211109 - DNA, 201 bp, Homo sapiens
gctcactgcagcctctgcctcctgggctcaagcaattctcctgcctcagcctcccgagtagctgggactacaggcacgcaccactgcacctggctaatttwtttttatttttatttttatttttttattttttgagatggagtcttgctcttgtcacccagactggagtgcagtggcgcgatctcggctcactgcaacctc

SEQ ID NO: 211110 - DNA, 201 bp, Homo sapiens
gtttgggatttttggggaacagctttattgagatatgattcatatgctatataactcctttatcgaacatgtacaattcagtggctttcaggatatttgcrgttgcgtgaccatcatgacaatcaactttagaacattttcatcacctcaaaaacaaaccctgtgccccttagccatcacccttattcctccccgcattct

SEQ ID NO: 211111 - DNA, 201 bp, Homo sapiens
aatgtttatcgctcatgtcatgacaagggataagtgacactgacaactttgttcaggttttttaatttttatttatttatttatttatttatttatttatttacttatttatttatttttaagctcagtcctcaaactgtgcctcattggccttccttctgaacgtttctttctgaccatcttgccttcttccccttgttc

SEQ ID NO: 211112 - DNA, 201 bp, Homo sapiens
atgtttatcgctcatgtcatgacaagggataagtgacactgacaactttgttcaggttttttaatttttatttatttatttatttatttatttatttatttacttatttatttatttttaagctcagtcctcaaactgtgcctcattggccttccttctgaacgtttctttctgaccatcttgccttcttccccttgttct

SEQ ID NO: 211113 - DNA, 201 bp, Homo sapiens
tgtttatcgctcatgtcatgacaagggataagtgacactgacaactttgttcaggttttttaatttttatttatttatttatttatttatttatttatttacttatttatttatttttaagctcagtcctcaaactgtgcctcattggccttccttctgaacgtttctttctgaccatcttgccttcttccccttgttctc

SEQ ID NO: 211114 - DNA, 201 bp, Homo sapiens
gtttatcgctcatgtcatgacaagggataagtgacactgacaactttgttcaggttttttaatttttatttatttatttatttatttatttatttatttacttatttatttatttttaagctcagtcctcaaactgtgcctcattggccttccttctgaacgtttctttctgaccatcttgccttcttccccttgttctcc

SEQ ID NO: 211115 - DNA, 201 bp, Homo sapiens
ctactcttacattaaaataacctgacattaatactagtttctacacttgatgctaatttgcaacagaaatcgagaactagaatgatgttggggactgcacrgttaacattggtgttctctgttagttccgcttagtaaagttagtctagagaagtaaaacacagaaagaaaaaaggaaatgagcattatcattggaaattt

SEQ ID NO: 211116 - DNA, 201 bp, Homo sapiens
agtgcagtggcacaatcttggcttactgcaacctctgcctcccgggttcaaacagttctccacctcagccttccaagtggctggaattacaggcactcacyaccacatccagataattttgtgtttttaatagagacgtggtttcaccacgttgcccaggctggtctcgaactcctggctcaagccatccacctgcctcgg

SEQ ID NO: 211117 - DNA, 201 bp, Homo sapiens
ctagtggttagtgtctgccatgtgggacagtacaactacggaacattttcatcatccaaatttctatcggacactgccgaagtgtttgccagtggtgtcasattttaaaagaatgcaattcggacatcgtgggaaggaactagtgtctggtacatcatgggaattaagaagtgctttggatacacagcatgcaaatgcagg

SEQ ID NO: 211118 - DNA, 201 bp, Homo sapiens
tgcaacctccacctcctgagttcaagcaattctcctgcctcaccctcccaagtagccagggctacaggcgcctgccaccacacccggctagtttttttgtrtttagtagggacggggtttcaccgtgttgggcaggctggtctcgaactcctgacctcaaaccttggcttcccaaagtgctgggattacaggtgtgagcca

SEQ ID NO: 211119 - DNA, 201 bp, Homo sapiens
gactcattacattaatgagacagtaaatcatttgacaatttatttaaattatgtgattttcaacctgtattggtacaaactggtcacttatctaagcaacracatagataattccctttctcaaaccagatgtttgttccaaatcacagctagttcgtgtttttttctataaactcaagttcctgctgagtttgcaggctc

SEQ ID NO: 211120 - DNA, 201 bp, Homo sapiens
tgatttaggggaactgtgtcaatctgacagaagcactgtcgctctatgaagaacagctggggcgcctgtattgtcctgtggaattttcaaaggagatcgtmtgtgtcccttcatacttggaattgtatcctttgaccgtgacattctgttgccagatcaaagcacccaagtaaatcatatgccaatgaaaaaatttaaatc

SEQ ID NO: 211121 - DNA, 201 bp, Homo sapiens
ttctaataaaaggactgcccgtaagcccaacacagggagacatatttaagctggactcctgtctccttgttagttgacttacaataaaaagcttttcttargccaggcacggtggcttatgcctgtaatcccagcatttggggaggctaaggcgggaggattgcttgaggccaggagtttgaggctgcactgagctatgtt

SEQ ID NO: 211122 - DNA, 201 bp, Homo sapiens
aaagtttttgataaggtgtgcaactaggggatatccctatcgtatatatcctgaataaacttttgttctcttatacacagattctaggaaaaaaatggggktgaatatagttctgtgtcaacattttagactcttaggagaattgtagtttaaaccattgtggaaatcaggaacactatatttttgatacttcatttgtaa

SEQ ID NO: 211123 - DNA, 201 bp, Homo sapiens
ttttgtgtgaccctccagctaagaatgatctttacatcttaaaagggttgtaaagcacacacaccaaagaatatgtgacagaaacctgatttagccagaaygctttaccacgtggccctttacagaaaaagcttgcccgttcctgcctttagaccatctaggtgcaatgattttgattgcccgtttcagagccatctggaa

SEQ ID NO: 211124 - DNA, 201 bp, Homo sapiens
gatttgttgggtcattttacaagttccatactagacaggcataaaggttgaaatttggaataattacaaagcattttctggggcatgtgacaggttacccrtggcttcagttagtaaagagttctaacttttttcagcccctctgttgagcattttctataactttttggtgagttgagtataactggtatggaaatggta

SEQ ID NO: 211125 - DNA, 201 bp, Homo sapiens
aggagcttggtcattgcttcctactgaactgagcctgtggtttgaggtgaccttccctccctgatttcctgaaccatcgctctttttaaccagctcccacrctcccctgtatttgagctgccttctggtggaagcatgtcttctttgtgtgttttaaatagctataactgtctaaataataaaacctaaacaatgtagttc

SEQ ID NO: 211126 - DNA, 201 bp, Homo sapiens
gtgccctgagtgctttgtgcattaattttaggtaaatcctcaaaataaccctaggtaggtcttgttatccccattttaaagacaaataaataggcctaatmttgaggttttttactttttgagtggcagagctggaattcaaagccatgtttgtttgattggaaggctggttctgcttccacgattctgaagcctcttagt

SEQ ID NO: 211127 - DNA, 201 bp, Homo sapiens
agatcaaagcacccaagtaaatcatatgccaatgaaaaaatttaaatcacaataataaacaattagcttagccatagagtatataaagccctggttctccrgcttaggtgcacattggaatcccctgagaagctttaaataaaatctgagattctagacttccattctcaaaagttttggggtctggcttgccacagcttt

SEQ ID NO: 211128 - DNA, 201 bp, Homo sapiens
agggcagagtactttgaaattgtgccagtggataaagatgctcagttataaagaggtgtgaatttaacttacttgaagggtaacgaaagctctgctggcargagaagaggcagaaaataatgggttgccctgtgttttgaaggttggtctactttatttaaagggcttcctccctaagtgattaaagcagaattttaaaag

SEQ ID NO: 211129 - DNA, 201 bp, Homo sapiens
agattgtgtagttctctcacgtttttgaaaaagggagttaaattgaggtccatggtggaaagatgactggatttggcttcaattcctgttctgccactcartgagtgaactaattcagtcatttgaaacaaaaatgaagtaaaatgactcattacattaatgagacagtaaatcatttgacaatttatttaaattatgtga

SEQ ID NO: 211130 - DNA, 201 bp, Homo sapiens
ggttctcttccacagctctgggccagagttccttcctcttctcaaaaaacatggtccttaagctgacggggcccactgaagagcatcgtaggataccttaygttgtttgcatgattcctttcaggagaggtcaagtggcctggttattcagtgtctcatagccacaaactaatggataatattccttccagatgaaaggca

SEQ ID NO: 211131 - DNA, 201 bp, Homo sapiens
tgaggcaggagaattgcttgaacccgggaggtggaggttgcagtgagccaagattgcaccactgcactccagcctgggtggcagagcaagactccgtctcaaaaaaaaaaaaggaacaatgtctattcttcccaatttattatgagtaatcccaaggaggggggaggggtttaaaagtagaccaactgattttgaagttga

SEQ ID NO: 211132 - DNA, 201 bp, Homo sapiens
tagttggctgggcgcggtagctcacacctgtaatcccagcaatttaggaggccgaggcaggcggatcacttgaagtcaggagtttgagaccagcctggccratgtggcaaaacaccgtctctactaaaaatacaaaaattagctggacgtggtagtgcatgcctgtaattccagctacttgaaaggctgacgcatgcgaat

SEQ ID NO: 211133 - DNA, 201 bp, Homo sapiens
tttacctgaaatttttgggtgatgaagtctgcttattaaaaattactatacagctttacctttcaaagttggtgtgactataagctgcttctttttttttwaattgaattaaaatgaaataacatcgaattagccacttgaaagtgaacaattcagcggcatttagcacattcacaacgttgtgcaaccatcacatctagt

SEQ ID NO: 211134 - DNA, 201 bp, Homo sapiens
gacccccatcctggctaacaagagaggggtactttttcaagtaatctgaagccccgcatgagacattctaatttaataaccagtagtcagtcaatgtgtctttttttttttttttttaagaaagtcacttttgcatttgcagtggaggagttaccaattgggaatcttctcatccccttagtatgtaatttactccgtttt

SEQ ID NO: 211135 - DNA, 201 bp, Homo sapiens
gaatagtgggtcttacactcgtggctctttttctttttcctcttttggtattgagtattcgaatattttacttcagatgttgtggatacatacaaacccayatttatgaaacttgttcttttaaacattcagattccacatgggagtttctcagactgattcttgacctctcaatgaaagtgttgaaacaggatgggaaat

SEQ ID NO: 211136 - DNA, 201 bp, Homo sapiens
ttacagagaaagtttgctgatccctgtcttataggaaaccagtgaaacctgctcaaatgaagctttcttattgtaaagaagcaagttggacttatgatggttttttttttttttttttgagatggagttgcgctcttgtttcccaggctggagtgcaatggcgcgatctcagctcaccgcaacctccacctcctgggttca

SEQ ID NO: 211137 - DNA, 201 bp, Homo sapiens
cttatctctctttgatttaggggaactgtgtcaatctgacagaagcactgtcgctctatgaagaacagctggggcgcctgtattgtcctgtggaattttcmaaggagatcgtctgtgtcccttcatacttggaattgtatcctttgaccgtgacattctgttgccagatcaaagcacccaagtaaatcatatgccaatgaa

SEQ ID NO: 211138 - DNA, 201 bp, Homo sapiens
gttggctgggcgcggtagctcacacctgtaatcccagcaatttaggaggccgaggcaggcggatcacttgaagtcaggagtttgagaccagcctggccaaygtggcaaaacaccgtctctactaaaaatacaaaaattagctggacgtggtagtgcatgcctgtaattccagctacttgaaaggctgacgcatgcgaatgg

SEQ ID NO: 211139 - DNA, 201 bp, Homo sapiens
cacctgtaatcccagcaatttaggaggccgaggcaggcggatcacttgaagtcaggagtttgagaccagcctggccaatgtggcaaaacaccgtctctacyaaaaatacaaaaattagctggacgtggtagtgcatgcctgtaattccagctacttgaaaggctgacgcatgcgaatggcctgaaccgaggaggcaggaag

SEQ ID NO: 211140 - DNA, 201 bp, Homo sapiens
tgcgggggagttgcagactggctctattgccagccagctcgcacaccatcttcccgtggagagagtgcagatccctgaaaggagcaggcaagaaggggccrggtataagcctgaccaaaggtgggcccttggacttaggtggcaagtggtaagcatgggcggggaaggcgtgagtgactgtctgtgtgtacatccgtgtgt

SEQ ID NO: 211141 - DNA, 201 bp, Homo sapiens
acccccatcctggctaacaagagaggggtactttttcaagtaatctgaagccccgcatgagacattctaatttaataaccagtagtcagtcaatgtgtctttttttttttttttttaagaaagtcacttttgcatttgcagtggaggagttaccaattgggaatcttctcatccccttagtatgtaatttactccgttttg

SEQ ID NO: 211142 - DNA, 201 bp, Homo sapiens
cccccatcctggctaacaagagaggggtactttttcaagtaatctgaagccccgcatgagacattctaatttaataaccagtagtcagtcaatgtgtctttttttttttttttttaagaaagtcacttttgcatttgcagtggaggagttaccaattgggaatcttctcatccccttagtatgtaatttactccgttttgt

SEQ ID NO: 211143 - DNA, 201 bp, Homo sapiens
actgccaaacttgattgactttaacaaggcaaaaatctttaagactcttagaaaaaaatcaaatagtaatgtgtcatataaagtaatcctgaactgatacagtcagagtgtgtgtttaactcacaaatgcatgcagagcctaataatcacaatttctctcatccagtgggtgttctcatcgtattggagaaccctactcat

SEQ ID NO: 211144 - DNA, 201 bp, Homo sapiens
ttggtccaaaaattgatttaaaagtagtttacttctttttctccaataaaatatttgccataatttaatgtctttaataccaacattttcttcatttcctrtggtagccaggacaaatgaagtatttcagatctttcaaaaactcttaggatgaaaggtaggaatttggacttaggtttttaaaatagtgtgtatgtaaaa

SEQ ID NO: 211145 - DNA, 201 bp, Homo sapiens
tttgtctccactttgttctctgattagtgggttgtgaatcacttcttcaggaatactttatagaagtgaattccattcatctgattaaggaacaagttggycttttcatgaactgtcatttttgacttgaatctggtactgttttttggtggctttcaggccacagaaataaaccacttttgtttgcaaatgagatagaac

SEQ ID NO: 211146 - DNA, 201 bp, Homo sapiens
ccaccattttcttttgcagaacctttgctcaaaactgaagggcaaaataataaaggttgtttttaatgatttatctatatatctgtctgtgtagataaagrtaaatatatagatacacatgagtgacaagtgaaatacatgccttttgtctccactttgttctctgattagtgggttgtgaatcacttcttcaggaatact

SEQ ID NO: 211147 - DNA, 201 bp, Homo sapiens
aaaggataattacatattaaataacttacagctaatagaatttgtaagtttgcagataaagttcaatagactaaaaactaccttcgtataatacagtagtrggccctttgtacccatggcttccccatctgtggtcaaccaacccaggactgaaaatattggcgggggaaagctttggccataatgaacatgaacagactt

SEQ ID NO: 211148 - DNA, 201 bp, Homo sapiens
ggataattacatattaaataacttacagctaatagaatttgtaagtttgcagataaagttcaatagactaaaaactaccttcgtataatacagtagtgggycctttgtacccatggcttccccatctgtggtcaaccaacccaggactgaaaatattggcgggggaaagctttggccataatgaacatgaacagacttttt

SEQ ID NO: 211149 - DNA, 201 bp, Homo sapiens
aataacttacagctaatagaatttgtaagtttgcagataaagttcaatagactaaaaactaccttcgtataatacagtagtgggccctttgtacccatggsttccccatctgtggtcaaccaacccaggactgaaaatattggcgggggaaagctttggccataatgaacatgaacagactttttttttgttgtcattatt

SEQ ID NO: 211150 - DNA, 201 bp, Homo sapiens
tgagacagagtctcgctgtgtcgctcaggctggagtgcactggtacgatctcggctcactgcaagctctgcctgccaggttcacaccatctcctgcctcascctcccaagtagctgggactacaggcacgtgccgccacacccggcttatttttttttttttagtatttttaatagagacagggtttcaccgtgttagcca

SEQ ID NO: 211151 - DNA, 201 bp, Homo sapiens
agtgcactggtacgatctcggctcactgcaagctctgcctgccaggttcacaccatctcctgcctcaccctcccaagtagctgggactacaggcacgtgcygccacacccggcttatttttttttttttagtatttttaatagagacagggtttcaccgtgttagccaagatggtctcgatctcctgaccttgtgatccgc

SEQ ID NO: 211152 - DNA, 201 bp, Homo sapiens
ttataccttacccgtagagccttaggaatgtttggagctgtccattccttaggcttttgctgcagtaccttaggccagcattttcttacccctccaaactmctcactatcgttgtcaacaccgttcatgaacctccataaataaaatcctacttaagcaggataaaatccaaattctttaaccttgtaatttgctaacact

SEQ ID NO: 211153 - DNA, 201 bp, Homo sapiens
aactgccaaacttgattgactttaacaaggcaaaaatctttaagactcttagaaaaaaatcaaatagtaatgtgtcatataaagtaatcctgaactgatacagtcagagtgtgtgtttaactcacaaatgcatgcagagcctaataatcacaatttctctcatccagtgggtgttctcatcgtattggagaaccctactca

SEQ ID NO: 211154 - DNA, 201 bp, Homo sapiens
tcagcctcccaaagtgctaggattataggcgtgagccaccgtgcctggccaggcttgcagaagtacatttaacaactgccaaacttgattgactttaacarggcaaaaatctttaagactcttagaaaaaaatcaaatagtaatgtgtcatataaagtaatcctgaactgatacagtcagagtgtgtgtttaactcacaaa

SEQ ID NO: 211155 - DNA, 201 bp, Homo sapiens
ccttttaggcatggggaaaggtagaagagggacttaagaagagagctaaagctcctggtagatttgtggggttttcttttgtttgcctggtgtccttaacsatagcctgtcaagagaacaaaggtggatatatttttcagtgaacacatacatgtttaatagtcattctggaaaatatttctaataccttctttggaattt

SEQ ID NO: 211156 - DNA, 201 bp, Homo sapiens
ctttgtacccatggcttccccatctgtggtcaaccaacccaggactgaaaatattggcgggggaaagctttggccataatgaacatgaacagacttttttkttgttgtcattattctctaaacagtatagtataacaactgtttacatagcatttacattgtattaggtgttataagtaatctagaggtaacttaaagtgt

SEQ ID NO: 211157 - DNA, 201 bp, Homo sapiens
ccttcgtataatacagtagtgggccctttgtacccatggcttccccatctgtggtcaaccaacccaggactgaaaatattggcgggggaaagctttggccrtaatgaacatgaacagactttttttttgttgtcattattctctaaacagtatagtataacaactgtttacatagcatttacattgtattaggtgttataa

SEQ ID NO: 211158 - DNA, 201 bp, Homo sapiens
ggcaggagtatcacttgaacctaggaggcggaggttgcagtgagcagagatcgcaccactgcactccagcctgggcaacacagcaagactcaaaaaaaaaataaataaaaaccagtggcacaaggactgcaaatagaagaatagaaagtagtccagtttttaccctttattaaattatccttcctattttatgggaagggt

SEQ ID NO: 211159 - DNA, 201 bp, Homo sapiens
attgggaaaagaattaatatgaacataattttttattccagaaattccattacagaaaccttcttcttggtgaacacgatgtccctttaacatgtattgarcaaattgtcacaggtacgtagtattccgtacatactctaaaagtcaattccactctggaagtattatttgaaaagtcatacctctcaaaatacttggatt

SEQ ID NO: 211160 - DNA, 201 bp, Homo sapiens
tgtctctactaaaaatacaaaaattagtcaggagtggtggtgtgcgcctgtagtctcagctactcgggaggccgaggcaggagtatcacttgaacctaggmggcggaggttgcagtgagcagagatcgcaccactgcactccagcctgggcaacacagcaagactcaaaaaaaaaataaataaaaaccagtggcacaagga

SEQ ID NO: 211161 - DNA, 201 bp, Homo sapiens
gtagtcctacaaggtaactaaagtaactcctgaaagcaccatgaccaccataccagccagccttggtttactgcttgtccccattcaagtaaatcacatcmgttttagctatttcttatttactacagtaccatcaaatacattacagattttgcacatcatttgagtaaaacagtggcacaggctgggcgcagtggctga

SEQ ID NO: 211162 - DNA, 201 bp, Homo sapiens
agatctagagaccccatggcacatatttatagtagcccattctctcctaagaatagaggaagggtgggaggaattttggtgaatgtctgtacttgcagttyatcctacagcaaatcgttaagactgtgggaataggtgctttgcattctctagagctggagaatgtgcatctggtttgccatccttctgtctacatcatgt

SEQ ID NO: 211163 - DNA, 201 bp, Homo sapiens
ttaaagtaaagtttaagaagaatgttggaacttgctagaggagtattagtgagaggattgtaagtcaccttgctttatttatcctctgtgatcgttcattrtatgtccttttcattaaggaagttattccctctgttgcagatcttttaacctgcttataaaaatgacataaagagaaaaggttgtttgctaaatgatttt

SEQ ID NO: 211164 - DNA, 201 bp, Homo sapiens
ggggtgcacattaaatgcggacaacttgcttaattatttatagggtctgcaggagcacactattcctgcttttagcacagcactcatataattttttttttcccctccagccttccagaatacattgtagtgccaagttctttagcagaccaagatctaaagatcttttcccattcttttgttgggagaaggatgccagta

SEQ ID NO: 211165 - DNA, 201 bp, Homo sapiens
aatgccttgtcattactattcactttatgaccatacagtgcctggcacctggtgggcaattggtgaatgttttcactatcctcatccttgccctcatgaarcactccttctaggtcccacaaagaccgttggtattttatgacaaagtaccttacaaatatttttctttttttaaaggagaaattgtcgtaaatgaagtca

SEQ ID NO: 211166 - DNA, 201 bp, Homo sapiens
ttatttttaggccaggcgtggtggctcatgcctgtaatcccagcactttgggaggccaaggcaggtggggcacctgaggtcaggagttcaagagcagcctrgccaacatggtgaaaccctgtctctattaaaaatacaaaaattagctggacatggtgcatggtggcaggtgcctgtaatcccagctactcaagaggctga

SEQ ID NO: 211167 - DNA, 201 bp, Homo sapiens
ttgaaagtttaaggcaagggactagcatcatgaacacatctttttagggaagtgtgtcttgtggtaagctgctggctggtttaaatgcagcagaatattcyattggggatgccagctgggagacttgccacagttgcagcctgcagcagaaagaccctgggccagaatgggttgtgccatctgtcaccagatattgccaag

SEQ ID NO: 211168 - DNA, 201 bp, Homo sapiens
ctgtgtattaaggaaaccatctgccttcctcaccttacaggttgttgaaagaatcagacaggacagatgtcctatttatagctctttaatgcatatgtagrcaagcagtggcagttctgtgactcttctctaacttacatatcatttacccaaacagcccttatcttccagccagcttggctgcttagccatattgaatta

SEQ ID NO: 211169 - DNA, 201 bp, Homo sapiens
acctggcaacttttgacttgttccttagaactctctttagttgtggtcaagtcatgaagcttttcctgccccggcctctctctgcagcgagagttaggggmcttctcttttgcatcttcattgcactcagacatctggtactctgtgattatcacacttattaatgctctcaagatagagataaaatcttattcatctttt

SEQ ID NO: 211170 - DNA, 201 bp, Homo sapiens
tgtttaaattgagggcctgcttacaattcatatctaagatttactggagaggagaaagggttgagtattcagtggcccagaatctgatatgggaattggtraggtttatgttcaaggagccaaagaagatttaaattttatgtatttgaattactcagtgcgtctatatatatatatatttggtcatcttaaatttttttt

SEQ ID NO: 211171 - DNA, 201 bp, Homo sapiens
atactagagtctaggccctatttgatttcccgcctctcttccaccacctgttgaatccctatgctctagctgtatttagttacttgatattatacagttayaccatctttttaaagttcttctctgtctagcatgcctacctcctcctcaccagctacctggcaacttttgacttgttccttagaactctctttagttgtg

SEQ ID NO: 211172 - DNA, 201 bp, Homo sapiens
tgtttattgcattatatcttgtaactggtgttttacagttggtttgttcatatcaggatctaaagtcttcacattgaatttgcttaatatgtctcttaggscttttaatctacaacagtctcctcccacctcttttttacctactatttgttgacaaaccaggtcatttgttccctagaattttccacattgtagatattg

SEQ ID NO: 211173 - DNA, 201 bp, Homo sapiens
ccgcggccttgcgcgcgccgtctctcggggcggggcaccgggccccttccggggatgggccccggcgcccgcgtcggcctggctgtgcccggcccctcccygctcgggcgggcgctgcgccgtatccccgcccgtcagtccgcccggctcggctggccgcagaaagggcctgggcggccgcactgagagctttacgcccgg

SEQ ID NO: 211174 - DNA, 201 bp, Homo sapiens
cccccatggtgcccaccatgtggctactaagtggggtgcacattaaatgcggacaacttgcttaattatttatagggtctgcaggagcacactattcctgyttttagcacagcactcatataattttttttttcccctccagccttccagaatacattgtagtgccaagttctttagcagaccaagatctaaagatctttt

SEQ ID NO: 211175 - DNA, 201 bp, Homo sapiens
aagcaatggttctgtcttaaaaaaaaaaaagtaaactccatgaaggcagagaccttacctgtctcattcctctctctatcccctggtctatagtaagggtyaaataaatatatgctgaaatgaatgagtaatgactaaagtatttttgtctttattaggatttgtaatgcaataactaaaagtcacccacagagaagtgat

SEQ ID NO: 211176 - DNA, 201 bp, Homo sapiens
gcctgtctcttaaaaagaaaacaaaaattacaaaatatactcctttgagaaatcgtataagtaactaaagaaactttacggtaatgcgaaagctatgtgcmttcagtagaaagcagtcaatcctctcttgtgatgctgagtagcagcagggagccacagctgccagtcagccacacagtctcagtttagggtattttcagc

SEQ ID NO: 211177 - DNA, 201 bp, Homo sapiens
atgttaataaattattttaaaaggaagatataaaatgtataacttttcatagtttctaggttttttgtcctctttttaattaaaattaatcattaaatgtrtctagatggtggttttatgcaaataatcatttaaaatatcttccaaagcaaagttaaaaccaacccccaagttctaggaattacaagtatgaaacattct

SEQ ID NO: 211178 - DNA, 201 bp, Homo sapiens
agatagagccagtagaaggagagaaaaatcaaagctgttttacggagttgtgaaagagctggataaggacaagactaaatgagttatttttaggccaggcrtggtggctcatgcctgtaatcccagcactttgggaggccaaggcaggtggggcacctgaggtcaggagttcaagagcagcctggccaacatggtgaaacc

SEQ ID NO: 211179 - DNA, 201 bp, Homo sapiens
aagtcttccttctcacagacacgctttttagttgtgttactccagagaaggccctgagatggagtgggactctaggatgtgggcttagaatgagcattttwctatctatctatctatctatctgtctgtctatctatctatctgtctatttatttttgagacagagtctcgctgtgtcgctcaggctggagtgcactggta

SEQ ID NO: 211180 - DNA, 201 bp, Homo sapiens
aaaatttggccagagaaacaatctcataaacaatagcacattcttagcctagcttattaaagtctgcaacccaaaacactaaaaagtattcagtgctgctrgactcagtcaccaaactgttttacataactgttaaaattttgagtgtgttttttataattcttttttggtggtggtggttttattgtttggctaggactg

SEQ ID NO: 211181 - DNA, 201 bp, Homo sapiens
gtacggtatctgaagatgcatgtgtataagtaaattttccttagtttaaaagataactacctttctgttaagcactgagaggaccaaaaaaaaaaaaaaaagaaaatacagtagagataatatatgaaaataatgctttgcagagcagcttttatcatacagtattatatttatagaaattgtataacaaaagtatttgta

SEQ ID NO: 211182 - DNA, 201 bp, Homo sapiens
caatagtttgtcagattatttcttgacaagttaccaggaagaacctttaatgctatgaatatgggcttataagttatgtcagatatttaatctccagtcaytggcttgtattttatgatgaagaatatataacccaccctttttaattgatagcttgagttaaagtaatcttatcttttaagaaaactggcagaaaactaa

SEQ ID NO: 211183 - DNA, 201 bp, Homo sapiens
ctaaaccttgtttcagataattttaagagttgtcgcttcagtaactatctctaacacagggatcagcaaaccttttctgtgaagtgcagtaaatattttargctttgcggaccataaggtatttgtttcaagtactcagctctgtctttgtcctgtgaaagcagccatagatggcacatgaacaaatgagtatggctatgt

SEQ ID NO: 211184 - DNA, 201 bp, Homo sapiens
ctgcaaagtgcagacatcttcagatctttactcaagtctgtgcagagaggtctttcttggtctccttctctactttttagcctgtctccctcttctcactrtaacacttcatattccccttccctgctctattatttttctcttttagcattcatagttatctaactttctgtattttttctctttatcttgtttagtgtc

SEQ ID NO: 211185 - DNA, 201 bp, Homo sapiens
gattcacagatactttttaatttactttctaatccggcatttttgttatttcttttgttgctcagattgttccagctttggccattgagagttatttcatsttggctcttgtatcctttggaaatgccgtccccccgcttttcttcacccccacttccatattttctggtattctggcattaccagaggctacagactcat

SEQ ID NO: 211186 - DNA, 201 bp, Homo sapiens
ttgaaattcactactgaaaaacaatgtatttagttcgagttctgccaccccaaaaaaatcaacgagtaattcaactgacttgcagttttacaatatttttrtagacttctttcagcgtagatgcttttggacatactcatttgtttcctaacctgatgtgatattgtgctatttttaaggggcttttaaaaaatacgctgt

SEQ ID NO: 211187 - DNA, 201 bp, Homo sapiens
aatacatattaaagctctttaaacatagaaatatactactacaaaaggaaaaattttataattactagatttctgttctaacaaaccaccccctagaaacrtcatcaaattgacttaaaaatgtagacgtaatttcagacttagagaaaagttgcaaataacagaagaatctgtggataccctttccttagattccccaat

SEQ ID NO: 211188 - DNA, 201 bp, Homo sapiens
ttggccccagacttcactgtaaatgagaagcagatacctggaacagcttaaatccagtaccactattaggaaaaagtaaaccagtgccctactgacagcagattgatagtgttaactacgtccttagtttgaacatgcaaaaccttttctaatggtttttatttctagtagactttgtgctttaaaaagatagttattttg

SEQ ID NO: 211189 - DNA, 201 bp, Homo sapiens
cttctgagcccaagcaatctgcctgcctccccctcccaaagtgccagagtacaggccactgcacccagctaccttttttttttttttttaaactaattagwgttattttcctaaaaagttaaattctaatttctaggaagagtgaagaatagtatcgatttaaaaattttcagtagccctcttgctattttatgttcttac

SEQ ID NO: 211190 - DNA, 201 bp, Homo sapiens
tctggtgggttctcacaagcaggccagccagccgtctctagcacaccacccttttactgcataaaaagcacaggcgtatagtctccctgaaaacttcagawcctctagagctttgaagcttttattcggagttttctcttcaaggtcacttaatttaacatgtgaacaagagcagtctcagtaccttctttttatatatcc

SEQ ID NO: 211191 - DNA, 201 bp, Homo sapiens
aaataaattgtagaaaagtattctttcaaaagtacattataacttttatattggtttcttatatttatttcttttaatcttttcttttaactcaaactacrttttaaggttttgttgcctactaagttataatctgagtgcagaaggaaacttgatttggctttatggaatacattttacattcagtgaagctgagctctg

SEQ ID NO: 211192 - DNA, 201 bp, Homo sapiens
atatcatttggaggtttattaactgtaattgcatttcccttcttatttatatttacagatgaaagggtcttgagaaaataaacttggatttcttgatttcytcccaggtgttagtagaaacctttggctcatcatcctctaatttagaaggtttttgcttaccgcacactgaagctaatttcctgctttttctggcttcat

SEQ ID NO: 211193 - DNA, 201 bp, Homo sapiens
aaatgtataaggtgttaggaaagataatacaacatggttttgaggtcctcagggagttaaaaactttcctagccatatcatttggaggtttattaactgtmattgcatttcccttcttatttatatttacagatgaaagggtcttgagaaaataaacttggatttcttgatttcttcccaggtgttagtagaaacctttgg

SEQ ID NO: 211194 - DNA, 201 bp, Homo sapiens
tatttgcttcaatcatgccgcttccttggtctcttccagatgccttattccttatttaggaccttgttactgttattatcacacattctctactatctcartgctcttcttccttcaagatttcattctacaatttttcctgagatcggcactatacccttcctcctgccccatcctatcctgagtgctactcactggact

SEQ ID NO: 211195 - DNA, 201 bp, Homo sapiens
ataatgaacacaggatacagagttgcatgagatgtcaggaaaagtgatgttcttaaaaatgtagaaatagatatatttaaggagtctatggaactatttgyacaaattatatattattgtatgagaacttcagaacctcctaaggaattaagtttaaactactttttgttttagagggggaaaaatgagtgtattaaattt

SEQ ID NO: 211196 - DNA, 201 bp, Homo sapiens
ccacaaaaaaaggatgtccatgatcaatgatctgtgaatttcttttctgtaaacagaaagagcatgtaactgctttctaattgttttggagaatgtgataracattagtattattattattggcttggagcattttccttaatatgttggtaactacttttgtcagtgaatattagtgtagccactgttggacacagagca

SEQ ID NO: 211197 - DNA, 201 bp, Homo sapiens
gatcagcctggccaacgtggtgaaaccttgtctctactaaaaatacaaaaattagtcaggagtggtggtgtgcgcctgtagtctcagctactcgggaggcygaggcaggagtatcacttgaacctaggaggcggaggttgcagtgagcagagatcgcaccactgcactccagcctgggcaacacagcaagactcaaaaaaa

SEQ ID NO: 211198 - DNA, 201 bp, Homo sapiens
gagtgtattaaatttccttcagatgatgaaaggtataggagaatacttttataaaagcatttgctgagtagaacactgtattaccttacagacaaacttaytaagattgtaatacatacagttatactttgagataggtgacttgacatgggtatcaaacagctgtgttatatctgtagcatcagaattctgatatatctg

SEQ ID NO: 211199 - DNA, 201 bp, Homo sapiens
tgttgaataaatgaggagtaaatgaacagatcttataaaacaggcttatggagcctcagaaattgtgtatcacagtcctttttggtacagccagagtgtarggtttttccactgtaccgtaactgacagagccatattcactgaagcaaataaccatcaagtgaccctcaaatgaccttcagttttctggaaaggaaggtg

SEQ ID NO: 211200 - DNA, 201 bp, Homo sapiens
tttccctcaggtgtgtcatctagccccactggccttctttaggtttctcagcagccatgcttgttacctgccacagggcccttgcactagctgccctctgyctagaacattttcaccccagatctttacattgcttctctattcatttaggtttcggcttcagtaccatcttcacagagcagctgtttttcaccatgtgac

SEQ ID NO: 211201 - DNA, 201 bp, Homo sapiens
gggaatatcatgatcagagagcatctgtaaagtgagaaattagatttgcttgatttcaagtactttatgtatttgtagtggaaatttgatttttaacactrcttttccttttctctcttcagggcattccttaagcattcagcagaacttgtatacatgctagaaagcaaacatctctctgtagtcctacaaggtaactaa

SEQ ID NO: 211202 - DNA, 201 bp, Homo sapiens
caaccccccacttgcttgggcaacaccagtagtaaaattggaatgatacagggaaggttagcatagcccttgcacaaagatgacatgcaggttcatgacamattacatattttaatgaaatgggagcatattcttgttatttaatttttaaaaatcagtttatcaagcaaatgtacagcgccattttatttttcatgccta

SEQ ID NO: 211203 - DNA, 201 bp, Homo sapiens
gtctctatttagctcaattttgtttccatgcccaacagtttgccagcagtgtaggtctctttcctgcaaggaagcctagtagattagtttcaagagttccwgcagctacattactccagcccctccagactttaccaggaggctcgtgcattctcacgtttttagagaaggcaaataccctttcctgtttctgctgctgtt

SEQ ID NO: 211204 - DNA, 201 bp, Homo sapiens
atgcttattccatgttattaaagtgaaaatgcatgatatttacttaaagctaacttttaaatattagaaactgatgtatctctttactctgatagggatcrtataaaataaaaagtaaaaatgtgtatgtatataatttattacagagccttttgaagaaactgaagagaaatggttatcttcactggaaaatactcgatg

SEQ ID NO: 211205 - DNA, 201 bp, Homo sapiens
gagcaggatgctgcggcaacagcgcagtggccccctggaggcctgctatggggagctgggccagagcaggatgtacttcaacgccagcggccctcaccacrccgacacctcggggacaccggagtttctctcctcctcatttccattttctcctgtagggaatctgtgcagacgaagcattttaggaacaccattaagcaa

SEQ ID NO: 211206 - DNA, 201 bp, Homo sapiens
tgccactgcagtccagcctgggcggcagagtgagacaccgtctcaaaaaaaaaaaaaacctgaaatcaaatactagtttgtgtggctactatcagcattgyaaaatctgactcattacttaaagccaaatcggtaaaataattagaattttgtaggtaaaaattgaacaaatgtggaaactttaaaattttaaatattata

SEQ ID NO: 211207 - DNA, 201 bp, Homo sapiens
aggatgtccatgatcaatgatctgtgaatttcttttctgtaaacagaaagagcatgtaactgctttctaattgttttggagaatgtgatagacattagtaktattattattggcttggagcattttccttaatatgttggtaactacttttgtcagtgaatattagtgtagccactgttggacacagagcaccgtcagaaa

SEQ ID NO: 211208 - DNA, 201 bp, Homo sapiens
gcgaagtcggcccatgtgtaagtcaagggaactgtcccaggactgcagcccggccagaagacgccccgcgccgccgtcccaggcagccaccgctgccgccrtggcccccgcaggccgccgtaggcccccgcgggccgcctgacccctgcgggccgccgtagaaggaccctccagaggccgcgctcttgagatggccgtcgg

SEQ ID NO: 211209 - DNA, 201 bp, Homo sapiens
aaacattttttattattaggcttccaagtcgataatgagcagatcttaaaaacagctcagttaatatgcgaaagaatttaaatggggggctgtgtgtcttkcgcatgtgtcatcacttagaaaacaacatttgctgtagcattttacggagggtggggggattgagattttgatttattttgctaatgtatttcagactga

SEQ ID NO: 211210 - DNA, 201 bp, Homo sapiens
cgtcactgcttttagcactttcagagggcagagctagaaaacatacacacatgtaccaacccaggtgtacacacatctgttactgcatgtctatttgtatrtttattaaggcaagcataagttcattctgctatctcaaactcttaatctagcccctcggggttcatttccaaattcttgcttttgctttttgttgatgga

SEQ ID NO: 211211 - DNA, 201 bp, Homo sapiens
tctggtatatgtgctgagaaacatgtgatggggctgcccagccacgtcggggaaagaaggaagatgtcttgaggtgcagtgagcttgcccactagtaattrttgtctgatcagtgtcctagagtctgactgtgccttttaggcatggggaaaggtagaagagggacttaagaagagagctaaagctcctggtagatttgtg

SEQ ID NO: 211212 - DNA, 201 bp, Homo sapiens
gatccagctcagcaaaccgacagccagaacagtgatacggagcagtattttagagaatggttttccaaacccgccaacctgcacggtgttattctgccacrtgtctctggaacacacataaaactgtggaaactgtgctacttccgctgggttcccgaggcccagatcagcctgggtggctccatcacagcctttcacaag

SEQ ID NO: 211213 - DNA, 201 bp, Homo sapiens
gtggcatgatctcggctcactgcaacctctgccttccaggttcaggtgattctcctgccacagcctcccgagtagctgggactacaggtgcacgccaccaygcctggctaatttttgtatttttagtagagacggggtttcaccatattggccaggctggtcttgaactcctgacctcgtgatccgcctgccttcggcctc

SEQ ID NO: 211214 - DNA, 201 bp, Homo sapiens
gagcgcagtggcatgatctcggctcactgcaacctctgccttccaggttcaggtgattctcctgccacagcctcccgagtagctgggactacaggtgcacrccaccacgcctggctaatttttgtatttttagtagagacggggtttcaccatattggccaggctggtcttgaactcctgacctcgtgatccgcctgcctt

SEQ ID NO: 211215 - DNA, 201 bp, Homo sapiens
cagaatctgatatgggaattggtgaggtttatgttcaaggagccaaagaagatttaaattttatgtatttgaattactcagtgcgtctatatatatatatwtttggtcatcttaaattttttttctcgttagaattcagttaaggccaatatttgaactttaataagttttggtacttgctacactgcagtacatttaatt

SEQ ID NO: 211216 - DNA, 201 bp, Homo sapiens
agttttgcggagtgttgaggcccaggggagccttgggagctggggttttctttagtttccaacccatcgaccctccctcctatgaccgccagcatgattgyagcgcttggggtcactggtcgaggcggttacccgtctgtcataaatgtgaacacctggaagcgacactggcagtttaaacattttttattattaggcttc

SEQ ID NO: 211217 - DNA, 201 bp, Homo sapiens
tgtctccttattctcaatgtctcagtctgtgacagctttttcatctcatctttcaagaccttgacgtgtttttttctattgaatttgattttcttttttttctttttcttttctttttttttttgagatggagtcttgttctgtcacccaggctggagtgcagtggcgtgatctccgctcaccgcaacctccagctcccga

SEQ ID NO: 211218 - DNA, 201 bp, Homo sapiens
atcccagcactttgggaggccaaggggggtgaatcacaaggtcaggagtttgagaccagcctggccaacatggtgaaaccccgcctctactaaaaatacaraaatttagccaggtgtggtggcgggtgcctgtaatcccaactactcgggagggtgaggcaggagaatcgcttgaacccgggagggggaggttgcagtgag

SEQ ID NO: 211219 - DNA, 201 bp, Homo sapiens
gcatgtttctgaacatactttgaacgaggatccttaactaatatagcttgcagattaatcatcataacagtcttgtcagctaggataccagtttatctccrtttgacagatgtgaaaactatagtttgctgaggttaagtaacttgcccagtgtcacacagctagcaaggcagagccagagttctctgtccagctcccagg

SEQ ID NO: 211220 - DNA, 201 bp, Homo sapiens
cccgggcgcggtggctcacgcctgtaatcccagcactttgggaggccaaggggggtgaatcacaaggtcaggagtttgagaccagcctggccaacatggtraaaccccgcctctactaaaaatacagaaatttagccaggtgtggtggcgggtgcctgtaatcccaactactcgggagggtgaggcaggagaatcgcttga

SEQ ID NO: 211221 - DNA, 201 bp, Homo sapiens
ttcagtgattatattgtatatgtgtaaaatcactccaatacttgaaaactgagtttgacttttaaagtgtgtgtgtgtatatatgtttgtgttccagtatrtatttgttaagagcatgtaatgccagactctgtcctgtttagctgctggactggtggatcggttcggtgaggatgtgagtatctcctgggtgccaggtct

SEQ ID NO: 211222 - DNA, 201 bp, Homo sapiens
tgtttttcttatcttttctaggtgtttttaaacattccacactaatttatattactttttctattcaggaaaaaaaaaaacaacagcagggttttgttttktttttttaaagtggtgtggaagttacccattgaatatagatgggaatcccagtcctggctgtttcctttgaaaagatctagagaccccatggcacatatt

SEQ ID NO: 211223 - DNA, 201 bp, Homo sapiens
cattaattgtaggtttttgtggatgtctctgatcagtttaaatatgtttacttttattcctaatcaggaatgaaggtagaattgtatcagatgctttttcygcatctaatgagataatcgtgttggttttgtcctttattactgtggtacgttactacaattgacagatgttaaaccaactttgcattcctggataatttg

SEQ ID NO: 211224 - DNA, 201 bp, Homo sapiens
tagccccactggccttctttaggtttctcagcagccatgcttgttacctgccacagggcccttgcactagctgccctctgcctagaacattttcaccccasatctttacattgcttctctattcatttaggtttcggcttcagtaccatcttcacagagcagctgtttttcaccatgtgacctaaagtagcctgtaatctc

SEQ ID NO: 211225 - DNA, 201 bp, Homo sapiens
tccccattcacttctcagtattgccatgtggcctgtcagtagaaagattaccttatacttaataccttgacaaaagagcagtagaatggagtctagacggrttttctaccacaaaccattcgaatgtaaaaagtatgagtgatgagcttctattatctggcaaatatccatgtataaaagaccatctcctattaaatgcta

SEQ ID NO: 211226 - DNA, 201 bp, Homo sapiens
ccatgctggagtgcagtggtacgatctcggctcccgggttcaagtgattatcatgcctcagcctcctgagtagctgggattacaggcacccaccaccacawccagctgatttttgtatttttaatagagacaagatttcaccatgtcggccaggctggtctcgaactcctgacctcaggtgatccacccgcctcggcctac

SEQ ID NO: 211227 - DNA, 201 bp, Homo sapiens
aagcataatcttttctggcaaggtgtgatttcatgcaaaagctaaagtgattaaaaactttttgtggacttcattaagattctcagaatactgagtttctrtttctgagtaatactgatgaaaggaagatgagcatttttccaaggacaagtatattctagacagcttttgtgaaagtaaatagttttgtctatatatctg

SEQ ID NO: 211228 - DNA, 201 bp, Homo sapiens; identical to SEQ ID NO: 37303

SEQ ID NO: 211229 - DNA, 201 bp, Homo sapiens
tcattgtatgaggtgaaacattttgtaaactgtgaatcattatgcaaattttcctaaagacatatgaattattctggatttgttggtataaaagacaaaayacactggtcagttaaggagctgattttatttaggctattgcaggagggagaacttaattaatgggcatcccaaagaaaaggacaaggcctgggattttat

SEQ ID NO: 211230 - DNA, 201 bp, Homo sapiens
actagagatggggtttcaccttgttggccaggctgctctcgaactcctgccctcaggtggtctgcccacctcagcctcccaaagtgctaggattataggcrtgagccaccgtgcctggccaggcttgcagaagtacatttaacaactgccaaacttgattgactttaacaaggcaaaaatctttaagactcttagaaaaaa

SEQ ID NO: 211231 - DNA, 201 bp, Homo sapiens
ttcaaaaactcttaggatgaaaggtaggaatttggacttaggtttttaaaatagtgtgtatgtaaaagtgcaaagaatggggccctggctttctcttctcrgagtgttccacagtaacaacatgaagacaatccaggtacacaagtttgtatgtgccttagtctgtgtgtccaaagaggcctcttacttaggtcatatgaa

SEQ ID NO: 211232 - DNA, 201 bp, Homo sapiens
catgcctgtaatcccagcactttgggaggccaaggcgggtggctcacctgaggtcaggagttcaagaccagcctggccaacatggtgaaaccttgtctctrctaaaaatacaaaaattagccaagcatggtggcacgcacctgtagtcccagctactcaggaggctgaggcaggagaatcacttgaacctgggaggcagag

SEQ ID NO: 211233 - DNA, 201 bp, Homo sapiens
tgtttagaaaagtacaggatttgaacgagagaaatggcaaaaataacaaacgatagaggatctcactttatgcttagaaaatatagatgttctcattttaygtttagaaaaatttgtgtaagttagatcttgaaacaaaatttggccagagaaacaatctcataaacaatagcacattcttagcctagcttattaaagtct

SEQ ID NO: 211234 - DNA, 201 bp, Homo sapiens
tcagtggaaattatctaaaataaccccaacagtataggattagacttttgtactgtcacagaagatagccaaggtcaggagcatataatatctatttcackcttagtctgctgtggaggcatgtcataaaacctcagtcaggtagcggtcagcggagccaggtctccctgagatgacccacctttcactgtgttggtccag

SEQ ID NO: 211235 - DNA, 201 bp, Homo sapiens
gattaaagaagtcctttttgcaggcaggtaggtgacaaagctgtttccacaaataagatccaaagttggaggagctcccctgcagttatctgagaaaatgrtattttagctggccttagtcactcaggttttcattcatattcagtatcacatgaggaaaagccatctctgaaaggtcctgcagtcatcccaacacttctg

SEQ ID NO: 211236 - DNA, 201 bp, Homo sapiens; identical to SEQ ID NO: 37304

SEQ ID NO: 211237 - DNA, 201 bp, Homo sapiens
taatgctttgcagagcagcttttatcatacagtattatatttatagaaattgtataacaaaagtatttgtaacttaatttttcttatcgatatatacataattgtaactgaggcttaagcaatacagttattttttgaagtttattaatattaagtaaattcacttactgtctaaaaataaagtatacagatcctgcacta

SEQ ID NO: 211238 - DNA, 201 bp, Homo sapiens
attggtcttgaacttctgagcccaagcaatctgcctgcctccccctcccaaagtgccagagtacaggccactgcacccagctaccttttttttttttttttaaactaattagagttattttcctaaaaagttaaattctaatttctaggaagagtgaagaatagtatcgatttaaaaattttcagtagccctcttgctatt

SEQ ID NO: 211239 - DNA, 201 bp, Homo sapiens
caagcagttctcctgcctcagcctcccaagtagctggggctacaggtgcgcaccaccacgcctggcgcaccaccacgcctggctaaattttttttttttttaatagagatgggtttcaccatgttggctcaggtggtctcaaactgacttcaggtgatccacccgcctcagccaaagtgttgggattatagatgtgagcca

SEQ ID NO: 211240 - DNA, 201 bp, Homo sapiens
gattgggctttgccaaaaattccatatgcaggttttgtgttctggagagatcataactcctaagtcttccttctcacagacacgctttttagttgtgttaytccagagaaggccctgagatggagtgggactctaggatgtgggcttagaatgagcattttactatctatctatctatctatctgtctgtctatctatcta

SEQ ID NO: 211241 - DNA, 201 bp, Homo sapiens
ttctccatgcatttgtaatagaaaaggcctcagaagtagcactgaaccttcattttactagcatttttatatacgtttatttttaaacagtttgtttagttaaaaatttacatactatggaattcacccatttttaatttgtaattcagtaaattttagtaaatatacagagtctagttttggaaatttttcatcacccca

SEQ ID NO: 211242 - DNA, 201 bp, Homo sapiens
tttctccatgcatttgtaatagaaaaggcctcagaagtagcactgaaccttcattttactagcatttttatatacgtttatttttaaacagtttgtttagttaaaaatttacatactatggaattcacccatttttaatttgtaattcagtaaattttagtaaatatacagagtctagttttggaaatttttcatcacccc

SEQ ID NO: 211243 - DNA, 201 bp, Homo sapiens
atttctccatgcatttgtaatagaaaaggcctcagaagtagcactgaaccttcattttactagcatttttatatacgtttatttttaaacagtttgtttagttaaaaatttacatactatggaattcacccatttttaatttgtaattcagtaaattttagtaaatatacagagtctagttttggaaatttttcatcaccc

SEQ ID NO: 211244 - DNA, 201 bp, Homo sapiens
catttctccatgcatttgtaatagaaaaggcctcagaagtagcactgaaccttcattttactagcatttttatatacgtttatttttaaacagtttgtttagttaaaaatttacatactatggaattcacccatttttaatttgtaattcagtaaattttagtaaatatacagagtctagttttggaaatttttcatcacc

SEQ ID NO: 211245 - DNA, 201 bp, Homo sapiens
gcccgaagttctgtcgtccgtagttttgcggagtgttgaggcccaggggagccttgggagctggggttttctttagtttccaacccatcgaccctccctcstatgaccgccagcatgattgcagcgcttggggtcactggtcgaggcggttacccgtctgtcataaatgtgaacacctggaagcgacactggcagtttaaa

SEQ ID NO: 211246 - DNA, 201 bp, Homo sapiens
ggacatgtagtcactgcctttttggagaatgcttctttagtttgaagctttctttattggactaaaattactttccaattaaaatttaactcagcaaatayttactgaatacttgccatgtgctagctaaagataaacaatgtcttgagggcatgaaagtgaatgagatacctggccttaaggagctcttttatattctag

SEQ ID NO: 211247 - DNA, 201 bp, Homo sapiens
ccatttctccatgcatttgtaatagaaaaggcctcagaagtagcactgaaccttcattttactagcatttttatatacgtttatttttaaacagtttgtttagttaaaaatttacatactatggaattcacccatttttaatttgtaattcagtaaattttagtaaatatacagagtctagttttggaaatttttcatcac

SEQ ID NO: 211248 - DNA, 201 bp, Homo sapiens
gaaactgttgttctgggtttctggaattagtactctgaaattggctccctctaggaaggcttgtgaagagagtagtgttgaacagacatgacagtttccargaaagcatagttggctaagaggagtaggattttccaagcaaagagtgtgacagtggagatggctggggctaagtcaggcagaatgtgttcaaacctgttt

SEQ ID NO: 211249 - DNA, 201 bp, Homo sapiens
tgccaaacttgattgactttaacaaggcaaaaatctttaagactcttagaaaaaaatcaaatagtaatgtgtcatataaagtaatcctgaactgatacagtcagagtgtgtgtttaactcacaaatgcatgcagagcctaataatcacaatttctctcatccagtgggtgttctcatcgtattggagaaccctactcatcc

SEQ ID NO: 211250 - DNA, 201 bp, Homo sapiens
atttaggacccagggctatatctatcttatgtctggggtggaactcaaaacctttttagtctgctagctactactggctactagattggctttttagggtrggcggactagccacttatctctggctttcttggatatccatgttcctgaggtttgttgctgtgttcacttctaagtcccttactctgtcttgatcctttt

SEQ ID NO: 211251 - DNA, 201 bp, Homo sapiens
gatctatgaagcagtgctgctgcagaccccaactcaggctggggaggagcccctgaatgtgggcagtgtggctgctggtgggcgctatgatgggctggtgsgcatgtttgaccccaagggccacaaggtgccatgtgtgggactcagcattggggttgagcgaatcttctacattgtggagcagaggatgaaggtaggtcc

SEQ ID NO: 211252 - DNA, 201 bp, Homo sapiens
taatgctctcttagcagatgctttgtgctatcgtgaacaatagggcacagatcttttattgatattcaatcacagcatcttatcagtctgagttttttagytcattcaagaaatccatatcttatcattccacaggcttgttctgtgtccttgagctggttcccttgtcttcaagttacagttttcctctctctaaacctg

SEQ ID NO: 211253 - DNA, 201 bp, Homo sapiens
atctactaaaaatacaaaaattagccgggcgtggtggcatgtgcctgtaatcccagctactcgggaggcagagacaggagaatcgcttgaacccgggaggyggaggttgcaggagctgagatcgtgccactgcactccagcctgggcgacagagtaagactctatctgaaaaaaaaaaaaaaattatttttgctctttcag

SEQ ID NO: 211254 - DNA, 201 bp, Homo sapiens
ttattggtgagcaagaactgaaagaaggggtcatcaagatccgttcagtggccagcagagaggaggtgagtggcggcagcagaaatagaagggacgaagtrtttctgcctttcccagattctgtaagaaatatgcatcttctggctgagaaattatcttcatggttaatagtggtagagatgaacaaacactcactcaaga

SEQ ID NO: 211255 - DNA, 201 bp, Homo sapiens
ttttgtccgggcacagtggctcatgcctgtaatcccatcactttgggaggccaaggggggtggatcacctgaggtcaggagtttgagaccagcctgacctrtatggcgaaaccccgtatctactaaaaatacaaaaattagccgggcgtggtggcatgtgcctgtaatcccagctactcgggaggcagagacaggagaatc

SEQ ID NO: 211256 - DNA, 201 bp, Homo sapiens
ttgaagatcatgtgtgaaatcctaagtggattgcagttgggagactttctcattaaggtgaggccagggctgagaactgtgggagaagtctggatttggcytaatactgtttatgcaagtcccaaacttgggtgactccaacccttaagcctgcaactgtaggactttcctagtaaagctgttgtatttcctatatgtctg

SEQ ID NO: 211257 - DNA, 201 bp, Homo sapiens
gtatggcgaaaccccgtatctactaaaaatacaaaaattagccgggcgtggtggcatgtgcctgtaatcccagctactcgggaggcagagacaggagaatygcttgaacccgggaggcggaggttgcaggagctgagatcgtgccactgcactccagcctgggcgacagagtaagactctatctgaaaaaaaaaaaaaaat

SEQ ID NO: 211258 - DNA, 201 bp, Homo sapiens
agaagtatggagaggactctgggctcatgtatgatctgaaggatcaaggtggagagctgttgtccctccgctatgaccttactgtatccttttgagtactrgagcctgacctgtctctttccaaatccagcgggctttctctgacaaaagtggagaacgtgactttgggatcttagaggtccattgcctatacttctagtt

SEQ ID NO: 211259 - DNA, 201 bp, Homo sapiens
gggagaagaaagagtacgtgcaacctcactcacttcttcaatggcgttcagtgtcccaaagggcttctcatctgtgttttggagtcatgctttcaactgtsgctcattctgtttgacccctataggaaaccctgactgagaagtatggagaggactctgggctcatgtatgatctgaaggatcaaggtggagagctgttgt

SEQ ID NO: 211260 - DNA, 201 bp, Homo sapiens
tcagagagttttggattttggaattgcagataagggattgtgtacttgaacttggacttctcttagggcagataatcgccatagtatggaaccaccacatyctctatttttggaagggcatacagcgtgctggtaatgtcactgattaagttttgccttacttcggaaagattctaatgctctcttagcagatgctttgtg

SEQ ID NO: 211261 - DNA, 201 bp, Homo sapiens
tttcctgaaactcttggactcaaacagtaacatttttaagcgaaatatatgaatattcctagtaaatgagatgactaaagatcagaagtagactgagttcrtcttagaatttacctcaaaatgaatctcagaaaaacattttcagatgtcagagagttttggattttggaattgcagataagggattgtgtacttgaactt

SEQ ID NO: 211262 - DNA, 201 bp, Homo sapiens
cgtgcaacctcactcacttcttcaatggcgttcagtgtcccaaagggcttctcatctgtgttttggagtcatgctttcaactgtggctcattctgtttgasccctataggaaaccctgactgagaagtatggagaggactctgggctcatgtatgatctgaaggatcaaggtggagagctgttgtccctccgctatgacct

SEQ ID NO: 211263 - DNA, 201 bp, Homo sapiens
tttggttatcagctgctttaaacgtcatggagcaaaggggatggacaccccagcatttgagctgaaggtaaggggagaagaaagagtacgtgcaacctcaytcacttcttcaatggcgttcagtgtcccaaagggcttctcatctgtgttttggagtcatgctttcaactgtggctcattctgtttgacccctataggaaa

SEQ ID NO: 211264 - DNA, 201 bp, Homo sapiens; identical to SEQ ID NO: 37311

SEQ ID NO: 211265 - DNA, 201 bp, Homo sapiens
tatctatcttatgtctggggtggaactcaaaacctttttagtctgctagctactactggctactagattggctttttagggtaggcggactagccacttayctctggctttcttggatatccatgttcctgaggtttgttgctgtgttcacttctaagtcccttactctgtcttgatccttttcaggcagagatgctatac

SEQ ID NO: 211266 - DNA, 201 bp, Homo sapiens
gcttgaaccaggaggcagagattgcagtgagccgtgattgtgccactgtactccagcctgggcaacagaccgagactctgtctcaaaaaaaaaaaaaaaaatccatatacagtgaggaagcttgtgtggtgaagacctgacctcatatatattacacgtgtaattgtaaatacaacatagattctttggggtgggactgag

SEQ ID NO: 211267 - DNA, 201 bp, Homo sapiens
ctaaacctgataaccagtgctaccttattaaaaattattatttttttgtccgggcacagtggctcatgcctgtaatcccatcactttgggaggccaagggkggtggatcacctgaggtcaggagtttgagaccagcctgacctgtatggcgaaaccccgtatctactaaaaatacaaaaattagccgggcgtggtggcatg

SEQ ID NO: 211268 - DNA, 201 bp, Homo sapiens
cttcccaaagcagccctttcatgtcttaatgtagatggccacaacacagactgtagcatgctccttgccattcctttctaacatcctctaggattgtgctycctcagtacatcatccatcatttcaatttagtggttgaatgagtagtcagttaccacctgagccacttttctaattaggatgcatatatgttgccagata

SEQ ID NO: 211269 - DNA, 201 bp, Homo sapiens
gaataataaaattgtaaggaaataggcttttcttgaaatcatttctttaaaatgtggaatgtaatttgctttgcttaatctggttttctttaatgtatgcmccagccacaccctcataagttaacatttctatagaaaaaagttatatttgtgttgctttcttactaaccaaatgccttcttttgttcaaagatgggtgga

SEQ ID NO: 211270 - DNA, 201 bp, Homo sapiens
acagggccactgggacttggagaaccatctgattatcgggggggttctttagatttttttaaacatataattggaacacacctagtattttaaagaatatkctcttgaaaagatgaaaagagtttctcccgggaggcggaggctgcagtgagccgcgatcgcatcactgcactccagactgggtgacagaaagagactctg

SEQ ID NO: 211271 - DNA, 201 bp, Homo sapiens
tttgtaggcttcctttaggagtcagcttgaactgtccatgccttctttttgactgttcattattgctgtccatgtagcccagcaatcttctttattcactrcaggttgttcttggtccctcaggttttgttgcctaaaagacatctttctacatcaatgaagaagaacttgatcaacttcatattaccacaattaattgtt

SEQ ID NO: 211272 - DNA, 201 bp, Homo sapiens
ttatttcatctcgccgaatttaataagactctgagttttctcaacataataggatgaaaacaaaaccgattttttatttatccatcaagtaactggaattrtgctgataaggtggccactagccacatttggctattgagcacttgaaacatgatcaaattgaggtttgctgtaagcatggaatatacaccagatttcaaa

SEQ ID NO: 211273 - DNA, 201 bp, Homo sapiens
aattttttctagactgccttgcctattgtttctactagcaggtcagactttttaattagcagcattatgaagaaaaaccactcaaaaagcaacaggagaasttttcagcttccattcgagaagcatttttgcctacttcctctttattttttcttgtcttacttcagtgaaaatgaaggataattaccaaaactgtatcta

SEQ ID NO: 211274 - DNA, 201 bp, Homo sapiens
ataggatgaaaacaaaaccgattttttatttatccatcaagtaactggaattgtgctgataaggtggccactagccacatttggctattgagcacttgaarcatgatcaaattgaggtttgctgtaagcatggaatatacaccagatttcaaagacttagtacagaaaaaagaaggtaaaaaaatgtaatgttccgttctt

SEQ ID NO: 211275 - DNA, 201 bp, Homo sapiens
attgtaactacaaatgtgctccccgcccacacacactggagcctgggtttgttttgtaaactgtttcacagtgtgggtcttggttccaagtttgaaagccyttagaacacaggatccagaaggatccgggcaaggtaaattcaaggtcaagggagagtcccttttctgtcccctgccatccaaagcagttaatggagggag

SEQ ID NO: 211276 - DNA, 201 bp, Homo sapiens
cttgaaacatgatcaaattgaggtttgctgtaagcatggaatatacaccagatttcaaagacttagtacagaaaaaagaaggtaaaaaaatgtaatgttcygttcttttgctttatgtgctctgctgattatgacccttaacaatatgtaaattaaattgccaataagtacaaatttaacctgatttttttactctgccta

SEQ ID NO: 211277 - DNA, 201 bp, Homo sapiens
acacacactggagcctgggtttgttttgtaaactgtttcacagtgtgggtcttggttccaagtttgaaagcccttagaacacaggatccagaaggatccgrgcaaggtaaattcaaggtcaagggagagtcccttttctgtcccctgccatccaaagcagttaatggagggagaggaaatggcgtgtgggggaggggaccg

SEQ ID NO: 211278 - DNA, 201 bp, Homo sapiens
aacgatgcttgagaaatagtttcacaggatggttagaaaaaaaaacgtggaactggcctagttttctcttgtatttaaaatattatgcttctatccttctytctcccccttgctgactatagaaaatctctcatagcgtggtgagtaggttgcccgccaattatgtacccattcatttggaaaagatacagtgcacttcca

SEQ ID NO: 211279 - DNA, 201 bp, Homo sapiens
tgaggcaaaacagatgataaaggagagtttagccatcccatgatggtggaatgggttgtttcaaacacaccagtatgcggagaacaaccagaaaagctggwtgaaaatgaaataaaattctgaagaactggaaggctaccaaggcagtgaggacagaaggaaagcccagagacataagcctagcatttggcattgcttatc

SEQ ID NO: 211280 - DNA, 201 bp, Homo sapiens
atgggagaaagtttttcaaaactgatgaaagatagcaagctgtagattcaataagcactataatccctaggcaagataaatatacagaagaccatacttaygctgggatatgaagatataaagttttgaagtagctgaggaaaaaagatatataaccttcaaaagagtgaccctaagactttcagctaagttatcagtgga

SEQ ID NO: 211281 - DNA, 201 bp, Homo sapiens
cacaactgttttagtccaagacaggccttccacttagcacttacttcagtgcagtgaaacttcgttggctccttgacaatgtgagaaaagttcaaaaggcygttgaagaaaaacgagctctttttgggactattgattcatggcttatttgggtatgtttaaatataatggatatatggagaattttttcagaaatttttt

SEQ ID NO: 211282 - DNA, 201 bp, Homo sapiens
tcggctcactgcaagctccgcctcccgggttcatgccattctcccgcctcagcctcccgagtagctgggacaacaggtgcccaccactacgcccgcctaatttttttttttttttttttgtatttttagtagagacagcatttcaccgcgttagccaggatggtctcgatctcctgacttcgtgatccgcccgccttggct

SEQ ID NO: 211283 - DNA, 201 bp, Homo sapiens
tccagccttgtcttccattaagccatatagcctcagtcagcaaatacacagttgcttgtttttctagcatccctacacaagtaagagagcgccacctagcycctggcttcaagcattgagcctgattctattccctgtcttgcgcaaaacattttggacccctttcttctggaggaaccagttcccagccaccactcctac

SEQ ID NO: 211284 - DNA, 201 bp, Homo sapiens
gccacaccctcataagttaacatttctatagaaaaaagttatatttgtgttgctttcttactaaccaaatgccttcttttgttcaaagatgggtggaacargaccctaaggaaattctacattctgtctatgagtgtatagagaaaacatgtgagaaacttggacagctcaatattgatatttccaacataaaaggtattt

SEQ ID NO: 211285 - DNA, 201 bp, Homo sapiens
ctagaggcaaataaaaaaaccgtagagatcctgtgtgaagtagtgaaaaacttaggaatggtttagcaaggtgttttttcctttgtttataaggagagagrttgctaaaccactccctgcaaaatgcagataaaagatttgctgaataagtgcttcaatcacaagatgattcccgggagttattccagtcatattactcca

SEQ ID NO: 211286 - DNA, 201 bp, Homo sapiens
caaaaggccgttgaagaaaaacgagctctttttgggactattgattcatggcttatttgggtatgtttaaatataatggatatatggagaattttttcagraattttttctagactgccttgcctattgtttctactagcaggtcagactttttaattagcagcattatgaagaaaaaccactcaaaaagcaacaggagaa

SEQ ID NO: 211287 - DNA, 201 bp, Homo sapiens
aatctggttccttgatttcttgagctaggctacattttagtggggggtatttaatgtgagagaaactcatttctgttgatcctagcatactactgtagttrgcaacattttgctctaccaatgaattggaaaccaaaacccctgtcctaatttttctaatttttaaaataggtatgcttatataataatacacaatatttg

SEQ ID NO: 211288 - DNA, 201 bp, Homo sapiens
tcaaaatgcagctgatgggatctgttgagttagtgctgactggtggtagcttcttctgggatccttctgccagctcctggactgagcactgtcccatcttycagttgctggaatgtcaccagcacagttagaaccctggtggtgcagggcacagcagcaaggcccacggggaaggaatgcccagcttgggcagagccaagc

SEQ ID NO: 211289 - DNA, 201 bp, Homo sapiens
ggttctgtagctatagctggtgctgttattcgctggctaagagacaatcttggaattataaagacctcagaagaaattggtgagtgtgttctaacaaaagkttagaaaatctgaaaaatgacacatttcagtattttatctctgcaaagtaaatacttatgctttgccccaaatgtgatccataaattatatggatcccta

SEQ ID NO: 211290 - DNA, 201 bp, Homo sapiens
atcttcttgtttttcagattttttggaattccaatggaaattcttccaaatgtccggagttcttctgagatctatggcctaatggtaaaaaacaaacaaamaaacaaaaaacacaccaaaaaaccaaaaaacaaacaaaaaaaaacctaataattaaagtttttttattacaaaacaagtttactattcataattcaaaag

SEQ ID NO: 211291 - DNA, 201 bp, Homo sapiens
actatgtaatacaggccataaggttggttttttaaattaaaaaattgatttaaaagtctaagttcatctaaataatgcttgaacataatttactattaaayaacttttagtctttagcttttacttaatctttatcagggtttaatttagagctcaatacaaaatttgaatcgttctaataagaaccattttagactcttt

SEQ ID NO: 211292 - DNA, 201 bp, Homo sapiens
ctttatcagggtttaatttagagctcaatacaaaatttgaatcgttctaataagaaccattttagactctttgaattttatatgtgtgtttttaattgtgytggtgggaaatctagactgagacctcatcaaattcttaatgcaaatctaatttgaaacaaggaataaactttttatacagcttaaatgtgttcttaattc

SEQ ID NO: 211293 - DNA, 201 bp, Homo sapiens
taataagaaccattttagactctttgaattttatatgtgtgtttttaattgtgctggtgggaaatctagactgagacctcatcaaattcttaatgcaaatytaatttgaaacaaggaataaactttttatacagcttaaatgtgttcttaattctgatcgttttgactgtaaggatttattttaaaaattggtttattgat

SEQ ID NO: 211294 - DNA, 201 bp, Homo sapiens
atctcctagtcagcaaccttaaaaatagtggaaatgagctaaaataccttaaataaatgaatctggttccttgatttcttgagctaggctacattttagtrgggggtatttaatgtgagagaaactcatttctgttgatcctagcatactactgtagttagcaacattttgctctaccaatgaattggaaaccaaaacccc

SEQ ID NO: 211295 - DNA, 201 bp, Homo sapiens
gtcatttgcaggtagatggaggaatgaccagcaacaaaattcttatgcagctacaagcagacattctgtatataccagtaggttagtaagtcttcattccyttaaactcccagagtaatgtttcttgtggaataactagttctttgggcatatgtaaccacaaagatattgatggaactctctctcctcagtgaagccctc

SEQ ID NO: 211296 - DNA, 201 bp, Homo sapiens
aaagttatcactttctgtagttaggtgataaataagaatacagatggggaggggaatcatagttgcattatttttgtgtatgtattttctttttcttttcyttttttttttttttttttttttgagacggagtctcgctctgtcacccaggctggagtgcagtggcgtcatcttggctcactgcaagctccgcctcccggg

SEQ ID NO: 211297 - DNA, 201 bp, Homo sapiens
tgtgtcatgaattttttcatacatgaatgcagaattgtgaaatataaggactttctgagttacttaatgattatgtccaattttctcttcctggacatttytgtctaccaaatttgaccttttcatatttgagatatttcaaattgattggtttatatcattctaatctgaaaatctttgtgcgtatttttaggataatct

SEQ ID NO: 211298 - DNA, 201 bp, Homo sapiens
gatcccactaagtacctaaatatgtaaatgtgtcaaacttaatacaacaacttattttaggcagggaatgagctgtgttagagtcccttgtaaggtatttsttgaattgtttttgtcccatttttaaagccttgtcatatttgcacagctatgccagatctgttcctcaaatacttcctgtggttaaaaagccattttata

SEQ ID NO: 211299 - DNA, 201 bp, Homo sapiens
ttgcctgtgtactgctttaaaagctgtggcctaagtatagcaaagaagtctcttcatatttgctaatactcattaattgcttattaagtatactcacttamgaattcacttttattaagtaccttcagtcttctcatcagttttgcactaagacgcgtacgctactgttcagtatagtgtttatatggatgctaaattggt

SEQ ID NO: 211300 - DNA, 201 bp, Homo sapiens
ggctgttttcagtctatagataattagtttgaacttacctactcactctttcatccacttgcttaactttgcctgaaggtgagacaatcagaaatacattyctgattagggacacactagaggccactttttcatctcctagtcagcaaccttaaaaatagtggaaatgagctaaaataccttaaataaatgaatctggtt

SEQ ID NO: 211301 - DNA, 201 bp, Homo sapiens; identical to SEQ ID NO: 37314

SEQ ID NO: 211302 - DNA, 201 bp, Homo sapiens
ctattcccagaccagagcagcacctctgcctagaatgcccaagctagcagggcactcagacccaggaacccctaatgccaccttggcctggagaagggaarcaccttctctattcataccagggagctgtggcagcactagactcagggttcccatgccgcacgacaggtggttgggatggacaagactcctgctcctaag

SEQ ID NO: 211303 - DNA, 201 bp, Homo sapiens
cctgagcaagaggtctcacacagcatatcccacactcacccaggcttgggggtttttaaattttatttcaaaagcttggatagcttcaatatccaggttgkggcaaaatcaggacacgtgtaaaataccttacaatacattagattcccaaaaggtaccaaaaagtacagtaaaattaacacttccgttacaggaaatgta

SEQ ID NO: 211304 - DNA, 201 bp, Homo sapiens
atggtgaaactccatctctaccaaaagtaaagaattaaaaaacattagtagggtgggttgatgtgtgcctgtggtcctagctgctgggcaggctgaagcgsgaggactgcctgagcccagaagttaaagatcagcctgagcaacatagagaaattcctctctttaaaaaaaaagaaagaaaatcattttgatttctcttgt

SEQ ID NO: 211305 - DNA, 201 bp, Homo sapiens
acagttcagtcatccattactattgctgtgctttgaggtcgttccatgttttttttgttttgttttttttttttgcaattatgaacagtgctgctttgaayagttttcataagtctctgttgtacatgtagcaagagtttttcttaggactgtacctgagggtggaattgctggcccatatggtatgtgtttacccttcat

SEQ ID NO: 211306 - DNA, 201 bp, Homo sapiens
gtggccattcattcttggcttggactgtggctccagggttaggtgaggcaaggtgcctgttctgtggggcagcaggctcagggccaggtgcagtgcactcmaagcaggctgctgtgggccagatgcacaggactctgggagaggtgaccagtaaaatgacctggcaggaactggcccatggaaggctctgaggacagtgtg

SEQ ID NO: 211307 - DNA, 201 bp, Homo sapiens
ctcaaaatgaaaactctaccccacattccccatcacctaggatggtcgtggtcaacccagggttccccctaaatccacttacaaggaaatctcatggctgkgttgccatttacagctcagtgagaccctaaataggcacagttgcatctcacagtagagatcacaactgccagccaagcaacctgtgccctcctacctctg

SEQ ID NO: 211308 - DNA, 201 bp, Homo sapiens
gggtgtctcagaactcagactccaccggtcccaatgccctggtttgcttgtcctttcacttggaccccaagtcctcaggacttcttctccttctagttgarttgttattcccttttatctccattccccaggcctaccccttcccccacgcccaccatggaaagctcttctggtatttgacgtgtccttattcaaattgtg

SEQ ID NO: 211309 - DNA, 201 bp, Homo sapiens
gtaagccctcatcactgccccatcctcactccccataggcctctcattcctttctttgaaggggggctcagccctaggcagggcagtccttaaaggatacycccacaactgggcctgcagctggaagagcctgctgcaggagaaagccccaagtccagggcacctggcaccccccccccgcctccctcgaccctgagcaag

SEQ ID NO: 211310 - DNA, 201 bp, Homo sapiens
acgagaacaaccatagcagctactatttacaagcatttgccctgtgccacgcgcttgatatgcatcttcccaggaccctcaccagccgtgacagcagagaytgccttcctcatgttattaagaccccgaagtctaaggctcaaaatcaagtagctcccatggctgagccaggcctgtctgactccaaagcccctgctgcca

SEQ ID NO: 211311 - DNA, 201 bp, Homo sapiens
agctactatttacaagcatttgccctgtgccacgcgcttgatatgcatcttcccaggaccctcaccagccgtgacagcagagactgccttcctcatgttaytaagaccccgaagtctaaggctcaaaatcaagtagctcccatggctgagccaggcctgtctgactccaaagcccctgctgccagtggctcctacactgtc

SEQ ID NO: 211312 - DNA, 201 bp, Homo sapiens
gtgaaaaaaaggtgacactggtttcctaagatacaatttactctttacaaccagggtccacaggtccaggctgcagagcggcagcaggaagcagagcctcycacctgcttctgggggacctggtaataaaaatcagcccatgatggcgctatggcctctcagacaccacacgctgcctaaacacctagagctctggaaata

SEQ ID NO: 211313 - DNA, 201 bp, Homo sapiens
taggacaaactcagggcagtgactgcccaaacaccttcactgcgacaaacatcaaatggtggatcaggtccatttgctgagaaacaaaatatgctagtatrggaggccacctttgggctaaagctcatggaatcccaactaaaaccaaaggccttccagcagagaacccttccgacagaatgcacttgagatgggcatctc

SEQ ID NO: 211314 - DNA, 201 bp, Homo sapiens; identical to SEQ ID NO: 37320

SEQ ID NO: 211315 - DNA, 201 bp, Homo sapiens
gttcagcccgtgtctcacaataccctgggggtgcttttccagttcagtgaggaaatgggtaagtcacctgcagttaccctgctaggtggcaagagctagayctggccccagggccgtctaactccaaagtccaagccctgttctttctggcgtggccatggtcagtgccaggaagactgggacaggaaaatgaaaccagaa

SEQ ID NO: 211316 - DNA, 201 bp, Homo sapiens
tacacacatgtgccaccacgcctggctatttttattttttgtagagatggggtttcaccatgctgcccaggctggtctcgaactcctcaccttaggcaacycacccatcttggcctcccaaagtgctgggattacaggcatgggccactgcacccagctaacatgtttgtaacatctgatttaaagtctttatccagtaag

SEQ ID NO: 211317 - DNA, 201 bp, Homo sapiens
acccagagagggacaagataggacatggcctggaccagggaggcaggcctcccactcagagtctgggtctcactggccccaagtctcccacccagaactcyggccaaaaatggctctctaggtgggctgtgcaggcaaagcaaagctcagggctggttcccagctggcctgagcagggggcctgccaccagacccacccac

SEQ ID NO: 211318 - DNA, 201 bp, Homo sapiens
cggctgactttttttttttttttcactgattctttcatctgccggcttaaatctgctgttgccaggtgcagtggctcacgcctgtaatttcctagcacttygggaggctgaggtgggcggatcacttgaggtcccgggtttaagaccagcctggccaacacagtgaaactccgtctctactaaaaatacaaaaattagcca

SEQ ID NO: 211319 - DNA, 201 bp, Homo sapiens
ggcgcccgccatgatgcccagctaatcttttgtatttttagtacagacggggtttcaccatgttagccaggatggtctcgatctcctgacctcatgatccrcccgcctcagcctcccaaagtgcggggattacaggtgtgagtcaccgcggccggctgactttttttttttttttcactgattctttcatctgccggctta

SEQ ID NO: 211320 - DNA, 201 bp, Homo sapiens
aaccactccagcacattctctcactcccagcttaatctgtattttcatcccctcaaaaaccggaacataacctccggctttgggttttgcccaaagcactyaaatcacatgcagaccacacaaactagtcatgctttaagaaaggtgtcctcttagaattcaaatcgtttccactgagactgctgaaatccagtacccagc

SEQ ID NO: 211321 - DNA, 201 bp, Homo sapiens
tttgctttgactgctttataatctttgtataaatgtaccacagttcagtcatccattactattgctgtgctttgaggtcgttccatgttttttttgttttgttttttttttttgcaattatgaacagtgctgctttgaatagttttcataagtctctgttgtacatgtagcaagagtttttcttaggactgtacctgaggg

SEQ ID NO: 211322 - DNA, 201 bp, Homo sapiens
gataaggcaagataatgtccttaggggtgagggaagtgacactttggtgcattcagccaaaaaccatcactctgtccatgtgacacatagagcctcagagragctcactgtcggggaaagacaggctcacagacacatggtcatgacagcgtggaggatgagtggaagtagtgtgttcacggtgctgtgagagcacaaagg

SEQ ID NO: 211323 - DNA, 201 bp, Homo sapiens
acactgagctcttttccttcacaaggccttggagcatgctgctccatctgcctggaaacctctccctcaagactcagtacatgagtcacctccccatagaygcttcccctgaccctctgtgttggtctgctctggctctcataagaaaataccagagactgagtggcttaaacaaaagacatttattttctcacagtcctg

SEQ ID NO: 211324 - DNA, 201 bp, Homo sapiens
tttgggaggccgaggcgggtggatcaggagtttgagaccagcctagccaacatggtgaaaccctgtctttactgaaaatacgaaaaattagctgggcatcrtggtgggcgcctgtaatcccagctacttgggaggctgaagcaggagaattgcttgagcctgagaggcagaggctgcagtgagctgagatcgcgccactgc

SEQ ID NO: 211325 - DNA, 201 bp, Homo sapiens
atcgcgccactgcactccagcccgggcaacagagtgagactgtctcaaaaaaaaaaaaaaaaagaaattccaaaggtggccagcatggtggctcatgcctrtaattccagtactttgaggccgaggtgggaggaatgcttgagcccccagtctgggcaatatagtgagaccccatctctgcaaaaaaagaagttccagagg

SEQ ID NO: 211326 - DNA, 201 bp, Homo sapiens
ggtgaggctctgggggcagcagtcaccacccacctgccaaggcccagtgtggtaccattttcttcacctcctaacaacctgggatggtggggttatgtccrctctcaagaggaactgagacactgagaggtgctattgcccaaaacggctctcctggggaggagaaagctaggacatgacctgatccctagctacccctga

SEQ ID NO: 211327 - DNA, 201 bp, Homo sapiens
atatagtgagaccccatctctgcaaaaaaagaagttccagaggcccagacttgctactggtgcccagggggctgtggggcagcttgggcattgagccctcrtgctgtgggatctgatgctgtctctaggtagatagtgttggaattgaattggaggacacccaactggtgtccgctgcagaactgattgcttgcctggtgg

SEQ ID NO: 211328 - DNA, 201 bp, Homo sapiens
aggtcgcctcccactggagcttagggctggcacccagcgaggggcagcaggaccacgtggctggcaaggagctgtttagggctgagagccaggcacctaakgttggtgccctgtcccatcccatcgaagacacgcggccttatggagtccccatgggacggggcagccaccttttctcaggatccgggagactgacgcgga

SEQ ID NO: 211329 - DNA, 201 bp, Homo sapiens
acccggaagacagggcaggaagatgcctgaagctggtgaggggcacgtggagctcattacaccaactgcaatgttggacattctctatataaggaaacaayatacatcacgtaaaccacacagaaaaccagagaatgcaggtgactcttgcagtctggcgtttccctgtggccattcattcttggcttggactgtggctcc

SEQ ID NO: 211330 - DNA, 201 bp, Homo sapiens
ctgggcctgcagctggaagagcctgctgcaggagaaagccccaagtccagggcacctggcaccccccccccgcctccctcgaccctgagcaagaggtctcwcacagcatatcccacactcacccaggcttgggggtttttaaattttatttcaaaagcttggatagcttcaatatccaggttgtggcaaaatcaggacacg

SEQ ID NO: 211331 - DNA, 201 bp, Homo sapiens
gatccagtttccttgtctcttattgaaggatgttattacctcctttctaggatcattgctggagcttagtgaggtaatatgttcctttatttctgccttamggatacagccaaaatccctgcctgtgggttgctcagtaaggaaggaaaacatcaagtgattcttcaaagaaatacagaattgcaaggagggctctggagg

SEQ ID NO: 211332 - DNA, 201 bp, Homo sapiens; identical to SEQ ID NO: 37322

SEQ ID NO: 211333 - DNA, 201 bp, Homo sapiens
tggggtacagggtcaagagctttccctgagtgaagctgacacatggcatattcagtggccctgaggcagcagttgcagggtaggtgagaggatggcagcasgagccccacaggaaagagccgaggagtctcactgatcttgaagagtgaggaccacaggagggttttaatcctggagagagtactctttggaaagatctct

SEQ ID NO: 211334 - DNA, 201 bp, Homo sapiens
agtagctcccatgaattgagtatgtgatgtgcacaaagccgaggctgacaatatcaacacatttaagattcattataaaccagaaggaggaaatcccaccycatttcacagcagagaaaacaaccgagagagattaaatgatgagctgctgtcacatagccagtcagcagtcttgcaagaattgttgctgactccaaagct

SEQ ID NO: 211335 - DNA, 201 bp, Homo sapiens
caccctgggccaccattctgggaaggcagctctggggagcagagtgcgctttgtaagagactcaaaggtggtcccacaacattgtacatgttcaaactacyccagcagtagctcccatgaattgagtatgtgatgtgcacaaagccgaggctgacaatatcaacacatttaagattcattataaaccagaaggaggaaatc

SEQ ID NO: 211336 - DNA, 201 bp, Homo sapiens
gttcccagaagcctggcccacaggcttcttggtgatccgtgagactgactctgggtgccttaggcagggaggataaggggcctgggctactgaagacaagygtggcaggcagaggaccaggcctgagacctcccagaggctctgtcaccctgggccaccattctgggaaggcagctctggggagcagagtgcgctttgtaa

SEQ ID NO: 211337 - DNA, 201 bp, Homo sapiens
ccagaggcccagacttgctactggtgcccagggggctgtggggcagcttgggcattgagccctcatgctgtgggatctgatgctgtctctaggtagatagtgttggaattgaattggaggacacccaactggtgtccgctgcagaactgattgcttgcctggtggtggggagaaatccttacatattttttggagtcacag

SEQ ID NO: 211338 - DNA, 201 bp, Homo sapiens
tccagaggcccagacttgctactggtgcccagggggctgtggggcagcttgggcattgagccctcatgctgtgggatctgatgctgtctctaggtagatagtgttggaattgaattggaggacacccaactggtgtccgctgcagaactgattgcttgcctggtggtggggagaaatccttacatattttttggagtcaca

SEQ ID NO: 211339 - DNA, 201 bp, Homo sapiens
ttccagaggcccagacttgctactggtgcccagggggctgtggggcagcttgggcattgagccctcatgctgtgggatctgatgctgtctctaggtagatagtgttggaattgaattggaggacacccaactggtgtccgctgcagaactgattgcttgcctggtggtggggagaaatccttacatattttttggagtcac

SEQ ID NO: 211340 - DNA, 201 bp, Homo sapiens
agttccagaggcccagacttgctactggtgcccagggggctgtggggcagcttgggcattgagccctcatgctgtgggatctgatgctgtctctaggtagatagtgttggaattgaattggaggacacccaactggtgtccgctgcagaactgattgcttgcctggtggtggggagaaatccttacatattttttggagtc

SEQ ID NO: 211341 - DNA, 201 bp, Homo sapiens
acgcctgtaatcccagcactttgggaggccgaggcgggtggatcaggagtttgagaccagcctagccaacatggtgaaaccctgtctttactgaaaatacraaaaattagctgggcatcgtggtgggcgcctgtaatcccagctacttgggaggctgaagcaggagaattgcttgagcctgagaggcagaggctgcagtga

SEQ ID NO: 211342 - DNA, 201 bp, Homo sapiens
gctctcccagggcatccatcgtagcacttagaaaaatgatcacttcttcttttttggctttgtggtggcgtgtgtgtgtgtgtatttgtatatacacacayatatatataaatacacagacacacatatatacaaacacacgcattcattttcgtccacagttcctggctcataactcccacagcccttgttacactcttt

SEQ ID NO: 211343 - DNA, 201 bp, Homo sapiens
atgctgggaacccagagagaaaaccaaacgaggccctgccctccaggaatctgggataggggcagtttgggctcagcagagagtctgagtgcacggcctakcatgggcgtggtagccagccagagcctgagcaggccttgggaggtaccaagcggggtccttggagggggtgctctctgacacagtaggggtcagccactc

SEQ ID NO: 211344 - DNA, 201 bp, Homo sapiens
gtccttggagggggtgctctctgacacagtaggggtcagccactccaggtggggtggggagtagcagaggaagggcatcccactgggtggctgaggaaccktgtgaatgtgtggccaggagctgatcctggagaggcaggcagggtccacatgccagagggcaccggaactatgctgggcggcagcagttctgccctggag

SEQ ID NO: 211345 - DNA, 201 bp, Homo sapiens
cttgatggcaggaacagctatatcctcccttgaaacctatggggctgtatccacgtggaaccccaacccacccttgcctcttgtaaccacctagtcttatrccctaaataccagacctggagttgggctccaatccagccaataaacatcccctgccagagcaggcttttcttcaccagccaggaggagcactattgtgcc

SEQ ID NO: 211346 - DNA, 201 bp, Homo sapiens
ctcatgctgtgggatctgatgctgtctctaggtagatagtgttggaattgaattggaggacacccaactggtgtccgctgcagaactgattgcttgcctgstggtggggagaaatccttacatattttttggagtcacagaagtcttctgtgttgattgttgtagtgtgaaagcagaggaaaaacaatggtttgggttttt

SEQ ID NO: 211347 - DNA, 201 bp, Homo sapiens
ctaccctcttggactccaacattgcctagagggccaggcatgaaataaaggacagatgagtgcctggcacagggccagagacaaggagtgggcttttctgmgcaggaagaaggtgaggcctcctggtgttctgtgccatgctataagatactcctggcccaggaaatggctcaacctggtctgacctccaactatatcacc

SEQ ID NO: 211348 - DNA, 201 bp, Homo sapiens
gtggggagaaatccttacatattttttggagtcacagaagtcttctgtgttgattgttgtagtgtgaaagcagaggaaaaacaatggtttgggttttttcmaaacaactttcatgacacatacgagaatgtaaattccagaagggccaaggccatgtctgttttacctactctttttcccccagcttctagtacataggag

SEQ ID NO: 211349 - DNA, 201 bp, Homo sapiens
ccgcctccctcgaccctgagcaagaggtctcacacagcatatcccacactcacccaggcttgggggtttttaaattttatttcaaaagcttggatagcttsaatatccaggttgtggcaaaatcaggacacgtgtaaaataccttacaatacattagattcccaaaaggtaccaaaaagtacagtaaaattaacacttccg

SEQ ID NO: 211350 - DNA, 201 bp, Homo sapiens
aatcatgtaaaatattcaattcagctttacagttaaaaataagaaattccattcttttagggaagatgaaaaagtcctgttgcatggatggtggtgatggytgcacgacgatgtgaatgtacttttgccactgaattgtatccttaaaaatggttaaaatggtaaaattttgttatgtatattttacacaataaagaaaaa

SEQ ID NO: 211351 - DNA, 201 bp, Homo sapiens
atgacgcaaataatataaaattaaaaggtgaaaaaaaggtgacactggtttcctaagatacaatttactctttacaaccagggtccacaggtccaggctgmagagcggcagcaggaagcagagcctcccacctgcttctgggggacctggtaataaaaatcagcccatgatggcgctatggcctctcagacaccacacgct

SEQ ID NO: 211352 - DNA, 201 bp, Homo sapiens
tctcattcctttctttgaaggggggctcagccctaggcagggcagtccttaaaggatacccccacaactgggcctgcagctggaagagcctgctgcaggaraaagccccaagtccagggcacctggcaccccccccccgcctccctcgaccctgagcaagaggtctcacacagcatatcccacactcacccaggcttgggg

SEQ ID NO: 211353 - DNA, 201 bp, Homo sapiens
tgctctctctgccctgggcacccaagccattccaaggggcagcagcaggcaacagcctcaagcatacagccctgacccagagccgttcctattcctgttcrtccccaacctcacacaatctgcccacccctgctgcacagcaccagagggagccccaagacaggcttggaaggctccatgtaggcagggaaacaggaccta

SEQ ID NO: 211354 - DNA, 201 bp, Homo sapiens; identical to SEQ ID NO: 37318

SEQ ID NO: 211355 - DNA, 201 bp, Homo sapiens
caggcagcacacttgacctgtgagggggccctcggtgggacggtgggtgaggtcgcctcccactggagcttagggctggcacccagcgaggggcagcaggrccacgtggctggcaaggagctgtttagggctgagagccaggcacctaatgttggtgccctgtcccatcccatcgaagacacgcggccttatggagtcccc

SEQ ID NO: 211356 - DNA, 201 bp, Homo sapiens
ctttataatgccggagccgggtgccacatcgcaacaaactgcacactcattggctgctcaagtccgtcactcaacctagcttcagcgtcccattggccgcsacggcgcgcgcgctctagacctgggcgggctttgtcctcattttagaacgcgcgcgagtccggccgctacggagggctcccgaagccgggcgggacggcg

SEQ ID NO: 211357 - DNA, 201 bp, Homo sapiens
ctattcccagagccacactcacctccccaaactcgccaaagtactccctgatcttttcctcagtggcttcaggattcagacccccaacgaagattttcttsaccgggtccttcttcatagccatggcctttttagggtcaatgacacggccatccagcctgtgctccttctggtctaggacctgttccaacagaaaggggt

SEQ ID NO: 211358 - DNA, 201 bp, Homo sapiens
gctcagcccataaacatgccccctctggctcgctctcccagggcatccatcgtagcacttagaaaaatgatcacttcttcttttttggctttgtggtggcrtgtgtgtgtgtgtatttgtatatacacacatatatatataaatacacagacacacatatatacaaacacacgcattcattttcgtccacagttcctggct

SEQ ID NO: 211359 - DNA, 201 bp, Homo sapiens
acaaaccttcagatgtaacatggaacccaaagtaggggtgcagcactgatggtgacttgtcttgcttggactaagccagcactagcagggcacgctaagcyggtcactgcacaaccccatggtcgtgttcccaatgtccatctcttcacagattgcagccttcttcgctgagtctctgcccagtgtgggagggcagatcat

SEQ ID NO: 211360 - DNA, 201 bp, Homo sapiens
ttaacattcaagagtatgcccacccagccccaaagccaccggcatgtgaagctgccggaaagtggacaggccagaccagggagatgtgtacctgaggggcrcccttgggcctgggctttcccaggaaggagatgaaggtagaagcacctggctcgggcaaggctagaaagatgctacgttgggccttcagtcacctgatca

SEQ ID NO: 211361 - DNA, 201 bp, Homo sapiens
aactcgaggttctaactgcccctgtgacatctgacaaacatctccagcttcatgtgttcaaaagggcaagggttgattggaccatggtactgttctccctyacctgcccaagaaggctatccccactcacccccgctcatcttgccttgtaaagggcatcaccacctatatctgctccaggcagaaaccacacgctcccca

SEQ ID NO: 211362 - DNA, 201 bp, Homo sapiens
cacgcacgcacgcactacgcacgcgcctccggctaggaagccgctgctacccatcccgttcggccgctgccccggccccgctggagcttctagggcccgargcgggcggcgccgttgggcagtcccggcgggtggtctccggggccgcctccccgacagcgccgtctccaggccgcccagttcaggagacggccccgccct

SEQ ID NO: 211363 - DNA, 201 bp, Homo sapiens
aggatatggtacccagcacacttgaggaaccgaaagaagtccacgaagggaaagcagaggctgtgagctgttgggaggcaagcagggcgcatcacctaggrccttctccgccaagtggggaagctgtctttatcctaagagcattgggaaactatcggaggctttaatcaggaaacgatgtcttaaagggaacggagtgca

SEQ ID NO: 211364 - DNA, 201 bp, Homo sapiens
gtgagccaaaattgcaccactgcactgcagtctgcaggacagagagaggctctatctcaaaaaaaaaaaaaaaaaaaaatagtctcatcaaaactcttgtyaaggttggtcaccacacagaactgcctgtggaaaggccctgtagcaggaaaggatatggtacccagcacacttgaggaaccgaaagaagtccacgaaggg

SEQ ID NO: 211365 - DNA, 201 bp, Homo sapiens
cggctgtaggccctgatgctttctctgttggatccagtttccttgtctcttattgaaggatgttattacctcctttctaggatcattgctggagcttagtkaggtaatatgttcctttatttctgccttaaggatacagccaaaatccctgcctgtgggttgctcagtaaggaaggaaaacatcaagtgattcttcaaaga

SEQ ID NO: 211366 - DNA, 201 bp, Homo sapiens; identical to SEQ ID NO: 37324

SEQ ID NO: 211367 - DNA, 201 bp, Homo sapiens; identical to SEQ ID NO: 37326

SEQ ID NO: 211368 - DNA, 201 bp, Homo sapiens
ctggagcttagggctggcacccagcgaggggcagcaggaccacgtggctggcaaggagctgtttagggctgagagccaggcacctaatgttggtgccctgkcccatcccatcgaagacacgcggccttatggagtccccatgggacggggcagccaccttttctcaggatccgggagactgacgcggacacatgcagaaat

SEQ ID NO: 211369 - DNA, 201 bp, Homo sapiens
ggggcgcggggctgcgcggagaggcacgcgcacgcacgacgcacgcacgcacgcactacgcacgcgcctccggctaggaagccgctgctacccatcccgtycggccgctgccccggccccgctggagcttctagggcccgaggcgggcggcgccgttgggcagtcccggcgggtggtctccggggccgcctccccgacagc

SEQ ID NO: 211370 - DNA, 201 bp, Homo sapiens
ttcccggaagggaggccgcaggggcctgcggggcggggcctgcggggcgaggcccggggcgcgtcccggaaccagagacggggcagcgctcgagttcctgygcgggactgccaaggcacgaccacgggccggaaggctgccaggcccagtgggcaagcgaagaaatgaaccaccgcaacgcgggcgcttcggggcggggcc

SEQ ID NO: 211371 - DNA, 201 bp, Homo sapiens; identical to SEQ ID NO: 37321

SEQ ID NO: 211372 - DNA, 201 bp, Homo sapiens
aagaccttcaccctggcgcctgagaggacctcacccagggtggcccgtcagcagcacctgggcctggctcgagagtgacctgggagggggctgaaagggcrgacaagggagagtcgggggagtcggttcacaggcagcacacttgacctgtgagggggccctcggtgggacggtgggtgaggtcgcctcccactggagctt

SEQ ID NO: 211373 - DNA, 201 bp, Homo sapiens; identical to SEQ ID NO: 37323

SEQ ID NO: 211374 - DNA, 201 bp, Homo sapiens; identical to SEQ ID NO: 37325

SEQ ID NO: 211375 - DNA, 201 bp, Homo sapiens
attcaccatcttcattttacaggtggggtaacagcagttcaaagaaaggaacttgagcccagacatttgccatgtcaagagctggagcctctggaaagagmagggagctggtgcttcctcagtggtggtggaggaggggcattcttatgccaccagctttattctgtgtggattccagggacttccatgttgccaaatcca

SEQ ID NO: 211376 - DNA, 201 bp, Homo sapiens
gcagagggcaaggagtaggtttagagagggggctgaggtagaatccttgggcagtgctgactgatgggttgagggaggaggcgtggatcaaaaatgggggrcagggaaggaactggcttatggtggaaaaatcagtgcatgtagtttggggcatgccaagtactaggggcctggaggcatccaggtagtaagagttggctg

SEQ ID NO: 211377 - DNA, 201 bp, Homo sapiens
atgttccccccaattccctcttgttgccttctccacccatcactctgaataaccatggtaaccatcactctcaatcccatattatttagttgttatttgastttatatgaagtctatcatgctgtatatactctggggatttttttttctactaacatatcactaagaatcctccctattgcctgtcactgaagttcattt

SEQ ID NO: 211378 - DNA, 201 bp, Homo sapiens; identical to SEQ ID NO: 37335

SEQ ID NO: 211379 - DNA, 201 bp, Homo sapiens
cggcggggggttgctgggcggctgcttgatggtgcctccgatctgcggccgctcccggggcttgggctcgatgggcgtccactgctcgccacgcacagccrcctgcggggcactgaagggttgagccgcgccccagcgcccgccctccctccctccctccctccccggaggcccaccccgctaggggccctgggacaggct

SEQ ID NO: 211380 - DNA, 201 bp, Homo sapiens
tctaatatgtatctatggctactactatatataagaccagagttgtgttttattagatgtttatgacagagaatcctgtaataatgttgattttttcttayttttatatcctagaatacctctattgggatataaagcagccttagcttccctcccagaaagacacagaacgatcagagatggtgcccttgactttatagt

SEQ ID NO: 211381 - DNA, 201 bp, Homo sapiens
actatatataagaccagagttgtgttttattagatgtttatgacagagaatcctgtaataatgttgattttttcttacttttatatcctagaatacctctrttgggatataaagcagccttagcttccctcccagaaagacacagaacgatcagagatggtgcccttgactttatagtggcacaaacacttcagagacaca

SEQ ID NO: 211382 - DNA, 201 bp, Homo sapiens; identical to SEQ ID NO: 37339

SEQ ID NO: 211383 - DNA, 201 bp, Homo sapiens
ttaaactcttcaaaagaaagacagagaaaatcctgaaagcaacaaaagaagtggctagttatgttactggctagtaaccctcaaaaataatcagcagataycttatctgaaaactcagaggacagaaagcaatagattaacatattccaaatgatgtgagaaaaaacttttgaacagatatcttatgttcaaaacattgtc

SEQ ID NO: 211384 - DNA, 201 bp, Homo sapiens; identical to SEQ ID NO: 36143

SEQ ID NO: 211385 - DNA, 201 bp, Homo sapiens; identical to SEQ ID NO: 37344

SEQ ID NO: 211386 - DNA, 201 bp, Homo sapiens
aggatgagaaaaagaatcaggaagactatttagaaacaataatgttaaagaatgtcaaaggcaacaaactccaagtaagagaaactcaaataaacaaactyaaattatatgataattaaactcttcaaaagaaagacagagaaaatcctgaaagcaacaaaagaagtggctagttatgttactggctagtaaccctcaaaa

SEQ ID NO: 211387 - DNA, 201 bp, Homo sapiens; identical to SEQ ID NO: 37340

SEQ ID NO: 211388 - DNA, 201 bp, Homo sapiens
ctaatgtgtggaatgtgcagatttaggttactttagtgtatgttctagttaataagttaaaattctggacacattattaaaggcagaaacttctttcaaarcaaacacccctacactctgtatgacctttacaattatcagtgtctctttttatgagcacacaattttctagaacactgtatgtgctcagttatgcaaaag

SEQ ID NO: 211389 - DNA, 201 bp, Homo sapiens
ggaatgtgcagatttaggttactttagtgtatgttctagttaataagttaaaattctggacacattattaaaggcagaaacttctttcaaaacaaacaccsctacactctgtatgacctttacaattatcagtgtctctttttatgagcacacaattttctagaacactgtatgtgctcagttatgcaaaagctctatgaa

SEQ ID NO: 211390 - DNA, 201 bp, Homo sapiens; identical to SEQ ID NO: 37354

SEQ ID NO: 211391 - DNA, 201 bp, Homo sapiens
gaatcctgtaataatgttgattttttcttacttttatatcctagaatacctctattgggatataaagcagccttagcttccctcccagaaagacacagaaygatcagagatggtgcccttgactttatagtggcacaaacacttcagagacacacaattataagagacttatcttttagcataaatacttatggcacaaaa

SEQ ID NO: 211392 - DNA, 201 bp, Homo sapiens; identical to SEQ ID NO: 37343

SEQ ID NO: 211393 - DNA, 201 bp, Homo sapiens
gattgcttgagctggcaagtttgagagcgaagaaagaaagagagggagggaggaaggaaggaaggaaggaaaggaaggaaggaaggaaggaagaaagaaakaaagaaagaaagaaaaaagggccaggtgctgtagctcacacctgtaatcccagcactttgggaggctaagtggggctggatcacttgaggtcaggagttt

SEQ ID NO: 211394 - DNA, 201 bp, Homo sapiens
ctcctgctgaccccagaggcaggcaccatggtcacctgggtagctgggcaggagtacgtggtcaactgtgtgtctggggacgcgaagccagcacctgacawcaccattctcctgagtgagtgtgggtgaactgggtggcagggggcagcatgaagcctctggagtgggaagggtgtgtgttcctgaccagtacccttctaa

SEQ ID NO: 211395 - DNA, 201 bp, Homo sapiens
ctgaccccagaggcaggcaccatggtcacctgggtagctgggcaggagtacgtggtcaactgtgtgtctggggacgcgaagccagcacctgacatcaccawtctcctgagtgagtgtgggtgaactgggtggcagggggcagcatgaagcctctggagtgggaagggtgtgtgttcctgaccagtacccttctaagggccc

SEQ ID NO: 211396 - DNA, 201 bp, Homo sapiens
gtgagagacgcccaggacccatgagtctgggcttcaagccctcccctaccccgcaacccggaagtccaagcccccagcctctcctctcccagactctgggyaccgaactccaatcttcaagtccttctcagtgctggaagcttaccccagacccttctctcaccagttcctcccaagctgctcctgctgaccccagaggca

SEQ ID NO: 211397 - DNA, 201 bp, Homo sapiens
gaacccctctagccctcttgctgccccaaggtggacagacaatatctgacatctctgcaaacgtgaacgagggctcccagcagaaactcttcactgtggargccacagccaggtgtggaaactgaaacaaccccccaaccttgacccctaattttccccatgggaaccccagaccccagggatgcaagcatgaagcttggg

SEQ ID NO: 211398 - DNA, 201 bp, Homo sapiens
gcagccctggcttgaccccggttccacaggctggagggcgtggccgccccaccccggagagccccattcaaaggctccgccgccgccaggagcgtccttcwgcaagtgtcatcccgcgatcatggccagcgcgtgacctgccgcgcccacagcgccgagctccgcgaaaccgtgagctccttctatcgcctcaacgtactg

SEQ ID NO: 211399 - DNA, 201 bp, Homo sapiens
ggaggccaattctggactcttgggcctccagggagaagatgaggaggaccagagcctggatgacatggagaagatatccaggggaccaacggggcgcctgyggattcaccatgccaaactggcccaggctggcgcttaccagtgcattgtggacaatggggtggcgcctccagcacgacggctgctccgtcttgttgtcag

SEQ ID NO: 211400 - DNA, 201 bp, Homo sapiens
gaggtgggaggatcacttgaggccaggagttcaaggctgcagtgagccatgactgcaccactgcacttcagcctgggcagcagagcgagaatctgtctcamaacaaacaaacaaacaaacaaacaaacaaaacaaaacaaaaagaaatccttacagtggcctctaagccccacatgctccctgtcacttccctaactttcc

SEQ ID NO: 211401 - DNA, 201 bp, Homo sapiens
ataaatccacagccaacaacatgtaattgtatatttttccttttcaaagaaaaaacctacaacattcttttttaatttttattttttatttttgtttttattttttattattattattattattattattattattattattttgagagaagtcttgctcttatcccccaggtttgagtgcaatggctcgaactctgctca

SEQ ID NO: 211402 - DNA, 201 bp, Homo sapiens
taaatccacagccaacaacatgtaattgtatatttttccttttcaaagaaaaaacctacaacattcttttttaatttttattttttatttttgtttttattttttattattattattattattattattattattattattttgagagaagtcttgctcttatcccccaggtttgagtgcaatggctcgaactctgctcac

SEQ ID NO: 211403 - DNA, 201 bp, Homo sapiens
aaatccacagccaacaacatgtaattgtatatttttccttttcaaagaaaaaacctacaacattcttttttaatttttattttttatttttgtttttattttttattattattattattattattattattattattattttgagagaagtcttgctcttatcccccaggtttgagtgcaatggctcgaactctgctcact

SEQ ID NO: 211404 - DNA, 201 bp, Homo sapiens
tcctgtgtccctgctggggactgggatggactcaggcctctagcacgatggataggggtgctgcagtccccacgtctgaagctcactccctgccagggacygcatggcggtcacatctccatgtccaacctgacattcctggcgcggcgggaggacaacggtctgaccctcacatgtgaggccttcagtgaagccttcacc

SEQ ID NO: 211405 - DNA, 201 bp, Homo sapiens
ttttctcccagccctagaacaaaatacatccccagttagggctaccattcatgttctttttgttgttgttgtttgtttggttttgctttgttttgtttttstattatgattagggaactgttttggaaattcataggacaatataatcataacttacattccacagttgccatacctgataacatggacttttaaagtttt

SEQ ID NO: 211406 - DNA, 201 bp, Homo sapiens
ggaggttgagccttcaatgagccgagctcacgccactgcactgcagcctgggcaacagagttgagaccctgtctcaagaaaaaaaagaaaaagtcttggtrtatgaaataaaaaattccaagtgtggccactttcaggtgctcaaaaatctcaccagcgatctgtttctcaccctctctcaactttgccttcatctgtggt

SEQ ID NO: 211407 - DNA, 201 bp, Homo sapiens
tcttccttcctctccccgccagatcccgcccagaaactgtggattgagggtcccccagagggccagaagctccgggctgggacccgggtgaggctggtgtrtttggctatcgggggcaacccagagccctccctcatgtggtacaaggttggtgccacgccagggctatgggggtggccaggaatgtgggggaaggaccag

SEQ ID NO: 211408 - DNA, 201 bp, Homo sapiens
cctctccaatgcctcctgtgtcgggggggtcctctggcagcggagactcaggcgtcttgctgagggtgaggagagacccttccctgccagggtggagaccygagggtgatagggaaccctgtggttgctgcatactgaaggtcttcctggggccggggtggggggcttgcatagggtcactgagccctttattcctgtttc

SEQ ID NO: 211409 - DNA, 201 bp, Homo sapiens
cggcgcgtgcatctcggcagcgtggagaaatctgggagcaccttctcccgagagctggtgctggtcacagggccgtcggacaaccaggccaagttcacgtkcaaggctggacagctcagcgcgtccacgcagctggcggtgcagtgtgagggctcgcactgctgaggcccgggggcggggcgggagggacagagccaggtg

SEQ ID NO: 211410 - DNA, 201 bp, Homo sapiens
gggatatttttctgtaaagaaggctctgagggaggtttgggggagactggtggcggggggcagcactcaacttccccccacaccttcatcctggaaggtcvgaagaggaccgagtcaggaacgaatatgaggagagccagtggacaggagagcgggacactcagagctccacggtaagtgggggtggccctggtgacccca

SEQ ID NO: 211411 - DNA, 201 bp, Homo sapiens
gtggccgccccaccccggagagccccattcaaaggctccgccgccgccaggagcgtccttctgcaagtgtcatcccgcgatcatggccagcgcgtgacctkccgcgcccacagcgccgagctccgcgaaaccgtgagctccttctatcgcctcaacgtactgtgtatgtgccccggcctgaaagcccctctcgatgccttc

SEQ ID NO: 211412 - DNA, 201 bp, Homo sapiens
gagggacttcagcccccagctgcccccgacgcaggaggaggtgtcttattcccgaggtgagttaggaccatgtcaggattccctcactcagaggtaccccygacgcctggactgggtgccttgatcgtgtctcccttccactccaactccaggtttcacaggtgaagatgaggatatggccttccctgggcacttgtatga

SEQ ID NO: 211413 - DNA, 201 bp, Homo sapiens
gaggccaattctggactcttgggcctccagggagaagatgaggaggaccagagcctggatgacatggagaagatatccaggggaccaacggggcgcctgcsgattcaccatgccaaactggcccaggctggcgcttaccagtgcattgtggacaatggggtggcgcctccagcacgacggctgctccgtcttgttgtcaga

SEQ ID NO: 211414 - DNA, 201 bp, Homo sapiens
attccagaaccttccatggctactgttgagcagcccattgtgttctgttttgcagggcactcaggattccccagtgaccaggtgtgggtggctcatgtctrtaatccaagcactttgggaggctgagacaggaggaccacctgagaccaggagttccagaccagcccaggcagcacagagagaccccatctctacaaaaaa

SEQ ID NO: 211415 - DNA, 201 bp, Homo sapiens
ggcatcgcacccaccctgaggacttccaggccatgctccccagaatctatcttgcggggagcctggaacccctctagccctcttgctgccccaaggtggayagacaatatctgacatctctgcaaacgtgaacgagggctcccagcagaaactcttcactgtggaggccacagccaggtgtggaaactgaaacaacccccc

SEQ ID NO: 211416 - DNA, 201 bp, Homo sapiens
ctgacttctcatcccagggtgacaccccggagctcagataataggcagttgctggtctgtgaggcgtctagcccagcactggaggcccccatcaaggcctmattcaccgtgaatgttctgtgtaagtggagaactgggccaactagggcgctgaggatggggagcaggcactggggggtgtggggggatcacagggattat

SEQ ID NO: 211417 - DNA, 201 bp, Homo sapiens
ctgcaagtgtcatcccgcgatcatggccagcgcgtgacctgccgcgcccacagcgccgagctccgcgaaaccgtgagctccttctatcgcctcaacgtacygtgtatgtgccccggcctgaaagcccctctcgatgccttcttgaccctaaactactccttgggtcttacctttttttccttctttttctcttctctctct

SEQ ID NO: 211418 - DNA, 201 bp, Homo sapiens
tcctggaacccctaagacatccctcccacctggggccctctcacacccagacctgtctgggcccaagtgtcttccccaagcctctgccttccaccagatgytcccaccatccgtgccctccaggaccccactgaggtgaacgtcgggggttctgtggacatagtctgcactgtcgatgccaatcccatcctcccgggcatg

SEQ ID NO: 211419 - DNA, 201 bp, Homo sapiens
ctaagacatccctcccacctggggccctctcacacccagacctgtctgggcccaagtgtcttccccaagcctctgccttccaccagatgctcccaccatcygtgccctccaggaccccactgaggtgaacgtcgggggttctgtggacatagtctgcactgtcgatgccaatcccatcctcccgggcatgttcaactggga

SEQ ID NO: 211420 - DNA, 201 bp, Homo sapiens
aacggggcgcctgcggattcaccatgccaaactggcccaggctggcgcttaccagtgcattgtggacaatggggtggcgcctccagcacgacggctgctcygtcttgttgtcagatgtgggtattacccaaacacctgacttcaagacctgccactgaacccacagccctcatgtctcccacatagctcatgttgactgcc

SEQ ID NO: 211421 - DNA, 201 bp, Homo sapiens
cctgcggattcaccatgccaaactggcccaggctggcgcttaccagtgcattgtggacaatggggtggcgcctccagcacgacggctgctccgtcttgttktcagatgtgggtattacccaaacacctgacttcaagacctgccactgaacccacagccctcatgtctcccacatagctcatgttgactgcccatcccctc

SEQ ID NO: 211422 - DNA, 201 bp, Homo sapiens
tggggaacaggtcagcacaacagaggcagagccgtattaccgctccctgagggacttcagcccccagctgcccccgacgcaggaggaggtgtcttattccygaggtgagttaggaccatgtcaggattccctcactcagaggtacccccgacgcctggactgggtgccttgatcgtgtctcccttccactccaactccagg

SEQ ID NO: 211423 - DNA, 201 bp, Homo sapiens
tgtaaggagtgcaaagacgggggtgcggggagggcgcggctgcccatcgggctcccctcaccaccccgcctaccaccccatttcagaaggagctagcctcrtgggtcagaaggccaggagcctccttggagctgagccccgagaggctggctgaagctatggactctgggcaggtaaggatctcaagcgggactgtcgggg

SEQ ID NO: 211424 - DNA, 201 bp, Homo sapiens
aatccacagccaacaacatgtaattgtatatttttccttttcaaagaaaaaacctacaacattcttttttaatttttattttttatttttgtttttatttwttattattattattattattattattattattattattttgagagaagtcttgctcttatcccccaggtttgagtgcaatggctcgaactctgctcactg

SEQ ID NO: 211425 - DNA, 201 bp, Homo sapiens
ctccctgactccccaaatttcagatgatgactctgactctataaccctgacttctcatcccagggtgacaccccggagctcagataataggcagttgctgstctgtgaggcgtctagcccagcactggaggcccccatcaaggcctcattcaccgtgaatgttctgtgtaagtggagaactgggccaactagggcgctgag

SEQ ID NO: 211426 - DNA, 201 bp, Homo sapiens
atccacagccaacaacatgtaattgtatatttttccttttcaaagaaaaaacctacaacattcttttttaatttttattttttatttttgtttttattttttattattattattattattattattattattattattttgagagaagtcttgctcttatcccccaggtttgagtgcaatggctcgaactctgctcactgc

SEQ ID NO: 211427 - DNA, 201 bp, Homo sapiens
ttctcatcccagggtgacaccccggagctcagataataggcagttgctggtctgtgaggcgtctagcccagcactggaggcccccatcaaggcctcattcrccgtgaatgttctgtgtaagtggagaactgggccaactagggcgctgaggatggggagcaggcactggggggtgtggggggatcacagggattatggaaa

SEQ ID NO: 211428 - DNA, 201 bp, Homo sapiens
ccacagccaacaacatgtaattgtatatttttccttttcaaagaaaaaacctacaacattcttttttaatttttattttttatttttgtttttattttttattattattattattattattattattattattattttgagagaagtcttgctcttatcccccaggtttgagtgcaatggctcgaactctgctcactgcaa

SEQ ID NO: 211429 - DNA, 201 bp, Homo sapiens
ctgagtgactgatatcccccagtccctccaggaccccctgtcatcgagtggccaggcctggatgaggggcacgtgcgggcaggacagagcttggagctgcsgtgcgtggcccgagggggtaatcccttagccacactgcagtggctgaaggtgagggcaaacgcgggcatggggaatggggggacagtggggtctgggagc

SEQ ID NO: 211430 - DNA, 201 bp, Homo sapiens
ctgcctcctgggttcaagcaatttttgaacctcagcctcccaagtagatgggactacaggtgtatgccaccacacccagataatttttgtatttttattcttttttattttatttttttgagacagagtctcactctgtagtccaggttggagtgcagtggcgttatttcggctcactgcatcctctgcctcctggttcaa

SEQ ID NO: 211431 - DNA, 201 bp, Homo sapiens
tcgcccagggtagtctcaaactcctcggtcttggcctcccaaagtgttgggattacaaacgtgagaaccgtattttcaaatgtattcaataacactacagygtttccaattttaagaggaagcaattgccacaaaagtgattaagtagcctgtcctggatcacaaagcccggtgtcctgagcccagggatccttgctccgg

SEQ ID NO: 211432 - DNA, 201 bp, Homo sapiens
ccgcgatcatggccagcgcgtgacctgccgcgcccacagcgccgagctccgcgaaaccgtgagctccttctatcgcctcaacgtactgtgtatgtgccccrgcctgaaagcccctctcgatgccttcttgaccctaaactactccttgggtcttacctttttttccttctttttctcttctctctctctctctctttcatt

SEQ ID NO: 211433 - DNA, 201 bp, Homo sapiens
atcacagaggcatagtggagggtggagacaacctcaccaaccttgagaactctcctccaaccctttggtattaagggcagattgtgtccacacccataacyttcctggaacccctaagacatccctcccacctggggccctctcacacccagacctgtctgggcccaagtgtcttccccaagcctctgccttccaccagat

SEQ ID NO: 211434 - DNA, 201 bp, Homo sapiens
gaagctccgggctgggacccgggtgaggctggtgtgtttggctatcgggggcaacccagagccctccctcatgtggtacaaggttggtgccacgccagggytatgggggtggccaggaatgtgggggaaggaccaggccccttctctccttcagaatcttgggcaatcttggaaaaagattaaatttcttgaaaagtacta

SEQ ID NO: 211435 - DNA, 201 bp, Homo sapiens
gtgcctcagtttccccatctagaaaatggggggataataacagttggtacattagagagtggtaaatattaaatgagttaaatatttggtgggtgtctgaratagctccctgagggcctaagactacgccccaagtcaagcaggagacaatcctctgacaggggaggaggaaaccaggctgctgcctccaggtcttccctt

SEQ ID NO: 211436 - DNA, 201 bp, Homo sapiens
ccccaagcctctgccttccaccagatgctcccaccatccgtgccctccaggaccccactgaggtgaacgtcgggggttctgtggacatagtctgcactgtygatgccaatcccatcctcccgggcatgttcaactgggagagactggtgaggatccagcctttggtgaatagaggtggggtcaaggggttgtggtttcttg

SEQ ID NO: 211437 - DNA, 201 bp, Homo sapiens
ccgccgccaggagcgtccttctgcaagtgtcatcccgcgatcatggccagcgcgtgacctgccgcgcccacagcgccgagctccgcgaaaccgtgagctcyttctatcgcctcaacgtactgtgtatgtgccccggcctgaaagcccctctcgatgccttcttgaccctaaactactccttgggtcttacctttttttcct

SEQ ID NO: 211438 - DNA, 201 bp, Homo sapiens
ctctgtccctgcagttccccctagtgccattattatcttgggatctgcatcccagactgagaacaagaacgtgacactctcctgtgtcagcaagtccagtygcccgcgggttctgctacgatggtggctgggctggcggcagctgctgcccatggaggagacagtcatggatgtgaggcgggggccaggctcctgggtctg

SEQ ID NO: 211439 - DNA, 201 bp, Homo sapiens
ggactcttgggcctccagggagaagatgaggaggaccagagcctggatgacatggagaagatatccaggggaccaacggggcgcctgcggattcaccatgmcaaactggcccaggctggcgcttaccagtgcattgtggacaatggggtggcgcctccagcacgacggctgctccgtcttgttgtcagatgtgggtattac

SEQ ID NO: 211440 - DNA, 201 bp, Homo sapiens
agtctcactttgtcacccaggctgcgaatacagtggcacgatctcggcttattgcatcctctgcctccttgtttcaagtgattctcctgccccagcctccygagtagctgggactacaggcgcccaccaccacgcctagctaactttttgtatttttagtagagacggggtttcaccatgttggtcaggctggtctcgaac

SEQ ID NO: 211441 - DNA, 201 bp, Homo sapiens
actgaagtcaaggggctcggcccaggccacttggcgagggagggacagaagaaagagccaagccattctctcagttaataagcattgaatgaaactaggtrcagtgactcatgcctgtaatcccagcactttgggagaccaaggcaggtggattgcttgaggtcaggagtttgagaccagcctgggcaacatagtgaaacc

SEQ ID NO: 211442 - DNA, 201 bp, Homo sapiens
gccctgacttccggctccccctgcaggtgaattccacctgcacatcgaggcctgtgacctcagcgatgacgcggagtatgagtgccaggtcggccgctctragatggggcccgagctcgtgtctcccagagtgatcctctccatcctgggtatgggtgagagacgcccaggacccatgagtctgggcttcaagccctcccc

SEQ ID NO: 211443 - DNA, 201 bp, Homo sapiens
gattttagtaaaagctaaaacacttttttctgggaagttaagcaggggcatgtatcccccagatcttcaatgaagacctacagggcatctctccatggttstaactccactttttgcctgtcagggaccctgggacctccactggcctgaagacacatatcaggatccaagaggaatctatgaccaggtggccggagactt

SEQ ID NO: 211444 - DNA, 201 bp, Homo sapiens
cactgaagtcaaggggctcggcccaggccacttggcgagggagggacagaagaaagagccaagccattctctcagttaataagcattgaatgaaactaggygcagtgactcatgcctgtaatcccagcactttgggagaccaaggcaggtggattgcttgaggtcaggagtttgagaccagcctgggcaacatagtgaaac

SEQ ID NO: 211445 - DNA, 201 bp, Homo sapiens
cactgcactccagcctgggtgaaagagtgagactcttttttttttttttttttttttgagacagggtctcattctgtcacccaggctggagtgcagtagcrtgatctcggctcactgcaacctctgcctccccagttcaagtgattcccctgcctcagcctcccaagtaactgggactacaggtgcctgccaccacaccca

SEQ ID NO: 211446 - DNA, 201 bp, Homo sapiens
tcccgcgatcatggccagcgcgtgacctgccgcgcccacagcgccgagctccgcgaaaccgtgagctccttctatcgcctcaacgtactgtgtatgtgccycggcctgaaagcccctctcgatgccttcttgaccctaaactactccttgggtcttacctttttttccttctttttctcttctctctctctctctctttca

SEQ ID NO: 211447 - DNA, 201 bp, Homo sapiens
ggctcccggctctcaggcgcatttctccgagcatccgtctatgggcagtttgtggctggtgagacagcagaggaggtgaagggctgcgtgcagcagctgcrgaccctcagcctccgaccactgctggcagtgcccactgaggaggagccggactctgctgccaagagtgggtgagtagggagccagggcccagggaggctg

SEQ ID NO: 211448 - DNA, 201 bp, Homo sapiens
cccaggagcacggcatcacactgcaggtcacctgtgagtcctggtgccagctgcccccctgtcggtctgtgcctcagagaaccatctgtgtgtgcccccarattatgcctactggatgccaaagatctcagcatctgtctccagtcctgttctgtctgggctggtctgtgagaaatccagcccagcttagtgtcttccttc

SEQ ID NO: 211449 - DNA, 201 bp, Homo sapiens
gcactcaggattccccagtgaccaggtgtgggtggctcatgtctgtaatccaagcactttgggaggctgagacaggaggaccacctgagaccaggagttcyagaccagcccaggcagcacagagagaccccatctctacaaaaaacacaaaaattacccagctgtggtgccacactcctgtagtcccagcaactcgggaga

SEQ ID NO: 211450 - DNA, 201 bp, Homo sapiens
ctcagctgcgaggcccacaacagcgtgtctgcagggacccaggagcacggcatcacactgcaggtcacctgtgagtcctggtgccagctgcccccctgtcrgtctgtgcctcagagaaccatctgtgtgtgcccccaaattatgcctactggatgccaaagatctcagcatctgtctccagtcctgttctgtctgggctgg

SEQ ID NO: 211451 - DNA, 201 bp, Homo sapiens
gtccctgcagttccccctagtgccattattatcttgggatctgcatcccagactgagaacaagaacgtgacactctcctgtgtcagcaagtccagtcgccygcgggttctgctacgatggtggctgggctggcggcagctgctgcccatggaggagacagtcatggatgtgaggcgggggccaggctcctgggtctgagca

SEQ ID NO: 211452 - DNA, 201 bp, Homo sapiens
cgggcaggacagagcttggagctgccgtgcgtggcccgagggggtaatcccttagccacactgcagtggctgaaggtgagggcaaacgcgggcatggggawtggggggacagtggggtctgggagccagtcctgagctggcccaggcctgtccctgtctccagaatggccagccggtgtccacagcgtggggcacagagca

SEQ ID NO: 211453 - DNA, 201 bp, Homo sapiens
ctgaagctcactccctgccagggactgcatggcggtcacatctccatgtccaacctgacattcctggcgcggcgggaggacaacggtctgaccctcacatktgaggccttcagtgaagccttcaccaaggagaccttcaagaagtcgctcatcctgaacgtaaaatgtgagcccctgccctggcccagcaatgcccccaag

SEQ ID NO: 211454 - DNA, 201 bp, Homo sapiens
cagagaaaaagtcattcttccttcctctccccgccagatcccgcccagaaactgtggattgagggtcccccagagggccagaagctccgggctgggacccrggtgaggctggtgtgtttggctatcgggggcaacccagagccctccctcatgtggtacaaggttggtgccacgccagggctatgggggtggccaggaatg

SEQ ID NO: 211455 - DNA, 201 bp, Homo sapiens
tcattggccaaagcaagtcacatggctcaacacagagtcagtgtggaaaggccccgcactcaaggatgtgactactgggagatgattgcaaccatttggcaaaaaaatccccttcagagcccgagaaaaaggttgcaagtgacagaaatgcagctgttttgtcaacacgaaaaagaatggcttggctgggcacagtggctc

SEQ ID NO: 211456 - DNA, 201 bp, Homo sapiens
tacataacttgcccaaggtcacacagtaggtggtgaagcctggattcgagccctgattctaggctcataaccccctcaataaatagtacctaactgatatygctcatttttagatttctagcaacttataagcttttccccacttcccctgctgccccctagaacctccaggtctcctgcctcaatgctgagcagaaccag

SEQ ID NO: 211457 - DNA, 201 bp, Homo sapiens
aaccccatctctactaaaaatacaaaaatgagccgggcgtcgtggcaagcgcctataatcccagccattctggaggctgaggcatgagaatcgcttgaacytggaggcagagcttgcagtgagctgagattgcaccactgcactccagcctgggcaacagagcgagactctgtctcagaaaaacaccaaaaacgaaaaaac

SEQ ID NO: 211458 - DNA, 201 bp, Homo sapiens
tatctagtgcctggattttgaaataggatggacatggggctggaactcctgagtcttagggaggaactcaagtcatggggctgtttttccaggcacttgaygccgcttccccttcctggctctctggggctacggacatggaaagatggagagcccaaggtcccaggagcatgcagagaaggaaaacagccaaggtggagg

SEQ ID NO: 211459 - DNA, 201 bp, Homo sapiens
gggctgtttttccaggcacttgacgccgcttccccttcctggctctctggggctacggacatggaaagatggagagcccaaggtcccaggagcatgcagaraaggaaaacagccaaggtggagggtggaaggtttgtgcttattaaaggccccagcaagggacagctccacgctctggcacctagggacaccatctggcga

SEQ ID NO: 211460 - DNA, 201 bp, Homo sapiens
tccttagccagttccccatttatggacatttgggctgttgctagtgatgttctgttgacaatgcagcagtgataaccttggggaaatgtcatcttgtgcaygtgatgcgaccctctcctgtgagaccgccgccactgtcccaaagacttcatatcccccttatctcactccatcctcacaacagtgttgctcggaaactca

SEQ ID NO: 211461 - DNA, 201 bp, Homo sapiens; identical to SEQ ID NO: 37464

SEQ ID NO: 211462 - DNA, 201 bp, Homo sapiens
tcacggctcatatctctaatctcagcaggctgaggtaggtggattgcttgagcccaggtattggagaccagcctgggcaacacaataataccccatctttaaaaaaaaaaaagttaagccgagcatggtggctcacacctgtaatcccagcactctgagaggctgaggtgggtggattacctgaggtcaagagttcgagac

SEQ ID NO: 211463 - DNA, 201 bp, Homo sapiens
cgcagaccaggccgcccctaacctctgagtctcgctcctccaaccccgtctcccagttcccccaactaacgtgacgatcctggccaacgcatccgcactgygcccgggagacgccttaaacttgacatgcgtcagcgtcagcagcaatccgccggtcaacttgtcctgggacaaggaaggggagaggtgggagtgcgaggg

SEQ ID NO: 211464 - DNA, 201 bp, Homo sapiens
gtcagaggatggaaagggctttgtttgttttgcgtgtggggaacaggtcagcacaacagaggcagagccgtattaccgctccctgagggacttcagccccyagctgcccccgacgcaggaggaggtgtcttattcccgaggtgagttaggaccatgtcaggattccctcactcagaggtacccccgacgcctggactgggt

SEQ ID NO: 211465 - DNA, 201 bp, Homo sapiens
agtctgaccccacactccgtggggctggagtggaagcctggctttgatgggggcctgccacagaggttctgcatcaggtgggtccttgtcgaggcaggagsgaagggaatgggctagggcacttccctgaatttactatccccctgtcctgcaggtatgaggccctggggactccagggttccactatgtggatgtcgtac

SEQ ID NO: 211466 - DNA, 201 bp, Homo sapiens
tgtctgggattcactgaggggtatcttccacccctaggaccctcggggctgcccctgctgcctgtgctgttcgctcttggggggcttctgctcctctccartgcctcctgtgtcgggggggtcctctggcagcggagactcaggcgtcttgctgagggtgaggagagacccttccctgccagggtggagacccgagggtga

SEQ ID NO: 211467 - DNA, 201 bp, Homo sapiens
taaggtgggaggattgcttgagctggcaagtttgagagcgaagaaagaaagagagggagggaggaaggaaggaaggaaggaaaggaaggaaggaaggaagraagaaagaaataaagaaagaaagaaaaaagggccaggtgctgtagctcacacctgtaatcccagcactttgggaggctaagtggggctggatcacttgag

SEQ ID NO: 211468 - DNA, 201 bp, Homo sapiens
cggagactcaggcgtcttgctgagggtgaggagagacccttccctgccagggtggagacccgagggtgatagggaaccctgtggttgctgcatactgaagrtcttcctggggccggggtggggggcttgcatagggtcactgagccctttattcctgtttccttcaggcatctcagagaagacagaggcagggtaagtggg

SEQ ID NO: 211469 - DNA, 201 bp, Homo sapiens
gagggaagggaatgggctagggcacttccctgaatttactatccccctgtcctgcaggtatgaggccctggggactccagggttccactatgtggatgtcstaccaccccaggccaccaccttcacgctgactggtctacagccttctacaagatacagggtctggctgctggccagtaatgccttgggggacagtggact

SEQ ID NO: 211470 - DNA, 201 bp, Homo sapiens
ctcaaaaaaaaaaaaaaaaaaaaaaaaaaaaggctgggcacagtggctcacgcctgtaatcccagcactttgggaggctgaggcgggcggatcacgaggtsaggagatcgagaccatcctggctaacacggtgaaactccgtctctactaaaaatacaaaaaattagccaggcgtggtggcaggtgcctgtagtcccagct

SEQ ID NO: 211471 - DNA, 201 bp, Homo sapiens
actgcaggtacagccgagcccagcaactctccccctagccagcccgtcccagcgtggagagaacactcttacctggtaggtccctttggccccctagggcyagcccactcttagtccactgaactagcccccagtaggcgcccagagcacacggcagccgggcttcctcccccagcagcaccaccaggtcctctggctgtt

SEQ ID NO: 211472 - DNA, 201 bp, Homo sapiens
agcctggatgacatggagaagatatccaggggaccaacggggcgcctgcggattcaccatgccaaactggcccaggctggcgcttaccagtgcattgtggwcaatggggtggcgcctccagcacgacggctgctccgtcttgttgtcagatgtgggtattacccaaacacctgacttcaagacctgccactgaacccacag

SEQ ID NO: 211473 - DNA, 201 bp, Homo sapiens
cactccagcctgggcaacagagcgagactctgtctcagaaaaacaccaaaaacgaaaaaacaaaacccactctccctgcagggcaggccggctatgtagtrtataagtccattccctatggctccttggaggaggtaatcccctacctgatccggagggcccaggagaaccggagcgtgcttcagggtgcccgcagggaac

SEQ ID NO: 211474 - DNA, 201 bp, Homo sapiens
ccccggggcttctgggccctgcctgaaaacctgacggtggtggagggggcctcagtggagctgcgttgtggggtcagcacccctggcagtgcggtgcaatsggccaaagatgggctgctcctgggccccgaccccaggatcccaggcttcccgaggtaccgcctggaaggggaccctgctagaggtaagggatcagagcct

SEQ ID NO: 211475 - DNA, 201 bp, Homo sapiens
cttctctgtccctgcagttccccctagtgccattattatcttgggatctgcatcccagactgagaacaagaacgtgacactctcctgtgtcagcaagtccmgtcgcccgcgggttctgctacgatggtggctgggctggcggcagctgctgcccatggaggagacagtcatggatgtgaggcgggggccaggctcctgggt

SEQ ID NO: 211476 - DNA, 201 bp, Homo sapiens
tgtccctgcagttccccctagtgccattattatcttgggatctgcatcccagactgagaacaagaacgtgacactctcctgtgtcagcaagtccagtcgcycgcgggttctgctacgatggtggctgggctggcggcagctgctgcccatggaggagacagtcatggatgtgaggcgggggccaggctcctgggtctgagc

SEQ ID NO: 211477 - DNA, 201 bp, Homo sapiens
cattattatcttgggatctgcatcccagactgagaacaagaacgtgacactctcctgtgtcagcaagtccagtcgcccgcgggttctgctacgatggtggstgggctggcggcagctgctgcccatggaggagacagtcatggatgtgaggcgggggccaggctcctgggtctgagcatggagggggctgagggcatgact

SEQ ID NO: 211478 - DNA, 201 bp, Homo sapiens
gcgggcggcccccggcatcgcatcctgtccagcggggctctgcatctgtggaatgtgacccgcgcggacgacggcctctatcagctgcactgccagaactstgagggcaccgcggaagcgcggctgcggctggacgtgcactgtgagccccgcccaccatggaaaccacacccacccaaggaaccttgcccattgtggagt

SEQ ID NO: 211479 - DNA, 201 bp, Homo sapiens
acccctaagacatccctcccacctggggccctctcacacccagacctgtctgggcccaagtgtcttccccaagcctctgccttccaccagatgctcccacyatccgtgccctccaggaccccactgaggtgaacgtcgggggttctgtggacatagtctgcactgtcgatgccaatcccatcctcccgggcatgttcaact

SEQ ID NO: 211480 - DNA, 201 bp, Homo sapiens
gtcttgctgagggtgaggagagacccttccctgccagggtggagacccgagggtgatagggaaccctgtggttgctgcatactgaaggtcttcctggggcyggggtggggggcttgcatagggtcactgagccctttattcctgtttccttcaggcatctcagagaagacagaggcagggtaagtggggatatttttctgt

SEQ ID NO: 211481 - DNA, 201 bp, Homo sapiens
ctctccaatgcctcctgtgtcgggggggtcctctggcagcggagactcaggcgtcttgctgagggtgaggagagacccttccctgccagggtggagacccsagggtgatagggaaccctgtggttgctgcatactgaaggtcttcctggggccggggtggggggcttgcatagggtcactgagccctttattcctgtttcc

SEQ ID NO: 211482 - DNA, 201 bp, Homo sapiens
ctgagccctttattcctgtttccttcaggcatctcagagaagacagaggcagggtaagtggggatatttttctgtaaagaaggctctgagggaggtttggrggagactggtggcggggggcagcactcaacttccccccacaccttcatcctggaaggtcggaagaggaccgagtcaggaacgaatatgaggagagccagt

SEQ ID NO: 211483 - DNA, 201 bp, Homo sapiens
gaaagaccctgtctctacaaacaaattttaaaaaattagctggagtggtggtgtgcacctgtagtcccagctattcaggaggctgaggcaggaggatcacytgagcccaggaagttgaggctgcaatgaaccaagatcatgccactgccctccagcctgggcaacagagcaagattccatctcaaaagaaagaaagataaa

SEQ ID NO: 211484 - DNA, 201 bp, Homo sapiens
ctgctagaggtaagggatcagagcctgagaccctcagccaccagcggaagctgcggccctgacttccggctccccctgcaggtgaattccacctgcacatygaggcctgtgacctcagcgatgacgcggagtatgagtgccaggtcggccgctctgagatggggcccgagctcgtgtctcccagagtgatcctctccatcc

SEQ ID NO: 211485 - DNA, 201 bp, Homo sapiens
tacagtataagagtcagccacgcaaaaaaggtgaaatgaagtggggagagatggtggggtgcaatggctcatgcctgtaatcccagcagtttgggaggccraggcaggcggatcacttgaggtcaggagtttgagaccagcctagccatcatggtgaaacctcgtctctactaaaactacaaaaatcagccaggcatggtg

SEQ ID NO: 211486 - DNA, 201 bp, Homo sapiens
ctctaattatcacagaggcatagtggagggtggagacaacctcaccaaccttgagaactctcctccaaccctttggtattaagggcagattgtgtccacayccataactttcctggaacccctaagacatccctcccacctggggccctctcacacccagacctgtctgggcccaagtgtcttccccaagcctctgccttc

SEQ ID NO: 211487 - DNA, 201 bp, Homo sapiens
tatttatagccaggcatggttggcacatgcctataatcccaacactttgggaggcgaaggtggaggattgtttgagaccagcctgggcaacacagcaagamcccatttctacaacaaattaaaaaaaaaaaaacagctgggtgtggtggcgcacacctgtagtcccagctattccggaggtggaaggatcacttgagccca

SEQ ID NO: 211488 - DNA, 201 bp, Homo sapiens
aaagaaggcagtctatttctttttcagtcagacgtgagtggccctgctcaagtcaaccgagtctacatgaatgagccagttcactgggggttcaacccatgggaaaaggtgaaagaatgtggaggaggcacaaccctgccttgtggcccaggcccagaaatggtgcacaccactctgctctcactcccctggtgggaagag

SEQ ID NO: 211489 - DNA, 201 bp, Homo sapiens
tatttccatgttacaagcatatccactcccgaagtgtttgctgaacatctatcttgttccagacacggtgctaggggccgaggaagcatgaaggcaaaatycctgacctcgaggcacttacttgcaagtcaggggcaagagacaataattaaaaccaaagtcagaatcccagcactttggaaggctgaggtgggaggatcg

SEQ ID NO: 211490 - DNA, 201 bp, Homo sapiens
aaaaaaaaaaaaagacctaggacttcacgcctgtaatcccagcatgttgggaggacaagtagggtggatcacttgaggtcaggagctcaagaccagcctgrccaacatggtgaaaccccatatctacaaaaatacaaaaattagccaggtgtggtggtgggtgcctgtagtcccagctactcagggggctaaagcagaaga

SEQ ID NO: 211491 - DNA, 201 bp, Homo sapiens
gacgggggtgcggggagggcgcggctgcccatcgggctcccctcaccaccccgcctaccaccccatttcagaaggagctagcctcgtgggtcagaaggccrggagcctccttggagctgagccccgagaggctggctgaagctatggactctgggcaggtaaggatctcaagcgggactgtcggggacagagtgccttgga

SEQ ID NO: 211492 - DNA, 201 bp, Homo sapiens
ctgcgctcagtggaaactgagctataaatgggagctcctggggcctcgccagtttccgcgccctgggggatgcggggtccggggctcccccgggcctgcgygtcgggaagagggcacaccgatacctgggggacagttgggacccctacctcgactcccccagcctcaaaacccctcctcaaaatatccctctgttccctt

SEQ ID NO: 211493 - DNA, 201 bp, Homo sapiens
tgagctataaatgggagctcctggggcctcgccagtttccgcgccctgggggatgcggggtccggggctcccccgggcctgcgtgtcgggaagagggcacrccgatacctgggggacagttgggacccctacctcgactcccccagcctcaaaacccctcctcaaaatatccctctgttcccttgttattgctgcaaacta

SEQ ID NO: 211494 - DNA, 201 bp, Homo sapiens
ggcttaaagacagtcggctgggcatgatggtccatgcctgtaatcccaacactttgggaggccaaggcaggaggatcgcttgagcccataagtttgagacragcctgggcaatatagtgacttgtctctacaaaacattttttaaaatgagccaggcatggaggtgtgcacctgtagtctcagctactcaggaggctgagc

SEQ ID NO: 211495 - DNA, 201 bp, Homo sapiens
gagctttgatggcggggccttccaccttaagggcacaggagagctgacacgggccttgctggttctccggctgtgtgcctggcccccactcgtcactcacrggctgttggtgagcagtgatcctgaggaccagcctggaggctcctcatagcctggcgctgagccctcgctccctgtcacccagctccaggcctggtctcg

SEQ ID NO: 211496 - DNA, 201 bp, Homo sapiens
tctgagaggggagggatctgggggcctacactcccggcttctgtgtggcttatctagtgcctggattttgaaataggatggacatggggctggaactcctragtcttagggaggaactcaagtcatggggctgtttttccaggcacttgacgccgcttccccttcctggctctctggggctacggacatggaaagatggag

SEQ ID NO: 211497 - DNA, 201 bp, Homo sapiens
aggaggataacttgaggtcaggagttcgagaccagcctggccaacatggtgaaaccccatctctactaaaaatacaaaaatgagccgggcgtcgtggcaascgcctataatcccagccattctggaggctgaggcatgagaatcgcttgaacctggaggcagagcttgcagtgagctgagattgcaccactgcactccagc

SEQ ID NO: 211498 - DNA, 201 bp, Homo sapiens
ggcccagggaggctgggaggacgcaggaaggggctttgctgttcgggccctgacacctgctggctgggcagtgaggcgtggtatgaggggaacctcggtgmtatgctgcggtgtgtggacctgtcacggggcctcctggagccccccagcctggctgaggccagcctcatgcagctgaaggtgacggcgctgaccagtact

SEQ ID NO: 211499 - DNA, 201 bp, Homo sapiens
tactcccagctcctcagggggctgaggcaggagaatcacttgaacccaagaagtggaggttgcagtgagctgagattgtaccactgcactccagcctgggygatagagccagattctgtctcaaaagacaaacaaacaaataaacaaacaaaaaaacttcatgggaacctcagttctagagtcccaagcactaaagttttg

SEQ ID NO: 211500 - DNA, 201 bp, Homo sapiens
ctactcaggaggctgatgcgggaggattgattgagcccaggaggttgagccttcaatgagccgagctcacgccactgcactgcagcctgggcaacagagtygagaccctgtctcaagaaaaaaaagaaaaagtcttggtatatgaaataaaaaattccaagtgtggccactttcaggtgctcaaaaatctcaccagcgatc

SEQ ID NO: 211501 - DNA, 201 bp, Homo sapiens
attgattgagcccaggaggttgagccttcaatgagccgagctcacgccactgcactgcagcctgggcaacagagttgagaccctgtctcaagaaaaaaaaraaaaagtcttggtatatgaaataaaaaattccaagtgtggccactttcaggtgctcaaaaatctcaccagcgatctgtttctcaccctctctcaactttg

SEQ ID NO: 211502 - DNA, 201 bp, Homo sapiens
gcagagccgtattaccgctccctgagggacttcagcccccagctgcccccgacgcaggaggaggtgtcttattcccgaggtgagttaggaccatgtcaggwttccctcactcagaggtacccccgacgcctggactgggtgccttgatcgtgtctcccttccactccaactccaggtttcacaggtgaagatgaggatatg

SEQ ID NO: 211503 - DNA, 201 bp, Homo sapiens
tgtatatgttgggattttagtaaaagctaaaacacttttttctgggaagttaagcaggggcatgtatcccccagatcttcaatgaagacctacagggcatstctccatggttctaactccactttttgcctgtcagggaccctgggacctccactggcctgaagacacatatcaggatccaagaggaatctatgaccaggt

SEQ ID NO: 211504 - DNA, 201 bp, Homo sapiens
gaagcttaccccagacccttctctcaccagttcctcccaagctgctcctgctgaccccagaggcaggcaccatggtcacctgggtagctgggcaggagtasgtggtcaactgtgtgtctggggacgcgaagccagcacctgacatcaccattctcctgagtgagtgtgggtgaactgggtggcagggggcagcatgaagcc

SEQ ID NO: 211505 - DNA, 201 bp, Homo sapiens
taaaacacttttttctgggaagttaagcaggggcatgtatcccccagatcttcaatgaagacctacagggcatctctccatggttctaactccactttttkcctgtcagggaccctgggacctccactggcctgaagacacatatcaggatccaagaggaatctatgaccaggtggccggagacttggacactctggaacc

SEQ ID NO: 211506 - DNA, 201 bp, Homo sapiens
tctcgctcctccaaccccgtctcccagttcccccaactaacgtgacgatcctggccaacgcatccgcactgcgcccgggagacgccttaaacttgacatgmgtcagcgtcagcagcaatccgccggtcaacttgtcctgggacaaggaaggggagaggtgggagtgcgagggatccctcccctctctggtctggcctcgcc

SEQ ID NO: 211507 - DNA, 201 bp, Homo sapiens
ttttgtagcaacggggtctcactatgttgcccaggctggtcttgaacccctgggctcaagcagttctcctgcgttggcctctcaaagtgctgggattacaggcgcgtgccactatgctaggctgattttttgtacttttaattttaaatagagatggcattactctatgttgcccgggccgatcttgaacaccttgactca

SEQ ID NO: 211508 - DNA, 201 bp, Homo sapiens
tggataggggtgctgcagtccccacgtctgaagctcactccctgccagggactgcatggcggtcacatctccatgtccaacctgacattcctggcgcggcrggaggacaacggtctgaccctcacatgtgaggccttcagtgaagccttcaccaaggagaccttcaagaagtcgctcatcctgaacgtaaaatgtgagccc

SEQ ID NO: 211509 - DNA, 201 bp, Homo sapiens
ccaggcacttgacgccgcttccccttcctggctctctggggctacggacatggaaagatggagagcccaaggtcccaggagcatgcagagaaggaaaacarccaaggtggagggtggaaggtttgtgcttattaaaggccccagcaagggacagctccacgctctggcacctagggacaccatctggcgagggcccccagg

SEQ ID NO: 211510 - DNA, 201 bp, Homo sapiens
ataggcttaagaagaggctgagaaatatttaaagcttatctcagattcttagtgttaagtcacaatctgtatatccaccccccaggtctccaccagccttytggagaacctgaagaccagctgcccacagagccaccttcaggcaagtcctcagtcccctgatccctcccggctcccctgagaatggaacctcctggtctc

SEQ ID NO: 211511 - DNA, 201 bp, Homo sapiens
caggcacttgacgccgcttccccttcctggctctctggggctacggacatggaaagatggagagcccaaggtcccaggagcatgcagagaaggaaaacagycaaggtggagggtggaaggtttgtgcttattaaaggccccagcaagggacagctccacgctctggcacctagggacaccatctggcgagggcccccagga

SEQ ID NO: 211512 - DNA, 201 bp, Homo sapiens
cagctagtagaattgtcctaaatgttttgttaaaaacacacgttgggtcaaatgcctgtgtctaaacaatcactgtggagagaggaatggagactcttatyttccaggccgggccatgtgcccactgtggagtcctgcctgaacccaagactgagattggggagtggctgttctccccaggggaaaaaagtgctattagta

SEQ ID NO: 211513 - DNA, 201 bp, Homo sapiens
cagccttgtcctcagggatatagcagccaagtcagcctgatattggctgggatggaagttggtggaaagaagtcatttgaggctgggcacggtggctcgcrcctataatgccagcactttgggacgccaaggtgggcagaccacttgaagccaggagttcaagaacagcctgtccaacatggcgaaactccgtctctatta

SEQ ID NO: 211514 - DNA, 201 bp, Homo sapiens
ggagggcaaggagtcaagcatgtgagggaagatggaagtccagcatcgaggatgaagctgggggctgaggccagatgcctcatcttgttcctgggaacgakattggcgggggtcttggggaggtagggagaaaactagcatttccaattcccgcaggagataagcaggcagaagaagcttatcccaggcaagtgtatgtgc

SEQ ID NO: 211515 - DNA, 201 bp, Homo sapiens
cactggagccttgacttaccaggttcaagcaatcctcttgcttcagtgtcccgagtagctgggactatagacatgcaccaccatgctgctaaatttttaawtttttttgtaaagaatcagcctcactatgttgcctaggctggtcttgagctcctaggctcaagcgattctcccaccttgacctcccaacatgctgggatt

SEQ ID NO: 211516 - DNA, 201 bp, Homo sapiens
aaaatctagatttgtatcctacgagattagaaatcttcaaagaaagagtatacctgttttccagtggccccaaatgcccaatgctgacacttaattggtcyagcttgggtcacatcctcatcactgaacacatccctgagtcaggggatggaatatgctaacaggagaggcctgggccagttcaccatgggatcagggagt

SEQ ID NO: 211517 - DNA, 201 bp, Homo sapiens
agatcctagctcctcaccagcatggcgcaaagcgctgtccatggtgctggaccatatgcactctctaaagcgtagatggaggctgcacgctttttccgaamagggccggatagtagtaaatgctttgggctgtgtgggacatacggtcttcctcaaactctacacaaactctgccaccgtaaagtaaaagcagccatagac

SEQ ID NO: 211518 - DNA, 201 bp, Homo sapiens
cagtggctcataatcccagtgacttataatcccagcactttgggaggctgagacgggtggatcgattgaactcaggagttcaagaccagcctgggccacartggaaacctcgtctttaaaaaaaaaaaaaattcaaaagttagctgggtgtggtgatgcatgcctgtagtcccagctacttgggaggctgaagtgggagga

SEQ ID NO: 211519 - DNA, 201 bp, Homo sapiens
cccgagctcgtgtctcccagagtgatcctctccatcctgggtatgggtgagagacgcccaggacccatgagtctgggcttcaagccctcccctaccccgcracccggaagtccaagcccccagcctctcctctcccagactctgggtaccgaactccaatcttcaagtccttctcagtgctggaagcttaccccagaccct

SEQ ID NO: 211520 - DNA, 201 bp, Homo sapiens
gagacgcccaggacccatgagtctgggcttcaagccctcccctaccccgcaacccggaagtccaagcccccagcctctcctctcccagactctgggtaccraactccaatcttcaagtccttctcagtgctggaagcttaccccagacccttctctcaccagttcctcccaagctgctcctgctgaccccagaggcaggca

SEQ ID NO: 211521 - DNA, 201 bp, Homo sapiens
gctgctcagccaagaactgtggcggcggctgctgccaggatgccgaaggataccccactagcacccctgagggggtcatgtggtcaataaaagtccttagstgctgcctaagctgctgtcctgcactgacgccgcctccttggggaagggctcatcttgacctcagccagcccaagctaggggttttgcagttcaagagag

SEQ ID NO: 211522 - DNA, 201 bp, Homo sapiens
ccagcctggccacctctagctgtgtgacctggggacaagagatagaacccctctcagcttcagtctccccactctgttaaaatggaataagaacatctgcytcccagagttgatgtgggaattagatgagtgattagctttctccaaagcaaacagaattctgcacaaagggttttaactaaaggaaatgtggtgaagagg

SEQ ID NO: 211523 - DNA, 201 bp, Homo sapiens
gaggaggtaatcccctacctgatccggagggcccaggagaaccggagcgtgcttcagggtgcccgcagggaacaggagctgctcagccaagaactgtggcrgcggctgctgccaggatgccgaaggataccccactagcacccctgagggggtcatgtggtcaataaaagtccttaggtgctgcctaagctgctgtcctgc

SEQ ID NO: 211524 - DNA, 201 bp, Homo sapiens
tcctggctacttgggaggctaaggtgggaggattgcttgagctggcaagtttgagagcgaagaaagaaagagagggagggaggaaggaaggaaggaaggaaaggaaggaaggaaggaaggaagaaagaaataaagaaagaaagaaaaaagggccaggtgctgtagctcacacctgtaatcccagcactttgggaggctaag

SEQ ID NO: 211525 - DNA, 201 bp, Homo sapiens
cctggctacttgggaggctaaggtgggaggattgcttgagctggcaagtttgagagcgaagaaagaaagagagggagggaggaaggaaggaaggaaggaaaggaaggaaggaaggaaggaagaaagaaataaagaaagaaagaaaaaagggccaggtgctgtagctcacacctgtaatcccagcactttgggaggctaagt

SEQ ID NO: 211526 - DNA, 201 bp, Homo sapiens
ctggctacttgggaggctaaggtgggaggattgcttgagctggcaagtttgagagcgaagaaagaaagagagggagggaggaaggaaggaaggaaggaaaggaaggaaggaaggaaggaagaaagaaataaagaaagaaagaaaaaagggccaggtgctgtagctcacacctgtaatcccagcactttgggaggctaagtg

SEQ ID NO: 211527 - DNA, 201 bp, Homo sapiens
tggctacttgggaggctaaggtgggaggattgcttgagctggcaagtttgagagcgaagaaagaaagagagggagggaggaaggaaggaaggaaggaaaggaaggaaggaaggaaggaagaaagaaataaagaaagaaagaaaaaagggccaggtgctgtagctcacacctgtaatcccagcactttgggaggctaagtgg

SEQ ID NO: 211528 - DNA, 201 bp, Homo sapiens
ttctgggaagttaagcaggggcatgtatcccccagatcttcaatgaagacctacagggcatctctccatggttctaactccactttttgcctgtcagggaycctgggacctccactggcctgaagacacatatcaggatccaagaggaatctatgaccaggtggccggagacttggacactctggaacccgattctctgcc

SEQ ID NO: 211529 - DNA, 201 bp, Homo sapiens
actcgtggatagggaaggggtgggtccagcagcctggggggctttctccttgaggaccatgggtccaacagagggggaggtagagatgtctcctgtgtccytgctggggactgggatggactcaggcctctagcacgatggataggggtgctgcagtccccacgtctgaagctcactccctgccagggactgcatggcggt

SEQ ID NO: 211530 - DNA, 201 bp, Homo sapiens
gacacctgtaatcccagctacttgggaggctgaggcaggagaatcacttgaacctgggaggcggaggttgcagtgagcagacatctgcagcctaggcaacrgagcaagatggagccaaaaaaaaaaagaaaagaaaaaaaaggcaggccaagtacagaggctcatgcctataagcttagcgtttgggaggccaaggtagga

SEQ ID NO: 211531 - DNA, 201 bp, Homo sapiens
gagtgggatcccagccttgtacccagcgccaagtggcccccatttcccacttaccttccctagacaaaccctctgccctttccttgcaccgcgctgtgtcstcaggcctggcgcagttggcgattcctgcctccgttccccggggcttctgggccctgcctgaaaacctgacggtggtggagggggcctcagtggagctgc

SEQ ID NO: 211532 - DNA, 201 bp, Homo sapiens
acgtaaaatgtgagcccctgccctggcccagcaatgcccccaagcctcaggacccagcacagagaaaaagtcattcttccttcctctccccgccagatccygcccagaaactgtggattgagggtcccccagagggccagaagctccgggctgggacccgggtgaggctggtgtgtttggctatcgggggcaacccagagc

SEQ ID NO: 211533 - DNA, 201 bp, Homo sapiens
acccccaaaatctctcccatggaaccctggatcccagaggagatcagcatggggacttagaccaggtgtggggaccagaggtgacatccccacctcttctbcctgactccccaaatttcagatgatgactctgactctataaccctgacttctcatcccagggtgacaccccggagctcagataataggcagttgctggtc

SEQ ID NO: 211534 - DNA, 201 bp, Homo sapiens
ccctcttgatgtaattgaattggtggagcatctagtccaggctacactctggaggatgcaaagataaataatagacctcggtagcttcaatgctctgccakttcagtatgatgtgtttaggcatggatttctttagtgtttgtttgtttgtttgcttgtttgtttgttttgagatggagtctcactctgtcaccaaggctg

SEQ ID NO: 211535 - DNA, 201 bp, Homo sapiens
cacgtagctgggactacaggcacctgccacctcgcccggctaattttttgtatttttagtagagacggggtttcaccgtgttagccaggatggtctcgatmtcctgaccttgtgatccgccctccttggcctcccaaagtgctgggattacaggcgtgagccaccgcgcccggcctaaatgtccttcactcttaaaccagt

SEQ ID NO: 211536 - DNA, 201 bp, Homo sapiens
gtgcagtggcgcgatctcggctcactgcaggctccgcgccccagggttcatgccattctcctgcctcagcctcccacgtagctgggactacaggcacctgycacctcgcccggctaattttttgtatttttagtagagacggggtttcaccgtgttagccaggatggtctcgatctcctgaccttgtgatccgccctcctt

SEQ ID NO: 211537 - DNA, 201 bp, Homo sapiens
gtctcaaactcctgacctcaggtgatctgcctgccttggcctcccagagttgctgggattacaggcgtgagccaccacgcccagcttatttattttgtttytgagacagagtctggctctgtcgcccagacttgagtgcagtggcacgatctcagctcacttcaacctccgcctcctgggttcaagtgattctcctgcctc

SEQ ID NO: 211538 - DNA, 201 bp, Homo sapiens
gatctagtcccccttaatctatacagatattgatgaacaagacaaatgcctagttgtaccaagccactggatccagccacacctgaagtcagggctacttstagactaccagtttccctccccacttaggtcagtctgaatgtcattttcagttagttgcaaccataaatgtccttcactctttttttttttttttttttt

SEQ ID NO: 211539 - DNA, 201 bp, Homo sapiens
gaaaataatgaaaccacccatttctattggatgaggttaacatgatcctctcctttttcccaccaccaggaagactgaggctcttccttcccatggcttcrtcaagtgcctgggagctcagaggtgctgctagtgctgggatcttacacatctggctgcaacaacttagttctttttttttttttttttttttttgagacg

SEQ ID NO: 211540 - DNA, 201 bp, Homo sapiens
tgaggttaacatgatcctctcctttttcccaccaccaggaagactgaggctcttccttcccatggcttcgtcaagtgcctgggagctcagaggtgctgctrgtgctgggatcttacacatctggctgcaacaacttagttctttttttttttttttttttttttgagacggagtcgcgctctgtcacccaggctggagtgc

SEQ ID NO: 211541 - DNA, 201 bp, Homo sapiens
gactgaggctcttccttcccatggcttcgtcaagtgcctgggagctcagaggtgctgctagtgctgggatcttacacatctggctgcaacaacttagttcyttttttttttttttttttttttgagacggagtcgcgctctgtcacccaggctggagtgcagaggcacaatctcagctcactgcaagctttacctcctggg

SEQ ID NO: 211542 - DNA, 201 bp, Homo sapiens
ctgcaacaacttagttctttttttttttttttttttttttgagacggagtcgcgctctgtcacccaggctggagtgcagaggcacaatctcagctcactgmaagctttacctcctgggttcaggcaattctcctgcctcagcctcctgagtagctgggactacaggcgcccgccaccatgctcggctaatttttttttttt

SEQ ID NO: 211543 - DNA, 201 bp, Homo sapiens
cggggtttcaccatgttagccaggatggtcttgatctcctgacctcgtgatccacccgcctcagcctcccaaggtgctgggattacaggtgtgagccactrcgcctggccatttcattatgattaagtggacacataggtcagccattcagaaggggaagtgactgtcttatttcttgctgatcaatttaagttctctttc

SEQ ID NO: 211544 - DNA, 201 bp, Homo sapiens
gtgagcttccccccgccacccactgccttttcagctaaccccttgtgtgtctgccacgcagctcggggcccatcatcagatgctgcagaggctggtggacrtcttgctggaagtaaaacataaggtaagctgcatatttgaaatcagcaggccgggcgcggaggctcacgcctgtgatcccagtactttgggaggctgagg

SEQ ID NO: 211545 - DNA, 201 bp, Homo sapiens
ctccactaaaaatacaaaattagcagggtgtcgtggcacatgcctgcaatcccagctactcgggaggctgaggcaggagaatcgtttgaacccagaggtgraggttgcagtgagctgagatcgcgctgttgcactccagcctgggtgacaagagtgaaatcctatctcaaaaaaaaaaaaaaaaaaagaaaagaaatcagc

SEQ ID NO: 211546 - DNA, 201 bp, Homo sapiens
agcagggtgtcgtggcacatgcctgcaatcccagctactcgggaggctgaggcaggagaatcgtttgaacccagaggtggaggttgcagtgagctgagatygcgctgttgcactccagcctgggtgacaagagtgaaatcctatctcaaaaaaaaaaaaaaaaaaagaaaagaaatcagcataatttgacaagcaaaattg

SEQ ID NO: 211547 - DNA, 201 bp, Homo sapiens
aaattgtttagtgcagcgattcatttgcaaggaaaaagaaatctcatagtggaaagagccccgccgaggcgctgtgattccagttctggaaacaggattcygcagggttgatgctcgtgtgtccacagctagctctctctgactttgaatgcgtcaccactgctctgggaccctgtttcctcctccataaaataagggtgt

SEQ ID NO: 211548 - DNA, 201 bp, Homo sapiens
tgcagttgggacgataggtgtgcgccaccacacccagctaatttttgtatttttagtagagacggggtttcaccatgttggccaggctggtctcaaactgsggacttcaggtgatccgcccgccttggcctcccaaggtgctgggattacaggcgtgaatcaccgcgcccagcctacttaatatttttctttaaattgatt

SEQ ID NO: 211549 - DNA, 201 bp, Homo sapiens
cacgcgggcctgggaatcgcctgccaggctaggccggacgacgcacgtgctccgagctgggtcgagggggcggggctgagggccgcggccgggccacgggkcggggaggagccgcggacggtgggcggggccagcgggccggggcctaaaaggcggcgcgggcggggttcttgacgcagctgcgggcggcgagcggcgcgc

SEQ ID NO: 211550 - DNA, 201 bp, Homo sapiens
aggcgagggcgagggcgtgaccctgcagcggaacatcacgctactcaacggcgtggccatcatcgtgggcgccatcatcggctcgggcatcttcgtgacgyccacgggcgtgcttaaggaggcaggctcgccggggctggcgctggtgatgtgggccgcgtgcggcgtcttctccatcgtgggcgcgctctgctacgcgga

SEQ ID NO: 211551 - DNA, 201 bp, Homo sapiens
ttcgccacctacctgctcaagccgctcttccccagctgcccggtgcccgaggaggcagccaagctcatggcctgccactgcgtgcgtgagtacggggcgcsggccgggggttgggaggtcgtggtccctgggtccctgcatccttgcatcactacgcccctggctcccacatctctacatttttgcgttcctggaccgtcc

SEQ ID NO: 211552 - DNA, 201 bp, Homo sapiens
aagaggacaaaccaagggcggagttaggctgggtgaggcttgacgctcataaaatgcggggtcctgtttaagagaaagaagacaaaaccaggaacagagcrgtggctcacgcctataatcccagcactgtgggaggctgaggcgggtggattacctgaggtcaggagtttgagacgagcctgaccaacatagagaaacccc

SEQ ID NO: 211553 - DNA, 201 bp, Homo sapiens
tttttgcgttcctggaccgtcccggcagttctaggctaaggtcattggtcccagaaaccaagtgcgtttctttcattcattcttttacacttctccccacrggctgggaatatcttcagtgacgggacagcagggtccctgccctgcccttcggtgggcatttcattcccccacttaagcggttcaggcaagtgccagcct

SEQ ID NO: 211554 - DNA, 201 bp, Homo sapiens
cattcgtctcagaatactgctgtctggcaggaaagtagaaacgaagccaatagtattaagccagggtggccggtgtcatataaaaatgcagggcaggagcyccttatcctgagcaggggagccagggaggcacatgtcctggaaggcggggagttttccaggggaggagaaaggctgcctttctgagacagtcaacaaatg

SEQ ID NO: 211555 - DNA, 201 bp, Homo sapiens
tccagacagagactctgtcactttggactggactcttgtcccacagtgctggccagggacaggtgcagagttgtgcttggttggcatgggacgctgatgarggctgtgttgcggccaggcccaaccaccatgagccgagatcatgccacggcactccagcctggaagacagagtgagactctgcctcaaaaaaataaaaaa

SEQ ID NO: 211556 - DNA, 201 bp, Homo sapiens
gcgccaccacacccagctaatttttgtatttttagtagagacggggtttcaccatgttggccaggctggtctcaaactgcggacttcaggtgatccgcccrccttggcctcccaaggtgctgggattacaggcgtgaatcaccgcgcccagcctacttaatatttttctttaaattgattagctcgaaaaatttttagcct

SEQ ID NO: 211557 - DNA, 201 bp, Homo sapiens
gatgtcaacccagctagaccatgcaatgagatattacttggcaatcagaaaggacacagctctaactcacgctgcggtgtgggtgagcctcaaaagcaccrtactaagtgacagacgcaagacacaaatgttccacatgttacatgactcagttcctatgaaacccacagagacagaagcagcacggcgggggtggggaga

SEQ ID NO: 211558 - DNA, 201 bp, Homo sapiens
gggagaaggagaaattccaaagaaatgtagtttatttattcagcagcaaacaaaagaattccagggcagaaggagtcaacgcaagcctcagatgtgcggamggatgaggcttcaacctgtgttaacaatggtgcgggctggtccagatggagctggggcgagcccttcctcgcggttcaaggagccgtttgatctgtacgt

SEQ ID NO: 211559 - DNA, 201 bp, Homo sapiens
tccagggcagaaggagtcaacgcaagcctcagatgtgcggacggatgaggcttcaacctgtgttaacaatggtgcgggctggtccagatggagctggggcragcccttcctcgcggttcaaggagccgtttgatctgtacgtggccttcgccttgatgctggcttcggggcggcctcctggggctgggaccagatcacccc

SEQ ID NO: 211560 - DNA, 201 bp, Homo sapiens
ggtgggaaagaaaagagctggctgtgaaggaccctttacccaagggctgttttcctcctggggaaggttctggagcatttcttccccatggggtaagtcaraattttctaggcaaaccacaggggaggaatgatgcccgggacaggggaggaagtgcaccgcggactgagctctggtcctgatgctgatctctgggctcat

SEQ ID NO: 211561 - DNA, 201 bp, Homo sapiens
ggaggaatgatgcccgggacaggggaggaagtgcaccgcggactgagctctggtcctgatgctgatctctgggctcatcccctcagctgaaaataaagagytagactctttttttttttttttttttttttgagatagaatcttgctatgttgcccaggctggagtgcaatggcgcgacctcggctcactgcaacctccgc

SEQ ID NO: 211562 - DNA, 201 bp, Homo sapiens
ggggcctgccactcccccgactgattcctgcagtcctggggagggagagaagagcccgcaccttggaaagggccaggcctcagtggccctgactggcaacrtggctttgggcaagttgtttatatctgtctgtctatcttcatcagtaaactagaaatacttcttgaagggttgttctgaagatttgaagtagttgctcag

SEQ ID NO: 211563 - DNA, 201 bp, Homo sapiens
gagatagaatcttgctatgttgcccaggctggagtgcaatggcgcgacctcggctcactgcaacctccgccttccaggttcaactgattctcctgcctcarcctcctgagtagctggaagtaccggcgcccaccaccatgcctggctaatttttgtatttttagtagagacagggtttcaccatgttggccaggctgatct

SEQ ID NO: 211564 - DNA, 201 bp, Homo sapiens
caaggctggaaagcttaattggcaggaaacctgcacgcagtggaatggctggggcctgccactcccccgactgattcctgcagtcctggggagggagagawgagcccgcaccttggaaagggccaggcctcagtggccctgactggcaacatggctttgggcaagttgtttatatctgtctgtctatcttcatcagtaaac

SEQ ID NO: 211565 - DNA, 201 bp, Homo sapiens
gaatcttgctatgttgcccaggctggagtgcaatggcgcgacctcggctcactgcaacctccgccttccaggttcaactgattctcctgcctcaacctccygagtagctggaagtaccggcgcccaccaccatgcctggctaatttttgtatttttagtagagacagggtttcaccatgttggccaggctgatctcaaact

SEQ ID NO: 211566 - DNA, 201 bp, Homo sapiens
ttctcctgcctcaacctcctgagtagctggaagtaccggcgcccaccaccatgcctggctaatttttgtatttttagtagagacagggtttcaccatgttrgccaggctgatctcaaactcctgacctcaagtgatccgcctaccttggcctcccaaattgctgggattacaggcgtgaaccaccgcgcctggccgagtta

SEQ ID NO: 211567 - DNA, 201 bp, Homo sapiens
ctaatttttgtatttttagtagagacagggtttcaccatgttggccaggctgatctcaaactcctgacctcaagtgatccgcctaccttggcctcccaaaktgctgggattacaggcgtgaaccaccgcgcctggccgagttagacctttgagaaattaaaagaccttaagaggctgagtgcggtggctcaagcctgtaat

SEQ ID NO: 211568 - DNA, 201 bp, Homo sapiens
tctcgcctagaggctcctagcctaggacttctgggagcttctcccatagcacagtgtatcagagagccccacagttggactcctgggtccagagccctgayccaccactcctgagctgcgcacctctgagcctcagcttcctcgcctgtgaaatggagatgttaaacatccacagtagcccgggcgcggtggctcacacct

SEQ ID NO: 211569 - DNA, 201 bp, Homo sapiens
tctccacacgcttccctgcatccagcgcccagctctccatacgcttccctgcatccagcacagctcgaaaagatggcggggacaagagtgtcgcctttctscaagatcagctgagaaaaggctttgagggagaaggagaaattccaaagaaatgtagtttatttattcagcagcaaacaaaagaattccagggcagaagga

SEQ ID NO: 211570 - DNA, 201 bp, Homo sapiens
ggctaccggggaattggctgccttgtggagctggaaacagcccaccaggtccaggggatccagggaatggctctatgccctgtgggggctcttctagcttyggcagcagcagcggcagcacctaccgagccccacgcccatgtggcaggcactgatggaagcccattacagccaccacactgcctgtcgtacacctgggga

SEQ ID NO: 211571 - DNA, 201 bp, Homo sapiens
gagggtccccaccctccatgcctggacaagctgcaagctcctcaggctgctggggccccccctcctccctgccttcgcaagagtcagggctaccggggaaytggctgccttgtggagctggaaacagcccaccaggtccaggggatccagggaatggctctatgccctgtgggggctcttctagctttggcagcagcagcg

SEQ ID NO: 211572 - DNA, 201 bp, Homo sapiens
tgaccctctcaccatagccagaagttttggcaaaaactgcccacagagggtccccaccctccatgcctggacaagctgcaagctcctcaggctgctggggycccccctcctccctgccttcgcaagagtcagggctaccggggaattggctgccttgtggagctggaaacagcccaccaggtccaggggatccagggaatg

SEQ ID NO: 211573 - DNA, 201 bp, Homo sapiens
ggggacgatgaggcaacacacaggcatcctcttctcagcccaaggctggaaagcttaattggcaggaaacctgcacgcagtggaatggctggggcctgccrctcccccgactgattcctgcagtcctggggagggagagaagagcccgcaccttggaaagggccaggcctcagtggccctgactggcaacatggctttggg

SEQ ID NO: 211574 - DNA, 201 bp, Homo sapiens
cacggtcattccctggggacccagctggcttctatgcagtgctcagggctccaagggtgcatttccagaaagagccagacggacacgatgtcttttctgcyctggcttccagagtcacaaagcactgctcctgcggcatcctgttcaccactcccaccaggagcacctgcccaggctcagggcaaggcgacatcaccccac

SEQ ID NO: 211575 - DNA, 201 bp, Homo sapiens
ctcagggcaaggcgacatcaccccacacctcggtgggaagggttcaaagaagcgacagccctccatataaatcatcacactgaatcttccaatcactccayggggcagggcctgtgattcatctgtcttgcacacacagggaaaccaaagctcagagaggcagagaaggccttgcccgggcacacaggtggcaggtgaaga

SEQ ID NO: 211576 - DNA, 201 bp, Homo sapiens
gcagggcctgtgattcatctgtcttgcacacacagggaaaccaaagctcagagaggcagagaaggccttgcccgggcacacaggtggcaggtgaagagccygtttttaaacccaggaagtggctccatgcagcctgaactcccagtcgtcccagcgcccacctcccacatgcagtcagaacccaggctgagctccaggccc

SEQ ID NO: 211577 - DNA, 201 bp, Homo sapiens
gctggccctgcacacaccatcacttccaccatctttactggtcatttcgggccatcctgattcagcatgggaggagaccacacaaggcctgagggacaccygggggctggctcaccctgcactcataccaagctcaccctggctgccctctattccagctctctgcatttcgtactctcctgttttctgcacttggtgaag

SEQ ID NO: 211578 - DNA, 201 bp, Homo sapiens
tcctccagttaaggaacaagctgtcctgaactagggcaggaaagaccagagtcacgtagtccccatcatctctcctagttccaggctggtccgggccctgmtgtgggactgactcggcagagaccctccaggaatgcctgccacggtcattccctggggacccagctggcttctatgcagtgctcagggctccaagggtgc

SEQ ID NO: 211579 - DNA, 201 bp, Homo sapiens
catctgcacaggcccctaccagtgctgacctgtcactatgcactcagctcccagcacgcaggcccagccccagtgtggccccggtgaccctgggcagacamtcccagaatggagacctcgaggcttcgcctttgaccctctcaccatagccagaagttttggcaaaaactgcccacagagggtccccaccctccatgcctg

SEQ ID NO: 211580 - DNA, 201 bp, Homo sapiens
acactcccagaatggagacctcgaggcttcgcctttgaccctctcaccatagccagaagttttggcaaaaactgcccacagagggtccccaccctccatgyctggacaagctgcaagctcctcaggctgctggggccccccctcctccctgccttcgcaagagtcagggctaccggggaattggctgccttgtggagctgg

SEQ ID NO: 211581 - DNA, 201 bp, Homo sapiens
atgcctggacaagctgcaagctcctcaggctgctggggccccccctcctccctgccttcgcaagagtcagggctaccggggaattggctgccttgtggagytggaaacagcccaccaggtccaggggatccagggaatggctctatgccctgtgggggctcttctagctttggcagcagcagcggcagcacctaccgagcc

SEQ ID NO: 211582 - DNA, 201 bp, Homo sapiens
agccaccacactgcctgtcgtacacctggggaaactgagactctaagaggacaaaccaagggcggagttaggctgggtgaggcttgacgctcataaaatgyggggtcctgtttaagagaaagaagacaaaaccaggaacagagcggtggctcacgcctataatcccagcactgtgggaggctgaggcgggtggattacctg

SEQ ID NO: 211583 - DNA, 201 bp, Homo sapiens
cctataatcccagcactgtgggaggctgaggcgggtggattacctgaggtcaggagtttgagacgagcctgaccaacatagagaaaccccatctctattamaaatacaaaattagccaggcgtgatggtgcatgcgtgtaatcccagctgctagggaggctgaggcaggagaatcgcttgaacccgggaggtggaggttgt

SEQ ID NO: 211584 - DNA, 201 bp, Homo sapiens
aggctgaggcaggagaatcgcttgaacccgggaggtggaggttgtggtgagccgagatcgtgccattgcactccagcctgggcaacaagagcgaaactccrtctcaaaataaataaataaataagagaaaagtggaacaagtcaccaacccacttccgccagcaaaggcttgtggtgctttccacaggtagctgggccatc

SEQ ID NO: 211585 - DNA, 201 bp, Homo sapiens
tctcaaaataaataaataaataagagaaaagtggaacaagtcaccaacccacttccgccagcaaaggcttgtggtgctttccacaggtagctgggccatcsgtgctcagataatggatgtgatggtcttcagcctcattggtgtgctcaccggtgtcccattctagctgcctggggctcaccacacgcataaaggaagggc

SEQ ID NO: 211586 - DNA, 201 bp, Homo sapiens
atggatgtgatggtcttcagcctcattggtgtgctcaccggtgtcccattctagctgcctggggctcaccacacgcataaaggaagggccctgacttcctytgggggccctgagggggagcagctttctgtaaccacatggctgctccagctctcatgcatcttagagacaggacaggaactcctggggacgatgaggcaa

SEQ ID NO: 211587 - DNA, 201 bp, Homo sapiens
ggggttcttgacgcagctgcgggcggcgagcggcgcgcacaatcctcgctcggctgcggctctcgggtgtcccaggcccggccggtaagcagagcatggcsggtgcgggcccgaagcggcgggcgctagcggccccggtggccgaggagaaggaagaggcgcgggagaagatgctggcctccaagcgcgcggacggcgcgg

SEQ ID NO: 211588 - DNA, 201 bp, Homo sapiens
atgtcttttctgccctggcttccagagtcacaaagcactgctcctgcggcatcctgttcaccactcccaccaggagcacctgcccaggctcagggcaaggsgacatcaccccacacctcggtgggaagggttcaaagaagcgacagccctccatataaatcatcacactgaatcttccaatcactccatggggcagggcct

SEQ ID NO: 211589 - DNA, 201 bp, Homo sapiens
gcagtgtctataaccaaaaccacattaggcgccgcctggaagcccggacccccacccccacccccagcgccgtcccatctgcacaggcccctaccagtgcygacctgtcactatgcactcagctcccagcacgcaggcccagccccagtgtggccccggtgaccctgggcagacactcccagaatggagacctcgaggctt

SEQ ID NO: 211590 - DNA, 201 bp, Homo sapiens
aaatgcggggtcctgtttaagagaaagaagacaaaaccaggaacagagcggtggctcacgcctataatcccagcactgtgggaggctgaggcgggtggatyacctgaggtcaggagtttgagacgagcctgaccaacatagagaaaccccatctctattacaaatacaaaattagccaggcgtgatggtgcatgcgtgtaa

SEQ ID NO: 211591 - DNA, 201 bp, Homo sapiens
cttgcacacacagggaaaccaaagctcagagaggcagagaaggccttgcccgggcacacaggtggcaggtgaagagcccgtttttaaacccaggaagtggstccatgcagcctgaactcccagtcgtcccagcgcccacctcccacatgcagtcagaacccaggctgagctccaggccctgctgcacatttctgagctttt

SEQ ID NO: 211592 - DNA, 201 bp, Homo sapiens
cactgaatcttccaatcactccatggggcagggcctgtgattcatctgtcttgcacacacagggaaaccaaagctcagagaggcagagaaggccttgcccsggcacacaggtggcaggtgaagagcccgtttttaaacccaggaagtggctccatgcagcctgaactcccagtcgtcccagcgcccacctcccacatgcag

SEQ ID NO: 211593 - DNA, 201 bp, Homo sapiens
gtggtggcctcaggctcaagggcagatggccttggcttcaaatcccagctctgcctctcaccccctcggactcagcagtcctcacccagggatgggctcayctgcagcttctgggctgctttcctggtttcctccagttaaggaacaagctgtcctgaactagggcaggaaagaccagagtcacgtagtccccatcatctc

SEQ ID NO: 211594 - DNA, 201 bp, Homo sapiens
accggtgtcccattctagctgcctggggctcaccacacgcataaaggaagggccctgacttcctttgggggccctgagggggagcagctttctgtaaccayatggctgctccagctctcatgcatcttagagacaggacaggaactcctggggacgatgaggcaacacacaggcatcctcttctcagcccaaggctggaaa

SEQ ID NO: 211595 - DNA, 201 bp, Homo sapiens
tggaaagcttaattggcaggaaacctgcacgcagtggaatggctggggcctgccactcccccgactgattcctgcagtcctggggagggagagaagagccygcaccttggaaagggccaggcctcagtggccctgactggcaacatggctttgggcaagttgtttatatctgtctgtctatcttcatcagtaaactagaaa

SEQ ID NO: 211596 - DNA, 201 bp, Homo sapiens
ccggcaggaggagaggacatctcactgcacacctgcctgttacccatgtgcatagacggacgtctcactgcacacccgcctgttacccatgtgcacagacygacgtctcactgcacaccgacctgttacccatgtgcatagaccaacatctcactgcacacccgcctgttacccacgtgcaccagactgacgcctcactgc

SEQ ID NO: 211597 - DNA, 201 bp, Homo sapiens
ttacccacgtgcaccagactgacgcctcactgcacacccacctgttacccacgtgtacagactgacgcctcactgcacacccacttgttacccatgtgcaycagactgacgcctcactgcacacctgcctgttacccatgtgcaccagactgacatctcactgcacacccgcctgttacccatgtgcatagactaacacct

SEQ ID NO: 211598 - DNA, 201 bp, Homo sapiens
ggcctcccaaagtgctgggattacaggcatgagccactgtgcccggcctatttacttattttaagaaaggatctcactctgtcacccaggctagagtgcastggtatgatcacagctcactgcagcctcaacctccggggctcaagccatcctcccacctcaacctcccaactacctgggaccacaggcatgtaccactgc

SEQ ID NO: 211599 - DNA, 201 bp, Homo sapiens
cacggttctgagagctctgacgccccatcctcttcctccgcgcggctccacagccagaggaaacctggggaggggttgttttcccagccagcctccacctyccacaccaggtggtcccacctcttggtgggaaagaaaagagctggctgtgaaggaccctttacccaagggctgttttcctcctggggaaggttctggagc

SEQ ID NO: 211600 - DNA, 201 bp, Homo sapiens
aagaaaggatctcactctgtcacccaggctagagtgcactggtatgatcacagctcactgcagcctcaacctccggggctcaagccatcctcccacctcarcctcccaactacctgggaccacaggcatgtaccactgcacctggctagtttttgtgttttttgtagagtcagattcttgttatgttgcttaggctggtct

SEQ ID NO: 211601 - DNA, 201 bp, Homo sapiens
tgctctgggaccctgtttcctcctccataaaataagggtgttgggctcaatggaagttcccaaaattcagtcatgcaggcaagatcctgaagactttgacrtatctgcctgccaatgggacaactttctactgaatatttttcttttcttttttattttttcgaggagtctccctctgtcactcaggctggaatgcagtgg

SEQ ID NO: 211602 - DNA, 201 bp, Homo sapiens
ggttgtacactttagatgggagagttgcatggtatgtgaattctatcacaataatgctgtgggttttgttgctgttgttgttgtttgagaccgagtctctytctgttgcccagactggagtgcaatggtgcaatcttggctcactgcaacctctgcctcctgtgctaaagcaattcttgtgtctcagtctcccgagtagct

SEQ ID NO: 211603 - DNA, 201 bp, Homo sapiens
ctggaagacagagtgagactctgcctcaaaaaaataaaaaaaataaaaagttataaatagaactaccctatgattcagcaatcacacacttctgggtatayatccaaaagagctggctgggcacagtggcttatgcctgtaatcccaatattttgagaggccaaggcaggaggatcactggagcccaggagttggagaaca

SEQ ID NO: 211604 - DNA, 201 bp, Homo sapiens
agatgaaggtaatcacggagatactggataccctgatcggtaaggtagcagtagaaatgtctccaggcaagccaggcacggtggctcatgcctgtaatccyaacattttgggaggccgaggtgggcggatcacgaggtcaggagattgagaccatcctgtctaacatggtgaaaccccgtctctactaaaaatacaaaaaa

SEQ ID NO: 211605 - DNA, 201 bp, Homo sapiens
agcagtagaaatgtctccaggcaagccaggcacggtggctcatgcctgtaatcctaacattttgggaggccgaggtgggcggatcacgaggtcaggagatygagaccatcctgtctaacatggtgaaaccccgtctctactaaaaatacaaaaaattggccgagcgtggtggcgggtgcctatagtcccagctactgggga

SEQ ID NO: 211606 - DNA, 201 bp, Homo sapiens
tccagatggagctggggcgagcccttcctcgcggttcaaggagccgtttgatctgtacgtggccttcgccttgatgctggcttcggggcggcctcctgggrctgggaccagatcaccccccgccgccccatttgcctgctcagaaacttcacaaggccacggttctgagagctctgacgccccatcctcttcctccgcgcg

SEQ ID NO: 211607 - DNA, 201 bp, Homo sapiens
gggaggctgaacgctcacccagaacaaaggcctccccacatgcctgctgtgagcttccaagtactcgttaggacacacgccaaggaaccccgggttggggkgataccgaggagcttcctccctgacccacacacaccctttgaacaggtctttggctgctcaccagtctggtcaatctcggggcagtatttatattccttc

SEQ ID NO: 211608 - DNA, 201 bp, Homo sapiens
agaccctccaggaatgcctgccacggtcattccctggggacccagctggcttctatgcagtgctcagggctccaagggtgcatttccagaaagagccagayggacacgatgtcttttctgccctggcttccagagtcacaaagcactgctcctgcggcatcctgttcaccactcccaccaggagcacctgcccaggctcag

SEQ ID NO: 211609 - DNA, 201 bp, Homo sapiens
agggcagatggccttggcttcaaatcccagctctgcctctcaccccctcggactcagcagtcctcacccagggatgggctcatctgcagcttctgggctgytttcctggtttcctccagttaaggaacaagctgtcctgaactagggcaggaaagaccagagtcacgtagtccccatcatctctcctagttccaggctggt

SEQ ID NO: 211610 - DNA, 201 bp, Homo sapiens
atgcacaggctgctgctgcctgtcacgaaacgaaaatccaccagcccaatcactaaggttaaagtcgctttttgttgctgcgggtgctttcagtcagctgrttcccagagagagctattaccttttgggagtccatgaaactttagaatgatggccttctgatggaaaatgctagaagtgtggttgaatctaactcctgat

SEQ ID NO: 211611 - DNA, 201 bp, Homo sapiens
gttcttggtgaaatgtgcagttgagtttaaggcccagctgtggccaacactcacacacacacgtctgctgtggaatgcacaggctgctgctgcctgtcacraaacgaaaatccaccagcccaatcactaaggttaaagtcgctttttgttgctgcgggtgctttcagtcagctggttcccagagagagctattaccttttg

SEQ ID NO: 211612 - DNA, 201 bp, Homo sapiens
gcaactttgtttttgatgaacagatattttatttatttatttatttttgagactgagtatcactctgttccccaggctggagtgcagtggcgcgatcgcaygatctcgcgatcttggctcactgcaacctctgctgcccaggttcaagtgattctcctgcctcagcctcctgagtagctgggattacaggcacctgccacc

SEQ ID NO: 211613 - DNA, 201 bp, Homo sapiens
gggtttcaccatgttggccaggctgatctcaaactcctgacctcaagtgatccgcctaccttggcctcccaaattgctgggattacaggcgtgaaccaccrcgcctggccgagttagacctttgagaaattaaaagaccttaagaggctgagtgcggtggctcaagcctgtaatcctaacactttgggaggccaaagcagg

SEQ ID NO: 211614 - DNA, 201 bp, Homo sapiens
ttctgccctggcttccagagtcacaaagcactgctcctgcggcatcctgttcaccactcccaccaggagcacctgcccaggctcagggcaaggcgacatcrccccacacctcggtgggaagggttcaaagaagcgacagccctccatataaatcatcacactgaatcttccaatcactccatggggcagggcctgtgattc

SEQ ID NO: 211615 - DNA, 201 bp, Homo sapiens
ctctctctgactttgaatgcgtcaccactgctctgggaccctgtttcctcctccataaaataagggtgttgggctcaatggaagttcccaaaattcagtcrtgcaggcaagatcctgaagactttgacgtatctgcctgccaatgggacaactttctactgaatatttttcttttcttttttattttttcgaggagtctcc

SEQ ID NO: 211616 - DNA, 201 bp, Homo sapiens
ccatagcacagtgtatcagagagccccacagttggactcctgggtccagagccctgatccaccactcctgagctgcgcacctctgagcctcagcttcctcrcctgtgaaatggagatgttaaacatccacagtagcccgggcgcggtggctcacacctgtaatcccagcacttagggaggccgaggtgggtagatcacctg

SEQ ID NO: 211617 - DNA, 201 bp, Homo sapiens
cggttcaaggagccgtttgatctgtacgtggccttcgccttgatgctggcttcggggcggcctcctggggctgggaccagatcaccccccgccgccccatytgcctgctcagaaacttcacaaggccacggttctgagagctctgacgccccatcctcttcctccgcgcggctccacagccagaggaaacctggggagggg

SEQ ID NO: 211618 - DNA, 201 bp, Homo sapiens
cattttgggaggccgaggtgggcggatcacgaggtcaggagattgagaccatcctgtctaacatggtgaaaccccgtctctactaaaaatacaaaaaattkgccgagcgtggtggcgggtgcctatagtcccagctactggggaggctgaggcaggagaatggcatgaacccaggagttcaagctggtcttgaactccagg

SEQ ID NO: 211619 - DNA, 201 bp, Homo sapiens
ctaacatggtgaaaccccgtctctactaaaaatacaaaaaattggccgagcgtggtggcgggtgcctatagtcccagctactggggaggctgaggcaggakaatggcatgaacccaggagttcaagctggtcttgaactccaggaggcggagcttgcagtgagccgagatcacaccactgcactccagcctgggtgacaca

SEQ ID NO: 211620 - DNA, 201 bp, Homo sapiens
attattattattatttgagacagagtctcactctgttgcccaggctggagtgcagtggcgtgatctcagctcactgcaacctctgcctcctgggctcaagmaattctcttgcctcagcctcctgagtagctgggactacaggcgcccaccaccacatctggataatttttgtatttttagtagagacagggtttcatcatg

SEQ ID NO: 211621 - DNA, 201 bp, Homo sapiens
gtgacagcagtggcctcatggccttatctcggggaaagcacttccttccaagcaccatgaaggcctcccgtgctgagacaagatggaagctcctagtcccrcctgaggactgatacggcctgtgcttctcggtctctcaggacgcgcaggcggccatgcgccccttcgacccctccgctctgctgcccacctgctgggatt

SEQ ID NO: 211622 - DNA, 201 bp, Homo sapiens
ccttatctcggggaaagcacttccttccaagcaccatgaaggcctcccgtgctgagacaagatggaagctcctagtcccacctgaggactgatacggcctktgcttctcggtctctcaggacgcgcaggcggccatgcgccccttcgacccctccgctctgctgcccacctgctgggattactggacctatgtgggctcgc

SEQ ID NO: 211623 - DNA, 201 bp, Homo sapiens
ttttgtagtttttttgggtgataagtgatgccttatagatttccccaaatattttattatgaaatttttgcaacatatgaaaaaatgaaaagaaatgaacragaagaatctatgagtttgacgtctcagtcctgtgatgatcatttttgccatattcactttatcacacctctgctcacccactcacctgacttcttgatg

SEQ ID NO: 211624 - DNA, 201 bp, Homo sapiens
cttatctcggggaaagcacttccttccaagcaccatgaaggcctcccgtgctgagacaagatggaagctcctagtcccacctgaggactgatacggcctgkgcttctcggtctctcaggacgcgcaggcggccatgcgccccttcgacccctccgctctgctgcccacctgctgggattactggacctatgtgggctcgct

SEQ ID NO: 211625 - DNA, 201 bp, Homo sapiens
ccaagcaccatgaaggcctcccgtgctgagacaagatggaagctcctagtcccacctgaggactgatacggcctgtgcttctcggtctctcaggacgcgcrggcggccatgcgccccttcgacccctccgctctgctgcccacctgctgggattactggacctatgtgggctcgctcaccaccccgccgctgaccgagtcg

SEQ ID NO: 211626 - DNA, 201 bp, Homo sapiens
ctgtgcttctcggtctctcaggacgcgcaggcggccatgcgccccttcgacccctccgctctgctgcccacctgctgggattactggacctatgtgggctygctcaccaccccgccgctgaccgagtcggtcacctggatcatccagaaggagcccgttgaagtggccccaagccaagtgagccgtgcccgtaactggcat

SEQ ID NO: 211627 - DNA, 201 bp, Homo sapiens
tttggggtgttcttacacaagaagaaagttccaattgaagtaggagcttgttgagattggacagcggttccagtgatcacagcgagcatgttctgagcaaygccctaatctatcacacacagacacacaaggcatccatgggagttgtcccagcgtcatgggtctgcatggtttttgttttcttcctttttcttttctttc

SEQ ID NO: 211628 - DNA, 201 bp, Homo sapiens
gccctaatctatcacacacagacacacaaggcatccatgggagttgtcccagcgtcatgggtctgcatggtttttgttttcttcctttttcttttctttcytttttttttttttgagacagagtctcgctctgtcgcccaggctgcagtgcagtggctcgatctcagctcactactacctccacctcctgggttcaagcaa

SEQ ID NO: 211629 - DNA, 201 bp, Homo sapiens
acggacacgatgtcttttctgccctggcttccagagtcacaaagcactgctcctgcggcatcctgttcaccactcccaccaggagcacctgcccaggctcrgggcaaggcgacatcaccccacacctcggtgggaagggttcaaagaagcgacagccctccatataaatcatcacactgaatcttccaatcactccatggg

SEQ ID NO: 211630 - DNA, 201 bp, Homo sapiens
gttgttgttatgaaagtaatgctgcagttaatgtggaactagagtgcacccaaaccaaaaaatgaaaattgcttgtaatcgcacacccagaggtgacctcyggacattttataaatagggagtgatatctattgtcatcatcatacacatatttataaatagttccaagaatgagcacaacaatggcttctgtgtgcttcc

SEQ ID NO: 211631 - DNA, 201 bp, Homo sapiens
acacacacgtctcgctgcctttatttccaggaattagtggcgggcccttggaaaaccactacagactgaagcaatttcacttccactggggagcagtgaaygaggggggctcagagcacacagtggacggccacgtgtaccccgcagaggtttgtagacgtggcctaacggcacatatctggacgctttccatgtctccgg

SEQ ID NO: 211632 - DNA, 201 bp, Homo sapiens
gggaggctgaggcaggagaatggcatgaacccaggagttcaagctggtcttgaactccaggaggcggagcttgcagtgagccgagatcacaccactgcackccagcctgggtgacacagcgagactccgtctcagaaaaaaaaaaaaaaaaaaaaagcaacaatgcagggactcctgacacatgctccaatgtggataaac

SEQ ID NO: 211633 - DNA, 201 bp, Homo sapiens
gcactgcccgctcccaggcttgacgagaggctgcgggccagtgggtgaaggggctcgccctgactgccaggccccgcccaggcgcacccgggaggacgggstgggatgacgcgggcgccgggggggtaggtcgcgaggccggggtctccatggcgcaggagtacgggggccttcgaggaccacgcgggcctgggaatcgcc

SEQ ID NO: 211634 - DNA, 201 bp, Homo sapiens
cctgattggtgggcagtgcagggcaggacggggccgtggtggcctcaggctcaagggcagatggccttggcttcaaatcccagctctgcctctcaccccckcggactcagcagtcctcacccagggatgggctcatctgcagcttctgggctgctttcctggtttcctccagttaaggaacaagctgtcctgaactagggc

SEQ ID NO: 211635 - DNA, 201 bp, Homo sapiens
tgggttcaagcaattctcctgcctcagcctctcgagtagctgggattacaggcacccatcaccacgcctggctaatttttgtatttttagtagagacgggrtttcaccatgttggccaagctggtcttgaactcaggtgatctgcccaccttggcctcccaaagtgctgggattccaggcatgagccaccgagcccggcct

SEQ ID NO: 211636 - DNA, 201 bp, Homo sapiens
tttttttctggaaatcttaagaatctatagcaattctgtctgtccaaggcagttcagagccacaggcatgctgcctatgccccgcccccgcccggcagacrtttctcagcagtcgcagcaggacttagcatctctggctcatctctttctgagggctccaggtgagctcttagagggtctttcagtctcctgggcctgtga

SEQ ID NO: 211637 - DNA, 201 bp, Homo sapiens
gctgcagtgagccgagatcgcaccactgcactccagcctggacaacaagagcaaaactccatctcaaataaataaataaataaaaatacaaaaattagccrggcatggtggcgtgtgcctgtagtgccagctacttgggaggctgaggtaggagaatcacttgaacctggaaggcggaggttgcagtgagctgagatggca

SEQ ID NO: 211638 - DNA, 201 bp, Homo sapiens
aagagagggtgggaggggggcaggtgtggaggggcggcacaggaacagggcattcgtctcagaatactgctgtctggcaggaaagtagaaacgaagccaayagtattaagccagggtggccggtgtcatataaaaatgcagggcaggagccccttatcctgagcaggggagccagggaggcacatgtcctggaaggcgggg

SEQ ID NO: 211639 - DNA, 201 bp, Homo sapiens
gttttccaggggaggagaaaggctgcctttctgagacagtcaacaaatgtgcagaccacaaatgtggatgagcacactgtggtcatggcccaggaggccasgtgcaccatgcgcgcgcaattctagggggcgctggatcatcacgcagggctaactggcccagtatgctgtcagcatgtagacataatctcacttctgaat

SEQ ID NO: 211640 - DNA, 201 bp, Homo sapiens
gacttcaaaaggaaaaatgtaagcaccaacataagctggtgtaatgtaatgtaattcccaccaatgtaagttggcaggaatccttgctctgtatagaaggstcacattttcttatcactgcttccaagtgtgacagcagtggcctcatggccttatctcggggaaagcacttccttccaagcaccatgaaggcctcccgtg

SEQ ID NO: 211641 - DNA, 201 bp, Homo sapiens
gaaaggctgcctttctgagacagtcaacaaatgtgcagaccacaaatgtggatgagcacactgtggtcatggcccaggaggccaggtgcaccatgcgcgcrcaattctagggggcgctggatcatcacgcagggctaactggcccagtatgctgtcagcatgtagacataatctcacttctgaatttaattaaatgtgtga

SEQ ID NO: 211642 - DNA, 201 bp, Homo sapiens
caaatgtgcagaccacaaatgtggatgagcacactgtggtcatggcccaggaggccaggtgcaccatgcgcgcgcaattctagggggcgctggatcatcaygcagggctaactggcccagtatgctgtcagcatgtagacataatctcacttctgaatttaattaaatgtgtgagttgcctcacagagttcgtaagtatat

SEQ ID NO: 211643 - DNA, 201 bp, Homo sapiens
gcgcgcaattctagggggcgctggatcatcacgcagggctaactggcccagtatgctgtcagcatgtagacataatctcacttctgaatttaattaaatgygtgagttgcctcacagagttcgtaagtatattctgtgaacaagtgagataatacataaaaagtctttttttattttttatttatttattttttttgagac

SEQ ID NO: 211644 - DNA, 201 bp, Homo sapiens
atctgaaagctcaactagggctagaggattcattccaaggttggccctctcaagtggatggcaagttggcgctggcagttggctgggagcctcagctcctytccctgtgggcctctcctcggggctgcttgagtaccctcccaatatggtgaccagcttccccccagagcaagtgatcctaaagaccaaggcggaagcggc

SEQ ID NO: 211645 - DNA, 201 bp, Homo sapiens
tcctcggggctgcttgagtaccctcccaatatggtgaccagcttccccccagagcaagtgatcctaaagaccaaggcggaagcggcaatgccttttataasctggccctgcacacaccatcacttccaccatctttactggtcatttcgggccatcctgattcagcatgggaggagaccacacaaggcctgagggacacct

SEQ ID NO: 211646 - DNA, 201 bp, Homo sapiens
ccagagcaagtgatcctaaagaccaaggcggaagcggcaatgccttttataagctggccctgcacacaccatcacttccaccatctttactggtcatttcrggccatcctgattcagcatgggaggagaccacacaaggcctgagggacacctgggggctggctcaccctgcactcataccaagctcaccctggctgccct

SEQ ID NO: 211647 - DNA, 201 bp, Homo sapiens
ggagcgcccttctggtgttcaaggtgcagcccgagggtgaggcagccaagtgcaggggtgaggagagaggcatgggaggcaagggtgggtactggggcccsataggctgggtggagactttggagctgctgctgggttctgagcaaagggcattttcgagtggaaaggctcagtttggctgtgctgccaaagagttttcca

SEQ ID NO: 211648 - DNA, 201 bp, Homo sapiens
gctctgctgcccacctgctgggattactggacctatgtgggctcgctcaccaccccgccgctgaccgagtcggtcacctggatcatccagaaggagcccgytgaagtggccccaagccaagtgagccgtgcccgtaactggcatgatggcgcttcatggaaggcgtctctcttgcttggcagcgtcactaagatgctgcat

SEQ ID NO: 211649 - DNA, 201 bp, Homo sapiens
ggacatagtgtttagtggggtcaggacagaatttgagtttgggatgatggaaaagttctggagacggatggtggagatggttgcaccacaatgtgactgcrtttaacgccatgaaactttacacttaaaaattgttaagatgggctgggcatggtggctcatgcctctcatcccagcactgtgggaggctgaggcaggtga

SEQ ID NO: 211650 - DNA, 201 bp, Homo sapiens
aacagcttgggcaagatggcaagaccccctggctacaaacaattaattttaaaccctggtatggtgtcctagctacttgggagactgacgcggggggatcrcttgagcccaggaattagagactgcagtgagctatgatggcatcattgcactcctgcctagttgacaaagtaagaccctgactcttttttttttgttttt

SEQ ID NO: 211651 - DNA, 201 bp, Homo sapiens
gtggcttatgcctgtaatcccaatattttgagaggccaaggcaggaggatcactggagcccaggagttggagaacagcttgggcaagatggcaagaccccytggctacaaacaattaattttaaaccctggtatggtgtcctagctacttgggagactgacgcggggggatcgcttgagcccaggaattagagactgcagt

SEQ ID NO: 211652 - DNA, 201 bp, Homo sapiens
catcttccttccagacagagactctgtcactttggactggactcttgtcccacagtgctggccagggacaggtgcagagttgtgcttggttggcatgggaygctgatgagggctgtgttgcggccaggcccaaccaccatgagccgagatcatgccacggcactccagcctggaagacagagtgagactctgcctcaaaaa

SEQ ID NO: 211653 - DNA, 201 bp, Homo sapiens
cctcatggccttatctcggggaaagcacttccttccaagcaccatgaaggcctcccgtgctgagacaagatggaagctcctagtcccacctgaggactgayacggcctgtgcttctcggtctctcaggacgcgcaggcggccatgcgccccttcgacccctccgctctgctgcccacctgctgggattactggacctatgt

SEQ ID NO: 211654 - DNA, 201 bp, Homo sapiens
gtggacactcctgggcttccttctggtagctcagccacctctcttgaccctgaccctcactgcttgatgttaggagacaagcccaaggcatctaggttgcyggcttccaccttggaaggccagggcccagcaaagtcaaggtgatgtgatgtggctgagcagggaggccatcttccttccagacagagactctgtcacttt

SEQ ID NO: 211655 - DNA, 201 bp, Homo sapiens
ggcatctaggttgctggcttccaccttggaaggccagggcccagcaaagtcaaggtgatgtgatgtggctgagcagggaggccatcttccttccagacagrgactctgtcactttggactggactcttgtcccacagtgctggccagggacaggtgcagagttgtgcttggttggcatgggacgctgatgagggctgtgtt

SEQ ID NO: 211656 - DNA, 201 bp, Homo sapiens
aagcccaaggcatctaggttgctggcttccaccttggaaggccagggcccagcaaagtcaaggtgatgtgatgtggctgagcagggaggccatcttccttscagacagagactctgtcactttggactggactcttgtcccacagtgctggccagggacaggtgcagagttgtgcttggttggcatgggacgctgatgagg

SEQ ID NO: 211657 - DNA, 201 bp, Homo sapiens
accctgcactcataccaagctcaccctggctgccctctattccagctctctgcatttcgtactctcctgttttctgcacttggtgaagagaagaagatgayggtgaacaactatcgtccacttcaacccctgatgaactggaaggtctgggcgtccttccaggccactaatgagggcacaagatcctagagacattaggtc

SEQ ID NO: 211658 - DNA, 201 bp, Homo sapiens
gcggatcaatgctgggaattggtttttgtagtttttttgggtgataagtgatgccttatagatttccccaaatattttattatgaaatttttgcaacataygaaaaaatgaaaagaaatgaacgagaagaatctatgagtttgacgtctcagtcctgtgatgatcatttttgccatattcactttatcacacctctgctca

SEQ ID NO: 211659 - DNA, 201 bp, Homo sapiens
gtctcttctacaggggccatttgggcagagaccaaaggaggagtgaaccacatggctacccgagggcagagaattccaggcagaggctggaggcaggagcrcccttctggtgttcaaggtgcagcccgagggtgaggcagccaagtgcaggggtgaggagagaggcatgggaggcaagggtgggtactggggcccgatagg

SEQ ID NO: 211660 - DNA, 201 bp, Homo sapiens
agcaatttcacttccactggggagcagtgaatgaggggggctcagagcacacagtggacggccacgtgtaccccgcagaggtttgtagacgtggcctaacrgcacatatctggacgctttccatgtctccggctctatggtggggggcgaacaagccatgcctgccgctcagatgtgaaggatttcctggggcctgggact

SEQ ID NO: 211661 - DNA, 201 bp, Homo sapiens
ttttgtttgtttgttttttgtttttttgaaacagggttcactctgtcacccagactggagtgcattggtgcaatcttggctcaccacaacctccgtctccyaggctcaagcgattctcctgcctcagccttccgagtagctgggattacaggtgcgtgccaccaggccctgctaatttttgtatttttagtagagatgtgg

SEQ ID NO: 211662 - DNA, 201 bp, Homo sapiens
tgccatgttggccaggctagtctcgaactcctgacctcaagtgatccacccacctcagcttcccaaaatgctaggataacaggcgtgagccactgcacccrgccaagatcatcttcttaaagcagtcttattttcaacattccaaagtgggagtcagtagagaaaatgagtgcggatcaatgctgggaattggtttttgta

SEQ ID NO: 211663 - DNA, 201 bp, Homo sapiens
acccaaaccaaaaaatgaaaattgcttgtaatcgcacacccagaggtgacctctggacattttataaatagggagtgatatctattgtcatcatcatacasatatttataaatagttccaagaatgagcacaacaatggcttctgtgtgcttcctttcatttaacaacatgccttttattttagtatctctatctgcaact

SEQ ID NO: 211664 - DNA, 201 bp, Homo sapiens
aatcgcacacccagaggtgacctctggacattttataaatagggagtgatatctattgtcatcatcatacacatatttataaatagttccaagaatgagcrcaacaatggcttctgtgtgcttcctttcatttaacaacatgccttttattttagtatctctatctgcaactttgtttttgatgaacagatattttattta

SEQ ID NO: 211665 - DNA, 201 bp, Homo sapiens
tgctgtgagcttccaagtactcgttaggacacacgccaaggaaccccgggttggggggataccgaggagcttcctccctgacccacacacaccctttgaasaggtctttggctgctcaccagtctggtcaatctcggggcagtatttatattccttcccgtttccaggcctaggagccttggcatcctgctctcgcctcta

SEQ ID NO: 211666 - DNA, 201 bp, Homo sapiens
atttataaatagttccaagaatgagcacaacaatggcttctgtgtgcttcctttcatttaacaacatgccttttattttagtatctctatctgcaactttrtttttgatgaacagatattttatttatttatttatttttgagactgagtatcactctgttccccaggctggagtgcagtggcgcgatcgcatgatctcgc

SEQ ID NO: 211667 - DNA, 201 bp, Homo sapiens
tttttgatgaacagatattttatttatttatttatttttgagactgagtatcactctgttccccaggctggagtgcagtggcgcgatcgcatgatctcgcratcttggctcactgcaacctctgctgcccaggttcaagtgattctcctgcctcagcctcctgagtagctgggattacaggcacctgccaccgcgcccagc

SEQ ID NO: 211668 - DNA, 201 bp, Homo sapiens
ttggcaggaaacctgcacgcagtggaatggctggggcctgccactcccccgactgattcctgcagtcctggggagggagagaagagcccgcaccttggaamgggccaggcctcagtggccctgactggcaacatggctttgggcaagttgtttatatctgtctgtctatcttcatcagtaaactagaaatacttcttgaag

SEQ ID NO: 211669 - DNA, 201 bp, Homo sapiens
cctcagcctcctgagtagctgggattacaggcacctgccaccgcgcccagctaatttttgtagttttagtagagacggggtttcaccgtcttggccaggckggtcttgaactcctgtcctcgtgatccactcgcctcggcctcccagagtgctgggattacaggcgtgagccaccacgcccagccgaggcgtgagtttttt

SEQ ID NO: 211670 - DNA, 201 bp, Homo sapiens
tagctgcctggggctcaccacacgcataaaggaagggccctgacttcctttgggggccctgagggggagcagctttctgtaaccacatggctgctccagcyctcatgcatcttagagacaggacaggaactcctggggacgatgaggcaacacacaggcatcctcttctcagcccaaggctggaaagcttaattggcagga

SEQ ID NO: 211671 - DNA, 201 bp, Homo sapiens
ttggccaggctggtcttgaactcctgtcctcgtgatccactcgcctcggcctcccagagtgctgggattacaggcgtgagccaccacgcccagccgaggcstgagttttttctggtaatccttgtccaaggataactaggaagtagaaaataatgaaaccacccatttctattggatgaggttaacatgatcctctccttt

SEQ ID NO: 211672 - DNA, 201 bp, Homo sapiens
ccactcccaccaggagcacctgcccaggctcagggcaaggcgacatcaccccacacctcggtgggaagggttcaaagaagcgacagccctccatataaatyatcacactgaatcttccaatcactccatggggcagggcctgtgattcatctgtcttgcacacacagggaaaccaaagctcagagaggcagagaaggcctt

SEQ ID NO: 211673 - DNA, 201 bp, Homo sapiens
gctgggaccagatcaccccccgccgccccatttgcctgctcagaaacttcacaaggccacggttctgagagctctgacgccccatcctcttcctccgcgckgctccacagccagaggaaacctggggaggggttgttttcccagccagcctccacctcccacaccaggtggtcccacctcttggtgggaaagaaaagagct

SEQ ID NO: 211674 - DNA, 201 bp, Homo sapiens
caaagtgctgggatcacaggcgtgagccaccgtgcctggcctaggattgcttttaaaacgtggtgtatttacagtggagtgagcttccccccgccacccaytgccttttcagctaaccccttgtgtgtctgccacgcagctcggggcccatcatcagatgctgcagaggctggtggacatcttgctggaagtaaaacataa

SEQ ID NO: 211675 - DNA, 201 bp, Homo sapiens
aaagtagtcttttagttccttgagtgaaaagtaaattcaaatgttactttagcatttacattataggtgttagttatctattgctgtgtaacaaatagctscaaaacatagtggctttagaaaacaatcatttgggccgggtgcagtagctcatgcctgtaatcccagcactttgggggccgaggcgagtggatcgcctga

SEQ ID NO: 211676 - DNA, 201 bp, Homo sapiens
ggatcatcacgcagggctaactggcccagtatgctgtcagcatgtagacataatctcacttctgaatttaattaaatgtgtgagttgcctcacagagttcrtaagtatattctgtgaacaagtgagataatacataaaaagtctttttttattttttatttatttattttttttgagacagagtttccctcttgttgccca

SEQ ID NO: 211677 - DNA, 201 bp, Homo sapiens
gctccggagttcgagaccagcatgggtaatatgacgaagtcctgtctctaccaaaaatacaaaaaattagcctggcatggtggcacacgcctgtggtctcwgctactcaggaggctgaggtgagaggattgcttgagcctgggaggcagagattgccacaagccaagatcacattgctgcactccaacttgggtgacagag

SEQ ID NO: 211678 - DNA, 201 bp, Homo sapiens
gccaagatcacattgctgcactccaacttgggtgacagagtgagacccccctctcagaaacaatttaagatatgattcaggttatagagattaactcttayttattttttataatccttttctataattcaattatgagaaaagaaaatggatattgtccagtgtctctaagacttgaaaccaaggtcagaaaagatgtag

SEQ ID NO: 211679 - DNA, 201 bp, Homo sapiens
tgcatcacaataaagctacacagagatcccattccccacctgttatactggttaagatccacaatttcacgagactcgatgttggcaaagctcgggggaakaggcatctcgtgtgttgctggtgggacagaggtacaaacccctgagtacctttgcttttttaaacccctttgctgagtagcatgcactctgctggaacca

SEQ ID NO: 211680 - DNA, 201 bp, Homo sapiens
attttgtattttgttttaaaattatttttaaacttgttgatatggcagaaagttttaaagatacaaaggagtttagattatgaaaagaaagttctttcctwctattggcccccagccctcagtttccatcataggggtaactactgttcccatttttctgtgtctttccaggaccttctgtgtcaatacaggcgtatgtat

SEQ ID NO: 211681 - DNA, 201 bp, Homo sapiens
ctgtgtagttcttgccagagttttgatttttgtggagttttcagtctaatctcttgtggtttctgagttttgttttaaatggaaaggcgttttgctctccmaaattattaacaacaacaataaaaaactcccttattttcctccagactgtttatgtcttttttttttttttttttttttgagacagagtctcactctgtt

SEQ ID NO: 211682 - DNA, 201 bp, Homo sapiens
ggccacaacgtggccaaatgatgattgattgggccaacataattttcttttccatatggctatctggtcccaacataattttattgaataattcaccttayttccactaattgattctgctgtctttatcgtgctaaattctcacgtttacttggatctattttttgtctttcttatctcctccaatgatctatgtgtagg

SEQ ID NO: 211683 - DNA, 201 bp, Homo sapiens
ctcccttatccagatctccccaggcaggaggcatcagcattgccagtaaggagacagaagggcacagatgaccttgaaaaggggaaaagggatgccctccytcccacaccacagctgcacccacttctccgtggcacccagttgtgtgcaacctggtatttctgccatttggaaatagctgtgatcacagtgggcttgcac

SEQ ID NO: 211684 - DNA, 201 bp, Homo sapiens
tgattgattgggccaacataattttcttttccatatggctatctggtcccaacataattttattgaataattcaccttacttccactaattgattctgctstctttatcgtgctaaattctcacgtttacttggatctattttttgtctttcttatctcctccaatgatctatgtgtaggttccataataattactgtgac

SEQ ID NO: 211685 - DNA, 201 bp, Homo sapiens
cctttttcatcacaacatggaggagttatgtcagtctctcccatcccttcaccaagagggcctctggggaagaagcatgaccaggtttgcaccctagaatrtctgtcctcagtggtctcttctaggaccttaggggtctccctgcccaggggcagagtatggccctgcggaggctagagcttccccaagagagtgcaccct

SEQ ID NO: 211686 - DNA, 201 bp, Homo sapiens
agatgtggcttcccctgggcaggtacagaccctctgggaaggtgtggctccccctgggcaggtgtggcttcccctgggcagatgcgtctgtccttgggcakgtggggttctccctgggcatgcacagaccctctgggcagatgtggctctccctgggccggcaggcctggtccattctggctctggggggctcagaactga

SEQ ID NO: 211687 - DNA, 201 bp, Homo sapiens
tggggccagtggagaagcagctctttttttccaacgagcgtgtcattgactcggagcttggactgcagcgggctggcccctcctggggtgcaggcagactrcacttcattgtttacccctttttgttttggtaaaatacacataacactatttgtcattttgaagtctatgcttcagtggcatctggtacattcatgttgt

SEQ ID NO: 211688 - DNA, 201 bp, Homo sapiens
ggccggcaggcctggtccattctggctctggggggctcagaactgaggctgacaccagctctggtgaaggtactgggcaggagacctgattagacacttgstatgaactgtgcatcttcataaacccagagagtccagtagaaaaagagacaggtgttcttgcccctgaagacaggtgcttcagtccctgtccctagcttt

SEQ ID NO: 211689 - DNA, 201 bp, Homo sapiens
cccctttttgttttggtaaaatacacataacactatttgtcattttgaagtctatgcttcagtggcatctggtacattcatgttgtataaccatcaccacyatctagatccagaacactttcaccaccccagaaggaaaccccatacccattagcagttattctctttttttttttgagacagaatctcgctgtgtcaccc

SEQ ID NO: 211690 - DNA, 201 bp, Homo sapiens
atagtctaggacttcagctggccgtgatattgacgagtaggagaaattttgataatgtaaagagtttgtattttttgggtggacaagtctttctttttaaratatatacttttgtcattttaaatatatattctttctttttaaaatatacacttttgtcattttaaatatatattctttctttttaaaatatacactttt

SEQ ID NO: 211691 - DNA, 201 bp, Homo sapiens
accatcaccactatctagatccagaacactttcaccaccccagaaggaaaccccatacccattagcagttattctctttttttttttgagacagaatctcrctgtgtcacccaggctggagtgtagtagcgcaatcttggctcaatgcaacccctgcctcccaagctcaagtgagtctcctgcctcagcctcccgagtagc

SEQ ID NO: 211692 - DNA, 201 bp, Homo sapiens
acactggcccatcctcttgccatcaagggtgagaaatggagatcagaccagaacctggagaagtatagattgattacggacaggtaaaagcaaccggagcygagcacaatggcttacgcctgtaatcccagcactttgggaggctgaagcgggcggatcacctgagatcaggagtttgagagcaggctgaccagcatggag

SEQ ID NO: 211693 - DNA, 201 bp, Homo sapiens
aaagtgctaggactacaggcgtgagccaccacgtccggtccccagttgctattttaattaaagctagggttatggtgtggctgaatagcctggtggccctstcctgcaggacctaacatctgtgaatataggctgggaatgtgaatcgctcaggaggccaccccaacacttgtgccagacctagcacttgtgtctccctgt

SEQ ID NO: 211694 - DNA, 201 bp, Homo sapiens
gtggggcagtgaacagaggaaacatgatgcggggaggtgctgtagaaatgggcagtttggagaagaacttgtgtgtgttttgctcctattttagaactggwgtcattgtgaggcttcacaggctgcgttccctgtgcaggacacaaggaaggtgccggccactttgagtagccaggccttgacaagagtaggtggagatcc

SEQ ID NO: 211695 - DNA, 201 bp, Homo sapiens
ctttgcttgagcagttgcatctcctctgtgtcatagaacaagtgctgttggctcttacttaaggcaagggcgctttgtggtgagcggtggagttgggtggygccctggcttctccatcagggagttttagaagctcctggtgaaaacaactccttccttgttttgtgtggttccccgaggggatgacgtgggctgcatccc

SEQ ID NO: 211696 - DNA, 201 bp, Homo sapiens
gaccacgctccagccatacagcttcatcctgtgccaggtccctctggtcaaagctcttgttgatggccagggcctggcacagcttggaggggccactgcaragctcgcggtccttgaggacacggctggcggtgcctttccggagggtgctgcgaagctgacgcatggtctccagaccttccaggggctccagtgctcgca

SEQ ID NO: 211697 - DNA, 201 bp, Homo sapiens
tctgctgcactccagcttgggcaagagagtgagaccctatcttaaaaaaaaaaagaaatacacttttttttttttactctgaaaaattttaaaccctgaamtagagagagcagactgacaaaccttatatgcctgtctcaggtgcctttaaaccctggctccatatatttccttccctctctctatttcaaggcaagtccc

SEQ ID NO: 211698 - DNA, 201 bp, Homo sapiens
caccagaggttgtaatcagcagtaccattcacccctttcccttgtcccacctccacccccacaggatgactcagcagtcctgttggcctccagaagcactragtcatggttggcccagttatctgctccctcaagtgttttcacagacccccacagctgcatgcctccacccttggcttgggcagatgtgcttgcctggct

SEQ ID NO: 211699 - DNA, 201 bp, Homo sapiens
tctgattgtattggctgagcatcacctttattaaatgtggacaagcaggccgggcgtggtgactcacgcctgtaatcccagcactttgggaggctgagggscggatttcttgaggtcagaagtgcaagatcagcctgaacaacaatgtgagatcgcatttctacaaaaaatttttaaaaaatatctgagtgtggtggcaca

SEQ ID NO: 211700 - DNA, 201 bp, Homo sapiens
ctgattgtattggctgagcatcacctttattaaatgtggacaagcaggccgggcgtggtgactcacgcctgtaatcccagcactttgggaggctgaggggyggatttcttgaggtcagaagtgcaagatcagcctgaacaacaatgtgagatcgcatttctacaaaaaatttttaaaaaatatctgagtgtggtggcacaa

SEQ ID NO: 211701 - DNA, 201 bp, Homo sapiens
gtggcacaagtgtagtctcagctactcaggaggctgaggtgggagggtcacttaagcctaggaaatcaagattatggtgagccatggttgtaccattgtaytctggccccagcaacagagccagaccgcgtatcaaaaatgaaaaaaaaaaggccgggcgcggtggctcacacctgtgatcccaacactttgccaggctga

SEQ ID NO: 211702 - DNA, 201 bp, Homo sapiens
actcctggtggcagcacttgtcaccgctctagggagctgggttagttcataaagaagcaccagcctcagtgcagagtgctctgagggagaaagcagcaggkgggtgagctgatgcttgggaaaatggagtaaagtccacgtggaagttagaggaaccaacatggcgtgtctctgccagaggagagggccccatgccagtgt

SEQ ID NO: 211703 - DNA, 201 bp, Homo sapiens
ttagtagagacagggtttcaccatgttggccaggctggtctcgaactcctgacctcaagtgatcggcctgcctcggcctcccaggttttgggattacaggygtgagccgccacgcccggccaattatgtgtctgtctagatgccgctgagtgaagcccccagcgtgcagagcagccaagttattttcttccctgctgcact

SEQ ID NO: 211704 - DNA, 201 bp, Homo sapiens
gtccctgataggttccagagggtcgagggcccctcttgttcctgagagcctcctgcactgtcctttgacccagtcatcatggttgcagaaggagctcttgrgcagagatatgggcctggagcctgctggttttcttgttaaccagtgtgacttctgctgggaagagcttctcatccttcaggaccaaaagtattcagtgaa

SEQ ID NO: 211705 - DNA, 201 bp, Homo sapiens
attgggttatcaactaaccaattattaaaaataatttttgcagacagaacattgagtgttttttggcctactgtaaagatttcaaaacataaagagacacytgtaacaaactctccatctccattttctttggccagcacctctataacaaaagagagaattaggaacaaaactaaagtcagacctagttgttgtagcaat

SEQ ID NO: 211706 - DNA, 201 bp, Homo sapiens
ttttttttgagacagagtcttgccttgttgcccaggctggagtgcagtggcgtgatgttagctcactgcaacctccacctcctgggttcaagtgattctcstgcctcagcctcccgagtagctgggactacaggcgcacgccaccacacctggctaatttttgtatttttagtagagacggggtttcaccatgttggccag

SEQ ID NO: 211707 - DNA, 201 bp, Homo sapiens
gagctcagaacttgaggcaacccagcgccacctagtggatattaaaggaggacaggaatctgagttttgctgaaaaaggctcctaagctgttgttcagcaygtagcattctttcctgacctacgcattctgtttgttagtgcccaggatcacatttcctccatccaaactcccaccctaacagtcttgggtcctggagctt

SEQ ID NO: 211708 - DNA, 201 bp, Homo sapiens
tggctgaatagcctggtggccctgtcctgcaggacctaacatctgtgaatataggctgggaatgtgaatcgctcaggaggccaccccaacacttgtgccakacctagcacttgtgtctccctgtggatcccagtggccctcagtgacagcatgtcactcattcatatgaccattgaattgtgtctcccaggagggcaggga

SEQ ID NO: 211709 - DNA, 201 bp, Homo sapiens
ttgtgagtgagccacgggactgacttgttcttctgtctcagagaggtaaggcgagtctgtgagagaaaggactggggtgcttgcagtcctggaggttgagrcaccagagctagggggtgggcagggcagcagcgggcagggccatgggggtctcacagtggtgcatgaacaacatacgggaactaagggcaggaagcttgg

SEQ ID NO: 211710 - DNA, 201 bp, Homo sapiens
gcgacagagcaagactgtctccaaaaaaaaaaaaaaaaaaaccattgctcacagaaagtgctgtgtgctggctgtgccccacatcctagtgagaggttgcraaggtgctattccacgttagggaggaagtctcgggccatagccaccaggtgtgttctgcatgaggctggggccagcttctccaggctggtaggccatggc

SEQ ID NO: 211711 - DNA, 201 bp, Homo sapiens
gcccatggctcctgctgctgctcaaggggaagtgcccaggctctgtccacctggaggcctgcctggcctcataccgttctgccctcatcgcactgtcctgrcccacctgccacactttgcttctctgctgcccactgaggccagtgttgagaacacggtgggggggtctgctgcactcactggcatgctcacctgcctgca

SEQ ID NO: 211712 - DNA, 201 bp, Homo sapiens
tctcaagtctttgtctccagaagtatctgagtaagtgccagatctattaggcaaaaccagtccttaaagttaaaccctttccgttctcaaattacgaatgmgaacgattctggcttttcagctccgttagacgctaaacctgacagagctctcagtgcggtctttcacagagcccttggtttctgggagctgagccaggtt

SEQ ID NO: 211713 - DNA, 201 bp, Homo sapiens
gggcatgggagcacatgcctgtaatcctagctactccggaggctaaggcaggagaatcacttgaacttgggaggcggaggttgcagtgagctgagatcacrccactgcactccagtttgggcaacagaacgagagtctgtctcaaaaaaaaaaaaaagaagaagaagatggaaattaactgaaataaaaaattcacttgcg

SEQ ID NO: 211714 - DNA, 201 bp, Homo sapiens
ctcaagtctttgtctccagaagtatctgagtaagtgccagatctattaggcaaaaccagtccttaaagttaaaccctttccgttctcaaattacgaatgakaacgattctggcttttcagctccgttagacgctaaacctgacagagctctcagtgcggtctttcacagagcccttggtttctgggagctgagccaggttg

SEQ ID NO: 211715 - DNA, 201 bp, Homo sapiens
tatttattttttataatccttttctataattcaattatgagaaaagaaaatggatattgtccagtgtctctaagacttgaaaccaaggtcagaaaagatgyagtgttccctgggtattaggggccatggtgctcatgtttaaatgtaccgtgtgtccccaccactggtaggggcagaagccatcaagccaggtctgagaga

SEQ ID NO: 211716 - DNA, 201 bp, Homo sapiens
gccactacctcagagaatggggagctagaggtttagagaagaactgatttctttcattttcaaaatgctctgaaatcatattattattattattattattattattattattattattattttgagacgtagtttcattcttgttgcccaggctggggtgcaatggcgcaatctcggctcactgcaacctctgcctcccag

SEQ ID NO: 211717 - DNA, 201 bp, Homo sapiens
acatcttaatgctttcatactgtacaacctgaggagcttggcagctgctgaggaaagagatcccttctgtggatctttggcagagctcccacaatgtttcyactcctggattcaggtctcctttctctttccagaatacatggaaagcagtgtgtcccagaactcaaatatctgcagaggaaaataaaggttttttttttt

SEQ ID NO: 211718 - DNA, 201 bp, Homo sapiens
aacggatgggcagccatgctatgaggaaggaagtcagcgctctgcacgcatccctgtgcactgtccccttgccctccacgcggctctttgggtgaagggcygctctgtgggtgaagggcctgggtcctgggagttgaaggtgcagcacagcaaacctgagtgtaactgggagaggcccctctgcctgtgaactttaaagag

SEQ ID NO: 211719 - DNA, 201 bp, Homo sapiens
gatttcttgtcatgcagatgagaaaacttttaccacaaagattagttttaggctgggtgcagtggctcacgcctgtaatcccagtactttgggaggccgasgcaggaggattgcttgaccccaggagtatgagaccagcttgagtagcattgtgagaccctgtctcttttgaagaaaaaaaagaaaaaaggaaaaaaaaaa

SEQ ID NO: 211720 - DNA, 201 bp, Homo sapiens
tgctgggtctgacccagctctgccagccttgtgcttacttctgaaaaatgacttttgttcctgcccagcctgtacttctgtgtgagaatttgacttttagygagaaaaccccatggtaagcgttgagtgtggggagcgtgtgaccctgtttctcagcgtggggagtgtgtgaccctgtttctcactgttgggagtgtgtga

SEQ ID NO: 211721 - DNA, 201 bp, Homo sapiens
tggctcagtggtctctgtcagccccaccctgacttgggggacagtgcaggggcatagtttcccgggagtggtcgggttgtcagggactgagtttccggttragaaccacactcggccctcgagagaaccacttgcaactcttctgagcagctggtccaggtctcacctgcatcctagcctcctctgtgccagcctgagttg

SEQ ID NO: 211722 - DNA, 201 bp, Homo sapiens
aatctctgccccagcctgggagcagagcaggatctcataccactaccaggacagctgacacctctgcgccccagaagagctgtcatggccagtgtggcttsagggcagcagcctgttgccaggtcccaggtccccggtccccaggcttggggaaggaagggggtggaagactttgaaagtccccccttggctgaggtctgg

SEQ ID NO: 211723 - DNA, 201 bp, Homo sapiens
caaggcatggctggctggcacccgggagacttctgggaccaggcatgtcacacaaacctcctcttcctccaggtaggcacaagtagtcctgtgagggtggygggcaagcaggagtggactctgtcatctccctagtccactgccgccctagagagacctgtgactgttgctccttgtttttattttttgaggggttttgtg

SEQ ID NO: 211724 - DNA, 201 bp, Homo sapiens
ctccagcctgggcgacagagcaagactccatctcaagggggaaaagaaaaagccgctcaattgttttgtcatggggccgggcgtggtggctcacgcctgtmatcccagcactttgggaggccgaggcgggcggatcacctgaggtcaggagttcgagaccagcctgaccaacatggtgaaaccccgtctctactaaaaata

SEQ ID NO: 211725 - DNA, 201 bp, Homo sapiens
tcacccctttcccttgtcccacctccacccccacaggatgactcagcagtcctgttggcctccagaagcactgagtcatggttggcccagttatctgctcyctcaagtgttttcacagacccccacagctgcatgcctccacccttggcttgggcagatgtgcttgcctggctgactgtggtccctgataggttccagagg

SEQ ID NO: 211726 - DNA, 201 bp, Homo sapiens
agaaagatgccctctcctttctgtagctgaggttgacacacaagaaagcaggtaggcatttttgtccccaggcttgggcacttccctctgcccagccatcrcatccatgctgcagggcagtgtaaagggacaagtgcaggttcagggttccaagtttgactctcgctttgcagccttcggtgtgtgatcttgggcacattc

SEQ ID NO: 211727 - DNA, 201 bp, Homo sapiens
ggcatggccttccctctcagataaacaggagggggaggcagcaccagaggttgtaatcagcagtaccattcacccctttcccttgtcccacctccaccccyacaggatgactcagcagtcctgttggcctccagaagcactgagtcatggttggcccagttatctgctccctcaagtgttttcacagacccccacagctgc

SEQ ID NO: 211728 - DNA, 201 bp, Homo sapiens
gaaagatgccctctcctttctgtagctgaggttgacacacaagaaagcaggtaggcatttttgtccccaggcttgggcacttccctctgcccagccatcgyatccatgctgcagggcagtgtaaagggacaagtgcaggttcagggttccaagtttgactctcgctttgcagccttcggtgtgtgatcttgggcacattct

SEQ ID NO: 211729 - DNA, 201 bp, Homo sapiens
taggcaaaaccagtccttaaagttaaaccctttccgttctcaaattacgaatgagaacgattctggcttttcagctccgttagacgctaaacctgacagarctctcagtgcggtctttcacagagcccttggtttctgggagctgagccaggttgtaccagctgaataaaaggcactctctgcacccctgctcttggggca

SEQ ID NO: 211730 - DNA, 201 bp, Homo sapiens
cgtgatcttggctcactgcaacctccgcctcccaggttcaagtgattctcctgcctcagcctcccaagtagctgggattacaggtgtgtgccaccacaccmggctaatttttgtatctttagtagagatgaggtttcactgtgttggcaaggctggtctcgaactcctgagctcaagtgatccacccgcgtctgttttatt

SEQ ID NO: 211731 - DNA, 201 bp, Homo sapiens
aggagtaaacaaaatccatgacgaatgttgtccacctgtcaacaccgataacccctgtgggacagttgatgaaacgcagccacagccccacccaggatgcygtaggcaggccctcacctcggggaacagtgtttgcaggatgctgtaagcaggccctcacctcggggaatagtgtttccaggatgctgtaggcaggccctc

SEQ ID NO: 211732 - DNA, 201 bp, Homo sapiens
acgccctcagctttggctccccaagtaggacccccagggcaccgctgtggtagtcaggggagacgcttgggggtggcatccaggaggctcaacgtgggcgrtgctgtgagtgatgaggggcctccacacagctgcacacgcacatgcacgtgcctcgtgtcccccgtggagacacctctcctgtctcctagcaccaccgtg

SEQ ID NO: 211733 - DNA, 201 bp, Homo sapiens
agtgctgggccaccttcactaggtgggtgtcactgactccagtcactcaagaggaaattgaggctcagtgggtgaggctggggccagctgtctcctctcastctgagagagttggggtttgcgacactgactgtgtgagggcagcaagccttgaggataccatgaaaacctcacagttgttctgattgtattggctgagca

SEQ ID NO: 211734 - DNA, 201 bp, Homo sapiens
ccagggcaccgctgtggtagtcaggggagacgcttgggggtggcatccaggaggctcaacgtgggcggtgctgtgagtgatgaggggcctccacacagctscacacgcacatgcacgtgcctcgtgtcccccgtggagacacctctcctgtctcctagcaccaccgtgactctgaggtggcagctctgtctccgggctctt

SEQ ID NO: 211735 - DNA, 201 bp, Homo sapiens
cgtgactctgaggtggcagctctgtctccgggctcttcagcaggcttgctagaattaggggcagctcccagcccagcaaatcagtgctggaatctctgccscagcctgggagcagagcaggatctcataccactaccaggacagctgacacctctgcgccccagaagagctgtcatggccagtgtggcttgagggcagcag

SEQ ID NO: 211736 - DNA, 201 bp, Homo sapiens
ggagcgcaatcttggctcactgcaacatctgtctcccaggctcaggtgatccttccatctcggcctcccgagtagctgggactataggcacccgcccccaygcctgaatagtttttgtatttttttgtggaaatgggattttgccatgttaccctggctgatcttgaattcctggactcaagcaatctacccaccttagcc

SEQ ID NO: 211737 - DNA, 201 bp, Homo sapiens
tgggtgagggacaggatgcccaggcccaccttggggtgtttgtggggcacacatcgcacctctgttcaggtcccttgaggttgcccccagaggggaggctrcccgtttcccaagtcagccgtatgaggggcgtgtcacacccaggaggtggggcagcagcgaatgcttgcaggcagatgtaccctaacccttgtaggagtt

SEQ ID NO: 211738 - DNA, 201 bp, Homo sapiens
cctgtctctacaaaaaaaaaaaaaaaaaaaaaaaaaaaaatcacccaggcgtgatgttgcacgtctgtagtcccagttacttgggaggttgtcttgagccygggagatcaaggctgcagtgagcggagatggcgccactgcactccagcctgagcaacagtgagaccttgtctcagaaaaaagaaaaaaaaaatagacctt

SEQ ID NO: 211739 - DNA, 201 bp, Homo sapiens
cactgcaacccccacctcccaggtgcaagcaatcctcctgtctcagcctccaagtagctgggactacaggcatgtgccgcagtgcctggctaattaaatamaaatttttggcagagatgagggtctcactatattgcccaggttggtctcgaactccgaggttcaggcgatcctcctgccttgccctcccaaaatgctggg

SEQ ID NO: 211740 - DNA, 201 bp, Homo sapiens
tctgtcagccccaccctgacttgggggacagtgcaggggcatagtttcccgggagtggtcgggttgtcagggactgagtttccggttaagaaccacactcrgccctcgagagaaccacttgcaactcttctgagcagctggtccaggtctcacctgcatcctagcctcctctgtgccagcctgagttgcagaaagcaccct

SEQ ID NO: 211741 - DNA, 201 bp, Homo sapiens
caccaccagctctgttcaggcctgtgggcagctcagagctgattcccagcagtggctcttcagcagaggcctctgggggctggtgtcaggttgggctcacrcccacccatcccttccaggctccttcactacttccgcggccgccaccacctggaggagattatgtacaacgagaacacgcggcgctcccagctgctcatg

SEQ ID NO: 211742 - DNA, 201 bp, Homo sapiens
ctctactgactgtggccctccccttcatatgtaggatgtctgtttccaggggaggccaagatagtgagttaactagcatcgtgaaacccttgaattttctacagtgtggtgcaagcatttcctcttatttattacaagacactctagtagctaatattagtattatttagcacttatttttctgctaaaccctctctatat

SEQ ID NO: 211743 - DNA, 201 bp, Homo sapiens
tctactgactgtggccctccccttcatatgtaggatgtctgtttccaggggaggccaagatagtgagttaactagcatcgtgaaacccttgaattttctacagtgtggtgcaagcatttcctcttatttattacaagacactctagtagctaatattagtattatttagcacttatttttctgctaaaccctctctatatg

SEQ ID NO: 211744 - DNA, 201 bp, Homo sapiens
catcctcttgccatcaagggtgagaaatggagatcagaccagaacctggagaagtatagattgattacggacaggtaaaagcaaccggagccgagcacaawggcttacgcctgtaatcccagcactttgggaggctgaagcgggcggatcacctgagatcaggagtttgagagcaggctgaccagcatggagataccccgt

SEQ ID NO: 211745 - DNA, 201 bp, Homo sapiens; identical to SEQ ID NO: 37494

SEQ ID NO: 211746 - DNA, 201 bp, Homo sapiens
atcctcttgccatcaagggtgagaaatggagatcagaccagaacctggagaagtatagattgattacggacaggtaaaagcaaccggagccgagcacaatkgcttacgcctgtaatcccagcactttgggaggctgaagcgggcggatcacctgagatcaggagtttgagagcaggctgaccagcatggagataccccgtc

SEQ ID NO: 211747 - DNA, 201 bp, Homo sapiens
cccctggtcttgtgactggcagcagctataaagccagcaaaggaagctccagagagccagtcctcgggtgcgatcattcagccaggaagcaggaagccttrgcctagccaggccccagcgctccccttctgcctcacccactcagtgtttgtgttggtcaagtggtgggggctaggagttggcttagagcagctgccagtg

SEQ ID NO: 211748 - DNA, 201 bp, Homo sapiens
gggtgagaaatggagatcagaccagaacctggagaagtatagattgattacggacaggtaaaagcaaccggagccgagcacaatggcttacgcctgtaatmccagcactttgggaggctgaagcgggcggatcacctgagatcaggagtttgagagcaggctgaccagcatggagataccccgtctctactaaaaaataca

SEQ ID NO: 211749 - DNA, 201 bp, Homo sapiens; identical to SEQ ID NO: 37483

SEQ ID NO: 211750 - DNA, 201 bp, Homo sapiens
gctggccgtgatattgacgagtaggagaaattttgataatgtaaagagtttgtattttttgggtggacaagtctttctttttaaaatatatacttttgtcrttttaaatatatattctttctttttaaaatatacacttttgtcattttaaatatatattctttctttttaaaatatacacttttgtccaggcacagtggc

SEQ ID NO: 211751 - DNA, 201 bp, Homo sapiens; identical to SEQ ID NO: 37496

SEQ ID NO: 211752 - DNA, 201 bp, Homo sapiens
caccattgttgttcttccttaagaacaacagtgcctccttagggcacccaggcatttccagagccatctctgttactattcaggcagccactcccaagaayagagcatgggggctgacagcccacatgtctatggatgggccctggaggggactcaggaaatgagcagcagtggcctctgcaaaggagcctgggggaaagg

SEQ ID NO: 211753 - DNA, 201 bp, Homo sapiens
cgagaccagcctggccaacatggtgaatacctgtctctaccaaaaatacaaaaaaattagccagacatggtggcgggcgcctgtaatcccagctacttggraggctgaggcaggagaatcgcttgaacccgggagctgtaaatcttgtgttgtgattcttgtaggaaatgaaggtcctcagtccccattccatcacatcct

SEQ ID NO: 211754 - DNA, 201 bp, Homo sapiens
tttgggttatgcagcatcccactacttatggtaggaagccaggcccatccgtgggaccagaggatgcagaggtttgcaggatagcttcacaggtcctgtcyagttctaaggttaggaatggatgctttctcagatgctaaaagctgaggggactagactaagcttgtgcacatttctgtcttggagatgaacggcgagagt

SEQ ID NO: 211755 - DNA, 201 bp, Homo sapiens; identical to SEQ ID NO: 37490

SEQ ID NO: 211756 - DNA, 201 bp, Homo sapiens; identical to SEQ ID NO: 37492

SEQ ID NO: 211757 - DNA, 201 bp, Homo sapiens
tctttcctactattggcccccagccctcagtttccatcataggggtaactactgttcccatttttctgtgtctttccaggaccttctgtgtcaatacaggygtatgtatttcttttttctttttttttttttttgagacgagtcttgcagtcttgccaggctggagtgcagtggcgtgatctcggctcaccgcaacctccg

SEQ ID NO: 211758 - DNA, 201 bp, Homo sapiens
gccctgttcgagatggagtctctgcattcaggtgtgtaggggcaggtgccactgcccaggcctgagggttcggcttgtcaccaagacgccgggccatgggcctggcatgcctatttttcggactcttctctctccagtacttcttagatgttccttttcccttgagaggcagtgccaagttcttttttttttttttttttt

SEQ ID NO: 211759 - DNA, 201 bp, Homo sapiens; identical to SEQ ID NO: 37493

SEQ ID NO: 211760 - DNA, 201 bp, Homo sapiens
tctcggctcaccgcaacctccgaccccctgtcaagcaattctcctgcctcagcctcccgagtagctgggactacaggcatgcgccaccatgcccagctaatttttttttttatttttagtagagatggggtttcaccatgttggccaggctggtctccaactcctgaccttgtgatccgcccgccttggcctcccaaagtg

SEQ ID NO: 211761 - DNA, 201 bp, Homo sapiens
agacggggtttctgcatgttggtcagggtggtctcccgacttcaggtgatccacccgcctcggcctcccaaagtgttgggattactggcgtgagccaccgygcccggccagtggctgttttttaaatggtttgctgagtagggtgcactctgctggaacttacatcacaaaagacaaatcactctcctatgtttaaggact

SEQ ID NO: 211762 - DNA, 201 bp, Homo sapiens
cagaggttgcagtgagctgagatggcgccactgcactccagcctgggtgacagaactagatgtcatctcaaaaataataataataataaaaattaaaaaamaaaagtaaaataaaaaataaataaaatttaaaaaatactttttaattctttttttggctgcctagtgagccgcaactgcccccaccattgagtttgttcc

SEQ ID NO: 211763 - DNA, 201 bp, Homo sapiens
cctgtgttattttgtatgtgcgcctctgtatctataagataaattcctaaaggcattactaatagggaaaatggcatttgtaatgttgtgtttccttctcrggggtttgtacctctgtcccaccagcaacacacgagatgcctcttcccccgagctttgccaacatcgagtctcgtgaaattgtggatcttaaccagtata

SEQ ID NO: 211764 - DNA, 201 bp, Homo sapiens
agcaacatggtgagaccctgtctcttaaaaatttgtttaaataaaaaccaaaccattgactttatatttctttttcttcttctttttttttttttttttgmgatggaatatccttctgttgcccaggctggagtgcattcttctgcctcagcctcccgagtagctgggactacaggtgcacatcaccatgcctggctaatt

SEQ ID NO: 211765 - DNA, 201 bp, Homo sapiens
tgcttctcaccactggaacactctgggggacttggcattccttccctgccctcctcgccctctgagacagccactgttctgcctggacgtgcacctgtgaygggtcttcatgaggtgtgcagggcaggcccattcacagggaggatgtactctgggtgttgggtgtctgccaggggtctggacgggcaggggcctgagtta

SEQ ID NO: 211766 - DNA, 201 bp, Homo sapiens
gtgcttaccttttctgggcctacagacctgccttgtacccctttgggactggggactgcctacagatgagggtgcaaaggcagttttgttctcactgggcyaggcctgaccctctgagagttctgcttctgtcttcactccctgccatggttcaggtggccacagggtctgtgggtatgagttctggggtcactggtcccc

SEQ ID NO: 211767 - DNA, 201 bp, Homo sapiens
aaatttcaaggtaggctgtttggaacccacatagatcttttgggttatgcagcatcccactacttatggtaggaagccaggcccatccgtgggaccagagratgcagaggtttgcaggatagcttcacaggtcctgtccagttctaaggttaggaatggatgctttctcagatgctaaaagctgaggggactagactaagc

SEQ ID NO: 211768 - DNA, 201 bp, Homo sapiens
agtgtgtgatcctgtttctcagcgtggggagtgtgtgaccctgtttctcagcgtggggagtgtgtgaccctgtttctcagcgtggggagtgtgtgatcctstttcttgtctggtaagttgcttagtcgtgatggtcaacagttaatgcttaatggtggcacttctgctagacttttgtgcagtttttataaaatagccttg

SEQ ID NO: 211769 - DNA, 201 bp, Homo sapiens
aaaaaaagcagtgaccatttggctccagagctacgtgggactcactgtagcacgaaaaagaagccaccagcagaaccctggtcccaacatcaggacgcagscttgggcacctctgggtttgaacagccgtctgccgtcctgaacccactccgcccacctggtggtcagcgggaccgtggtgggcatggggtccaggaggcc

SEQ ID NO: 211770 - DNA, 201 bp, Homo sapiens
atattgaaattaagctggttatctacagtggcctctaagggttcaagtgaaataaagaatcacatgtttctcacattaaatcaaaagctagaaatgattargcttcttgaggaaggcatgttgaaagctgaactaggccaaaagctagtctgcttgcacaaaacagccaaatggtaaatgcaaaggaaaagctcttgaagg

SEQ ID NO: 211771 - DNA, 201 bp, Homo sapiens
tgtcatcccacactgtgagggggtgtgtgtgtgtgtgtacatgtgcataggggcctacctcactttattgtgttttctacaaattgaaagttcatggcaamcctgtgtccagcaagtctgtcagcaccatttttccaacagtatatactcactttgtgtctctgggtggtgttttggtaattcttgcagtatttcaaactt

SEQ ID NO: 211772 - DNA, 201 bp, Homo sapiens
tgacgaaaccccatctctacaaaaaatacaaaaattagctgggttggtgacctgcgcccttagtcccagccactgcggaggctgagggagcccaggacatggagcttgcagtgagccgagatcatgccgctgtactccagcctgagccttgagtgacagagtgagaccctgtctcaaaaaaaaaaaaaaaaaaaaaaaaat

SEQ ID NO: 211773 - DNA, 201 bp, Homo sapiens
caacgccctcagctttggctccccaagtaggacccccagggcaccgctgtggtagtcaggggagacgcttgggggtggcatccaggaggctcaacgtgggyggtgctgtgagtgatgaggggcctccacacagctgcacacgcacatgcacgtgcctcgtgtcccccgtggagacacctctcctgtctcctagcaccaccg

SEQ ID NO: 211774 - DNA, 201 bp, Homo sapiens
ctctgaaatcatattattattattattattattattattattattattattattttgagacgtagtttcattcttgttgcccaggctggggtgcaatggcrcaatctcggctcactgcaacctctgcctcccaggttcaagcaattctcctgcctcagcctcccaaagtgctgggattacaggcgtgaaccactgcacccg

SEQ ID NO: 211775 - DNA, 201 bp, Homo sapiens
agctgctgaggaaagagatcccttctgtggatctttggcagagctcccacaatgtttccactcctggattcaggtctcctttctctttccagaatacatgraaagcagtgtgtcccagaactcaaatatctgcagaggaaaataaaggtttttttttttttttttttttgagacaaagtttcactctgtcgcccaaggctg

SEQ ID NO: 211776 - DNA, 201 bp, Homo sapiens
agtgattctcctgcctcagcctcccgagtagctgggactacaggcgcacgccaccacacctggctaatttttgtatttttagtagagacggggtttcaccrtgttggccaggctggtcttgaactgctgacctcgtgatccacccaccttggcctcccaaagtgctgggattacaggcatgagccaccatgcccggccccc

SEQ ID NO: 211777 - DNA, 201 bp, Homo sapiens
cggctcactgcaacctctgcctcccaggttcaagcaattctcctgcctcagcctcccaaagtgctgggattacaggcgtgaaccactgcacccggcctaattttttttttttttttaacagagggtttctccatgttggccaggctggtctcgaactcagcttggtcaacatggagaaccctgacctcaggtgattgaact

SEQ ID NO: 211778 - DNA, 201 bp, Homo sapiens
cggggtttcaccatgttggccaggctggtcttgaactgctgacctcgtgatccacccaccttggcctcccaaagtgctgggattacaggcatgagccaccrtgcccggcccccatattttcttttcttaaacataatgtgatcttaagagatgctctcctgcccgggtctccacctgcagtttcccctaagcagcagggga

SEQ ID NO: 211779 - DNA, 201 bp, Homo sapiens
ttttaacagagggtttctccatgttggccaggctggtctcgaactcagcttggtcaacatggagaaccctgacctcaggtgattgaactcctgggcttaartgatcctcccaccttggcctcccaatgttctgggattacacgcatgagccccctcacccagctaccagctctgcctttaattctcaggtgacatcttggg

SEQ ID NO: 211780 - DNA, 201 bp, Homo sapiens
ggacttcatcttaatggtgttgccctaccccagtcttttgcatttcagtcagcactcatgggatctcagttattttctttttcttttttttttctttttcttttttttttttttttttgcgggggtgtgtgtgtgtgtgagagagagacagagttttgatcttatcgcccaggctggatttcagtagtgcgatcccggctc

SEQ ID NO: 211781 - DNA, 201 bp, Homo sapiens
accactgcccttttctcaaatcccgctcttggcccttctctccgcagttaagggccaggaggctccagctgcctgtttgtgtcccaggtgcatacctgatrcacacccggtgcaggacctcgtgcaggacctggtgcatacctggtgcagggttccctgcacttcgtatgttccgtgtgtttgagtcccaggtgcatacct

SEQ ID NO: 211782 - DNA, 201 bp, Homo sapiens
ccactgcccttttctcaaatcccgctcttggcccttctctccgcagttaagggccaggaggctccagctgcctgtttgtgtcccaggtgcatacctgatgmacacccggtgcaggacctcgtgcaggacctggtgcatacctggtgcagggttccctgcacttcgtatgttccgtgtgtttgagtcccaggtgcatacctg

SEQ ID NO: 211783 - DNA, 201 bp, Homo sapiens
tttgagtcccaggtgcatacctggtgcatacccggtgcatacctggtgcaggacctggtgcatacccggtgcatacctggtgcaggacctggtgcataccyggtgcagggttcctgcacttcgtgtgttccgtgacaggtgattgttttgcagcccctaccatgccctgctgctgctcagtgatgagaagtccttgctggg

SEQ ID NO: 211784 - DNA, 201 bp, Homo sapiens
atcatcgcaccttggcctcctaaagggctggtattacaggcatgagccaccatgcccagctgtgcctttggacttcatgggctggacaggactcagtaaasaccatgtcctgcccaccttcatagcattcaggagacagagaattttaaaagaactcaccactccatacaaccctgcagagtgagggaggcagtgaccctc

SEQ ID NO: 211785 - DNA, 201 bp, Homo sapiens
cacagtcccatatcccacaggtaacctagatccctccaggttttttatctgtatatatacattttattgtgtgtgtgtgtgtgtgtgtgtgtgtgtgtgtrtatatatatatatatatatatatatacacacacaaacattttattttgtattatgaaaattaggatcgtgctgtatattcgttgtgattggctgaataat

SEQ ID NO: 211786 - DNA, 201 bp, Homo sapiens
ctagatccctccaggttttttatctgtatatatacattttattgtgtgtgtgtgtgtgtgtgtgtgtgtgtgtgtgtatatatatatatatatatatatayacacacacaaacattttattttgtattatgaaaattaggatcgtgctgtatattcgttgtgattggctgaataatggcccccacagatatacacatccta

SEQ ID NO: 211787 - DNA, 201 bp, Homo sapiens
gtgtgtgtgtgtgtgtgtgtgtgtgtgtgtgtgtatatatatatatatatatatatatacacacacaaacattttattttgtattatgaaaattaggatcrtgctgtatattcgttgtgattggctgaataatggcccccacagatatacacatcctaatccccaaaatctatgaatgtgaactcatgtgggactttggag

SEQ ID NO: 211788 - DNA, 201 bp, Homo sapiens
ctcggcttgctgcaacctcacctctagggttcaagcgattctcctgcctcagcctcccgagtagctgggattacaggcatccaccaccaaggtgagctaaktttttctttttaagtagagacagggtttcgccatgttggccaggctggtctcgaactcctgacctcaagcgatccacccacctcggcctcccaaagtgct

SEQ ID NO: 211789 - DNA, 201 bp, Homo sapiens
tgctgtttataagttttgccccacccccaatctcatgaatataactctgtctttatgtgtattacattaccagacagactatataaagtataaagccagakgggtgcagtggctcatgcctgtcatcccagcactttgggaggccgaggtgggcagatcatgaggtcaggaggtcgagaccagcctggccaacgtggtgaa

SEQ ID NO: 211790 - DNA, 201 bp, Homo sapiens
aagacgccgggccatgggcctggcatgcctatttttcggactcttctctctccagtacttcttagatgttccttttcccttgagaggcagtgccaagttctttttttttttttttttttgagacggagtctcgctctgtcacccaggccggactgcggactgcagtggcgcaatctcggctcactgcaagctccgcttccc

SEQ ID NO: 211791 - DNA, 201 bp, Homo sapiens
ctcttctctctccagtacttcttagatgttccttttcccttgagaggcagtgccaagttctttttttttttttttttttgagacggagtctcgctctgtcrcccaggccggactgcggactgcagtggcgcaatctcggctcactgcaagctccgcttcccgggttcacgccattctcctgcctcagcctcctgagtagct

SEQ ID NO: 211792 - DNA, 201 bp, Homo sapiens
agtacatttgtgtttctagagcggaggccctcagagccctggactctgagataagagtcagcaccacccacagcacccctgcaggtgacactcccttatcyagatctccccaggcaggaggcatcagcattgccagtaaggagacagaagggcacagatgaccttgaaaaggggaaaagggatgccctccctcccacacca

SEQ ID NO: 211793 - DNA, 201 bp, Homo sapiens
ccgtctctactaaaaaatacaaaaaattagctgggtgtggtggcgggcgcctgtagtcccagctactggggaggctgaggcaggagaatggcctgaaggcrggaggcggagcttggcgggaggaggagaatggcgggaaggcgggaggtgcagtgagcccagatcgcgccactgcacctccagcctgggcagcagagcgag

SEQ ID NO: 211794 - DNA, 201 bp, Homo sapiens
cgcctgtagtcccagctactggggaggctgaggcaggagaatggcctgaaggcgggaggcggagcttggcgggaggaggagaatggcgggaaggcgggagktgcagtgagcccagatcgcgccactgcacctccagcctgggcagcagagcgagactccgtctcaaaaaaaaaaaagcaggctgggcacagtggctcacgg

SEQ ID NO: 211795 - DNA, 201 bp, Homo sapiens
tcagcgggaccgtggtgggcatggggtccaggaggcctgcccacccttgttggggggctgtggtggctgcctccctggccttcaccaccagctctgttcaggcctgtgggcagctcagagctgattcccagcagtggctcttcagcagaggcctctgggggctggtgtcaggttgggctcacacccacccatcccttccag

SEQ ID NO: 211796 - DNA, 201 bp, Homo sapiens; identical to SEQ ID NO: 37488

SEQ ID NO: 211797 - DNA, 201 bp, Homo sapiens; identical to SEQ ID NO: 37489

SEQ ID NO: 211798 - DNA, 201 bp, Homo sapiens
ctagaggagctctggctaaggcacagttttctagaaataaaacatttattcggtttttaaacaattaaaaaatcttgtctgggcaggccctttgctcaggmctgtgtgtcctgctcagccactctgtcgaccacactgacccaggggctgccccggacatagaagcggaggggtttccgggcccactcccctgcatggccg

SEQ ID NO: 211799 - DNA, 201 bp, Homo sapiens
gacttaaaaacagtgacaaacctttctctttccccttgttaacagacctcagtgcagctcctggcttaccctcttactgtgggggatttacaggctggagrttgggccggcacctttccagagcagtcatccctctgacatgttcagggaatttgcccaggtctgccatggcctttggggcactcctggtggcagcacttg

SEQ ID NO: 211800 - DNA, 201 bp, Homo sapiens
cactctgtcgaccacactgacccaggggctgccccggacatagaagcggaggggtttccgggcccactcccctgcatggccgacgcccacccgggctgctrccactacagccggctcactgggctccaggggaccacgctccagccatacagcttcatcctgtgccaggtccctctggtcaaagctcttgttgatggccag

SEQ ID NO: 211801 - DNA, 201 bp, Homo sapiens
ggtcaaagctcttgttgatggccagggcctggcacagcttggaggggccactgcagagctcgcggtccttgaggacacggctggcggtgcctttccggagrgtgctgcgaagctgacgcatggtctccagaccttccaggggctccagtgctcgcagcaagacgcaagccccgtcccctgtgggacggacagtttggaagt

SEQ ID NO: 211802 - DNA, 201 bp, Homo sapiens
gcccagcaaatcagtgctggaatctctgccccagcctgggagcagagcaggatctcataccactaccaggacagctgacacctctgcgccccagaagagcygtcatggccagtgtggcttgagggcagcagcctgttgccaggtcccaggtccccggtccccaggcttggggaaggaagggggtggaagactttgaaagtc

SEQ ID NO: 211803 - DNA, 201 bp, Homo sapiens; identical to SEQ ID NO: 37497

SEQ ID NO: 211804 - DNA, 201 bp, Homo sapiens
tcatcttgttagcaggatgaagggaacttgtacaccagagcctgccagtcagctctctgcatacaggcaggatcagtgatggcattactaagattctgaagggtcgaacacagtaacgtaggatttagctacatttatacagatccagcaattctgggaggttctgtggtgttattcgtgaacctccatggaaggagtttc

SEQ ID NO: 211805 - DNA, 201 bp, Homo sapiens
catctggtacattcatgttgtataaccatcaccactatctagatccagaacactttcaccaccccagaaggaaaccccatacccattagcagttattctctttttttttttgagacagaatctcgctgtgtcacccaggctggagtgtagtagcgcaatcttggctcaatgcaacccctgcctcccaagctcaagtgagtc

SEQ ID NO: 211806 - DNA, 201 bp, Homo sapiens
cagctgccagtgtgcaccggatgttgggagagcccatgcaatgactcagtggaaggactgactgcaacaccctgcacaggcagggcaggaggaggctgacraagccccctcacctcccttgggatccctcctccagcctagccccctccctcaccaggccaggccccttgagaaacagagacagcaagcgaaggctcctgg

SEQ ID NO: 211807 - DNA, 201 bp, Homo sapiens; identical to SEQ ID NO: 37486

SEQ ID NO: 211808 - DNA, 201 bp, Homo sapiens
gccactggattccagcctgggcaacagagcaagactccgtctcaaaaaaaaaaaaaaaagttacgtgaacatctgaagttgtctttgccacccccagttcyagcaagcacagggatcacccctggccgtgttgggagttgtctgccctgtgcatagatgcagatctatccacaggaaaagagaacgtcgcgtgaggttttt

SEQ ID NO: 211809 - DNA, 201 bp, Homo sapiens
gtctttgccacccccagttccagcaagcacagggatcacccctggccgtgttgggagttgtctgccctgtgcatagatgcagatctatccacaggaaaagrgaacgtcgcgtgaggtttttcatcgcacgaattgttctgtggcgcccttttcccatagtcggccttggagctccgtctgcctttgcaagcagggatcaac

SEQ ID NO: 211810 - DNA, 201 bp, Homo sapiens
gccgccgccttagcacctcctccggacggtgtcgccgaagtctcgcgagcccggagcgtggcacgtgggttggtaactgtggcgctgctccctccaccacmacccctgtcctcctcaggccccctccgcctccacccctgccctcctcaggccccctccgcctccacccctgccctcctcaggccccctccgcctccaccc

SEQ ID NO: 211811 - DNA, 201 bp, Homo sapiens
agatgccattaagaacattggtgatcatgtcaaaatatcaacagtaacaggagtttggaaaaagttgattccagctctcatggatgactttgaaggagtcraaacttcagtggaggaagtaactgcagatatggtggaaatagcaagagatctagaattagaagtagggcctaaagatgtgactgaaatgctgcagtctca

SEQ ID NO: 211812 - DNA, 201 bp, Homo sapiens
tcggcctcccaaagtgctaggattacaggcgtgagccatcgtgcctagccagaaagtaaactcctaaactgtttctaaaaatctcaactcaggtagtgcaraagcccagatgttttctgacaaatatatatggatccaccatgaccactttattgctccaggcagaggcttagggaagtcaggtgtgctggcagtcacagt

SEQ ID NO: 211813 - DNA, 201 bp, Homo sapiens
gattagttttaggctgggtgcagtggctcacgcctgtaatcccagtactttgggaggccgaggcaggaggattgcttgaccccaggagtatgagaccagcytgagtagcattgtgagaccctgtctcttttgaagaaaaaaaagaaaaaaggaaaaaaaaaaagaaaagaaaagatgagatacttctgcacaggcatccgg

SEQ ID NO: 211814 - DNA, 201 bp, Homo sapiens; identical to SEQ ID NO: 37487

SEQ ID NO: 211815 - DNA, 201 bp, Homo sapiens; identical to SEQ ID NO: 37485

SEQ ID NO: 211816 - DNA, 201 bp, Homo sapiens
attttatttattttttgagacggagtctcactctgtcgcccaggctggagttgagtggcgtgatctcggctcactgcagcctccacctcccgggctcaagrgattctcctgcctcagcctcccaagtagctggggctacagggcatgtgccaccacaccctgcaattttttttttttttttttttttttttagtagagatg

SEQ ID NO: 211817 - DNA, 201 bp, Homo sapiens
aggcgactgccaccacgcccggctaattttttctatttttagtagagatggggtttcaccgtgttagccaggacggtctcgatctcctgaccttgtgatcyaccagcctcggcctcccaaagtgctgggattacaggcgtgagccaccgcgcccggcccgtgtctttgactgttgttcccaaaagtgcttttctttctgaa

SEQ ID NO: 211818 - DNA, 201 bp, Homo sapiens
aagctcaagtgagtctcctgcctcagcctcccgagtagctgggattacaggtgtgcgccaccacgcccagctaatttttgtatttttagtagagatcggtggggggggggggtctcgccatgttggccatgctggtcttgaactcgtgaccttaggtgatccacccaccttggcctcccagactgctgggattacaggcgt

SEQ ID NO: 211819 - DNA, 201 bp, Homo sapiens
actacatgaaaatgaaccttttctcatatttttatttttagggtgatttattatcctgaagtcatttttcttcttaaaatgatgcccatggctttagcctytactgaaaatccttatgttttaggcatcacttcgagagccatcaaacccacactgggactgattgatcctctgcacaccctccacatgcctgcccgagtg

SEQ ID NO: 211820 - DNA, 201 bp, Homo sapiens
gtatactgctagttcacacaagcaggaggtgacagagttagaactcacatccaggtcccccagggccatggtctgcttccctcactatgttatgctgcctkccaagagactgtagaaaattgtgtctaactccattctggtcaatattgtcagaactttgatgagctgttccctaataacctggaaatgaggggaataagg

SEQ ID NO: 211821 - DNA, 201 bp, Homo sapiens
caaggagaaggtgccccggggctccggcaagaaaaggaagtttcaaccccttttcggggactttgcagccgagaaaaagaaccagttggagctgcttcgtrtcatgaacagcaagaagcctcagctggatgtgactagggccaccaataagcagatgagggaggaggaccaggaggaggccgccaagaggaggaaaatgag

SEQ ID NO: 211822 - DNA, 201 bp, Homo sapiens
actcaactgtattaatttatattataagtaatgactgttgcaggcaagaggtgggctggtagaatgtactgtgatcatcagtgttagataatatatccacygtgggttgagtgccaaacagctccaagacaggttgtgatctaaatggagggaaggaggaagatgacgctttccatctgtgtactttcaatatttcttttt

SEQ ID NO: 211823 - DNA, 201 bp, Homo sapiens
agaaaaagaaccagttggagctgcttcgtgtcatgaacagcaagaagcctcagctggatgtgactagggccaccaataagcagatgagggaggaggaccargaggaggccgccaagaggaggaaaatgagccagaagggcaagagaaagggaggccggcaggggcctgggggcaagaggaaagggggcccgcccagccagg

SEQ ID NO: 211824 - DNA, 201 bp, Homo sapiens
cctataaataactatgtgaagctgttccaaaaggaccaccaatattattttccattgtaaaagagttccaggtctctactattttgtgaagaataggcatrgcctttcaattaacactatcaccaaattgctttcgatgaatgtgggagattgtatacttgatacatatctgtgtcactatgggtctgatttcatttctta

SEQ ID NO: 211825 - DNA, 201 bp, Homo sapiens
cagctgaaatgttgttatttcatgaacgtgctaaaagtagatgtctgaatttatttcgttcccatgttaatgagttgtccttcactcttacatgcctatamataatagcacatcattgcttaacatatcttaattctgagagagtttagcttttttatggcagagctgatatgtatagggacatatcacaaactttatgtc

SEQ ID NO: 211826 - DNA, 201 bp, Homo sapiens
ccgactttcttgccttgttctgcacctctcttcttgtctttgttcctcttcttcctaccacacaaggggcaagtatgtaggacttggcagcccctccgaartgtcagagctaagtgagctcccccagccaacttgggccctcctggggaggcacacgatggccccgtgctgggcgttagggagaccccgtgggtgtgcatg

SEQ ID NO: 211827 - DNA, 201 bp, Homo sapiens
tcattgccaaagccaatattcctaaagatttttccctaattattcttctaagagttttagggttctagctcttacatttaggtttttgatgcattttgagygaatttttttaatacatccatccttcttttcattccttttaccagacaaaacaaatacctactgtataccatgcattgtacggtatactaaaagaaggaa

SEQ ID NO: 211828 - DNA, 201 bp, Homo sapiens
aagaaatcattgccaaagccaatattcctaaagatttttccctaattattcttctaagagttttagggttctagctcttacatttaggtttttgatgcatyttgagcgaatttttttaatacatccatccttcttttcattccttttaccagacaaaacaaatacctactgtataccatgcattgtacggtatactaaaag

SEQ ID NO: 211829 - DNA, 201 bp, Homo sapiens
atttcttagttttacaaaaatgggaggtaaatggaatcttttggatataagttctgtcttaaagtaggaagccagattttcctcaggctgtattcataaawcaccccaaggcatctgctgccttttttcctctgatcatgttttcatgattcagagaaatatagttaattttaattaaactagccctaggttcatttggag

SEQ ID NO: 211830 - DNA, 201 bp, Homo sapiens
tgattctcctgcctcagccttccaaagtgctgggattacagatgtgagccaccaggcccggcctcttaattactaatcatgtaaaaattctgcccttatgwatcttctttcatcaataccattattatctgcatatgaaacgctgttttctgagagccttcatgttctttggtcctgcccagctggttctataatatttat

SEQ ID NO: 211831 - DNA, 201 bp, Homo sapiens
ggtctcactgctcaggttggtcttgacctccaggactcaagtgattctcctgcctcagccttccaaagtgctgggattacagatgtgagccaccaggccckgcctcttaattactaatcatgtaaaaattctgcccttatgaatcttctttcatcaataccattattatctgcatatgaaacgctgttttctgagagcctt

SEQ ID NO: 211832 - DNA, 201 bp, Homo sapiens
ttttagggttctagctcttacatttaggtttttgatgcattttgagcgaatttttttaatacatccatccttcttttcattccttttaccagacaaaacaratacctactgtataccatgcattgtacggtatactaaaagaaggaaaataaagtcccttttctcctttgtgaagcttaccttctagtgaggggagacagt

SEQ ID NO: 211833 - DNA, 201 bp, Homo sapiens
agatcggggtagccttagaggccatggttttgttgtaattgccacaggcatttatctgcgagcattaaacacaggaatggtaggattcagtttatactggaaaaaaatcactttggctgctgtggggagaatgacctctggggggcaagaatggagcaaaagtggaaacagacctttcaggaagcttctcaagctggacag

SEQ ID NO: 211834 - DNA, 201 bp, Homo sapiens
cacagctgagcccctggcctcacaagtttcccttccactagctacactcccaaacacatgccagcaatagaaaacatgcccagagacccatgaaaatggarcctcaaaatggacattcctcagtttcatgcaggtgccaggggagtcatcgctgtacattttagcccctgtccccgagaagctactgaccagagtataaat

SEQ ID NO: 211835 - DNA, 201 bp, Homo sapiens
accaataagcagatgagggaggaggaccaggaggaggccgccaagaggaggaaaatgagccagaagggcaagagaaagggaggccggcaggggcctggggrcaagaggaaagggggcccgcccagccagggagggaagaggaaagggggcttgggaggcaagatgaattctgggccgcctggcttgggtggcaagagaaaa

SEQ ID NO: 211836 - DNA, 201 bp, Homo sapiens
gccaagaattaataataatagtgaatactaaggtatacaatgtgccaggtactcttctaaatactttacatgtgtcaactcatcgaattttcacagccacrtcatgaaccagtactattatttatccctgtcttagagtcagggtagtgcctcacaccaggtccgcagcaggaatatcttgttccaggattgacatctggg

SEQ ID NO: 211837 - DNA, 201 bp, Homo sapiens
attgaggtgcccggcaatgccgaccccttggaggaccagttcgccaagcggattcaggccaagaaggaaagggtggccaagaacgagctgaaccggctgcktaacctggcccgcgcgcacaagatgcagctgcccagcgcggccggcttgcaccctaccggacaccagagtaaggaggagctgggccgcgccatgcaagtg

SEQ ID NO: 211838 - DNA, 201 bp, Homo sapiens
cagggaggtaggaaggaccgcagacatcctcctgcaggagctcccgctgagtcccaggtgctgtgctgggaatgttaatgacacaagcccagggcagagasgggccaggggctccatttcccagagggtgctgaggggaaacagtgcaactttgccaaggatctgtgtcccttttctctttcggactggagatgttgttca

SEQ ID NO: 211839 - DNA, 201 bp, Homo sapiens
atagaaatgctgagaggttggttagaatccacaggattttgtatctgaatagtgaagagttgagatttctggcttgggcatcaagtaaacagtgggctcakttaccaaggcagggattgtaggagagttagtgttaggaggaaaatggcaacttcagtctagggcattttgagttgagcatgcttctggtacattcagatg

SEQ ID NO: 211840 - DNA, 201 bp, Homo sapiens
agctgattttctcgaattcttagttggtttcaacaattagttaatttcctatttgagggaataaaattaataatttacagaaagatattctcattgttttycaggatcatatttatgtctttaaaatttagtaacagaaatattagatttttatatacagagagagagacagggtcaccctctgtcacccaggctggagta

SEQ ID NO: 211841 - DNA, 201 bp, Homo sapiens
caagagtcacattccgtctccagatgtgcagccctgcacagggtggtgggtgcccatagtcccagctactcaggaggctgaggcaggagaatcacttgaayctgggaggcatagtttgcagtgagcagagatcaggccacttcactccagcctgggctacagagcaagactgtgtctcaaaaaaaaaaaaaagatgtgcaa

SEQ ID NO: 211842 - DNA, 201 bp, Homo sapiens
aaagcctgtgtctgtgcctcttaagcctctgattgcaggtaaagactgtttatttctttgtttgttttattttgcaatgagcaatagatcttaagaaagaygcaagccagtccttttaacatacacatttcgaaagctttctggtttgttcatttcaaatcaatgccttgtttggagaacaatcattcattttaaaattct

SEQ ID NO: 211843 - DNA, 201 bp, Homo sapiens
cacaccaccacacctggctaatttttgtatttttagtagagatggggttttgccatgttagccaggctggtcttgaactcctgacctcaggtgatccaccrgcctcagcctccccaaagtgctgggattacaggtgtgaaccactgtgcccagccaggatttttaatcatatctgcaaagttcctcttactatgtagggta

SEQ ID NO: 211844 - DNA, 201 bp, Homo sapiens
ctgtgcccagccaggatttttaatcatatctgcaaagttcctcttactatgtagggtaacattcacagattcccaggattagaaccttatcttcaggagcrattactcaactcagtgattactcactgagaaggtaatggttgcggaaagaccagtggatgcagagagcaaaccctgtggccttcagggaaggtatgcaga

SEQ ID NO: 211845 - DNA, 201 bp, Homo sapiens
ccaggctggtcttgaactcctgacctcaggtgatccaccggcctcagcctccccaaagtgctgggattacaggtgtgaaccactgtgcccagccaggattyttaatcatatctgcaaagttcctcttactatgtagggtaacattcacagattcccaggattagaaccttatcttcaggagcaattactcaactcagtgat

SEQ ID NO: 211846 - DNA, 201 bp, Homo sapiens
ctgcaaagttcctcttactatgtagggtaacattcacagattcccaggattagaaccttatcttcaggagcaattactcaactcagtgattactcactgakaaggtaatggttgcggaaagaccagtggatgcagagagcaaaccctgtggccttcagggaaggtatgcagaggtgaagcatacctgggtatggaacagag

SEQ ID NO: 211847 - DNA, 201 bp, Homo sapiens
ttctccggcacgaacaactggaaggatgaaattgccattagatggggatggggaaggctgtgggaagagcaggcttgagagaacaccaggagctcagtctyccatagggaaaatgttgccacttcatagacatccaagcagagatgccaagtgggcaggtgaacctggacttcgggagagatgcccaagccagaaagataa

SEQ ID NO: 211848 - DNA, 201 bp, Homo sapiens
gagagagggagagtgagcccgccagagggggtaggaggtggaaaagtttcaggcgcaaaactcttcaataggctgaaaaagattgagtgagggggaggacyaggaaatacaggacaggtagaggtcccgagaaagcaagaggggacaggatacaaaccacaagtaagaagtagaaataatgaattgagatagcctcagagc

SEQ ID NO: 211849 - DNA, 201 bp, Homo sapiens
gctcagtctcccatagggaaaatgttgccacttcatagacatccaagcagagatgccaagtgggcaggtgaacctggacttcgggagagatgcccaagccrgaaagataaatgtggaagtcatcagcatcaaaggtatttgagaccatgagaccaggggaggtcactaagggactgagtgtggaaagaaaagaaaaagttc

SEQ ID NO: 211850 - DNA, 201 bp, Homo sapiens
gcataaggagatagagagtgatctcacggggaaagtgtggagagatctccagccagggtgttgggaaggtgcatgatgataggccaatgctttctaggcakaggggaagggccctgaggcagggtcaacgttagcatattcaaggaacttaaaagggatggtgggactaagtgaggtgttagagctggggcaggaaacaga

SEQ ID NO: 211851 - DNA, 201 bp, Homo sapiens
gggaactttctctgtcaccctgcctgagggcagaacctcccgcgtggctcttccagattgccatttccatgattatgtgcattattttttaatttttattatatatatatatatatatattttttttttttttttaacagagacagggtctcactgctcaggttggtcttgacctccaggactcaagtgattctcctgcct

SEQ ID NO: 211852 - DNA, 201 bp, Homo sapiens
aatgagagctggaggccctgtgctattattatagtctaatcttacagagaactcagagaggctaagtgacttgcccaaagacacaaagtaagttgcagagygaggaccagtggtgtgctagtaaactggctctctggcatttaataataaacaagtaagccctgacttgtagtgttggcccatttctgtggtgtaaatact

SEQ ID NO: 211853 - DNA, 201 bp, Homo sapiens
gcagcctgatttcaggggccaaagaatgtgtccgagacccagaaacgaagccagcaaatgtaggtcgggaggagagagagggagagtgagcccgccagagsgggtaggaggtggaaaagtttcaggcgcaaaactcttcaataggctgaaaaagattgagtgagggggaggactaggaaatacaggacaggtagaggtccc

SEQ ID NO: 211854 - DNA, 201 bp, Homo sapiens
tggtaggattcagtttatactggaaaaaaatcactttggctgctgtggggagaatgacctctggggggcaagaatggagcaaaagtggaaacagacctttyaggaagcttctcaagctggacaggcgagtgatagcagtgtcctggattccggttgtggtaccacaggaggtgagaagcgctctgactggggcttcatttt

SEQ ID NO: 211855 - DNA, 201 bp, Homo sapiens
agttgaacttgcagagcaagggaaaggggaatcaagtgtggctcctgggttttgcctgagctactgggtgtcatttctgagatgagaaaatggtaggagcrgtggggtgggagagtcagagttctatcttgtatatgtgaactttgagactccagtatccccctccccaccatcttcactaattcagcagataactgttga

SEQ ID NO: 211856 - DNA, 201 bp, Homo sapiens
gggacagattattttttttaagcctagaggaatccaataagtttgagttttggttaaggatgcctttgcactcagggagctgaaggtagattgttgtccasttctgatctattttccttaaaaaagaaaaagcataatgaaaattgttctgtagactttatcgtatgactgaccagtattgatataaataagtattgataa

SEQ ID NO: 211857 - DNA, 201 bp, Homo sapiens
gtggcataatcacagctcaccacagccttgacctcccaggctcaagtgatcctctgtcctcagcctcccgagtagccagcactataggtgtgtgccaccayaccaggctaatttttttaacttttttgtacacaataggtctcactgtgttacccaggctggtcttgaattcctgagctcaagcaatcctcctgccttggc

SEQ ID NO: 211858 - DNA, 201 bp, Homo sapiens
gaaaaatataacatactggtttttattttctcttctccaagcttcatggaagctattgagtttgcccaaaagggagcttttgatgcctatgttgctgtcgrtggtggctctaccatggacacctgtaaggctgctaatctgtatgcatccagccctcattctgatttcctagattatgtcagtgcccccattggcaaggga

SEQ ID NO: 211859 - DNA, 201 bp, Homo sapiens
tcaggcagagagaagagcaacaccagcgatggagatgcagtcccaggacacaaaagacaagtagacctacctttataagaggaggtaaagatggagaagayggctgataaaagaccatgaataagaatatagctaatacgatgagcccggcagtgtcttacacactttgaatggactatcagtataatagtaactctaatc

SEQ ID NO: 211860 - DNA, 201 bp, Homo sapiens
taatttccataactttgtagcttttacaaactgccttttcaaagccctgggtaacttctttcatttactgtttcaggaaagggtcaccaagcttgcacccygtccccagtcagaagaggatctggctgctctgtttgaagcttcaatgaaactgtattaattgtcattttaactgaaagaattaccgctggccattgtagt

SEQ ID NO: 211861 - DNA, 201 bp, Homo sapiens
tttatgaaaattttcatgaagggatggatcctttatgaaaattcaaggcaaaaacaaccaaactgatcttgaactatggcaaaatttcccttttccccatktctgttctttgaagggctcctataaataactatgtgaagctgttccaaaaggaccaccaatattattttccattgtaaaagagttccaggtctctactat

SEQ ID NO: 211862 - DNA, 201 bp, Homo sapiens
atttaataatgtgcttcaatatggaggtgaaagtagtcacgatctccttttgaacaatacaagagaaagtggacttagactactgtgggaggcattttgcrtagacttcatataatgctacactctgtagagggctttacttcttggcagtgaatgtgtttggctagaatatatgagaatgtagggtgctaagggttgtga

SEQ ID NO: 211863 - DNA, 201 bp, Homo sapiens
gggagcagcactgccacagcaggagtagcaagatggtgctttcttctgcacatgcttattattctaatagggtaaacattttaaaagtgggagatttccartgaaaatcttggaaaattggaaaatggcatcattgggcacatgtttcatctgggcaaagtgggctagggcacggggtgatgtgtggccatttctattgga

SEQ ID NO: 211864 - DNA, 201 bp, Homo sapiens
agcccctccgaaatgtcagagctaagtgagctcccccagccaacttgggccctcctggggaggcacacgatggccccgtgctgggcgttagggagaccccrtgggtgtgcatggtgtattcactgatcttgtgactgaactccacccagagcccgtttcttcctctctccctacagtcagcactttatgtcttctaggagc

SEQ ID NO: 211865 - DNA, 201 bp, Homo sapiens
gcctgcccgagtggtcgccaacagtggctttgatgtgctttggtaagtgctggtgcctcctggaggggcttttttagtactgggtctatggatagtatttygttgctcaacgcacatgctaagtattcattgattagcaccccacaacatccctagctttggctgtcattaccccctgtcctaaatcaaacattcaagctt

SEQ ID NO: 211866 - DNA, 201 bp, Homo sapiens
aggacaggtagaggtcccgagaaagcaagaggggacaggatacaaaccacaagtaagaagtagaaataatgaattgagatagcctcagagcttggggaagaaaaaaaaaggtggcggggggtgtagggaggaagcaagggttcccaggagcgttcacgttggaaagttttgagtttggatttttttttccttcccttggct

SEQ ID NO: 211867 - DNA, 201 bp, Homo sapiens
gatttaggggacagaagggagagctgctggcagtccttgagtagatgagaggggctgcgatttagggaatgcaagacagattgggttttgctgagagtgtsgctaagaggtaatcagtgatgtcagcaaggaagccagaataagggggccagagccaggagggcaggtagatgaggtcctgctctccccaagcctcactct

SEQ ID NO: 211868 - DNA, 201 bp, Homo sapiens
cacgtggttatgctgccggagtttgggccgccactgtaggaaaagtaacttcagctgcagccccaaagcgagtgagccgagccggagccatggagggccaragcgtggaggagctgctcgcaaaggcagagcaggacgaggcagagaagttgcaacgcatcacggtgcacaaggagctggagctgcagtttgacctgggca

SEQ ID NO: 211869 - DNA, 201 bp, Homo sapiens
acaaaaggcttactttatgcctggcacttacttggtgctagccacaggggataaagttgtgagaaacagtagatcctgcctgggcatcactaaattcacartccacaggcagaaagaagcagaaaaacagcaccagtgtggtacgttttaacacggagggaggctccagaaagggtgtctctctgcagcctcgggcctcag

SEQ ID NO: 211870 - DNA, 201 bp, Homo sapiens
gttagaacagagagagtaactcgccaagggctttctcttgcccaaggagtgactcacccttcaggacaagccaagggacctccctgtccatcattaactgycatctatgagacagaaacatatccaacctttaaggcccttctgaacatatacagaattttgtcttcagctgattttctcgaattcttagttggtttcaac

SEQ ID NO: 211871 - DNA, 201 bp, Homo sapiens
ttctcctagtccaggaatttttttttttttttttggagacagcctcactctgtcacccagactggagtgcagtggtgtgatctcagctcactacaacctcygcctcctgagttcaagcgattctcctgcctcagccttctgagtagctgggattacaggtgcacaccaccacacccagctaatttttgtatttttagtaga

SEQ ID NO: 211872 - DNA, 201 bp, Homo sapiens
tctgaacatatacagaattttgtcttcagctgattttctcgaattcttagttggtttcaacaattagttaatttcctatttgagggaataaaattaataayttacagaaagatattctcattgttttccaggatcatatttatgtctttaaaatttagtaacagaaatattagatttttatatacagagagagagacaggg

SEQ ID NO: 211873 - DNA, 201 bp, Homo sapiens
tgccttcaggaatgactaattaaaatgtcaccgggggcctgacagttaaccaagagatgaccaggctgggtgatgccatggtgagctcactgaaggcacagggccccatctaaggtgtgactccactcaaccttataagatcactgccatatgggaatgcattcccagtttgctggattattcaagagaaagtgaaattca

SEQ ID NO: 211874 - DNA, 201 bp, Homo sapiens
cagacgtctgaatgtgactcaccaagaggagtgtttggtattcatattgatgatgactctgtagaggaagaatttaaaggtcaagcatgaagaaacagatytaggaagacttggtgtttttatctggatacccatcattctggcccttacaattagagattatggaaaaggtgagttttgtgacttactagctattaaaag

SEQ ID NO: 211875 - DNA, 201 bp, Homo sapiens
gattttctcgaattcttagttggtttcaacaattagttaatttcctatttgagggaataaaattaataatttacagaaagatattctcattgttttccagratcatatttatgtctttaaaatttagtaacagaaatattagatttttatatacagagagagagacagggtcaccctctgtcacccaggctggagtacagc

SEQ ID NO: 211876 - DNA, 201 bp, Homo sapiens
tcagctgcctttgtgtatattcaaagcatgtaaataagaagagagagcgcaaatcataggctacatttatgataaatgggaaaatcttagagaacttaaarttaacactctaggcaactagcaacactactgagaagggagttcctctgttagacaaattccaggctggaagaacccactgattcttccttcttgaatggg

SEQ ID NO: 211877 - DNA, 201 bp, Homo sapiens
gattattcaagagaaagtgaaattcagatggtcttattaaattttttatcctgatttttaagcattattagtcaattcaaaaaaaaaaagaaatttaaacrtaacacagatcaaataaaatatatttcaggcgaaacatgacccatcatccatcagtgtaaaagcctttctctcacccgtaaactttatgaggccctgtgt

SEQ ID NO: 211878 - DNA, 201 bp, Homo sapiens
ctgggaactttctctgtcaccctgcctgagggcagaacctcccgcgtggctcttccagattgccatttccatgattatgtgcattattttttaatttttattatatatatatatatatatattttttttttttttttaacagagacagggtctcactgctcaggttggtcttgacctccaggactcaagtgattctcctgc

SEQ ID NO: 211879 - DNA, 201 bp, Homo sapiens; identical to SEQ ID NO: 37511

SEQ ID NO: 211880 - DNA, 201 bp, Homo sapiens
actgtctctactaaaaatacaaaaattagccagtcatggtggcaggcacctgtaatcccagctacttgggaagctgaggtgggagaatcgcttgaacccargagacataggttgcagtgagcggagatcgtgctactgcactgcagcctgggcaacagaatgagactccgtctcaaaaaaaaaacaaaaacaaaaaaaacc

SEQ ID NO: 211881 - DNA, 201 bp, Homo sapiens
ctgcctgagggcagaacctcccgcgtggctcttccagattgccatttccatgattatgtgcattattttttaatttttattatatatatatatatatatattttttttttttttttaacagagacagggtctcactgctcaggttggtcttgacctccaggactcaagtgattctcctgcctcagccttccaaagtgctgg

SEQ ID NO: 211882 - DNA, 201 bp, Homo sapiens
tcagtgcccccattggcaagggaaagcctgtgtctgtgcctcttaagcctctgattgcaggtaaagactgtttatttctttgtttgttttattttgcaatkagcaatagatcttaagaaagatgcaagccagtccttttaacatacacatttcgaaagctttctggtttgttcatttcaaatcaatgccttgtttggagaa

SEQ ID NO: 211883 - DNA, 201 bp, Homo sapiens
ctgccggcctttcctctggtcgcccggattgcgagccgcttccggacgctccggaagcgaacctttcttttccggattgggcatcccggcatctgcacgtkgttatgctgccggagtttgggccgccactgtaggaaaagtaacttcagctgcagccccaaagcgagtgagccgagccggagccatggagggccagagcgt

SEQ ID NO: 211884 - DNA, 201 bp, Homo sapiens; identical to SEQ ID NO: 37512

SEQ ID NO: 211885 - DNA, 201 bp, Homo sapiens
aaacggagtcacttgttgcacatagcatgaacattaatgttctactgaagtccttttgaatatgccttaagtccaagttgcaaaatacatggtcttagacktcggggacgacccagttctctctcagagctctgtgtgtacagagaacctggcagaggtggttgactgacctagttttgtcatgataagggtgttttcccc

SEQ ID NO: 211886 - DNA, 201 bp, Homo sapiens
gaccagagtataaatagaagtaggatgtgctggatgtcttcgctgaattgactcaataatcattggagaaattaacaaatcactggatttgcttgggaacrtagagataaaaccttagttaatagaaaaaaacggagtcacttgttgcacatagcatgaacattaatgttctactgaagtccttttgaatatgccttaagt

SEQ ID NO: 211887 - DNA, 201 bp, Homo sapiens
ccttcacagtcaagtgaaaggagagtgtcccagaaacattacagaggcccccatggggaattatactgaaaactataattcatgcaaaatatagttcatgktacactgtgtttccagtgcatcactgatgtagacggtgatgtctgttctcttctgcagttgatgagctagaagtcatggcaggccagcaggtggaggcag

SEQ ID NO: 211888 - DNA, 201 bp, Homo sapiens
tagttcttgaagtagcaaactctgagtttacggtacataagagaaaaagatctgctttttcttcaggccaagaattaataataatagtgaatactaaggtwtacaatgtgccaggtactcttctaaatactttacatgtgtcaactcatcgaattttcacagccacatcatgaaccagtactattatttatccctgtctta

SEQ ID NO: 211889 - DNA, 201 bp, Homo sapiens
tttatttttagggtgatttattatcctgaagtcatttttcttcttaaaatgatgcccatggctttagcctctactgaaaatccttatgttttaggcatcamttcgagagccatcaaacccacactgggactgattgatcctctgcacaccctccacatgcctgcccgagtggtcgccaacagtggctttgatgtgctttgg

SEQ ID NO: 211890 - DNA, 201 bp, Homo sapiens
cctcactacatgaaaatgaaccttttctcatatttttatttttagggtgatttattatcctgaagtcatttttcttcttaaaatgatgcccatggctttascctctactgaaaatccttatgttttaggcatcacttcgagagccatcaaacccacactgggactgattgatcctctgcacaccctccacatgcctgcccg

SEQ ID NO: 211891 - DNA, 201 bp, Homo sapiens
tccctttcattgttccaatatgacagaaaatcatttttaccataattaaaacctaatcctttgcaaggaaatagcaccttataaaaatgtttattaggccrggcacggtggctcacacccataatcctaggactttcggaggccggggtgggtggatcacgaggtcagcattgtgaaaccccgtccctactaaaaatacaa

SEQ ID NO: 211892 - DNA, 201 bp, Homo sapiens
tgggaaaatggccctgagcccgactggcttgaggcttagacaggtgaccccgcgaagcgggtgggcaggcgcggccgaggggcgggaggcgggcagcctcygtgattggccggcggagggggcggtgtagcgacccgaggagggaagaggactccaagcgccatggccgctgccgcccgagcccgggtcgcgtacttgctg

SEQ ID NO: 211893 - DNA, 201 bp, Homo sapiens
acggattcaaggtattcttgtattgttgttattgtttctttactttaagcagaagctaactgttgattaaaacttgcccccaaccaggcgtggtggctcaygcctgtaatcccagcactttgggaggctgaggcaggcagattgcttgaggtcaggagttcgagaccagtatggccaacatggtgaaacactgtctctact

SEQ ID NO: 211894 - DNA, 201 bp, Homo sapiens; identical to SEQ ID NO: 37515

SEQ ID NO: 211895 - DNA, 201 bp, Homo sapiens
tttccttagactgactaggactcaaccaaagacaggggagccatgaaagctcagggacaccgtagactgagtggtcatagtgattttttccggagggaggsacagggctggagtgcagtggcataatcacagctcaccacagccttgacctcccaggctcaagtgatcctctgtcctcagcctcccgagtagccagcacta

SEQ ID NO: 211896 - DNA, 201 bp, Homo sapiens
aggcaaggggcagtggctttcgaaagctctgtggggaaagaggtatgatgtgataaacctctgagatggggatcaactcatatgaagtatacaagaaataycgtttttaaagatatggcgtttatcaagtcattgattcttatgaccaagttaatttccataactttgtagcttttacaaactgccttttcaaagccctgg

SEQ ID NO: 211897 - DNA, 201 bp, Homo sapiens
tgcctgagggcagaacctcccgcgtggctcttccagattgccatttccatgattatgtgcattattttttaatttttattatatatatatatatatatatwttttttttttttttaacagagacagggtctcactgctcaggttggtcttgacctccaggactcaagtgattctcctgcctcagccttccaaagtgctggg

SEQ ID NO: 211898 - DNA, 201 bp, Homo sapiens
atgcaggtgccaggggagtcatcgctgtacattttagcccctgtccccgagaagctactgaccagagtataaatagaagtaggatgtgctggatgtcttcrctgaattgactcaataatcattggagaaattaacaaatcactggatttgcttgggaacatagagataaaaccttagttaatagaaaaaaacggagtcact

SEQ ID NO: 211899 - DNA, 201 bp, Homo sapiens
ctaaaatagcactaaattaacactaaaatagcaacttaattaggtatcattctgaatgcctcagtgcacatgcaatactgggaaatcacagatagcaaaaycttaattggacaaaaccaatttcttagttttacaaaaatgggaggtaaatggaatcttttggatataagttctgtcttaaagtaggaagccagattttcc

SEQ ID NO: 211900 - DNA, 201 bp, Homo sapiens
tacccagggcacagacgtacaaatccaaatcagaatagctcatttgttccacaggggaccttgagattttctagtcttttcttctctgccatttttatggmtgctagcatattactatttaaagttttatagctaacatgcactaactggtaactgggacatatcctcagtttaaagttttgccctttcttctcccctctc

SEQ ID NO: 211901 - DNA, 201 bp, Homo sapiens
cacctgtaatcccagctacttgggaagctgaggtgggagaatcgcttgaacccaggagacataggttgcagtgagcggagatcgtgctactgcactgcagyctgggcaacagaatgagactccgtctcaaaaaaaaaacaaaaacaaaaaaaaccccacaaaacttaccccaagccttagttaatggcatggcaatttatt

SEQ ID NO: 211902 - DNA, 201 bp, Homo sapiens
gcgtggaagaggcgatagtggcgcggctgccggagcccaccacacgcctgccgcgagagaagcctctgccccgaccgcggccacttacacgctggcagcasttcgcgcgcctcaagggcatccgtcccaagaagaagaccaacctggtgtgggacgaggtgagtggccagtggcggcggcgctggggctaccagcgcgccc

SEQ ID NO: 211903 - DNA, 201 bp, Homo sapiens
tatggatatactacattttggttatgcatttacctattgatagacacttgggttgtttccaccttttgactattatgaataatgctgcgatgaatattggygtacaagtatctatttgagtccctgctttcaattctttggggtatatacctaggagtagaattgttgtatcatatagtaactctatgtttaactttctga

SEQ ID NO: 211904 - DNA, 201 bp, Homo sapiens
agacacagaagtcatacatgcatgttaacacaggtacagagatcacatgcacattaaacacacatgtatgttaatacagacagacaccatatatattaacrctcatatttatgcagaagcaggcaatatgcatattaaacgtgaccatgttaatgcagacacatacatgcatattaaacacacatgcatgctaaacatgca

SEQ ID NO: 211905 - DNA, 201 bp, Homo sapiens
ccaagaaggaaagggtggccaagaacgagctgaaccggctgcgtaacctggcccgcgcgcacaagatgcagctgcccagcgcggccggcttgcaccctacsggacaccagagtaaggaggagctgggccgcgccatgcaagtggccaaggtctccaccgcctctgtggggcgctttcaggagcgcctccccaaggagaagg

SEQ ID NO: 211906 - DNA, 201 bp, Homo sapiens
atgatttgcaattttttttaattttgttgtcttttcactctcttgaccatgtcctttgatgcacaaaagttttaaatttttattcagcctagtttatctgtttttttttttcttttttccctgtgctttttcttttttttcttttagagacagagtcttgctctgttggccaggctggagtgcagtggtgcaatctcggct

SEQ ID NO: 211907 - DNA, 201 bp, Homo sapiens
agctgttggttactccaaagctgatatccccgcactagtgaaaggaacgctgccccaggtaagagaccggcaggctcctcactccctgcgaaggagcctakcgcctccagaaagacatgctgcattgatggcgggctagcagggatggaaaccagggctccccggtggttctcgggtctcctccacagcagacagcagttc

SEQ ID NO: 211908 - DNA, 201 bp, Homo sapiens
gatcacatgcacattaaacacacatgtatgttaatacagacagacaccatatatattaacgctcatatttatgcagaagcaggcaatatgcatattaaacrtgaccatgttaatgcagacacatacatgcatattaaacacacatgcatgctaaacatgcacgtatgttaatgcagacatggacatcatacatgcatgcta

SEQ ID NO: 211909 - DNA, 201 bp, Homo sapiens
cggccggcttgcaccctaccggacaccagagtaaggaggagctgggccgcgccatgcaagtggccaaggtctccaccgcctctgtggggcgctttcaggarcgcctccccaaggagaaggtgccccggggctccggcaagaaaaggaagtttcaaccccttttcggggactttgcagccgagaaaaagaaccagttggagc

SEQ ID NO: 211910 - DNA, 201 bp, Homo sapiens
ttcttttttccctgtgctttttcttttttttcttttagagacagagtcttgctctgttggccaggctggagtgcagtggtgcaatctcggctcactgcaayctccacctcccaggctcaagcaattctcctgcctcagcctcctgagtaggtgggattatagctgcccaccaccacacccagctgaatttttttttttttt

SEQ ID NO: 211911 - DNA, 201 bp, Homo sapiens
aatcttacagagaactcagagaggctaagtgacttgcccaaagacacaaagtaagttgcagagcgaggaccagtggtgtgctagtaaactggctctctggmatttaataataaacaagtaagccctgacttgtagtgttggcccatttctgtggtgtaaatactctcaccatggccagtgacatcactcatccaggagtag

SEQ ID NO: 211912 - DNA, 201 bp, Homo sapiens
tcctctcgccttggcctcccaaagtcctgggattacaggcatgagccaccactcccagcctcattttttattttataaacttctgtattgtttggatttgytacaacaagcatatattacttttctaacatttataaaagagaagggaaaggaaagaaaaatgtcattttaatgttttaggtcagattcgttttattttat

SEQ ID NO: 211913 - DNA, 201 bp, Homo sapiens
cggctcactgcaatctccacctcccaggctcaagcaattctcctgcctcagcctcctgagtaggtgggattatagctgcccaccaccacacccagctgaatttttttttttttttttttttgtatttttagtagagacagggtttcaccatgttggccaggctggtctcgaactcctgacctcaagtgatccgcctgcctc

SEQ ID NO: 211914 - DNA, 201 bp, Homo sapiens
ctgaaatcaggacataacttaaaatctgtggcatcacagtatgttttcatcctccgtggtacctattttaaaaacggtgcaggctgggcacagtggctcaygcctgtattcccagcactttgggaggccaaggtaggaggatcacttgaggccaggagtttgagaccagcctgggcaacaaagtgacacctcatctccaca

SEQ ID NO: 211915 - DNA, 201 bp, Homo sapiens
ggctcactgcaatctccacctcccaggctcaagcaattctcctgcctcagcctcctgagtaggtgggattatagctgcccaccaccacacccagctgaatttttttttttttttttttttgtatttttagtagagacagggtttcaccatgttggccaggctggtctcgaactcctgacctcaagtgatccgcctgcctca

SEQ ID NO: 211916 - DNA, 201 bp, Homo sapiens
taaagtggccatcctagggcttgactgtagggagagaaggtgccatcgggaagactctgatgtctgcttagcagttatatttcttgtcataaagcattaarctgacttccaggctttacacatagtttctgtgagcttagctcagtgagtccacccctgagaaacaaatctgcacttggatctgggatctgatgcagtcta

SEQ ID NO: 211917 - DNA, 201 bp, Homo sapiens
cagctgaatttttttttttttttttttttgtatttttagtagagacagggtttcaccatgttggccaggctggtctcgaactcctgacctcaagtgatccrcctgcctcagcctcccaaagtgctgggaccaccgcactggactccctgtgcttctggtgttacatccaagaaatcattgccaaagccaatattcctaaag

SEQ ID NO: 211918 - DNA, 201 bp, Homo sapiens
cctgtagtcccagctactcaaacacctgtagtctcagccaccctgaggcaggaggatcgcttaagccagggaggtcaaggcagcagtgagccagaattgcwccactccagcccaggcaacagagtgggaccctgtctcaaaaaaacccaaataaacaacaacaacaaaaaaaactataatattttcctatttgttcatcaa

SEQ ID NO: 211919 - DNA, 201 bp, Homo sapiens
cataagagaaaaagatctgctttttcttcaggccaagaattaataataatagtgaatactaaggtatacaatgtgccaggtactcttctaaatactttacrtgtgtcaactcatcgaattttcacagccacatcatgaaccagtactattatttatccctgtcttagagtcagggtagtgcctcacaccaggtccgcagca

SEQ ID NO: 211920 - DNA, 201 bp, Homo sapiens
ttttttttttttttttttttgtatttttagtagagacagggtttcaccatgttggccaggctggtctcgaactcctgacctcaagtgatccgcctgcctcrgcctcccaaagtgctgggaccaccgcactggactccctgtgcttctggtgttacatccaagaaatcattgccaaagccaatattcctaaagatttttccc

SEQ ID NO: 211921 - DNA, 201 bp, Homo sapiens
tgaagatgtataaagcaaaggattacaatgtggatcacccactggtggtaaaatcataagaataaattatttaattaaatattataatcatcccaatttcyataaatatatttgccaattctcgcctgcttagagtatggggtaaagtaacttaacatctagaatatgcagggaagaacagctttgtcatctgccggtcac

SEQ ID NO: 211922 - DNA, 201 bp, Homo sapiens
gttttagggttctagctcttacatttaggtttttgatgcattttgagcgaatttttttaatacatccatccttcttttcattccttttaccagacaaaacwaatacctactgtataccatgcattgtacggtatactaaaagaaggaaaataaagtcccttttctcctttgtgaagcttaccttctagtgaggggagacag

SEQ ID NO: 211923 - DNA, 201 bp, Homo sapiens
ttgggaggctgaagtgggaggatcatctgagcccaggaagttgaggctgcagtgagctgttatcatgccactgcactccagcctgggagacagagtgagaytctctctctcaaaaaaaaaaaaaagaaccataaaggacaataccaaaaaatattgctttgcgatagcttaataatgaaatgtcaggctgggcacagtgta

SEQ ID NO: 211924 - DNA, 201 bp, Homo sapiens
cggagtcacttgttgcacatagcatgaacattaatgttctactgaagtccttttgaatatgccttaagtccaagttgcaaaatacatggtcttagacgtcrgggacgacccagttctctctcagagctctgtgtgtacagagaacctggcagaggtggttgactgacctagttttgtcatgataagggtgttttccccaag

SEQ ID NO: 211925 - DNA, 201 bp, Homo sapiens
cattgccaaagccaatattcctaaagatttttccctaattattcttctaagagttttagggttctagctcttacatttaggtttttgatgcattttgagcraatttttttaatacatccatccttcttttcattccttttaccagacaaaacaaatacctactgtataccatgcattgtacggtatactaaaagaaggaaa

SEQ ID NO: 211926 - DNA, 201 bp, Homo sapiens
aaaatattatctgcttctcatatgtagaagagagtaattcctccattctagggaaaacgaaaactgtaattcatgcaaaacatggggtcatctcccttcayagtcaagtgaaaggagagtgtcccagaaacattacagaggcccccatggggaattatactgaaaactataattcatgcaaaatatagttcatgttacact

SEQ ID NO: 211927 - DNA, 201 bp, Homo sapiens
ggaagaacagctttgtcatctgccggtcaccgcatttcgtttctccccagccccatggcctttctgtggtgctcacgtccccagcggtgttcactttcacsgcccagatgtttccagagcgacacctggagatggcagaaatactgggtatgaaccattactcaaaattctgtgaccggccaggcacggtggctcccatct

SEQ ID NO: 211928 - DNA, 201 bp, Homo sapiens
agagggaccacagccaggggagggagggtttccaaaaaggaggacgtgggaaatctgtagagaagtcgaccgagaagtgagatgcggtggcgacctcggarcgcaccgggtgtgcgcgcagctggggcctctggggagcggcgcggcggggacggaggagagctcggagcccggggctgcaactgggcagagaaagatggg

SEQ ID NO: 211929 - DNA, 201 bp, Homo sapiens
attcagcagataactgttgagcatctacttactatgtaaagccctctggtaggcgcagggcagagagcagtgcacacagctgagcccctggcctcacaagyttcccttccactagctacactcccaaacacatgccagcaatagaaaacatgcccagagacccatgaaaatggaacctcaaaatggacattcctcagtttc

SEQ ID NO: 211930 - DNA, 201 bp, Homo sapiens
ccactgaaaaccccaggtttctgactctaaatcactttccattgctccttactgcctcactacatgaaaatgaaccttttctcatatttttatttttaggstgatttattatcctgaagtcatttttcttcttaaaatgatgcccatggctttagcctctactgaaaatccttatgttttaggcatcacttcgagagccat

SEQ ID NO: 211931 - DNA, 201 bp, Homo sapiens
ccggagcccaccacacgcctgccgcgagagaagcctctgccccgaccgcggccacttacacgctggcagcagttcgcgcgcctcaagggcatccgtcccargaagaagaccaacctggtgtgggacgaggtgagtggccagtggcggcggcgctggggctaccagcgcgcccgggacgacaccaaagaatggctgattgag

SEQ ID NO: 211932 - DNA, 201 bp, Homo sapiens
tccatgttgtactgtgtgtcagagcttcctttctttttaaaggctgaataataattgtttagatatactgtatttggtttatggtctgctttttattatcrccaggcactggcaattttaaataactataaattactttcccccacccccaacttcctgccaacgctcaattttcctaagggtttcatggagagaggcatg

SEQ ID NO: 211933 - DNA, 201 bp, Homo sapiens
ttttgtgtctggcttattgcacttagcagaatgtcttcaaggttctattgcacttagcagaatgtcttcaaggttcgtccatgttgtactgtgtgtcagarcttcctttctttttaaaggctgaataataattgtttagatatactgtatttggtttatggtctgctttttattatcgccaggcactggcaattttaaata

SEQ ID NO: 211934 - DNA, 201 bp, Homo sapiens
gtactggtttgtgacatgtcctcaaacttcctgtccaagccagtggatgtttccaaggtagagtataaaaggcagggtgaggggaacccactgactcggtktctgcagggacattttaatatatacaagagcgggaagaaccatgggtgtttgaggcctgcagaacccctgagccagtgcagctgccagtgagcaggctgc

SEQ ID NO: 211935 - DNA, 201 bp, Homo sapiens
tggctcccctggaactacgtgggctgagagtaggtgagggctggggttccaagaagaaactactagtccatcaatggatgtaggatagatggatactgggygacaagtaaaaactcagatatctcccatgccttttgaaaaaatttactttattttattttgttgagacagagtctttctgtgttgcccgggttggagtac

SEQ ID NO: 211936 - DNA, 201 bp, Homo sapiens; identical to SEQ ID NO: 37530

SEQ ID NO: 211937 - DNA, 201 bp, Homo sapiens
tttgctttttattttgatgtataatagatacatgatttcatgggtaggcctaaaacattatcgaaaccccctgcccaacatccacctggttcatagcatgktgcataacacaggattattggttgcaagttataggacccccaactcactggcttaagtaaaaaagaaatgtattatctcacctaacagataaatgcagga

SEQ ID NO: 211938 - DNA, 201 bp, Homo sapiens
gactggggtcccagttcaatttaagggcctatcttttcttctcctaacctggttcccaccttgtatacctgtacctagacctcggcctggtttctttccakctaattcttggccttgttaactgccctgcatctgaataatgtgaacctggaactctgtcttgggttatcagtcttcccagctgctaagaacctcatggcc

SEQ ID NO: 211939 - DNA, 201 bp, Homo sapiens
cctgggagagatggcatttgaccacatggctatgaacttcctctgactggggtcccagttcaatttaagggcctatcttttcttctcctaacctggttccyaccttgtatacctgtacctagacctcggcctggtttctttccatctaattcttggccttgttaactgccctgcatctgaataatgtgaacctggaactct

SEQ ID NO: 211940 - DNA, 201 bp, Homo sapiens
gcttctctcgtccattggcctgctgagtatcatgtcacattcataggacaatcctgtccttcatggagtgggtatttggaacatcagcctgggagagatgrcatttgaccacatggctatgaacttcctctgactggggtcccagttcaatttaagggcctatcttttcttctcctaacctggttcccaccttgtatacct

SEQ ID NO: 211941 - DNA, 201 bp, Homo sapiens
gaattttgtgctccagacctaaagggcaactgttgcacatggattcctgtttgtgagaaagagatggtaagaagaatcacagagagcatcacggagtgatraattaataaataacttgctcagtgaatgtaccacttgaaaaatccttctgccatgactataaagctaaaatgtttgcaatttgaaaatcagtttgtatgg

SEQ ID NO: 211942 - DNA, 201 bp, Homo sapiens
cagaatgcctgttgacatcttcgtgctccaccaagatgttgggaagtgcggctctttccctggttcccacttggactttctccttaaatctttgcagcccwgggatttccagctggttccatgcccatccatagcccacatagcctctcagtctgccttggccccttctcctacctcggccctcaacccattcaaacaaca

SEQ ID NO: 211943 - DNA, 201 bp, Homo sapiens
attgctcacccaatgagaacaagctgcaaatggagacatcaagatgtgtgcaaaatcccctccccagtccgtgatgtgaggctgatggggtacctggagcscttcagaactttgtatcacatagtagagttcttgaaaaggcctcacttttgaaaagacgcctttttttttttttccccacagagtctaatgaccataggc

SEQ ID NO: 211944 - DNA, 201 bp, Homo sapiens
gtgactgaaaacaaccaccattcacttgctcgtagttttttgggtcagcaggttgggctgagctcagctagggggttcttctgctggtcttgggatgcctsattctactgaagtcgtcatctggttattcatttggagccagatggtctacagtggtttcacatatctggcagttggtgctggctgttggctgggacactt

SEQ ID NO: 211945 - DNA, 201 bp, Homo sapiens
gagtcagtcttgtggacccagggaggggtctcactatttttcatcaaagcggaggttacattttaaaataaaacatgtaagcctgggcgcggtggctcacrcctgtaatcttagcaatttgggaggctgaggtggatggaccacttgaggtcaggagctagagaccagcctgaccaacatggtgaaaccctgtctttacca

SEQ ID NO: 211946 - DNA, 201 bp, Homo sapiens
aaatacggatgcttaattcttcctgctttcaatttttttctcttaagttaaatgtgctttttgttgctccacctctctgattggagcctcacattgggagsctgaggcagtggaatatcaaaagagggtagccgttgaatgtttattttcaatgtcagccgtgaaacctaccacttcgaatagtggggcctggaattcagg

SEQ ID NO: 211947 - DNA, 201 bp, Homo sapiens
gctttgtgatatcttctactttcatgataggatgggtaaattgcagggagaggaactgtaaatacggatgcttaattcttcctgctttcaatttttttctsttaagttaaatgtgctttttgttgctccacctctctgattggagcctcacattgggagcctgaggcagtggaatatcaaaagagggtagccgttgaatgt

SEQ ID NO: 211948 - DNA, 201 bp, Homo sapiens
gcggggacatgctggcttagagtttgccgcccatgcttgaagctcctcggtgccggcaccttggtacaggccctagttcttttgacctagaaagctttttktttgtttgtttccagccatttcctttttttaatttacagtttgcgttcagtgcaaacccatagcatgagacattactatgaatcaaaatgtaaatacaca

SEQ ID NO: 211949 - DNA, 201 bp, Homo sapiens
ggattttgatgtctacagatttacccttccccagcactctgcctgggtacagtggtgtgcacaaaattagggaccagcaagtccaatgtaagatgtaatgrtggaaatatgcagttgtgcccatcagtaggggtctgatgaaaacaatgaggatctgtgggtaatatggaatgactgcattgagaaggatgaagcgggtct

SEQ ID NO: 211950 - DNA, 201 bp, Homo sapiens
ctgctctaagccacagttttctcatctgtacaatggaggtaatgatacatacttcttaaaattgtcaagagaattaaaaggaaatgcttctgaatcaagartatataatataaggattgagagcatttttacattaaggattgaggactcttgtgctggttaatttgtataaagtgctagaaacagtggttggcacacagg

SEQ ID NO: 211951 - DNA, 201 bp, Homo sapiens
agagagccatgccttgcctcctttagattctagtggctcagggtggtccttgatttgtggctgcatcactccagcctccacatctgtcttcacatggcctyctttctgccgtgtcttcccttctgtctcttaaaaagagaggtctttggatttagggcctgtccagataatccaggatcatctcatctcgagatccttcac

SEQ ID NO: 211952 - DNA, 201 bp, Homo sapiens
tcttgtattagtttcctggggctggtgtaacaaagtactacagacttagtggctcaaaacatcagaaaactgattctcactcttctggggccagaagttcraaatcaaaatgtcagcagggttttggtccctccagagagccatgccttgcctcctttagattctagtggctcagggtggtccttgatttgtggctgcatc

SEQ ID NO: 211953 - DNA, 201 bp, Homo sapiens
caaatctataggagcctgcttagcttggagtagcagttatgtaatttgttgggccaacccagctgttataaggatgtgccttcttcctgttgtttatggamccctttgcataattccccagctgagagtataatggagctccatcttccatgagggttttggcaaaattacctttgaaaatctcttacactgctcgtatag

SEQ ID NO: 211954 - DNA, 201 bp, Homo sapiens
ccggcaagcgggcttcgggaagaatgcagttggtgaggaagctcggcgaggcgtgccggtgcagctgcccctggccctgactgctggtgcgaggcagtgcmcgactcagctggccggggcctgctgtcccgccggtgccacgcacctgcagacgcccgggctgtgccatctcctgggccggtccgggggctggggcggggc

SEQ ID NO: 211955 - DNA, 201 bp, Homo sapiens
tcatttcgttctggagtaaaccgagtgattgaattctctcccgggccacaatcagatcttgctggtggaactcactctctgccttcccaggccccagcccsgctcctcccctcccccgccaaacccaccgtccccagccccacccgcagtgaagaaggcaaagtctccgatgtgccttgagcccattgtcaggcggctgcc

SEQ ID NO: 211956 - DNA, 201 bp, Homo sapiens
agtccttggggaactacctgcttttgagagtggttcttagaaacgtgtttggtcaacagacggggagagacttgtcttcaagagcagatgcagattatccygagcccaggggacctatgtgagggagcttccccttgcctggtacccacctccaaaagcatcaacaggataccgttttatgagtggcttgccaaggcaggg

SEQ ID NO: 211957 - DNA, 201 bp, Homo sapiens
cactttgggaggccgaggagggtggatcatgagatcaggagttcaagaccagcctggccaacatggtgaaaccccgtctttactaaaaatacaaaaattcrctgggcatggtggcacacgctgtaatcccagctactcggcaggctgaggcaggaaaattgcttgaacccgggaggcagaggttgcagtgagccgagattg

SEQ ID NO: 211958 - DNA, 201 bp, Homo sapiens
agaatcttgctctgttgcccaggctggagtgcagtggcgtgatctcagctcgctgcaacctccgcctcccgggttcaagcaattctgtctcagcctcccgmgtagctgggagtacagacgcctgccaccatgcctggctacttttcgtatttttagtagagacggggttccaccatgttggccaggctgctctcaaactcc

SEQ ID NO: 211959 - DNA, 201 bp, Homo sapiens
agtggttccatctgggccaggattttgtcagagcttcccctcctccaggtgctgcttagggaaaatgtcttctacataatttactatggaaaggaaagaattttttttttttttgacagaatcttgctctgttgcccaggctggagtgcagtggcgtgatctcagctcgctgcaacctccgcctcccgggttcaagcaatt

SEQ ID NO: 211960 - DNA, 201 bp, Homo sapiens
ttgtcagagcttcccctcctccaggtgctgcttagggaaaatgtcttctacataatttactatggaaaggaaagaattttttttttttttgacagaatctygctctgttgcccaggctggagtgcagtggcgtgatctcagctcgctgcaacctccgcctcccgggttcaagcaattctgtctcagcctcccgagtagctg

SEQ ID NO: 211961 - DNA, 201 bp, Homo sapiens
gtgaggctgatggggtacctggagcccttcagaactttgtatcacatagtagagttcttgaaaaggcctcacttttgaaaagacgcctttttttttttttycccacagagtctaatgaccataggccctgggaactttgatttaattgtgctggataaaactgccttcaaatcgttgctccgtagccctgagtgatgaact

SEQ ID NO: 211962 - DNA, 201 bp, Homo sapiens
ttttctgaatggccctcagggatctagaattgggttgaccctagtccttgcttgatgacatgctcttgttcacatgggccctgcttttgtcttgtgtattttctttctttattttttttggagacaggatctcgctctgtcacccaggctagagtgcattggtgtgatcatagctcactgcagcctcgaacccctgggctc

SEQ ID NO: 211963 - DNA, 201 bp, Homo sapiens
ataagccttttatgaagacctcgcacattgataatcttattaagtttcccctatattttttgggaagaggacctctgcattctaaaacttattttcttttrtttttggcggttctgaagactgcatggtattaagagaccatagggttaactatattgcttatttctgttaaattttgctcctgttggtttgggacatata

SEQ ID NO: 211964 - DNA, 201 bp, Homo sapiens
gctaatcataggatttaggatcagaagatactgtatatttgcataacagtgcctccaaacatttataatattgctttacattcaatttacagtttttattrtacttaaatacaacctcattaaagtttaaaagtacataagccttttatgaagacctcgcacattgataatcttattaagtttcccctatattttttggga

SEQ ID NO: 211965 - DNA, 201 bp, Homo sapiens
atgctggtgagaggttctgacatctcagcttaccctgtcataattggtttttgctaatcataggatttaggatcagaagatactgtatatttgcataacartgcctccaaacatttataatattgctttacattcaatttacagtttttattatacttaaatacaacctcattaaagtttaaaagtacataagccttttat

SEQ ID NO: 211966 - DNA, 201 bp, Homo sapiens
ggagtcagtcttgtggacccagggaggggtctcactatttttcatcaaagcggaggttacattttaaaataaaacatgtaagcctgggcgcggtggctcayacctgtaatcttagcaatttgggaggctgaggtggatggaccacttgaggtcaggagctagagaccagcctgaccaacatggtgaaaccctgtctttacc

SEQ ID NO: 211967 - DNA, 201 bp, Homo sapiens
ggaactctgagtatgggtttgctgtccacatggagattgctttagagcatgaactgctccctacacaggatagagtcatttccttaaaaaaattgtgcttygggaagagttgggaagtttgcatacatgtatgaaaaatggccaaatccttcttaagcagcatgtctttctctttttaagtttggtgtgatttttgctggt

SEQ ID NO: 211968 - DNA, 201 bp, Homo sapiens
gaatatgtgccaggactttgcagtgatgggcttgggttagccccatccaggtgaggaccaggctgacggatcatcctcaggctttggaactctgagtatgrgtttgctgtccacatggagattgctttagagcatgaactgctccctacacaggatagagtcatttccttaaaaaaattgtgcttcgggaagagttgggaa

SEQ ID NO: 211969 - DNA, 201 bp, Homo sapiens
tatcaacatcagtcacattgcctaatttcatgcttaccttgtgtgtaagttgcataatcgctggctttgtggacatgggaaggaaggagactggctgtggrtggggatggatgcctggggacctcactgtagacccttccttgtcccctcgtcaggtttgtatgttcagagggaaagcagtgcagaacatatttaaataac

SEQ ID NO: 211970 - DNA, 201 bp, Homo sapiens
aattggttatgatccacaaaagcaatgcattcttcaactggaaaaaaaaaaacctactggattagggaggtgtgatttttcagtaggagtctttaaaactstttgtaattattttggttataaacttttatagaactattttcaatgaatgctgtctataagaaagatacagtctcaggagcaagttcaaagattattcac

SEQ ID NO: 211971 - DNA, 201 bp, Homo sapiens
atttttgaagatgatttgttcccagtaaaagtcgaaaggttggatcgctcatcctctcaggatgttgataacgatggtaacaaaggatgaggctgggaggktgctttcactcgtgcaatgctttggagtcagttagtctttccctgctaggggaggcctgtcagtctcctggttgactcccatctatgtaaggaaagagga

SEQ ID NO: 211972 - DNA, 201 bp, Homo sapiens
agacctcgtctctacaaataataataataataaaaaattagccgggtgtggtggtacatgcctgtagtgccagctgcttgggaagctgaggcgggaggatygcttgatcccaggaggtcaaggctgcagtaagctgagattggaccactgcactccagcctgggtgacagagtgagaccctgtctcaaacaaaaacaaaaa

SEQ ID NO: 211973 - DNA, 201 bp, Homo sapiens
aaataaaacatgtaagcctgggcgcggtggctcacacctgtaatcttagcaatttgggaggctgaggtggatggaccacttgaggtcaggagctagagacyagcctgaccaacatggtgaaaccctgtctttaccaaaaatacaaaattatccaggcgtggtggcacatgcctataatcccagctactaaggaggctgagg

SEQ ID NO: 211974 - DNA, 201 bp, Homo sapiens
tccgtctcaaaagaaaaaaaaaatgtttcttctcttggtaaccagggagagttagaggccccacgttaaagactcctttctactttgggggtagaaaggargtgtgcagagcgaatgtgaatatgtgccaggactttgcagtgatgggcttgggttagccccatccaggtgaggaccaggctgacggatcatcctcaggct

SEQ ID NO: 211975 - DNA, 201 bp, Homo sapiens
tttctgaatggccctcagggatctagaattgggttgaccctagtccttgcttgatgacatgctcttgttcacatgggccctgcttttgtcttgtgtattttctttctttattttttttggagacaggatctcgctctgtcacccaggctagagtgcattggtgtgatcatagctcactgcagcctcgaacccctgggctca

SEQ ID NO: 211976 - DNA, 201 bp, Homo sapiens
ttctgaatggccctcagggatctagaattgggttgaccctagtccttgcttgatgacatgctcttgttcacatgggccctgcttttgtcttgtgtattttctttctttattttttttggagacaggatctcgctctgtcacccaggctagagtgcattggtgtgatcatagctcactgcagcctcgaacccctgggctcaa

SEQ ID NO: 211977 - DNA, 201 bp, Homo sapiens
gctttgggacctgtgtcccagtgggtggtgatgtttctcacaccaaagacatcgccctggggaagaatctcagttcaccccctggggtaggtcccgtctaytccctcctttgtatatcttctgggaaaaaaacaaatgtactttctgaaatgtgtcaatttaaggactcctgttagcgatctttgggacaaatactcctgt

SEQ ID NO: 211978 - DNA, 201 bp, Homo sapiens
tacctcaccctggggctctcaggctttgggacctgtgtcccagtgggtggtgatgtttctcacaccaaagacatcgccctggggaagaatctcagttcacyccctggggtaggtcccgtctattccctcctttgtatatcttctgggaaaaaaacaaatgtactttctgaaatgtgtcaatttaaggactcctgttagcga

SEQ ID NO: 211979 - DNA, 201 bp, Homo sapiens
gttagaggacagaaagaacggtgataccactgggaaaaaaattaagggcatcaggaacaaaataagaaagcatagaaggaattctgggactctcctgaatccccccccgccacgcctaggtcctttaactccaagcactaaacctgggcctctcccagaaggcagcctgccaaactaatgtggcaggcaggtcatctcctg

SEQ ID NO: 211980 - DNA, 201 bp, Homo sapiens
gtgttgcccgggttggagtacagtggctcttcacaggcaggatcatagcacactgtagcctccagctcctgggctcaagtgatcctcccaccttagcctcytaaatatctgggactatgggcacataccaccatgcccaccttcccatgccatttttgaagatgatttgttcccagtaaaagtcgaaaggttggatcgctc

SEQ ID NO: 211981 - DNA, 201 bp, Homo sapiens
ccgttgaaaagtggacatattcacctttctctgagacattaaaatactggtgagtgtgtgtggtcctgggccccatgagcaggggagtgggtggtgagttyttccctcctgtacctcaccctggggctctcaggctttgggacctgtgtcccagtgggtggtgatgtttctcacaccaaagacatcgccctggggaagaat

SEQ ID NO: 211982 - DNA, 201 bp, Homo sapiens
acggtatgggagttgaaacatgagttaataaagaactggaagccacgagggtcctgtgttaagtagagccacaggggctagacatcagtgctctgcagagrgctgggtgggaggggaggcaggacctcctatcctgtgttaagtagagtcacaggggctagacatcagtgctctgcagagggctgggtgggaggggaggca

SEQ ID NO: 211983 - DNA, 201 bp, Homo sapiens
gagattattgataattctcaaggattctacgtgtaagtcaatggattttatctcctattttgcctcttgtgaatttaaaactgtgtatatactgtgtacckttgaaaagtggacatattcacctttctctgagacattaaaatactggtgagtgtgtgtggtcctgggccccatgagcaggggagtgggtggtgagttttt

SEQ ID NO: 211984 - DNA, 201 bp, Homo sapiens
gttgggctgagctcagctagggggttcttctgctggtcttgggatgcctcattctactgaagtcgtcatctggttattcatttggagccagatggtctacwgtggtttcacatatctggcagttggtgctggctgttggctgggacacttatctccagcactctagctcaaacatgcttaagtgacagcaatatatatata

SEQ ID NO: 211985 - DNA, 201 bp, Homo sapiens
ctatttcaaataatgtgtttaagtctgttttaatgcaccttcaacagcagtttgcttgaatatagttctacttttgcaaagatgagctaaacggatttttwaaaaatcttcattttagcatctacgtcatgggcttggttctggagtggattaaaaacaatggaggtgccgcggccatggagaagcttagctccatcaaat

SEQ ID NO: 211986 - DNA, 201 bp, Homo sapiens
tgcgttcccttctgagccttaccaccttcgtgggatgggtgtccctggctgaaggtgtacctctgccatgttcccctcctccagtaccttggaaagtcccrgtgtgtccctgagcagcgtgtctccgaggggactgtctggaactctcatccccacaataggaagggtttttcagtcatgggggaacactgcgttcctgtc

SEQ ID NO: 211987 - DNA, 201 bp, Homo sapiens
atatctggcagttggtgctggctgttggctgggacacttatctccagcactctagctcaaacatgcttaagtgacagcaatatatatatatatatatatattttttttttttttttttgagacagagtcttgctctgttgcccaggctagagtgctgtggcacaatcttggctcactgcaatctccgcctcccgagttcaa

SEQ ID NO: 211988 - DNA, 201 bp, Homo sapiens
cctcggccttccaaagtgttgggattacgggcgtgagccactgcatttgactatcttgtctatttcaaataatgtgtttaagtctgttttaatgcaccttmaacagcagtttgcttgaatatagttctacttttgcaaagatgagctaaacggattttttaaaaatcttcattttagcatctacgtcatgggcttggttct

SEQ ID NO: 211989 - DNA, 201 bp, Homo sapiens
tatatatatatatattttttttttttttttttgagacagagtcttgctctgttgcccaggctagagtgctgtggcacaatcttggctcactgcaatctccrcctcccgagttcaagcaattctcctgcctcagcctcctgagtagctgggattacaggtgtgtgccagcacgcccagctaatttttgtatttttttttttc

SEQ ID NO: 211990 - DNA, 201 bp, Homo sapiens
ggttgaccctagtccttgcttgatgacatgctcttgttcacatgggccctgcttttgtcttgtgtattttctttctttattttttttggagacaggatctygctctgtcacccaggctagagtgcattggtgtgatcatagctcactgcagcctcgaacccctgggctcaagcattcctccctgctctgcctcccaagtag

SEQ ID NO: 211991 - DNA, 201 bp, Homo sapiens
ctgcaatctccgcctcccgagttcaagcaattctcctgcctcagcctcctgagtagctgggattacaggtgtgtgccagcacgcccagctaatttttgtatttttttttttcagtcgagatggggtttcaccatgttaatcaggctgatctcaaactcctgacctcgtgatccacctgcctcggcttcccaaagtgctggg

SEQ ID NO: 211992 - DNA, 201 bp, Homo sapiens
attgggttgaccctagtccttgcttgatgacatgctcttgttcacatgggccctgcttttgtcttgtgtattttctttctttattttttttggagacaggrtctcgctctgtcacccaggctagagtgcattggtgtgatcatagctcactgcagcctcgaacccctgggctcaagcattcctccctgctctgcctcccaa

SEQ ID NO: 211993 - DNA, 201 bp, Homo sapiens
gggagtttttaggtaggagaccggaaatgatggtctcaggtgctgcaactctcaggagccagtggctagaaaaaggtgttttgatgcgaaattagacgttkttgttctcaatgcctggatctttggtcattctaggtctgtgggaggcatccgggcctctctgtataatgctgtcacaattgaagacgttcagaagctggc

SEQ ID NO: 211994 - DNA, 201 bp, Homo sapiens
aggctgatggaaattaagtacaagtcatacaaggggatgataacccactgttccatatgcaagagtttgttttccctaagtaaacaataaatgtgctgggrcagattttttgttttttgttttttaaaaaatcttctgcttgcatctaggaagtgttaagaaaaaaaaatctgttgatttgtttatgacaacccatacatt

SEQ ID NO: 211995 - DNA, 201 bp, Homo sapiens
gaggctgatggaaattaagtacaagtcatacaaggggatgataacccactgttccatatgcaagagtttgttttccctaagtaaacaataaatgtgctggsgcagattttttgttttttgttttttaaaaaatcttctgcttgcatctaggaagtgttaagaaaaaaaaatctgttgatttgtttatgacaacccatacat

SEQ ID NO: 211996 - DNA, 201 bp, Homo sapiens
agggaggggtctcactatttttcatcaaagcggaggttacattttaaaataaaacatgtaagcctgggcgcggtggctcacacctgtaatcttagcaattkgggaggctgaggtggatggaccacttgaggtcaggagctagagaccagcctgaccaacatggtgaaaccctgtctttaccaaaaatacaaaattatccag

SEQ ID NO: 211997 - DNA, 201 bp, Homo sapiens
cacacctgtaatcttagcaatttgggaggctgaggtggatggaccacttgaggtcaggagctagagaccagcctgaccaacatggtgaaaccctgtctttrccaaaaatacaaaattatccaggcgtggtggcacatgcctataatcccagctactaaggaggctgaggcaggagaatctcttgaaccggggaggtggaga

SEQ ID NO: 211998 - DNA, 201 bp, Homo sapiens
aacaaggcgggggttcggggccggctgcagactctcaccgcagcggccaggaacgccagccgttcacgcgttcggtcctccttggctgactcaccgccctsgccgccgcaccatggacgcccccaggcaggtggtcaactttgggcctggtcccgccaagctgccgcactcagtaagtccccgcgagcgggcgccgggagt

SEQ ID NO: 211999 - DNA, 201 bp, Homo sapiens
gtcacattgcctaatttcatgcttaccttgtgtgtaagttgcataatcgctggctttgtggacatgggaaggaaggagactggctgtgggtggggatggawgcctggggacctcactgtagacccttccttgtcccctcgtcaggtttgtatgttcagagggaaagcagtgcagaacatatttaaataaccctattttcct

SEQ ID NO: 212000 - DNA, 201 bp, Homo sapiens
gaattagggaagacaaagtagtattgtaacattaccatatttcttgtagtaaatccacccaagttaaagcacttggtagagcatcacttgttctcaatctytgaccacatgagtttatgtattgactgttacctatgcttctgcccagagctgttccagacaactataaggtgatttttctgcaaggaggtgggtgcggcc

SEQ ID NO: 212001 - DNA, 201 bp, Homo sapiens
ggtcaaacagtaaccctaggctttcaacacagtctccagtaaatagttgtccaaggattgcataaataaatgagtgaattagggaagacaaagtagtattrtaacattaccatatttcttgtagtaaatccacccaagttaaagcacttggtagagcatcacttgttctcaatctttgaccacatgagtttatgtattgac

SEQ ID NO: 212002 - DNA, 201 bp, Homo sapiens
atgtcttccagtattttctacactctattgtttgttcagaatatttcataatttaaaataatccttgtaagattctctccaattcactattagtacctaaygctttttatttgttccccatcccgtgtttatatgtttttgtttttattttatgtgatatttccaaagatttgaaatcattgtatctaggaatgatttttc

SEQ ID NO: 212003 - DNA, 201 bp, Homo sapiens
ttttgttagatacttcctaaatctggatgtcttccagtattttctacactctattgtttgttcagaatatttcataatttaaaataatccttgtaagattytctccaattcactattagtacctaatgctttttatttgttccccatcccgtgtttatatgtttttgtttttattttatgtgatatttccaaagatttgaa

SEQ ID NO: 212004 - DNA, 201 bp, Homo sapiens
ttaccaccttcgtgggatgggtgtccctggctgaaggtgtacctctgccatgttcccctcctccagtaccttggaaagtcccggtgtgtccctgagcagcrtgtctccgaggggactgtctggaactctcatccccacaataggaagggtttttcagtcatgggggaacactgcgttcctgtctgacctcctggggttcct

SEQ ID NO: 212005 - DNA, 201 bp, Homo sapiens
actgtctggaactctcatccccacaataggaagggtttttcagtcatgggggaacactgcgttcctgtctgacctcctggggttcctcatttacgtggtcrgtgagctgttgagaggcttcaggaagtcaggagtgaggaggcctgcctagctctgtgaatgcagctttcctaagtttctctggccatggaaccactttcc

SEQ ID NO: 212006 - DNA, 201 bp, Homo sapiens
gtcatgggggaacactgcgttcctgtctgacctcctggggttcctcatttacgtggtcggtgagctgttgagaggcttcaggaagtcaggagtgaggaggyctgcctagctctgtgaatgcagctttcctaagtttctctggccatggaaccactttcccagaatgcctgttgacatcttcgtgctccaccaagatgttgg

SEQ ID NO: 212007 - DNA, 201 bp, Homo sapiens
tgcagaataactgaaatttccctgtattgttgtttacttgcaaatttcgtaggtatttctgttcatttggttttgagctggaatatttgttattgttgttyatctttcctttcacagaaatgagtcacaggtcatcagattttgccaagattattaacaatacagagaatcttgtgcgggaattgctgtaagttttaaaaa

SEQ ID NO: 212008 - DNA, 201 bp, Homo sapiens
tcttgctctttcttcccagtgctgtctggggaggtaggctggggaagcttcaggagaggttgttggatgtttgtggctgctggctgctccctgcctaaggmccctctgggcagcccggtgttggcttttgccaacatgagctggcatgagccactgcacccaggccttgggtcccacttgagacagtgaatgagccagttg

SEQ ID NO: 212009 - DNA, 201 bp, Homo sapiens
gacatcagtgctctgcagagggctgggtgggaggggaggcaggacctcttatcctgtgttaagtagagccacaggggctagacatcagtgctctgcagagkgctgggtgggaggggaggcaggacctcctatcttgtgttaagtagagtcacaggggctagacatcagtgctctgcagagggctgggtgggaggggaggca

SEQ ID NO: 212010 - DNA, 201 bp, Homo sapiens
gggaggggaggcaggacctcctatcctgtgttaagtagagtcacaggggctagacatcagtgctctgcagagggctgggtgggaggggaggcaggacctcytatcctgtgttaagtagagccacaggggctagacatcagtgctctgcagagggctgggtgggaggggaggcaggacctcctatcttgtgttaagtagagt

SEQ ID NO: 212011 - DNA, 201 bp, Homo sapiens
gagttcgagaccaccctgaccaacatggacaaaccccgtctctactaaaaatacaaaaattagccaggcatggtggcacatgcctgtaatccaagctactygggaggctgaagcaggagaatcacttgaatccagggggcagaagttgcagtgagccaagattgtgccattgcactccagcctgggcaataagagcaaaac

SEQ ID NO: 212012 - DNA, 201 bp, Homo sapiens
cctgttaaaagaatgagaacaggccaggcgcagtggctcatgtctgtaatcccagcactttgggaggtcgaggcaggtggatcacctgaggtcgggagttygagaccaccctgaccaacatggacaaaccccgtctctactaaaaatacaaaaattagccaggcatggtggcacatgcctgtaatccaagctactcgggag

SEQ ID NO: 212013 - DNA, 201 bp, Homo sapiens
cctccccagtccgtgatgtgaggctgatggggtacctggagcccttcagaactttgtatcacatagtagagttcttgaaaaggcctcacttttgaaaagaygcctttttttttttttccccacagagtctaatgaccataggccctgggaactttgatttaattgtgctggataaaactgccttcaaatcgttgctccgta

SEQ ID NO: 212014 - DNA, 201 bp, Homo sapiens
aaattatccaggcgtggtggcacatgcctataatcccagctactaaggaggctgaggcaggagaatctcttgaaccggggaggtggagattgcagtgagcygagatggcaccattgcactccagcctgggtgacagagggagactccatctcaaaataaataaataaataagcaaacaaacaaacaaataataagtaaaat

SEQ ID NO: 212015 - DNA, 201 bp, Homo sapiens
ccctaggcgctttgcatcagcgtgcacagcgggatcagcagctccggcaagcgggcttcgggaagaatgcagttggtgaggaagctcggcgaggcgtgccsgtgcagctgcccctggccctgactgctggtgcgaggcagtgcacgactcagctggccggggcctgctgtcccgccggtgccacgcacctgcagacgcccg

SEQ ID NO: 212016 - DNA, 201 bp, Homo sapiens
caggtgtgtgccagcacgcccagctaatttttgtatttttttttttcagtcgagatggggtttcaccatgttaatcaggctgatctcaaactcctgacctygtgatccacctgcctcggcttcccaaagtgctgggattataggtgtgagccaccgcgcttggccatgacagcaatattttaagagagcgggaggagaggc

SEQ ID NO: 212017 - DNA, 201 bp, Homo sapiens
ctctcctgcatttgtgattcttggaaagtggcatgcatttgcccacactatgacataagcctggagtttctgtgcccactcaggaagaccagatgacaccygccaacctcttcctaaactcatttgtgtcctttccattgggacaatgttcttttcctttgttttcaccagggggatccttttctcccattataccatctc

SEQ ID NO: 212018 - DNA, 201 bp, Homo sapiens
accgcgcttggccatgacagcaatattttaagagagcgggaggagaggctgtaaggtcttttgagacctaggcttggaaggtgcaaagagtctgttgtaawctcttggccaaagccagtcaaaaggccagcccagattcaaaagatggaaaactagattccacctcttcttatttttaaatgggccacaaaaattctctat

SEQ ID NO: 212019 - DNA, 201 bp, Homo sapiens; identical to SEQ ID NO: 37528

SEQ ID NO: 212020 - DNA, 201 bp, Homo sapiens
ctcccgaccttaggtgatccgcccacctcagcctcccaaagtgctgggattacaggcgtgagccaccgtgcccagctctgaaggtgtaaagttctatgagytttgtcccatttgccccagaaacatgccactaggactgttttgagctatcttcctggtttatttgattgcataatgaggactccaccagtgtcttgtccc

SEQ ID NO: 212021 - DNA, 201 bp, Homo sapiens
ttacagtttgcgttcagtgcaaacccatagcatgagacattactatgaatcaaaatgtaaatacacaaacacaatatagaatccaaaacagaggtgcagcwttcaggaatgaagcagaagacaggttcattcacatgcacagtagcttcagggctgtgtgatctggttgttcccatgtagcttcctaaagatggaaaaaaa

SEQ ID NO: 212022 - DNA, 201 bp, Homo sapiens
gtctgtgcgttcccagtttcttcaccccccagtctctcctctgtgtgctgtaattatttttctaaaacacagaccgcattttgttgtggattactcctcaytgctcaaggatccagtccagttcccagcagggcactccacagccccggccctgtaggtcttccagccaccccagccaggaagccagtgctccagttaagt

SEQ ID NO: 212023 - DNA, 201 bp, Homo sapiens
gccttgtcccctcccctgaaacctgtcaaccttgccgctgctgaattccttatctggcttctctgcctttgcagcccttggctgttacagcacttcctacrtataattgtgattccctccggagccatctctctgtagattggaagcagttaatttcccttaatctttttttctccccccagccccatactagagacactc

SEQ ID NO: 212024 - DNA, 201 bp, Homo sapiens
cccttggctgttacagcacttcctacgtataattgtgattccctccggagccatctctctgtagattggaagcagttaatttcccttaatctttttttctycccccagccccatactagagacactctcccatgggtagtgcataaatatttgttgcatgacaatttagtctttaatttctcacttttatgacattattgc

SEQ ID NO: 212025 - DNA, 201 bp, Homo sapiens
aaacagcatggtactgctaccaaaacagagatatagaccaatggaacagaacagagccctcagaaataacaccgcacatctacaaccatgtgatctttggsaaacttgacaaaaacaagcaatggggaaaggattccctatttaataaatggagctgggaaaattggctagttgtatgtagaaagctgaaactggatccct

SEQ ID NO: 212026 - DNA, 201 bp, Homo sapiens
gatgctggagaggatgtggagaaataggaatgcttttacagtgctgctggaagtgtaaactagttcaaccattgtgggagacagtgtggcgattcctcagrgatctagaactagaaacaccatttgaccctgtgatcccattactgggtatatacccaaaggattacaaatcatgctactataaagacacatgcacacgta

SEQ ID NO: 212027 - DNA, 201 bp, Homo sapiens
cagtcccagctctgcagactgacattattgtgttgggagatacttaagtactcccaatctaaggccactaatctttaccatgcaagttttttttttttttyttttttaaccagtaggtggcctttcaatactgagttaaaaacctgccttccagtgaactttcagtaccttcaccacctaattacagccaaatgacctggg

SEQ ID NO: 212028 - DNA, 201 bp, Homo sapiens
agacttggctttggatttctggacctttgtgcctgtactgtgccgaaagactttacaggtatatccggagcaataagccagtcaccatcatttcggtcatragtcatccctcagatgtcatggaaatccgaatggtcaaagaaaattttaaagcaagacctggtcaggtgagtcagtggtcagcaactttttaaatagcct

SEQ ID NO: 212029 - DNA, 201 bp, Homo sapiens
atgcaagtttttttttttttttttttttaaccagtaggtggcctttcaatactgagttaaaaacctgccttccagtgaactttcagtaccttcaccacctwattacagccaaatgacctgggatgtcatacttgagtttttttttttttgatgaatgattttatcattgtctgtctttagatcttatccatatttctttgg

SEQ ID NO: 212030 - DNA, 201 bp, Homo sapiens
ggctcctctcgcttttttgcatgtgtatttttatgtatatgtcttctacagagaaagcaccaaatttagatgacttcactgataagtcctaccaaatattyaagaaagaaatcctaaactaataaatcctaccaaatattcaagagaactattatataaaacctcctagagaatagaaaaacttagaaatattttcaattt

SEQ ID NO: 212031 - DNA, 201 bp, Homo sapiens
aaaagaaagatgatccagcagcatgaaggatataggcagggtaagaatggaggcttagatcccacttaggattcctcctctaagaggctgaaatttcatargcttatcaatataatttaagaactggaaacatgtctttttttaattactatcaccaaacacagtgcctggaatatagtagttataaatagttattaagtg

SEQ ID NO: 212032 - DNA, 201 bp, Homo sapiens
accgtgttgtaaagatgaagaaagactctaagattcatcttttctaaaacttcttaggtattcagtatacattgcttcagtgcaggaatccttaaaagatrtccatctagactatgttattattgtcagtatgttaagatacaatgctgcctataccacttttaaatgcctcttttacttcatgactttcaccttcttttg

SEQ ID NO: 212033 - DNA, 201 bp, Homo sapiens
gaacccatcactgaactaacatttactattttgattttgtacatttttaaaaaacataagagtgaaagaatgagtcaaacgtaaatcttggaagagtttaktttatgggctgagaatggatctacagggtttctttaactttgatctacttgaagaaaattggtcttagacttgtactgggtttaaatgagtgtgtcatgc

SEQ ID NO: 212034 - DNA, 201 bp, Homo sapiens
gtataagcattccattttctccttaatctcatcagcatcaactttttaataagctattctaactggtatgagatagtatctcattgtggttctgatttgcmtttctctaatgattagtgatgttgagcattttttcatatgcttgttggctgagtgtatatcttttcttgagaaacgcctattcatatcctttgcccattt

SEQ ID NO: 212035 - DNA, 201 bp, Homo sapiens
tgtaatataattattatatggtattttgttggatctgcctactaggttttcttttaaaaaggagcacaaataagttgttcattttgtttaaaaaatagcatttttttagttacttgttataggagttggatttagtcagattaggataaatgtgaaaataatatcaccatgtggaatgagtttacaaatattaatatattt

SEQ ID NO: 212036 - DNA, 201 bp, Homo sapiens
taaaagctgccctatgaaacatggactagttcttattctcatggccacatccagctttagggcatgctggggaacaggatttgtattccggacagaatctkcctggcttaatattttattactttgcaactaagaagaatgcatattggctcacaatcaacaaggtttgccatagccttaattaataaagcctaaaaaaaa

SEQ ID NO: 212037 - DNA, 201 bp, Homo sapiens
tatatcctcagttatcaaaagtctagaagaaaagggatcagcagcttaatacccttctgaaagattccatcctaagccattaaatattttcaaggtaattyttagaagtttatcatgcattttccagtatgaacataatgcataccattagggaataatgaaaaatgcacaaaagtagaaatggaaagtttttaaatatta

SEQ ID NO: 212038 - DNA, 201 bp, Homo sapiens
attttcaaggtaatttttagaagtttatcatgcattttccagtatgaacataatgcataccattagggaataatgaaaaatgcacaaaagtagaaatggawagtttttaaatattatcaatatttgaagacaatattattcttcaaattgtatttttaagacttgccctaccttattttcttaagaaaaataatttttctt

SEQ ID NO: 212039 - DNA, 201 bp, Homo sapiens
cctatattcactatatgagttttaatatatatcattatggatagtctgattaaaattccaataaatgaagaggtatcattgtcatgtgcgttttctctcatttttttttttgtttattcaggccaccagtatatctttttggcttctaattttcagaggaatgttgaaaaattaaaaatggtttaaagataaagaggaatg

SEQ ID NO: 212040 - DNA, 201 bp, Homo sapiens
ctatattcactatatgagttttaatatatatcattatggatagtctgattaaaattccaataaatgaagaggtatcattgtcatgtgcgttttctctcatttttttttttgtttattcaggccaccagtatatctttttggcttctaattttcagaggaatgttgaaaaattaaaaatggtttaaagataaagaggaatga

SEQ ID NO: 212041 - DNA, 201 bp, Homo sapiens
gttacattttacatttttcatttaactcattaagtctttaacccatcctgacttttgtttatagtaaagagaaggggtccagcttcaatcctctgcatatrgctagccagttacccagcaccattcattaaatagggagtccatttaccattgcttgtttttgttaactttgtcaaaagttgtttgttgtaggtgtgtgac

SEQ ID NO: 212042 - DNA, 201 bp, Homo sapiens
tgataataacttctgttgacttcttactatatgtcaagcactgcattaaatactatatatgctcacttaatatatacaataaccctttggggtaggtatcttattattattattattattattattttcattttgcagatgaggaaaatgagactgagataaagtcacatagttacctaagaccacacagctagttaaggg

SEQ ID NO: 212043 - DNA, 201 bp, Homo sapiens
tactattttggtcaaggtaaagctaagctttaagcacgaatttattaggagggcaaaggttggagttttgattatttaaaatgcttcactatttttcatasatgtcattgacttccctacacaagaaggatatcctgatttgatgggttttccaaggaaattgtgattgtttcttgctgtggtacacctatattttctcat

SEQ ID NO: 212044 - DNA, 201 bp, Homo sapiens
tttgaaaatcatttcttcaccataacattaaataggaaatatggaataagaaaagaaatcagttgctgagtgtcaagtacagagcagcaagagtttttttkttgttgttttttaaactatttttcaacataaacaaaagtagagagaatagtataatgaatccttgtattcataaaaaatatagaggttagtttacttttt

SEQ ID NO: 212045 - DNA, 201 bp, Homo sapiens
tgtcaagtacagagcagcaagagtttttttgttgttgttttttaaactatttttcaacataaacaaaagtagagagaatagtataatgaatccttgtattyataaaaaatatagaggttagtttactttttagtatatactcaatcactgaaaacttttttactttcttaaaacagtgtatcaaagaatttttcacctatg

SEQ ID NO: 212046 - DNA, 201 bp, Homo sapiens
ctcaggcctgtaatcccagcacttttggaggtcaaggtaggaagaccacttgagccccggatttcaagatcagcctgagaaacataaggagacactgtttytacagtaaataaaaaaaaaaagccagatgtggtggtacacatctgtagtcccagctactaggaaggctgaggcaggaggattgcttgagccccagtgttt

SEQ ID NO: 212047 - DNA, 201 bp, Homo sapiens
tttcattgagccttgatcccaccactgctctccagcctgagcaagagagtgagaccttgtctcaaaaaacaaatatatatatatatatatatatatatatwtatatatatatttaatttcttgaatatttacttttctccttttatggagtattttaatgtatatggaaatcttatatatgcacaattttctttggagatg

SEQ ID NO: 212048 - DNA, 201 bp, Homo sapiens
tattatggcaactagtatattgattcccacgccaaaggaattagcttttaaatcttaactattttgattatattgtagactggcacatttttgttcggggyctttatgcatttctgtggctaaaaaatctgaaagaaaagaaaacccatgcctcttattttattttattttattttattttttgagacatggtctttctgt

SEQ ID NO: 212049 - DNA, 201 bp, Homo sapiens
gatctcagggaaaaaagtaatttattggaaggattctaggtcatgttatggaaaccaaaccagaaaaaagagagggctatatttgtaccccagggacactrgatctagtgacaggtagtgaacactagaactcacatgacatcagggacttgggctttcatctctgctgcttcttgaatgctcacattgtttttcccttcc

SEQ ID NO: 212050 - DNA, 201 bp, Homo sapiens
aaaaagtaatttattggaaggattctaggtcatgttatggaaaccaaaccagaaaaaagagagggctatatttgtaccccagggacactggatctagtgayaggtagtgaacactagaactcacatgacatcagggacttgggctttcatctctgctgcttcttgaatgctcacattgtttttcccttccttttcaaactt

SEQ ID NO: 212051 - DNA, 201 bp, Homo sapiens
gataataacttctgttgacttcttactatatgtcaagcactgcattaaatactatatatgctcacttaatatatacaataaccctttggggtaggtatcttattattattattattattattattttcattttgcagatgaggaaaatgagactgagataaagtcacatagttacctaagaccacacagctagttaagggg

SEQ ID NO: 212052 - DNA, 201 bp, Homo sapiens
ataataacttctgttgacttcttactatatgtcaagcactgcattaaatactatatatgctcacttaatatatacaataaccctttggggtaggtatcttattattattattattattattattttcattttgcagatgaggaaaatgagactgagataaagtcacatagttacctaagaccacacagctagttaaggggc

SEQ ID NO: 212053 - DNA, 201 bp, Homo sapiens
gtgagagtgtaaattagttcaaccattgtggaagacagtgtggcaattcctcaaggatctagaatagaaataccatttgacccagcaatcacattactagrcatatacccaaagggttataaatcattctataaagacacatgcacatgtatgtttattgcagcagtgttaacaatagcaaagacttggaatcaacccaaa

SEQ ID NO: 212054 - DNA, 201 bp, Homo sapiens
cagcaggggctgggttatggtggtgagttccacatgcatgcatctgtggtactgggtgatatgttttggctgtgtccccacccaaatctcatattgaattrtaatccccactggttgggggagggacctcatgggaggtgattagatcatgggagtggttcccccatgctgttcttgtgatagtgagtgagttctcatgag

SEQ ID NO: 212055 - DNA, 201 bp, Homo sapiens
gctggcaaagctaagagacatgaagaatcattcccagggaacaaaaccatagcctaataaaagaactgataacatgtactagctaggtttcagaattgttmtggactaagtatttctatatggcttctttttctcttttttgaataggagcatttactgtggatttcccatgattgtcttggcattttatgttgcatgtat

SEQ ID NO: 212056 - DNA, 201 bp, Homo sapiens
ttgttgtacagaagctacttagtttaattagatcttatttgtccatttttggttttgttttaattgcttttgttgtcttcatcatgaaatctttgccaagrtctatgtcctgaatggtatttttaccaggttatcttccaggctttttgtagttttaggttttacattaagtctttcattcatcttgaattaatttttata

SEQ ID NO: 212057 - DNA, 201 bp, Homo sapiens
gtgctggcagggtttactcctgttggcttgggtggcacactggtgggagtgagcctgaagtggtcctgtgtatgctcatgcctatggcagtggcagtgtgrctggtgcagggcggtggcagaggcagagttgccagcgtccatgtacacatttgtgctgttggtggaagggtaacagggcactcctgcatcagcaagggtt

SEQ ID NO: 212058 - DNA, 201 bp, Homo sapiens
tagcaaagacagagcctgggacttagtaggtacattattaagagttggagccattttttaaaccttttgtctttttgttatttttgctgttctgaaagtckctaagcttttaaaaatggtctcttattttactattcttgaattgtttcacgcttctcaactcatgacaagaacctattctgccaatgaacctcctgcccc

SEQ ID NO: 212059 - DNA, 201 bp, Homo sapiens
cccactactcttctcagcctattctctgtctccatgagttcaatttcttttttttagctcccatatgtgtattcactcaagatttattgattaccaaattygatggatagagttgcctacagattgtgggagtaagaataatgtaactaggaattttcttgaagtgcctgctttttgtttcatatatatatatatatatat

SEQ ID NO: 212060 - DNA, 201 bp, Homo sapiens
tagatattgactatgataagctaggttgtgttaaattctagaatcaagtatgttagaataggagaaaatctgagtatacccacagaattgtaataagtctrttcctttttctgtcctctcagttttggcaagagaacagacctgactatgtcaacatccagctgtacctcagtcaaacagatgggatacaggtatgtggtt

SEQ ID NO: 212061 - DNA, 201 bp, Homo sapiens
tttttgcacaacagggtgactatagttaataatagtgtgtattgtatttttcaaaatagctaagagtgtattttaattttaattttttattttttgagacagagtctcgccctttcacccaggctgtactccagtggcatgaacatgactcactgcagcctcaagctcctgggttcaagcaattctcctgtgccagtcttc

SEQ ID NO: 212062 - DNA, 201 bp, Homo sapiens
ttttgcacaacagggtgactatagttaataatagtgtgtattgtatttttcaaaatagctaagagtgtattttaattttaattttttattttttgagacagagtctcgccctttcacccaggctgtactccagtggcatgaacatgactcactgcagcctcaagctcctgggttcaagcaattctcctgtgccagtcttca

SEQ ID NO: 212063 - DNA, 201 bp, Homo sapiens
attttaagtgttctttgtatattttgataataatcctttatcgatatgtcttttgcaaatgctttttcccagtctgtggcttatcttctcatggtgttcamaacgtcttttgcagagctgaaattttaattttaatgaaggccagcttattaattctttctttcatggatcatgtctctgacattgtatctaaaaagccaa

SEQ ID NO: 212064 - DNA, 201 bp, Homo sapiens
acatgtttgccagtattttggagcctggcaggcctgggtagaggctgcgggggacgcctccaagttcccacccgggacatcctgaacagcagcagccacarcaacaggctcgcccctagacaaaggggccggcgcggcggagcagactggtgcagcctgggccgcgcgctcagagcgctgggcgtctgggcagctgagtgg

SEQ ID NO: 212065 - DNA, 201 bp, Homo sapiens
aggcctgggtagaggctgcgggggacgcctccaagttcccacccgggacatcctgaacagcagcagccacaacaacaggctcgcccctagacaaaggggcmggcgcggcggagcagactggtgcagcctgggccgcgcgctcagagcgctgggcgtctgggcagctgagtgggcagagctgacccggtgcgggtgggagtc

SEQ ID NO: 212066 - DNA, 201 bp, Homo sapiens
tcgggcttccactcagtctttgaccctcggtcctcgctcagcggcccggcaggccgcacaactgtaaccgctgccccggccgccgcccgctccttctcggkccggcgggcacagagcgcagcgcggcggggccggcggcatggctgtgtcctggaggagctggctcgccaacgaaggggttaaacacctctgcctggtagg

SEQ ID NO: 212067 - DNA, 201 bp, Homo sapiens
gctttggccacagattggtgtagaaacagtcatttgaggggaactgatgacttatttgccttttatggtcttctagccttaaggatgaatgacgttttagrttaggtttccttgaaaacaggctggcaggcatattgcatgcagcagatttgttgggaaggatgcttaggacaacagtcaataacgattgactaaaaaggc

SEQ ID NO: 212068 - DNA, 201 bp, Homo sapiens
ttcattgagccttgatcccaccactgctctccagcctgagcaagagagtgagaccttgtctcaaaaaacaaatatatatatatatatatatatatatatatatatatatatttaatttcttgaatatttacttttctccttttatggagtattttaatgtatatggaaatcttatatatgcacaattttctttggagatgg

SEQ ID NO: 212069 - DNA, 201 bp, Homo sapiens
gattatggtaacagatgtgatagccctgtggccagcttgaggcaaagatgggaagaaaaggaagaggagagaagtgaatgtaggtacagacagaagaaaargaactggaggtagaagacggctgagaaaggaaaattgaattatatgtgaaataaaatagtagtaactattcagacaaagggcaaggattttagaactcaa

SEQ ID NO: 212070 - DNA, 201 bp, Homo sapiens
atccaccctaaagatgagataccgaattaggtaatatctagaagtctcttgcatgcctccttccaagatatttataactatacctgaatatctatttagawacagatatctaaaattctggggattgttggatctaggcaagttgcttttaaatgaattatgtgaaaataaaagatctcagaatatctgggaatcttcagt

SEQ ID NO: 212071 - DNA, 201 bp, Homo sapiens
tggtggtgctattcctcatgatcacagcctctacatatgcaataaggtaagtgtcagaatcaattattttgatgtgtatctgtcaggttatttagaaaaaktcttgagtaatcaaaatgtttaaccattgtagtgtcctggttaatggactattctgggtaagtaagagtgaagtatagctgtttctatacatgacttctt

SEQ ID NO: 212072 - DNA, 201 bp, Homo sapiens
ctagaagtctcttgcatgcctccttccaagatatttataactatacctgaatatctatttagatacagatatctaaaattctggggattgttggatctagrcaagttgcttttaaatgaattatgtgaaaataaaagatctcagaatatctgggaatcttcagtaagagaagaataatgagaaagaatagcattctaaaat

SEQ ID NO: 212073 - DNA, 201 bp, Homo sapiens
ctattctgggtaagtaagagtgaagtatagctgtttctatacatgacttcttgtttctgaaagttctcttgtattagcaaattttctggattggtaagaarttgtgtatggagactgcatttgatgatcaaaagaattagagttcttcagaatttgagtatcttttgaaggatagtgtatctctatgggacacgggattga

SEQ ID NO: 212074 - DNA, 201 bp, Homo sapiens
ctctactgtttgacatatgtctttccagatattttcccatatgcttctgcatacatgagtttctaacatttatttgctggatcatattgttttgtaactgrctcctttcactcaactacatgtgatggacatctttccatattactgtatgtgcctcattcatgttaatgaccatataatatttcacagtaggaaagtact

SEQ ID NO: 212075 - DNA, 201 bp, Homo sapiens
gtttgagggagaacatacatgtagatgtgggatttgaattaggcttcccacagaacagcacagtatttcggattctaatataatcattttttgtatttttytctcactatgatttaagtaaaaacctacttgtatacatttttatagttcctggcctgacaggggtctgcatggtggtggtgctattcctcatgatcacag

SEQ ID NO: 212076 - DNA, 201 bp, Homo sapiens
tggtaatacagatattattattactttcataatcttaaaatacctggttttaacttggattattgctttcatttctgaaattatgctttttttgagaagcmagtacaagacatgagcatgtggcttttcaacttgaaaatgagaaacgggaatatgaaagtagtctcaggtactgaaaatctgtcgtgtgggtgaaagatt

SEQ ID NO: 212077 - DNA, 201 bp, Homo sapiens
gttatggaaaccaaaccagaaaaaagagagggctatatttgtaccccagggacactggatctagtgacaggtagtgaacactagaactcacatgacatcarggacttgggctttcatctctgctgcttcttgaatgctcacattgtttttcccttccttttcaaactttctcaacttagcagtaaagttgactacaagcag

SEQ ID NO: 212078 - DNA, 201 bp, Homo sapiens
aatgctaaaagcaaacaagtatattatgtggaaagaaagtattaataggctgggcatggtggctcacacctgtaatcccagcactttgggaggcaaagggsggggagcacaaggtcaggagatcaagaccatcctggccaacatggtgaaacccagtctctactaaaaaatacaaaaaattagctgggcgttgtggctggc

SEQ ID NO: 212079 - DNA, 201 bp, Homo sapiens
atcccagcactttgggaggcaaaggggggggagcacaaggtcaggagatcaagaccatcctggccaacatggtgaaacccagtctctactaaaaaatacaraaaattagctgggcgttgtggctggcgcctgtagtcccagctactcaggaggctgaggcaggagaatggcgtgaacccggtaggcagagcttgcagtgag

SEQ ID NO: 212080 - DNA, 201 bp, Homo sapiens
tgctcaagtaaataaatactcatatcattagatgcatatttatgtgtgtgtgtgtgtgtgtgtgtgtatgtgtgttagggggaggatgtgtgtgtgtatgtgtgtgtgtgtgtgtgtgtgtgtgtttctcttatccctgacttactagggttgtttcattacagcctttgaaaatttggtaaactgtctatagttcagttt

SEQ ID NO: 212081 - DNA, 201 bp, Homo sapiens
gctcaagtaaataaatactcatatcattagatgcatatttatgtgtgtgtgtgtgtgtgtgtgtgtatgtgtgttagggggaggatgtgtgtgtgtatgtgtgtgtgtgtgtgtgtgtgtgtgtttctcttatccctgacttactagggttgtttcattacagcctttgaaaatttggtaaactgtctatagttcagtttt

SEQ ID NO: 212082 - DNA, 201 bp, Homo sapiens
tgtatatatacttatgtatttaaatattatgtaaataaatatatggcatatctattatatatagattatattttatatattgatatatttatatattgatttatatatatatatatatatatagtcaacacatatgttattttgtgaagcacttttgaaaaagatggttttgtgccaatataccctattgttcttctttta

SEQ ID NO: 212083 - DNA, 201 bp, Homo sapiens
aacccaataaagtggtttaaaacaacaaattttctttttttttcttttttttttcttgaaatgaggtcttattttgtctcccaggctggagtgcagtggcwctattaccagaaaggggtcctgagccagaccccaagagagggttcttggatctcacacactctatgactccatagagtaaagtgaaagcaagtttattag

SEQ ID NO: 212084 - DNA, 201 bp, Homo sapiens
gtatatatacttatgtatttaaatattatgtaaataaatatatggcatatctattatatatagattatattttatatattgatatatttatatattgattwatatatatatatatatatatagtcaacacatatgttattttgtgaagcacttttgaaaaagatggttttgtgccaatataccctattgttcttcttttat

SEQ ID NO: 212085 - DNA, 201 bp, Homo sapiens
tatatatacttatgtatttaaatattatgtaaataaatatatggcatatctattatatatagattatattttatatattgatatatttatatattgatttatatatatatatatatatatagtcaacacatatgttattttgtgaagcacttttgaaaaagatggttttgtgccaatataccctattgttcttcttttatg

SEQ ID NO: 212086 - DNA, 201 bp, Homo sapiens
caaccagaggtcacatttgttgccctcgtgattttggctggcttgggctggcttctttacaatatgctgtttcatcagcaaggtctttgtgctctgtaccktgtgcggacctcctaactcatctgcaactaagaataccttaacctcctgggaacgcagctggcttcagccctattttacccatcccctattcaagataga

SEQ ID NO: 212087 - DNA, 201 bp, Homo sapiens
ccaccttgtgactgctgcacttccttgatagcccggctaaatctgcctcatcttgccactgtgaaaacatctctcactctcatgtttcattttctttctcyagcaatattaattgttccatcttctgggttttcttaggtatttattcacatttctattcttaccactttgttcagcccatatgatatttttatgggttgt

SEQ ID NO: 212088 - DNA, 201 bp, Homo sapiens
gcggatcacctgaggtcaggaactcgaaaccagcctgatcaacatgatgaaaccccatctctactaaaaacacaaaaaattagccgggcatggtgggtggmaagtgcctgtaatcccagctacttaggaggctgaggcaggagaatcacttgaacccaggaggcagaaattgcactgagctgagatcgcgccactgcactc

SEQ ID NO: 212089 - DNA, 201 bp, Homo sapiens
cagaaaaggctattgataataaaaatcaaaagctagtgataaaatgcaataatcatttatggtacagtatttagcaaagtaggaatagatgaaatttttctttttttttttattatactttaagttttagggtacatgcgcacattgtgcaggttagttacatatgtatacatgtgccatgctggtgcaaaaatttttctt

SEQ ID NO: 212090 - DNA, 201 bp, Homo sapiens
ctggaggctctgctggtagaactcccagcacacttcactcaaatggctggctgcagctggtgctagttatggtctgggatctcagatgaggctgctaagcygaatgtgttgttactcctttacatcgtctctccacatggcttgaacttctcacagcatgcctgctggattcgaagagatggcattcaagtgcttaaaaat

SEQ ID NO: 212091 - DNA, 201 bp, Homo sapiens
cgtctctccacatggcttgaacttctcacagcatgcctgctggattcgaagagatggcattcaagtgcttaaaaatgtaagcaaatctcttaatattcagycttagtattacatagggcttctactgccatattctctggttgaaaacaatcattggatcagcccaaactaaaggggtagagaaagaaattccacttctca

SEQ ID NO: 212092 - DNA, 201 bp, Homo sapiens
gatggcattcaagtgcttaaaaatgtaagcaaatctcttaatattcagtcttagtattacatagggcttctactgccatattctctggttgaaaacaatcmttggatcagcccaaactaaaggggtagagaaagaaattccacttctcaaggaaggaatgacaagttttgggccctttttaatcaacatccaagtaagctg

SEQ ID NO: 212093 - DNA, 201 bp, Homo sapiens
tgagactccgtctcaaaaaaacagaaaaacaaaacaaacaaacaaacaaacaaaaaaacatataattctgcagaatgcacatcatttttattgtctcaagragaacttaatagcaattagccaaacactagtcataatgtatattcataaaattcaaaggactgaaatcatacagaatgtttcttgaccacaatttagttg

SEQ ID NO: 212094 - DNA, 201 bp, Homo sapiens
atattattattactttcataatcttaaaatacctggttttaacttggattattgctttcatttctgaaattatgctttttttgagaagcaagtacaagacwtgagcatgtggcttttcaacttgaaaatgagaaacgggaatatgaaagtagtctcaggtactgaaaatctgtcgtgtgggtgaaagatttgatttttttt

SEQ ID NO: 212095 - DNA, 201 bp, Homo sapiens
ggtgatatgttttggctgtgtccccacccaaatctcatattgaattataatccccactggttgggggagggacctcatgggaggtgattagatcatgggartggttcccccatgctgttcttgtgatagtgagtgagttctcatgagatctgatggttttataagaggcttcccccttccctctgcactcattctctcttc

SEQ ID NO: 212096 - DNA, 201 bp, Homo sapiens
gtgaaactcatagaatcagagaatagaatggtaattatcagggtctagagtgagggaggggaaatggggagttggttaaatggtataaagtttcagttgtrcaatataagcatattccagagatctgctgtaaaacatagcacttacagttaataatattgtattgtacacttgacaattattaagagagtagacctatat

SEQ ID NO: 212097 - DNA, 201 bp, Homo sapiens
gtttcagttccaaactatctttatgtgaatgcataaaactgaatgcttgtaagagcacccaaatcatctcttgaatgttttgctgcttagaagtttcttcyaccagataccctaaatcatctctctcaagttctaagttccacatatttctagcgtaggggcaaaatttcaccagtctctttgttaaagcatagtaagagt

SEQ ID NO: 212098 - DNA, 201 bp, Homo sapiens
cccaaaatggggtaatgaaagaaaactctataggaaatttcataggaggtggtaaaagtgtcaagagtgaaagaaatagtttctctactattgaggataaygtcaagaatggaagaaatagttttatttttagcatagcatattgtaatgaaaccagtataaagtatactaaatttaaaagctagaattacctctccaaca

SEQ ID NO: 212099 - DNA, 201 bp, Homo sapiens
agtttctctactattgaggataacgtcaagaatggaagaaatagttttatttttagcatagcatattgtaatgaaaccagtataaagtatactaaatttaraagctagaattacctctccaacaacctttcagtttctaaatcttcctatggatatatcctaatatcttctaaatgaaaaaatttaagaatgaagaacatc

SEQ ID NO: 212100 - DNA, 201 bp, Homo sapiens
aaatacagtcttgttagcaacatggagcattcatagacttatggactgttataactaggagacacattaaacatcacttttctaataattttgttttagakattaatgaactgtgacaacaaatgttcagagacttgaccaagtgacaaaacttgaatttgaataagtatctagtgtttttgtaatgcttaaagttattaa

SEQ ID NO: 212101 - DNA, 201 bp, Homo sapiens
tacttcagattgccctggccagaacttccaacactatggtgaataggagcggtgagagagggcatcactgtcttgtgccagttttcaaagggaatgcttcmagtttttgcccattcagtatgatattggctgtgggtttgttataaatagctcttattattttgagatacgttccatcaatatctagtttattgagaattt

SEQ ID NO: 212102 - DNA, 201 bp, Homo sapiens
gacaagagagcttttcctcacctcacggaagctccattagttatatgaggctctggagcctccctatgggttgcctcctacagcaaaggacatctcacccygggccttcactcttgaggtggcccagggagccctcagtatgaaggctctgagtccattgcaggcttgtttcagaagattcaggttcagaagtgcaagaga

SEQ ID NO: 212103 - DNA, 201 bp, Homo sapiens
aatggaagaaatagttttatttttagcatagcatattgtaatgaaaccagtataaagtatactaaatttaaaagctagaattacctctccaacaacctttyagtttctaaatcttcctatggatatatcctaatatcttctaaatgaaaaaatttaagaatgaagaacatcaggaatatattttagtatttgtatttcctg

SEQ ID NO: 212104 - DNA, 201 bp, Homo sapiens
aagtggctggaaaacaatgccatacttgcccattatagtctatgaaccatgacttacgtagtatatatagcaagtagaataaatcaatgattatatttggmttaaattgtcagattattttactcaatttctctcattttgcaatagatgtgctttcccattttgatttttcactcatcttcccttttatctacagatctg

SEQ ID NO: 212105 - DNA, 201 bp, Homo sapiens
ggtctggctcagtgaatctacatttttacataaacaatgcagtggagaaagcaatcagacatgcatttgtctcaggtgagcctcagagggatgactttgarttccgtctgtcctttgtccacaaggaaattccctgtgggggaggtatgtagctttttatctttgtagctaccttatttaggaatacaatggaaggcaggt

SEQ ID NO: 212106 - DNA, 201 bp, Homo sapiens
agagggcatcactgtcttgtgccagttttcaaagggaatgcttccagtttttgcccattcagtatgatattggctgtgggtttgttataaatagctcttaytattttgagatacgttccatcaatatctagtttattgagaatttttagcatgaagggctgctgaattttgttgaaggccttttctgcatctattgagata

SEQ ID NO: 212107 - DNA, 201 bp, Homo sapiens
agaaaaggctattgataataaaaatcaaaagctagtgataaaatgcaataatcatttatggtacagtatttagcaaagtaggaatagatgaaatttttctttttttttttattatactttaagttttagggtacatgcgcacattgtgcaggttagttacatatgtatacatgtgccatgctggtgcaaaaatttttctta

SEQ ID NO: 212108 - DNA, 201 bp, Homo sapiens
aatgggatggctgggtcaaatggtatttctagttctagatccctgaggaatcgccacactgtcttccacaatgattgaattagtttacagtcccaccaacrgtgtaaaagtgttcctgtttctccacatcctctccagcacctgttgtttcctgactttttaatgatcaccattctaactggtgtgaaatggtatctcatt

SEQ ID NO: 212109 - DNA, 201 bp, Homo sapiens
gttcttccatttgtttgtgtcctcttttatttcgttgagcagtggtatgtagttctccttgaagaagtccttcacatcccttgtaagttggattcctaggyattttattctctttgaagcaattgtgaatgggagttcactcatgatttggctctctgtttgtctgttattggtgtataagaatgcttgtgatttttgcac

SEQ ID NO: 212110 - DNA, 201 bp, Homo sapiens
gtctctgtctccttcagttcttctctgatcttagttatttcttgccttctgctagcttttgaatgtgtttgctcttgcttctctagttcttttaattgtgrtattagggtgtcaattttagatctttcctgctttctcttgtggacatttagtgctataaattttcctctacacactgctttaaatgtgtcccagagattc

SEQ ID NO: 212111 - DNA, 201 bp, Homo sapiens
gagacattttgcttctcttttccactccctcttacaattttttattcccttggctttgtgggcacctctatgccctggtagttttcctcccctctgattgygttcatctggaacgcaatcctttccctctcccacctttgttccacatgtctgtttcaaatcacccattcctattaataaactcattataacttttgaatc

SEQ ID NO: 212112 - DNA, 201 bp, Homo sapiens
tgtcaaaggcaaggctactgttcagtaaacccctctaaatcagaatgtcattagaagaaatttaaattatatgtaaaggaataaaagctgaaaattgaagrcttttgttttgaaaagttgaacttacaaatttgcaagtgtcattttctgtatttccgaaatactgtaaaatttatttatcataaagtttaatattagaaa

SEQ ID NO: 212113 - DNA, 201 bp, Homo sapiens
acaattttttattcccttggctttgtgggcacctctatgccctggtagttttcctcccctctgattgcgttcatctggaacgcaatcctttccctctcccrcctttgttccacatgtctgtttcaaatcacccattcctattaataaactcattataacttttgaatctcagaatctccatccctggactatctgaaactc

SEQ ID NO: 212114 - DNA, 201 bp, Homo sapiens
gggtttaacgtatcaagctttttctcaattcagagacttctcatgtattgtctcctctgtctgcattacttttctgcccactctttgctcaagttctggtrttgtactggagccatctcacaccagctcctgagggtcaattgttaaattatcagaagccagttgccaaacacagcaattattaaaaattaaatatataaa

SEQ ID NO: 212115 - DNA, 201 bp, Homo sapiens
gtctgtttcaaatcacccattcctattaataaactcattataacttttgaatctcagaatctccatccctggactatctgaaactcgccattttaaaattyagtacattatcttcttacaaaaaatgttttccatctccttaattaatgtacctatatagcggcatcaccattttaatagtctccttggaaagaaatctaa

SEQ ID NO: 212116 - DNA, 201 bp, Homo sapiens
tcagatgcatgggacaactgaagtaaagagagatgtgtatggcgtatacccagtgagaggttcctagaatgtagtaaatttattctaataaaagaatctgwcaattgaagaaaggaatgcaaactggcctatggcatagttaccgacttaccatttgtgccaacgaatccttgggtgacctcactgtaaggagctacatga

SEQ ID NO: 212117 - DNA, 201 bp, Homo sapiens
acttttgaatctcagaatctccatccctggactatctgaaactcgccattttaaaattcagtacattatcttcttacaaaaaatgttttccatctccttawttaatgtacctatatagcggcatcaccattttaatagtctccttggaaagaaatctaagccatcgaggtgcctctatcctctcccttctatgttactgca

SEQ ID NO: 212118 - DNA, 201 bp, Homo sapiens
agagagctactggttgtcatggtaatatgactgcacgtgtgaagttagcattggcaacatcacattttcattaaaacatcatgcatatttgcatgaacttytgcccagaccattgttgcaggattggctcctccaccccatctcataatggtgccaagagatttcatatttcagatccaaacttgttagagtttacagcat

SEQ ID NO: 212119 - DNA, 201 bp, Homo sapiens
ctccatccctggactatctgaaactcgccattttaaaattcagtacattatcttcttacaaaaaatgttttccatctccttaattaatgtacctatatagyggcatcaccattttaatagtctccttggaaagaaatctaagccatcgaggtgcctctatcctctcccttctatgttactgcatccaatatattaaactct

SEQ ID NO: 212120 - DNA, 201 bp, Homo sapiens
gtatcatttcgtttatgaagtgttatataacaataagaggataaattaataacaggataaataaagaataagaaagcacactaaaaactcttttttttttkaaacaaattcttactctgttgtccaggtagagtgtagtggtgcaatcatggttcattgcagcctcaacatcccgggttcaagtgatcttcctgctttggc

SEQ ID NO: 212121 - DNA, 201 bp, Homo sapiens
gacccaggtgaagtgttgttttatctgcaaagagtctcttaaggaagttcattctctcctatttgctataatattaatttgaacatttctttattattacmtgatgttgcattgtatttatgaaggatgattgtatgcatgaaggattataccactaaacttcagcttcttgaagaagtagtccatttcttcttgatcttt

SEQ ID NO: 212122 - DNA, 201 bp, Homo sapiens
ctgggttcacaccattctcctgcctcagcctcccgagtatctgggaccacaggcacctaccaccatgcctggctaattttttgtatttttagtagagacasggtttcaccatcttggtcaggctggtcttgaactcatgaccttgtgatccacctgccccggcctcccaaagtgctaggattacaggcgtgagccactgcg

SEQ ID NO: 212123 - DNA, 201 bp, Homo sapiens
actgagactataggtgttcactaccacacctgtctaatttttgtgtgtgtgtgtggagatgaggtcttgccatgttgcctaggctggtcctcaaattcctrggctcaagcaatcctcctgccttggccttccaaagtgttaggatttacaatccagagtcactgctcccagactaaaagcatttttttttttaacaactct

SEQ ID NO: 212124 - DNA, 201 bp, Homo sapiens
agagtctcttaaggaagttcattctctcctatttgctataatattaatttgaacatttctttattattacctgatgttgcattgtatttatgaaggatgaytgtatgcatgaaggattataccactaaacttcagcttcttgaagaagtagtccatttcttcttgatctttatattaccagtgccacaaataagcactaag

SEQ ID NO: 212125 - DNA, 201 bp, Homo sapiens
gatgattgtatgcatgaaggattataccactaaacttcagcttcttgaagaagtagtccatttcttcttgatctttatattaccagtgccacaaataagcrctaagaatacttaaatgagttacttgcattattttgcataatgcactttagtgtttggcaggcctatactcaaagctcactctgacacttagttgggtga

SEQ ID NO: 212126 - DNA, 201 bp, Homo sapiens
gtgagccactgcggccagccatgtttttattttaatattaatatgtgcttaactacacatattatactgtaactttttaactgaaaaattgccataagcayatcttttaattcatgttttaggagaacgatagagctgtagatatcaatacttgtattatttcttccctttgagatgttttctaaaacaaaaagacagtga

SEQ ID NO: 212127 - DNA, 201 bp, Homo sapiens
tgccacaaataagcactaagaatacttaaatgagttacttgcattattttgcataatgcactttagtgtttggcaggcctatactcaaagctcactctgamacttagttgggtgattcaattacctaatttctcaaaatcacatttgcctcatctgaagacattggtacctacctcacagagttgttgtgagaactaacat

SEQ ID NO: 212128 - DNA, 201 bp, Homo sapiens
ttgttttatccgttcaaaaccagattagcattcgaagatatattgataccttggactggtacttagaagggagaagtttacagtttcctatgagacccagygagatattaaacattgtgtgtaattaccttttacagtatctgctttgaaataattgaatagagatatgaatatttggcaaaatatgtattttattttaga

SEQ ID NO: 212129 - DNA, 201 bp, Homo sapiens
aaataagcactaagaatacttaaatgagttacttgcattattttgcataatgcactttagtgtttggcaggcctatactcaaagctcactctgacacttarttgggtgattcaattacctaatttctcaaaatcacatttgcctcatctgaagacattggtacctacctcacagagttgttgtgagaactaacattatata

SEQ ID NO: 212130 - DNA, 201 bp, Homo sapiens
tccctacaagacctacattaactagtcagcacagtgagctctgaagtcttggacttgctttatgtaacccaatcgctaatcacagggcccttccactgccrttttctttcacctgtgccataacttcagcccttatttccttttaattcatattgtggcataccaattctactaatgatcaacacatgccttttttcctcc

SEQ ID NO: 212131 - DNA, 201 bp, Homo sapiens
caataattaagaattaagagacctggatccaaattttgtcttgtctttttattgggcaagtcaatattttaagccttaattactcaattttcttatctatraaagacaactctgtaaagttattgtagattttgaaaataaatcacttaacacttcccgtgacacatggtacttgataaaagctgggtagtcgcaggcaga

SEQ ID NO: 212132 - DNA, 201 bp, Homo sapiens
tgaaatacactagcaattttaacgtgtgtaatttattgttttacataagtatttttgggttttagagaaatgtagattgtcttactgacctgttgacattkatttttttttcttccactaataaggatctgtatagattttagtctgttccttcctgttatctattgatatgggggacttgctatcaggataaaagttgta

SEQ ID NO: 212133 - DNA, 201 bp, Homo sapiens
tttaagatacattctttgaaaatagtggaatgtaataatttgaatgtgttttaatataactaccagcatgtatagagatgtgtatgtgtttcaagctgttytgggtttttttttgttttttttttttttttttttgcttgtacagttttgacatctgtgttttctcttttaagatgcatttttgcaatcagaatacctttg

SEQ ID NO: 212134 - DNA, 201 bp, Homo sapiens
gatacattctttgaaaatagtggaatgtaataatttgaatgtgttttaatataactaccagcatgtatagagatgtgtatgtgtttcaagctgttctgggkttttttttgttttttttttttttttttttgcttgtacagttttgacatctgtgttttctcttttaagatgcatttttgcaatcagaatacctttgatatc

SEQ ID NO: 212135 - DNA, 201 bp, Homo sapiens
ttagggaatttttgaagcatttgaagcactatgatgaaaatggtattaattaagttgctagttggacagattaaaatcaagggaagacttgaaggtacttraaggcagaggggaaggaggcagtggaggggtggggatggaaattggaagtaatggatttgtgaatacaagttaagaaggtagcattagaaggaagaacct

SEQ ID NO: 212136 - DNA, 201 bp, Homo sapiens
aaaatcaagggaagacttgaaggtacttaaaggcagaggggaaggaggcagtggaggggtggggatggaaattggaagtaatggatttgtgaatacaagtkaagaaggtagcattagaaggaagaacctaatatctctaaaaaccagggaaggataagatgttggataataagaaagatgtgttttgaaatgaggagaaca

SEQ ID NO: 212137 - DNA, 201 bp, Homo sapiens
gactttgagttccgtctgtcctttgtccacaaggaaattccctgtgggggaggtatgtagctttttatctttgtagctaccttatttaggaatacaatggraggcaggtttgggtgacatagttcccagcttgaattttcccttggcttagtaatttgggggtcctgaggtttatttttttttttttcacaaaagtaaaca

SEQ ID NO: 212138 - DNA, 201 bp, Homo sapiens
aagctctccgatggttaggtagagtccacaccaagtagctatggtggcagctgctgcaaaatgcctctgttggggatctcaggctgcagtgcaaatgggtrtggccggggaggtgccccagagaaggaccagcaaacaggggtgtgttcagatcagactggccccgtcccatggaccagatagctctgctctgttcaggtc

SEQ ID NO: 212139 - DNA, 201 bp, Homo sapiens
tgtgagccaccatgccctgcctatgaacctttttgacaaccacgatagctattcaagatgtttgcttggtattctttgtatttctgataatctgattaaargatgttccaaatataggaacattagttataggtttccttatagctttataagtgatgtcttttttgctgcttttgctgtatgtgtgtgtgtgtgtatgca

SEQ ID NO: 212140 - DNA, 201 bp, Homo sapiens
ggctggtcctcaaattcctaggctcaagcaatcctcctgccttggccttccaaagtgttaggatttacaatccagagtcactgctcccagactaaaagcatttttttttttaacaactctggaagtgaattccagcagaaccagcaaaaagaatggaattaattacctctggggaaagtgcctaagggtaaggagaactgg

SEQ ID NO: 212141 - DNA, 201 bp, Homo sapiens
tccaaagtgttaggatttacaatccagagtcactgctcccagactaaaagcatttttttttttaacaactctggaagtgaattccagcagaaccagcaaaragaatggaattaattacctctggggaaagtgcctaagggtaaggagaactggggcaggaaactattataagtcttgtaccactattaagcttctaaaatc

SEQ ID NO: 212142 - DNA, 201 bp, Homo sapiens
taaatgtcaacatctaccatgtactcttaggaatcattaagaatacaactgagggtcatagatttagaaagatatttaatccaccctaaagatgagatacygaattaggtaatatctagaagtctcttgcatgcctccttccaagatatttataactatacctgaatatctatttagatacagatatctaaaattctgggg

SEQ ID NO: 212143 - DNA, 201 bp, Homo sapiens
tagatttagaaagatatttaatccaccctaaagatgagataccgaattaggtaatatctagaagtctcttgcatgcctccttccaagatatttataactayacctgaatatctatttagatacagatatctaaaattctggggattgttggatctaggcaagttgcttttaaatgaattatgtgaaaataaaagatctcag

SEQ ID NO: 212144 - DNA, 201 bp, Homo sapiens
atactcaaagctcactctgacacttagttgggtgattcaattacctaatttctcaaaatcacatttgcctcatctgaagacattggtacctacctcacagrgttgttgtgagaactaacattatataatgcatgtgaaatacttagcatagtgtctgacacttaataagtactcaataaattctgactgctactattatag

SEQ ID NO: 212145 - DNA, 201 bp, Homo sapiens
tttagaaagatatttaatccaccctaaagatgagataccgaattaggtaatatctagaagtctcttgcatgcctccttccaagatatttataactataccygaatatctatttagatacagatatctaaaattctggggattgttggatctaggcaagttgcttttaaatgaattatgtgaaaataaaagatctcagaata

SEQ ID NO: 212146 - DNA, 201 bp, Homo sapiens
agttgttgtgagaactaacattatataatgcatgtgaaatacttagcatagtgtctgacacttaataagtactcaataaattctgactgctactattatarggcttcagttgaatagaaaaggaagtagagacagatgaaatagaatggtttgggataaaattgagaagtcaaaggaatgaaagcttaattaatttgagtg

SEQ ID NO: 212147 - DNA, 201 bp, Homo sapiens
acactgctataaagaatacctgaaactgggtaatttataaagaaaagaggtttaattgactcacagttccacatggctgggaaggcctcaggaaacttacrataatagcagaaggggaagcaagacagcaggagagagagtgaggcaggggaaactgccagaaacttatcaaacaaccagatcctgtgagaaatcactcac

SEQ ID NO: 212148 - DNA, 201 bp, Homo sapiens
atagggcttcagttgaatagaaaaggaagtagagacagatgaaatagaatggtttgggataaaattgagaagtcaaaggaatgaaagcttaattaatttgwgtgatcattttggtagagataaaggaatgagaataactggaataaaaggaggttgtagtgagagagtgttataaattattatattctgtcagcagtttaa

SEQ ID NO: 212149 - DNA, 201 bp, Homo sapiens
gtaataaacacatgtgagtcttgagaattccgctctgattttgactcacagtaagttacttgataaagtttgtcctacagtctcactacttctcagcaaamttcttactgtgtgatcagatactaaatttctttcagtttattcccagtaaatctgatggaatgtctagattctgcagactttgatccaaagactgaacta

SEQ ID NO: 212150 - DNA, 201 bp, Homo sapiens
tgatccaaaatactgtcataagtaagggtagacaagatggattgtaagataatcagagttgaggtgaacaagaaattaaatgttgtgaaatattattgttsaatttggaaatgtttatatttggtgattgccatagaaatttcagatagtagataggccttgagttaagaggaatagtgtgaatcagtcaccagattcttt

SEQ ID NO: 212151 - DNA, 201 bp, Homo sapiens
acttctcagcaaaattcttactgtgtgatcagatactaaatttctttcagtttattcccagtaaatctgatggaatgtctagattctgcagactttgatcyaaagactgaactaaatccaatgaactcaagagaacaacttttaagtagttattaagctgatattctgtgttcagacctgtgcctgggactgaaagaacat

SEQ ID NO: 212152 - DNA, 201 bp, Homo sapiens
gtaagggtagacaagatggattgtaagataatcagagttgaggtgaacaagaaattaaatgttgtgaaatattattgttcaatttggaaatgtttatattyggtgattgccatagaaatttcagatagtagataggccttgagttaagaggaatagtgtgaatcagtcaccagattctttaaaatatgttcaggagtgacc

SEQ ID NO: 212153 - DNA, 201 bp, Homo sapiens
ttgtgtaaaatataacaaacagtacttccttcagaaatgtattataaagttagtgtttttaaaactacaggttatgcctttttcttgagaaattaactttrcagtttaatgaggaacagataacattttaataagaaagatctggaaaagaaaagtagaatgcgttactcatggtaaaaataagtatttttgtaacacttt

SEQ ID NO: 212154 - DNA, 201 bp, Homo sapiens
taagggtagacaagatggattgtaagataatcagagttgaggtgaacaagaaattaaatgttgtgaaatattattgttcaatttggaaatgtttatatttrgtgattgccatagaaatttcagatagtagataggccttgagttaagaggaatagtgtgaatcagtcaccagattctttaaaatatgttcaggagtgacca

SEQ ID NO: 212155 - DNA, 201 bp, Homo sapiens
gacaagatggattgtaagataatcagagttgaggtgaacaagaaattaaatgttgtgaaatattattgttcaatttggaaatgtttatatttggtgattgycatagaaatttcagatagtagataggccttgagttaagaggaatagtgtgaatcagtcaccagattctttaaaatatgttcaggagtgaccaagaaattg

SEQ ID NO: 212156 - DNA, 201 bp, Homo sapiens
aacatagtattgaaagttctggccagggcaatcaggcaagagaaaaaaaaatggtattcaaacaggaagagaggaaatcaaattgtctctgtttgcagatracatgattgtatatttagaaaaccccatcatctcagccccaaaactccttaagctgataagcaacttcagcaaagtctcaggacacaaatcaatgtgcaa

SEQ ID NO: 212157 - DNA, 201 bp, Homo sapiens
tattattgttcaatttggaaatgtttatatttggtgattgccatagaaatttcagatagtagataggccttgagttaagaggaatagtgtgaatcagtcascagattctttaaaatatgttcaggagtgaccaagaaattggtaaagaacagtgacgtgaatgggataaaggatgacttatacaaggatgggagtacaatg

SEQ ID NO: 212158 - DNA, 201 bp, Homo sapiens
cagcagttaatgaattagcaataattgtgagtaaatattcaataaaggacttgtagcatgtatcacatgatgtttctatgaatcttgggtataaattcccmtgttgtctactggaaaagttttctacagtgagaagatatggttatcttttaggattaaaaatgagaagacagggccatatattattgtggatttgcctca

SEQ ID NO: 212159 - DNA, 201 bp, Homo sapiens
tgacttatacaaggatgggagtacaatgaactggaaagttagatttgtgactcaatcgtttgcttttgtgaaacaaggcatatgggaggatggacactctytactgtaaagcaggggctgatcaccaaggcccttaaatctggcctgctgcttgttttgtaaatgaagtttcattgaaacacagcaacactcattaattta

SEQ ID NO: 212160 - DNA, 201 bp, Homo sapiens
agatgtaactacctgtgtatatatctagatggatctgtgtcaggatgaggattaacctattgtatcttaaagtatatatgctttgtataatgaaacactgyagttctggcctcttgtgagtctatgtggaaatcatttaggataatgatgaaacttaacatggcttatttactatcacaatataataaatcattcaatgaa

SEQ ID NO: 212161 - DNA, 201 bp, Homo sapiens
aaagaagataaattgtttttcccttggtttctcattttatgaacgttaaatatatgctgtcatgttttttagtaggttacagctcacttaaaatactacaraaatataaaaattgcttagtaaataaagaattcaccagtcattaagttttattcgttccagccatttcacaaacccaaacataggagtaaataccaaatt

SEQ ID NO: 212162 - DNA, 201 bp, Homo sapiens
ttttgatgaaagccaacattgttaaaaaaaaatgcatttgatgtgacaaatgaaaatataacatttttcttaaaaggtggattgtagaaagcttagtagcmataatgtgtttacccaacaatgtctgttatttgccttcactttctttgaaactgttttttttttcccaccctctttcattttttgttatagtttagcctc

SEQ ID NO: 212163 - DNA, 201 bp, Homo sapiens
atataacatttttcttaaaaggtggattgtagaaagcttagtagcaataatgtgtttacccaacaatgtctgttatttgccttcactttctttgaaactgttttttttttcccaccctctttcattttttgttatagtttagcctctgtggcaataaacgccaatttatattttataagaaatccagttctaggcattgat

SEQ ID NO: 212164 - DNA, 201 bp, Homo sapiens
gttctttcaaaaactgcttttgatttttttaaaataaagtgttaaacaaataagaagcaaaataatgagtatcacagaaatagacttttatcactctgctmcccctggaaataaaaggatccattaaatattcttcctttgtgtaatactgcattgtctaccttcagaccttacagtatttaaaagtaccagatgttgagg

SEQ ID NO: 212165 - DNA, 201 bp, Homo sapiens
ctttctcttatcctgtaatccttaggcaagaagaaagtaaaaggagggaggggagaaaagggagtactgtatattctcgggagagaataaggcagtatgayggcagtggaaagaaccctggactgtgagtgtttttgttttgtttttgtcttttctttaagtatctttgcctctttctagccatgtgaccttgagacaatc

SEQ ID NO: 212166 - DNA, 201 bp, Homo sapiens
  misc_feature (1)...(201): n = A,T,C or G
gttttgtttttgtcttttctttaagtatctttgcctctttctagccatgtgaccttgagacaatcagccagctggttggtttttagtttccttgtctacancataccaaattgagggagttgtttcctaatttctcagttcattattgctgtaaagtggtataattattttgaaagaaataaattctaagatacagataat

SEQ ID NO: 212167 - DNA, 201 bp, Homo sapiens
gagcatgcgagtgatagggttttttcttctggaattgtaaatcattttattttcttctagaattataaatcattttcatttgaatcctagaatcttatgasacaagatttgtctacatatgtaatatatataggcaaatatatatgtgtgtgtatatatgtatgtgtgtatgtaaacatatatatacacacaaacagagag

SEQ ID NO: 212168 - DNA, 201 bp, Homo sapiens
gtataaaagtaaagaataggacttcatcagggtgaaagttttggagggtaccctgtcagcaaagatcatctatcctctttaagagagaattaagggtggcrgtttgaggtaaaaccaggagatatcagttatgatggtttgaaggaaaagtgtaaactggcagtgtaaacaagggcaggatatttatgagtagttgagaat

SEQ ID NO: 212169 - DNA, 201 bp, Homo sapiens
acattgttactattatattgttactattcagttaccatgtattactatgcattaccatgtattattattgagttaccatggtaataaaggacattcgcttratttaaacaaacttttcagtagggagatgtatgctccatatctttctagttggtatggatatactctaagtttgccctttaattcttctttttagaagga

SEQ ID NO: 212170 - DNA, 201 bp, Homo sapiens
tctttctttttttttttttttttgagacaaggtctgcctctgtcacccaggctgggcagcagtggtgtgatcatggctcactccaacttggacacctgggyttagcctcctgagtagttgggactacaggcacatggcaccatgcctggctaaactttttaaaaaattgtgtagagatagggcctcgctatgttgcccagg

SEQ ID NO: 212171 - DNA, 201 bp, Homo sapiens
ttatgagttgttaacaaagatatgaaaagctaaaccattgtttcaggtaccatgcaaattgacaatgaagtgttgaaaatgaaacatagggcctcttttcygaatattattatgtattagtccattctcacactgctacaaagatactacctgagacttggtaatttataaacaaaagaggttaaattgacttacagttct

SEQ ID NO: 212172 - DNA, 201 bp, Homo sapiens
gacgggttgatgggtgcagcaaaccaccatggcacatgtatacctatgtaacaaacctgcatgccctgcacatgtatcccagaacataaagtataataaawaaattaaaatgtacttattgttatggattgtctttaaacaagtttgaaaaagcagcactctataatacataaaaagtgttttatgtgatactaacacatt

SEQ ID NO: 212173 - DNA, 201 bp, Homo sapiens
tgggtggcatggcaggtgaaagcaaggagaattgagacaaatagatagacaggaagtcaaatatctcacttctttttaccccattagaggaaaggcctcamtgtctaggcctcattttgagggtcccagtacaccttcctcattctccaagtttctgatcccttctccataccctgcagtctttagatctttttttgctat

SEQ ID NO: 212174 - DNA, 201 bp, Homo sapiens
agacagttatcataagggatataaaaatataagaagaagctagatttaaataacatttctcaagaaaaatatagccacgattaaaatatagcttttttatygtatgatttttaagatttctcaagtttaaagacacagaaatacaatttaaatgatctcagggaaaaaagtaatttattggaaggattctaggtcatgtta

SEQ ID NO: 212175 - DNA, 201 bp, Homo sapiens
tatggaaaccaaaccagaaaaaagagagggctatatttgtaccccagggacactggatctagtgacaggtagtgaacactagaactcacatgacatcaggracttgggctttcatctctgctgcttcttgaatgctcacattgtttttcccttccttttcaaactttctcaacttagcagtaaagttgactacaagcagtt

SEQ ID NO: 212176 - DNA, 201 bp, Homo sapiens
ttttttttttttttttttagacggagtcttgctctgtcgcccaggctggagtgcagtgtcgcgatctcggctcactgcaagctgcgcctcccgcgttcacrccattctcctgcctcagcctcccgagtagctgggactacaggtgcccgccaccatgcccggctaatttttttgtatttttagtagagacgggatttcacc

SEQ ID NO: 212177 - DNA, 201 bp, Homo sapiens
tgggattacaggcgtgagccactgtgcccggccgaagctttcaaaatttttaaagaaattaggatcatggcacaaaaaggggcagcaagagttcaaaatgaaaaaaaaatggcttttgaacacctaatatatgagcaataaacatgctgaaaaactacttagctgtaagtacaggcaatttcttatagaaatggaagaatg

SEQ ID NO: 212178 - DNA, 201 bp, Homo sapiens
taagaactcacttactattatgagaacagcatgggagaaatcatccccatgattcaattacctccacctagtctctcctttgaaacatggggattgtgagrattacaattcaagatgagatttgggtggggacacaaatctgaaccatattattctgctcctggcccctcctaaatctcatgttcatttcacatttcagaa

SEQ ID NO: 212179 - DNA, 201 bp, Homo sapiens
gatttgggtggggacacaaatctgaaccatattattctgctcctggcccctcctaaatctcatgttcatttcacatttcagaaccaatcatgccttcccartagtccctcaaagtcttaattcattccagaagtaacctaaaagtccaagtccaaagtcctgcctgagacatggcaagctgctttcacctaggagcctgta

SEQ ID NO: 212180 - DNA, 201 bp, Homo sapiens
tccgacagattgggcagtactttgggaagattcctgggtccatggaaaattgccttggaaataaatgtcaccaaatagtgtggctctggtaaatcccttgwgaatgggttggaatcagacaagcgtactctaggtctgttacaggtagttagacaggcatgagcatggcaggagagggctgttcacccctacccactagca

SEQ ID NO: 212181 - DNA, 201 bp, Homo sapiens
tttagctcccatctataagtaagaacatgtggtatttggttttctgttcctgttaatttgcttaagataatggcctccagctgcattcttgttgctacaarggacataatttctttttatggctgcatagtatttgatggtgtatctgtgtcacattttctctaccaaatctacctacattgattccatgtctttgctatt

SEQ ID NO: 212182 - DNA, 201 bp, Homo sapiens
tattgtggcataccaattctactaatgatcaacacatgccttttttcctcctatttcgtttgatttcttatgcaactctcacccattttatgtatctttaytttaatagagacagtgacctgcaataattaagaattaagagacctggatccaaattttgtcttgtctttttattgggcaagtcaatattttaagccttaa

SEQ ID NO: 212183 - DNA, 201 bp, Homo sapiens
  misc_feature (1)...(201): n = A,T,C or G
ctttttagaaggaatttgtttttctaagattaatatgcatacttctaaggaaaataaataccaaattttgacaaaccattaatttctttaaatccctaganataatgtgcttctttccctttttaaataattttgtaattacattctaaattcttttcaagtagctataatggcattgaagttcttttgttgtcctggcat

SEQ ID NO: 212184 - DNA, 201 bp, Homo sapiens
taaaggattttgtttctccttcacttatgaagcttagtttggttggatatgaaattctgggttgaaaattcttttctttaagaatgttgaatgttggcccycactctcttctggcttgtagagtttctgctgagagatcagctgttagtctgatgggcttccgtttgtgggcaaccccacctttctctctggctgccctta

SEQ ID NO: 212185 - DNA, 201 bp, Homo sapiens
cttattttaggtgttcacattttgtgtctacatatttaaatagtaattcctacatgttgtgagaaaactcatttgtaccttctatttcaagcatcatgtgwgtgtgtttgtgtgtattgtgtgtctgcattggtgtggtgttttccttggtaggtggaggaggggataatactccaagatctataatatggggagtatgaa

SEQ ID NO: 212186 - DNA, 201 bp, Homo sapiens
catctactctttaaatatatatctatatatacacacacacacgtatagatagatgattgatagattacttttagataaatactgaaaactaaaattcaaayaaatctaaagattaaaaattcaaacaagatatagataaaataaaaagctattatatatgatcaggagccaacaggcaatacttaactgatagagtcaagg

SEQ ID NO: 212187 - DNA, 201 bp, Homo sapiens
agcatctcatcgtgattttaatttgcatttccctgatgattagtgatgttggccattttttcatgtttgttagctgttgtatgtcttcttttgagaaatgyctgctcaagtcctttgtccactttttgatgggattatttgtttttttcttgttgatttgttttaattccttgtagattctggaaactagtcctttgtcag

SEQ ID NO: 212188 - DNA, 201 bp, Homo sapiens
tagctaccttaacagcataagcattaccctgagggatgggatctgatgccttttgatgacccttgcagtgaatgactccagcttcctttggaagtaaagtggccttgagaagtgtttttattaaagaggcattaatgatggaggaaccttgcatagtgaggaaacttatttctgcccatataacagcatggtggtgcagga

SEQ ID NO: 212189 - DNA, 201 bp, Homo sapiens
ccttgcaatataacttctaatactattaataggttacaatatactaggtgttcttaaaactaaggtaaagactttaatagagtcttaatctttaatgtccyttaaggatttcgttttgatgccatttaaaaaaaattaaaactggcaaattagtataatgtgagcattaacagaaagataaaaaaattaacctattaataa

SEQ ID NO: 212190 - DNA, 201 bp, Homo sapiens
aaaaaattaaaactggcaaattagtataatgtgagcattaacagaaagataaaaaaattaacctattaataaaaatgcaaagaacttctgttcaagtaccktttgtttagggaaatactgtctctcttagaaatattttatatgacttcttttattaccctgaaaaatctaatactcaaaacagttaaaatattcattttt

SEQ ID NO: 212191 - DNA, 201 bp, Homo sapiens
ggttatacaagaatagcattaatcattgttacttttgttttttatatatttttttctttcttttttttgtagtggtaagaggttttattttcttctcatcycaggaataggtttgcatactgctaagttgcagtgagctgagatcatgccactgcactccatccagggtgacagagcaagactccatctcaaaaaaaaaaa

SEQ ID NO: 212192 - DNA, 201 bp, Homo sapiens
tcttctcatcccaggaataggtttgcatactgctaagttgcagtgagctgagatcatgccactgcactccatccagggtgacagagcaagactccatctcaaaaaaaaaaaaaaaaaaatgcctactgctttttattgttatgtaaatccttattgcatttggtatattctgcatattggggtggattagagattggtcat

SEQ ID NO: 212193 - DNA, 201 bp, Homo sapiens
catcacggtatcacttcgcagaaaatcctgtttttttttttccagtggctttaatgaatttcttctaagaagtcctgtgaaaggactgagctgtagtattkggataactgtgccattttcttaagaaacagtttgagcctgctgagaaagtaggtcatctggtttgacattttcctgcaaaagaagtagcattaatatatc

SEQ ID NO: 212194 - DNA, 201 bp, Homo sapiens
atctctttatagcacagtcttccttagagggtgcaactacagaaaaggaaatgttggagggataaagaagaaaggagaaatatttatttccaaagtggctstcatttggagtagactgagtcagaatagagtatttaattaaagtctaatatttgagatcatggtgcttatttctctctaacaaaagaggaggggaaaatg

SEQ ID NO: 212195 - DNA, 201 bp, Homo sapiens
agcacaaataataacagaaaattacttgctcctaattctgtgcttatctgacaaatgccgtcaatatttcttggattcatctagcaccttgtaggctgaartagaacttgactctacaaggttaggttttgcattcacattcattcatattttaaacatcagtttctgtatgttttacttatgctttattaaatctcaatt

SEQ ID NO: 212196 - DNA, 201 bp, Homo sapiens
cagtttctgtatgttttacttatgctttattaaatctcaattataaatactaactgttttcttaaaaccactctatctcatagatattttaaattgttacmatagttggctttaaataaaattttaaggcaaagaaattatttttatcagaccatctgtttatcatgtaggcttaggaagtggtttatagcttccccagat

SEQ ID NO: 212197 - DNA, 201 bp, Homo sapiens
gaagaggtctctcccagaactgtgagctgtgttgcctgagcttggtagagaggtggtgcaagcactctcttggctgctctggctagtgtctcactggggcktgtgccacccacatcactggctgtgagccctgcacagcaccaggacttgcagggaatttcagtcctttaaacctagactgcctttcaagtttatttacaa

SEQ ID NO: 212198 - DNA, 201 bp, Homo sapiens
tctctcccagaactgtgagctgtgttgcctgagcttggtagagaggtggtgcaagcactctcttggctgctctggctagtgtctcactggggcgtgtgccmcccacatcactggctgtgagccctgcacagcaccaggacttgcagggaatttcagtcctttaaacctagactgcctttcaagtttatttacaatcccaga

SEQ ID NO: 212199 - DNA, 201 bp, Homo sapiens
gctcccatctataagtaagaacatgtggtatttggttttctgttcctgttaatttgcttaagataatggcctccagctgcattcttgttgctacaaaggayataatttctttttatggctgcatagtatttgatggtgtatctgtgtcacattttctctaccaaatctacctacattgattccatgtctttgctattataa

SEQ ID NO: 212200 - DNA, 201 bp, Homo sapiens
gacccggtttcattcttctgcatatgactaaccagttattccagcaccatttattgaatatggagccctttccctgttgcttatttttgttgactttgtcwaagatcaaatggctataggtgggtggctttattttagtgttctctattccggtccagtggtttatgtgtctgtttttctactggtactatgccattttgg

SEQ ID NO: 212201 - DNA, 201 bp, Homo sapiens
agcgcatgtctcattgtgtacccaatatccctcttccatattggggagctacgccttccccaacccttttcagttctaatgggactatcaagcactgtttsctccctgatcataatggtacaaactcattcctagtcaagcagcctacctcattttacacttcatagtaattggtccaagtaatgaacatagaaatggtag

SEQ ID NO: 212202 - DNA, 201 bp, Homo sapiens
actaattatctttttagtatctccattgtttggtctttcccagaatgtcatacagttgtaatcatatggtatgtaggtttttcagattggcttctttcacwtaaaaatatgaaattaaggttctgtgtcttttcatgactggagagttcatttattttattgctaaataatatttcattgtatgtaagtgctgcaatttgt

SEQ ID NO: 212203 - DNA, 201 bp, Homo sapiens
tgacattgcccttttgttccaatgaagtcaattcatattccagattgagactattttcaattaatcgtgctggttaatgtctaagagacactatctattatgttagtaatcaagatatattgtttcttttgaacttccaatatattttggccatgcaattctgttggaagaaaaatggtaattaggtttgctcagaatgat

SEQ ID NO: 212204 - DNA, 201 bp, Homo sapiens
gacattgcccttttgttccaatgaagtcaattcatattccagattgagactattttcaattaatcgtgctggttaatgtctaagagacactatctattatgttagtaatcaagatatattgtttcttttgaacttccaatatattttggccatgcaattctgttggaagaaaaatggtaattaggtttgctcagaatgatt

SEQ ID NO: 212205 - DNA, 201 bp, Homo sapiens
aatggtaattaggtttgctcagaatgatttattatttacaagtatattggtatattgtgcttattgtttctgattcaatttttttgaggaacagaattatdttcattatttaaaaaataaaaacattttaagagtcatatgttcataaagttctcagtgacatcatgatttgaattgagaactaaattatgtttcctgaat

SEQ ID NO: 212206 - DNA, 201 bp, Homo sapiens
tctctgaacagagccctgaataaagaggagaaatatataggggaattgcatttgcagcatacaaggactaaagaacaggtttaaaatagctccataaatgrgttattttaaaaatatatatcttaaaaaagtttaagagataataaaagtaagagagtattttatatctataaaaatatatctttaaaaagtttaagaggc

SEQ ID NO: 212207 - DNA, 201 bp, Homo sapiens
aacccgggaggtggagcttgcagtgagcctagattgtgccactgcactccagcctgggcgacagagtgagactccgtctcaaaaaaacagaaaaacaaaamaaacaaacaaacaaacaaaaaaacatataattctgcagaatgcacatcatttttattgtctcaagaagaacttaatagcaattagccaaacactagtcat

SEQ ID NO: 212208 - DNA, 201 bp, Homo sapiens
atttatgtaacatctggaaggttctggaaaaagagaaatgatttattgctgatctttattctacttaaacacatgcacatgcatcacaccccacagtagcygagaacttggtagaagttctcagtacaaagtggagatctatgaagcacctgtgtttcaggttggattagctagaaggtgtgtgtgtgtgtgtgtgtgtgt

SEQ ID NO: 212209 - DNA, 201 bp, Homo sapiens
ttcacctgtgccataacttcagcccttatttccttttaattcatattgtggcataccaattctactaatgatcaacacatgccttttttcctcctatttcrtttgatttcttatgcaactctcacccattttatgtatctttactttaatagagacagtgacctgcaataattaagaattaagagacctggatccaaattt

SEQ ID NO: 212210 - DNA, 201 bp, Homo sapiens
agttgtaatcatatggtatgtaggtttttcagattggcttctttcacataaaaatatgaaattaaggttctgtgtcttttcatgactggagagttcatttrttttattgctaaataatatttcattgtatgtaagtgctgcaatttgtttatccattcacccattgaagtgaacactcttgactgtttctaagtcttggca

SEQ ID NO: 212211 - DNA, 201 bp, Homo sapiens
gtatcaactacatgacccctagcttattttcttattaatatttaattaaaaataaaatctcatgtgaatatgaaatggagcaggatgctaggacagcaggmataaaccagaatagtctcagtcaaacaaagacatgtggccccactccctttcagtgactttaattaagatttcttttcattccttaagcaaatattcttt

SEQ ID NO: 212212 - DNA, 201 bp, Homo sapiens
tttgccaaggttaaggacatggcccctgacagagcctcaggaggtcctgaagacatgtgcccaaggtggtcagggttcaagtgtgcttttatacattttarggagacatgagacatcaattaatatgtgtaacattgccttaggtacagtaaatcaggactacttgaggggggcggaggcaaaagactgtattcttttgag

SEQ ID NO: 212213 - DNA, 201 bp, Homo sapiens
tttttttggatttctagacttcagagtgtaagcacatctgtgtttggatctcattagttcctcctcatctatgttgtaagaaatgtcagaattttgagagaaaaaaaaacagtagaagccagttatgtatctctgattcagtatgttttaataaatatgaagataaaatatacattctgcttctcaggaagcactggccac

SEQ ID NO: 212214 - DNA, 201 bp, Homo sapiens
tttctaaatcttcctatggatatatcctaatatcttctaaatgaaaaaatttaagaatgaagaacatcaggaatatattttagtatttgtatttcctgaarctgtcctgctaaagcaagatttataataatggaatttccagtttttcattttaaaagttctacaggaagtaatacttgcagagagagccaaagatttaaa

SEQ ID NO: 212215 - DNA, 201 bp, Homo sapiens
  misc_feature (1)...(201): n = A,T,C or G
ctgtatcttggtggcacaatactcatctactagaagaagaaagagggatagagagataaatacatataacaataaaacatagtgtgataaactctgtgaangtggaagcacaagttgtactgggagtgtacagtaggtccagcctattccaaattgggcaggaggagagaacaaaaaagtaatggagggatcaaggaagcc

SEQ ID NO: 212216 - DNA, 201 bp, Homo sapiens
cttggtggcacaatactcatctactagaagaagaaagagggatagagagataaatacatataacaataaaacatagtgtgataaactctgtgaaggtggargcacaagttgtactgggagtgtacagtaggtccagcctattccaaattgggcaggaggagagaacaaaaaagtaatggagggatcaaggaagcctttcca

SEQ ID NO: 212217 - DNA, 201 bp, Homo sapiens
tctactagaagaagaaagagggatagagagataaatacatataacaataaaacatagtgtgataaactctgtgaaggtggaagcacaagttgtactgggartgtacagtaggtccagcctattccaaattgggcaggaggagagaacaaaaaagtaatggagggatcaaggaagcctttccataggtatgactctagaggt

SEQ ID NO: 212218 - DNA, 201 bp, Homo sapiens
tgcatacctattcctgaaaatgtgcatactctatgccatgcagatagctatgcaacgtaagtatttccaaggtaacatctaggattttttcctttgtccttctttttttttcccccttcctcttcccctccccctcctattttctctcttttcttcattatgaattcatatgcactgaagtttactaaatcaattcttagc

SEQ ID NO: 212219 - DNA, 201 bp, Homo sapiens
gcatacctattcctgaaaatgtgcatactctatgccatgcagatagctatgcaacgtaagtatttccaaggtaacatctaggattttttcctttgtccttctttttttttcccccttcctcttcccctccccctcctattttctctcttttcttcattatgaattcatatgcactgaagtttactaaatcaattcttagct

SEQ ID NO: 212220 - DNA, 201 bp, Homo sapiens
catacctattcctgaaaatgtgcatactctatgccatgcagatagctatgcaacgtaagtatttccaaggtaacatctaggattttttcctttgtccttctttttttttcccccttcctcttcccctccccctcctattttctctcttttcttcattatgaattcatatgcactgaagtttactaaatcaattcttagctc

SEQ ID NO: 212221 - DNA, 201 bp, Homo sapiens
agtatttccaaggtaacatctaggattttttcctttgtccttctttttttttcccccttcctcttcccctccccctcctattttctctcttttcttcattwtgaattcatatgcactgaagtttactaaatcaattcttagctcatgatatgcagtcattattggtcttttcctggccgtcattcacttatttatttattc

SEQ ID NO: 212222 - DNA, 201 bp, Homo sapiens
gcatgttattaactgttctgcactgtctctctcctgccacactatccttccatgctgagggctttcatattgctaacactgctcttacttttggacatctrtgttgctggagtcagaaaacaaaaataagtaaaattaccatttcgaactgaggtttattgaaagcacaaatatgtgttttctatagtaatgtgaaagctt

SEQ ID NO: 212223 - DNA, 201 bp, Homo sapiens
tttttttttcccccttcctcttcccctccccctcctattttctctcttttcttcattatgaattcatatgcactgaagtttactaaatcaattcttagctsatgatatgcagtcattattggtcttttcctggccgtcattcacttatttatttattcatttatgatattacaattaatacatatgaaacaccaacaatta

SEQ ID NO: 212224 - DNA, 201 bp, Homo sapiens
gcacaaatatgtgttttctatagtaatgtgaaagctttcgattgtccatactactaagctcttctaatattgtgaagtggtgaaatttgaataaatccccctgtttttaaaaagtctaatacttattttcatatactgtgccagttagaaacaatcaaatcaataatatatacagctattacaaattcagtagtttgagtt

SEQ ID NO: 212225 - DNA, 201 bp, Homo sapiens
cacaaatatgtgttttctatagtaatgtgaaagctttcgattgtccatactactaagctcttctaatattgtgaagtggtgaaatttgaataaatccccctgtttttaaaaagtctaatacttattttcatatactgtgccagttagaaacaatcaaatcaataatatatacagctattacaaattcagtagtttgagttt

SEQ ID NO: 212226 - DNA, 201 bp, Homo sapiens
ggtcctgaagacatgtgcccaaggtggtcagggttcaagtgtgcttttatacattttagggagacatgagacatcaattaatatgtgtaacattgccttargtacagtaaatcaggactacttgaggggggcggaggcaaaagactgtattcttttgagtccttgatcagccttccactgaatacaccaatacacaatttg

SEQ ID NO: 212227 - DNA, 201 bp, Homo sapiens
ttcagattggcttctttcacataaaaatatgaaattaaggttctgtgtcttttcatgactggagagttcatttattttattgctaaataatatttcattgyatgtaagtgctgcaatttgtttatccattcacccattgaagtgaacactcttgactgtttctaagtcttggcaatcaggaataaagctgctaaagatact

SEQ ID NO: 212228 - DNA, 201 bp, Homo sapiens
tgtattagttgtttgggttaaccagcctcttgttctgctctcagtgagtattttcttcgtccattgccccctgcagctttgactttacatatttgggaggttcttcttcatccactgtccacatcagaaggtggcaagagtgagtgttctctccttggttcggcttggaaggacagaggattgtgttagagagctaacaac

SEQ ID NO: 212229 - DNA, 201 bp, Homo sapiens
gtattagttgtttgggttaaccagcctcttgttctgctctcagtgagtattttcttcgtccattgccccctgcagctttgactttacatatttgggaggttcttcttcatccactgtccacatcagaaggtggcaagagtgagtgttctctccttggttcggcttggaaggacagaggattgtgttagagagctaacaaca

SEQ ID NO: 212230 - DNA, 201 bp, Homo sapiens
tattagttgtttgggttaaccagcctcttgttctgctctcagtgagtattttcttcgtccattgccccctgcagctttgactttacatatttgggaggttcttcttcatccactgtccacatcagaaggtggcaagagtgagtgttctctccttggttcggcttggaaggacagaggattgtgttagagagctaacaacaa

SEQ ID NO: 212231 - DNA, 201 bp, Homo sapiens
agtttgaggccagcctggccaatgtggtgaaatgccgtctctactacaaatacaaaaaccagccaggcatggtggtgtgcgcctgtagtcccagttactcrggaagctgaggcagaagaatcacttgaacccaggaggcggaggttggagtgagtcgacatcatgccactgcactccagccaagtaagactccgtctcgaa

SEQ ID NO: 212232 - DNA, 201 bp, Homo sapiens
aataaatcagactattttaaaatgtagaactactgtttatcaaaaatatgccatcaagagagtaaaaatgctgccaataaagtgggaaaatatccaattayttagatcaagagcacgtaagaaatgatgcttaacatccttagtcactgtggaaatgtaaattaaagccactatgccagaatggctaaactgaatactctt

SEQ ID NO: 212233 - DNA, 201 bp, Homo sapiens
atctccttcttatttgactgcttaacagaagatagtgtcactgaaggcatattactttgcacaaggagattgcgttttctttttctttctttctttctttyttttttttttttttgagacagagtcttgctgcgatgcccaggctggagtgcagtggagtgatctcagctcactgcaacctctgattgcctggttcaagca

SEQ ID NO: 212234 - DNA, 201 bp, Homo sapiens
tctccttcttatttgactgcttaacagaagatagtgtcactgaaggcatattactttgcacaaggagattgcgttttctttttctttctttctttctttcttttttttttttttgagacagagtcttgctgcgatgcccaggctggagtgcagtggagtgatctcagctcactgcaacctctgattgcctggttcaagcaa

SEQ ID NO: 212235 - DNA, 201 bp, Homo sapiens
ttatttattcatttatgatattacaattaatacatatgaaacaccaacaattacttacatttacccttttgcttctctcctatttcatccccctacctttyctaaaagatagtcattattctgaattgtgcatgtccttcctttttaattggtttgctttatttcatatatatcatacttaaataatacattgcttagttt

SEQ ID NO: 212236 - DNA, 201 bp, Homo sapiens
tttcaaaatagccgtgggctagatatgatttttgacaatctctacatattcttatgatttttgacaatctctacatattcttatttatcgtattgaaaacwggggaaatgaaatcttctgacgctttgttatgtgaagcagacctttccttctcatagatgccccaagcgtatgtccttgttgaaggaatatgccttcatc

SEQ ID NO: 212237 - DNA, 201 bp, Homo sapiens
atagccgtgggctagatatgatttttgacaatctctacatattcttatgatttttgacaatctctacatattcttatttatcgtattgaaaacaggggaartgaaatcttctgacgctttgttatgtgaagcagacctttccttctcatagatgccccaagcgtatgtccttgttgaaggaatatgccttcatcttcccga

SEQ ID NO: 212238 - DNA, 201 bp, Homo sapiens
ctttcttcctgtaatcccagcactttgggaagccgaggcaggtggatcgcctgagggcaggagtttgagaccagcttggccaacatggtgaaacccatctytactaaaaatacaaaaattagccagctgtggtggcacacgcctgtatttccagctacttgggaggctgaggcaggagaattgcttgaaccgaggaggtgg

SEQ ID NO: 212239 - DNA, 201 bp, Homo sapiens
gaggtattgcagataggagagtatatgggtttggcaccatggggtggataggcaaaacaatttggttgataacgcacagatcctgaactaacttgtaagasttgtctggtttttggacaggtaaaatggggaattgtaaggagagtttataggctttaaaaggccatgctgtaacaggcgagtgattacaggccttaatcc

SEQ ID NO: 212240 - DNA, 201 bp, Homo sapiens
gagattgcagcagttcaatcatatattcaggctccacttgtaattctagttctctatttatactatgtttgtagttacttcctcctctgaagtcatggacscctgaaagttatccatgagggctcaaatcacttcttccaaactcctattaatgttgatattatgacttcctcccatgaatcatgaatgttcttaatagca

SEQ ID NO: 212241 - DNA, 201 bp, Homo sapiens
aacttagaggccattttagagttgttaattggcctaaattcaatattgttttgtctcagggaagaggatggtcccaggtaagggaataagaaggagaaatrgttggtagttgcagtcagaacacacacatttattcatcattgcagataactgaaagtcaaagaatttgtagctttgtaacataaaaaaaattctgtaaag

SEQ ID NO: 212242 - DNA, 201 bp, Homo sapiens
actgaaagtcaaagaatttgtagctttgtaacataaaaaaaattctgtaaagttgaaaggtgagtcaaacaattagaatgtatttcattcacaaccactgytgtatgtatctacattgatattttttcctcatttttctgattgaaatatgttttaagacctaaaatatgggttacaaagcaacttccttgccctataaag

SEQ ID NO: 212243 - DNA, 201 bp, Homo sapiens
gtagctttgtaacataaaaaaaattctgtaaagttgaaaggtgagtcaaacaattagaatgtatttcattcacaaccactgctgtatgtatctacattgakattttttcctcatttttctgattgaaatatgttttaagacctaaaatatgggttacaaagcaacttccttgccctataaagttataccatatcacagagt

SEQ ID NO: 212244 - DNA, 201 bp, Homo sapiens
agccaagttttgagttcttcttcaagatatcatctatctttaataatttctgttcaatctgcatgtctgtaatgtacttgtcatctgatcctgagccaagttattttattttattttattttattttattttattttattttttagacagagtctcgctctgttgcctaggctggcgtgcagtggtgcaatttcggctcac

SEQ ID NO: 212245 - DNA, 201 bp, Homo sapiens
aaaccacaatgagataccatctcacaccagttagaatggcaatcattaaaaagtcaggaaacaacagatgctggagaggatgtggagaaatagaatgcttytagactgttggtgagagtgtaaattagttcaaccattgtggaagacagtgtggcaattcctcaaggatctagaatagaaataccatttgacccagcaatc

SEQ ID NO: 212246 - DNA, 201 bp, Homo sapiens
gccaagttttgagttcttcttcaagatatcatctatctttaataatttctgttcaatctgcatgtctgtaatgtacttgtcatctgatcctgagccaagttattttattttattttattttattttattttattttattttttagacagagtctcgctctgttgcctaggctggcgtgcagtggtgcaatttcggctcact

SEQ ID NO: 212247 - DNA, 201 bp, Homo sapiens
ttttccaattctgctccccttttttccacagtatttattgccatctgacattctatggatttgcttgtttgcggccagcctcccccacgagaaaggaagcwcctcaagagcaagaattttgttttgttcactgttgtatgtccccggcaccaacaacagtgtctggcacagtgtagatgcctaggtgatatttgttgaatg

SEQ ID NO: 212248 - DNA, 201 bp, Homo sapiens
agtgtcactgaaggcatattactttgcacaaggagattgcgttttctttttctttctttctttctttcttttttttttttttgagacagagtcttgctgcratgcccaggctggagtgcagtggagtgatctcagctcactgcaacctctgattgcctggttcaagcaattctcctgcctcagccttctgagtagctggga

SEQ ID NO: 212249 - DNA, 201 bp, Homo sapiens
ctttgcacaaggagattgcgttttctttttctttctttctttctttcttttttttttttttgagacagagtcttgctgcgatgcccaggctggagtgcagkggagtgatctcagctcactgcaacctctgattgcctggttcaagcaattctcctgcctcagccttctgagtagctgggactacaggcacgcaccagcaca

SEQ ID NO: 212250 - DNA, 201 bp, Homo sapiens
ctttctttctttctttcttttttttttttttgagacagagtcttgctgcgatgcccaggctggagtgcagtggagtgatctcagctcactgcaacctctgwttgcctggttcaagcaattctcctgcctcagccttctgagtagctgggactacaggcacgcaccagcacacctggctaatttttgtatttttagtagaca

SEQ ID NO: 212251 - DNA, 201 bp, Homo sapiens
gtatcttctaattcacaaaaatggcattggatcataggacttatttagtttcctaatttttctcatctgttattatatttttgaagtctatttatgtggcygtgtgcttcttttgtttcttgctaccaactgctacatggtattccattgtttgcatctaccactttttatatatccattcttccaggcatgtaaactcag

SEQ ID NO: 212252 - DNA, 201 bp, Homo sapiens
acactggtgggagtgagcctgaagtggtcctgtgtatgctcatgcctatggcagtggcagtgtggctggtgcagggcggtggcagaggcagagttgccagygtccatgtacacatttgtgctgttggtggaagggtaacagggcactcctgcatcagcaagggtttggacagttagctctgtttgcatcatctgtggtgac

SEQ ID NO: 212253 - DNA, 201 bp, Homo sapiens
agcagttttaaagttgtacacctttcaatttaacctccaaagagaaaacattactaactgctgctatctctggttccaagtccaaaaactgcagagaaggkaatcatttgttcagcttggatcatgtgcccaaaactggacaaacagttgtggccagagaaatacagtcttgttagcaacatggagcattcatagacttat

SEQ ID NO: 212254 - DNA, 201 bp, Homo sapiens
tttcaatttaacctccaaagagaaaacattactaactgctgctatctctggttccaagtccaaaaactgcagagaaggtaatcatttgttcagcttggatyatgtgcccaaaactggacaaacagttgtggccagagaaatacagtcttgttagcaacatggagcattcatagacttatggactgttataactaggagaca

SEQ ID NO: 212255 - DNA, 201 bp, Homo sapiens
ccaagttttgagttcttcttcaagatatcatctatctttaataatttctgttcaatctgcatgtctgtaatgtacttgtcatctgatcctgagccaagttattttattttattttattttattttattttattttattttttagacagagtctcgctctgttgcctaggctggcgtgcagtggtgcaatttcggctcactg

SEQ ID NO: 212256 - DNA, 201 bp, Homo sapiens
ttcaatttaacctccaaagagaaaacattactaactgctgctatctctggttccaagtccaaaaactgcagagaaggtaatcatttgttcagcttggatcrtgtgcccaaaactggacaaacagttgtggccagagaaatacagtcttgttagcaacatggagcattcatagacttatggactgttataactaggagacac

SEQ ID NO: 212257 - DNA, 201 bp, Homo sapiens
caagttttgagttcttcttcaagatatcatctatctttaataatttctgttcaatctgcatgtctgtaatgtacttgtcatctgatcctgagccaagttattttattttattttattttattttattttattttattttttagacagagtctcgctctgttgcctaggctggcgtgcagtggtgcaatttcggctcactgc

SEQ ID NO: 212258 - DNA, 201 bp, Homo sapiens
aagttttgagttcttcttcaagatatcatctatctttaataatttctgttcaatctgcatgtctgtaatgtacttgtcatctgatcctgagccaagttattttattttattttattttattttattttattttattttttagacagagtctcgctctgttgcctaggctggcgtgcagtggtgcaatttcggctcactgca

SEQ ID NO: 212259 - DNA, 201 bp, Homo sapiens
attttattttattttattttattttttagacagagtctcgctctgttgcctaggctggcgtgcagtggtgcaatttcggctcactgcaagctctgcctccygggttcaagcaattcttctgcctcagcctcctgagtagaagggtttacaggtgctcgccaccatgccgggctaatttttgtatttttaatagagacaaag

SEQ ID NO: 212260 - DNA, 201 bp, Homo sapiens
aagctctgcctcccgggttcaagcaattcttctgcctcagcctcctgagtagaagggtttacaggtgctcgccaccatgccgggctaatttttgtattttyaatagagacaaagtttcaccatagtgaccaggctggtctcaaactcctgacctggtgatctacccgtcttggtctcccaaaatgctgggattacaggtgt

SEQ ID NO: 212261 - DNA, 201 bp, Homo sapiens
attaaagccactatgccagaatggctaaactgaatactcttcagaaatgagaataaacaatgtacagttacaagtaaaaatatggattaatttcatgaacrtaactgagcaaaagaagttacattaaaaagtatacatattctatgattaaattgcataaagtataaaattaagtgaacctaatctatggttttggaggtc

SEQ ID NO: 212262 - DNA, 201 bp, Homo sapiens
gtttataatagtaacacataatgagcactacacatccaggaattgtgctttatatgcattattaatttaattcttactattcctctataagttaggtagtrctgtttccctaattttacagataagaggactgagattcaaagaggtaaatgccctacccaaagtcacatggcagagctgggtctccaatccagatttgtt

SEQ ID NO: 212263 - DNA, 201 bp, Homo sapiens
cttaaatttaggctttcttttatatagtatgtgaaattcgaatacctggatggcaagagatctaaaaggtagtattctgactagagtgtggaatgtagttrtaagaatgcctaatgctactgatgtttgcaaaactacgcaagtaggatgtctgaaggacgctggtctatcagcaggtagtggatcccaacccctgggctg

SEQ ID NO: 212264 - DNA, 201 bp, Homo sapiens
gcaggtagtggatcccaacccctgggctgggattcacaaggctaaaccctgtcatcaggactgtaaaactgaggcactgcttaaattgtaaagattttggytcagagatctaagtcaagaagctgtgttagcgcaagactaatgagcaagcaataaacaagccttagtgctgactgagagcacaactcattcccgactcag

SEQ ID NO: 212265 - DNA, 201 bp, Homo sapiens
ttttttttatttttaggcagaaattgtcagtcgacaaagtagcctaaagtccttcctttcttaaaaatcttatattaaatgtatccattcataatggttaytggagcataattttgttagcatgattattttatggggactccttgccaaagaacttttatccttacagactttaaattaattaatttgtaaggccttgac

SEQ ID NO: 212266 - DNA, 201 bp, Homo sapiens
aacatcaaattggttttttttcaaaccatgttccttttaacatgagattgcattagataataattacaaattattgtaagtgggcttgagttcttgatttsgctctcagcttgaacattactggtacatggaaatgctgctgatttttgtgcattgactttgtatactgaaactactgaagtcatttatcagttctcttgg

SEQ ID NO: 212267 - DNA, 201 bp, Homo sapiens
gataaagaaaaaggagcattaaccttgactatgcctttagctccagccacctttttaagaggaaattattgggcaggtgggggagggctagtcacagaacraaactgtaagccagactgggtgtgagcaggggaggtgacagaagaattatagggtgggggagtggagtctgaggaagatttggagcctgattcagcctgg

SEQ ID NO: 212268 - DNA, 201 bp, Homo sapiens
ttggacttgctttatgtaacccaatcgctaatcacagggcccttccactgccgttttctttcacctgtgccataacttcagcccttatttccttttaattmatattgtggcataccaattctactaatgatcaacacatgccttttttcctcctatttcgtttgatttcttatgcaactctcacccattttatgtatcttt

SEQ ID NO: 212269 - DNA, 201 bp, Homo sapiens
tagccctgtggccagcttgaggcaaagatgggaagaaaaggaagaggagagaagtgaatgtaggtacagacagaagaaaaggaactggaggtagaagacgrctgagaaaggaaaattgaattatatgtgaaataaaatagtagtaactattcagacaaagggcaaggattttagaactcaattccagatccctcacttgtt

SEQ ID NO: 212270 - DNA, 201 bp, Homo sapiens
tcaaagaacccactttttgtttcgttaatctattgtatttattttaatctcaatttcattcagttcagctcggattttagtatttcttttcttctgctagytttccggttgatttgctgtaagttgggttcagctgagtggctttgtttctggatgatttcacggggggccaggctcagctgagcactcttgagctgcatg

SEQ ID NO: 212271 - DNA, 201 bp, Homo sapiens
aattcccacctacatttcccagctcatactggacttagcccatttcttgcatcaatactgggcctcccagaaggcctgtcagtatactgtaggcactcatkgataccgttaataaaatgtatttctgatatttgtgtggccctctacaattcttagcacactttttttctgtagcatcccaacttattgacccttttatag

SEQ ID NO: 212272 - DNA, 201 bp, Homo sapiens
ttctgatatttgtgtggccctctacaattcttagcacactttttttctgtagcatcccaacttattgacccttttatagatgaaagaaatccagtttagaraggaaaagttatttgtctggaatcccagccttagtaaatgactagaacgctgagttctagtcgtcctgtccaaagttatttcaaaacaccaaagagtagc

SEQ ID NO: 212273 - DNA, 201 bp, Homo sapiens
agtattttggctggactttttgcttccctgaataaaattaattgtctgttactaagaaagaatgggaggatgaatattatatgaacaattagcatttctaytgcagttaagaaggatttctctatgctctctctctctctctgtctcacacacacacacttgaatatataaacatgagcagagtaattagagctgcagagc

SEQ ID NO: 212274 - DNA, 201 bp, Homo sapiens
ctatcatagaatcataatttagggactctgtgcaggaaccatatcttggtgattattttgtatctgccttacaatacctaacccagagcctaatatatgayaagcacttaaaaaataccatgaatgcttcaatataatataattccccaaatagagtgagcctccatattcccaatgagaattttactaattaaatgattt

SEQ ID NO: 212275 - DNA, 201 bp, Homo sapiens
ttcctttgtgattgtcctttacagctaaagaactatcagtttgtaagtaaagttttatacttatgaacaaccagggcaagaggagggacagtgttagattmttttccttactcctgctatttttctgttcacatagtaaatgtttaaataagtatttccagtactgatctagccattgaaaaaatgtttattgaatttaga

SEQ ID NO: 212276 - DNA, 201 bp, Homo sapiens
gactatgcctttagctccagccacctttttaagaggaaattattgggcaggtgggggagggctagtcacagaacgaaactgtaagccagactgggtgtgarcaggggaggtgacagaagaattatagggtgggggagtggagtctgaggaagatttggagcctgattcagcctggcagggagtgacctgaggaggagcagt

SEQ ID NO: 212277 - DNA, 201 bp, Homo sapiens
aggcctgacccatcacaaaatctagagattgcattcagcatgtttgctatatggtacagaaaattaatttcacttattttcatttttttcccacctttttmtgactgctctacaggctgtatattgatggtccttttggaagtccatttgaggaatcactgaactatgaggtcagcctctgcgtggctggaggcattggag

SEQ ID NO: 212278 - DNA, 201 bp, Homo sapiens
ggaagattgaaaagactcagcaacacttggggttgggactgaggggacaggtgggagggaaggaaggatttgggatgagtcgcattgggaacagagactarggagggaccaatgtgtaaaagaatgcctggatgtcaggcacctcagaccatttgcccattttacgacaaaaattatctagatcttgtacaatggagaaat

SEQ ID NO: 212279 - DNA, 201 bp, Homo sapiens
gaggtcagcctctgcgtggctggaggcattggagtaactccatttgcatcaatactcaacaccctgttgtatgtcattttgatctattttgttaatccaartagagaactgccaatatttctgatatctctctttttagtataaaataattccttattgaattattctacttgttgatcaaggacctccatttcctgattg

SEQ ID NO: 212280 - DNA, 201 bp, Homo sapiens
cctcccccctcaggaaagtggtacttgccactaaggtgaaggatcaaggcaggagtccctgcggtgatcagacacctctgaaacgtgggtgaataatcagrcaggtgtccccacagtgattaaacaccaagggaaaactgtcttgccgagtccgtgactggtgccggagttttgggttcacggataaaatgcatctcttct

SEQ ID NO: 212281 - DNA, 201 bp, Homo sapiens
tcatgtcagcgtgaaaagaccaccaaacaggctttgcttaagctaagcaataaagctttttaatcacctgggtgcagatgggctgagtctgaaaagagagycaaggtagggagataggtttgggtccattttataggatttgtgtaggtaatggaaaattacagttaaagggggttgttctctggcaggcagggatggggg

SEQ ID NO: 212282 - DNA, 201 bp, Homo sapiens
aacacaaagcaaaatgaaagtagaaagttattctcaaatctattccatttactattttttttgcagaaccaaaaaagcaataataaatttaagtgatgtgkttgaatgatattttatttcagttttaaatactagatgtaaatttggtactttctggcggttcttacaaaaatgatcatgctctaagccagaaatagtttg

SEQ ID NO: 212283 - DNA, 201 bp, Homo sapiens
caaggtaatgtcatcaaaggcaggaaccggccattttctcttcttttgtgactcttcagttacttcaggccatctggatgtatacgtgcaggcttgggctmggaggcctgacacaaacatgctttcctgacatctgtattctaacttgtgtgattcattgtttttaagcttgaataacctgatttcacatatttttccatg

SEQ ID NO: 212284 - DNA, 201 bp, Homo sapiens
gagcccaatattattctggtccagttcagttatggccttcaactggaaatggatgatatgcatacttgtgaatattattcacacttaaattcatttaacayttaaacacctaaattcatgaagtatgtcgtatccttgagtcagtatattgcatattaaattcatttaggtctcgtgctatcagacgctagaatgtaaatg

SEQ ID NO: 212285 - DNA, 201 bp, Homo sapiens
tccagtgggatggggtgagtctggagataagctttatggtttctcctgctggtgtctccagatagcaaacacagcagcggcttccagtctgtggtgcaaasaaagaaatactattctctagtgcagataccatttcacctatctttttataaaataccagattttggtgaaggttcttaagatattcaaataattatctcc

SEQ ID NO: 212286 - DNA, 201 bp, Homo sapiens
tttagtgggtttaaatgaaaccaggacatctgcagcagttttgatctctggtcttgctctcaactatttaaatcttaaaaattgttttgctctatgttttyataattttattgcttgtcaaaaatcagctgggatacatgataggttagcatggtgacaatgttatcttaaccatagatgaagcaaagtggtgaaaatttc

SEQ ID NO: 212287 - DNA, 201 bp, Homo sapiens
ttggtcttctcgaggagtatctttgtggcgttctctgtatttcctgaatttgaatattggcctgccttactaggttggggaagttctcctggataatatcytgcatggtgttttccaacttggttccattctcgccgtcactttcaggtacgccaatcagacgtagttttggtcttctcacatagtcccataattcttgga

SEQ ID NO: 212288 - DNA, 201 bp, Homo sapiens
tttaaagttagagttaacaaaatgtattccatggattgtatataatgtgaaaggaagtgaagtcaaggctgaccccagagtttttggtccgagcaactggratttcattaactgagatagggaaggttggggttggagaggaggttctgatggaaatttgtgcaactccacttaggaagtgttattttgagatgacactta

SEQ ID NO: 212289 - DNA, 201 bp, Homo sapiens
caaacagatgggatacaggtatgtggttgatgttatcgtaaattaaacaagcctcttgataatagatttactgtaggagctgtggtggaagaaaattcctkcaggtggttcgaacagaagtttcctagaggaaagcctcctttggaatatgtccaggaaagtcatagcttgtccttgaagtcaaccacattatgccttcca

SEQ ID NO: 212290 - DNA, 201 bp, Homo sapiens
cagagagatttgagtctctgagaaggatgtaggttctatttccagatatatgggaattaggagaagatagttttggaagtattaataggataatagtaatyttagatatagtaaatttagagtgaatttcaggtataaatgtctaacatgcagtagaaaatatgaaactaagaacttgggaagaaagggttaaaataaaga

SEQ ID NO: 212291 - DNA, 201 bp, Homo sapiens
atttatattaaggtcgacatgatccaaactttatgtcaaaggaactagatagattcagcaacattttcatgtttacagttaaattaaaatttcaaaatacytaaaattattatcatagcaaaggcttgtgataaattttaaagcatagatgtgtatgaaatgattgtaagagttcttgttttctctgtcttcaattatact

SEQ ID NO: 212292 - DNA, 201 bp, Homo sapiens
gtggcgtgatctcagctcactgcaacctccacctcctgggttcacaccattctcctgcctcagcctcccgagtatctgggaccacaggcacctaccaccaygcctggctaattttttgtatttttagtagagacagggtttcaccatcttggtcaggctggtcttgaactcatgaccttgtgatccacctgccccggcctc

SEQ ID NO: 212293 - DNA, 201 bp, Homo sapiens
ctgtccagggctatgctcctgaagaggactatgaataaccagatacaactaatgataataacagtaatctaaaatagttacataatgcttactctatgctaagtataaattcaaaatgcttcacatactttatgttattaaatgctcagaatgttatgagaataaataatattgttaaacctctttcagaagtgggaacac

SEQ ID NO: 212294 - DNA, 201 bp, Homo sapiens
aatctcccaaggagccacttcccaggttcggaatgtagaaaccaagccagaagtaagagtggcataaaatcatctccctaccacctgcaaactacctctcycatctatctaaacagtggaaatttctggtaatttaacaaaaagtatttatgagttgttaacaaagatatgaaaagctaaaccattgtttcaggtaccatg

SEQ ID NO: 212295 - DNA, 201 bp, Homo sapiens
tttgtttgcttttaacaagtttgggagaaattcactaaactttaatttatactattacctttcaaggaatatcataacacatatagctgtttgatttaacrgttctttacctgatatgtaaagttcttgtttgctgttgggttttggcttgatttttcaagactcattttaggaaaaggctaagtgggaaaaaaattgaaa

SEQ ID NO: 212296 - DNA, 201 bp, Homo sapiens
ggctaaaaaatcaaaggtgccagaatcaaaggcccaaaatcaagatattgggagggccatgctccctgtgaaacctgtaggagaaaatcttccttgtctcytcctagcttctgacggaggtcattgatccttggcattccttgggttacaaatgcatcgctccaatctctgtctctgtcatcacatggcattctccctgtg

SEQ ID NO: 212297 - DNA, 201 bp, Homo sapiens
tgatagaaatttatttctcacagttctggaagtggcagtcccatcaggctgccagcattgctggcttctggtgagggttctcattcagtttgcagatgacyaacttctcatgtatcctcatgtggtcgaagcagagctagttagcattctggtcttttcctataaagacactaattccattaatgagggctcaactcttat

SEQ ID NO: 212298 - DNA, 201 bp, Homo sapiens
ttcttggacagttatttggccttggatgccactgaaaaatcagtgagagtcccatagggaacacgtttacgtgtctcttgactgaaacgttagagtgaaartcagttaaagagcatagtcaaataactaaacaccaaatggggttggatgattagttaaaattatatttaagaagaatattaagtgtaatcacaaatatgt

SEQ ID NO: 212299 - DNA, 201 bp, Homo sapiens
ctgagcctttttgagattgaccaattagaattcattctttgtcttacactgcagttctttaaagatgaaacaactaactgaagtctaagaaaattagccakttgtcagaatggcattcaaggagattagttctaacaattgattcatttaaaaatcaaatttttctacctttttaccagaatagattttgtttgtttgttt

SEQ ID NO: 212300 - DNA, 201 bp, Homo sapiens
agttctaacaattgattcatttaaaaatcaaatttttctacctttttaccagaatagattttgtttgtttgtttaaaaacaaacaaatggaattcaaggarataatgaattttaaaagaaagaagaaaggaaatgatattttgaaataattgtacgtgataggttgccatttgatacttacattctttatatcacagcaat

SEQ ID NO: 212301 - DNA, 201 bp, Homo sapiens
tatagttgaacacttcataatttttaaaatatatttttataaacatcaaaaggatatttgattataaatgtacaggccagcttattaaatggatatttttwaaaaaatccaatttaggaaatcatggatgaatattatttattgaagaaatcactgattcaagatgatccctatctctaccttcaaagattttgttttaga

SEQ ID NO: 212302 - DNA, 201 bp, Homo sapiens
acaagtctcctgactgcaagttcattgtgctttacagcagggcatagtcagcttgtcacagataaagagtggcaatcttattttaccatgttccccttagrtgggaggtagggaggtgctgcaagaaattcccatgtttactatgaatgctgtagcagaatgttaactgtaacactaaaagaattaataactaattatttt

SEQ ID NO: 212303 - DNA, 201 bp, Homo sapiens
ttcattttgatttttaaaactgaggactgcaatcattaatcagttcattaaattaattggaataagtatattgcatgtagtgagagtagtagtattttttkaaattttagttttaattatatcctatggcctgtgttgtaagattttttattttaagagtttaaaagccattcgattaagcaactagtagtaaacttttct

SEQ ID NO: 212304 - DNA, 201 bp, Homo sapiens
ggaggtagggaggtgctgcaagaaattcccatgtttactatgaatgctgtagcagaatgttaactgtaacactaaaagaattaataactaattattttgaratagagatattctaaatattacattgtaaaccatttagtatttaataaactattagaaaattatttattatatctaacccaaacttggtttcctattgtt

SEQ ID NO: 212305 - DNA, 201 bp, Homo sapiens
tactctgggattgggtgaaatctttgagattatatctttattttactgccttgtagtgttttcaaacaatacaatttaagaataactaggtttagtctctyacatttactcctgtgaccctgagtcaagtgacttctcctggatctgtaatacaacgagtgaataagctctccggggtgattaagttctcattatgtaaga

SEQ ID NO: 212306 - DNA, 201 bp, Homo sapiens
tcattctgcccctggcccctcccaaatctcatgtccttctgaaattttaaaacacaattgtgtcttccctacagtgccctgaagtcttaactcattccagygttaacccaaaagtccaagtccaaagtctcatctgagacaagggaagtcccttctgcctatgaacctgtaaaatcaaaagcaagttagttacttcctaga

SEQ ID NO: 212307 - DNA, 201 bp, Homo sapiens
  misc_feature (1)...(201): n = A,T,C or G
atctttattttactgccttgtagtgttttcaaacaatacaatttaagaataactaggtttagtctctcacatttactcctgtgaccctgagtcaagtgacntctcctggatctgtaatacaacgagtgaataagctctccggggtgattaagttctcattatgtaagatcctgcgtttacaaatctacatgaaaaagcaag

SEQ ID NO: 212308 - DNA, 201 bp, Homo sapiens
aaacttgaaatcatggcagaagttgaaggggaagcaagatgcatcttacatgatgacaggagagaggaagagtgagcagggaaatgccacacacttttaarccatcagatcgcatgagaactcagtatcatgagaacgtcatggaagagaccacttccatgatcctattgtagcccaccaggtccatccgtcaacatgtgg

SEQ ID NO: 212309 - DNA, 201 bp, Homo sapiens
gtctctcacatttactcctgtgaccctgagtcaagtgacttctcctggatctgtaatacaacgagtgaataagctctccggggtgattaagttctcattaygtaagatcctgcgtttacaaatctacatgaaaaagcaagtatgaacatttatagaactagtttctaatgtctacccccaaaccacattttcttagtaccc

SEQ ID NO: 212310 - DNA, 201 bp, Homo sapiens
ctacccccaaaccacattttcttagtacccgaatctacctccactcattccatcaaaggtctagtagacaggtctccagataattgttggattgcagcatwctaatgcaaatttagtacaaatgaattgcaaagattccttgtagaattcgaaaaagaaaaaaaaaaaagtaagatttcattaagttagtgagagtgacat

SEQ ID NO: 212311 - DNA, 201 bp, Homo sapiens
caactctgtctcaaaaaaaaaaaaaaaaagaaaaaaagaattagtaataagttaatttcatttatatacagagatgcagctgtcttaaatcattagtgcasaaatccagcaatacataaaaagtacagtattatcacaaccatgcaagatctattccagaagtggaaggttggcttaataatgaaaaatcaattaatgtaa

SEQ ID NO: 212312 - DNA, 201 bp, Homo sapiens
gcaaagattccttgtagaattcgaaaaagaaaaaaaaaaaagtaagatttcattaagttagtgagagtgacattagggaatcctcaaatcgcacacacacrgagaggatatcagagagttaagctagttaataattgcaaaagaaaatgttaaagaaacacaaaaatcataacatcctgtgtgatttaaaaataatgattt

SEQ ID NO: 212313 - DNA, 201 bp, Homo sapiens
taaaatcaattcactagaaatgcattagagatctattatgtgcaagaaaagtattagagggatgcagaggtttggcagtgagtatgaatgtataagggatraatgcataagacatgatcccttctacttattcaggaataaaccaagtacctttgtgcatatggcttcctcatattggaatgccattctcctattctctaa

SEQ ID NO: 212314 - DNA, 201 bp, Homo sapiens
gaatgttttataatgtaatttatcagtacagtgggtcatttacattgatcatatatttatttcagggtacatattcaaactgttgctttggcttttttccmcctgattttagagactgctgattaagacagcagtatcaaatatcccatatgtcctggttagctttgttcagtaccaaggttccagaacacatagttgtag

SEQ ID NO: 212315 - DNA, 201 bp, Homo sapiens
gtttgcttggggtatggtgatgtcattaatttcttaatctcattttgtacggcaggggatagctgtaaatcatttaggaaacctatttgcaacccaaatgyttagtctcaggtgaaagggctgggtaaagtcagatttgttttcctctgagtggttttcagcttgctggttaattgaaaatgctttctgcagttactgatt

SEQ ID NO: 212316 - DNA, 201 bp, Homo sapiens
catattagcagactactatctgcttcttagccttatatcataataacttgaaaataaacaacttatttttattatttccatgtgtctttatttgaaatacmaagaacttacaaaatgataaaatcttactcataatttttgtcatttctctctatatactgtgttaatactttggtattagtagattaatatgatgtactc

SEQ ID NO: 212317 - DNA, 201 bp, Homo sapiens
catcctacttataaaaaataatgaaaatttacaaaatttagtctgagtttttgggaaacaggcactcctagcctacagttgggtttgtaattaataaatayatttttagagggcaattggcagcgtgtattaaaagcattaaaaaggtgtatcccttaattttgcagttcaaattctaatggttttgatttaaagaaggat

SEQ ID NO: 212318 - DNA, 201 bp, Homo sapiens
cataatttcttcattatgtccaatctttgtacattgtgtccagtttgataaacagctctgatttattttcctgtcttgaatatatttaccagtgaaagctytccagtgtgtcactgaagaatgaaagcattaaactgtctggagacagaacttaagaatttgtgtatctcctttggccacagtttatcttgttttaaaagt

SEQ ID NO: 212319 - DNA, 201 bp, Homo sapiens
tctagttcaattgggatttgatctaaaaatgaactccttgtgattctaatcccttaaaatgtattgacacctgttttattgcccaggatatgttcaatctyggtgaatgttccatatgcacttaaaaagaatttgtattccattattgttagatagaacattctacaaatgccaattagttccaataggttgatagtgatg

SEQ ID NO: 212320 - DNA, 201 bp, Homo sapiens
aacattactaactgctgctatctctggttccaagtccaaaaactgcagagaaggtaatcatttgttcagcttggatcatgtgcccaaaactggacaaacarttgtggccagagaaatacagtcttgttagcaacatggagcattcatagacttatggactgttataactaggagacacattaaacatcacttttctaataa

SEQ ID NO: 212321 - DNA, 201 bp, Homo sapiens
tgcacttaaaaagaatttgtattccattattgttagatagaacattctacaaatgccaattagttccaataggttgatagtgatgttcaagttttcaatakgcttactgaatttctgtctgcttgtattaattactcagagtattgaaataattaactataattatgaatttatctgtctttacagttccatcagtgtttg

SEQ ID NO: 212322 - DNA, 201 bp, Homo sapiens
cttgtattaattactcagagtattgaaataattaactataattatgaatttatctgtctttacagttccatcagtgtttgctttatgttgaagctttttaktttcagtgtttaaatcatttacatttaatttaatgaaaatacagttggctttaaatctagcagttcaccattgctttgtacttatctatttgttctttct

SEQ ID NO: 212323 - DNA, 201 bp, Homo sapiens
tgtattccattattgttagatagaacattctacaaatgccaattagttccaataggttgatagtgatgttcaagttttcaatatgcttactgaatttctgkctgcttgtattaattactcagagtattgaaataattaactataattatgaatttatctgtctttacagttccatcagtgtttgctttatgttgaagcttt

SEQ ID NO: 212324 - DNA, 201 bp, Homo sapiens
attaattactcagagtattgaaataattaactataattatgaatttatctgtctttacagttccatcagtgtttgctttatgttgaagctttttattttcrgtgtttaaatcatttacatttaatttaatgaaaatacagttggctttaaatctagcagttcaccattgctttgtacttatctatttgttctttctttgtt

SEQ ID NO: 212325 - DNA, 201 bp, Homo sapiens
acactccccctcccaccccctcgcctgtcccccaaatgcatgagaatttttctgcacattgatgggagagatgtggaggaagagggaagaggtcattttcmgtgaatacagcttttctttttaccctttaaacatttttgctccctttgttcttttcccagattacttctgtttgcttggggtatggtgatgtcattaatt

SEQ ID NO: 212326 - DNA, 201 bp, Homo sapiens
tttgttctttctttgttttattttctttttttaccttgatttgggttgaatttttttttataattccacttttttctctaatgttagccatgcctctgtatttttttttttttttctttttagtaattgctttaggttgttggttcctgaactggattccttggaccagcatcaattggaatcttgttagaaaagcaaatt

SEQ ID NO: 212327 - DNA, 201 bp, Homo sapiens
tctcccttggtcttctctcatgttggactgcagttacatgtatttttgactagttgttttgactagttggtattgtcccacaggccacttatgctctgttstttttttttttttttttttcagtttttttctctgtgggcttcaatttggataatttctaatgctttttcttcaagtttactttttcttcagcaatgcctg

SEQ ID NO: 212328 - DNA, 201 bp, Homo sapiens
ctcccttggtcttctctcatgttggactgcagttacatgtatttttgactagttgttttgactagttggtattgtcccacaggccacttatgctctgttctttttttttttttttttttcagtttttttctctgtgggcttcaatttggataatttctaatgctttttcttcaagtttactttttcttcagcaatgcctgt

SEQ ID NO: 212329 - DNA, 201 bp, Homo sapiens
  misc_feature (1)...(201): n = A,T,C or G
ctttttttttttttttttttcagtttttttctctgtgggcttcaatttggataatttctaatgctttttcttcaagtttactttttcttcagcaatgcctnttcttttattaactcatctagtatatttatcatttcaaatattgcattccatctctagaatttatgtttgggccttaaaaaatattccatttatcatctc

SEQ ID NO: 212330 - DNA, 201 bp, Homo sapiens
tgatggtaaacattaataatcagatgcatgggacaactgaagtaaagagagatgtgtatggcgtatacccagtgagaggttcctagaatgtagtaaatttrttctaataaaagaatctgacaattgaagaaaggaatgcaaactggcctatggcatagttaccgacttaccatttgtgccaacgaatccttgggtgacctc

SEQ ID NO: 212331 - DNA, 201 bp, Homo sapiens
acttgcaaaaatgactaacacattgaaccaagggacaaagtcagtaaaaagccctgtaaatgaccttgcaatatataagaacctgcagataataaaggtgrcattacaagcttatgaggaaagtaaagtttaagcaaatgtaggtctatctaaattacacatatgaattaaaaatactctatagaaatgggtaatgattat

SEQ ID NO: 212332 - DNA, 201 bp, Homo sapiens
gcctccctagtagctaggatcacgaacacacaccaccatgcctaattttattttttttaattgtatttattttttcgtaaggtcaaggtttcaatatgttktccaggctggtctcagactcctgggctcaagtactccttccacctctgcctttcaaagtgttggattacaggcattagccaccatgcctgacccctcaat

SEQ ID NO: 212333 - DNA, 201 bp, Homo sapiens
aatccttttattaactataattagtttgaaaaattgaataaaataaaaatataccacttacgattgcagcaaaacatataatatctggagacaaaagatayatgttcactaagagaaatatgtagagatttgaataaagactgtgtactataaagatatagttcttccttaattattatatatatatttttttgagacagg

SEQ ID NO: 212334 - DNA, 201 bp, Homo sapiens
taaaaaatataaaagccagtattggggttatactcaagagtgaaacactagatgtattcctaagaaaatcaggaaaaaagcaaaagtatttttaattctaycaatatttacatatagtaaaaaatgaaacatttggaattattagaaaaagtgcaacaataaaataccattatttccagaaaaagtagatatatctacttt

SEQ ID NO: 212335 - DNA, 201 bp, Homo sapiens
atggcttaggaggaatcctgggctgcaggcattccttggcccagtggccagatttctggcacttgaagcaagatcctgagggaggaggtccttaaggaatsccagaccgctgtggcttaggcgttttgaagttcttgtgtgctgcaaatgtggctggggtttctcttacagcacaggcaagtaattgcaactcctctgtta

SEQ ID NO: 212336 - DNA, 201 bp, Homo sapiens
aatttactttttgcctaaatttatattatgaacatttttacgttaataaatattctgttattattctctttactgatggcacagcacatcgcaatataggkttttatacattattttcccagacccatattactaaatgttttgggtagattttgttttgtttttttttttttttggtatttcaattttgaaacaaacacc

SEQ ID NO: 212337 - DNA, 201 bp, Homo sapiens
tttaatattacatagagtcttctatctctgtgtgttggaatttttttcaatggaatctagtattgacaaattaagattgtcttgtaaaaaataaagtcttkggttatacaagtgacataaaatatagtggctaaacttactacataagaaatgttataaacattccaattaaggatttctaaggtaagattaatagattga

SEQ ID NO: 212338 - DNA, 201 bp, Homo sapiens
aacctagaaagccataactgaactttggattttagctttgtgagatagtataagctaaaataacatcttatttcttaaaaaaataattatttggaaaccarctcattaattttcatgaacttggatactgtataactgaatttcaaatttaatttggtggtaagtcagatatgattaagatcacatatgcacagaaacata

SEQ ID NO: 212339 - DNA, 201 bp, Homo sapiens
aaaactcagaaggagatgcatactgctattctcacttactgataaaaagagtattggagggaaaataaattacgaatgtcacagtctctgcttaagagccyaacccagctcctttcgaagaaatgtggagggaatgcattgtaaatgagatttggcaccttagcttctgcagtcttaccatagtcaacactcccactggct

SEQ ID NO: 212340 - DNA, 201 bp, Homo sapiens
agctattgatatatgcaggagcatgcatgagtttgaaaaatattatgctgacctaaagaacagaaacaaaagagaacatataaaatgattaaatgtatacracactcaagaataggcaaaattaacatatacatttcatccaaggaatgcaaggttagtttaacacacaaaaatcaatgtaatgcatcatcataatagaac

SEQ ID NO: 212341 - DNA, 201 bp, Homo sapiens
atcagtgggcaagaaccacaggatgttttagaagtgtatggcaaaggtgggggaagaatttaatggtcaagtgatgtttaacctaagattaagattaatcrcagcattatttacaacagccaagatatggaaacaacctaaatgaccatagacagaagaatggagttaaaatatggtaaatacatacaatgtaatattact

SEQ ID NO: 212342 - DNA, 201 bp, Homo sapiens
acttatgatttgtgatggtaaacattaataatcagatgcatgggacaactgaagtaaagagagatgtgtatggcgtatacccagtgagaggttcctagaaygtagtaaatttattctaataaaagaatctgacaattgaagaaaggaatgcaaactggcctatggcatagttaccgacttaccatttgtgccaacgaatcc

SEQ ID NO: 212343 - DNA, 201 bp, Homo sapiens
ggtatctatttttcctgcctctttgcacttatgatttgtgatggtaaacattaataatcagatgcatgggacaactgaagtaaagagagatgtgtatggcrtatacccagtgagaggttcctagaatgtagtaaatttattctaataaaagaatctgacaattgaagaaaggaatgcaaactggcctatggcatagttacc

SEQ ID NO: 212344 - DNA, 201 bp, Homo sapiens
cacaaccatgcaagatctattccagaagtggaaggttggcttaataatgaaaaatcaattaatgtaatttacttttatattaaagcagaaaaaatcatgtrcagaaaaggctattgataataaaaatcaaaagctagtgataaaatgcaataatcatttatggtacagtatttagcaaagtaggaatagatgaaatttttc

SEQ ID NO: 212345 - DNA, 201 bp, Homo sapiens
agatatgttcatgtgtggtagtgtgcacatccatgccctacatctactctttaaatatatatctatatatacacacacacacgtatagatagatgattgayagattacttttagataaatactgaaaactaaaattcaaacaaatctaaagattaaaaattcaaacaagatatagataaaataaaaagctattatatatga

SEQ ID NO: 212346 - DNA, 201 bp, Homo sapiens
atatgacattgcccttttgttccaatgaagtcaattcatattccagattgagactattttcaattaatcgtgctggttaatgtctaagagacactatctattatgttagtaatcaagatatattgtttcttttgaacttccaatatattttggccatgcaattctgttggaagaaaaatggtaattaggtttgctcagaat

SEQ ID NO: 212347 - DNA, 201 bp, Homo sapiens
atgcttatttgcaatccatatatcttctttggtgaggtatctgtatttttcattggactatttgttttcttatcattaagtcgtaaaggtcttttatgtaytttagatacaagttcttatcagacatatgagttacagatattttattcatgtctgtggcttctgtttttattctcttaacagtaacttttgaagaacaga

SEQ ID NO: 212348 - DNA, 201 bp, Homo sapiens
taatatatttatatagttacaaaaaagagcacaggattacataaatgaaaaggaacaggttccccttttcttttcttccccacttttactccccagcaatatacttataagcatatctaattttatttctttcagtggtcacctcgactattaataaaatgtgtataattctatttcttgatctatcaaattcagacaata

SEQ ID NO: 212349 - DNA, 201 bp, Homo sapiens
aatggtggagagtggtcatttaagccctttgcatatttcaattacgcattgaaccgaatattaaaaataattattcaacatcttagaaaacaagaagaatraggagaagagcaggaggaggaggaggaggaggaagagaggaggaaactgcagccatcactgccattgagtttgttttcgaaaaactgtagctgaaagggc

SEQ ID NO: 212350 - DNA, 201 bp, Homo sapiens
tgactatagtaagcaataatgtattatatgctttcaaatagctagaagaaggatattgaatgttcccaacacaaagtaataataaatgtttgagatgatgsatggatatgctaattactctgatctgatcacttttactttatatgtatggaaacatcactatgtactccatagctatgtataattattatctgtcaatca

SEQ ID NO: 212351 - DNA, 201 bp, Homo sapiens
taattttaaaaaccctcagaaacaaatataattatgtttccaattatgttagtaaaataggataatgaatagataatggtatatttctgaccacatctggktatggatgaaaacaatctctcaggttcatctagaaattacaatgtcatgcaattattcattttaaaagctactaattaataaatttaatatgcataaata

SEQ ID NO: 212352 - DNA, 201 bp, Homo sapiens
agaagagtcaataaaattgatcacaatgagcacaaatttacatatttttagacaaacaccaatgccaaatcagaattttaaaatattttatcactttaagktttcgttatttttaattttgttttcctaattgttgactcaccaagaagcacccagaaaaatgaccaattattcaaactaacctctctggctttttcaact

SEQ ID NO: 212353 - DNA, 201 bp, Homo sapiens
ataacctaaagtccatgctttacatcagggttcacacttgatgctatacattctatgggtttgcacaaatgtgtaatgacctgtacccaccattactgtamcatgcagaatagttcattgccctaaaaatcctctgtgctctgcctatttatctttcctttcccactaacgccagaccaccactggttagtgtttacagtc

SEQ ID NO: 212354 - DNA, 201 bp, Homo sapiens
caagggtgtagtaagggttagagatagattagggagagggagagtgaaaggtcagaaatggaggaggatcaggaaaccagcatattcgtgactcaatttgytctaaactataatcatgtccaagtattctggttcaactggagagcaaccaagcaactgagctagcatgagcttgtgttccagagggtttgcattctgcca

SEQ ID NO: 212355 - DNA, 201 bp, Homo sapiens
aggtatggcgactcccattttgctcatgtgggacctgacactcaaagagtaagtgattgtctcaaaggtgcaaggctgctacattgcagaccttgtcttgyagtgctactcataacacagtgtggggctaaatgttattatatgcagaagaggcatggtctgtctgcatgaaagaaggaagatttgaaacaactaaagtga

SEQ ID NO: 212356 - DNA, 201 bp, Homo sapiens
ccatgtgccgaacactcttggcttacctccgaggatcacagaaggtaagaaaaaacagtcctactttcaaattccagcataaaaatcaagtgtaacagtcrcatgttagtttgtttacttttcatagtctgacttttgactggagtgatttcttgtaagatgatggtaaaagacatgtcacctgccaagatgatctgtgag

SEQ ID NO: 212357 - DNA, 201 bp, Homo sapiens
tgtctcaaaggtgcaaggctgctacattgcagaccttgtcttgtagtgctactcataacacagtgtggggctaaatgttattatatgcagaagaggcatgrtctgtctgcatgaaagaaggaagatttgaaacaactaaagtgaggctttaaaaagtgaccattaagacaagttttagttggaggcctcaaagggatgtga

SEQ ID NO: 212358 - DNA, 201 bp, Homo sapiens
ataatgattcttcccatttatgaacatggaatttttttttcatttgtttgtgttatttctgatttctttcagcagtgttttgtaattctcttacagaggtsttttatttacctggttatttgtatttctaggtattttattattgttgtggatattgtgaatgggattatgatctggatttggctctcagcttgaacactg

SEQ ID NO: 212359 - DNA, 201 bp, Homo sapiens
acaaaaccagttttccctcctaggcctctgggtctgtgatgtgggggctgctataaagacccttgacatgccctggagacattatttctgttgtcttgctkattagcatttgactcttcattacttatgcacatttctgcagcaggcttgaatttctcctcagaaaatgggattttcttttctattgcattgctaggtggc

SEQ ID NO: 212360 - DNA, 201 bp, Homo sapiens
attatgtacattaaaaatctagggttttcttatttaataaacattagactgttaccttatttctaaaattatccccagatttatcggagattgttaactcycctttattcttttattaaatatattgtgtatatacattacatatctgtaggcatagaaaggtgtatgaaagaatatatacttgtttgctcatggatagtt

SEQ ID NO: 212361 - DNA, 201 bp, Homo sapiens
acttctataaagaactgcctgggactgggtaatttatagaggaaaaaggtttaattgactcacagttcagcatggctcgggaggcctcaggaaacttacartcatggtggaaggcaaatgggaagcaaggcacttctttacaaggcagcaggaaagagaagtgccagggaagagccccttaaaaaaccgtcagctctcatg

SEQ ID NO: 212362 - DNA, 201 bp, Homo sapiens
tacttaggatttcctgaggcacactggatctgtagtttaggaaagcactctacttctaaatgcacctagcaagtagactttactctcttgataactgtctrttacttaatgttactgtctgttacttaataactgtcatgttactacatgccatttgctaaaatatagacctcctttttgaaggttgaaaatgaggtcaaa

SEQ ID NO: 212363 - DNA, 201 bp, Homo sapiens
gaagaaaattcctgcaggtggttcgaacagaagtttcctagaggaaagcctcctttggaatatgtccaggaaagtcatagcttgtccttgaagtcaaccayattatgccttccatttgtccttctcacagggagcttttgagtctgcccctcccctcttcactatcgcctcaagttcttctaaaattcagactacacatga

SEQ ID NO: 212364 - DNA, 201 bp, Homo sapiens
agaatgaaaagtatgaggtaaataaaatattttcctggttgacatttacatttggaaataattagaaaattgttttcaatatgtaaaatagcaagaaatcractttgttaatactttaaaccatgctcataaagcatacttcttgtcatgttctgcctaattttacacctgattttccattttctctgctcttgttctaga

SEQ ID NO: 212365 - DNA, 201 bp, Homo sapiens
ctacctagaaatgaatttgagtagggcaaatatttctaagctaaattttacattatgctattatgctaatttacagtctcttcctgccatttccttctctstccaattacttctatttggcacttagaaatgtaaaatgcatgctttcaaacattttcactgcatagttgtcttaagagttcccttgaagtaaaacaaagc

SEQ ID NO: 212366 - DNA, 201 bp, Homo sapiens
tttgatatttaagttcttaactattcaggaactaatgttttggggtggtttgaaacaaggatgttacgtgattttgtttgcatatgataaccaatgttttycttcatcgaatagactcttcttttcccattaatctgacatgccatctatatatgtataattgatacttatatagttgtttatgggtctttgttttgctcc

SEQ ID NO: 212367 - DNA, 201 bp, Homo sapiens
cctatatgttggaaactcaagatgagcctttatgtgacataatttccataaaagataacacaatcttaaaattagcagatagcatccgtagtaacagagaygatagtcttcagcactgctctgggcaatgaccttttgtcaagaatgtactgaatattggtgcacaaagatgatggagtcttaaaattatatcaacaattg

SEQ ID NO: 212368 - DNA, 201 bp, Homo sapiens
attctttagatcatatgagtgaaataaagctcagtttatacaactacaatgagaatgtcactttccaaagctgtggctggaaaggcagcctggagatttgyaggaagccatgccataagttcatttaaattctgaaactagtttaaatgtgtggatgacaagggacactaggatgatgataataacttctgttgacttctt

SEQ ID NO: 212369 - DNA, 201 bp, Homo sapiens
gctgttgccatgactagtgaattacaacgattagtcatttgtggaagataatatttaaactattaactttggctaataatcaaatgtatgttaaacagctmctgtgttccagactgtttattagtcactggagatacagcattgagcaaaagtgacaaagtctccgctcttatagagattgtgttttggtccatggggagt

SEQ ID NO: 212370 - DNA, 201 bp, Homo sapiens
agcagcagtctgagctgtggatctgtagtgtcaactgagataggtagtaacaacttgggttagctaatcttcataatgcatctgggagctaaactgaggcrtataatataaaagtatatgtagccaagtagcctaatggtatcatcagttaggcctgtttactgacttggaatataagttgggaccaaaaaaaaggaggtt

SEQ ID NO: 212371 - DNA, 201 bp, Homo sapiens
gattgttaactcccctttattcttttattaaatatattgtgtatatacattacatatctgtaggcatagaaaggtgtatgaaagaatatatacttgtttgytcatggatagttacacccagggcatgagattgagggtagggtcttgatattactttctgttttattttatacttttgtttgtttgaatgatagtgagcat

SEQ ID NO: 212372 - DNA, 201 bp, Homo sapiens
ttttggaaactccttgtaagtcagattataaccacactaatttatattaatgttattactttattatgacaacatattttaggccaattacatcaaccacyttgcactagatatcactgtgaatggcttttggttgctgcaagaagccaataaataaataaacaaacaaacaaacaaacaaataaataaataaatcatatt

SEQ ID NO: 212373 - DNA, 201 bp, Homo sapiens
atttgtctaaatatatgtaaaagggaaatttggagagttataagtgagggtggagatagggatatgggccctagcaagcccttacagagaaagtgacactsggacactttcttcactttctttgtgactgaaagattaataaagagtccatctggtagttatcctgggggttggaacaggtacaatgccaatacaaataga

SEQ ID NO: 212374 - DNA, 201 bp, Homo sapiens
cttttattaaatatattgtgtatatacattacatatctgtaggcatagaaaggtgtatgaaagaatatatacttgtttgctcatggatagttacacccagrgcatgagattgagggtagggtcttgatattactttctgttttattttatacttttgtttgtttgaatgatagtgagcatctattattttttactcatttg

SEQ ID NO: 212375 - DNA, 201 bp, Homo sapiens
caaatcaaagaatgtcagcagccactggaatctggaagagacaaggaacagattctctttagcacatcagaaaagatggtgcattagttgcagtggctcaygcatgtaatcccaggactttgggaggctgagtctggtggatcacttgaacccaggagtttgataccagcctgggcaaaatggcaaaatctcgtctctaca

SEQ ID NO: 212376 - DNA, 201 bp, Homo sapiens
catgacatctgtagtgatttgttagcacagccataggaaactaacagaagggcccacttgtcttaaattcctatcgtttaacctgtggggttggtaacatmcattttaaggggttcttgccccgtttctttaccttttctggtcattaattgtcaagctgagcagaaactatttttatattactggagagttatgcttgag

SEQ ID NO: 212377 - DNA, 201 bp, Homo sapiens
aagttgtagaacaagaaaataaccacctattgagaatacttaggagataaggtgatgagattacttttatttctcactgattttccttggccacatttcattttttttttttttaagatgaaacaaaacaggatctcattatgttgcccaggctggagtgtagtggctattcacaggcatgatcatagtgcactacagcct

SEQ ID NO: 212378 - DNA, 201 bp, Homo sapiens
tcttttaaaatatttttgtttttaaattttaaaatgggaataatgatcctagttcatgcagtttttgtgaggataatgtaaaatgcatatacatttccctkggctagacctggtgttttccatacattactaagctattattaaaacactaccccagttactatctgtagtctgatttatgttcagcttctttgaagatat

SEQ ID NO: 212379 - DNA, 201 bp, Homo sapiens
caaaaataagtaaaattaccatttcgaactgaggtttattgaaagcacaaatatgtgttttctatagtaatgtgaaagctttcgattgtccatactactamgctcttctaatattgtgaagtggtgaaatttgaataaatccccctgtttttaaaaagtctaatacttattttcatatactgtgccagttagaaacaatca

SEQ ID NO: 212380 - DNA, 201 bp, Homo sapiens
gagactgtctcaaaaacccaaacaaacaaacaaacaaacaaacaaaaacaatcaaaaaagttaggtaatcagctttttaatcagtccttcactgaaatgtsattttttattcttaagtgcagtcttgttcccatggaatgcctactatattcaaaatttttattcccattataatttattaatgatatgaacctagtgata

SEQ ID NO: 212381 - DNA, 201 bp, Homo sapiens
ctctctctgtaatagctatgtgtccttctgacttttaatagcttttctagggaaaaaccacattcccactgaaaatggaagaatgtcatttttagaaagcrtagataaaaaaatgatgacataaaacaaatagaaaagatttgagttaagcataaggaaatctgaatataaagtcattatgaactgtatatttttggtagc

SEQ ID NO: 212382 - DNA, 201 bp, Homo sapiens
gaggaatgaggcaacattttggaatgattgtttttgatgaggagtagatgagaggtaactaaacgctcagtaattgtgatcggatgtgctgaacccatgaygtaggagacacaaggcctgtttcagttatctagtcaaccatgctctctgcaaaacactttcaacttctccatgccttctcctgtgcacagataatttctg

SEQ ID NO: 212383 - DNA, 201 bp, Homo sapiens
atctttttggcttctaattttcagaggaatgttgaaaaattaaaaatggtttaaagataaagaggaatgaggcaacattttggaatgattgtttttgatgrggagtagatgagaggtaactaaacgctcagtaattgtgatcggatgtgctgaacccatgatgtaggagacacaaggcctgtttcagttatctagtcaacc

SEQ ID NO: 212384 - DNA, 201 bp, Homo sapiens
tatattgaatatcctatattcactatatgagttttaatatatatcattatggatagtctgattaaaattccaataaatgaagaggtatcattgtcatgtgygttttctctcatttttttttttgtttattcaggccaccagtatatctttttggcttctaattttcagaggaatgttgaaaaattaaaaatggtttaaaga

SEQ ID NO: 212385 - DNA, 201 bp, Homo sapiens
gggctccacccagtttgagcatccaggccactttgtttacctactcaagcttcagcaatggtgggcgcccctccccaagccttgctgctgccttgcatttygatctcagactgctgtgctagcaacgagtgaggttctgagggtgtgggaccctctgagacatgcgtgggatataatctcctggtgtgccgtttgctaaga

SEQ ID NO: 212386 - DNA, 201 bp, Homo sapiens
ggagacatgagaaaaagatctttatattgaatatcctatattcactatatgagttttaatatatatcattatggatagtctgattaaaattccaataaatkaagaggtatcattgtcatgtgcgttttctctcatttttttttttgtttattcaggccaccagtatatctttttggcttctaattttcagaggaatgttga

SEQ ID NO: 212387 - DNA, 201 bp, Homo sapiens
aatatttcttccctatattacttggaacccctcttatttcttagattgctatagtataatatcaattattataattttatctcttccctgttcctattctrttgtattctgtcctgtcctgtcctatcccgttccatctcatcctaacctattctgttgaagcctgcgctttacgttaatatatcctcagttatcaaaagt

SEQ ID NO: 212388 - DNA, 201 bp, Homo sapiens
atgacacctaggacagagatttaccctttgatctattatttcagtgctcacaagggtgcttaataaatggctgtttgatgatgaggttgtatgtttgctcstcagtaggaacatgttaccttcagtcctttggttgacctttggctgcctccctgatcctctggagagaggaaggctatttactgctatttgctattggca

SEQ ID NO: 212389 - DNA, 201 bp, Homo sapiens
gttgaccaaatttgtattctgagccattgtgctctgttgtttctttgcaacattaatattaggttgaatcatatagattggtagatcagaaacagtcaaawatcagccattttatatggctcaacctaatagcaactgttaccatttattgattatatatgacgtgtcagacacagttcttggccccttttataatctcat

SEQ ID NO: 212390 - DNA, 201 bp, Homo sapiens
gttattgcattcaattgagcttgaaaaataacacataaaagtattggtttgataaaacatgctccctccgtttctaagtctatagccatataaagccatcmaattttgctcaatgtatacattggtcttcaatttaaagattgtccataaagtagtgtggatattttgcaaggggaataggcctggtacagaggaaggagc

SEQ ID NO: 212391 - DNA, 201 bp, Homo sapiens
actatatagaccataaaaatatgcttaccatagctttgaaaaattgtacagcttactttatgtggtttctctttttgttcatgtatctgtctcgtgactattttttgttgactttcgttgctcagaacatattttccccaaagagtacttattagaaacaattttatttattaataaccatgcatttttgaggtcctcaaa

SEQ ID NO: 212392 - DNA, 201 bp, Homo sapiens
tcactgtgaatggcttttggttgctgcaagaagccaataaataaataaacaaacaaacaaacaaacaaataaataaataaatcatatttggatatatggartctcacagattttacataattcatattcatacaatgtaaactttaagcttataacaaatattcattatcaactgctatatacccaaaggagtgcctggaa

SEQ ID NO: 212393 - DNA, 201 bp, Homo sapiens
cacacagctagttaaggggcttcatattcaggtttatgtgacttcaaattgtcctctaaatcaatgagtgctgatcctggctcagaactccacccgagacytaaggaataacaacttcagaagtttggtagtagaaagtggtttattttaaaatagcccatcaggtaataactatgtacagtccaatatgagaagcctttg

SEQ ID NO: 212394 - DNA, 201 bp, Homo sapiens
attatgacaacatattttaggccaattacatcaaccaccttgcactagatatcactgtgaatggcttttggttgctgcaagaagccaataaataaataaayaaacaaacaaacaaacaaataaataaataaatcatatttggatatatggaatctcacagattttacataattcatattcatacaatgtaaactttaagct

SEQ ID NO: 212395 - DNA, 201 bp, Homo sapiens
cttgaattattgaattatttatttgtcatttagaaagtactcttgcttatgaatgaaaaatatttatgtattgtaaaaatctaggatatatttttctattygtccatgtaagttggtgagtatatatacatatatgtttgcctgttttgaatcagaagttcaattttgattcagggtacatagagttcaaggttttgaagg

SEQ ID NO: 212396 - DNA, 201 bp, Homo sapiens
gaattattgaattatttatttgtcatttagaaagtactcttgcttatgaatgaaaaatatttatgtattgtaaaaatctaggatatatttttctattcgtycatgtaagttggtgagtatatatacatatatgtttgcctgttttgaatcagaagttcaattttgattcagggtacatagagttcaaggttttgaaggtga

SEQ ID NO: 212397 - DNA, 201 bp, Homo sapiens
ttacaaacagactaggtattaaaacaaaaagattcccgaatagagtgaatctaagttcccctagagcccctaagaattacatcagctttaaccattaattycctgggttcttcttattcagtaatgtcttaaaacctttttatcagtatgggatgggcgggcaaggggataaagaaactggcggctggtgggaagccttag

SEQ ID NO: 212398 - DNA, 201 bp, Homo sapiens
tgtgtcaagctatgtgctaagtcctagaataaaaatggagtaagacaggatttttgtccttaagaagttcagttgagtaggagaattagacacacacataygtataattaaattaatttgtggaaaatgcagtaatgattatgtagaaagagtattgtatttccccagtgcatttcatattttgaaaaacactgtctacaa

SEQ ID NO: 212399 - DNA, 201 bp, Homo sapiens
ccatataagtgggtagctacaactcatttacaaggtcatctaaatttttaatatcttatttcttcattattcttcagataatatctttcattatccttcaytgtccttaaattcatgcttaaagcatatttccagcctgtgaaataggagaaaaaggaaaatgtggaagaaatttcctttgtaaaaggacatacacatctc

SEQ ID NO: 212400 - DNA, 201 bp, Homo sapiens
ataaatgtttcctaaaatgtttgaccttgttaagatacataataatatgataactctataatataatgtaatcattttataataaatctaataataaaatwaaaaaaatgtgatactttacttgccagaattcttccatgtaacctgaaaataacaatgaagaagactaggatttagactggagcagataaaaatgctgtg

SEQ ID NO: 212401 - DNA, 201 bp, Homo sapiens
attcagaaacataaaaactgaaaagcacccagctgtttctggctcacagtaaatctcaaattctcctgggtagaaatggtgaatactctccatcctgctgrtgtattagttgtttgggttaaccagcctcttgttctgctctcagtgagtattttcttcgtccattgccccctgcagctttgactttacatatttgggagg

SEQ ID NO: 212402 - DNA, 201 bp, Homo sapiens
aaatgtttcctaaaatgtttgaccttgttaagatacataataatatgataactctataatataatgtaatcattttataataaatctaataataaaataawaaaaatgtgatactttacttgccagaattcttccatgtaacctgaaaataacaatgaagaagactaggatttagactggagcagataaaaatgctgtgga

SEQ ID NO: 212403 - DNA, 201 bp, Homo sapiens
agaggcatgtctagctgttagtttgttattgtctgtacttttacatagcatgcctgcactagccatcatttttctactttgtgtttttaatcttttaaccrgtcactttgggaagagtttttccaggaatagtttttcccgttttcaaagaaaaccaggcaagaatggctatggatctcacaaagactggcaacattttgt

SEQ ID NO: 212404 - DNA, 201 bp, Homo sapiens
atgaaagaaatatggattcattacaaagtcagttaagtctaggaatatgaatattacgatatattccctgaattatcaataacttgtgatgcaaacatttrgcatgttaatatggctgtgtttctcaacatcaaaaatattcttctgtcatcaattcatattgttgtaattcaattatagcatttagagtattgactaagt

SEQ ID NO: 212405 - DNA, 201 bp, Homo sapiens
attagctattgttactgagttttttcacaaagttattttttattaccagtagctcattaaaataaatgatgtcttactattttaatcatctctattaggawcacttaatagtgttaattttattctccctttttaatgtattatgtcactgagagaaacaagatcattctattcagagttcagttctagtcagatgctttt

SEQ ID NO: 212406 - DNA, 201 bp, Homo sapiens
tcctccgaaactggaggtgctcaaagtttgtatgatcattgcttaaagatgcagtgaaacagatgtctgtattaattcacaaaataatattctacttacaratatcctgatgtataattcacaatggaacttagactagcagttgaatacggaatcatctttgattcatcacaattttggtagaccctagtttccaaatat

SEQ ID NO: 212407 - DNA, 201 bp, Homo sapiens
taaactatatcaaattacaatggttaagaaatcttactgaattctatcaggcatgtttcctggtctataatttttgacttcttgagggaaatgctaactakgagtcccaaacatttattctttaaggtaaatttctccagaagtcttattctaaggctagcatatccaatcagagaaagaaaattaatatgatctaggtta

SEQ ID NO: 212408 - DNA, 201 bp, Homo sapiens
ctaacacgcacatggagggctactatgagaatggagtgagattttgtatatgaagtagcaaagacagagcctgggacttagtaggtacattattaagagtkggagccattttttaaaccttttgtctttttgttatttttgctgttctgaaagtcgctaagcttttaaaaatggtctcttattttactattcttgaattgt

SEQ ID NO: 212409 - DNA, 201 bp, Homo sapiens
cgcgatctcggctcactgcaagctctgccttccgggttcatgccattgtcttgcctcagcctcccgagtagctgggactacgtgtgcccatcaccacaccyggtcaatttttttgtatttttagtagagacggagtttcactgtcttagccaggatggtctcgatctcctgacctcatgatccgccagccttagcctccca

SEQ ID NO: 212410 - DNA, 201 bp, Homo sapiens
agtatatgacattgcccttttgttccaatgaagtcaattcatattccagattgagactattttcaattaatcgtgctggttaatgtctaagagacactatctattatgttagtaatcaagatatattgtttcttttgaacttccaatatattttggccatgcaattctgttggaagaaaaatggtaattaggtttgctcag

SEQ ID NO: 212411 - DNA, 201 bp, Homo sapiens
atattgctttaaggaaggggtccagattaaatcttttgcaaatggctagccagttttcctagcaccatttatattgttattgtagtcttgtagtataattygaagtcaggtaatgtgaggcctccagctttgttctttttgcttggtatagctttggctatttgggttcttttttggttccatatgaatttaaaatagttt

SEQ ID NO: 212412 - DNA, 201 bp, Homo sapiens
catctttctttctttgttaccccatcctgcattcagctgccatacatcttttcagactctttagtttttatgtttgagggatttttgttgtttatttgggktttttttttttatttttaggcagaaattgtcagtcgacaaagtagcctaaagtccttcctttcttaaaaatcttatattaaatgtatccattcataatgg

SEQ ID NO: 212413 - DNA, 201 bp, Homo sapiens
  misc_feature (1)...(201): n = A,T,C or G
ttgaacatcttcattttgaagttcttaaattgccttcacatttgtaagccttattttccaacaaagtatctggtccttaagggcataaggacctctccaangtcttcagaatttctcaaggagctaacccagccatgtgggtgcacggtagacattcctaaatgactgaatcagatgatggtctacacttgtttttgtgta

SEQ ID NO: 212414 - DNA, 201 bp, Homo sapiens
ccttgaacagttactgggattcaacctaagaaatggaaaggaagtcactctaaatgagtaggctagcatgtgtgaagatgaagggacgagaaaatgtattrgttgataagtattcgtttagctcaattagagtaaaaaaaggagaaacatggaatataaagccagaaagaatttgaaacagatgtgcttggccataggcaa

SEQ ID NO: 212415 - DNA, 201 bp, Homo sapiens
atgtttcctaaaatgtttgaccttgttaagatacataataatatgataactctataatataatgtaatcattttataataaatctaataataaaataaaawaaatgtgatactttacttgccagaattcttccatgtaacctgaaaataacaatgaagaagactaggatttagactggagcagataaaaatgctgtggaag

SEQ ID NO: 212416 - DNA, 201 bp, Homo sapiens
tgtttcctaaaatgtttgaccttgttaagatacataataatatgataactctataatataatgtaatcattttataataaatctaataataaaataaaaawaatgtgatactttacttgccagaattcttccatgtaacctgaaaataacaatgaagaagactaggatttagactggagcagataaaaatgctgtggaaga

SEQ ID NO: 212417 - DNA, 201 bp, Homo sapiens
aagattccaaaattaataaaataatatgtctaaatgaggtatatcacagtggcggtgtggggcaagaagcaggggcagtattgtttggcaaatagacacasagctttgtgttatcttaagtgggttctgttacatttgagaagatttcattctactttaaagaaaggcatgcatctaaaataaataaaggtaccaggaatt

SEQ ID NO: 212418 - DNA, 201 bp, Homo sapiens
gtttcctaaaatgtttgaccttgttaagatacataataatatgataactctataatataatgtaatcattttataataaatctaataataaaataaaaaawatgtgatactttacttgccagaattcttccatgtaacctgaaaataacaatgaagaagactaggatttagactggagcagataaaaatgctgtggaagag

SEQ ID NO: 212419 - DNA, 201 bp, Homo sapiens
ttctcctgttttcacacttctaactaatattagaatgcctatttctacaactcatctctgtttttttttcccaatctaagggatgaaaatggcaactcaaygttttaagttagtatttcccctgcctttatttcttcttgtattccttctttcatgtctctctttatgcttttttctctctttttaataaatatgtattta

SEQ ID NO: 212420 - DNA, 201 bp, Homo sapiens
tgatattagtaacaggaaaaaattgagtagtagaaagagacatggatttatgttatggtttccttgcacattcattcagtgatcttcagcagattactcayccatctcaaacttgtattctcctctataaaaataaagataaaaatatatacatcacaggtttgttctgaggattaaataaaatataattttttcaaatgc

SEQ ID NO: 212421 - DNA, 201 bp, Homo sapiens
gcattttataaaattcaataccccttcatgataaaacaaacaaacaaacaaacaaaccctcaacttaagggcacctatgaaaaacccagagctaacatcataagaagtactcaatgctcttcccctatgatcaggacaaggttatctgttcttgctaattttaataaacattttactagagtttgtagtcagaaaaactag

SEQ ID NO: 212422 - DNA, 201 bp, Homo sapiens
acatgatcatcataggagacacagaaaaagcattttataaaattcaataccccttcatgataaaacaaacaaacaaacaaacaaaccctcaacttaagggyacctatgaaaaacccagagctaacatcataagaagtactcaatgctcttcccctatgatcaggacaaggttatctgttcttgctaattttaataaacatt

SEQ ID NO: 212423 - DNA, 201 bp, Homo sapiens
ttgaaaaaaaaaacttgaatccaaaatatataaatgtaaaacagacacactgcaataagaagattttttaaccaaagcaataaagaggagaaaaatttgarcagatattttacaaaagaagctatataagtgacatagccataaacatatgaaaaagatgttcagcattataaatacttattagaactgctaaaaaaaact

SEQ ID NO: 212424 - DNA, 201 bp, Homo sapiens
caattagagtaaaaaaaggagaaacatggaatataaagccagaaagaatttgaaacagatgtgcttggccataggcaataggacagaaagaatatgggtgktttttcacagggtgacacaaaaggttaatccataggagattgctgtgatcagacattttctttgggaagcctgttggaaagaaatgaaaggtgattgaat

SEQ ID NO: 212425 - DNA, 201 bp, Homo sapiens
acacccctagacttactggctcaaagtaccaaagaattgtgtttatgactgaaataacagctggaagttcaaaggggaaaaatccggcattgaaagaattwcaggagtaagacccaaaatatgactataaaccctgcacaaataccactttgacagccagactttacatgcagataagaccctcaaggatcctagtaagaa

SEQ ID NO: 212426 - DNA, 201 bp, Homo sapiens
gtccccactgaagactagcaggtgacagtgcaaagtagagtctaaggatggtaatggcatgaaagacacctttttctatcaatgaactgaatccaactttrtatcactaatgttgactaaaactattccacagccatctctgaatgttctcaggcacagcatctaggaaacattgcctcagcctcccaagtaactgggatt

SEQ ID NO: 212427 - DNA, 201 bp, Homo sapiens
acacttcatagtaattggtccaagtaatgaacatagaaatggtagggtactttattatatccaatatataaatattatgagagaaagagagagagagaatkatgctttcttatctgtgttgttaaggtttaaagatgttgccttggttctgcctgtagcagaaaagagttaggtcaacattcacagagggcagagataatg

SEQ ID NO: 212428 - DNA, 201 bp, Homo sapiens
tatacaaatgttcataacagctttatttgtaataattccaaactggaaagtgggatgaatctaaatatcactccctaggtgattgaaattttaatcatgcwttatattcatataatggataactactcaacaattaaaaagcagaaattttaatctgcataacagtttgtattaatcttgaaatcattaagctgaatgaaa

SEQ ID NO: 212429 - DNA, 201 bp, Homo sapiens
tgcattgtcctagcagaggttctccatatggcctggacatccaggcatttccatgtatcctctgaaatctaggtggaaactcccgaagcccaactcttttrtctttgcacacccacaggccccacaccacacggaagctgccaaggcttggggcttgcactctctgaagcaatggcctgagctgtaccttggcccctttta

SEQ ID NO: 212430 - DNA, 201 bp, Homo sapiens
ggctttaagataagccttgaacagttactgggattcaacctaagaaatggaaaggaagtcactctaaatgagtaggctagcatgtgtgaagatgaagggaygagaaaatgtattggttgataagtattcgtttagctcaattagagtaaaaaaaggagaaacatggaatataaagccagaaagaatttgaaacagatgtgc

SEQ ID NO: 212431 - DNA, 201 bp, Homo sapiens
gtgtcgcgatctcggctcactgcaagctgcgcctcccgcgttcacaccattctcctgcctcagcctcccgagtagctgggactacaggtgcccgccaccaygcccggctaatttttttgtatttttagtagagacgggatttcaccgtgttagccaggatggtctggatctcctgacctcgtggtccacccatctcggtct

SEQ ID NO: 212432 - DNA, 201 bp, Homo sapiens
ctctaccggaggggtaaagaaacctcaccgaatgctacaaatgccgcttgcaagtgcaccctctactggaggggtgaagaaacctcaccgcaagccttatrctgtagtgcttcatgaaattagatattatgaaaagcccattgaacttctgattcaaaaacttctttctagcatctggtgtgaaaaatttctcaagacttc

SEQ ID NO: 212433 - DNA, 201 bp, Homo sapiens
atctttacttaacttttcattttccgaaatggaaaaatgagattgaggtgatttgttcactatcacctactgaattagtgacttggtcactatttagtctrttgttctccttagtccaatattagccactataatgaacagctgtatgaacacacgcaagaacattttaaaccccacactgtatggactactagctttaca

SEQ ID NO: 212434 - DNA, 201 bp, Homo sapiens
agtgaggagctgcgttcctttggagggggagaggcgctctgatttttagaattttcagcttttctgctctgtttttttccccatctttgtggttttatctrtctttggtctttgatgatggtgacatgcgaatgaggttttggtgtggatgtcttttctgtttgttagttttccttctaacagtcaggaccctcagctgca

SEQ ID NO: 212435 - DNA, 201 bp, Homo sapiens
aatggaaaaatgagattgaggtgatttgttcactatcacctactgaattagtgacttggtcactatttagtctattgttctccttagtccaatattagccrctataatgaacagctgtatgaacacacgcaagaacattttaaaccccacactgtatggactactagctttacattttaggtgaaatgatactttaaaatg

SEQ ID NO: 212436 - DNA, 201 bp, Homo sapiens
aagaagctagcgaaaatgattgatttactctcaaaataaaatatatttttagtattatagttgtttgagacttgccaataaattgtgaaggaattatgagmatttttatttaaatttattctgatttcacaatacttttcagaattctaaggctcaatatttaacctcgttgtgatatatagctaaatgctaactgcataa

SEQ ID NO: 212437 - DNA, 201 bp, Homo sapiens
ttgaggaagtagttggtaaaacttgaaggaaagtgagaaaaatattattggaggctggggaaaaaaactcttcttagggagtggtggaaatttcgacagcmctgttgtctgagataaggtagaaaataggaaatgtacccactaagtcaaggatctagctatagacaattccaggcagaattttaaaagttttaactgctt

SEQ ID NO: 212438 - DNA, 201 bp, Homo sapiens
cttattaaaatgacaaatgagcttagaaactgctatggtttgaacgtttcctccaaagtttgtgtgttggaaacaattcattatgcaactatgttgagagktgagaccttgaataggtgattagttcatgaggtctctgcccttgtaattgggtgaatgctgttatcatgggagtgggttagttggcacaggagtgggttc

SEQ ID NO: 212439 - DNA, 201 bp, Homo sapiens
actttgttatgtgctttatatacattatttaatttaatccccacaccaagtctacaagaagaaaatacttattaaaatgacaaatgagcttagaaactgckatggtttgaacgtttcctccaaagtttgtgtgttggaaacaattcattatgcaactatgttgagagttgagaccttgaataggtgattagttcatgaggt

SEQ ID NO: 212440 - DNA, 201 bp, Homo sapiens
ttttaatgtacattattgttgactctagtcatctaattatatttttataaccaatactcatccccacttctccccctctcattcgcagcctctggtaatcrtcattctactctctatcttcacgagttcagttttcatttttagctcccacaaataagtgagaacgtgtgaaatttgtctttctgtgccttgcttatttca

SEQ ID NO: 212441 - DNA, 201 bp, Homo sapiens
cttctcaaaagaagacatttatgtggccaagaaacatatgaaaaaaagctcatcatcactggtaattagggaagtgcacatcaaaaccacaatgagatagkatctcatgccagttagaataggtaccattatggcttacacctgtaatcccagcattatgggaagccagggttggcagatcacctgaggtcaggagttcaa

SEQ ID NO: 212442 - DNA, 201 bp, Homo sapiens
ctagtatattgattcccacgccaaaggaattagcttttaaatcttaactattttgattatattgtagactggcacatttttgttcggggtctttatgcatytctgtggctaaaaaatctgaaagaaaagaaaacccatgcctcttattttattttattttattttattttttgagacatggtctttctgtgttgctcaggc

SEQ ID NO: 212443 - DNA, 201 bp, Homo sapiens
tcgtaaattaaacaagcctcttgataatagatttactgtaggagctgtggtggaagaaaattcctgcaggtggttcgaacagaagtttcctagaggaaagyctcctttggaatatgtccaggaaagtcatagcttgtccttgaagtcaaccacattatgccttccatttgtccttctcacagggagcttttgagtctgccc

SEQ ID NO: 212444 - DNA, 201 bp, Homo sapiens
agtgcaatggctgggttactttgcaggcatgctatttttccaaaatagtgtatttttcatgctgctagttctttagagtgaactagactagttatcttacycatctcttacaactgggaagtaagcactcactgtaggaaatggaaaaatcatgaaaaaggaagtacttttcctctaggaaggaagcgtaaagaagaaatg

SEQ ID NO: 212445 - DNA, 201 bp, Homo sapiens
aaatgtgaggcaatgaattataaggtttccataatagagatgaaaagagacagaaagataaactaccaaaagaattaaaggagcttgataagttcctctgmaaaggctaaattaaaatgagacgtaaatgatcaatgattgacacaagatagtacagcagataaaaatatggatttcggtgtctatgagaactgaattcaa

SEQ ID NO: 212446 - DNA, 201 bp, Homo sapiens
agaaaacatgcaatgaaaacataatttaattcataagattaagcagaaactcctgatggtttattattagctattgttactgagttttttcacaaagttawtttttattaccagtagctcattaaaataaatgatgtcttactattttaatcatctctattaggaacacttaatagtgttaattttattctccctttttaa

SEQ ID NO: 212447 - DNA, 201 bp, Homo sapiens
tttttttctccttaattgtagaagcccagctgagcactagcattccagaatgacatggcaaaagggtccttcccaggcctttttaggaaggtattgtaatrttcctccttagaggtttgtcgagctttattcttagccctaccctacaactattttaaacatgctcttacacaaccctttattccctccattacctcaaag

SEQ ID NO: 212448 - DNA, 201 bp, Homo sapiens
tgataatagatttactgtaggagctgtggtggaagaaaattcctgcaggtggttcgaacagaagtttcctagaggaaagcctcctttggaatatgtccagraaagtcatagcttgtccttgaagtcaaccacattatgccttccatttgtccttctcacagggagcttttgagtctgcccctcccctcttcactatcgcct

SEQ ID NO: 212449 - DNA, 201 bp, Homo sapiens
agctcccacaaataagtgagaacgtgtgaaatttgtctttctgtgccttgcttatttcacttaacacaatgacctcagttccacccacgtcgttgaaaatsagaggatctcctttttgtggctgaatagtacaccgttgttatatgtagcacattttctttatccattcatctgttgatggacacttaggttgcttcaaaa

SEQ ID NO: 212450 - DNA, 201 bp, Homo sapiens
gaataataaaaactgcttgaaatttgttaccattattgcagtgcataaataaaaaagaactagatgaatatgttttttgttttactgtgaatataaattarccacttaaaattattatttcaaattggtaatatcttttttctttccttccttattcatcgctgcttttgcaaatccgtgtaggaattttagataactatg

SEQ ID NO: 212451 - DNA, 201 bp, Homo sapiens
gtctttctgtgccttgcttatttcacttaacacaatgacctcagttccacccacgtcgttgaaaatgagaggatctcctttttgtggctgaatagtacacygttgttatatgtagcacattttctttatccattcatctgttgatggacacttaggttgcttcaaaatcttggctattgtgaatagtgctacaataaacat

SEQ ID NO: 212452 - DNA, 201 bp, Homo sapiens
ttagttattatggcaactagtatattgattcccacgccaaaggaattagcttttaaatcttaactattttgattatattgtagactggcacatttttgttyggggtctttatgcatttctgtggctaaaaaatctgaaagaaaagaaaacccatgcctcttattttattttattttattttattttttgagacatggtctt

SEQ ID NO: 212453 - DNA, 201 bp, Homo sapiens
tgcaatttgtgaattaccatagttttgctatcccacacattttggtattttgactttaaaaatagtgaaacaaatgccctgggttataatagtgaagaaasaggattgattcctagaagatcactaatcttagacaaatcagttttttatagagcttcctgatttgtgcaataaagaaaaataattgtatctcccagacct

SEQ ID NO: 212454 - DNA, 201 bp, Homo sapiens
tgtttaaccattgtagtgtcctggttaatggactattctgggtaagtaagagtgaagtatagctgtttctatacatgacttcttgtttctgaaagttctcytgtattagcaaattttctggattggtaagaaattgtgtatggagactgcatttgatgatcaaaagaattagagttcttcagaatttgagtatcttttgaa

SEQ ID NO: 212455 - DNA, 201 bp, Homo sapiens
ccctcccttgacatttgggaattacaatttgagatgagatttggctgggtacacaaagccaaaccatatcaatgtcacttagtgaaactaagtgactaccragttcactcaggcagctagcatttggtattcaaattcaggactgttgacctaaagcttctgtgtgtcttaatgttgactaatttgagctggtaatctagg

SEQ ID NO: 212456 - DNA, 201 bp, Homo sapiens
aactcattcctagtcaagcagcctacctcattttacacttcatagtaattggtccaagtaatgaacatagaaatggtagggtactttattatatccaatayataaatattatgagagaaagagagagagagaatgatgctttcttatctgtgttgttaaggtttaaagatgttgccttggttctgcctgtagcagaaaaga

SEQ ID NO: 212457 - DNA, 201 bp, Homo sapiens
ctatatgagttttaatatatatcattatggatagtctgattaaaattccaataaatgaagaggtatcattgtcatgtgcgttttctctcattttttttttkgtttattcaggccaccagtatatctttttggcttctaattttcagaggaatgttgaaaaattaaaaatggtttaaagataaagaggaatgaggcaacatt

SEQ ID NO: 212458 - DNA, 201 bp, Homo sapiens
tgcttcttaccctcccttgcttcctttcttccttttttttttcttctttcttcccaaaagtagcagaataaaacaaaagtttactaaggattgcatttatkgaatagaaaacattttagagtcctgttacaagtagcttgtggctgaatttcctcacatagtggtattatgttctctcttggcagatgggtaacgcaaaca

SEQ ID NO: 212459 - DNA, 201 bp, Homo sapiens
gcaagagaacagacctgactatgtcaacatccagctgtacctcagtcaaacagatgggatacaggtatgtggttgatgttatcgtaaattaaacaagcctsttgataatagatttactgtaggagctgtggtggaagaaaattcctgcaggtggttcgaacagaagtttcctagaggaaagcctcctttggaatatgtcca

SEQ ID NO: 212460 - DNA, 201 bp, Homo sapiens
ttaattgattactgtgtcttgactattttttggtattagtgcatctagaactacttcactgtttttccctgtgccaacagttagagatgatagacccaccwgattcttttagagtatttcattgtatagatttatctagtttactgaacaattctctaatgttagatacttttttattacaaagaatgctgaaatggatat

SEQ ID NO: 212461 - DNA, 201 bp, Homo sapiens
agcagaaactggtttttatttgagtatcctcaccacttttcactatatttgaaacacagaaagctctcaattagtcttcttcgtactgagcttacaatgcrcaaatcccctacatattttattggtttttaattctgtcttcacatcttgtgatgcagtttcacggttttggtagacagagtatataataatagtttaaca

SEQ ID NO: 212462 - DNA, 201 bp, Homo sapiens
ttttatatattgatatatttatatattgatttatatatatatatatatatatagtcaacacatatgttattttgtgaagcacttttgaaaaagatggtttkgtgccaatataccctattgttcttcttttatgcttttactctgcatgcaaggactcaccctccaccttgtgactgctgcacttccttgatagcccggcta

SEQ ID NO: 212463 - DNA, 201 bp, Homo sapiens
gtgatgttgaattcaattctgtagcaggcaatatctgacgtagagtgcttttctccatgtgaagccatccatgaaatgaaattatatttgcaaggtgcagsccagagcctgatgaacagcacatgctcagccagttaggtctctgttggttgatgctttcatacagtcctcaggctgcctttgcttcacaatgccaagact

SEQ ID NO: 212464 - DNA, 201 bp, Homo sapiens
acaagcaaagcttgagcaagggggaaggtgtgatgggcccgtgcacatctcaatttctccttccttacccaacctcctcaaaataatttttattaccctakctttgccaaaatgagttcatcttcacatctctagtaatttcctaacactgctattatttatgtgagctctaagtcagtcgagccctttgtttattgtgat

SEQ ID NO: 212465 - DNA, 201 bp, Homo sapiens
gttttgatagcagggccattttgactaatgaatgttttgatacagctattgccaagaaattattttacttttaacttggtaaaaaattgccaagcattgtygaaatgggtaacttcattgttttatctctgaatgtcttccaattggtagtcccacctctgcaggtgttagatggggagaggctcagggataggattagca

SEQ ID NO: 212466 - DNA, 201 bp, Homo sapiens
caacagggtgactatagttaataatagtgtgtattgtatttttcaaaatagctaagagtgtattttaattttaattttttattttttgagacagagtctcrccctttcacccaggctgtactccagtggcatgaacatgactcactgcagcctcaagctcctgggttcaagcaattctcctgtgccagtcttcagagtaac

SEQ ID NO: 212467 - DNA, 201 bp, Homo sapiens
agaagtagagagtagaatgctgctggttaccagagcatggggatgggagtggacagagtgtacaaagtttcggttagaagaaataggcctagtaataggcytggaaataggcctgtttttgcacaacagggtgactatagttaataatagtgtgtattgtatttttcaaaatagctaagagtgtattttaattttaatttt

SEQ ID NO: 212468 - DNA, 201 bp, Homo sapiens
aaaacgcttagcctggcgactgttctgtattggatgataaagagatggtaaacctgttagttgtaccttactatgtcagctttctgtagatgagatctttrttgttcctgctttgctttttatttatgcccagactatttacttttgtatttttaatataaaaatgctatttttaaagctacatttggccagtaagtttgg

SEQ ID NO: 212469 - DNA, 201 bp, Homo sapiens
agtgattcattaaaaacgcttagcctggcgactgttctgtattggatgataaagagatggtaaacctgttagttgtaccttactatgtcagctttctgtaratgagatctttgttgttcctgctttgctttttatttatgcccagactatttacttttgtatttttaatataaaaatgctatttttaaagctacatttggc

SEQ ID NO: 212470 - DNA, 201 bp, Homo sapiens
ctgttacttaatgttactgtctgttacttaataactgtcatgttactacatgccatttgctaaaatatagacctcctttttgaaggttgaaaatgaggtcraatatctgttaaaaccagatgactccccagtcaagtgtttcaacaacaatcacaacaaaagttgtttatatacttctggtcactaagttaatcaatgaat

SEQ ID NO: 212471 - DNA, 201 bp, Homo sapiens
ggggccggcggcatggctgtgtcctggaggagctggctcgccaacgaaggggttaaacacctctgcctggtaggatggcgggctaggctctccttgcgttytctctgtcctgcagtgattttgattcattctctgagcgtgcacgggtgggaagctggaagtggaagttttgtcttaattcgaacattctcaacttaacaa

SEQ ID NO: 212472 - DNA, 201 bp, Homo sapiens
tgctttctgcagttactgatttaggttccattgaaagcactgtgtcgaagaatttacctgtggtttctattcatcaggtaataattattttcaatttttgwtttctgtctctcatgtctgattggtttagttcatctggctctccatgaatgtcctgcttttctggaaaaccttcttgctgtataaccaagggccagagta

SEQ ID NO: 212473 - DNA, 201 bp, Homo sapiens
tgaccacttcataatattttccatgatactgcaagctgtgcaatttaaagttattggtggacatacaagctttgtgaataaaataaccacaaagattgtawatatttgaacaaacttgagagttgtaaccaaataaaatgcttatcagagcatggtacctgtgtttaaaaattcagctcaattcaacaaagatttactgaa

SEQ ID NO: 212474 - DNA, 201 bp, Homo sapiens
acagaaagaagtcgttcaaagggggttttagtgagaggaaaagggaagactattcaaggcttttgaaggagctggtatttggcatgattcttaaaagagcwatagggtgagacctctagcttctagagccaggacagggctttactactgtccttaactgtgtgctgaccttgccttatttgttcagctaggattgtgtct

SEQ ID NO: 212475 - DNA, 201 bp, Homo sapiens
agcagaataaaacaaaagtttactaaggattgcatttattgaatagaaaacattttagagtcctgttacaagtagcttgtggctgaatttcctcacatagkggtattatgttctctcttggcagatgggtaacgcaaacattagaaaattcaaataatttttccataacttgaaagaggtaatagtgggattttactggtc

SEQ ID NO: 212476 - DNA, 201 bp, Homo sapiens
cacagctgatctaggatgtagaattcagtggtaatccagagaatagtgttcctattattattaataggaattattgctatatgacaggcattcaattaaaygatttacatacataattatttttgtttttattaaatggacagaatctgattactaatattcctcagttcctatcccaatttgttaatttaaacatgatcc

SEQ ID NO: 212477 - DNA, 201 bp, Homo sapiens
agtacagtagatggagtggattacccaagtagatttctcttttaattgaatgaataccttattgctcttctagaagcagccattctttccagtttcaaacrtatggtcagagattattgacttgattatcattttaagtgtacaaaaatgttttgttaatttcttcgttacatatgattagtattgattaatgtctgagat

SEQ ID NO: 212478 - DNA, 201 bp, Homo sapiens
  misc_feature (1)...(201): n = A,T,C or G
tagtacagtagatggagtggattacccaagtagatttctcttttaattgaatgaataccttattgctcttctagaagcagccattctttccagtttcaaanatatggtcagagattattgacttgattatcattttaagtgtacaaaaatgttttgttaatttcttcgttacatatgattagtattgattaatgtctgaga

SEQ ID NO: 212479 - DNA, 201 bp, Homo sapiens
ccacttcctggcttaaaacacaatcattctgtgctatggactgaatatttgtgtccccccaaaattcatatgttgaaatcctcacccttaaggcaatagtrttgggaagtggagcctttgggtgacttggtgattaggtgatgaaggtaaagccctcatgactggcattagtgcctttatgaaagaggcttcagagcacta

SEQ ID NO: 212480 - DNA, 201 bp, Homo sapiens
gaagtgacacagaccatgaagaggagacttgggttcccattcttgcagctttatgaactagcagtgtaaacagggcaaaaagaaggttgaactggatggtwtgtaaggcgccatgaaagaactacagattttttattctaaagcactaaagaattaggctttgtatgggcatcatttggtttgattaaaattttccttggg

SEQ ID NO: 212481 - DNA, 201 bp, Homo sapiens
gatagtctgattaaaattccaataaatgaagaggtatcattgtcatgtgcgttttctctcatttttttttttgtttattcaggccaccagtatatcttttkggcttctaattttcagaggaatgttgaaaaattaaaaatggtttaaagataaagaggaatgaggcaacattttggaatgattgtttttgatgaggagtag

SEQ ID NO: 212482 - DNA, 201 bp, Homo sapiens
atgcttaggagacatgagaaaaagatctttatattgaatatcctatattcactatatgagttttaatatatatcattatggatagtctgattaaaattccmataaatgaagaggtatcattgtcatgtgcgttttctctcatttttttttttgtttattcaggccaccagtatatctttttggcttctaattttcagagga

SEQ ID NO: 212483 - DNA, 201 bp, Homo sapiens
tcaaaagttgaaagtcatagttaaaagacatgccgagttagctaagattgctagtattttgaggacagagatagaatttaaaaacaattttatagattcarttagtaaaagttaataagaaataggattgagttcaggaggagtaaaatagacaatatgtttaagtaggctatgcttaggagacatgagaaaaagatcttt

SEQ ID NO: 212484 - DNA, 201 bp, Homo sapiens
ttggttgacctttggctgcctccctgatcctctggagagaggaaggctatttactgctatttgctattggcaaaaagtttgtggcaatttggctatgattsttgggtggaattttagtttgaggtggaacatatttcattcaacaaaacattacttaatactttttattaatcttcactgaatcttggaatttcaacagat

SEQ ID NO: 212485 - DNA, 201 bp, Homo sapiens
attttagtgcacccatcacccaagcaatgtacactgtacccaatatgtagttttttatccctcacccgacttctaacattcccgctccagagttcttaaarttcattatatctttcttatgtctttgagtcctcaaaggttagcttagctctcacttataagtgagaacacaggatatttagttttccattcctgagttac

SEQ ID NO: 212486 - DNA, 201 bp, Homo sapiens
aagaaatgtcatctgagagccagtgcctggaatcagggaaccttgcttggtgctctaccccactgtggctgaattggtatgtaacctgcaagacaaagtcycattcactcttccctttccttttcttacgcagaaggagtccctctccataacaaccacagttgggaatttgctgggtcacacctaaagccagtacatctc

SEQ ID NO: 212487 - DNA, 201 bp, Homo sapiens
caaagtcccattcactcttccctttccttttcttacgcagaaggagtccctctccataacaaccacagttgggaatttgctgggtcacacctaaagccagwacatctctcagtctcacccaaggcccatggcgagtactgcgtgggtaccactgctggttattcaagggccaatggctctttagtcagaagatgattaatc

SEQ ID NO: 212488 - DNA, 201 bp, Homo sapiens
agttggtatggatatactctaagtttgccctttaattcttctttttagaaggaatttgtttttctaagattaatatgcatacttctaaggaaaataaatascaaattttgacaaaccattaatttctttaaatccctagaaataatgtgcttctttccctttttaaataattttgtaattacattctaaattcttttcaag

SEQ ID NO: 212489 - DNA, 201 bp, Homo sapiens
ggctctttagtcagaagatgattaatcttgccaggactgggtccttctcttcaaggcagcaagtttcttgcttgcccagggtgtgtctagaaatgtcattygacagttagtgcctggaatcagggcctcaggcctctgcccagggccctatcctactgtggctgagctggcatcccagaggcaggacaaagtcctctttat

SEQ ID NO: 212490 - DNA, 201 bp, Homo sapiens
tctccctttgtgattttgatatactattctctcagcctaggtgtaaaccctactcataaaatagggcttaagccctactcttagtttagatggaaggacarcatgagaaaatgcaggtgaagtgcttagcacttggtacataggcattcagcaaattgataactattactataaatattaaataatggtaattagtattaa

SEQ ID NO: 212491 - DNA, 201 bp, Homo sapiens
ctgtctgacctctgctttttcatcatactacgtagcttttctaaacgacttcactggtccatgtcagatacttatactactggttagtattaatttttacmagtgctgcccaacagaaacataaagcaagtcatatatataatttaaagttttctagtagcacattaaaaaaaggaaaaagaaaccagtgacatttattta

SEQ ID NO: 212492 - DNA, 201 bp, Homo sapiens
gtcattaatttatctaagctattttggaataggtattttcagtctgtatattaccttttattggaaaagaaactccttctacagttttactatctatgaartagtgtttaattttatgtcctaggcttatcttttctaatcttataataagtgttgcattatttcatagagtaacaatttgcaggcacttttcaaattgca

SEQ ID NO: 212493 - DNA, 201 bp, Homo sapiens
ccgttccaaatggaagaaattggccaaaacgaagtggctacaggccccatggaagtccgaaatccagtggggcattaaaatcttaaagctctgaaatgatstcctttgactccatgtctcacatccagttcacactgatgcaagaggtgagttcccatggtcttgggcagcttcatccctgtggctttgcagggtacagcc

SEQ ID NO: 212494 - DNA, 201 bp, Homo sapiens
acataacttgatgaacaacttggagaaaactctttagatatagaatggtaaaatttgctctggatcacgaggtatttgtattaatataaaaatctaagaaytggaaatttattgcaataacctagaaagccataactgaactttggattttagctttgtgagatagtataagctaaaataacatcttatttcttaaaaaaa

SEQ ID NO: 212495 - DNA, 201 bp, Homo sapiens
taattataattcaataaacaagaaaaggtttcttctaataaacacatgaggtctgataactttttggttttgttttctagtatttccccattaggtgtaasttaatgaataggacgtttttcagtggaagctttatctcatctattacataacttgatgaacaacttggagaaaactctttagatatagaatggtaaaatt

SEQ ID NO: 212496 - DNA, 201 bp, Homo sapiens
ctggctctccatgaatgtcctgcttttctggaaaaccttcttgctgtataaccaagggccagagtatcactacctccaccagatgttgggggtaagtaagstgaacttggataatctggtggaatgggtttaacactggcagacattgctacaggtttggtcagttccattcattaaagaaatgtgcactcttcactttga

SEQ ID NO: 212497 - DNA, 201 bp, Homo sapiens
cagaaggtaagaaaaaacagtcctactttcaaattccagcataaaaatcaagtgtaacagtcgcatgttagtttgtttacttttcatagtctgacttttgrctggagtgatttcttgtaagatgatggtaaaagacatgtcacctgccaagatgatctgtgagttattctgcaataccagataagggcagaggataatagt

SEQ ID NO: 212498 - DNA, 201 bp, Homo sapiens
ttatgatgctttccaaagcctcttccaattccaatgtttttatgactgtaaaactcatattatttaatgtggattctaatagtttgagtttaagattttcwtaatatattcagaaagtgaagtgagactatagaagtccaatcatatttcctcaatactttaaagctgtttgaagatgcaaccagaaaacatggattcggg

SEQ ID NO: 212499 - DNA, 201 bp, Homo sapiens
tgctaaatgaaagaagagcagaatgatggagaacttgcaggctatgtgctcctccagtgaaattccactgatatgaagacatttggttgacaaataattgmatcaccatataataattgaacacatacaaattttaagaaaggactatgaaagaccacaggaagcataatgctgccttctgtaggagactgaatcaaaagg

SEQ ID NO: 212500 - DNA, 201 bp, Homo sapiens
tgtgctaaactaatgtcatgtattttgttttttattatgacaatgccccacttgcaggaaccaatttctataataacaggctataataagttaagcagctrtaacctaaaatacggtgccttgaataaagcagtttatttctcataacattaaagaagtgaaccatataagtgggtagctacaactcatttacaaggtcat

SEQ ID NO: 212501 - DNA, 201 bp, Homo sapiens
attataaacagaaaggtcacagaagaattaaaagtaacagacatatgaaataataccccatcctacttataaaaaataatgaaaatttacaaaatttagtytgagtttttgggaaacaggcactcctagcctacagttgggtttgtaattaataaatatatttttagagggcaattggcagcgtgtattaaaagcattaaa

SEQ ID NO: 212502 - DNA, 201 bp, Homo sapiens; identical to SEQ ID NO: 37546

SEQ ID NO: 212503 - DNA, 201 bp, Homo sapiens
agtgagcaaccttcggtgatatataaagactcatatttagttttcatttaaggcctagataattcctgaggagaaaatgacaatacaatgtaattctcttrttgcaaagtaataagagaaatgaatataaagttctgcctgagggaatgagaaatacttcacaaagaatcaaatttttatcctaagaagaatgagtaggaa

SEQ ID NO: 212504 - DNA, 201 bp, Homo sapiens
atgactgaagtaaactattttacttcctctaagtctttccaatatgttttcatgttctgacctaaaagcaatactctgatctaataagtttaagaaaatayttaagtttaatcaggtttcttgaatttaatacttctcagagacttttatacattaatgtaccctgtgactttttaaggaatggttatagtatttttagta

SEQ ID NO: 212505 - DNA, 201 bp, Homo sapiens
tgtgaggtatgtgtggactccaagagaaatctggagagtggctcttctctttggaaaactttactttgttcaggtaaaggaaagctcctgaaaacaagaarcctgaaaaataatttaagtgattctaaacccttaaatacactccaaagaagcaattttaggaagcttccactttggcttcaagagttggccaaatctgat

SEQ ID NO: 212506 - DNA, 201 bp, Homo sapiens
cacatactttatgttattaaatgctcagaatgttatgagaataaataatattgttaaacctctttcagaagtgggaacactgatgtttagaaagattaagyagcttgttgaagtttacttaactgatggatcctagattcaaacctaggcattctgattcagaaactcctaagtttttactacaaggctttatttttttgg

SEQ ID NO: 212507 - DNA, 201 bp, Homo sapiens
cgggcctcaggaggaggacattaaggatatactgttagaggatagagatatttgtgcaatatagtgaagtgttaaggactgctgatacccaagtatcttcycttttagaagccactttcgtggaagtcttccttcacccacactgatgtggcagagggaaaagcttggtcatcttgctactggtgggaggcacttgctcct

SEQ ID NO: 212508 - DNA, 201 bp, Homo sapiens
aatgtatgtgtgcatgtgtctttatggtagaatgatttatatccctttgggtatatattcaatcatgggattgctggatcaaatgaaagtttggttttaakttcgttgagaaattgcaaaactattttccacaggggctgatctaattcacattcccatgaacagcatgtaagtgttcccttttctctgcaaccttcccgg

SEQ ID NO: 212509 - DNA, 201 bp, Homo sapiens
ttttccctgaaaatttgtaccttactgctccttttgagtgcttttaaaatgcagttgtcaagttgagctttattccttttcagtagaaaatataagtaatyactatttcatagtgtctcctgctgaaagtgagagttggtagaatgtctactttttatattgcaatgttcagatggttgccactcaggtctgcctctgact

SEQ ID NO: 212510 - DNA, 201 bp, Homo sapiens
tagttcctggcctgacaggggtctgcatggtggtggtgctattcctcatgatcacagcctctacatatgcaataaggtaagtgtcagaatcaattattttkatgtgtatctgtcaggttatttagaaaaagtcttgagtaatcaaaatgtttaaccattgtagtgtcctggttaatggactattctgggtaagtaagagtg

SEQ ID NO: 212511 - DNA, 201 bp, Homo sapiens
tcctgttcccctagggctacagcttggtaataatgcagtatgtttccaagttggcatatgttttgtaatggcatatcaaaggacatcactttctagcctgyaggtcctttctacctgccccctaatgtgctaaactaatgtcatgtattttgttttttattatgacaatgccccacttgcaggaaccaatttctataataa

SEQ ID NO: 212512 - DNA, 201 bp, Homo sapiens
ttttgctgaaagttccaagtagcagccaaaacataccaaaaatacgacattaaaaaaaatcctgttcccctagggctacagcttggtaataatgcagtatrtttccaagttggcatatgttttgtaatggcatatcaaaggacatcactttctagcctgtaggtcctttctacctgccccctaatgtgctaaactaatgtc

SEQ ID NO: 212513 - DNA, 201 bp, Homo sapiens
cttgcctaactttatttcatgtctcttgtaacattttgctgaaagttccaagtagcagccaaaacataccaaaaatacgacattaaaaaaaatcctgttcycctagggctacagcttggtaataatgcagtatgtttccaagttggcatatgttttgtaatggcatatcaaaggacatcactttctagcctgtaggtcctt

SEQ ID NO: 212514 - DNA, 201 bp, Homo sapiens
aacaaaaactcccattcagaaacataaaaactgaaaagcacccagctgtttctggctcacagtaaatctcaaattctcctgggtagaaatggtgaatactstccatcctgctgatgtattagttgtttgggttaaccagcctcttgttctgctctcagtgagtattttcttcgtccattgccccctgcagctttgacttta

SEQ ID NO: 212515 - DNA, 201 bp, Homo sapiens
ggataactgcaacaaaaactcccattcagaaacataaaaactgaaaagcacccagctgtttctggctcacagtaaatctcaaattctcctgggtagaaatsgtgaatactctccatcctgctgatgtattagttgtttgggttaaccagcctcttgttctgctctcagtgagtattttcttcgtccattgccccctgcagc

SEQ ID NO: 212516 - DNA, 201 bp, Homo sapiens
gactaagttactgtaacacgaaaattccaaaaatgatggtggattcatcaaaatgatagttttattctccctcgtgtaagagtcaatccattcttggctarcagggacctttgctccaggaggtcatttagcaatccagtttcttattgagttgctcaactatctcctagagcatagtcttatttgatcaaagagagttca

SEQ ID NO: 212517 - DNA, 201 bp, Homo sapiens
taattcaattatagcatttagagtattgactaagttactgtaacacgaaaattccaaaaatgatggtggattcatcaaaatgatagttttattctccctcrtgtaagagtcaatccattcttggctagcagggacctttgctccaggaggtcatttagcaatccagtttcttattgagttgctcaactatctcctagagca

SEQ ID NO: 212518 - DNA, 201 bp, Homo sapiens
tgatctcctcatagacagtgacttagcttgtctttccccactgcagaccaaattctcttaatgtattttgtgtctagcagggaagacagacattaatgatktctaacttaaaaagtgctataaaggaaaaagttaatgatatttaagagtttataatgaggggacctaatattcctgtgttagggttctctgggaaaatag

SEQ ID NO: 212519 - DNA, 201 bp, Homo sapiens
ctctctcaagacagtagcagggacaatcataaacctcaccctacttgttttccatttttcagggatcactattcttcatcacttcatgtccaatgtcttgraagccattgttttacatattttgtctgtttttatagttaatttaggaggaagactaaatatatttctggctttactattttatctggaagcaaaagtcca

SEQ ID NO: 212520 - DNA, 201 bp, Homo sapiens
tgaattgacattaaacattgtcacaaatcagtttccatatgtgtgtggatctatttctgcagtctttaatcagtttcattggtttgtttatctatacttayttttatatctatgtttatcaataccataaatatacatactgcctcaacatagaaactctctcaagacagtagcagggacaatcataaacctcaccctact

SEQ ID NO: 212521 - DNA, 201 bp, Homo sapiens
ttgaggacagtaaggggtatgaaggttccactgaataccaagagcctgagaaactgcttgggtgatttgactaataaaggccggtccattattggactatrtagaggtgggaaggccaaaccaaggaattatgtctgacggaagggaagaaatgaccatggttaccttctcagaccctgtgggaaaggcctctatccatcc

SEQ ID NO: 212522 - DNA, 201 bp, Homo sapiens
tggcagtgtaaacaagggcaggatatttatgagtagttgagaatgatgaataggagtttgactagacagaagatagtagggatgacaagtttttggggtgyggttcaagttgggctggtgtctagaatgagactggggcctaataaaaaggagcatccatacaggagctcaaataggctataccctgtagcatcctgagga

SEQ ID NO: 212523 - DNA, 201 bp, Homo sapiens
aaaagtgtaaactggcagtgtaaacaagggcaggatatttatgagtagttgagaatgatgaataggagtttgactagacagaagatagtagggatgacaartttttggggtgcggttcaagttgggctggtgtctagaatgagactggggcctaataaaaaggagcatccatacaggagctcaaataggctataccctgta

SEQ ID NO: 212524 - DNA, 201 bp, Homo sapiens
tttcttatgaagacaacagtcatactggatttgagcaatccctaactgacctcatcttaactcgattatacctgcaaagacccaacttccaaatgaggtcrcattcatagatgccagggtataggacttcaacatatatttctgcaggacacaatgcaacccatagcagatggagagcatcagcatgatgggattgctaat

SEQ ID NO: 212525 - DNA, 201 bp, Homo sapiens
acatttgattattatctatctatactctttagattatttgcatctattatatttacatagcagaaatataaaatacttgtattcatatgtctccctaaatmcatattcagtgacctcaccttggtagtttgaaattggccacagagtggatatatttataatacagaaatcagctaccagtacaaatcaggtcttttttta

SEQ ID NO: 212526 - DNA, 201 bp, Homo sapiens
caatctgacttttgtttattttgaaccccttttacaatgcctacctatttaaccatctgatttgctttgcgtgacataggggcatagagtgagctaggtargtttctgaaccctatgctttgactatacttagttaatctcttacctgaatgaaagccttaggtttctcatctgtgtaatataaataaaaacacttacctt

SEQ ID NO: 212527 - DNA, 201 bp, Homo sapiens
gtaaacattaataatcagatgcatgggacaactgaagtaaagagagatgtgtatggcgtatacccagtgagaggttcctagaatgtagtaaatttattctrataaaagaatctgacaattgaagaaaggaatgcaaactggcctatggcatagttaccgacttaccatttgtgccaacgaatccttgggtgacctcactgt

SEQ ID NO: 212528 - DNA, 201 bp, Homo sapiens
cttttacaatgcctacctatttaaccatctgatttgctttgcgtgacataggggcatagagtgagctaggtaggtttctgaaccctatgctttgactatayttagttaatctcttacctgaatgaaagccttaggtttctcatctgtgtaatataaataaaaacacttaccttgtatgattattttgttttgaagtttaaa

SEQ ID NO: 212529 - DNA, 201 bp, Homo sapiens
tttgtttaactataacttggactgtcattttgtaactatcatttatatttagtcttatctaggtaattagttattatggcaactagtatattgattcccaygccaaaggaattagcttttaaatcttaactattttgattatattgtagactggcacatttttgttcggggtctttatgcatttctgtggctaaaaaatct

SEQ ID NO: 212530 - DNA, 201 bp, Homo sapiens
ttttaatttttatgaatacatagtaggcatatatgtttatgggatacatgagatattttgatacaggcatacaatgtgtaatgatcacatttgcataaatragatattcataatctcaaatatttatcttttctttgtgttacatacaaattgtactgttttcattattttttaatgtacattattgttgactctagtcat

SEQ ID NO: 212531 - DNA, 201 bp, Homo sapiens
ccacgccaaaggaattagcttttaaatcttaactattttgattatattgtagactggcacatttttgttcggggtctttatgcatttctgtggctaaaaawtctgaaagaaaagaaaacccatgcctcttattttattttattttattttattttttgagacatggtctttctgtgttgctcaggctggtctcaaaagtct

SEQ ID NO: 212532 - DNA, 201 bp, Homo sapiens
gtactgttttcattattttttaatgtacattattgttgactctagtcatctaattatatttttataaccaatactcatccccacttctccccctctcattygcagcctctggtaatcgtcattctactctctatcttcacgagttcagttttcatttttagctcccacaaataagtgagaacgtgtgaaatttgtctttct

SEQ ID NO: 212533 - DNA, 201 bp, Homo sapiens
ttaactattttgattatattgtagactggcacatttttgttcggggtctttatgcatttctgtggctaaaaaatctgaaagaaaagaaaacccatgcctcttattttattttattttattttattttttgagacatggtctttctgtgttgctcaggctggtctcaaaagtctggcctcaagtaatcctcccagctcagcc

SEQ ID NO: 212534 - DNA, 201 bp, Homo sapiens
taactattttgattatattgtagactggcacatttttgttcggggtctttatgcatttctgtggctaaaaaatctgaaagaaaagaaaacccatgcctcttattttattttattttattttattttttgagacatggtctttctgtgttgctcaggctggtctcaaaagtctggcctcaagtaatcctcccagctcagccc

SEQ ID NO: 212535 - DNA, 201 bp, Homo sapiens
cagatcatggtgaaaagaatttttcaatagtggtaggaccacagttttacagccatttagaaaaataaataaaatgcaattttaaaacgctagatccatgytttatgaaaataagagattcccctcccccccttttattttgagcatttactttagaaaacttgtaattatacatacttgatactatttctgaaaaaaaaa

SEQ ID NO: 212536 - DNA, 201 bp, Homo sapiens
aaatgtggaatttcagatcatggtgaaaagaatttttcaatagtggtaggaccacagttttacagccatttagaaaaataaataaaatgcaattttaaaamgctagatccatgttttatgaaaataagagattcccctcccccccttttattttgagcatttactttagaaaacttgtaattatacatacttgatactatt

SEQ ID NO: 212537 - DNA, 201 bp, Homo sapiens
gaaatttaaaaaatattattggtttatcaatgaatttgatagagctaggatggaatataaaactcaaaaatacatatgtgaaggtagtttatgataaatgyggaatttcagatcatggtgaaaagaatttttcaatagtggtaggaccacagttttacagccatttagaaaaataaataaaatgcaattttaaaacgctag

SEQ ID NO: 212538 - DNA, 201 bp, Homo sapiens
caaatgtttcaaaactgttattaggaagactacagtttctccactgaattgacattaaacattgtcacaaatcagtttccatatgtgtgtggatctatttmtgcagtctttaatcagtttcattggtttgtttatctatacttacttttatatctatgtttatcaataccataaatatacatactgcctcaacatagaaac

SEQ ID NO: 212539 - DNA, 201 bp, Homo sapiens
tgtattattatatatggtatgtattacctattatgtgtattattatatattatatatagcatatctatacatggacatatacacacacgtaactttactgrgtcatagttaacattaaaacatctcacaaactgcatttatgtaaaaggtacaattgggtaagttttgacatatggatacacccatgaaaccatcaccaca

SEQ ID NO: 212540 - DNA, 201 bp, Homo sapiens
ccttctaggttacgcttgaaagtgctatcactttggaaagcctgaccatctccttcctgcctagatgtctaacaggtgcattgcacagtagcctttttatrccttataatacaaccaatatctaactttttcgaaagaatccacagattccaaagaagaaagcaggaagtcatctatttaccactccgtaggttcaaatta

SEQ ID NO: 212541 - DNA, 201 bp, Homo sapiens
ttgtcatgttctgcctaattttacacctgattttccattttctctgctcttgttctagaaaaacagttggtgttttctgttgtggacccaattcactatcyaagactcttcataaactgagtaaccagaacaactcatatgggacaagatttgaatacaataaagagtctttcagctgaaaacttttgccatgaagcagga

SEQ ID NO: 212542 - DNA, 201 bp, Homo sapiens
aaaatggaaacataatcctatttcaaaaaaatttatcaaacattttaagtttataaaaagttcttgcttttttgttttctctgaatttttcttaaactatkggtgtctgctattatttatctattctacactcaagtatagagtgtcttctgattctgtaaaaattacataatttgttagtaattaaaaatacagtattcc

SEQ ID NO: 212543 - DNA, 201 bp, Homo sapiens
ggatttgtgtaggtaatggaaaattacagtcaaaggtggttgttctctggcgggcaggggtgggggtcacaaggtgctcagtgggggagcttctgagccargagaaggaatttcacaaggtaatatcatcagttaaagcaggaaccggccattttcacttagtctgtgactcttcagttacttcaggccatctggatgtat

SEQ ID NO: 212544 - DNA, 201 bp, Homo sapiens
acactcttttaaaaagacatcattaggaaaatgaaaaaacaagacacagaatgtgaaaaaaatttgttatgcatgtatttgaaaaaaaaaacttgaatccmaaatatataaatgtaaaacagacacactgcaataagaagattttttaaccaaagcaataaagaggagaaaaatttgaacagatattttacaaaagaagct

SEQ ID NO: 212545 - DNA, 201 bp, Homo sapiens
agagagtcagtgaagggagacaggggtggggccattttataggatttgtgtaggtaatggaaaattacagtcaaaggtggttgttctctggcgggcagggrtgggggtcacaaggtgctcagtgggggagcttctgagccaggagaaggaatttcacaaggtaatatcatcagttaaagcaggaaccggccattttcactt

SEQ ID NO: 212546 - DNA, 201 bp, Homo sapiens
taaatagaacagagaaacataactattaaatatattaattaattgggatttacaaacattacactcttttaaaaagacatcattaggaaaatgaaaaaacmagacacagaatgtgaaaaaaatttgttatgcatgtatttgaaaaaaaaaacttgaatccaaaatatataaatgtaaaacagacacactgcaataagaaga

SEQ ID NO: 212547 - DNA, 201 bp, Homo sapiens
agagaccaccaaacaggctttgtgtgagcaataaagctttttaatcacctgggtacaggcaggctgagtctgaaaagagagtcagtgaagggagacagggrtggggccattttataggatttgtgtaggtaatggaaaattacagtcaaaggtggttgttctctggcgggcaggggtgggggtcacaaggtgctcagtggg

SEQ ID NO: 212548 - DNA, 201 bp, Homo sapiens
ggtggaagaagatgtagttaatgcaataaatgtttttcaagaaatttgggacattttcaggtaatttttttgcaacagaataaaaagcctaggaatagccrcacatgtatatggtcaactgattttcaacaaattacttttaagcaaatattgctagaacaacaggattctatctggaagaaaatgaatatctattaatcg

SEQ ID NO: 212549 - DNA, 201 bp, Homo sapiens
tgtaggctgaagtagaacttgactctacaaggttaggttttgcattcacattcattcatattttaaacatcagtttctgtatgttttacttatgctttatkaaatctcaattataaatactaactgttttcttaaaaccactctatctcatagatattttaaattgttacaatagttggctttaaataaaattttaaggca

SEQ ID NO: 212550 - DNA, 201 bp, Homo sapiens
caattctcctgcctcagcctcccaagtagctgggattacaggcatgcaccaccacacctggctaattttgtatgttttttagtagagacggggcttctccstgttggtcaggctggtctcgaactcctgacctcaggcaattaaactactaaaattaagtatttgagagcatgaaagataatttaaaaagcatgtactgta

SEQ ID NO: 212551 - DNA, 201 bp, Homo sapiens
ttttatgttgcatgtatgaggacacgggtattacgttcctttagttcacaaattttcacagtgagaagaatgacaattgaggtgcctaatctgttcttagrctagatttaaacgatgagatcttgaaactcaagcctgagtctgcttccataattagttgagaatctggggagacttgggagggagagggtatattctgca

SEQ ID NO: 212552 - DNA, 201 bp, Homo sapiens
aactattttgattatattgtagactggcacatttttgttcggggtctttatgcatttctgtggctaaaaaatctgaaagaaaagaaaacccatgcctcttattttattttattttattttattttttgagacatggtctttctgtgttgctcaggctggtctcaaaagtctggcctcaagtaatcctcccagctcagcccc

SEQ ID NO: 212553 - DNA, 201 bp, Homo sapiens
actattttgattatattgtagactggcacatttttgttcggggtctttatgcatttctgtggctaaaaaatctgaaagaaaagaaaacccatgcctcttattttattttattttattttattttttgagacatggtctttctgtgttgctcaggctggtctcaaaagtctggcctcaagtaatcctcccagctcagcccct

SEQ ID NO: 212554 - DNA, 201 bp, Homo sapiens
ctattttgattatattgtagactggcacatttttgttcggggtctttatgcatttctgtggctaaaaaatctgaaagaaaagaaaacccatgcctcttattttattttattttattttattttttgagacatggtctttctgtgttgctcaggctggtctcaaaagtctggcctcaagtaatcctcccagctcagccccta

SEQ ID NO: 212555 - DNA, 201 bp, Homo sapiens
tatgcatttctgtggctaaaaaatctgaaagaaaagaaaacccatgcctcttattttattttattttattttattttttgagacatggtctttctgtgttkctcaggctggtctcaaaagtctggcctcaagtaatcctcccagctcagcccctaagtgctgggtttacaggcatgatccagcatgctcagacccagctct

SEQ ID NO: 212556 - DNA, 201 bp, Homo sapiens
cttgaaatctattttgtctgatattaagtatagcttctcctcttcctttttggtttccattggcatggaatatgtttttccatctgtttattttcagtctrtgtgtatcttcataggtgaagtgtgtttcttgtaaccagcagatcattgggtctttttgtttctccattcaaccactgtaagtcttttgattggacagtt

SEQ ID NO: 212557 - DNA, 201 bp, Homo sapiens
ttgttcaagttcatgctgcaaaatcatcttcacttaataattctagcattcaccacccaaaaactcataagcaaggcttttgtattgccacacagtttggrattttttttctcagaattaggaagcaaatgtagccagcaattattttagatattgctttcagaaatgaatttttcccatatctgtcagatttggctcaga

SEQ ID NO: 212558 - DNA, 201 bp, Homo sapiens
gtgtttcaaatactgccctggttgtaattattgttcaagttcatgctgcaaaatcatcttcacttaataattctagcattcaccacccaaaaactcataarcaaggcttttgtattgccacacagtttgggattttttttctcagaattaggaagcaaatgtagccagcaattattttagatattgctttcagaaatgaat

SEQ ID NO: 212559 - DNA, 201 bp, Homo sapiens
tgacctggcttgggtccctcctttcccggaggaaaaacttctccttttccggagtagttgtcagtgaagtgtttcaaatactgccctggttgtaattattrttcaagttcatgctgcaaaatcatcttcacttaataattctagcattcaccacccaaaaactcataagcaaggcttttgtattgccacacagtttgggat

SEQ ID NO: 212560 - DNA, 201 bp, Homo sapiens
tgacctttgcatacaacagcattggtgcttgcagccaagagatgacaaatattttttcccatcatttgagaaaagctgattgaataataaaaatagtagtwaaaaaaacctaccaccaataccacaaattattattttattgtattatattattatgtataatattgtaaatagtaaatagcaaaatcaatttattgaatg

SEQ ID NO: 212561 - DNA, 201 bp, Homo sapiens
ttctctttttcagttaaggaaacttagggaaatgacctattttacttcaggtactcaaggaagttgtaaatgttgatcctaagcccttaagaccctaggcwatacattagtcagctgcacagagattgtggcagaatcagctacctaatttgcagggcccactgcaaaatgaaatgtgggattctttgatcaaaaaattat

SEQ ID NO: 212562 - DNA, 201 bp, Homo sapiens
aattttttaggggaattagctcccatgacaggctttctgcaacctgaaaacactgaaatgctgatagcatcgcttagtccaactctgaaaacctcagaacmaggtaaacaaatggtgtaactcaatctgaggctaaaggcctgagaactcagggagttgctggtgtaagttctggagtccaaaggccagagagcttagagt

SEQ ID NO: 212563 - DNA, 201 bp, Homo sapiens
gaaaagtcatttttactgttttaacaggtagattgtcaagtttagactcataacacagtctttcaaaggtttctactggacagaaacagcctcattttcayaatcgtagtcaaagcagaaaaacatacacagaactaaatgcctagcatctgataagatgaccttttgctgaaaaatcatttggaacagcacttgttctgc

SEQ ID NO: 212564 - DNA, 201 bp, Homo sapiens
ccagtcaagtgtttcaacaacaatcacaacaaaagttgtttatatacttctggtcactaagttaatcaatgaatatttattgagcacttattataagtcayaagcactattttaggcagtagaaaaatagcagtggagcaggataaacccttgactttaagaagtgcacattctggtggattctacagaagttagagaact

SEQ ID NO: 212565 - DNA, 201 bp, Homo sapiens
attgtcatattactatcagcattttggtcaaagccattcaacaagtctctaggaagttgcaaactttcccacatctttctgtcttctgttccaacctctgmctgttacacacttccaaagtcacttccacatttttgggcatctttatagcaacaccccactctctccagtcccaatttacttctataaagaactgcctgg

SEQ ID NO: 212566 - DNA, 201 bp, Homo sapiens
ttattttttgtttaaaattattctagttagtgaagcctaaaagcagttaattgaaattgaaactgaaggcactgcttagtttcataagaggaaggagagcmtgagggagatttagtactatggtgtttaaaaccaaaacagaaagagtgctgaaagttaaccctgtcctgttgcattaattactgatgtttagtgtatact

SEQ ID NO: 212567 - DNA, 201 bp, Homo sapiens
agcgtaaagaagaaatgatttggattaggtacattagggaagggcaccttttgttaggcttctaaaactgtctactgggaaagtgaggaggtgcgagtacwcaagtgctgagaacccatagactaattctcttatttttcatgtggtgctttataagtgaaatttgtttctactgtactgagatttcgaatgctgttattt

SEQ ID NO: 212568 - DNA, 201 bp, Homo sapiens
tttctctcaaatttatgaaattataattgaagtacactaattatacacatgtatacaatttgattggttttgatacatacatatatacacatacatacacmatagtggaaccatcatcaaaagttagatgataaatatttttattatcacagaatatttttgtgctcttttataacgcatcttgccctctacccctcctag

SEQ ID NO: 212569 - DNA, 201 bp, Homo sapiens
gttttgagtgagtttcttaatcctgagttctaacttgattgcactgtggtctgagagacagtttgttgtgatttctcttcttatacatttcctgaggagtkctttacttccagctatgtggtcaattttggaataagtgtaatgtggtgctgagaagaatgtatatgctgttgaattggggtggagagttctgtagatatc

SEQ ID NO: 212570 - DNA, 201 bp, Homo sapiens
gtggggtgttttaagccactaagcactgagttttggagaaatttattacttagtaatacataatgaaaccccaaacagaagatgtagaaaggtcatttccrtatcattctgtgaagcatccttttctatttagatcaaataagtgttccaaattcatttaattctatttcaattccaagttttgctgggcatgtatgaaaa

SEQ ID NO: 212571 - DNA, 201 bp, Homo sapiens
atgtctttttcccttcttgttttttgctttaaaattatttagcatttgtttatgaaagctacaacaatacatacaagaatgctgtctttttgattcctacrtgatttgctatattaaaacaaattatgtgtttattgtttgcttttaaaatcaattcactagaaatgcattagagatctattatgtgcaagaaaagtatta

SEQ ID NO: 212572 - DNA, 201 bp, Homo sapiens
atttattacttagtaatacataatgaaaccccaaacagaagatgtagaaaggtcatttccatatcattctgtgaagcatccttttctatttagatcaaatragtgttccaaattcatttaattctatttcaattccaagttttgctgggcatgtatgaaaagtgaaggtctagctgttaacatgttgcctccattatcaga

SEQ ID NO: 212573 - DNA, 201 bp, Homo sapiens
attggaattatattctgggaatagaaataatcaataactcaggaggaaatctctcttcaccttcactcttctctgtacctacgtttcttattttctctacrgtttagcttcctctgctcccctgtctacagagccacatgtatttcccttacttttatttatttctcattaattttaaataccaagagaaaagactccaat

SEQ ID NO: 212574 - DNA, 201 bp, Homo sapiens
tgcatagcatttcaatgtggaaagggaattagtttagctaatccattttacttttaaagagttataagattactgcacttatcccattcaagaaagaaatyattgctgacctctaaagtctcttccaacactgacagtctgttagttaataaccattggaaatgttaaaaataaacaatattaagtttcacctgagtttat

SEQ ID NO: 212575 - DNA, 201 bp, Homo sapiens
ctgttagttaataaccattggaaatgttaaaaataaacaatattaagtttcacctgagtttatgcagtgctgaggacaacgctttttttttctcagacatyagaatgggttgtggcagaaattcctctcttatttctccaagacatcttatcatatttgtaaaagtaattaacttcaagtacatattttctgatcattttg

SEQ ID NO: 212576 - DNA, 201 bp, Homo sapiens
acatattttctgatcattttggccattgtttgtaatgtaaaaagataaattatactgctatgctagtttgataaggcagaataaaagaagtggtgttattktgattgtgtatttttaattttaaaatgtagattattttaatgttatattcagtaatatttttgaagtcgcttgtatgtgactcagttatttatagcaggc

SEQ ID NO: 212577 - DNA, 201 bp, Homo sapiens
tgataaggcagaataaaagaagtggtgttattgtgattgtgtatttttaattttaaaatgtagattattttaatgttatattcagtaatatttttgaagtygcttgtatgtgactcagttatttatagcaggctgggaccagacctagaacaaaatcttcctatataggaggaacaggcgctgcttatagaaactgaatag

SEQ ID NO: 212578 - DNA, 201 bp, Homo sapiens
taaaagaagtggtgttattgtgattgtgtatttttaattttaaaatgtagattattttaatgttatattcagtaatatttttgaagtcgcttgtatgtgaytcagttatttatagcaggctgggaccagacctagaacaaaatcttcctatataggaggaacaggcgctgcttatagaaactgaatagcagatgctgaggg

SEQ ID NO: 212579 - DNA, 201 bp, Homo sapiens
gattgtgtatttttaattttaaaatgtagattattttaatgttatattcagtaatatttttgaagtcgcttgtatgtgactcagttatttatagcaggctrggaccagacctagaacaaaatcttcctatataggaggaacaggcgctgcttatagaaactgaatagcagatgctgaggggaaggacagtctgaaggacag

SEQ ID NO: 212580 - DNA, 201 bp, Homo sapiens
gattattttaatgttatattcagtaatatttttgaagtcgcttgtatgtgactcagttatttatagcaggctgggaccagacctagaacaaaatcttcctrtataggaggaacaggcgctgcttatagaaactgaatagcagatgctgaggggaaggacagtctgaaggacagaatgcagtattcagagcagtgtcctgat

SEQ ID NO: 212581 - DNA, 201 bp, Homo sapiens
aaaatagaattatttgatccaacaatcccacttctgggtatatattcaatgaaattgaagtcaggatcttggagagatatctgtactttcatgttcattgyagcattattcacaatagccacaatatggaaacaacctaaatatccctcaacagatgaatggataaagaaaatatggaatatatagtgtgtgtatacatgt

SEQ ID NO: 212582 - DNA, 201 bp, Homo sapiens
cacaaaaggctgtttccggctcaaatttcgttaccaaggctctttgagatgaacttttttgggggaaaacaatcagtctaaaagagctgtgtcttcttgtktgtgtgtgtgtgtgtgtgtgtgtgtgtgtgtgtacaagggggcggcgagggtccccacttttagtatgagtagcattgttcacatgtttgccagtatttt

SEQ ID NO: 212583 - DNA, 201 bp, Homo sapiens
agagctgtgtcttcttgtgtgtgtgtgtgtgtgtgtgtgtgtgtgtgtgtgtacaagggggcggcgagggtccccacttttagtatgagtagcattgttcmcatgtttgccagtattttggagcctggcaggcctgggtagaggctgcgggggacgcctccaagttcccacccgggacatcctgaacagcagcagccacaa

SEQ ID NO: 212584 - DNA, 201 bp, Homo sapiens
atattgtggcataccaattctactaatgatcaacacatgccttttttcctcctatttcgtttgatttcttatgcaactctcacccattttatgtatctttrctttaatagagacagtgacctgcaataattaagaattaagagacctggatccaaattttgtcttgtctttttattgggcaagtcaatattttaagcctta

SEQ ID NO: 212585 - DNA, 201 bp, Homo sapiens
aaatattattttatgttcttattatattatataaaagtaagtggtaaacaacatgcctagcatattgcatctttaaacatatgtgctatacatatttaacatatatatatatacatattatatgtatgtatattatgcatatacattatgtacattaaaaatctagggttttcttatttaataaacattagactgttacct

SEQ ID NO: 212586 - DNA, 201 bp, Homo sapiens
tccccatcaagctacctatgactttcttcacagaattggaaaaaactactttaaagttcctatggaaccataaaagagcctgtattgccaagacaatcctragccaaaagaacaaagctggaggcctcatgctacctgacttcaaactatgctacaaggctacagtaaccaaaacagcatggtactgctaccaaaacagag

SEQ ID NO: 212587 - DNA, 201 bp, Homo sapiens
aatattattttatgttcttattatattatataaaagtaagtggtaaacaacatgcctagcatattgcatctttaaacatatgtgctatacatatttaacatatatatatatacatattatatgtatgtatattatgcatatacattatgtacattaaaaatctagggttttcttatttaataaacattagactgttacctt

SEQ ID NO: 212588 - DNA, 201 bp, Homo sapiens
cacccagggcatgagattgagggtagggtcttgatattactttctgttttattttatacttttgtttgtttgaatgatagtgagcatctattattttttaytcatttgttatgttttcttatttaaaatacaaattaaaatactattactgtaatgtatgcaataagcaattgggcagggtgtagatttctacaatatgag

SEQ ID NO: 212589 - DNA, 201 bp, Homo sapiens
tctgcactaataccaaagaaatgagcacttttactctttactcatacaatgaaaaagtaagttattgcattcaattgagcttgaaaaataacacataaaaktattggtttgataaaacatgctccctccgtttctaagtctatagccatataaagccatcaaattttgctcaatgtatacattggtcttcaatttaaagat

SEQ ID NO: 212590 - DNA, 201 bp, Homo sapiens
atcaactaagaatgtggtattatggagagagtgagggaaaggaaattatgggagccctgtgagttagatagatactctgaagacatctagtatgttgacartacttacagcctacagctggaaagaacatgggatttggagccaagaaaatctggatttggatattgtttaaccttgcacagatcatttaagctcaattta

SEQ ID NO: 212591 - DNA, 201 bp, Homo sapiens
tgaactctggggtcaagtgatcctttcaccttagcctctcaaagtgttgggattagtcataagccacagtatttggccttttaaaaatacatacatatatwttgaaaatcacttttttttctttccaactttttttaggttcgaggggtacatatacaggtttgttacatgggtaaattgcatgttgcaggggtttcttac

SEQ ID NO: 212592 - DNA, 201 bp, Homo sapiens
tctgggtatatattcaatgaaattgaagtcaggatcttggagagatatctgtactttcatgttcattgcagcattattcacaatagccacaatatggaaamaacctaaatatccctcaacagatgaatggataaagaaaatatggaatatatagtgtgtgtatacatgtatatgtatataaaatggaatattactcagcct

SEQ ID NO: 212593 - DNA, 201 bp, Homo sapiens
ttcattgcagcattattcacaatagccacaatatggaaacaacctaaatatccctcaacagatgaatggataaagaaaatatggaatatatagtgtgtgtwtacatgtatatgtatataaaatggaatattactcagccttaaaaagaaaggaaatttgctatttgtgacaacatgtttgaatctagaggacattctaagt

SEQ ID NO: 212594 - DNA, 201 bp, Homo sapiens
ttattcacaatagccacaatatggaaacaacctaaatatccctcaacagatgaatggataaagaaaatatggaatatatagtgtgtgtatacatgtatatrtatataaaatggaatattactcagccttaaaaagaaaggaaatttgctatttgtgacaacatgtttgaatctagaggacattctaagtgaaataagccaa

SEQ ID NO: 212595 - DNA, 201 bp, Homo sapiens
gacattctaagtgaaataagccaagacaaacactgaatgaccccaacttttatgaggaatctaaaatagtcaacctaatagaacaagagactagaatagcrgctgacaggagctggagggagggagaaatggggaagtattggtcaaagggtacaaaattgttttagtcatgcaagatgaataagttttggatatctactg

SEQ ID NO: 212596 - DNA, 201 bp, Homo sapiens
aatataattccccaaatagagtgagcctccatattcccaatgagaattttactaattaaatgattttgcccaagaataatatacattcacttatcagtttratgtttatgaggttatctaataactagttttaattcttagtttattaaattagttacatttacatatttaaaccgcatattttaggctgagctcagtagc

SEQ ID NO: 212597 - DNA, 201 bp, Homo sapiens
ttccccaaatagagtgagcctccatattcccaatgagaattttactaattaaatgattttgcccaagaataatatacattcacttatcagtttaatgtttrtgaggttatctaataactagttttaattcttagtttattaaattagttacatttacatatttaaaccgcatattttaggctgagctcagtagctcacaca

SEQ ID NO: 212598 - DNA, 201 bp, Homo sapiens
taggaggatcacttgagcccaggaggtcaaggcttcagtgagctataatcatgccactgcactcagtctgggtgacagagtgagaccctatctcaaaactrcaaaaataaataaatagtatatcttttcaaataacaaaattattaagaaatggcatgttttttcatctcactcttaatacatgatacaacttactcaagc

SEQ ID NO: 212599 - DNA, 201 bp, Homo sapiens; identical to SEQ ID NO: 37558

SEQ ID NO: 212600 - DNA, 201 bp, Homo sapiens
cgctgtcacgtaggttcagtgggcggaagaggtggccccggatgctgcggcgcccgctggccgggctggctgcggccgccctgggccgggccccaccggamggtgagtacgacaagcgcgatcgcgagggtgactcgggtcgaggcggcagcggtccctgcgctttgcggtcgcccagtccacgccgcctccggatctcct

SEQ ID NO: 212601 - DNA, 201 bp, Homo sapiens
tggttggctggcacgtagaggaggtggcagggctgggtgagcagcaggagccaggttagtggggaggcccgagctaagcgcaggggcaaattctgcgggtrggagagccaggagggcatggggtgcatggtgagatgaaaacgatgtgtgcttgtgacaaaaagcccagaagaggcagtaaggagggaggagtctatccct

SEQ ID NO: 212602 - DNA, 201 bp, Homo sapiens; identical to SEQ ID NO: 37559

SEQ ID NO: 212603 - DNA, 201 bp, Homo sapiens
gcccaccagtgccatgctggttgtgggttggcagggcagagtgaccttaagaagggccagctcagtggagcaacaggacagaagctcacatggggtccagmccacaggaccatttgagtagctctcccatatcgggtccttcgaagcacatgatttagctttactttttctccttcgtattagaaaagtcaccataatacc

SEQ ID NO: 212604 - DNA, 201 bp, Homo sapiens; identical to SEQ ID NO: 37560

SEQ ID NO: 212605 - DNA, 201 bp, Homo sapiens; identical to SEQ ID NO: 37572

SEQ ID NO: 212606 - DNA, 201 bp, Homo sapiens
acatgggcggggcagtcgcctcatgacgtcagtctcgcgcgcgggcggaggtgggccggtgcggcgctgtcacgtaggttcagtgggcggaagaggtggcyccggatgctgcggcgcccgctggccgggctggctgcggccgccctgggccgggccccaccggacggtgagtacgacaagcgcgatcgcgagggtgactcg

SEQ ID NO: 212607 - DNA, 201 bp, Homo sapiens
cgggctgggagggcgctgtgctgaacgcccctgcggtcgcgacaggccagcgcaggtggaggcggggctagcgaggcactgaggtaagtacttccctaagrggcggggaagaacgagtgagacatgggcggggcagtcgcctcatgacgtcagtctcgcgcgcgggcggaggtgggccggtgcggcgctgtcacgtaggtt

SEQ ID NO: 212608 - DNA, 201 bp, Homo sapiens
tgtctttgggctcatggccccttcctgtctcaggcttgctctgctctttacctggggttgctgtcgaggaccctgtgcaagactcggccggtttttctttytccctgatggacagacccaaacatagccgcgcagcatcgtgaagggctggggccttcactcctctgtggctctggaagagcccgatttcctcaggaggta

SEQ ID NO: 212609 - DNA, 201 bp, Homo sapiens; identical to SEQ ID NO: 37599

SEQ ID NO: 212610 - DNA, 201 bp, Homo sapiens
tctggggctccagagagagcaggagtggtgcctgaggactgaggcccagggggcggcccttccctaccctgcacaggcccggctgggctggaaagctgtcycacagccgcagtgaggacagccgcaggccagtgggctgctctgggggtcgtgtgggacctggggtggggctgcatgggctcactgtgccctgaccccagg

SEQ ID NO: 212611 - DNA, 201 bp, Homo sapiens
tttgtgatcaatgacatgtatgcgtgtgcatgtgtacctttgcaggtacacatgtgtggtgtgtgtgcatttgcttggtgtgcgtgcatttgtgtgtgtgtttgtgtgtgcatgcatgtgtgtgtgtttgtggtaggtttgtgcacacatcctgcatacctttgtgcctgggagtggcatgtgtgtggtgggtgtcgctgt

SEQ ID NO: 212612 - DNA, 201 bp, Homo sapiens; identical to SEQ ID NO: 37604

SEQ ID NO: 212613 - DNA, 201 bp, Homo sapiens; identical to SEQ ID NO: 37570

SEQ ID NO: 212614 - DNA, 201 bp, Homo sapiens; identical to SEQ ID NO: 37601

SEQ ID NO: 212615 - DNA, 201 bp, Homo sapiens
gcagctgggagtccctaccgctggcccggcgcggtgtgcgctccggttcccacctcaccctgcaagccttggggtcctgggcggatggagccggctattcyggggctcccaggattctgcctactccgcggcacggcgcagagacggggacttggggaaacagcaggccttcccgacgcatgggtgtggcatttggggttc

SEQ ID NO: 212616 - DNA, 201 bp, Homo sapiens; identical to SEQ ID NO: 37573

SEQ ID NO: 212617 - DNA, 201 bp, Homo sapiens
  misc_feature (1)...(201): n = A,T,C or G
gagcgtcgccttagaagtatgccccagtaaggactggtgtgggaagcaggtgcctcaaagttgattttgaccctgcgtgtggtgggcctcggtttcgtctntgcatgaaagaggtcggtcctgaggccccgggctgggtcctgctctgctgtctttgggctcatggccccttcctgtctcaggcttgctctgctctttacc

SEQ ID NO: 212618 - DNA, 201 bp, Homo sapiens
tagcaaagaggacagttttttgagcctgagaagatttattgtgaaaaactctctctctctctctctctctctctctctgtatatatatatatatatttatwtatatttataattgcttcttttatttcagtgctgctcttcatttcaagatgccgttgcagctctgataaatgcaaactgacaaccttcaaggccacgacg

SEQ ID NO: 212619 - DNA, 201 bp, Homo sapiens
aaacagaattataaatgactatttcttagcctaatgttttctagattatttatctacattgtatggaacttgtgtgagaccttcatatcttattatacccrtataatatcccattttatggatataccatattttgtttatccattcttcagttcacggtcatttggcttgcttccactattttagctattagtaatgcca

SEQ ID NO: 212620 - DNA, 201 bp, Homo sapiens
attttatattaatgatggtcagttattcatttttatttgtattattactattcacaactcatttcctaatgaaatagttaagtttctggcattaaaaactmgtgtcaaatctctagaaatcttgttatgaacagatttataacggtcaaattggtagtacttgactttctttttttagaacagcagcgcttatcagctgta

SEQ ID NO: 212621 - DNA, 201 bp, Homo sapiens
tttctggcattaaaaactcgtgtcaaatctctagaaatcttgttatgaacagatttataacggtcaaattggtagtacttgactttctttttttagaacascagcgcttatcagctgtagaaccaattgccaagttataaaattgatttttgaaaacaaagctatttaatgtttgtaagcatttcatatagtaaaagtggg

SEQ ID NO: 212622 - DNA, 201 bp, Homo sapiens
ttctttttttagaacagcagcgcttatcagctgtagaaccaattgccaagttataaaattgatttttgaaaacaaagctatttaatgtttgtaagcatttyatatagtaaaagtgggttgtgttcctggaatttgaatatagatgaaggtctgtcataaattacaatttgtatacactattgttttctgcaagacttagtt

SEQ ID NO: 212623 - DNA, 201 bp, Homo sapiens
cacccaagttcaagcgattctcctgcctctgcctctcaattagctgggattacaggcatgcaccactacgcccggctaatttttgtatttttagtagagayggggtttcacagtgttggccaggctgatctcaaactcctgacctcaagtgatccgcccacctcagcttcccaaagtgctgggattacaggcatgagccac

SEQ ID NO: 212624 - DNA, 201 bp, Homo sapiens
acaaagctatttaatgtttgtaagcatttcatatagtaaaagtgggttgtgttcctggaatttgaatatagatgaaggtctgtcataaattacaatttgtrtacactattgttttctgcaagacttagttattacagtctgttataactaatgcagaaaacgcaagctgtatctctcttttggattatgaatactttgttt

SEQ ID NO: 212625 - DNA, 201 bp, Homo sapiens
tggggtttcacagtgttggccaggctgatctcaaactcctgacctcaagtgatccgcccacctcagcttcccaaagtgctgggattacaggcatgagccaycacacctagccaacaaactttctgcgcgttgaatatgtcactcactgccttttggtctccattgttgtttatttgaagttgttaatcattttcaggattt

SEQ ID NO: 212626 - DNA, 201 bp, Homo sapiens
ccaatgcctgggcttccttggggacatttttattgactgcttttttttgttccacccccctgtatgtggaccagacttttgtgtttctttgcatgccttgwaattttttttttgttgaaactggatagtttataatgtgtcaaccatggaaatcagatctctacccctaccctgaggagggtttgttgtttttgttatttg

SEQ ID NO: 212627 - DNA, 201 bp, Homo sapiens
gcatttcatatagtaaaagtgggttgtgttcctggaatttgaatatagatgaaggtctgtcataaattacaatttgtatacactattgttttctgcaagayttagttattacagtctgttataactaatgcagaaaacgcaagctgtatctctcttttggattatgaatactttgttttcttgtagtttctggcatggaac

SEQ ID NO: 212628 - DNA, 201 bp, Homo sapiens
gcatccatgtactgggatttggggtttgttttttcttttgttttctttttcaatctgtggtataaatactagagactgtgggcttcctgtactactaccayttatcctctgattcagccactttgtttttgttttaaacctaacctcatagcaaagaggacagttttttgagcctgagaagatttattgtgaaaaactctc

SEQ ID NO: 212629 - DNA, 201 bp, Homo sapiens; identical to SEQ ID NO: 37610

SEQ ID NO: 212630 - DNA, 201 bp, Homo sapiens
ctcatagcaaagaggacagttttttgagcctgagaagatttattgtgaaaaactctctctctctctctctctctctctctctgtatatatatatatatatwtatttatatttataattgcttcttttatttcagtgctgctcttcatttcaagatgccgttgcagctctgataaatgcaaactgacaaccttcaaggccac

SEQ ID NO: 212631 - DNA, 201 bp, Homo sapiens; identical to SEQ ID NO: 37608

SEQ ID NO: 212632 - DNA, 201 bp, Homo sapiens; identical to SEQ ID NO: 37607

SEQ ID NO: 212633 - DNA, 201 bp, Homo sapiens
ttcatatcccattctccacaaatgaacatccattggtatataggttaaggtcaggattagctaaggggacttctaagagatcctcttgggcagcataagtstggacaataatttgttggcagtcatgctcaactggttccccatcctctgggagaaaagtgacagggttgagggctgcacacgtgcatatttgaagcactg

SEQ ID NO: 212634 - DNA, 201 bp, Homo sapiens
tataccaaactatgaatttacttttaaaaagttttattggccgagaggttgatattttttccatttcatgatgagggtttgacggtcactgccacctcctstgcccgtccttcaacttggccctgtaaaggatctccttagccttggccccaagtttgtactagattctatccttcattaattatagttcattcttgatta

SEQ ID NO: 212635 - DNA, 201 bp, Homo sapiens
aagtttgtctgacaggctttaggagccaggaggcaagggtcaggatagataggatagatgggcgagtctcacttgggtgatatgacttggaggagagttcygctcttggctacagggtcagccaactttctgtcaggaccccggagctgaatggctttcctctctgtcaaccctgggctcagcctggaagtacaggaaaag

SEQ ID NO: 212636 - DNA, 201 bp, Homo sapiens
tgtaggattagttcaccaacatattttctgagtgtgtgaatactatgtgtccatatatcccttgtcacattgttttttaatttcacagatttctttaaagmctcgtgcagcacatcattatcgctggatgcccggacatgtaatacacctgacagcatgtgaagtgctcagaatggggcaggatgtcacctggaatcagca

SEQ ID NO: 212637 - DNA, 201 bp, Homo sapiens
gtttacccttttaaagtaaacaatatgttcacaaagttctacatcaatctctactatctacctagagaactttcaaaggaaacctttgtacctaccagcatcattgccattcccccatgtccccagcccctggcagacactcatctactttctgtctatatggatttgctttttctggacatttaatataaacagaattat

SEQ ID NO: 212638 - DNA, 201 bp, Homo sapiens
tgtaatctgaaaaatctcgactttctcaaagggagcgctacataatgtatgatataatttatatcagaagaaaacatgtcctagaaatgtaaccctctttmttaggacttacatgtgctcagggaggttgaaaacaaccttgattatggaggatgcctccttagctggggattagctatccactgttcccttccagaaatc

SEQ ID NO: 212639 - DNA, 201 bp, Homo sapiens
ggtgcagaatggcctagtattattatgaaaatagttttgagaccctctgtatattgtcatgctttttgtttgaccacaactcaatgtttatattactatarccatgtataaactgagcatagcataccatgattgctttttttttttttttttttctgagatggagtctcactctgttacccaggctggagtgcagtggca

SEQ ID NO: 212640 - DNA, 201 bp, Homo sapiens
tgtacacctgaaatagccttgcaccactttttctacaaattgcttcctacctttgaccttacaggcttgttaactaaaggcagtaaatgctcagctgatcttttttttttttctttgagatggagtcttgctctgttgcccaggctggagtgcagtggcacgatctcagctcactgcaacctacgcctcccaggttcaagc

SEQ ID NO: 212641 - DNA, 201 bp, Homo sapiens
tcccaagtatctgggactacaggcacccgccaccgcgcccagctaattttttgtatttttagtagagatggggtttcaccgtgttagccaggatggtctcratctcctgacctcgtgatccacccgccttggcctcccaaagtgctgggattacaggcgtgagccacctcacccagcctcagctgatcttttgatgggcat

SEQ ID NO: 212642 - DNA, 201 bp, Homo sapiens
ccatttcatgatgagggtttgacggtcactgccacctcctctgcccgtccttcaacttggccctgtaaaggatctccttagccttggccccaagtttgtamtagattctatccttcattaattatagttcattcttgattaatgatagcaatgcttccactcactttttaaggagttactccttttccgtttgtaattgaa

SEQ ID NO: 212643 - DNA, 201 bp, Homo sapiens
ttctgggcgggggagattagaggaggctcatcattaataggaaggagagctatagggaggctaggatatggagataagctgagaggtcatcctgtgggatrtaaattgcaagctttgcatagttgtggattctccttcaatgaaaagaaagcttggacataaggtatttcactccacttgccttcccttttacagaaaatg

SEQ ID NO: 212644 - DNA, 201 bp, Homo sapiens
aaaatggaccaatcagcaggatgtgggtggggacaaataaaggaataaaagctggccatcccagcgagtagcggcaacctgctcaggtacccttccatgtagtggaaacttggttcttttgctcttcacaataaatcttgctgttggtcactctttgcgtccgcactacctttatgagctgagagggtctgtggcttcatt

SEQ ID NO: 212645 - DNA, 201 bp, Homo sapiens
tgtcaccattttatcccagttggcaatttttaaagaaaattactgaagtgaacataaaaaatggaaacatttcagaagtgtttgaataaacatcccctctscaaaaaagaagatcctcactgaatagttttgggtgtgtgcttctcagtttttccagtgcatgtttataatatatttatctggaggctggtttttttgttt

SEQ ID NO: 212646 - DNA, 201 bp, Homo sapiens
tgtaagtggaatcctagtgagaggtgaagccagctgggcttctgggttgagtggggacttggagaacttttgtgtctagttaaaggattgtaaatgcaccratcagcgctctgtgtctagctcaaagattgtaaacgcaccaatcagcactctgtaaaaatgcaccaatcagcgctttgtaaaatggaccaatcagcactc

SEQ ID NO: 212647 - DNA, 201 bp, Homo sapiens
cagtgctctgtaaaatggaccaatcagcaggatgtgggtggggacaaataaaggaataaaagctggccatcccagcgagtagcggcaacctgctcaggtayccttccatgtagtggaaacttggttcttttgctcttcacaataaatcttgctgttggtcactctttgcgtccgcactacctttatgagctgagagggtct

SEQ ID NO: 212648 - DNA, 201 bp, Homo sapiens
aactgttccttggtatacattaagggaaatgctgctagagttttctttcaaagaacttaacctaaatttcagggtgttttcaaatctttagcaatccacamacatagaattagaaaaataagtaagactagagagaaggaaattttaaaagagaaaagttaaccacccataattttgagaaaaaaaagcaaatatgtagga

SEQ ID NO: 212649 - DNA, 201 bp, Homo sapiens
gtaaaatggaccaatcagcaggatgtgggtggggacaaataaaggaataaaagctggccatcccagcgagtagcggcaacctgctcaggtacccttccatgtagtggaaacttggttcttttgctcttcacaataaatcttgctgttggtcactctttgcgtccgcactacctttatgagctgagagggtctgtggcttca

SEQ ID NO: 212650 - DNA, 201 bp, Homo sapiens
gtctgcggcttcattcctgaggtcagggagaccacgaacccacgggaaggaagaaactcaggacacatctgaacatctgaaggaacaaactccagatgcaycatctttaagagctgtaatactcaccgggagggtccgcagcttcattcttggtgagtaagacccagaacccaccagaaggaataaatttcagacacaata

SEQ ID NO: 212651 - DNA, 201 bp, Homo sapiens
ctttttcaatctgtggtataaatactagagactgtgggcttcctgtactactaccatttatcctctgattcagccactttgtttttgttttaaacctaacytcatagcaaagaggacagttttttgagcctgagaagatttattgtgaaaaactctctctctctctctctctctctctctctgtatatatatatatatatt

SEQ ID NO: 212652 - DNA, 201 bp, Homo sapiens
taatgaaatttgtatgggtaaagccatatatgtatttctagcaatacattttatttatctatttttattgtattttaagttctagggtacatgtgcacaaygtgcaggtttgttacatatgtatacatgtgccatgttggtgggctgcacccattaacttgtcatttacattaggtataactcctaatgctatccatcccc

SEQ ID NO: 212653 - DNA, 201 bp, Homo sapiens
ttgttttaaacctaacctcatagcaaagaggacagttttttgagcctgagaagatttattgtgaaaaactctctctctctctctctctctctctctctgtrtatatatatatatatttatttatatttataattgcttcttttatttcagtgctgctcttcatttcaagatgccgttgcagctctgataaatgcaaactga

SEQ ID NO: 212654 - DNA, 201 bp, Homo sapiens
ttctagggtacatgtgcacaacgtgcaggtttgttacatatgtatacatgtgccatgttggtgggctgcacccattaacttgtcatttacattaggtatawctcctaatgctatccatcccccttccccccaccccacaacaggccctggtgtgtgatgtcccccttcctgtgtccaagtgttctcattgctcaattctca

SEQ ID NO: 212655 - DNA, 201 bp, Homo sapiens
ttgtcaaagacaagatagttgtagatgtgtggtattatttctgagggctctgttctgttccattggtctatatctctgttttggtaccagtaccatgctgytttggttactgtagccttgtagcatagtttgaagtcaggtagtgtgatgcctccagctttgttcttttggcttaggattgacttggcaatgcgggctctt

SEQ ID NO: 212656 - DNA, 201 bp, Homo sapiens
atatgaactttaaagtagttttttccaattctgtgaaaaaaagtcattggtagcttgatgggaatggcattgaatctataaattaccttgggcagtatggccattttcacgatattgattcttttcctcctgacaaatttacagttttccgctttgtggcatagactgagggtgtatttcatctttcctgcaaagtcaata

SEQ ID NO: 212657 - DNA, 201 bp, Homo sapiens
ttttaaaaaaacaacaaaaacgctgaagctaggagaggctaagaatttgctgaagtttgggttggggaatgatgactcccaggtctcctgctggggcagtmcggttggagagctgaaatcattgccactgtactcttctgtgtctcagatgtaaacaaacccaagagaaaatattcaggactgggcacagtggctcacacc

SEQ ID NO: 212658 - DNA, 201 bp, Homo sapiens
aatcagtccctgagggttgaagaggttgctctgatgtgtcttaacactgaagcctccaaaaagagaatctgtaacattcatattcgcaggaagatttgggrgattccagagctcctctctggaaaagactatgagctataaggcacacttaacacaaagcatccaagatgctgccctacattttttgggagaaaggaagtg

SEQ ID NO: 212659 - DNA, 201 bp, Homo sapiens
aagactttaggacaagcttgtccaactcactgccaaggatggctttgaattctgcctgatatacatttgtaaactttaatacatgagattttttttgtgatttttttttttttaagctcatcagctattgttagtgttagtgaattttatgtgtggccaaaaacacttcttctttttccagggaataaggcccagggaatc

SEQ ID NO: 212660 - DNA, 201 bp, Homo sapiens
ccaaagtgctgggattataggcgtgagccactgtgcctggccagatcctgtctttttcttaatgggcagtagagcacaaacttgggggccagattatgtgrgtttgaagcctagctcttctgcttactagccatatgacgttcgaagagctatttaacctctttatgcctcagtttccttatctggaaaataatactttct

SEQ ID NO: 212661 - DNA, 201 bp, Homo sapiens
caagtgatctgcctgcctcggcctcccaaagtgctgggattataggcgtgagccactgtgcctggccagatcctgtctttttcttaatgggcagtagagcrcaaacttgggggccagattatgtgggtttgaagcctagctcttctgcttactagccatatgacgttcgaagagctatttaacctctttatgcctcagttt

SEQ ID NO: 212662 - DNA, 201 bp, Homo sapiens; identical to SEQ ID NO: 37605

SEQ ID NO: 212663 - DNA, 201 bp, Homo sapiens; identical to SEQ ID NO: 37606

SEQ ID NO: 212664 - DNA, 201 bp, Homo sapiens
gttcagaaaaataaaaataatttctcatattaaatacagacgctcctcaacttatgatgtgggtaggtcccagtaaacccattataatttgaaaatatcayattgaaaatgcatttaatatctcttacctgaaatcataacttagccaagcctaccttaaatgttctcagaacatttagcctgcagttgggcaaaaccatt

SEQ ID NO: 212665 - DNA, 201 bp, Homo sapiens
agtgctgattggtctatttttacagaatgctgattggtgcatttacaatcctctagctagacacagagcactgatgggtgtttttacaatcctctagctasacagaaaagttctccaagtccccacttgacccaggaagtccagctggcttcacctctcaatcccccctctaaacaggacaccccaactgctgttgggaat

SEQ ID NO: 212666 - DNA, 201 bp, Homo sapiens
agaggggaactctttaggccagtcaaaaggccagcgggtcagtccaggggtcctcagtagaagttgttagttgagctcatttggggttccatttgtaagaycatctgtagcttgatggcctcaatcctagaggaaacaaatttgacaaggaggttaaaaatacagggcccgaaggcaagtaatagcaagatggctgtcatg

SEQ ID NO: 212667 - DNA, 201 bp, Homo sapiens
cagcagaaacactagttttcctgctagaccacaaggatgaccgaggaaggtcggatttagtggcccttgctgacgcattcttgaaaacctgcacccttgcstattctcctgggccacaaagaggactgagaaaaatcggatttagtgacccttaccaacacattcttgaaaacctgttagagtcctaagcattctcctgtt

SEQ ID NO: 212668 - DNA, 201 bp, Homo sapiens
acggtccctggaccctgctgattggaatagttgcactcaccgacacagcagcagaaacactagttttcctgctagaccacaaggatgaccgaggaaggtcrgatttagtggcccttgctgacgcattcttgaaaacctgcacccttgcctattctcctgggccacaaagaggactgagaaaaatcggatttagtgaccctt

SEQ ID NO: 212669 - DNA, 201 bp, Homo sapiens
catttaatggcccagagtttgatctaacaatagcatgacatctctccaagtgagatcaaaggtttgccctagaccctgcaggacatctatatacctatcargatcatctgaaaacttccccaggtctgccttgatctgctttaagtcagagagggagaaggggacatgtacctgggttgggccaaattcccctccccctac

SEQ ID NO: 212670 - DNA, 201 bp, Homo sapiens
tgaaaccctgtctctactaaaaatacaaaaaaaaattagccgggcgtggtggcaggcgcctgtagtcccagctactcaggaggctgaggcaggagaatggygtgaacccaggaggcagagcttgcagtgagccaagattgcaccactgcacttcagcctgggcaacagagggagactccatctcaaaaaaaaaagaactgg

SEQ ID NO: 212671 - DNA, 201 bp, Homo sapiens
tagctgagactacaggcatgcgccaccacaccgggctaattttttttttttttttttttggtagagatgggagtctcactgtgttgcccaggctggtctcraactcctggactcaagtgatcctcctgcctcagcttcccaaggtgctgggattataggtgtgagccactgcatctggccaaattaacagtatattatctt

SEQ ID NO: 212672 - DNA, 201 bp, Homo sapiens
acagatttctttaggtgtgtattttcatatctctaaataataatgcttatatggtttctaaattattcagctttaagttctttctactattaaggaggggttttttttttattgttttttgttttaatagagacagggtctttctctatcacccagtctagagtgcagtggtgcaatcatagctcaccgcagcctcgaact

SEQ ID NO: 212673 - DNA, 201 bp, Homo sapiens
aagtttaagtccagcttgggcatcatagtgagaccctatctctacaaaaataagcagccaggtgcacctgtggttgcagctacttgagaggctaaggtggwaggatccccaggagtttgagcctgcagtgagccaagataatgacattgtactacagactgggtgatggattgagaccctgtcttaaaaaaaaaaaaaaga

SEQ ID NO: 212674 - DNA, 201 bp, Homo sapiens
ttgagaccctctgtatattgtcatgctttttgtttgaccacaactcaatgtttatattactataaccatgtataaactgagcatagcataccatgattgctttttttttttttttttttctgagatggagtctcactctgttacccaggctggagtgcagtggcaccattttgggtcactgcaacctccgcctcccagatt

SEQ ID NO: 212675 - DNA, 201 bp, Homo sapiens
aaagagagagaaagcaaaaaacttaagtattacttctgtgaaaataacaatgataagccctttattttaacataagtaatttcttgtgaaaatcttttcaraaaaattggaagaataacagtgtttttgtatttttgcaaatctcttttactgtttgacttaatagaaaatacctgaattctgatacttctgcacttattc

SEQ ID NO: 212676 - DNA, 201 bp, Homo sapiens
tcttttatctctaaactttcatgacactaaactcaaaaaggttatttttcagacaacctgcggtcatacctacttatatttcccttattctaatatattgktcttcactgtcttctcttaaattaattttatttatttatttatttgtttagacagagtcttactctgtcaccaggctggagtgtagtggtgcaatcttgg

SEQ ID NO: 212677 - DNA, 201 bp, Homo sapiens
ttgtttgaccacaactcaatgtttatattactataaccatgtataaactgagcatagcataccatgattgctttttttttttttttttttctgagatggartctcactctgttacccaggctggagtgcagtggcaccattttgggtcactgcaacctccgcctcccagattcaagtgattctcctgcctcagcctccaga

SEQ ID NO: 212678 - DNA, 201 bp, Homo sapiens
gctggagtgcagtggcaccattttgggtcactgcaacctccgcctcccagattcaagtgattctcctgcctcagcctccagagtagctgggactacagackcgtgccaccacacccagctaatttttgtatttttagtaaacacggggtttcaccatgttggccaggcttgtctcaaactccagacctcatgatccgccca

SEQ ID NO: 212679 - DNA, 201 bp, Homo sapiens
gctgaagtgcagtggctcagtctcactcattgcaacctccgcctcccaggttcaagtgattctcctgcctcagcctcccaagtagctgggattacaggtgygcgccaccacatctggttaatttttgtattttcagtagagatgaggtttcgccatatcggccaggctggcctgaactccagacctcaagtgatctgcctg

SEQ ID NO: 212680 - DNA, 201 bp, Homo sapiens
ttttgttttaaacctaacctcatagcaaagaggacagttttttgagcctgagaagatttattgtgaaaaactctctctctctctctctctctctctctctrtatatatatatatatatttatttatatttataattgcttcttttatttcagtgctgctcttcatttcaagatgccgttgcagctctgataaatgcaaact

SEQ ID NO: 212681 - DNA, 201 bp, Homo sapiens
tctcatcatatgaataggaaggatatcatgtctgaggctccccatatcctagcttcaggagtagcttttgttaggcctgctagtctgagaaataattttgrcaaaaattatttctttctgattggtgagcccaggtgcctaaagaagggaacagagtcctgaagtttatactagaaatcattcttataggagaaactagaa

SEQ ID NO: 212682 - DNA, 201 bp, Homo sapiens
tgtttctcactttatcttccaacccttttattgagtttctctatttttggagctggagtcttgctctgttgctcagggtggagtgcaatggcacagtctcsgctcactacaacctcttcctcctgggttcaagcgattgttctgtctcagcctcccaagtagctgggattacaggcacacaccaccatgccccgctaattt

SEQ ID NO: 212683 - DNA, 201 bp, Homo sapiens
ataattttggcaaaaattatttctttctgattggtgagcccaggtgcctaaagaagggaacagagtcctgaagtttatactagaaatcattcttataggaraaactagaaaagcaccagagacagggagtggtttttataatagggactagcctcggagaagagagcaagaagtttgtctgacaggctttaggagccagga

SEQ ID NO: 212684 - DNA, 201 bp, Homo sapiens
tgttggccaggctggtcccaaactcatgccttaggtgatctgtctgcctcgtcctcccaaagttctgggattacaggcctgagccactgtgcccagcctawgccagcgcacctggccgagtttttcatttttgctatcatgttaataattttcaagggctctttttatttgctagttctatttatgtggtttcctgtttgt

SEQ ID NO: 212685 - DNA, 201 bp, Homo sapiens
cgataggtgcccagtatttagccaccgaattctaaggaaaaataggacagaatagcaagcgaaaggggtccgatggtactcactgcttggtgatggtccarggtcaccaagatgtgtccagcattggttccttctggtggattcttggtctcgctgaccaagaataaagccgcggacctttgcagtgagtgttacagctct

SEQ ID NO: 212686 - DNA, 201 bp, Homo sapiens
gtattttctatttggatttcgaggtgaccctttcatgtacccacattccataaaatcctgtttaagataattctacttctcctgtttaaaacaaaaaaaamcccaagactcagtggtgtcacaatttgtaacttaaaatctgtttactttggtgaactttattgttactattctaataatagctttattgaatattcacat

SEQ ID NO: 212687 - DNA, 201 bp, Homo sapiens
tgaccgctctagctaattcctgctggataagagctaagaagaggccctgcagttgtagtgtcctccagaggggaactctttaggccagtcaaaaggccagygggtcagtccaggggtcctcagtagaagttgttagttgagctcatttggggttccatttgtaagaccatctgtagcttgatggcctcaatcctagaggaa

SEQ ID NO: 212688 - DNA, 201 bp, Homo sapiens
tccagaggttggtataagagtttgaaaggcgttgtctgatttcagaagccttttcctctaagtgccgggcagcatctcgtactatccctgactggttagtrtaaaagcaacactctttccctaagaaggtgcaaagtcctcctttctcagcagtgaggaggtctaggcctcagcggttttggagagtcactgctgccaaag

SEQ ID NO: 212689 - DNA, 201 bp, Homo sapiens
ataatgttaatatgtaaacagtataaaaaagtgaaatattgaaatgatacatgtgtctaatatttgtattacaatgtaataatagtatcttacatgatgtsattaaagtgaaatatagtcctaccgaaacagtaatgtgtttaagggaaagacatttaatactgcttcaagttttaaaatgtaaataattaaaattttaaa

SEQ ID NO: 212690 - DNA, 201 bp, Homo sapiens
ggtgtatatgtgccacatttcttaatccagtctatcattgttggacatttgggttggttccaagtctttgctattgtgaatagtgccgcaataaacctacrtgtgcatgtgtctttctttataggagcatgatttataatcctttgggtatatacccagtaatgggatggctgggtcaagtggtatttctagttctagatc

SEQ ID NO: 212691 - DNA, 201 bp, Homo sapiens
ccacattcctttcatttaatggcccagagtttgatctaacaatagcatgacatctctccaagtgagatcaaaggtttgccctagaccctgcaggacatctrtatacctatcaagatcatctgaaaacttccccaggtctgccttgatctgctttaagtcagagagggagaaggggacatgtacctgggttgggccaaattc

SEQ ID NO: 212692 - DNA, 201 bp, Homo sapiens
tttcttttgccaaactttattggtcaaaccataatcataatgtgtctggagttggttccttctggagggttcttggtctcactgactttaaaaatgaagcygcagacctttgcagtgagtgttacagctcttaaaggtggtgtggacccaaagagtgagcagcagcaagatttattgtgaagagcaaaagaacaaagcttc

SEQ ID NO: 212693 - DNA, 201 bp, Homo sapiens
tgggattgtagttactatccttactggatagattttttatttcttgcaaactgtatgagaaatcctttgagagtgtgtggtagtaatgaagtagataaacytgatattctggttcctgtagcagtggccatttctaaccctatacgtagaggtattagttgtatggccctgtgctgacagacttgagctttgaggggcact

SEQ ID NO: 212694 - DNA, 201 bp, Homo sapiens
atccatcagcggtttgtttatgcatagatgtgtgcatatgcttacgtgcatatgtaggcatgagccaccgcgcccagccagttttgtcttcttgaagatgyctctcccagggccttctgacaggttccagtctgctgtggttgtctgttggcttgttatatggcctagatgttccttgacctggggattctcttttttttc

SEQ ID NO: 212695 - DNA, 201 bp, Homo sapiens
tatagatggctccttcctgattctgtaagtactttaaggtttggctgagtgcaaagaactcacttgtttgagcagaccaattattaggcaagtttcctaaytgcaagagttttcttatcacttactgaatacccattgtgtcttttcctgttctgaagggagttcctcctaggtcagacctttgtatgataattagttaag

SEQ ID NO: 212696 - DNA, 201 bp, Homo sapiens
ggatttcgaggtgaccctttcatgtacccacattccataaaatcctgtttaagataattctacttctcctgtttaaaacaaaaaaaaccccaagactcagyggtgtcacaatttgtaacttaaaatctgtttactttggtgaactttattgttactattctaataatagctttattgaatattcacataccataatgttta

SEQ ID NO: 212697 - DNA, 201 bp, Homo sapiens
ggtcagacctttgtatgataattagttaagatttagatcccctgtaaggaaacctgctgggttaaggatttttgatcagaaggctgtgagttgtcagtggyctcagtgcttttgggctacgcccttgtttatactgacaacaaggtggtactggagtgttacagtgttacagggaagaccttcaattatcaattataggtt

SEQ ID NO: 212698 - DNA, 201 bp, Homo sapiens
taaggggacttctaagagatcctcttgggcagcataagtctggacaataatttgttggcagtcatgctcaactggttccccatcctctgggagaaaagtgrcagggttgagggctgcacacgtgcatatttgaagcactggtccctcaaggagtagcgcctggtatctaagtaggcagttgtctgatagccatgaacttcc

SEQ ID NO: 212699 - DNA, 201 bp, Homo sapiens
gtgcatccatgtactgggatttggggtttgttttttcttttgttttctttttcaatctgtggtataaatactagagactgtgggcttcctgtactactacmatttatcctctgattcagccactttgtttttgttttaaacctaacctcatagcaaagaggacagttttttgagcctgagaagatttattgtgaaaaactc

SEQ ID NO: 212700 - DNA, 201 bp, Homo sapiens
cataagtctggacaataatttgttggcagtcatgctcaactggttccccatcctctgggagaaaagtgacagggttgagggctgcacacgtgcatatttgragcactggtccctcaaggagtagcgcctggtatctaagtaggcagttgtctgatagccatgaacttcctttggcacctaatatgccatttacatcatgag

SEQ ID NO: 212701 - DNA, 201 bp, Homo sapiens
tctggacaataatttgttggcagtcatgctcaactggttccccatcctctgggagaaaagtgacagggttgagggctgcacacgtgcatatttgaagcacyggtccctcaaggagtagcgcctggtatctaagtaggcagttgtctgatagccatgaacttcctttggcacctaatatgccatttacatcatgagtagtcc

SEQ ID NO: 212702 - DNA, 201 bp, Homo sapiens
ggtgatggtccaaggtcaccaagatgtgtccagcattggttccttctggtggattcttggtctcgctgaccaagaataaagccgcggacctttgcagtgartgttacagctcttaaagatggtgtgtccagagtttgttccttcagatgtgtctggagtctcttctttccattgagttcatggtctcgctgacttcatgag

SEQ ID NO: 212703 - DNA, 201 bp, Homo sapiens
ttgccaaaaaatattgtacatttgtgagttatcaaagctctcaaaggaaaaaaaattaaaaactgggaaacagaattgtcatactactttaattgaaaagwaacaatgagtttttaatccatttgttaactttatggggcacctgcagactattttgattagtctttacaattgattgaaacccactgggcaaatttcgcc

SEQ ID NO: 212704 - DNA, 201 bp, Homo sapiens
tctgatctcttttagggctgctgacaccagctaatggacattaaaacatgtcaggaggaacttaaattactaacgatttcaagacaaggggtggtaattcyggcacagtgtcagaaactcatcaactatagactgttcaatcattattgcctaggcgtccaactatggttttgcacctcaacataccaaagaggtaaaatg

SEQ ID NO: 212705 - DNA, 201 bp, Homo sapiens
ctccagctatggataatatgtccctccctaataaaggtatgggactttcaggcataacaagaaaggcatgtggaaagagcaaagtctcccaattacaactgaggaggtgggagaaatacctggttacaggccatcccaggattcctcagatggtaagggaccttgaggacagctgtccgggacaggagattaacacgagaa

SEQ ID NO: 212706 - DNA, 201 bp, Homo sapiens
tccagctatggataatatgtccctccctaataaaggtatgggactttcaggcataacaagaaaggcatgtggaaagagcaaagtctcccaattacaactgaggaggtgggagaaatacctggttacaggccatcccaggattcctcagatggtaagggaccttgaggacagctgtccgggacaggagattaacacgagaaa

SEQ ID NO: 212707 - DNA, 201 bp, Homo sapiens
cgggcaccctcagtccttttgttggattatctggttggcggcttctggcccagagaaactttgtgccttccagtgatttccgcggcatagtggacacagaygagggggcagcttgtttctcgttggacgatcttttttaaagtatttctgcaaaccacactgataacaagccctactgggtgattggcctgctccattttc

SEQ ID NO: 212708 - DNA, 201 bp, Homo sapiens
gctaaagaggtagccaaatgtttgttcattagagtcatgggtactggagcaacctatttattcaggcattcattgaacaactatttactgagcatctgttwgatgcccggcattgctcgctccagggccacagctgtgaacaagatggagggtccctgcctttatgagcttatgagcttatgagccaaacacatagtcaca

SEQ ID NO: 212709 - DNA, 201 bp, Homo sapiens
cagggccacagctgtgaacaagatggagggtccctgcctttatgagcttatgagcttatgagccaaacacatagtcacaccggctcaggctatcacaatcytaagtggtacttaggaaagcacagggtgttaggggagcatgtgaccttgagacctaacctggttgaggggagagggactgttcagggaagacctgcttaa

SEQ ID NO: 212710 - DNA, 201 bp, Homo sapiens
gcacttttgccatttttggccagttaaattctgttgtgggggctgtcctgtgcattgcaggatgtttagcagcatctctggcctctacctactaaatgccrgtgcaccctccctgcagttaaatgaccccaaatgtctccagacataggcaaatgttccccggagaacaaagtcatctttggttgaggaacaaaatgaacc

SEQ ID NO: 212711 - DNA, 201 bp, Homo sapiens
atcccaaacagaaactgtactcatgaaaacagtagctccccattcttccctcccccagctctggaaacaaccatgctactttctgcctctgcgcatttgastactctaggtacctctgtaagtggaatcctagtgagaggtgaagccagctgggcttctgggttgagtggggacttggagaacttttgtgtctagttaaag

SEQ ID NO: 212712 - DNA, 201 bp, Homo sapiens
tttaagagctgtaacgctcactgcgaaggtctgcggcttcattcctgaggtcagggagaccacgaacccacgggaaggaagaaactcaggacacatctgarcatctgaaggaacaaactccagatgcaccatctttaagagctgtaatactcaccgggagggtccgcagcttcattcttggtgagtaagacccagaaccca

SEQ ID NO: 212713 - DNA, 201 bp, Homo sapiens
atcctagcactttgggaggccaaggcaggaggcttgcttgaggccaggaattcaagatcaagtttaagtccagcttgggcatcatagtgagaccctatctmtacaaaaataagcagccaggtgcacctgtggttgcagctacttgagaggctaaggtggtaggatccccaggagtttgagcctgcagtgagccaagataat

SEQ ID NO: 212714 - DNA, 201 bp, Homo sapiens
ggactacaggcacccgccaccgcgcccagctaattttttgtatttttagtagagatggggtttcaccgtgttagccaggatggtctcgatctcctgacctmgtgatccacccgccttggcctcccaaagtgctgggattacaggcgtgagccacctcacccagcctcagctgatcttttgatgggcatcaaagccactagg

SEQ ID NO: 212715 - DNA, 201 bp, Homo sapiens
taggtagccatttcccagaaaacctgacacccgtatctttagtccggcagccgcactagtcgcttttaactggccgataggtgcccagtatttagccaccraattctaaggaaaaataggacagaatagcaagcgaaaggggtccgatggtactcactgcttggtgatggtccaaggtcaccaagatgtgtccagcattgg

SEQ ID NO: 212716 - DNA, 201 bp, Homo sapiens
caggtgactgcagaggaacctgctaaggctgggtggatattggccatttccaccgagtatccatgcaggaattcccattcagccatacagtgtaggcagcttttttttttttttttttttccacgaatagctgagaacttttacttaaaaataaaaaatgtaaagcctgattttaaatattggctcatattttttcctttt

SEQ ID NO: 212717 - DNA, 201 bp, Homo sapiens
aattagtaaatacagggtctcaccatgttgaccaggctggtttcgaactccttaacctcaggtgatccgcctgcctgggcctcccgaagtgctgggattaygggcgtgagtcaccgcgcgccgaccctccttcagtcctgtgtcttgtacggtgaatgtggtttctaaggtggataaggaggcagggattccttgcctagc

SEQ ID NO: 212718 - DNA, 201 bp, Homo sapiens
aaatgaagtggtagaaaacagaaattactactggaaatgatcccttctgactgtcaaattctgttttctatgaagtgtgtggtatttcagctatactgtatttttttttttttatagagccaaccaaggactcttgtcactatttttatttattctaatgagaaatgtattcatggttccaggtcagtatgtcaaatgtct

SEQ ID NO: 212719 - DNA, 201 bp, Homo sapiens
cttaagccaagagagctgaagctgatgtttgatggttaccttttggtatatatgtcatggcatgagaaagaatcactgctttagtctgtagaagctttgtygtcctttgccatgccctggggagggagcaggaccatcctttgcacccatcagagcattcctagttcttttgttgccagatacgtaagagtggttgagttt

SEQ ID NO: 212720 - DNA, 201 bp, Homo sapiens
accctaagccagaatttcattcctttttaagaccaaatactgatccgttgtatggatataccacatcttgtttatcacgtgctttttcttaaccattaggrtggtcttcattcagatacaatgcaatcatggacattcctttggctttcaagggaattaatgaaatttgtatgggtaaagccatatatgtatttctagcaa

SEQ ID NO: 212721 - DNA, 201 bp, Homo sapiens
tttttgaattatgatacatgtaatttattagtacaatagtgagagacaggactagctggatttcctaggcccactaagaatccctaagcctagctgggaargtaaccgcatccacctttaaacatggggcttgcaacttagctcacacccgaccaatcaggtagtgaagagagctcactaaaatgctaattaggcaaaaac

SEQ ID NO: 212722 - DNA, 201 bp, Homo sapiens
acactacttatgctaattaacaaaacctctggtttgcaattaaaaatcctgaagcacatgctatatctgctgctggagtgcccaccaccatggctggctgrtttttgtatttttagtagagacggggtttcaccacgttggccagggtggtctagaattcctgacctcagatgatttgcccacctcggcctcctaaagtgc

SEQ ID NO: 212723 - DNA, 201 bp, Homo sapiens
gcattatgaggtagattggtcatgctcagtaatattattttgggtcaaaataagatgtaaatttttttttcttttgagaccagtctcgctttgttgcccargctggagtgcagtggcatgatcacagctcactgctgcttctccccagtcagctcaactggttctcccacatcagcctcccgtaaatattttttaaaaatg

SEQ ID NO: 212724 - DNA, 201 bp, Homo sapiens
tgttattcgtatggtaggtctcctgatctagttctctaaattactgtatgttttgttttattttctcatccctcagtttgtctatttgcttaactcgctgygagtgtttctcactttatcttccaacccttttattgagtttctctatttttggagctggagtcttgctctgttgctcagggtggagtgcaatggcacagt

SEQ ID NO: 212725 - DNA, 201 bp, Homo sapiens
ctaccatttatcctctgattcagccactttgtttttgttttaaacctaacctcatagcaaagaggacagttttttgagcctgagaagatttattgtgaaaractctctctctctctctctctctctctctctgtatatatatatatatatttatttatatttataattgcttcttttatttcagtgctgctcttcatttca

SEQ ID NO: 212726 - DNA, 201 bp, Homo sapiens
aagaggatgctttttcttctgttaacgtgctaataaatactattttcattaatgagtgaaatgcaagggttatttaaatgacattttgtctcaaagtagtwtaatgattacaagaaaaaaattctgtagaacttttcatgtcattaattcaggcatggagaactgatattttttcttctgtatgtaaactacacagatgaa

SEQ ID NO: 212727 - DNA, 201 bp, Homo sapiens
atggcattgaatctataaattaccttgggcagtatggccattttcacgatattgattcttttcctcctgacaaatttacagttttccgctttgtggcatasactgagggtgtatttcatctttcctgcaaagtcaataggcagaaagggtaggtgtcagttcttcccccaggctgtcagctggtgtgtccctggtgtgcct

SEQ ID NO: 212728 - DNA, 201 bp, Homo sapiens
gagttagcataatgccttcaggattcattcatgttgtaccctaagccagaatttcattcctttttaagaccaaatactgatccgttgtatggatataccasatcttgtttatcacgtgctttttcttaaccattagggtggtcttcattcagatacaatgcaatcatggacattcctttggctttcaagggaattaatgaa

SEQ ID NO: 212729 - DNA, 201 bp, Homo sapiens
cttcccccaggctgtcagctggtgtgtccctggtgtgcctttgggagagagagcatggggaaagaggatgctttttcttctgttaacgtgctaataaataytattttcattaatgagtgaaatgcaagggttatttaaatgacattttgtctcaaagtagtataatgattacaagaaaaaaattctgtagaacttttcatg

SEQ ID NO: 212730 - DNA, 201 bp, Homo sapiens
ggggccagattatgtgggtttgaagcctagctcttctgcttactagccatatgacgttcgaagagctatttaacctctttatgcctcagtttccttatctrgaaaataatactttctatgtagcattctcctgaagattctatgtgttaatacgggtaagccatttagaagagttccagagcatattaagcactccaggtt

SEQ ID NO: 212731 - DNA, 201 bp, Homo sapiens
ctaagatgagatgaggctatgaaagtgcaattggccagaaagaactccaccctgaatggcaaggccttcgccttgtgatcttacctgtttcctgctccttyccttgacctaccttgggtggcgtttgggctccctcacttgggtcacagtcctccgagatactggcatggctttgacatcaaacacagtagttggtatttt

SEQ ID NO: 212732 - DNA, 201 bp, Homo sapiens
cgaagggcaataggttggtgacccaggtttatccatcagcggtttgtttatgcatagatgtgtgcatatgcttacgtgcatatgtaggcatgagccaccgygcccagccagttttgtcttcttgaagatgtctctcccagggccttctgacaggttccagtctgctgtggttgtctgttggcttgttatatggcctagatg

SEQ ID NO: 212733 - DNA, 201 bp, Homo sapiens
ccacactgataacaagccctactgggtgattggcctgctccattttctgtcctctctaaaccagcaaggtttgtttgtctgagagccatgactaaggctgyggcctttctctgatcccgcttttccttttaggcctgttcctcttggtccctattatagaataccgaggttgcgaggtttaataatgtctccagattttgt

SEQ ID NO: 212734 - DNA, 201 bp, Homo sapiens
tttttcctaattctccttcatccttctagaacacaggtcagcagacgtttacgactccagtccccatgatctgagttgaggtcccagtgggatccatacaggggatggcttgctgaccggtagggaatttgtccctttcttcagctgtcattctatcatttacttgactaagataccaggtatctccaaactctcgggctg

SEQ ID NO: 212735 - DNA, 201 bp, Homo sapiens
cctaattctccttcatccttctagaacacaggtcagcagacgtttacgactccagtccccatgatctgagttgaggtcccagtgggatccatacaggggatggcttgctgaccggtagggaatttgtccctttcttcagctgtcattctatcatttacttgactaagataccaggtatctccaaactctcgggctgcagct

SEQ ID NO: 212736 - DNA, 201 bp, Homo sapiens
cttgactagctttccttcttattgactatataaaagataagtatttattttcagtattcttagaatttagtatttttgtatttcttggtcttaaaagtcamgtaccaagaaccattactttcaggtactggctttcctctgttccaactcacggtggaattatttcatttctcatttcttcttaggttatgcgatctactt

SEQ ID NO: 212737 - DNA, 201 bp, Homo sapiens
agcagacgtttacgactccagtccccatgatctgagttgaggtcccagtgggatccatacaggggatggcttgctgaccggtagggaatttgtccctttcktcagctgtcattctatcatttacttgactaagataccaggtatctccaaactctcgggctgcagctgaagccacattcctttcatttaatggcccagagt

SEQ ID NO: 212738 - DNA, 201 bp, Homo sapiens
tgtaatttctacttccctcaggtggacatttttccccatcagagagagaatattggggccaggccatagtgcagaaaaaaataagccacttctttttcagsgtttgcaggtcagattgtcccagtggcttaggatgcatttcaagggtgagcctgttgatgcctgagtgtttcccatctgaaagaaaaaaccacccgcggt

SEQ ID NO: 212739 - DNA, 201 bp, Homo sapiens
tccctctccctgaggtcattttgtccatcttcccactccattaagcactcagcggcaccctgtctatctggtggtgctgactctctttatgttggaacacttttagtgaccatatcgtcaccttaggggcacctgatacctatcttctttttcccttccttgactagctttccttcttattgactatataaaagataagta

SEQ ID NO: 212740 - DNA, 201 bp, Homo sapiens
ttgtcgtgtgtgtgtatttttaaatatgagatggggtcttgctatgttgattcaggttgttccaggctgatctggaactcttgggctcaagtgttcttccygcctcaaccttccaagtagctgggatcgtaagtgtgtgccaccatgcctggcctgaaaacttttttatttcagcactgtttatactttaaaaaaatcact

SEQ ID NO: 212741 - DNA, 201 bp, Homo sapiens
ccctctccctgaggtcattttgtccatcttcccactccattaagcactcagcggcaccctgtctatctggtggtgctgactctctttatgttggaacacttttagtgaccatatcgtcaccttaggggcacctgatacctatcttctttttcccttccttgactagctttccttcttattgactatataaaagataagtat

SEQ ID NO: 212742 - DNA, 201 bp, Homo sapiens
acatttttgttaattattttggtatttattccttgtgtgggtgtgtaatttttggtaaagttgcattaaaatagtatagcatgtgcgcatttttacttccytttaaacttcttttcttcttggaaatctctttggctatgaaatctcattttcctttcacccttctgattcttagccgagttttacttaagaaaacgttgt

SEQ ID NO: 212743 - DNA, 201 bp, Homo sapiens
aagacatttaatactgcttcaagttttaaaatgtaaataattaaaattttaaaaaagtatttgttgagactagcctcatttcaagtgctcagtagttgcawgtgactactagctaacattctctactgcatagccctgaagttaaccattttcaactttttacagatttctttaggtgtgtattttcatatctctaaataa

SEQ ID NO: 212744 - DNA, 201 bp, Homo sapiens
aatacactagggctgggtgcagtggctcacccctgtaatcccagcactttaggaggccaaggcaggcagatcacctgaggtcaggagttccagaccaaccwggccaacatcatgaaaccccgtctctactaaaaatatagaaattagccaggtgtggtggcgggtgcctgtaatcccagctacttgggaggctgaagcagg

SEQ ID NO: 212745 - DNA, 201 bp, Homo sapiens
caaggcaggcagatcacctgaggtcaggagttccagaccaacctggccaacatcatgaaaccccgtctctactaaaaatatagaaattagccaggtgtggkggcgggtgcctgtaatcccagctacttgggaggctgaagcaggagaattgcttgaacccgggagccagaggttgcagtgaaccaagatcgcagcactgca

SEQ ID NO: 212746 - DNA, 201 bp, Homo sapiens
ctgagttgggaggattgcttaagcccaggagtcgaggctgtggtgaactgtgattgggccaccacattcaagcctgggtgacagagcaagaccctgtcccaaaaaaaaaaaaaaaaaaaaatgctcaaactaaagagtgataaatacattgtatacatgtcttgtttctcttgaaatgtgtacattttatcattccataat

SEQ ID NO: 212747 - DNA, 201 bp, Homo sapiens
ctcaaactccagacctcatgatccgcccaccttggcctcccaaagtgctgggattactggcgtgagccgccgcgcccgaccatgatttcttttattgtacrtacttgttggcatattttactcacttgtactcaatggcattttttcatattgtttgtttattatatgtacttttatgttttttggagatggagtctcact

SEQ ID NO: 212748 - DNA, 201 bp, Homo sapiens
attcccctgcctcatattccggagtagctgggattacaggcgcctgccaccatggctggctaatttttgtatttttagaagagacggggtttcaccacgtwggccggggtggtctagaattcctgacctcagatgatttgcccacctcggcctcctaaagtgctgggattacaggtgtgagccactgtgccctgcgacact

SEQ ID NO: 212749 - DNA, 201 bp, Homo sapiens
tccgcccacctcagcttcccaaagtgctgggattacaggcatgagccaccacacctagccaacaaactttctgcgcgttgaatatgtcactcactgccttytggtctccattgttgtttatttgaagttgttaatcattttcaggatttgttgtataatcacttttctttaacattttcaaaatcctttgtccttgtcttt

SEQ ID NO: 212750 - DNA, 201 bp, Homo sapiens
tgtcaacacagttttatcatcataaattaatgtagctgtcttttaaatcagatgggaagagagttacaaagaaaattacattcatactataaatttgtctrtatatatatacctttactgctgctttctattttttcatgtggatttgagttgctgtctagaatcttttcatttctgcctgaatatcttcatttagtattt

SEQ ID NO: 212751 - DNA, 201 bp, Homo sapiens
agaaagatcaaatctttccaagatctgaggtgtttggctttgtggcagctggaaacagagggccgggggtgttttatttgggtgacttaaaataaagttartgaaggatgtgtggtggaatgtgtatcaggaagtcttatcactgggtctggagagttttccgaatgaaagaatagaagatgccagattttcctagattcc

SEQ ID NO: 212752 - DNA, 201 bp, Homo sapiens
cactttacactggaaaccattcagccccagggcaatgggaagtgattgtccatggtttgtttgtttttttttttcttttgagatgaagtcttgctctgtcrcccaggctggagtgcagtggctcaatctcgtctcactgcaacctccgcctcccggattcaagcgattctcctgcctcagcctcccgagtacctgggagct

SEQ ID NO: 212753 - DNA, 201 bp, Homo sapiens
ctctctcatggtttgcagagcatacggtaaccatgaccactttacactggaaaccattcagccccagggcaatgggaagtgattgtccatggtttgtttgtttttttttttcttttgagatgaagtcttgctctgtcgcccaggctggagtgcagtggctcaatctcgtctcactgcaacctccgcctcccggattcaagc

SEQ ID NO: 212754 - DNA, 201 bp, Homo sapiens
gagaggcctcgagactttagatgaatgaaagattgctagggttgtttgtcagaaagttttaagggttttggttttgcataatggatgatctctctggaatrgattgaaccaccgccccgttcaagtaatctcctgatttcattggtttttgcggtttaacaagctcctctgtaactgtcttgggaattgcgttctgaaatt

SEQ ID NO: 212755 - DNA, 201 bp, Homo sapiens; identical to SEQ ID NO: 37617

SEQ ID NO: 212756 - DNA, 201 bp, Homo sapiens
agttatctctaaatccgggttttgctttcctcctatgctgttgatctaatgtgatataaaaatacatctgagattagaacgtgtgcatcagattttcaggscaagatagactaatggattgggatgcatgtgttaaaatctacagagaagcgagcctcacttggtggattgacacaggccagtgattaataaatttggtga

SEQ ID NO: 212757 - DNA, 201 bp, Homo sapiens
tccagttggccccttcccattgacattacagtaatgcagttgtgtgctgtttgaaaaagcatccctagttacacagaatgatttacaggacaccagactcygcatttcagaggtctccagtgtaccataaaaaatatattataaaagaataatctttatctgaactaaagctgcagtgaaggaaactcgtgtccagctgag

SEQ ID NO: 212758 - DNA, 201 bp, Homo sapiens
actaaggggatttgaggtcccctggaatctcttaaaatcaccctcaaacgcatttgcgtggctggaattcaactttagtgtgttaaggtcagagcaaaatsaatagggaacagttacaaagatcatgctggcgttttggctttctagtaaagaaaggatgcctcccacctccgtaactttccatcccccttggctgaatga

SEQ ID NO: 212759 - DNA, 201 bp, Homo sapiens
tttagaaataacttaactgaagaaatatataataaatgtgtgcattatgattgatttcttccacttttaaaaatatgccttatgctttaaaagcttgagakaagtacacttagtcataaacattccagcacattacagggaagcagcaaatgtgtctgttaacgtcttgtctgtttcaacagagagaactaattgcagtat

SEQ ID NO: 212760 - DNA, 201 bp, Homo sapiens
tttttttttttccaattctaattttagaattatgagaattgtcaaatgccccttcagggaggcagaaagatcaaatctttccaagatctgaggtgtttggstttgtggcagctggaaacagagggccgggggtgttttatttgggtgacttaaaataaagttaatgaaggatgtgtggtggaatgtgtatcaggaagtctt

SEQ ID NO: 212761 - DNA, 201 bp, Homo sapiens
tttcctagtccaactcttcatcttttaaatgatggtatctgtacctaaacagtatagttccttcctataacaggtatgctatctgggatctatttgactgrttagagatccacaggttaattaaaggttttaatttttccactgtttatttattgttattttgtttaaatgtgcttccagtagcctatgaattctgcacat

SEQ ID NO: 212762 - DNA, 201 bp, Homo sapiens
attttttttctctttggcactaggtatctcgttaatatttagacattatatacattttctttcaactggttttcctattacgtgatcaaacaaaaccagaratgccagccacagcagccaacaagggaaaagcagccccgtcaggcacccagctgtggctggggggcaaatggtactcactagagccacccccaggaggca

SEQ ID NO: 212763 - DNA, 201 bp, Homo sapiens
aagacaactctataatacctcccatcttacagatgaagaatctaaggccaacagattaaataatttgctcacgatcacacggctaaacaagtagaaacccrccttccctattgtctttttattgagcctttttacctaagcaagtttgacttgaaagtttcagtcttgccattgaaagagccataatacaccctttcagtt

SEQ ID NO: 212764 - DNA, 201 bp, Homo sapiens
aagatcagtggttactgggaaatagcggggggggggggggtggataggagggaattggctatagaggggcgtaagaaactttttgaaaagataaatttatrtgttctatatcttgattgtggtggtggttacactatgtttaccttttttttttttaactcagaactaactgtacacttgcaatgggtaaatttgtgtatt

SEQ ID NO: 212765 - DNA, 201 bp, Homo sapiens
tgggtcggagctgtggttggggccatcccgcctgtcatgggctggacagcggccacgggcagcctcgatgctggtaagtgtcccgcgatgtggagtctcayatgagcacactcggtcaaggaggcatttcctccctgagctgtagcacttggttcgattccattccatcccacgttaattcttttagcaaatgtgctgatg

SEQ ID NO: 212766 - DNA, 201 bp, Homo sapiens
ccttcatctgattactcaacagattgtgtcttttcaaccccctgatttaccctggaatctgtgccctctcacctcagtgctttagcttcagcccatcatcrgttttgcgtgggttattacagcacatcccagctgacttctctgccttcttcctaaccctccttccatctgtcttccactcaactggcagataggtcttcc

SEQ ID NO: 212767 - DNA, 201 bp, Homo sapiens
tcagcattgccaacacatgggtcggagctgtggttggggccatcccgcctgtcatgggctggacagcggccacgggcagcctcgatgctggtaagtgtccygcgatgtggagtctcatatgagcacactcggtcaaggaggcatttcctccctgagctgtagcacttggttcgattccattccatcccacgttaattcttt

SEQ ID NO: 212768 - DNA, 201 bp, Homo sapiens
catggctgcaacttagtcacttgggcttcaagcaacctaataattaaagtgacaatgaaaatatcatgagttctaacagttgcagtttcctgatggctgtrtaccacgatggctaggaacacagaggtgagccctggctgtcactacttgtagttgtgtgacatggggcaaattacttttctgtttcgatttcttcatctg

SEQ ID NO: 212769 - DNA, 201 bp, Homo sapiens
cattttgtgtgtattcaccccaattcactttctttcccaaatctttttccttaataccttaatttatgttccaaagtcaggcacctataagccatcctagrcactctttttctgttatctccttcatctgattactcaacagattgtgtcttttcaaccccctgatttaccctggaatctgtgccctctcacctcagtgct

SEQ ID NO: 212770 - DNA, 201 bp, Homo sapiens
cataaagaggattccccatatccaggaatcagccagatcagtgctgcctctactggataggtggattatttgtactttgtcagtgccgattttaggtagtrtgattgagttgagttggagatgatcactccacgttctctgcctttttccagcccgttgctagctgtgtcctttgccacttgttgtgctgttccaggagtt

SEQ ID NO: 212771 - DNA, 201 bp, Homo sapiens
cacttgggcttcaagcaacctaataattaaagtgacaatgaaaatatcatgagttctaacagttgcagtttcctgatggctgtgtaccacgatggctaggracacagaggtgagccctggctgtcactacttgtagttgtgtgacatggggcaaattacttttctgtttcgatttcttcatctgtaaaatggagacagtaa

SEQ ID NO: 212772 - DNA, 201 bp, Homo sapiens
cctaagaagttcacctcaggtaggaaatgcagacacgtaaatgtctgcctggaccctgtggcttgctcaggaaaagacgctcacagttgcttatcacagaygacacccacactctggctgccacaccctcttagtgactttccccttggatgtcccaaaggcatctcagactgaacacacccaaggtcacactaatgacct

SEQ ID NO: 212773 - DNA, 201 bp, Homo sapiens
gtttcataaagaggattccccatatccaggaatcagccagatcagtgctgcctctactggataggtggattatttgtactttgtcagtgccgattttaggyagtgtgattgagttgagttggagatgatcactccacgttctctgcctttttccagcccgttgctagctgtgtcctttgccacttgttgtgctgttccagg

SEQ ID NO: 212774 - DNA, 201 bp, Homo sapiens
aagttgtttgttcatgactaaatataaaatggaacactgtgcaggaggcattgtctcagtcagtcttcaaccctaggaggaaaagatgatcatttctcttrtagagaggagtaagtgaaacctagctgccctatagccaggaagggacagaacctatatgaatccagaacactctaatcctgactctcttaaccactttac

SEQ ID NO: 212775 - DNA, 201 bp, Homo sapiens
caggcccagtgtgacgtgggagcacaaagagaagtatctacctcaaactgaggagaccaaggattacttctcagggaatgcgtcttgaagctgagaaccaraggttgagtaagaaataagccattctgcctgttccctgctgagctcttgtttctgttccttcctcctccacctactctagtttggtggtccttaatctcc

SEQ ID NO: 212776 - DNA, 201 bp, Homo sapiens
cggcgcccagcgtcccgtgaggagagaggacacagggatcccggggagcggccccagactcgtaaattatggccgcatctccgcacactctctcctcacgyctcctgacaggtactgtacccgccttgggcacgaccttgggggaaattcttctcttattaccacgtgcgaggccgtggttccggctggctgcaaccttgg

SEQ ID NO: 212777 - DNA, 201 bp, Homo sapiens
cttttctgtctccctagctgggttcagagcccgttctctggactcccataatcctttgcacaactctgtccttctactgcacatgtgattataattaaccrggttctcttgtctcagtctttctagtggattaggggttggcaaacattttccgcagagtcagacagtaaacattctatgctttgtgggctatgtggtctc

SEQ ID NO: 212778 - DNA, 201 bp, Homo sapiens
ctccagcatttcatcaaagttctgcctcctacgcatttgtttgtgcttcttctgtgtctggagtgcttgtccctcctaccctatgcccttaaccatctagycctgctcagcctttaagcttcccttgaagagtatttgaggaaaatcatccttgcccttttctgtctccctagctgggttcagagcccgttctctggactc

SEQ ID NO: 212779 - DNA, 201 bp, Homo sapiens
acaggcgtgagccaccgtgcccggcctaaatctgaaatttaaccctaatttctctagctacaagactaggctcttaatcagtctgctgtgttgaacttctrctaggtactccagcatttcatcaaagttctgcctcctacgcatttgtttgtgcttcttctgtgtctggagtgcttgtccctcctaccctatgcccttaac

SEQ ID NO: 212780 - DNA, 201 bp, Homo sapiens
atatccattaaccagatatccatccaaaaaccaaatatccatcagcaagtaaaaagatgcacaaactgcgatactaccatataattgaatattactcagcrataaaaaggaatgaactattgaaaccctctgcaagatgatgaatatcaaaagttattattcggagtgtaaaaaattcagacaaaaagagtccattttatt

SEQ ID NO: 212781 - DNA, 201 bp, Homo sapiens
tttaaacacctcaactatatgatatatgtgtgtttagctttgagagtgaaaagcatatgtccatacaaagacttgcacacagatgttcatagctgcttttyggtaatagttaaaaactattagaaatattcagatatccattaaccagatatccatccaaaaaccaaatatccatcagcaagtaaaaagatgcacaaactg

SEQ ID NO: 212782 - DNA, 201 bp, Homo sapiens
cttagcctttcttctcctcatcttgcttctagaaaccagatgtcagagtaacacttgaactggaagcaaactgctaaggaatttaaatgataaaaaggagwaaaaggactaataaaaaaaatatttcacaaaaaatttaaatattgaataaattatgaaaggagaaaactcaggtgtgtatgtgtgtgtgcctgtgtgcgt

SEQ ID NO: 212783 - DNA, 201 bp, Homo sapiens
ttctcaagatcatttgaatagaatggactcacaggcaatattattgatgtgtgagctatgaacattaagacttctttaagaattcagaatttttttccagygtagataaagtagcctagagcatgatggaaacacatgaaactagtttgtctgattaaaagaaaaagttatacaaatcataaaattaggaaggcagtttgt

SEQ ID NO: 212784 - DNA, 201 bp, Homo sapiens
caaggaaggtgctttgcttccactcagaagccttgttccaatataaagggtcatgatgacaacgttgatgataatgacagttgcagacagcggagtgtagkccccatcagacttttgtctctgtaccgccagagtggtctttaatatcctttcactcgaagaaactagtgacaaatgtatattggagctggaatgttcttc

SEQ ID NO: 212785 - DNA, 201 bp, Homo sapiens
gcatcccagatgctcatggataaatctagagtcgtggtgcatttggctaaagagctcctgcatgtgaggaagtctggagaaaagtgctccagaggggtcayaatggagctgtgttaacctctgctgtcagcttctcaccacggagtttatccctattacttggagccaaaccactgcatctgttctccttaggctgtgtca

SEQ ID NO: 212786 - DNA, 201 bp, Homo sapiens
ttgaagtccccttgtatacctccaccttagagaaatgtgtttcagcagttggtgagggatacagttgaggaacaaataggaaacagagggatggaagagakaaaggcaaggaatgtgtgtgatccactccatcaggatgcttggctttgaagagtgttgaagcaagaggggtattaccttgggggaaatatgaagaaagta

SEQ ID NO: 212787 - DNA, 201 bp, Homo sapiens
tcatctgacttagcagtttcacatctaggaatttatcttcggaatttcttctaaccagagctgtgaacaaaagtctacccataagatatttatcccaacaygctttttgatttttaaaaatggaaaaagactgaatgtctgaaaaaaagtatattggttgaattaattgtggtatatccaaagaataagccactgtgtgtt

SEQ ID NO: 212788 - DNA, 201 bp, Homo sapiens
gcatttcctccctgagctgtagcacttggttcgattccattccatcccacgttaattcttttagcaaatgtgctgatgtggcagactgaaattctgtggaygcagagtaaagagagaccgtgtcatcctggctggtgggtgcacatgacatacactttcccttgtagggaatgtctgggagaaaaaaaaggaagcagtgct

SEQ ID NO: 212789 - DNA, 201 bp, Homo sapiens
agtaacctgaaaagaagaaagaaaaaaataaataatcgtattggaaaatgtcattgtgtttaggaatactaagacatcgtaaaaaaaaaattaaaagtagrtagtttgtagtataggatatggggaaaggaaacatatgtcaaagttttttacaaaattaaagggaacacaacttaccagatgtcccaaacttatggggaa

SEQ ID NO: 212790 - DNA, 201 bp, Homo sapiens
ggcagcccccctgtgaagcagggtctgagccagaccccacagcctcctgcccccaggcacactggcacccccaggtgagaaaggagggatcttagctcatyggctgccccaccagcctgatgtaggcacctgtctcccagccaccctgtgatgtaggcaggcagcgatgagagcacagggtggcagagcttctgaggtgcc

SEQ ID NO: 212791 - DNA, 201 bp, Homo sapiens
agtgtaatttggatatatttaagttatttaaatgaatgaccagctcattgatttgtagacatcataaaagggcagcttattgaagaggaagtcaaagggcwttcctaagcagttactgtaatttagaagaataatcagaaagcaggttaagaaaagccaaaaggagattgtttaaatatatttggatgcattcattgaaga

SEQ ID NO: 212792 - DNA, 201 bp, Homo sapiens
cgggtcccagcgggcggaaatggagctcagcgctccagcacaatggttgcacccagaggtagtactgaagtagatactgaattccctacaagtgtttgccygtgtgtaggggcttctttgctccccacaatgtggggaggtgtgaggagcatcaggtgggcaggagccagcgatggtaagcgtcctgcagcgcaggcagcc

SEQ ID NO: 212793 - DNA, 201 bp, Homo sapiens
agtgtattataaataatttaactgcacctgtctactgagcatcttctcacttttttgtaataaaattttcctttgctatggagaaaatagtatatgtgttytagcggcgatactgtgtctttgtgtctctctaccagcaccctccccgtgctcacaggatagtcacctcattccttggccatgatgattcatggccgtgat

SEQ ID NO: 212794 - DNA, 201 bp, Homo sapiens
aatctttgcatatatccttatttatttcgatagttttctaaaaatatgtggtcatgtcaagagattatgaagttttcaaaataaaaagttaaaattaagaraaactacttcaagtaaaactaaatgtcttcccagtcttttgtttgtttgaaatcaacttacacttctgtttgtcagtgtgttaaagtgctcatcattaat

SEQ ID NO: 212795 - DNA, 201 bp, Homo sapiens
ggaagcgacagcatgcctgttttgcacaacattgccagcttattgataaaaatgtaagaaaattctacaactctctaaaatggaattttaggttgttattygtaatgtttacagtgtcaaattcgttctttgttgaattagccttgtattaagggtattgccattaacagggaaacaatttggctattgaaaaataaattt

SEQ ID NO: 212796 - DNA, 201 bp, Homo sapiens
tgtcgtatgattccatttatatgacattttggaaagccaaaactaggcacagaagtaagatcagtggttactgggaaatagcggggggggggggggtggayaggagggaattggctatagaggggcgtaagaaactttttgaaaagataaatttatatgttctatatcttgattgtggtggtggttacactatgtttacct

SEQ ID NO: 212797 - DNA, 201 bp, Homo sapiens
ggaatgcagtattaggctatttgcataatggagtaaactgaaggtgcttttaagcccacaggaagctcctcccaggtgattgcatcccaactcaagactcyagccaccccaggccctcagcagacccaggaaagaagaggctcagcaagttgtattacaccagtgtgccccacatacagttgggagactctgggttaaact

SEQ ID NO: 212798 - DNA, 201 bp, Homo sapiens; identical to SEQ ID NO: 37619

SEQ ID NO: 212799 - DNA, 201 bp, Homo sapiens
aatgtgatgtcatttgcccacatttcaatggcattatttgtttgtttgtttgtttttactattgagttgtttgaattccttgtacattctgggtattaatrctcttgtcacacgaacagttttaggcaccattttcaatactatattacagaggtgaacaaaacagaaaaattcttgctatcgtggagcttgcatgctagc

SEQ ID NO: 212800 - DNA, 201 bp, Homo sapiens
atgagtacaggtatctttttgattaatgttgatttctttccttttgtgtagatactcagtagtgggattgctggatcaaatggtagttctatttttagttmtttgggagatcgccatactattttccatagaggctatactaatttacatgccccgtcaacagtgtgtaagagttccctttcctctgcatcctcatcaaca

SEQ ID NO: 212801 - DNA, 201 bp, Homo sapiens
aaataaataaataaataaataaaataaaaaggtgtctgtgtgtgtgaaaccacaatctccacgttctgaatgtaattatgccaaatatattttcttcttayattctttgcatttcttttaaacatgttttaaaatttaattttcttttaaaataggttttgttttcccattttcttcacaatttccttaagttctgaattt

SEQ ID NO: 212802 - DNA, 201 bp, Homo sapiens; identical to SEQ ID NO: 37632

SEQ ID NO: 212803 - DNA, 201 bp, Homo sapiens
tgtttggtttgtaagctgagcgatgcagccttgtcctctggctgttattttgaagactgaggcgcctgcagcctggtgggaaagagtgctggggtcctttkgtgaggtttgcagtggatgagggaagggagggtttaaagcctgggcttggcatccctgggctagatgacatctgcgtgttcatcctggtttatagttgac

SEQ ID NO: 212804 - DNA, 201 bp, Homo sapiens
ccagaccccacagcctcctgcccccaggcacactggcacccccaggtgagaaaggagggatcttagctcatcggctgccccaccagcctgatgtaggcacmtgtctcccagccaccctgtgatgtaggcaggcagcgatgagagcacagggtggcagagcttctgaggtgccaggcaggctctcccaggagaggaaaccat

SEQ ID NO: 212805 - DNA, 201 bp, Homo sapiens
ataaataatttaactgcacctgtctactgagcatcttctcacttttttgtaataaaattttcctttgctatggagaaaatagtatatgtgttttagcggcratactgtgtctttgtgtctctctaccagcaccctccccgtgctcacaggatagtcacctcattccttggccatgatgattcatggccgtgatggttctgg

SEQ ID NO: 212806 - DNA, 201 bp, Homo sapiens
aactgcacaatgaactgtaagcagctcagcttttctccccgtcacagtgccaacggctttcagtccagtgcttgctacagagagtgctgtgccgcaaagcrtgggcccagcccagagagtgctctttgtggttgttctgtcagggtagtcaggactctgcggcccagctgcttctgtgcacaggaaataacttcattttac

SEQ ID NO: 212807 - DNA, 201 bp, Homo sapiens
atgaattgttatttgtaaggtgctggaccatggtgagggctcaatttgggatctgtatgctgttgttatcattcaggagtcctccttcatacagtggaggractggcacagatcaggaaatggaagattttgtttggtttgtaagctgagcgatgcagccttgtcctctggctgttattttgaagactgaggcgcctgcag

SEQ ID NO: 212808 - DNA, 201 bp, Homo sapiens
catatttaagacaaaacacatatctttgctgtgatgaaaagtactataataaacatgagtacaggtatctttttgattaatgttgatttctttccttttgkgtagatactcagtagtgggattgctggatcaaatggtagttctatttttagttctttgggagatcgccatactattttccatagaggctatactaattta

SEQ ID NO: 212809 - DNA, 201 bp, Homo sapiens
gtgagcaaggaagccggcggcgctgcctggatggggagcccgaccccaccgctcatgagctgtgcatccttcgcggctgaattcagcctctttctgccacygtctcctcatctcccacatggggctaataatcttctcccctcctggagtcattgtgaggatgaaatgaattgttatttgtaaggtgctggaccatggtga

SEQ ID NO: 212810 - DNA, 201 bp, Homo sapiens
aaaaaatactcagtggaaagtagagtggtgggttattgaacctttccctcatactatcatcatcggaacacttttgtggagtgttgtctatgtagaaaagsgtgctagttcccaaggttgcagagaggtaaataacatggtcttcattctcttggaatcacgtcgaggagaaggcaacacacgtgcattaaaaggacacta

SEQ ID NO: 212811 - DNA, 201 bp, Homo sapiens
gtcagcaaagcggtggtgagcaaggaagccggcggcgctgcctggatggggagcccgaccccaccgctcatgagctgtgcatccttcgcggctgaattcarcctctttctgccactgtctcctcatctcccacatggggctaataatcttctcccctcctggagtcattgtgaggatgaaatgaattgttatttgtaaggt

SEQ ID NO: 212812 - DNA, 201 bp, Homo sapiens
taaaatcatgtaaataaaagtacattgttagggaagaggtttaaaactatagagaaatatagagttgtttacagaatttgaatgtctttaaaatttgcttkaaaatataatacttgtcagctaataacataaaaaagaaattcaagttattttcaaaggatggggagaagtaagcaaaaacacacgctgaataagcaaact

SEQ ID NO: 212813 - DNA, 201 bp, Homo sapiens
ttttttttgagacaggtcttgctctgttacttaggctggagtgcagtggcaggactatggctcactgcacccttaacctccagaactcgtgatcctcccasctcagcctcccaagtagctggaattacaggtgccagtcgctgggcctaggtaatttttttttactttgtgtggccggtttcgaactcctgggctcaagcg

SEQ ID NO: 212814 - DNA, 201 bp, Homo sapiens
gttatgcccatgtgactgtcattagtatacctgagtgtttgtgcttgcacaaatgtatatcttattattgtctattttattgtgtaaagtggcttataaartgttctatcatgtttttgtatgtttctcaaattcccttttaaaaatgtacagaaatatcttttaaagaatttttaaattattttttccagaattatattt

SEQ ID NO: 212815 - DNA, 201 bp, Homo sapiens
ttaaagggggtttggatcataatcccaaaagacacagtcccaaatattgaagtctcaaaagatcaaaattcctaaagtctagaatccctaatgtccaaagkcccgaaaattccaatcacaggatagtaaaatcatgttaggtggaactatcactttaatctttatttaaaaattaagtatggtttaaggaggtgcatatgg

SEQ ID NO: 212816 - DNA, 201 bp, Homo sapiens
ataaaaggcatataaatattttaacatcactaatggttaataattaaacattttacttcctggagacctctaaaccggcatttaaaaaactttttttttarcctaatatatattacaagcctagaagaataaaaagggccaaatggtttatactgactatgtaaatcactggattctttcttcacgtttccaggcaatgcc

SEQ ID NO: 212817 - DNA, 201 bp, Homo sapiens
gtgaaagaggtaaacagatcagagccagggtgtgacgcacccgcctgcaggtacatccagctctgtgtcagtgctgagccaggagcactgactgccctggraagggagccagggctcacagaacaggcggagcggacttgcagcgtcctccaggttacagcactgcttccacctgcctgaagccacacacccgggtcccag

SEQ ID NO: 212818 - DNA, 201 bp, Homo sapiens
tggttatccacacatggggggtcctagagccaattgtctgcatatgccaagggacttggctacttgtatgtttaacaggtgattttcaaagtggataaaartagatattcctgacacctagtgcaaattattgttgttgttttggttttttgtttgtttgtttgtttttttggaatttttcttcaagaagtgccagggtat

SEQ ID NO: 212819 - DNA, 201 bp, Homo sapiens
ttggttgattctcaggctttgggttgtgtgaaagattctgaaattatttacaacgctaatgcttcaaacctgaaactatacagttgagccttgaatgacaygggtttgaactgtgtgggtccacttatacgtggatttatttcaaccaaacacagactgcaggatgtgaaacttgaacttaaagagggaccacattttctc

SEQ ID NO: 212820 - DNA, 201 bp, Homo sapiens
ccctggttctttacatcagtagcccattccccagggtcagttgattcttggttgattctcaggctttgggttgtgtgaaagattctgaaattatttacaaygctaatgcttcaaacctgaaactatacagttgagccttgaatgacatgggtttgaactgtgtgggtccacttatacgtggatttatttcaaccaaacaca

SEQ ID NO: 212821 - DNA, 201 bp, Homo sapiens
acattttccgcagagtcagacagtaaacattctatgctttgtgggctatgtggtctctgttgcaactacccggctctgctgctgtgtaaaagcagccatarcaatactaaggcaaatgagtgtagctgaattccaataaaactttgtttatggacactgaaattttactttcatataattttcacatgccacaaataatct

SEQ ID NO: 212822 - DNA, 201 bp, Homo sapiens
cctttgcacaactctgtccttctactgcacatgtgattataattaaccgggttctcttgtctcagtctttctagtggattaggggttggcaaacattttcygcagagtcagacagtaaacattctatgctttgtgggctatgtggtctctgttgcaactacccggctctgctgctgtgtaaaagcagccatagcaatacta

SEQ ID NO: 212823 - DNA, 201 bp, Homo sapiens
tgaaatgtcgccttctctatatagacacatatgcagatagagctatggttgtacattttcttcaaaagaaataggatcattttatatatatatatatatatgtatgtatgtatgtatacacacacacacagttttgcaacatgccattttcttatgacagtatagttttcactgacaatattcactgcatactattccatt

SEQ ID NO: 212824 - DNA, 201 bp, Homo sapiens
gtgaaatgtcgccttctctatatagacacatatgcagatagagctatggttgtacattttcttcaaaagaaataggatcattttatatatatatatatatatgtatgtatgtatgtatacacacacacacagttttgcaacatgccattttcttatgacagtatagttttcactgacaatattcactgcatactattccat

SEQ ID NO: 212825 - DNA, 201 bp, Homo sapiens
atatctgcttgcaacactcgtcctaataggataaaaggattaagtagttttagggtggccaagaggaggggacagcaggagacaagtggttaaaagtgaaygttcccaatatttcttctaaaatatacctcagttcttctcaggaggataaaaccaagtgttttgccctaggagattatagctgccagagtctaacactta

SEQ ID NO: 212826 - DNA, 201 bp, Homo sapiens; identical to SEQ ID NO: 37628

SEQ ID NO: 212827 - DNA, 201 bp, Homo sapiens
gcatggaagaaatcagagccgattctaaagattttgacatgggttatagagaagttgtatgtttaacaaaaaaagaatctggagaggcactttgattttcrtggaaatgtgttgaattcaatttgagacacattgagtttgtgatgttaaaacatctacataaaaaaaaaaaaaaacagcaatcaagtgacattacagaat

SEQ ID NO: 212828 - DNA, 201 bp, Homo sapiens; identical to SEQ ID NO: 37629

SEQ ID NO: 212829 - DNA, 201 bp, Homo sapiens
ttcacaattgtgtgtgctccactgtagtacctgaccttatgccaattttccaagtgtaagcatggctactgcttcatttccaacgtccacatctcatgtargcttcttttggccagccctaacctaaaactgtacagaaaggggattctgggcaatgtagttctggattaactaaattgacacaacacagagccatcatgg

SEQ ID NO: 212830 - DNA, 201 bp, Homo sapiens
ccccgcacaggcgcatttctcctgggaggaatcctctactcctggcagtttcctcatttcaacgccctgagctggggcctccgtgaagactactcccgggrcggctactgcatgatgtcggtcacccacccgggcctgtgccggcgcgtggcgctgcgccactgcctggccctgctcgtgctgtccgcagcagcccctgtg

SEQ ID NO: 212831 - DNA, 201 bp, Homo sapiens
cagattcacaattgtgtgtgctccactgtagtacctgaccttatgccaattttccaagtgtaagcatggctactgcttcatttccaacgtccacatctcaygtaggcttcttttggccagccctaacctaaaactgtacagaaaggggattctgggcaatgtagttctggattaactaaattgacacaacacagagccatc

SEQ ID NO: 212832 - DNA, 201 bp, Homo sapiens
ttcaaagtctcagcgtgaccccacgccccaagactctgacaacgcttcctcttaccagtcactttaaaatccagaggtcactttatttaccatcaaaatayaaagaagtctacttgcatcaccctgtttactccgtcagttgcacctgagcattccaacctttcctctgtcctttttaattccctagcagtactcactgcc

SEQ ID NO: 212833 - DNA, 201 bp, Homo sapiens
ggaaggaatgtgaatgttcaggcagaaccttttaattacatgtaacttcaactaattcaataaagaatatggactctaacaggctaataatttttcaacayattatataaattatacatcattttaaaataatttagtgcagtctgcaggtatgtttatttgcaatgatggtttattaaataaattatttattgagtgcct

SEQ ID NO: 212834 - DNA, 201 bp, Homo sapiens
catgacggtatcagaatatctcatgtaccccatgtacctactacgtacctataaaaattaaaacaatttaaaaaaaatttttaagaaaacacagggtctttatagacagttgaaaattacaaaaaggtaaagcatagtaaatcagcttccctctcactatccagagacaaggattgtaaatattttgatgttttctccttc

SEQ ID NO: 212835 - DNA, 201 bp, Homo sapiens
catgatgtgactattatacattgcatgacggtatcagaatatctcatgtaccccatgtacctactacgtacctataaaaattaaaacaatttaaaaaaaawttttaagaaaacacagggtctttatagacagttgaaaattacaaaaaggtaaagcatagtaaatcagcttccctctcactatccagagacaaggattgta

SEQ ID NO: 212836 - DNA, 201 bp, Homo sapiens
cccgaatattcccagcccccggcagctcactccggagatttcctagagaggcaatgcagccatgaggtgggagtagaaggagccttcccctccccaccacsccccgcctccaaaccccgttcctaacctagaatcctccaacctcgcctgtgacactctcaggacccgccacctgactcggggctgcctttgtgcagcctg

SEQ ID NO: 212837 - DNA, 201 bp, Homo sapiens
tttttttcctgactagaaaatacatggtcttatgacattcttcatagaaatggaaaaaactatcttaaaatttatatggaaccacaaaagacccaggatarccaaagatgtcctaagcaaaaagaacaaaactagaggaatcacattacctgaccaaattatagtaaccaaagagctatagtatacaaagctatagtatag

SEQ ID NO: 212838 - DNA, 201 bp, Homo sapiens
ccctgtgtagttgtagatgtggtttcaatgctgtgatgggtcttgacagccatggggtagagtgagtgaagacctgaaagcatgttttccttgagaaaccraaggtagctcagaatgcttagagtacagcatgaaagaggtaaagaacaagaaagaaaagagcctagagaggtaaaaggaggcaagagctgttatgaagag

SEQ ID NO: 212839 - DNA, 201 bp, Homo sapiens
taagaacatttttaatgtactcagtaattttgaaattagaatacattatttcctgcattcacacagtgtgtgatgtacgtcaaagggaggagacgtactcrtcataactgactttgtaccctttcaccatcttgtacccattccgttcaactcccagcctctctaaccaccattctactctctgcttcaagtctgattatt

SEQ ID NO: 212840 - DNA, 201 bp, Homo sapiens
agaattttacagtttctttgtttgggagttctcgggttgcttaatgatttctctggcctccacccccaccgtgttgtgaccagatgtatattataactgtrtttggacctctgtagatttgccaattttattgattagtatgtggtataaccttttctttttgagtacatcatttttctgcagtaaatgttcatgttctgt

SEQ ID NO: 212841 - DNA, 201 bp, Homo sapiens
ttgtgataagaacatttttaatgtactcagtaattttgaaattagaatacattatttcctgcattcacacagtgtgtgatgtacgtcaaagggaggagacrtactcatcataactgactttgtaccctttcaccatcttgtacccattccgttcaactcccagcctctctaaccaccattctactctctgcttcaagtctg

SEQ ID NO: 212842 - DNA, 201 bp, Homo sapiens
ttctccctattgcccctggtttccccctttctgtttccctccttccctttctctctgttgtatagagtcttgcttttgctgatgattaagccaacaggtgycaggagtgctaaagcaagttggctttgtgcccacaagcgtacagtgcagatactgtgtcactgtaggttttggtgaattgttgtgtccttccaagagaag

SEQ ID NO: 212843 - DNA, 201 bp, Homo sapiens
caacgttatgtctgattttttttgttgcaaagctttcagaatcttgacttgtggtaatcttcttttaaaaaagcttttaacagaattaataagtcatcacrttatgataaatgattaaggaaatgatgcctctaatacattgaattattaaaactatcattttgaaaaattatattggtacaaactagtgtctactgctat

SEQ ID NO: 212844 - DNA, 201 bp, Homo sapiens
caagctgatgaatgtattcattacctcagatacttatttttgtgataagaacatttttaatgtactcagtaattttgaaattagaatacattatttcctgyattcacacagtgtgtgatgtacgtcaaagggaggagacgtactcatcataactgactttgtaccctttcaccatcttgtacccattccgttcaactccca

SEQ ID NO: 212845 - DNA, 201 bp, Homo sapiens; identical to SEQ ID NO: 37640

SEQ ID NO: 212846 - DNA, 201 bp, Homo sapiens; identical to SEQ ID NO: 37641

SEQ ID NO: 212847 - DNA, 201 bp, Homo sapiens
aaaacttcgagtttacttagactgtcctaacaatttttttgtgtgtgtttcttttttaaaatcagtgagaaggccaagtctgtgtgaggtggtgaggaatktaatgggtaaagatgtttttaggtggtgtgtttttttaattgttttaccaagagttggtgaggatgctagaaggcaggccttcttctcactgttggtgaa

SEQ ID NO: 212848 - DNA, 201 bp, Homo sapiens; identical to SEQ ID NO: 37642

SEQ ID NO: 212849 - DNA, 201 bp, Homo sapiens
tttagattttttcataaagtaaaagctatagtgtttagtttccatttgacattgaaatctttttggttatttgtcagtttatatttttcattaaaacttcragtttacttagactgtcctaacaatttttttgtgtgtgtttcttttttaaaatcagtgagaaggccaagtctgtgtgaggtggtgaggaatttaatgggt

SEQ ID NO: 212850 - DNA, 201 bp, Homo sapiens
gttttaaattctgacggagaatccgtgtcgatggtcaaatctatcacttagaaaagttttatctgaagtaaaactactgatatctcaattgagacagcacraaggtatgatccttgtattactaaatatttcttcccttgattttctgctttatatcactttgcatttataagccctttaccgaatggtggtggctgtgtg

SEQ ID NO: 212851 - DNA, 201 bp, Homo sapiens; identical to SEQ ID NO: 37633

SEQ ID NO: 212852 - DNA, 201 bp, Homo sapiens
gagacagtcactgtaagaaagaacgttggggtactgacatacacatgcctggaaaggaattgtgtaggagattctgaagcctaaatcagtagctttgtacraagtccttttcacttaggagatcttctgactaaaaaaactgggaaattaaattataaagtgatgcaaaagtaggttgtttatgggatgatttcctactta

SEQ ID NO: 212853 - DNA, 201 bp, Homo sapiens; identical to SEQ ID NO: 37634

SEQ ID NO: 212854 - DNA, 201 bp, Homo sapiens
tgatttttctgttccccacctttttcttctcctttgctcttcttcactaaatagtctcgtcatctcctgtagagccctttcaagaaccttcccaggacctrtgattcttcaaacactgtttgaaaacccatgatttagtctgtgtgaaaaaccatcacaaagtaggtctttggttgtgccttcactaagtattagcttccc

SEQ ID NO: 212855 - DNA, 201 bp, Homo sapiens; identical to SEQ ID NO: 37638

SEQ ID NO: 212856 - DNA, 201 bp, Homo sapiens
atggtgagaggaatgtggcaggcttgtgccctggaagccctggtgaaagaggtaaacagatcagagccagggtgtgacgcacccgcctgcaggtacatccrgctctgtgtcagtgctgagccaggagcactgactgccctgggaagggagccagggctcacagaacaggcggagcggacttgcagcgtcctccaggttaca

SEQ ID NO: 212857 - DNA, 201 bp, Homo sapiens
aaaaatcttcctttttagatttcaggtactgctagatatattgtgtttaaattttagttcacagaaatgaaatttattctctttactgaaataacactttatatttcaaaatatataaatatgtaaatgtatataaataatgtaatataataaatgtgtataaataatgtaacctttcctcagctcatgagtcccttgcca

SEQ ID NO: 212858 - DNA, 201 bp, Homo sapiens
ctgccttccagcccccaccctactgcctgtccttaggtggcttcgtgcatgtcatagaaggaccctggcctgaaaatcaagcagccttgttttgaattgcycttccgtctctttttggagaacttggcattgcctaattttttttttcactgaagtttataaatctacctcaaaatccaatggtcaagattaaatggggca

SEQ ID NO: 212859 - DNA, 201 bp, Homo sapiens
ccactctctccagctcagctcagacatctcttcctcagagaagccacctctggtcccctagactcagtcagctcctcttatgtgtcttcactgcaccatgyacttttcctcactgcatttggagtggtgactttagagtcactagtgtggctcttgatgtctacgtccttgactgaagggtctgctcggtgcaggcaggag

SEQ ID NO: 212860 - DNA, 201 bp, Homo sapiens
cacctcaaaccttccagccccaaggcctttatgaatactgtcccctccaccagccctgacttgacaaagtcaccactctctccagctcagctcagacatcycttcctcagagaagccacctctggtcccctagactcagtcagctcctcttatgtgtcttcactgcaccatgcacttttcctcactgcatttggagtggtg

SEQ ID NO: 212861 - DNA, 201 bp, Homo sapiens
ttcctttgggatggattttgttctttagcatttctagtgatttcagttctgaaaatgtatttttaagtttatttgttcataacttccagttctctttttawatcttgtctgcctcagccagatgtatttcatctcacccttgatatcaggctttatgatctgaattttgtgagtaggaagtaatgattttaaaaattgtat

SEQ ID NO: 212862 - DNA, 201 bp, Homo sapiens
accgcccacacctcaaaccttccagccccaaggcctttatgaatactgtcccctccaccagccctgacttgacaaagtcaccactctctccagctcagctsagacatctcttcctcagagaagccacctctggtcccctagactcagtcagctcctcttatgtgtcttcactgcaccatgcacttttcctcactgcatttg

SEQ ID NO: 212863 - DNA, 201 bp, Homo sapiens
accacaccaccttccttttttttaatcatgcaataaaattgactttttaaatatatatagttctgtgactcctaacacgtgttaatcttcttttttacacygcccacacctcaaaccttccagccccaaggcctttatgaatactgtcccctccaccagccctgacttgacaaagtcaccactctctccagctcagctcag

SEQ ID NO: 212864 - DNA, 201 bp, Homo sapiens
agcaaaaataacaataacaaattttattttacttttcctttatgccggacattgttctgtgttagagatacagctggaaacaaacaaatatcttgcttttktagtgcctatatctcaccacccaaatagatccatttgttaacattttgatttatattattatagacttcttcacatacacacatatcttcatatatataa

SEQ ID NO: 212865 - DNA, 201 bp, Homo sapiens
tctgagtttggtgacgtgtacctatagtgccagctattcaggaggctgaggcaggaggatgacttgagcccaagagatcgaggctgcagtgagctgagacygtgccactgcactccagccaaccttgtcctgaggaactttccctgtcattctcagcactccagccaaaccacaccaccttccttttttttaatcatgcaa

SEQ ID NO: 212866 - DNA, 201 bp, Homo sapiens
tttgggcagcatataaataaagaaatagtccttagcaaaaaggaagagtttactatactttttttagagggctagtgttcaaattaaaaatacatatatgyggttggtctgtataaaagttcttcacttctaataaaattctatgggaggaaaactttccttctgttcgtatttataaaaagattcaaattttatttatat

SEQ ID NO: 212867 - DNA, 201 bp, Homo sapiens; identical to SEQ ID NO: 37645

SEQ ID NO: 212868 - DNA, 201 bp, Homo sapiens
tttaaggtactagaaaatgcttctgcaattttttctttcagcaagccttcctctacccagagcacccaacagtccactgatgtgggaatgtcacaaacttkagtctgtgtgtggcaacaacttttttttttttttttttaagaattgatgtcttgctctgtcacccaggctggagtacggtggtgcagtcatagttcaatg

SEQ ID NO: 212869 - DNA, 201 bp, Homo sapiens
ctctgtcctttttaattccctagcagtactcactgccaagaaaaaatgccttctagttgatagttttgtcattaaaacagatctctctctttttttttttttaaggtactagaaaatgcttctgcaattttttctttcagcaagccttcctctacccagagcacccaacagtccactgatgtgggaatgtcacaaacttga

SEQ ID NO: 212870 - DNA, 201 bp, Homo sapiens
ataataaaaagtattaaagtattttaaaaacatatttcttatgaaaaatcccaacagatggaatagtagagtgagtacagtggaccctcaacatactcatstcccagaatcaacaactatcaagacttttaccacacttgctccatcttgccctttaagtacttttaatgaccaaaacacttgtagctgtatgattaaatt

SEQ ID NO: 212871 - DNA, 201 bp, Homo sapiens
attgcttggggccaggagttcaaggccagcctgggcaacatggtgagaccccatctctacaaaaagttgttttaaaaagttttctgagtttggtgacgtgyacctatagtgccagctattcaggaggctgaggcaggaggatgacttgagcccaagagatcgaggctgcagtgagctgagaccgtgccactgcactccagc

SEQ ID NO: 212872 - DNA, 201 bp, Homo sapiens
cccctcccctcaccccctacacacataggtgcacacactcacacagaggtacacatacacgcaggcacacatgctcagcactcttatacgttaagatccttctgtggctttctgttgcttttagaatagcaaagtcaaggctgagtgcagtggctcatgcctgtaatctctgtactttgagaggctgaggcaggaggattg

SEQ ID NO: 212873 - DNA, 201 bp, Homo sapiens
cccaaaattagcatattatttttaatacatccccccctattattttaaacatcaaaataattctcccaaataattttttttcccatctagtcattgtggtytgccttaacgttgtggctttttcataagatattatagtgaaaaattttggccaaaacttaaggaaaatcgttttcattaccagaacacccaagaggagtt

SEQ ID NO: 212874 - DNA, 201 bp, Homo sapiens
aatttatcttctttgcaactctactgtcaccatcctgatcctaagtactgtcatccttcatcccctcactccttatctcctgattggtccttccatacctkctttaggcccctccagtgtatccttcacaaatagtatcacttagcactggtgcccctcccctcaccccctacacacataggtgcacacactcacacagag

SEQ ID NO: 212875 - DNA, 201 bp, Homo sapiens
gttataccccaaaattagcatattatttttaatacatccccccctattattttaaacatcaaaataattctcccaaataattttttttcccatctagtcaytgtggtctgccttaacgttgtggctttttcataagatattatagtgaaaaattttggccaaaacttaaggaaaatcgttttcattaccagaacacccaag

SEQ ID NO: 212876 - DNA, 201 bp, Homo sapiens
caggactctgcggcccagctgcttctgtgcacaggaaataacttcattttacaaagccctctgtctataaaggtaatcattataatgggattttacttgtrtccattttcctctcagcctcagagttaggccttttcctctcacctgcctaattaccttatcttaatttttttttaattcagcctaactgctgttagcaaa

SEQ ID NO: 212877 - DNA, 201 bp, Homo sapiens
gatggctgtattgtcatatttttaaataccttccaaactcatatatattgatggagaagcatttgtaacactatatatcctataggagcctgtgggtttcrtaaccaatttgtcttttcttttgaggtgaatggttttcagatatgttcaggtgagagagcagtagattagatgcttcaaatgactaggattccttgggtt

SEQ ID NO: 212878 - DNA, 201 bp, Homo sapiens
tgaaagctaagcaaatgtgaattgttcttgatgtttgctattttataactgcacaatgaactgtaagcagctcagcttttctccccgtcacagtgccaacrgctttcagtccagtgcttgctacagagagtgctgtgccgcaaagcgtgggcccagcccagagagtgctctttgtggttgttctgtcagggtagtcaggac

SEQ ID NO: 212879 - DNA, 201 bp, Homo sapiens
gcagatggatgttgtgaaagctaagcaaatgtgaattgttcttgatgtttgctattttataactgcacaatgaactgtaagcagctcagcttttctccccrtcacagtgccaacggctttcagtccagtgcttgctacagagagtgctgtgccgcaaagcgtgggcccagcccagagagtgctctttgtggttgttctgtc

SEQ ID NO: 212880 - DNA, 201 bp, Homo sapiens
gatattggaaagtcagtaaattgcagaagcctgcctttattgtccttccaagcctgtgtgcctcctctcacctactacttcctctcctccacttccttctytctccactagggctccacctaccctagacctgctccctcccacactctctttgccctccctagttaatttaacagtttgccttttaagtagtgaagcatc

SEQ ID NO: 212881 - DNA, 201 bp, Homo sapiens
cctaggcttgtctgcagtttgtcacagacttgggatccttgttatttgctgtcttgtgttacagttattaaggcatatctgccgtctccctttcaaattaktcaagagcaagaataagaccatatacatctttatccctggcagtgcgtactgattacaaatttggtatttagtaaatgtctgttgaatgaataagtgaat

SEQ ID NO: 212882 - DNA, 201 bp, Homo sapiens
cagggtatcttcagagggctgtgggctctcttaacttaccccaaactggtcccagatgactttggagaagaaagtctacagaattaagtcatgaccagttkctttgaggagggaatatgctttccaggaagagggaagagcctgtacaaaggcttacaggcctgaaagccagtctagagtggggtggggacacgtgcaagg

SEQ ID NO: 212883 - DNA, 201 bp, Homo sapiens
taggtttttggttgaagaatctaggtagatggtatcatgcatactttggattcttgacataggtcttcccttcccttgtgcctgttcttggaattatccakgtacctgtaatgttgctcaccctaccattctcttcctttctcttcatcctctctagaaaatccaacttaaatgtcatcttcttgaagctttcccagattt

SEQ ID NO: 212884 - DNA, 201 bp, Homo sapiens
acttcagagaacatgataattacctggagagcttactaacacaaagattcctgggccctacccctggaacttctgattcagtgggctggggtggggtctgrgaatttttatttctaacaagtttctagttgctgctgatgcccctggtccagggaccacactttaagaaccaccagtttgcaaagacagaaccagacagag

SEQ ID NO: 212885 - DNA, 201 bp, Homo sapiens
agataatcaaatatgcttcctaggtttttggttgaagaatctaggtagatggtatcatgcatactttggattcttgacataggtcttcccttcccttgtgyctgttcttggaattatccatgtacctgtaatgttgctcaccctaccattctcttcctttctcttcatcctctctagaaaatccaacttaaatgtcatctt

SEQ ID NO: 212886 - DNA, 201 bp, Homo sapiens
atgtatttttaaacagatttttattgctgggattttaggaactgggttgaatatggtcttatattgctaagtcatcttctagagctgtactgtcttgtgtrgtagccactaggctcaagtggctatttaaatttaaatttatactaaactttaaaattcagttacccagtcccattagccatatttcaaacgcgcaaaggc

SEQ ID NO: 212887 - DNA, 201 bp, Homo sapiens
atagatgtaactattttctttccacatatttttgatccaaggttgattgaatccacagatgtggaacctatggatacagaagtcttctatttttgtgactmtagattttactaactgtttatcgagaatgttatagtagattttcttttaactattacagttgtttatgagtagtaaacaacgctacgtttgtgttcaagg

SEQ ID NO: 212888 - DNA, 201 bp, Homo sapiens
ggacttgcagcgtcctccaggttacagcactgcttccacctgcctgaagccacacacccgggtcccagcgggcggaaatggagctcagcgctccagcacartggttgcacccagaggtagtactgaagtagatactgaattccctacaagtgtttgcccgtgtgtaggggcttctttgctccccacaatgtggggaggtgt

SEQ ID NO: 212889 - DNA, 201 bp, Homo sapiens
agctctgtgtcagtgctgagccaggagcactgactgccctgggaagggagccagggctcacagaacaggcggagcggacttgcagcgtcctccaggttacrgcactgcttccacctgcctgaagccacacacccgggtcccagcgggcggaaatggagctcagcgctccagcacaatggttgcacccagaggtagtactga

SEQ ID NO: 212890 - DNA, 201 bp, Homo sapiens
atgtaaaagctggtctgattgaagatgttgctaaataaccatttgagagcatttggggccttggttttatagtaatgtgtgcttttttgtttagtatgtcwcacagctgaacagaagccacaaccagcaagtaagacccaagccagaaccagtagcatctcctttccttgaaaaaacatcttcaggtcaagccaaagcaga

SEQ ID NO: 212891 - DNA, 201 bp, Homo sapiens
ggctggagtgcagtggtgcgatctcggctcactgcaacctccgcttcctgggttcaagcgattctcctgcttcagcctcctgcatagctgggactacaggygcccgccaccacgcccagctaatttttatatttttaatagagacggggtttcaccatattggccaggatggtctctatctcttgacctcgtgatccgcct

SEQ ID NO: 212892 - DNA, 201 bp, Homo sapiens
catcgtcccttggagtatccctgggggattggctctagtatcccatctctagtttacttatgacacctaatgcaatgtaaatgctatgtaaataattgtcrtactgtattgtttacagaataatgacaggaaaaaaaaagtctgtacatactcattatagatgtaactattttctttccacatatttttgatccaaggttg

SEQ ID NO: 212893 - DNA, 201 bp, Homo sapiens
gtaactacatacccttttcaattttaaacaaaatgaactttctttttagaacatttctattattgacagttcagtgattatggggctttcttgtccactgkgatggtaaatgacttaaaaaaatttgttaagcacaatacaaaatgtggatctggatatttagagatatttaaagtataatacatcgtcccttggagtatc

SEQ ID NO: 212894 - DNA, 201 bp, Homo sapiens
ttagcttttgggtttttttttttagaaatgtgttacaaaattcaaatttccttctctctagtaatagttgttattatttttacatgtattaccatttacartttgtacattttaaaattaggtagtatttccattttgtaaatttcatcattattatgtcttactataaaacaccgttcttttccctttgttagcttttta

SEQ ID NO: 212895 - DNA, 201 bp, Homo sapiens
tactcgtacaatttatccgtcctcactgcctttttcaaattaattgctttgatgaaataagtataaatacattctttgttagcttttgggtttttttttttagaaatgtgttacaaaattcaaatttccttctctctagtaatagttgttattatttttacatgtattaccatttacaatttgtacattttaaaattaggt

SEQ ID NO: 212896 - DNA, 201 bp, Homo sapiens
tctggaagactgaccttattttttttctcttgagtatggaattaaaagaaaattaacatttttatataattagtacatgtagtttttataatcagaaaaaygtggatcttttttaagccaaagatcagcctgtactttgtgttattaatataatcaattagtttatatgaaggatggcttgttttttgtcgttttggcctt

SEQ ID NO: 212897 - DNA, 201 bp, Homo sapiens
catagcccagggcatatctcattgtgattgtttcaaaatttttaaatgtaggtgtgtttttttttttttcttttttttttttttgagctggccttgctctrttgcccaggctggagtgcagtggcaccatcatagctcactgcagccttgaactcccatgctcaagtcatcctcccacctcagtctctcaagtagctatga

SEQ ID NO: 212898 - DNA, 201 bp, Homo sapiens
cctgtggtatccacacctttctttgaaatgcagtatttttgagattttaataaatgtaaaagcattttggcacactgaagtgctttgcaaatgtaagttttgtttttatcattattatttttagtctacatttattaaagggttgctatctgttcactcccctggaggagacagagagataacttagattatagtacagaa

SEQ ID NO: 212899 - DNA, 201 bp, Homo sapiens
caaaaccctgcctctgaaaaaaagggagagccaaatattagacataaaccatatgattctcttgattagaccctggtagattttactaccagtaatttgcwcatggttgtccatatagaaaatcagacattagtacctacaattgcttgctttgctttttattttagagccagtttctccagtttattagtcctgtacttt

SEQ ID NO: 212900 - DNA, 201 bp, Homo sapiens
ttgtacaatatctgctctctggataaacacagttgtaattttgatatgaaactgagataaagctttatttttgtgaacactgtccaactaacaatttttttgccaaactcagttttgaaactacatgtttctgcttcttaaaagtttcagttttgttcaacagtttataggcaccagttttatggaattttttaaagttaa

SEQ ID NO: 212901 - DNA, 201 bp, Homo sapiens
gtatgcagttaggtccagatgtaaatcatgagtgagtaattgcacagaaattgcatcctgagtaggcattctaaggaagttgattcttctgcagtattttygagatttaaataaatgtaaaagcattttactgatttgttatatgtgttctgcaaaataagcacaggtagctaaacgctaaataccatcaaagtcggaacg

SEQ ID NO: 212902 - DNA, 201 bp, Homo sapiens
cacccccaggtgagaaaggagggatcttagctcatcggctgccccaccagcctgatgtaggcacctgtctcccagccaccctgtgatgtaggcaggcagcratgagagcacagggtggcagagcttctgaggtgccaggcaggctctcccaggagaggaaaccattctttggaaatctctggtgatgactgcctttgtctc

SEQ ID NO: 212903 - DNA, 201 bp, Homo sapiens
ctttcatatgtaaactgaggcctgtaccatctacccttataggattttttttctaagagttaaagtaaatctgttaatttttaaattttcttttttgttaygttcttcaccactgtctttgtttcttggctgttttctttgccagcctgattgtcttcatcatatgcatttccatggccatcttcctcattgtcgtcttca

SEQ ID NO: 212904 - DNA, 201 bp, Homo sapiens
gtttttaatttttttcaaaagttgcatttttaatagtaatttgaatctttaagagtgtgtgtatgtgtgtgtgtgtgtgtgtgtgtgtgtgtgtgtgtggtttttaaattacagcattgaacttagaaggcctgcctagccagtacctcaaatttgttgcagatgctgcatataaatctgatttatctttttttttaagtc

SEQ ID NO: 212905 - DNA, 201 bp, Homo sapiens
tattcaggataattgtggaggattggagatggccccactgtgtttttcttaaagttcatcaaatttgtgaaaactgtaccagtgggagctcagagggatcygcaaagactttgctttgtcctgttatcagtgaattgctattaggtttgacaaactattgattttcagttttgcttaaaggaacagcaacaccaataaggg

SEQ ID NO: 212906 - DNA, 201 bp, Homo sapiens
ttagctgagtaagctaaaaaacagcactgctatttaactttaatagcagaaagtgtgccttttaaggtagtagttttttgactagacatggataaattaawtgccctcggtgtttttttttttttaagttaaactctttatttagagatcttcatagattcacatgcagttgtaagaaataatatagagagattgcatgta

SEQ ID NO: 212907 - DNA, 201 bp, Homo sapiens
catcacttttgggaagtcttctgggtttggaggtccttctatgttcagagttcctcacctgctgaatcactgttaccttgtgtaataattaatgcctgttsacttttctgaatctttatcagagtgaaagccccaagagggccgggaacacatctgtcttgttgactattacatttccattgcccagcgcggtgccttgca

SEQ ID NO: 212908 - DNA, 201 bp, Homo sapiens
ataaattccttcactctgggtctggggtagggtctagaattgtgtattttaatggtccccatagcatactttgagacacactcttctaatctgtagaaccrattcaacactctctcctagctctttactgtcagcacactgccttgcttcccattactcacaagaatatgtttatttcccattaagggagacctctgcaac

SEQ ID NO: 212909 - DNA, 201 bp, Homo sapiens
caatagtaattgaacatagaattcgtaattgcattctaaatgtcagtataggttagtataatagtaaaaaaattcagcattcatttttaataattcattgwtcaaagaaatatttttgattatgccattgatgttttactacaaagcctcaagttgccagcgggtgacattaacaccgtaatcctctgtgaaagaagtcta

SEQ ID NO: 212910 - DNA, 201 bp, Homo sapiens
atgagtatggttagaatagccttgatttcccatatttatttcccatatttatccattccttattagtagctatttatgtagtgtatttttttgctatttawataatgaatgtagtgacccagtcctcagtaactgtcttcagtttagtctcatctgtgctatatttaacaaacgcttcttgaggtttttagtatcctgtct

SEQ ID NO: 212911 - DNA, 201 bp, Homo sapiens
atgggtggcttgctacactgtgtgaagccatcagaaaagtgttctgccttgtctcagtgagaattatgtcaagttgaggccctgctttctcattttggcaygaccctctacccctttcagtccctctagctgtgatatagctgcctctaagctctcctgcactgtggtgacaaagggactttctggggagtgggctcatct

SEQ ID NO: 212912 - DNA, 201 bp, Homo sapiens
tttcatgtttatgctaattatttcattttctggtaattgcctctttgtttagttatttgctttcttccctaattggtatatcttcctcatacttcctcatyaatacaattaaatctaccttctttttttagagattgatagtattccatagtatagatatatagagatactctttctactagctttcttcattataatttt

SEQ ID NO: 212913 - DNA, 201 bp, Homo sapiens
acatttaagtagtctcttacttcttgctattaaaaataaagatttgtaatatcatttaacatatatccttttacatatttttttctcaaagttagctgtakagaagtatacctttatttttgttgggtatatagcatgccattgcgtagttataccataatttatttatttctcctgttttaagtgttttttattttatta

SEQ ID NO: 212914 - DNA, 201 bp, Homo sapiens
ctgttgatggaactgatatgaagtatgatctatcaatgtataaatttttttctcctagagcctagaatgctgttttttattaaaagaaaaaagcagaaatrgaggatacacgttcattttagatcgcttgtatagtttaagaagtcaacttactgtaatcttcagttattaaatatttgtattaagggggttttagcattc

SEQ ID NO: 212915 - DNA, 201 bp, Homo sapiens
ttaccctagcagaggttctccatgagggctcagcccttgcatgcagcagacttctgcctagacatccaggcatttccatactctgaaatctaggcagaggytcccaaagcccagctcttgtcttctgtgcagctgcaggcccaacaccatgtggaagcaaccaaggcttggggcttgcaccttctgaagccatggcttgag

SEQ ID NO: 212916 - DNA, 201 bp, Homo sapiens
aatgcttactgtctggcgtttacagaaaaagtttgctgaccttctgtcggagagcacagactagtgagagccaagaatgatggcagacaaatagtggtggycaactgagaaacgacttgggcctgaactgaggctgtggtggggaaagagaacaagggagagagagagaaagagagatagatagagagaaacattaaggaa

SEQ ID NO: 212917 - DNA, 201 bp, Homo sapiens
aggaacaaataggaaacagagggatggaagagataaaggcaaggaatgtgtgtgatccactccatcaggatgcttggctttgaagagtgttgaagcaagargggtattaccttgggggaaatatgaagaaagtaatttatttgatgcaggaagttaatagacagtagagatagaagataaaagacagattagggaggagat

SEQ ID NO: 212918 - DNA, 201 bp, Homo sapiens
cctacaatagccttgtgtgtgcaagtgaaagggacaattgcttgtctctcactttaagtcaaaagctagaaatgattaagcttaatgaggaaggtgacatrttaaaagctgagataggctgaaggctaggcctcttgcaccaaacagccatgttgtgaatgtaaaggacaagttattgaaggagattaaaagtgctacttc

SEQ ID NO: 212919 - DNA, 201 bp, Homo sapiens
aacagaaaccttgtggcctgggaagcctgaaatgcttactgtctggcgtttacagaaaaagtttgctgaccttctgtcggagagcacagactagtgagagscaagaatgatggcagacaaatagtggtggtcaactgagaaacgacttgggcctgaactgaggctgtggtggggaaagagaacaagggagagagagagaaa

SEQ ID NO: 212920 - DNA, 201 bp, Homo sapiens
ccaccttagagaaatgtgtttcagcagttggtgagggatacagttgaggaacaaataggaaacagagggatggaagagataaaggcaaggaatgtgtgtgrtccactccatcaggatgcttggctttgaagagtgttgaagcaagaggggtattaccttgggggaaatatgaagaaagtaatttatttgatgcaggaagtt

SEQ ID NO: 212921 - DNA, 201 bp, Homo sapiens
ccttgtatacctccaccttagagaaatgtgtttcagcagttggtgagggatacagttgaggaacaaataggaaacagagggatggaagagataaaggcaakgaatgtgtgtgatccactccatcaggatgcttggctttgaagagtgttgaagcaagaggggtattaccttgggggaaatatgaagaaagtaatttatttg

SEQ ID NO: 212922 - DNA, 201 bp, Homo sapiens
attgcactttgctttattatgcttcatagatactacattttttacaaattgaaggcctgtggtaaacctgcagcaaacaagtctgttggtgcagatttttscagcagcatatggtcactttgtgtctctgtgtcacactttgataattcgtacagtatttcaagcttttttattattatatctgacatggtgatcagtgat

SEQ ID NO: 212923 - DNA, 201 bp, Homo sapiens
tttttgaaatccatgcatagtcttttcagaatatgcattttccatgaactttttgaagtccccttgtatacctccaccttagagaaatgtgtttcagcagytggtgagggatacagttgaggaacaaataggaaacagagggatggaagagataaaggcaaggaatgtgtgtgatccactccatcaggatgcttggctttg

SEQ ID NO: 212924 - DNA, 201 bp, Homo sapiens
agtgaaagaaaggagaggtgtcattgttatgtgtatatcaggtgattaggatgaaagagatcacgtagggaaagtgttttcccacgtagcatgattgtaawatgggctgaaggtcaaatgggtttgcctaggtcagtcctggtttgccccaacagaattattgataacgtcctctttccctttcaacaatgcccagtttgg

SEQ ID NO: 212925 - DNA, 201 bp, Homo sapiens
agacatgttataacaagttagtatgagtttattttggtgcaaaaaatttttgaaatccatgcatagtcttttcagaatatgcattttccatgaactttttsaagtccccttgtatacctccaccttagagaaatgtgtttcagcagttggtgagggatacagttgaggaacaaataggaaacagagggatggaagagataa

SEQ ID NO: 212926 - DNA, 201 bp, Homo sapiens
tgtgactgtcattagtatacctgagtgtttgtgcttgcacaaatgtatatcttattattgtctattttattgtgtaaagtggcttataaaatgttctatcrtgtttttgtatgtttctcaaattcccttttaaaaatgtacagaaatatcttttaaagaatttttaaattattttttccagaattatattttcaggatttt

SEQ ID NO: 212927 - DNA, 201 bp, Homo sapiens
gataagggctcttttcaaactgatgtcttatcctccttaatgcctcaatctagatcctgttcagacatgttataacaagttagtatgagtttattttggtrcaaaaaatttttgaaatccatgcatagtcttttcagaatatgcattttccatgaactttttgaagtccccttgtatacctccaccttagagaaatgtgtt

SEQ ID NO: 212928 - DNA, 201 bp, Homo sapiens
ttgatgttttgaatagattattgttagaagaatacttttcctctgtctgttttcctggtgtgctaccagtaaataaagttataacattgagacattctgawagagttcgagacagctcaactataagcttatttcagctgtttattatttttactccattacctcagttttttcatatatttacatactgagtgcagggaa

SEQ ID NO: 212929 - DNA, 201 bp, Homo sapiens
tgttgctttgataagggctcttttcaaactgatgtcttatcctccttaatgcctcaatctagatcctgttcagacatgttataacaagttagtatgagttkattttggtgcaaaaaatttttgaaatccatgcatagtcttttcagaatatgcattttccatgaactttttgaagtccccttgtatacctccaccttagag

SEQ ID NO: 212930 - DNA, 201 bp, Homo sapiens
actataaacttgaaataaaatagtttaatttgaccaaaactgtgttataacttttgaattagctctggattattaaaagagagttaattttaaggaaaggyataaagaaacttgttttaactatttgctgtcttcactaaaccaacctttctactgtagatgtatatttttaaaaaattgatgttttgaatagattattgt

SEQ ID NO: 212931 - DNA, 201 bp, Homo sapiens
cttaaacaagttatccatttgtaaactgctgatttgggggggcattgtccccataaacttcttgtaaagcatcaatgatttcactattcttccatccaagygttagcataaatttgatatttgttcttgcttctgttttagcagaattcatgttgctttgataagggctcttttcaaactgatgtcttatcctccttaatg

SEQ ID NO: 212932 - DNA, 201 bp, Homo sapiens
gcacccactgagtggaaagttagctcaactttaatttttcaatcagaattgtgtgagctaaaccaattgagacgtctatggtattggttgttgtttctacygttaaccattggtccacttaaattagggcatgaaaaagattcattttttcctcacaaattgatgtggatggtttgcagctgtggactttaatcttcaaca

SEQ ID NO: 212933 - DNA, 201 bp, Homo sapiens
tgtttttaatttttttcaaaagttgcatttttaatagtaatttgaatctttaagagtgtgtgtatgtgtgtgtgtgtgtgtgtgtgtgtgtgtgtgtgtggtttttaaattacagcattgaacttagaaggcctgcctagccagtacctcaaatttgttgcagatgctgcatataaatctgatttatctttttttttaagt

SEQ ID NO: 212934 - DNA, 201 bp, Homo sapiens
gaagtgtttttaatttttttcaaaagttgcatttttaatagtaatttgaatctttaagagtgtgtgtatgtgtgtgtgtgtgtgtgtgtgtgtgtgtgtgtgtggtttttaaattacagcattgaacttagaaggcctgcctagccagtacctcaaatttgttgcagatgctgcatataaatctgatttatcttttttttt

SEQ ID NO: 212935 - DNA, 201 bp, Homo sapiens
gaagggtgaaccctttggtttggatgtggtttgtttgtcctcaccaaaacttgtgttgaaagttgatccctaatgttttggtgttgggaggtagggtctartgggaggtgttcgggttatgggatcagattcttcatgaatggcttggtgctgttgtcatggtgaattcattcctgctctcaggagactggattagttctc

SEQ ID NO: 212936 - DNA, 201 bp, Homo sapiens
agtcatcaatgactcctggtttctctcaaaccccacattcatgccatcaggaaattatgctgattgtgtgcatgcatgtacacacacacacacacacacamgtgttagctgtggaagttgtgaggaatgattagaggatggctggattttccagccagttcttacagccttcatgttagcaccaccatcatctcttgccag

SEQ ID NO: 212937 - DNA, 201 bp, Homo sapiens
ccttcgcggctgaattcagcctctttctgccactgtctcctcatctcccacatggggctaataatcttctcccctcctggagtcattgtgaggatgaaatraattgttatttgtaaggtgctggaccatggtgagggctcaatttgggatctgtatgctgttgttatcattcaggagtcctccttcatacagtggaggaac

SEQ ID NO: 212938 - DNA, 201 bp, Homo sapiens
atcaggtcagtttctcactttcatctaaattatgttattgtcactttttcctagatggctgtattgtcatatttttaaataccttccaaactcatatatattgatggagaagcatttgtaacactatatatcctataggagcctgtgggtttcgtaaccaatttgtcttttcttttgaggtgaatggttttcagatatgtt

SEQ ID NO: 212939 - DNA, 201 bp, Homo sapiens
tccttcgcggctgaattcagcctctttctgccactgtctcctcatctcccacatggggctaataatcttctcccctcctggagtcattgtgaggatgaaaygaattgttatttgtaaggtgctggaccatggtgagggctcaatttgggatctgtatgctgttgttatcattcaggagtcctccttcatacagtggaggaa

SEQ ID NO: 212940 - DNA, 201 bp, Homo sapiens
aatcaggtcagtttctcactttcatctaaattatgttattgtcactttttcctagatggctgtattgtcatatttttaaataccttccaaactcatatatattgatggagaagcatttgtaacactatatatcctataggagcctgtgggtttcgtaaccaatttgtcttttcttttgaggtgaatggttttcagatatgt

SEQ ID NO: 212941 - DNA, 201 bp, Homo sapiens
gtgaatgattgaatctggaagactgaccttattttttttctcttgagtatggaattaaaagaaaattaacatttttatataattagtacatgtagtttttrtaatcagaaaaatgtggatcttttttaagccaaagatcagcctgtactttgtgttattaatataatcaattagtttatatgaaggatggcttgttttttg

SEQ ID NO: 212942 - DNA, 201 bp, Homo sapiens
acatgtattaccatttacaatttgtacattttaaaattaggtagtatttccattttgtaaatttcatcattattatgtcttactataaaacaccgttcttktccctttgttagctttttataaatcactttttgtctcttctcaatttatcagtagattcagtcaaacatttgatgtactttctctgtgcttcatcacccc

SEQ ID NO: 212943 - DNA, 201 bp, Homo sapiens
tctgccattattaactagtcttctgcaggtaaacatttgtgatatttccagattttttactattaaaagcaactctgttacttttacgtatacgtctttgkactcacgtgagtctgcctttaggatcagtacttagaaatgtaatagctagctttaaacatttaaatctttgatgaaacaacaaatttgtttctaaaaaga

SEQ ID NO: 212944 - DNA, 201 bp, Homo sapiens
tggatataataataagatcactaaaatcatgtaaataaaagtacattgttagggaagaggtttaaaactatagagaaatatagagttgtttacagaatttraatgtctttaaaatttgcttgaaaatataatacttgtcagctaataacataaaaaagaaattcaagttattttcaaaggatggggagaagtaagcaaaaa

SEQ ID NO: 212945 - DNA, 201 bp, Homo sapiens
ctgttcatctcataacattattatggatataataataagatcactaaaatcatgtaaataaaagtacattgttagggaagaggtttaaaactatagagaawtatagagttgtttacagaatttgaatgtctttaaaatttgcttgaaaatataatacttgtcagctaataacataaaaaagaaattcaagttattttcaaa

SEQ ID NO: 212946 - DNA, 201 bp, Homo sapiens
attctaacctgttcatctcataacattattatggatataataataagatcactaaaatcatgtaaataaaagtacattgttagggaagaggtttaaaactrtagagaaatatagagttgtttacagaatttgaatgtctttaaaatttgcttgaaaatataatacttgtcagctaataacataaaaaagaaattcaagtta

SEQ ID NO: 212947 - DNA, 201 bp, Homo sapiens
gctttgaagccatctggattatatttcagtggaaggaataggcttgattaagaaaactgctgtggtagtactatagagcaaggatcacctgtttttgtaaatgaagttttattggaacacaaccacgcccacttgttctgagcatatatcatgccgcagtgacagagttaattgcaacagaaaccttgtggcctgggaagc

SEQ ID NO: 212948 - DNA, 201 bp, Homo sapiens
ttcagatcttggctctgacatttactagccagtgagactttgggcagttccttaactttattgagatgatatccacatctataaagtaggaataataataratcatttaagaattaaataattaatgcatataaagcatacaacagcatgctggacacatgggagacactgcaagtttccaaataagtataggtgaacatt

SEQ ID NO: 212949 - DNA, 201 bp, Homo sapiens
catgactaaatataaaatggaacactgtgcaggaggcattgtctcagtcagtcttcaaccctaggaggaaaagatgatcatttctcttgtagagaggagtragtgaaacctagctgccctatagccaggaagggacagaacctatatgaatccagaacactctaatcctgactctcttaaccactttactcttagctagca

SEQ ID NO: 212950 - DNA, 201 bp, Homo sapiens
gtaattgaagactcaatagatgtagggaaagagacaaaagaggaaaagcggtggaaagagatgaagctgcaagtgtatgatttgccaggaattttggctcractatccaaaatcaaactcacaggtactttgtttttctgatatacttacttatttgaaactctatctttagtgaaacaaaaagctaattttatttaccac

SEQ ID NO: 212951 - DNA, 201 bp, Homo sapiens
agtcatgagccactgtgcctggctgggcccttgattattgaaaacttttttattgtatttggaatgttaagcctccagggaaaattctggaggagatgaataacaagtaaatttatttttctttcaaggaacatatatttctaggcttttctaaactacagaaattgaaaaccattactgaggcctaaattttattctcca

SEQ ID NO: 212952 - DNA, 201 bp, Homo sapiens
tagcgtggtcatttcagcattaaatgtagtaaagcatagtgatcctgaaatgaaaattttccctggcccttctgaagacctacacggacttaaacaatgartagggctggtaaattgcatttattcacaaatctggattagattatttcaaagctctgacccatcacacagtgtagcgcttaccttagtggctggctttgc

SEQ ID NO: 212953 - DNA, 201 bp, Homo sapiens
tcagagtagattggacttgatgattgttaattgataacaggagagttcaggatgttcctgaagtcttcagatgttcctgaagtcttaagtaatggttttakgtacaatagggaacagagtagagattggttgagaataaaacactcttaaagacattttgcaatccatccatatagagataccaagagaggagatggaaat

SEQ ID NO: 212954 - DNA, 201 bp, Homo sapiens
gacattttcaaaacagttttctgtagaggctttctccagaaactcatttccaagctccaatgtgggatttacacaggaaattaaagttaaattgtcttgayttgattaaggttttgcattttcttttgtttttgaagaaaggatattttattttgtaatttcaaagtcatttattgtggaagaatgaccaagaagtatgaa

SEQ ID NO: 212955 - DNA, 201 bp, Homo sapiens
atggtgaaatgccttctctactaaaaataccaaaaaaaaaaaaaaaaaaaaaattagccaagcgcaatggtgtgcacctgaaatcccagttacttgggagkctgaggcaggtgaatcgcttgaacccaggaggcagaggttgtagtgagccaagatcgtgccactgcactccagcctgggtgacagagtgagactccatct

SEQ ID NO: 212956 - DNA, 201 bp, Homo sapiens
caggcctcagacctgtcagcccgccacactccagccagtcccttccgatcacctccagacaccacgctctcctttcggagcccgcccgccggaagtgacgrcccggaactactcccacaggggggcggggaaggaagatggcggcgcccagcgtcccgtgaggagagaggacacagggatcccggggagcggccccagact

SEQ ID NO: 212957 - DNA, 201 bp, Homo sapiens
tgtagtggtaaagccatgtttcacctcctgttatatattcattttcttctttttttttttttttttgaagaaatgcctcaggatcttgatcccatttgttkaaaatttccattgaaagccctgctcttgtctgcagccaatctgagtacaatggttttggcacccactgagtggaaagttagctcaactttaatttttcaa

SEQ ID NO: 212958 - DNA, 201 bp, Homo sapiens
ttttggaaagccaaaactaggcacagaagtaagatcagtggttactgggaaatagcggggggggggggggtggataggagggaattggctatagaggggcrtaagaaactttttgaaaagataaatttatatgttctatatcttgattgtggtggtggttacactatgtttaccttttttttttttaactcagaactaact

SEQ ID NO: 212959 - DNA, 201 bp, Homo sapiens
agtagatgttattgttctttagccttctggaaaggaatcaagcaaaatgccttcagcatcccaaaaaactatggccatgagctttgctcttgatctgtccrctttttctttgactggaccactcccacctcttggtagccactgctttgattgtctttgtgttcaggattgtagtggtaaagccatgtttcacctcctgtt

SEQ ID NO: 212960 - DNA, 201 bp, Homo sapiens
tatatgacattttggaaagccaaaactaggcacagaagtaagatcagtggttactgggaaatagcggggggggggggggtggataggagggaattggctayagaggggcgtaagaaactttttgaaaagataaatttatatgttctatatcttgattgtggtggtggttacactatgtttaccttttttttttttaactca

SEQ ID NO: 212961 - DNA, 201 bp, Homo sapiens
tggatgcctaatgatttcccatccaaatgctcacaaggttgcccgtgtttgatgagaggaatgagcaggagcattattgtggtggagaagaactctctggrgaagctttctgctaaagctttgctaatttttttcaaaacactctcataataagtagatgttattgttctttagccttctggaaaggaatcaagcaaaatg

SEQ ID NO: 212962 - DNA, 201 bp, Homo sapiens
cagtgtcagcaaagcggtggtgagcaaggaagccggcggcgctgcctggatggggagcccgaccccaccgctcatgagctgtgcatccttcgcggctgaaytcagcctctttctgccactgtctcctcatctcccacatggggctaataatcttctcccctcctggagtcattgtgaggatgaaatgaattgttatttgta

SEQ ID NO: 212963 - DNA, 201 bp, Homo sapiens
agggagccaaatcaggactgtgaagtggatgcctaatgatttcccatccaaatgctcacaaggttgcccgtgtttgatgagaggaatgagcaggagcattrttgtggtggagaagaactctctggggaagctttctgctaaagctttgctaatttttttcaaaacactctcataataagtagatgttattgttctttagcc

SEQ ID NO: 212964 - DNA, 201 bp, Homo sapiens
tgggaggcagtgtcagcaaagcggtggtgagcaaggaagccggcggcgctgcctggatggggagcccgaccccaccgctcatgagctgtgcatccttcgcrgctgaattcagcctctttctgccactgtctcctcatctcccacatggggctaataatcttctcccctcctggagtcattgtgaggatgaaatgaattgtt

SEQ ID NO: 212965 - DNA, 201 bp, Homo sapiens
aatttaaccatgtcaaagcattcttttttacattattaactgaagagaaatggattccctttaaagactttttaagattaggaaacaaaaagaaggcagarggagccaaatcaggactgtgaagtggatgcctaatgatttcccatccaaatgctcacaaggttgcccgtgtttgatgagaggaatgagcaggagcattat

SEQ ID NO: 212966 - DNA, 201 bp, Homo sapiens
tgaatctacaaataccatattctaaaacgtatgtgcttgtgtgttctgtgataaacctaaaaccagagccccatccacgtgggaggcagtgtcagcaaagyggtggtgagcaaggaagccggcggcgctgcctggatggggagcccgaccccaccgctcatgagctgtgcatccttcgcggctgaattcagcctctttctg

SEQ ID NO: 212967 - DNA, 201 bp, Homo sapiens
tcctgggaatttaaccatgtcaaagcattcttttttacattattaactgaagagaaatggattccctttaaagactttttaagattaggaaacaaaaagayggcagagggagccaaatcaggactgtgaagtggatgcctaatgatttcccatccaaatgctcacaaggttgcccgtgtttgatgagaggaatgagcagga

SEQ ID NO: 212968 - DNA, 201 bp, Homo sapiens
ctccaatttggcaagcttacaaatgcgattacacctttaccatgattgtctcttagaatggctttaatatcctgtaaatgtcagattttaatgaatctacraataccatattctaaaacgtatgtgcttgtgtgttctgtgataaacctaaaaccagagccccatccacgtgggaggcagtgtcagcaaagcggtggtgag

SEQ ID NO: 212969 - DNA, 201 bp, Homo sapiens
cattcagtggtctctgaagttgataactcatggcttattcagatgattcaaattagctactgcactagatcaggtttgcctagagagttcttgaataccaygtgggaaagagtctctaactaaatatggtttttatatataaggaaaatgatgagcattactgaacaatgacagaaagaaaatgcattttgaatgcagagt

SEQ ID NO: 212970 - DNA, 201 bp, Homo sapiens
tgttgggaagatagatggttccaggtcatatgatgtatgagggaacttcaaaaagattatggaaaaaatagaattaaaagataaaaattaaaaaaaaaaamctatttctcaacctaatctccatcaaggtcaagacactttggtaagcagtgataccagccatttagtctatctgtaaagaactcacagagtcctgggaat

SEQ ID NO: 212971 - DNA, 201 bp, Homo sapiens
taagccacatttctgaaacttttcataaaagctcttacactccaatttggcaagcttacaaatgcgattacacctttaccatgattgtctcttagaatggytttaatatcctgtaaatgtcagattttaatgaatctacaaataccatattctaaaacgtatgtgcttgtgtgttctgtgataaacctaaaaccagagccc

SEQ ID NO: 212972 - DNA, 201 bp, Homo sapiens
cactcaggctggcatgcagtggtgcaatcttggctcactgcaacctcctccacctcctgggttcaagcaattctcctgccgcagcctcccaagtagctggkattataggcgcccgccaccgtgcccacctaatttttgtatttttagttgagacgtggtttcaccatgttggctagactggtcttgaactcctgacctcaa

SEQ ID NO: 212973 - DNA, 201 bp, Homo sapiens
tataggagatgtaacaacacagaggtatctttgtaatctttcatctggaaaatcatattgtgtgccatgttgggaagatagatggttccaggtcatatgaygtatgagggaacttcaaaaagattatggaaaaaatagaattaaaagataaaaattaaaaaaaaaaacctatttctcaacctaatctccatcaaggtcaag

SEQ ID NO: 212974 - DNA, 201 bp, Homo sapiens
gttcatactgtctatagtaaaactattgaaagattcctacatttttttggtggtatgtcacaactaaatttgtggggtgaaaatagctcatttttaccatstgtaagggaagtttcacagtctaattagtcaagtaattagtgtttttgaccgacacttaggaaggaagtggtgaggtttcctgcaatatatgtaagtaca

SEQ ID NO: 212975 - DNA, 201 bp, Homo sapiens
catctaaagtttcctttctgggtatataggagatgtaacaacacagaggtatctttgtaatctttcatctggaaaatcatattgtgtgccatgttgggaaratagatggttccaggtcatatgatgtatgagggaacttcaaaaagattatggaaaaaatagaattaaaagataaaaattaaaaaaaaaaacctatttctc

SEQ ID NO: 212976 - DNA, 201 bp, Homo sapiens
  misc_feature (1)...(201): n = A,T,C or G
cgaagctaggactaacgaattcatggggcggggagaaggtacctggagctggcctccagtctcccatcaaaggggtttcatctcacgagccagcctcctgngttcccctcttatgaaagggcagattattttcattagtttctaatttatttttatatgatttgcttaaatcgttcatactgtctatagtaaaactattga

SEQ ID NO: 212977 - DNA, 201 bp, Homo sapiens
agctatgatgaaaatcacaaacgaagctaggactaacgaattcatggggcggggagaaggtacctggagctggcctccagtctcccatcaaaggggtttcrtctcacgagccagcctcctgtgttcccctcttatgaaagggcagattattttcattagtttctaatttatttttatatgatttgcttaaatcgttcatac

SEQ ID NO: 212978 - DNA, 201 bp, Homo sapiens
caggaaagaagcgccagggcctaccgaaaaggagcagccttggtggaagcttgaaatgtctggctttgattctgtacctcgcctcttcccttggttcctgytggtggcttgtaggattatcatctcccactacgcattctctgaccgctgggaccatcatctcttataggcaagaccactcctaggcttgtctgcagtttg

SEQ ID NO: 212979 - DNA, 201 bp, Homo sapiens
acattatgtcaaattctttctgtgtgttataattaaagccaaagagattcttaatatttaccaagtcttaatttcgcttcagagatgtgtttcctagttcrgttaaaattggagtttctgttcatgttctccttgttttcagagaagacagagagatgtagacaccgttcatctactatcttttatcaaacctgaggtcct

SEQ ID NO: 212980 - DNA, 201 bp, Homo sapiens
gggatctgaaggatgagaaggagccagctgtggaaagaggcaaatgaaacaaaagtacaagaacccagggacaagaaagagcttggaatgctcaaagaatrgaagaagtctcatgaatggataatagtgattgagctaaagagaagtgtgagatgcacttactggcagagaaagagtttacattttatatcaggtatagca

SEQ ID NO: 212981 - DNA, 201 bp, Homo sapiens
aacaaaggtcagaaactaaacttccacataaaatggcctatctcaataaattaaattcatgtgtgctcttctaaaagggcttttcgtaacactaatgtctytgaatccaactggcctccacagaacttgaagaaggagtaaacaaccttcttcttcttttttttttttttttttttgacacaagggccaattcaggaaaaa

SEQ ID NO: 212982 - DNA, 201 bp, Homo sapiens
atacgtgaatttaatgtgataatgcctatagtcattatggttctacaatatattgtcagctatttggagaaggatcaatctatttcaaataagtttttttkttgttgttgttattttggatgtcaaaacaatcttatagtgaggttcaaatagtgctaccactttaccaaaaagatcatccccttctataaagcaggacac

SEQ ID NO: 212983 - DNA, 201 bp, Homo sapiens
cttcaacaaaggtcagaaactaaacttccacataaaatggcctatctcaataaattaaattcatgtgtgctcttctaaaagggcttttcgtaacactaatrtctctgaatccaactggcctccacagaacttgaagaaggagtaaacaaccttcttcttcttttttttttttttttttttgacacaagggccaattcagga

SEQ ID NO: 212984 - DNA, 201 bp, Homo sapiens
agaaaaatgtggatcttttttaagccaaagatcagcctgtactttgtgttattaatataatcaattagtttatatgaaggatggcttgttttttgtcgttytggcctttacagctgggactcctgttggtaacagtgtgtctgctctgtttctgtatcgcagctctggttgtaagtaccactgcagctggatttgcattgg

SEQ ID NO: 212985 - DNA, 201 bp, Homo sapiens
attttctgtgacttcaacaaaggtcagaaactaaacttccacataaaatggcctatctcaataaattaaattcatgtgtgctcttctaaaagggcttttcrtaacactaatgtctctgaatccaactggcctccacagaacttgaagaaggagtaaacaaccttcttcttcttttttttttttttttttttgacacaaggg

SEQ ID NO: 212986 - DNA, 201 bp, Homo sapiens
gatagtctattaacccattaatacattaatccattcatgagggctgggcccccatgacccagtcacctcttataggcccaacttcttagtactgccacatyggggattaagtttcaacatgaatttctgaggggaccaactttcagaccatagcccagggcatatctcattgtgattgtttcaaaatttttaaatgtaggt

SEQ ID NO: 212987 - DNA, 201 bp, Homo sapiens
cctacctgtgactacaggtggataaagaaagtacctgaagctatgatgaaaatcacaaacgaagctaggactaacgaattcatggggcggggagaaggtayctggagctggcctccagtctcccatcaaaggggtttcatctcacgagccagcctcctgtgttcccctcttatgaaagggcagattattttcattagtttc

SEQ ID NO: 212988 - DNA, 201 bp, Homo sapiens
ctacccagttttcattcatgcccttgtgcacattgatttaaacaccaaaattgagccacatcattttctgtgacttcaacaaaggtcagaaactaaacttmcacataaaatggcctatctcaataaattaaattcatgtgtgctcttctaaaagggcttttcgtaacactaatgtctctgaatccaactggcctccacaga

SEQ ID NO: 212989 - DNA, 201 bp, Homo sapiens
aaaaaagaaagcatttgtgactattttcaagcgttgtgagctgtgacagtattcctagggatgaaggattcttctgttctcatctcccttttataatcagmaaatgcccagatattctaataaatatgaatatgaagagttaactgtcatagtaacttagtctatcacttgtagccaattaaaacatatgttttaggagca

SEQ ID NO: 212990 - DNA, 201 bp, Homo sapiens
ctggatgctgagagtgatcatggcatcctgggtaaatagcttcattttcgtttgcatggcttgtcagcctacccagttttcattcatgcccttgtgcacaytgatttaaacaccaaaattgagccacatcattttctgtgacttcaacaaaggtcagaaactaaacttccacataaaatggcctatctcaataaattaaat

SEQ ID NO: 212991 - DNA, 201 bp, Homo sapiens
gcaaatgtgctgatgtggcagactgaaattctgtggatgcagagtaaagagagaccgtgtcatcctggctggtgggtgcacatgacatacactttcccttrtagggaatgtctgggagaaaaaaaaggaagcagtgctgcctacctgtgactacaggtggataaagaaagtacctgaagctatgatgaaaatcacaaacga

SEQ ID NO: 212992 - DNA, 201 bp, Homo sapiens
tttaggaaaaatgaaacataacaggaaaataaatttcacacagtttgcaattggagtacctttgcccataacacaagaaagctctgaagtccactgattgwgggctcctcgtgccagaaggggaaggattccttcaggtgcctggatgctgagagtgatcatggcatcctgggtaaatagcttcattttcgtttgcatggc

SEQ ID NO: 212993 - DNA, 201 bp, Homo sapiens
ggggtccttgggaccccttttctgtcttatggtcttccgtgctgtaagacctggagaccaactggcctgaatggaggttgtggggcctgagggctctcccrgcacctctgccagccctgtcgcctcattggttccttctcttctgacttcatatttgacaggttgtccttctgtcttagacaaaaatctattaaattcgct

SEQ ID NO: 212994 - DNA, 201 bp, Homo sapiens
tgttataaatgttttaggaaaaatgaaacataacaggaaaataaatttcacacagtttgcaattggagtacctttgcccataacacaagaaagctctgaaktccactgattgagggctcctcgtgccagaaggggaaggattccttcaggtgcctggatgctgagagtgatcatggcatcctgggtaaatagcttcatttt

SEQ ID NO: 212995 - DNA, 201 bp, Homo sapiens
atagctgccagagtctaacacttattttggaatgtttccgggggtccttgggaccccttttctgtcttatggtcttccgtgctgtaagacctggagaccarctggcctgaatggaggttgtggggcctgagggctctcccggcacctctgccagccctgtcgcctcattggttccttctcttctgacttcatatttgacag

SEQ ID NO: 212996 - DNA, 201 bp, Homo sapiens
tagaattgccagttttctgaattggatgtatattacttttgttataaatgttttaggaaaaatgaaacataacaggaaaataaatttcacacagtttgcawttggagtacctttgcccataacacaagaaagctctgaagtccactgattgagggctcctcgtgccagaaggggaaggattccttcaggtgcctggatgct

SEQ ID NO: 212997 - DNA, 201 bp, Homo sapiens
caggaggataaaaccaagtgttttgccctaggagattatagctgccagagtctaacacttattttggaatgtttccgggggtccttgggaccccttttctrtcttatggtcttccgtgctgtaagacctggagaccaactggcctgaatggaggttgtggggcctgagggctctcccggcacctctgccagccctgtcgcc

SEQ ID NO: 212998 - DNA, 201 bp, Homo sapiens
caaggaggcatttcctccctgagctgtagcacttggttcgattccattccatcccacgttaattcttttagcaaatgtgctgatgtggcagactgaaattytgtggatgcagagtaaagagagaccgtgtcatcctggctggtgggtgcacatgacatacactttcccttgtagggaatgtctgggagaaaaaaaaggaag

SEQ ID NO: 212999 - DNA, 201 bp, Homo sapiens
tggggaaattattaagatatattgaaataaatcagggaataaaaccacaatttagcatattctcaattttttttaagtagttatatcattggaaaaaggcwgagaagatatcaactagtatgtttctccgaataactcatgaagaatttcttctttgtgattttctagaattgccagttttctgaattggatgtatattac

SEQ ID NO: 213000 - DNA, 201 bp, Homo sapiens
gtaagtgtcccgcgatgtggagtctcatatgagcacactcggtcaaggaggcatttcctccctgagctgtagcacttggttcgattccattccatcccacrttaattcttttagcaaatgtgctgatgtggcagactgaaattctgtggatgcagagtaaagagagaccgtgtcatcctggctggtgggtgcacatgacat

SEQ ID NO: 213001 - DNA, 201 bp, Homo sapiens
agaataagccactgtgtgttataaatattaatgatgttgatgcaaaaaatatatttaatagcctggggaaattattaagatatattgaaataaatcagggrataaaaccacaatttagcatattctcaattttttttaagtagttatatcattggaaaaaggctgagaagatatcaactagtatgtttctccgaataactc

SEQ ID NO: 213002 - DNA, 201 bp, Homo sapiens
aaaaaccctttacattttaagcaacatagaaattttctataatttttttttgcaaatcaaaggggaaaatgtttatagctaaaataccatttaatgagaamaaaatcaatgcaatgacattgtcatttgtttcattttcccaaggagaatacagaggacagtacttaagttttagttatgttgattgcttgtgtgaaatgc

SEQ ID NO: 213003 - DNA, 201 bp, Homo sapiens
acatggtccctggccaaaggtcctggtcccaaggggcaggtaaggagatggagtaagaggtcagcactatacctccgggtagctgcacgtgcacgcagctsccagtctccaaagcagcagagatggatagttttatttcccagcttcattctttataaattgtgttttatttaagcttttcaaagactctttaaaattcat

SEQ ID NO: 213004 - DNA, 201 bp, Homo sapiens
tagatgtctgcatttgtaaacatggtccctggccaaaggtcctggtcccaaggggcaggtaaggagatggagtaagaggtcagcactatacctccgggtarctgcacgtgcacgcagctgccagtctccaaagcagcagagatggatagttttatttcccagcttcattctttataaattgtgttttatttaagcttttca

SEQ ID NO: 213005 - DNA, 201 bp, Homo sapiens
gtgccaggctggtccttgtagatgtctgcatttgtaaacatggtccctggccaaaggtcctggtcccaaggggcaggtaaggagatggagtaagaggtcascactatacctccgggtagctgcacgtgcacgcagctgccagtctccaaagcagcagagatggatagttttatttcccagcttcattctttataaattgtg

SEQ ID NO: 213006 - DNA, 201 bp, Homo sapiens
aaagactgaatgtctgaaaaaaagtatattggttgaattaattgtggtatatccaaagaataagccactgtgtgttataaatattaatgatgttgatgcamaaaatatatttaatagcctggggaaattattaagatatattgaaataaatcagggaataaaaccacaatttagcatattctcaattttttttaagtagtt

SEQ ID NO: 213007 - DNA, 201 bp, Homo sapiens
ataatggccaatagaccaaatcctgaagaagcattttttgtttggcctgctgtgccaggctggtccttgtagatgtctgcatttgtaaacatggtccctgsccaaaggtcctggtcccaaggggcaggtaaggagatggagtaagaggtcagcactatacctccgggtagctgcacgtgcacgcagctgccagtctccaaa

SEQ ID NO: 213008 - DNA, 201 bp, Homo sapiens
tctacccataagatatttatcccaacatgctttttgatttttaaaaatggaaaaagactgaatgtctgaaaaaaagtatattggttgaattaattgtggtrtatccaaagaataagccactgtgtgttataaatattaatgatgttgatgcaaaaaatatatttaatagcctggggaaattattaagatatattgaaataa

SEQ ID NO: 213009 - DNA, 201 bp, Homo sapiens
ctagatgcacagttaattagacacgttcacagaacagatcagagatggcaaaataatggccaatagaccaaatcctgaagaagcattttttgtttggcctsctgtgccaggctggtccttgtagatgtctgcatttgtaaacatggtccctggccaaaggtcctggtcccaaggggcaggtaaggagatggagtaagaggt

SEQ ID NO: 213010 - DNA, 201 bp, Homo sapiens
gagctgtgaacaaaagtctacccataagatatttatcccaacatgctttttgatttttaaaaatggaaaaagactgaatgtctgaaaaaaagtatattggktgaattaattgtggtatatccaaagaataagccactgtgtgttataaatattaatgatgttgatgcaaaaaatatatttaatagcctggggaaattatta

SEQ ID NO: 213011 - DNA, 201 bp, Homo sapiens
ggagctagatgcacagttaattagacacgttcacagaacagatcagagatggcaaaataatggccaatagaccaaatcctgaagaagcattttttgtttgscctgctgtgccaggctggtccttgtagatgtctgcatttgtaaacatggtccctggccaaaggtcctggtcccaaggggcaggtaaggagatggagtaag

SEQ ID NO: 213012 - DNA, 201 bp, Homo sapiens
gataggtggattatttgtactttgtcagtgccgattttaggtagtgtgattgagttgagttggagatgatcactccacgttctctgcctttttccagcccrttgctagctgtgtcctttgccacttgttgtgctgttccaggagttgccattctgaccttgggggtgaatccactcacaggagccctggggctcttcaaca

SEQ ID NO: 213013 - DNA, 201 bp, Homo sapiens
ctcagcagacccaggaaagaagaggctcagcaagttgtattacaccagtgtgccccacatacagttgggagactctgggttaaactgatgagccaacaaaygagcctgagtataggtcctgtttccaagttattttacttgctttgagtctcagtttcttattgctaaaatgaggtaatgctatctcagtaaacttgtctt

SEQ ID NO: 213014 - DNA, 201 bp, Homo sapiens
agatggagagaagtgtttcagggggcaagggggccaattctagggcaaaggagctagatgcacagttaattagacacgttcacagaacagatcagagatgscaaaataatggccaatagaccaaatcctgaagaagcattttttgtttggcctgctgtgccaggctggtccttgtagatgtctgcatttgtaaacatggtc

SEQ ID NO: 213015 - DNA, 201 bp, Homo sapiens
ccagatcagtgctgcctctactggataggtggattatttgtactttgtcagtgccgattttaggtagtgtgattgagttgagttggagatgatcactccasgttctctgcctttttccagcccgttgctagctgtgtcctttgccacttgttgtgctgttccaggagttgccattctgaccttgggggtgaatccactcac

SEQ ID NO: 213016 - DNA, 201 bp, Homo sapiens
cctcagcagacccaggaaagaagaggctcagcaagttgtattacaccagtgtgccccacatacagttgggagactctgggttaaactgatgagccaacaamtgagcctgagtataggtcctgtttccaagttattttacttgctttgagtctcagtttcttattgctaaaatgaggtaatgctatctcagtaaacttgtct

SEQ ID NO: 213017 - DNA, 201 bp, Homo sapiens
atggccatacaaaagatggagagaagtgtttcagggggcaagggggccaattctagggcaaaggagctagatgcacagttaattagacacgttcacagaayagatcagagatggcaaaataatggccaatagaccaaatcctgaagaagcattttttgtttggcctgctgtgccaggctggtccttgtagatgtctgcatt

SEQ ID NO: 213018 - DNA, 201 bp, Homo sapiens
acagcaggagacaagtggttaaaagtgaacgttcccaatatttcttctaaaatatacctcagttcttctcaggaggataaaaccaagtgttttgccctagsagattatagctgccagagtctaacacttattttggaatgtttccgggggtccttgggaccccttttctgtcttatggtcttccgtgctgtaagacctgga

SEQ ID NO: 213019 - DNA, 201 bp, Homo sapiens
aggtgattgcatcccaactcaagactctagccaccccaggccctcagcagacccaggaaagaagaggctcagcaagttgtattacaccagtgtgccccacrtacagttgggagactctgggttaaactgatgagccaacaaatgagcctgagtataggtcctgtttccaagttattttacttgctttgagtctcagtttct

SEQ ID NO: 213020 - DNA, 201 bp, Homo sapiens
agttttttgatgtctaagctgagtcttagaggatgagtaagagatggccatacaaaagatggagagaagtgtttcagggggcaagggggccaattctaggscaaaggagctagatgcacagttaattagacacgttcacagaacagatcagagatggcaaaataatggccaatagaccaaatcctgaagaagcattttttg

SEQ ID NO: 213021 - DNA, 201 bp, Homo sapiens
atcaagaagagcagccagagctcccacaaacatattctttcttattgtaagtttgtttcataaagaggattccccatatccaggaatcagccagatcagtrctgcctctactggataggtggattatttgtactttgtcagtgccgattttaggtagtgtgattgagttgagttggagatgatcactccacgttctctgcc

SEQ ID NO: 213022 - DNA, 201 bp, Homo sapiens
tgaaggtgcttttaagcccacaggaagctcctcccaggtgattgcatcccaactcaagactctagccaccccaggccctcagcagacccaggaaagaagargctcagcaagttgtattacaccagtgtgccccacatacagttgggagactctgggttaaactgatgagccaacaaatgagcctgagtataggtcctgttt

SEQ ID NO: 213023 - DNA, 201 bp, Homo sapiens
gtccttggaggagttttttgatgtctaagctgagtcttagaggatgagtaagagatggccatacaaaagatggagagaagtgtttcagggggcaagggggycaattctagggcaaaggagctagatgcacagttaattagacacgttcacagaacagatcagagatggcaaaataatggccaatagaccaaatcctgaaga

SEQ ID NO: 213024 - DNA, 201 bp, Homo sapiens
cacgaactgaccaccactacagcatcagtgcccccaggacaaggaccacacctgtcttgctcaccacattatatacagttgtttcgatttcagggaatgcrgtattaggctatttgcataatggagtaaactgaaggtgcttttaagcccacaggaagctcctcccaggtgattgcatcccaactcaagactctagccacc

SEQ ID NO: 213025 - DNA, 201 bp, Homo sapiens
atccagaacactctaatcctgactctcttaaccactttactcttagctagcaaaatcaagaagagcagccagagctcccacaaacatattctttcttattrtaagtttgtttcataaagaggattccccatatccaggaatcagccagatcagtgctgcctctactggataggtggattatttgtactttgtcagtgccga

SEQ ID NO: 213026 - DNA, 201 bp, Homo sapiens
atgcttgccttggccacgaactgaccaccactacagcatcagtgcccccaggacaaggaccacacctgtcttgctcaccacattatatacagttgtttcgrtttcagggaatgcagtattaggctatttgcataatggagtaaactgaaggtgcttttaagcccacaggaagctcctcccaggtgattgcatcccaactca

SEQ ID NO: 213027 - DNA, 201 bp, Homo sapiens
acatgcttgccttggccacgaactgaccaccactacagcatcagtgcccccaggacaaggaccacacctgtcttgctcaccacattatatacagttgtttygatttcagggaatgcagtattaggctatttgcataatggagtaaactgaaggtgcttttaagcccacaggaagctcctcccaggtgattgcatcccaact

SEQ ID NO: 213028 - DNA, 201 bp, Homo sapiens
attaagtgatgtcttaataaagtataaatacaggggaagaacagcttccagaattcaggtagtattttctgcccaaatcttccaatattgtgtctgaagtkgtttgttcatgactaaatataaaatggaacactgtgcaggaggcattgtctcagtcagtcttcaaccctaggaggaaaagatgatcatttctcttgtaga

SEQ ID NO: 213029 - DNA, 201 bp, Homo sapiens
gaatgtattcattacctcagatacttatttttgtgataagaacatttttaatgtactcagtaattttgaaattagaatacattatttcctgcattcacacagtgtgtgatgtacgtcaaagggaggagacgtactcatcataactgactttgtaccctttcaccatcttgtacccattccgttcaactcccagcctctcta

SEQ ID NO: 213030 - DNA, 201 bp, Homo sapiens
tgaatgtattcattacctcagatacttatttttgtgataagaacatttttaatgtactcagtaattttgaaattagaatacattatttcctgcattcacacagtgtgtgatgtacgtcaaagggaggagacgtactcatcataactgactttgtaccctttcaccatcttgtacccattccgttcaactcccagcctctct

SEQ ID NO: 213031 - DNA, 201 bp, Homo sapiens
atcactaattaagtgatgtcttaataaagtataaatacaggggaagaacagcttccagaattcaggtagtattttctgcccaaatcttccaatattgtgtytgaagttgtttgttcatgactaaatataaaatggaacactgtgcaggaggcattgtctcagtcagtcttcaaccctaggaggaaaagatgatcatttctc

SEQ ID NO: 213032 - DNA, 201 bp, Homo sapiens
agagggaagggcatctgttaaggcgtcttgggagctagagtgaacctagagccttgagaaggcaggagaagagttaaaatagtcactataaggaacgaaartggaaatcagccctggctaagcacccgcactgttaaaccatccccttgaaatggggccagttagtatgagtgtaagcctttcccagcaggagcagagaca

SEQ ID NO: 213033 - DNA, 201 bp, Homo sapiens
aagagttaaaatagtcactataaggaacgaaaatggaaatcagccctggctaagcacccgcactgttaaaccatccccttgaaatggggccagttagtatragtgtaagcctttcccagcaggagcagagacagtaggttattgagcagatccagggtgggaatgttggatggacaaggcagaatggattattgagggtgc

SEQ ID NO: 213034 - DNA, 201 bp, Homo sapiens
tgtccttggaggagttttttgatgtctaagctgagtcttagaggatgagtaagagatggccatacaaaagatggagagaagtgtttcagggggcaaggggsccaattctagggcaaaggagctagatgcacagttaattagacacgttcacagaacagatcagagatggcaaaataatggccaatagaccaaatcctgaag

SEQ ID NO: 213035 - DNA, 201 bp, Homo sapiens
catgtggaggggctcaggaaggtgagaacggagagagaaaatgtccttggaggagttttttgatgtctaagctgagtcttagaggatgagtaagagatggycatacaaaagatggagagaagtgtttcagggggcaagggggccaattctagggcaaaggagctagatgcacagttaattagacacgttcacagaacagat

SEQ ID NO: 213036 - DNA, 201 bp, Homo sapiens
ccatgtggaggggctcaggaaggtgagaacggagagagaaaatgtccttggaggagttttttgatgtctaagctgagtcttagaggatgagtaagagatgsccatacaaaagatggagagaagtgtttcagggggcaagggggccaattctagggcaaaggagctagatgcacagttaattagacacgttcacagaacaga

SEQ ID NO: 213037 - DNA, 201 bp, Homo sapiens
cttctcctctttggccttctcacacgctgttcccactgcctgcaactctcttctccaccctttccgcccatctcccacccatccatcgggtctcagtttamacatcacttcttcctagaaacaccccctgtccaccacccagcataaactaggttaggtgcccctgactgccccgtgttccctgctgtgccacacatgctt

SEQ ID NO: 213038 - DNA, 201 bp, Homo sapiens
tggcagcagctcatgttagcatgaggtctaagaagtgctgtgagagcttgggaacagacatggagaccaaccatgtggaggggctcaggaaggtgagaacrgagagagaaaatgtccttggaggagttttttgatgtctaagctgagtcttagaggatgagtaagagatggccatacaaaagatggagagaagtgtttcag

SEQ ID NO: 213039 - DNA, 201 bp, Homo sapiens
cctaatttctgtgctctcttgacacctcccaccctcattctactctccagatatgtggaacataaacttgccattcttctcctctttggccttctcacacrctgttcccactgcctgcaactctcttctccaccctttccgcccatctcccacccatccatcgggtctcagtttacacatcacttcttcctagaaacaccc

SEQ ID NO: 213040 - DNA, 201 bp, Homo sapiens
tataaagatgaatagtgcaaagtcacttcactgaaaaaacacagcataaggggatgggcagccatggcagcagctcatgttagcatgaggtctaagaagtsctgtgagagcttgggaacagacatggagaccaaccatgtggaggggctcaggaaggtgagaacggagagagaaaatgtccttggaggagttttttgatgt

SEQ ID NO: 213041 - DNA, 201 bp, Homo sapiens
ttcctaatttctgtgctctcttgacacctcccaccctcattctactctccagatatgtggaacataaacttgccattcttctcctctttggccttctcacwcgctgttcccactgcctgcaactctcttctccaccctttccgcccatctcccacccatccatcgggtctcagtttacacatcacttcttcctagaaacac

SEQ ID NO: 213042 - DNA, 201 bp, Homo sapiens
gtcataccatagcgttctctcttttgcatggtttgtaaaggttcatttgggcaccattcttaagttcagagaatataaagatgaatagtgcaaagtcactkcactgaaaaaacacagcataaggggatgggcagccatggcagcagctcatgttagcatgaggtctaagaagtgctgtgagagcttgggaacagacatgga

SEQ ID NO: 213043 - DNA, 201 bp, Homo sapiens
tcaggaaccggtagcatgctgagcctgtaattcattacagacgttgtaatgatggcagtcagaggcacatcattgctactcatgatcactaattaagtgaygtcttaataaagtataaatacaggggaagaacagcttccagaattcaggtagtattttctgcccaaatcttccaatattgtgtctgaagttgtttgttca

SEQ ID NO: 213044 - DNA, 201 bp, Homo sapiens
ggaagatagattaaagatacaagctagctgaaggctgtttctctcaacgaagcatttgataaaaattatgtggtggtgtgcccacgattcttcttcctttraaatgcctaacttgagcctctcttgtgaggtgaattaaacaaatgcttgtctctctttgctgacttccacatggcaggcagagtagtccttctaaaaagc

SEQ ID NO: 213045 - DNA, 201 bp, Homo sapiens
gatgagtggaagtcataccatagcgttctctcttttgcatggtttgtaaaggttcatttgggcaccattcttaagttcagagaatataaagatgaatagtscaaagtcacttcactgaaaaaacacagcataaggggatgggcagccatggcagcagctcatgttagcatgaggtctaagaagtgctgtgagagcttggga

SEQ ID NO: 213046 - DNA, 201 bp, Homo sapiens
actacacaacggccacctggtgtttactgttgtcaggaaccggtagcatgctgagcctgtaattcattacagacgttgtaatgatggcagtcagaggcacwtcattgctactcatgatcactaattaagtgatgtcttaataaagtataaatacaggggaagaacagcttccagaattcaggtagtattttctgcccaaat

SEQ ID NO: 213047 - DNA, 201 bp, Homo sapiens
gaacttaaagtgcaaaccatgatcaccctcatgtcattagaccaaagagccgttcagtgggagaggagggcccgctctctgcttctaatgtgctccaccartgcattttaggaaatctggaagatagattaaagatacaagctagctgaaggctgtttctctcaacgaagcatttgataaaaattatgtggtggtgtgccc

SEQ ID NO: 213048 - DNA, 201 bp, Homo sapiens
agatgggacacaattaaatgctgttttcattggttggtgttagatgagtggaagtcataccatagcgttctctcttttgcatggtttgtaaaggttcattygggcaccattcttaagttcagagaatataaagatgaatagtgcaaagtcacttcactgaaaaaacacagcataaggggatgggcagccatggcagcagct

SEQ ID NO: 213049 - DNA, 201 bp, Homo sapiens
tccataagtcacgttacagcactggtactacacaacggccacctggtgtttactgttgtcaggaaccggtagcatgctgagcctgtaattcattacagacrttgtaatgatggcagtcagaggcacatcattgctactcatgatcactaattaagtgatgtcttaataaagtataaatacaggggaagaacagcttccaga

SEQ ID NO: 213050 - DNA, 201 bp, Homo sapiens
tagtccagaaaaagaagactaagaagagacaaagtggagccaagaataatagaacttaaagtgcaaaccatgatcaccctcatgtcattagaccaaagagycgttcagtgggagaggagggcccgctctctgcttctaatgtgctccaccagtgcattttaggaaatctggaagatagattaaagatacaagctagctgaa

SEQ ID NO: 213051 - DNA, 201 bp, Homo sapiens
aaaagatgggacacaattaaatgctgttttcattggttggtgttagatgagtggaagtcataccatagcgttctctcttttgcatggtttgtaaaggttcmtttgggcaccattcttaagttcagagaatataaagatgaatagtgcaaagtcacttcactgaaaaaacacagcataaggggatgggcagccatggcagca

SEQ ID NO: 213052 - DNA, 201 bp, Homo sapiens
cataaataacactgtgcgacctccccttgaaaatcccgtgtccataagtcacgttacagcactggtactacacaacggccacctggtgtttactgttgtcrggaaccggtagcatgctgagcctgtaattcattacagacgttgtaatgatggcagtcagaggcacatcattgctactcatgatcactaattaagtgatgt

SEQ ID NO: 213053 - DNA, 201 bp, Homo sapiens
tcaagtaacttgcaaatatatgtaaaatgtgacaaaatagtccagaaaaagaagactaagaagagacaaagtggagccaagaataatagaacttaaagtgmaaaccatgatcaccctcatgtcattagaccaaagagccgttcagtgggagaggagggcccgctctctgcttctaatgtgctccaccagtgcattttagga

SEQ ID NO: 213054 - DNA, 201 bp, Homo sapiens
gtaagacgatgtgaaaagatgggacacaattaaatgctgttttcattggttggtgttagatgagtggaagtcataccatagcgttctctcttttgcatggkttgtaaaggttcatttgggcaccattcttaagttcagagaatataaagatgaatagtgcaaagtcacttcactgaaaaaacacagcataaggggatgggc

SEQ ID NO: 213055 - DNA, 201 bp, Homo sapiens
atgatgggtttcatttgcataaataacactgtgcgacctccccttgaaaatcccgtgtccataagtcacgttacagcactggtactacacaacggccaccyggtgtttactgttgtcaggaaccggtagcatgctgagcctgtaattcattacagacgttgtaatgatggcagtcagaggcacatcattgctactcatgat

SEQ ID NO: 213056 - DNA, 201 bp, Homo sapiens
gatagatctcttgattaaaacagctaaatttcaacaacctgaatgtaaccatgatatttaaagatttcatggtaaatcaaacttaataacccacatattawttgatatattctctctttattccaaaaccattattattgcttgtcctctttctacttaacagttccaaagagagtcctttactttttttttactgatgtc

SEQ ID NO: 213057 - DNA, 201 bp, Homo sapiens
gttttagatgatgggtttcatttgcataaataacactgtgcgacctccccttgaaaatcccgtgtccataagtcacgttacagcactggtactacacaacrgccacctggtgtttactgttgtcaggaaccggtagcatgctgagcctgtaattcattacagacgttgtaatgatggcagtcagaggcacatcattgctac

SEQ ID NO: 213058 - DNA, 201 bp, Homo sapiens
ctcttttctaacctttttctatctaaaagatagatctcttgattaaaacagctaaatttcaacaacctgaatgtaaccatgatatttaaagatttcatggyaaatcaaacttaataacccacatattatttgatatattctctctttattccaaaaccattattattgcttgtcctctttctacttaacagttccaaagag

SEQ ID NO: 213059 - DNA, 201 bp, Homo sapiens
tgtgtttaactgagatgaaaaatgaacactcttttctaacctttttctatctaaaagatagatctcttgattaaaacagctaaatttcaacaacctgaatrtaaccatgatatttaaagatttcatggtaaatcaaacttaataacccacatattatttgatatattctctctttattccaaaaccattattattgcttgt

SEQ ID NO: 213060 - DNA, 201 bp, Homo sapiens
ttaggtcattattcagatagagttttgtgattctgtcagagctcttaattccaaaatgttcttacgtggcagacacaattcagttttttttttttttttttaccatatttctacaacctagcaatcttactacactaaaatcaaccaaatttcttactctgattctgattctttgaaatatttcataatgtggtcgtcatt

SEQ ID NO: 213061 - DNA, 201 bp, Homo sapiens
taatcattatcattgtagagttttagatgatgggtttcatttgcataaataacactgtgcgacctccccttgaaaatcccgtgtccataagtcacgttacrgcactggtactacacaacggccacctggtgtttactgttgtcaggaaccggtagcatgctgagcctgtaattcattacagacgttgtaatgatggcagtc

SEQ ID NO: 213062 - DNA, 201 bp, Homo sapiens
agaaacaggcttataataatcattatcattgtagagttttagatgatgggtttcatttgcataaataacactgtgcgacctccccttgaaaatcccgtgtscataagtcacgttacagcactggtactacacaacggccacctggtgtttactgttgtcaggaaccggtagcatgctgagcctgtaattcattacagacgt

SEQ ID NO: 213063 - DNA, 201 bp, Homo sapiens
gtagccaattaaaacatatgttttaggagcaaatatcttttactaataatctagggtcattttgcctaatgtctcttcactttgattcctctcttttcacrtaagacgatgtgaaaagatgggacacaattaaatgctgttttcattggttggtgttagatgagtggaagtcataccatagcgttctctcttttgcatggt

SEQ ID NO: 213064 - DNA, 201 bp, Homo sapiens
ttgtagccaattaaaacatatgttttaggagcaaatatcttttactaataatctagggtcattttgcctaatgtctcttcactttgattcctctcttttcmcgtaagacgatgtgaaaagatgggacacaattaaatgctgttttcattggttggtgttagatgagtggaagtcataccatagcgttctctcttttgcatg

SEQ ID NO: 213065 - DNA, 201 bp, Homo sapiens
ttttataatcagaaaatgcccagatattctaataaatatgaatatgaagagttaactgtcatagtaacttagtctatcacttgtagccaattaaaacataygttttaggagcaaatatcttttactaataatctagggtcattttgcctaatgtctcttcactttgattcctctcttttcacgtaagacgatgtgaaaaga

SEQ ID NO: 213066 - DNA, 201 bp, Homo sapiens
ggcagaaaatcatagttgtgtttaactgagatgaaaaatgaacactcttttctaacctttttctatctaaaagatagatctcttgattaaaacagctaaayttcaacaacctgaatgtaaccatgatatttaaagatttcatggtaaatcaaacttaataacccacatattatttgatatattctctctttattccaaaac

SEQ ID NO: 213067 - DNA, 201 bp, Homo sapiens
atcatgagaaaaaagaaagcatttgtgactattttcaagcgttgtgagctgtgacagtattcctagggatgaaggattcttctgttctcatctcccttttytaatcagaaaatgcccagatattctaataaatatgaatatgaagagttaactgtcatagtaacttagtctatcacttgtagccaattaaaacatatgttt

SEQ ID NO: 213068 - DNA, 201 bp, Homo sapiens
agtaaaaggactaataaaaaaaatatttcacaaaaaatttaaatattgaataaattatgaaaggagaaaactcaggtgtgtatgtgtgtgtgcctgtgtgygtctccaggcttgggatgctttcaaaaatccatctaggaatgggaagagccgatggtttttgtttttttaatcaaaggctgaatggtatgattaagagaa

SEQ ID NO: 213069 - DNA, 201 bp, Homo sapiens
tgaagagttcacaaaaactttttgtacatattgtcatgcttagtcattacaatggttgaacaagaggaacgctgctgggattttctgaaagttacactccyttctctcatcatgagaaaaaagaaagcatttgtgactattttcaagcgttgtgagctgtgacagtattcctagggatgaaggattcttctgttctcatct

SEQ ID NO: 213070 - DNA, 201 bp, Homo sapiens
ccccaccagcctgatgtaggcacctgtctcccagccaccctgtgatgtaggcaggcagcgatgagagcacagggtggcagagcttctgaggtgccaggcargctctcccaggagaggaaaccattctttggaaatctctggtgatgactgcctttgtctccctctccttccctgacccccgcacaggcgcatttctcctgg

SEQ ID NO: 213071 - DNA, 201 bp, Homo sapiens
atgaggccctctttcctaaggtaactgagcccagagacacccaagaaggccagcttagcctttcttctcctcatcttgcttctagaaaccagatgtcagartaacacttgaactggaagcaaactgctaaggaatttaaatgataaaaaggagtaaaaggactaataaaaaaaatatttcacaaaaaatttaaatattgaa

SEQ ID NO: 213072 - DNA, 201 bp, Homo sapiens
aaataaaactgttctctattaaccatggtatgaagagttcacaaaaactttttgtacatattgtcatgcttagtcattacaatggttgaacaagaggaacrctgctgggattttctgaaagttacactcccttctctcatcatgagaaaaaagaaagcatttgtgactattttcaagcgttgtgagctgtgacagtattcc

SEQ ID NO: 213073 - DNA, 201 bp, Homo sapiens
cctccttaggtttctcaagaaagaataaataaacatgcatataagcaggaactagtagatccaatttatctagactctcaaaaagcctttcacaagattcyatacaaagtctacttttagaagttggctcttttgagaaacaggcttataataatcattatcattgtagagttttagatgatgggtttcatttgcataaat

SEQ ID NO: 213074 - DNA, 201 bp, Homo sapiens
acatgccaagagatatataatgaaagacaactgaaagtgggtgacctaaccaggccggccgcagtcagcactggagtggagcggcttatgttggctcagcrtatgtagcttggccagatggggaccagcatcacattggtaatggtatagtagttatcaaatctcagagagcttccagaccacgtggattcctaacaagtt

SEQ ID NO: 213075 - DNA, 201 bp, Homo sapiens
gaagaacaaatttggcctcaacttaataatagtggtgttaatgtagagaacttgttcttaaaataaaactgttctctattaaccatggtatgaagagttcrcaaaaactttttgtacatattgtcatgcttagtcattacaatggttgaacaagaggaacgctgctgggattttctgaaagttacactcccttctctcatc

SEQ ID NO: 213076 - DNA, 201 bp, Homo sapiens
cagagcaccctagaagctgcacactggtgactcttgcttgctaagaaacgtgttgtggaatctgtaatccagcagggtcactgaacactacacaaacataycttactcagaagtggaattatggcttctgctaggagaaggcaggcttgagtaacctccttaggtttctcaagaaagaataaataaacatgcatataagca

SEQ ID NO: 213077 - DNA, 201 bp, Homo sapiens
caaagttcctctgctaattgataacagagctagttcacagccctctgttcttccactagaacatgccaagagatatataatgaaagacaactgaaagtggrtgacctaaccaggccggccgcagtcagcactggagtggagcggcttatgttggctcagcatatgtagcttggccagatggggaccagcatcacattggta

SEQ ID NO: 213078 - DNA, 201 bp, Homo sapiens
gaacataaacattttataagtatagaaatttctttttttttagtgttaaccagtgaagtggcaggaagaacaaatttggcctcaacttaataatagtggtrttaatgtagagaacttgttcttaaaataaaactgttctctattaaccatggtatgaagagttcacaaaaactttttgtacatattgtcatgcttagtcat

SEQ ID NO: 213079 - DNA, 201 bp, Homo sapiens
acactgcaaccctgtgcatagaagggtatcatctcacatgtgtgcacatagggtaaagtctgcctctctagggagttggctgtttttaaaaccagagcacyctagaagctgcacactggtgactcttgcttgctaagaaacgtgttgtggaatctgtaatccagcagggtcactgaacactacacaaacatatcttactca

SEQ ID NO: 213080 - DNA, 201 bp, Homo sapiens
gacttttaccacacttgctccatcttgccctttaagtacttttaatgaccaaaacacttgtagctgtatgattaaattaaaacaaagtagatagtgcaggyaagtcagaagtctaaggatatatccaaagttcctctgctaattgataacagagctagttcacagccctctgttcttccactagaacatgccaagagatat

SEQ ID NO: 213081 - DNA, 201 bp, Homo sapiens
agggtttagcttaagtattatagggctttacaggagacatttttcaaatttactgagggttttaccagtaagcacttaagcaaatgtaaacattttgtggsctgcaggggagctgtggatattattcatcacccaggcacactagtctagcagacgggtacccagccaggctaaagctctgcagagtttctaagggttgtt

SEQ ID NO: 213082 - DNA, 201 bp, Homo sapiens
ttttcccaaggagaatacagaggacagtacttaagttttagttatgttgattgcttgtgtgaaatgctgattcctgccagcagtcgccaggtgtctctcasactgctgggagaggaatgtctcgtcttcttcatctggttgcctccgtcactgttctaggggcttctggcactggtgcaaggcagagctgtgcttccttga

SEQ ID NO: 213083 - DNA, 201 bp, Homo sapiens
agaattctccatcaagtcacttctagctttcatattctgttgccctgacttcattcagtactgtagttccagctgctgggctctcctctggccccctcccrgctaaattctaactcgtcataattctacaagttagtctttttcctagaagggccctctcatagatacaggccctctctcctgccataggaacactgcaac

SEQ ID NO: 213084 - DNA, 201 bp, Homo sapiens
gaaaaatcccaacagatggaatagtagagtgagtacagtggaccctcaacatactcatctcccagaatcaacaactatcaagacttttaccacacttgctycatcttgccctttaagtacttttaatgaccaaaacacttgtagctgtatgattaaattaaaacaaagtagatagtgcaggcaagtcagaagtctaaggat

SEQ ID NO: 213085 - DNA, 201 bp, Homo sapiens
gtcaatacctggttttgaaatgaatgatgaagatggagttttagaaatgaaatgaatggattgtttggttggcattattaacttaaagaacagggtttagsttaagtattatagggctttacaggagacatttttcaaatttactgagggttttaccagtaagcacttaagcaaatgtaaacattttgtgggctgcagggg

SEQ ID NO: 213086 - DNA, 201 bp, Homo sapiens
tggtggccagaattctccatcaagtcacttctagctttcatattctgttgccctgacttcattcagtactgtagttccagctgctgggctctcctctggcmccctcccggctaaattctaactcgtcataattctacaagttagtctttttcctagaagggccctctcatagatacaggccctctctcctgccataggaac

SEQ ID NO: 213087 - DNA, 201 bp, Homo sapiens
taataaaaagtattaaagtattttaaaaacatatttcttatgaaaaatcccaacagatggaatagtagagtgagtacagtggaccctcaacatactcatckcccagaatcaacaactatcaagacttttaccacacttgctccatcttgccctttaagtacttttaatgaccaaaacacttgtagctgtatgattaaatta

SEQ ID NO: 213088 - DNA, 201 bp, Homo sapiens
agagtcagtgctggcccctatagcagagtggtagagtggtggccagaattctccatcaagtcacttctagctttcatattctgttgccctgacttcattcmgtactgtagttccagctgctgggctctcctctggccccctcccggctaaattctaactcgtcataattctacaagttagtctttttcctagaagggccct

SEQ ID NO: 213089 - DNA, 201 bp, Homo sapiens
actagaatgcagaccacctgatcctactcagcatgcttagttatgctaccatgaggaaaccagaatatagcactaataataaaaagtattaaagtattttwaaaacatatttcttatgaaaaatcccaacagatggaatagtagagtgagtacagtggaccctcaacatactcatctcccagaatcaacaactatcaagac

SEQ ID NO: 213090 - DNA, 201 bp, Homo sapiens
caggtgggtggaaatgccacctcaaggcagaatgtgcactcagaagtctctcagctgtaatttatagttcttctgtcacaggcaccttgacagcaacataycccttatattttctcattttccatcaaaattccattctgttgggtcactctttgggcacagaggctgcaggccaggtaggaaagagtcagtgctggcccc

SEQ ID NO: 213091 - DNA, 201 bp, Homo sapiens
cacttttaaataactagttaacttcagagtcagaactagaatgcagaccacctgatcctactcagcatgcttagttatgctaccatgaggaaaccagaatwtagcactaataataaaaagtattaaagtattttaaaaacatatttcttatgaaaaatcccaacagatggaatagtagagtgagtacagtggaccctcaac

SEQ ID NO: 213092 - DNA, 201 bp, Homo sapiens
actgaccacagggttcagaagagatggcccaggaacaggtgggtggaaatgccacctcaaggcagaatgtgcactcagaagtctctcagctgtaatttatrgttcttctgtcacaggcaccttgacagcaacatatcccttatattttctcattttccatcaaaattccattctgttgggtcactctttgggcacagaggc

SEQ ID NO: 213093 - DNA, 201 bp, Homo sapiens
gaatggattattgagggtgcctgagtgagtattgtggaagtaactgaccacagggttcagaagagatggcccaggaacaggtgggtggaaatgccacctcmaggcagaatgtgcactcagaagtctctcagctgtaatttatagttcttctgtcacaggcaccttgacagcaacatatcccttatattttctcattttcca

SEQ ID NO: 213094 - DNA, 201 bp, Homo sapiens
caaacctgaggtccttcagacttatatttttaaggtatcttatatatatatttttagtgatatcctttttgctggtctatcctaatttaatatttcttaargacgtcaaggcctactgtttcttttaaatattttagaatcaaataattattttcttcaattcatcaagagtgtattgatcacctgtaatgtacaagcact

SEQ ID NO: 213095 - DNA, 201 bp, Homo sapiens
ttaaattaaaacaaagtagatagtgcaggcaagtcagaagtctaaggatatatccaaagttcctctgctaattgataacagagctagttcacagccctctrttcttccactagaacatgccaagagatatataatgaaagacaactgaaagtgggtgacctaaccaggccggccgcagtcagcactggagtggagcggctt

SEQ ID NO: 213096 - DNA, 201 bp, Homo sapiens
ggtttcgaactcctgggctcaagcgtttctcctgcctcggcctcctaaagtgctgggattacaagtgcgagccaacacacccagctaattttgtttttaawttttttgtagacacagtgtctcactatgttgcccaggctggtctcaaactcctggcctcaagtgatctttctgtcttggcctcccaaagtgctgggatta

SEQ ID NO: 213097 - DNA, 201 bp, Homo sapiens
agtagctggaattacaggtgccagtcgctgggcctaggtaatttttttttactttgtgtggccggtttcgaactcctgggctcaagcgtttctcctgcctyggcctcctaaagtgctgggattacaagtgcgagccaacacacccagctaattttgtttttaaattttttgtagacacagtgtctcactatgttgcccagg

SEQ ID NO: 213098 - DNA, 201 bp, Homo sapiens
tttttttttgagacaggtcttgctctgttacttaggctggagtgcagtggcaggactatggctcactgcacccttaacctccagaactcgtgatcctcccmcctcagcctcccaagtagctggaattacaggtgccagtcgctgggcctaggtaatttttttttactttgtgtggccggtttcgaactcctgggctcaagc

SEQ ID NO: 213099 - DNA, 201 bp, Homo sapiens
cagcattgccaacacatgggtcggagctgtggttggggccatcccgcctgtcatgggctggacagcggccacgggcagcctcgatgctggtaagtgtcccrcgatgtggagtctcatatgagcacactcggtcaaggaggcatttcctccctgagctgtagcacttggttcgattccattccatcccacgttaattctttt

SEQ ID NO: 213100 - DNA, 201 bp, Homo sapiens
agaggataaattaaaacacttggaattggggtcagtcaatacctggttttgaaatgaatgatgaagatggagttttagaaatgaaatgaatggattgtttrgttggcattattaacttaaagaacagggtttagcttaagtattatagggctttacaggagacatttttcaaatttactgagggttttaccagtaagcact

SEQ ID NO: 213101 - DNA, 201 bp, Homo sapiens
accttttggctattcgtatgtcttctttttttctttttctttttctttttttttttttttttttttttgagacaggtcttgctctgttacttaggctggartgcagtggcaggactatggctcactgcacccttaacctccagaactcgtgatcctcccacctcagcctcccaagtagctggaattacaggtgccagtcgc

SEQ ID NO: 213102 - DNA, 201 bp, Homo sapiens
ggtagtgtgattgagttgagttggagatgatcactccacgttctctgcctttttccagcccgttgctagctgtgtcctttgccacttgttgtgctgttccdggagttgccattctgaccttgggggtgaatccactcacaggagccctggggctcttcaacattttcctgtatacctgctgctacacaccactgaaaagga

SEQ ID NO: 213103 - DNA, 201 bp, Homo sapiens
tcctgcaggcggagccaggactgggcctttcttcttgttatttcagagacatctgtattttgattatgtctcttttgaattatctattttccagcttggtracgctgacagggaaataatacatgtcagcattagtttttccaacttaatggatcagatgagagtgatccataacatgtaagctttaggtgtgggctgtaa

SEQ ID NO: 213104 - DNA, 201 bp, Homo sapiens
ataacaatagctcttctgactggggtaaaatgatatctcagtatggttttaatttgcattcctctgatgattagtgatgttgagcattttttcatataccktttggctattcgtatgtcttctttttttctttttctttttctttttttttttttttttttttttgagacaggtcttgctctgttacttaggctggagtgc

SEQ ID NO: 213105 - DNA, 201 bp, Homo sapiens
atgtgttgaatgaaatgaatagatcagtacaaacaagaatttctctggaaagtcagacaaagaagaaggacagagtggacagtgaaagcttcctgcaggcrgagccaggactgggcctttcttcttgttatttcagagacatctgtattttgattatgtctcttttgaattatctattttccagcttggtgacgctgacag

SEQ ID NO: 213106 - DNA, 201 bp, Homo sapiens
attttttatgataacaatagctcttctgactggggtaaaatgatatctcagtatggttttaatttgcattcctctgatgattagtgatgttgagcattttytcatataccttttggctattcgtatgtcttctttttttctttttctttttctttttttttttttttttttttttgagacaggtcttgctctgttacttag

SEQ ID NO: 213107 - DNA, 201 bp, Homo sapiens
ccacgttctctgcctttttccagcccgttgctagctgtgtcctttgccacttgttgtgctgttccaggagttgccattctgaccttgggggtgaatccacwcacaggagccctggggctcttcaacattttcctgtatacctgctgctacacaccactgaaaaggatcagcattgccaacacatgggtcggagctgtggtt

SEQ ID NO: 213108 - DNA, 201 bp, Homo sapiens
agaggttaaataagttacccacttttaaataactagttaacttcagagtcagaactagaatgcagaccacctgatcctactcagcatgcttagttatgctwccatgaggaaaccagaatatagcactaataataaaaagtattaaagtattttaaaaacatatttcttatgaaaaatcccaacagatggaatagtagagtg

SEQ ID NO: 213109 - DNA, 201 bp, Homo sapiens
gcagcccagaaatatgtgttgaatgaaatgaatagatcagtacaaacaagaatttctctggaaagtcagacaaagaagaaggacagagtggacagtgaaarcttcctgcaggcggagccaggactgggcctttcttcttgttatttcagagacatctgtattttgattatgtctcttttgaattatctattttccagcttg

SEQ ID NO: 213110 - DNA, 201 bp, Homo sapiens
atactattttccatagaggctatactaatttacatgccccgtcaacagtgtgtaagagttccctttcctctgcatcctcatcaacatcttcattttttatrataacaatagctcttctgactggggtaaaatgatatctcagtatggttttaatttgcattcctctgatgattagtgatgttgagcattttttcatatacc

SEQ ID NO: 213111 - DNA, 201 bp, Homo sapiens
agagaggttaaataagttacccacttttaaataactagttaacttcagagtcagaactagaatgcagaccacctgatcctactcagcatgcttagttatgstaccatgaggaaaccagaatatagcactaataataaaaagtattaaagtattttaaaaacatatttcttatgaaaaatcccaacagatggaatagtagag

SEQ ID NO: 213112 - DNA, 201 bp, Homo sapiens
aagttttataatctgggtgaaaaactagccacatgtataaaatgcttaacagacagcataaggcagcccagaaatatgtgttgaatgaaatgaatagatcrgtacaaacaagaatttctctggaaagtcagacaaagaagaaggacagagtggacagtgaaagcttcctgcaggcggagccaggactgggcctttcttctt

SEQ ID NO: 213113 - DNA, 201 bp, Homo sapiens
ggtagttctatttttagttctttgggagatcgccatactattttccatagaggctatactaatttacatgccccgtcaacagtgtgtaagagttccctttyctctgcatcctcatcaacatcttcattttttatgataacaatagctcttctgactggggtaaaatgatatctcagtatggttttaatttgcattcctctg

SEQ ID NO: 213114 - DNA, 201 bp, Homo sapiens
atacaccctttcagttgaggaaaccaaggaccagagaggttaaataagttacccacttttaaataactagttaacttcagagtcagaactagaatgcagamcacctgatcctactcagcatgcttagttatgctaccatgaggaaaccagaatatagcactaataataaaaagtattaaagtattttaaaaacatatttct

SEQ ID NO: 213115 - DNA, 201 bp, Homo sapiens
cctttttgctggtctatcctaatttaatatttcttaaggacgtcaaggcctactgtttcttttaaatattttagaatcaaataattattttcttcaattcmtcaagagtgtattgatcacctgtaatgtacaagcactgtcagttttgtttttataatgctcaaagttttataatctgggtgaaaaactagccacatgtat

SEQ ID NO: 213116 - DNA, 201 bp, Homo sapiens
tggtcttcattctcttggaatcacgtcgaggagaaggcaacacacgtgcattaaaaggacactaagtgttgtcaaaggtacatttcactcaacaaatgtgkttttttagtgcacatgccagccaggcatggtgctcgaccctggaggtgcagtggtgactaaggcacacttctgtgtcttgtggggttctgagtcatgaag

SEQ ID NO: 213117 - DNA, 201 bp, Homo sapiens
gcttctgaattatgaagaagtgactagtgcataaagagatttgtgtaagaaaccactaacattaaaatgttagagtaaattacgtacatattttgtaataygtacacatgcttcatttgaaaccgtagtgtggctttaaagcacatatgccttcaaaggatggaaaaatccataaaatgttttgaattttgcagctgaaag

SEQ ID NO: 213118 - DNA, 201 bp, Homo sapiens
gggtgggaatgttggatggacaaggcagaatggattattgagggtgcctgagtgagtattgtggaagtaactgaccacagggttcagaagagatggcccasgaacaggtgggtggaaatgccacctcaaggcagaatgtgcactcagaagtctctcagctgtaatttatagttcttctgtcacaggcaccttgacagcaac

SEQ ID NO: 213119 - DNA, 201 bp, Homo sapiens
gcaagtttgacttgaaagtttcagtcttgccattgaaagagccataatacaccctttcagttgaggaaaccaaggaccagagaggttaaataagttacccmcttttaaataactagttaacttcagagtcagaactagaatgcagaccacctgatcctactcagcatgcttagttatgctaccatgaggaaaccagaatat

SEQ ID NO: 213120 - DNA, 201 bp, Homo sapiens
acctgaggtccttcagacttatatttttaaggtatcttatatatatatttttagtgatatcctttttgctggtctatcctaatttaatatttcttaaggaygtcaaggcctactgtttcttttaaatattttagaatcaaataattattttcttcaattcatcaagagtgtattgatcacctgtaatgtacaagcactgtc

SEQ ID NO: 213121 - DNA, 201 bp, Homo sapiens
gtactccagcctggggaacagagtgaaatcctgtctcagagaaaagaaaaattctaacctgttcatctcataacattattatggatataataataagatcrctaaaatcatgtaaataaaagtacattgttagggaagaggtttaaaactatagagaaatatagagttgtttacagaatttgaatgtctttaaaatttgct

SEQ ID NO: 213122 - DNA, 201 bp, Homo sapiens
tcttttttaagccaaagatcagcctgtactttgtgttattaatataatcaattagtttatatgaaggatggcttgttttttgtcgttttggcctttacagytgggactcctgttggtaacagtgtgtctgctctgtttctgtatcgcagctctggttgtaagtaccactgcagctggatttgcattggctccgggcccttt

SEQ ID NO: 213123 - DNA, 201 bp, Homo sapiens
acccgcactgttaaaccatccccttgaaatggggccagttagtatgagtgtaagcctttcccagcaggagcagagacagtaggttattgagcagatccagrgtgggaatgttggatggacaaggcagaatggattattgagggtgcctgagtgagtattgtggaagtaactgaccacagggttcagaagagatggcccagg

SEQ ID NO: 213124 - DNA, 201 bp, Homo sapiens
ctttatttacatcattgtatttaattcttaagacaactctataatacctcccatcttacagatgaagaatctaaggccaacagattaaataatttgctcamgatcacacggctaaacaagtagaaacccgccttccctattgtctttttattgagcctttttacctaagcaagtttgacttgaaagtttcagtcttgccat

SEQ ID NO: 213125 - DNA, 201 bp, Homo sapiens
gagatgtgtttcctagttcggttaaaattggagtttctgttcatgttctccttgttttcagagaagacagagagatgtagacaccgttcatctactatctyttatcaaacctgaggtccttcagacttatatttttaaggtatcttatatatatatttttagtgatatcctttttgctggtctatcctaatttaatatttc

SEQ ID NO: 213126 - DNA, 201 bp, Homo sapiens
aaatcagccctggctaagcacccgcactgttaaaccatccccttgaaatggggccagttagtatgagtgtaagcctttcccagcaggagcagagacagtargttattgagcagatccagggtgggaatgttggatggacaaggcagaatggattattgagggtgcctgagtgagtattgtggaagtaactgaccacagggt

SEQ ID NO: 213127 - DNA, 201 bp, Homo sapiens
ttaaataggtccttcctatttaaattattctgtcttatttcatctgttctttcttgtagctgattttacaattggagagttcacggtagttacatgtgttkgtttaaggtctgtcttcctttctagactaaactcttgctgttttgttcactgctgtacagctacacttagcatagtggctatctaggcaatgagaaattt

SEQ ID NO: 213128 - DNA, 201 bp, Homo sapiens
agggaaggatccagggcagcttccacgggactttacgtggcacttggccagatgtgtatctaaagctatgattctgctttgtaactttctagctataatcyacctccccaactttcaacaaacacattatgtcaaattctttctgtgtgttataattaaagccaaagagattcttaatatttaccaagtcttaatttcgct

SEQ ID NO: 213129 - DNA, 201 bp, Homo sapiens
taaaatagtcactataaggaacgaaaatggaaatcagccctggctaagcacccgcactgttaaaccatccccttgaaatggggccagttagtatgagtgtwagcctttcccagcaggagcagagacagtaggttattgagcagatccagggtgggaatgttggatggacaaggcagaatggattattgagggtgcctgagt

SEQ ID NO: 213130 - DNA, 201 bp, Homo sapiens
ccctccagctctatttaaataggtccttcctatttaaattattctgtcttatttcatctgttctttcttgtagctgattttacaattggagagttcacggyagttacatgtgtttgtttaaggtctgtcttcctttctagactaaactcttgctgttttgttcactgctgtacagctacacttagcatagtggctatctag

SEQ ID NO: 213131 - DNA, 201 bp, Homo sapiens
ttgctccagcttgggcctgatagttccatttccctggggcaaaggaaagggttataaggacaattaagcattagggatgggaatgggaggacaaaagtacytaaggcaaagggaaggatccagggcagcttccacgggactttacgtggcacttggccagatgtgtatctaaagctatgattctgctttgtaactttctag

SEQ ID NO: 213132 - DNA, 201 bp, Homo sapiens
ttctgaaatgggaggaaggaagtaaatctgagggcatttgtcactgttgtataagagggaagggcatctgttaaggcgtcttgggagctagagtgaacctrgagccttgagaaggcaggagaagagttaaaatagtcactataaggaacgaaaatggaaatcagccctggctaagcacccgcactgttaaaccatcccctt

SEQ ID NO: 213133 - DNA, 201 bp, Homo sapiens
gcccctccctccagctctatttaaataggtccttcctatttaaattattctgtcttatttcatctgttctttcttgtagctgattttacaattggagagtycacggtagttacatgtgtttgtttaaggtctgtcttcctttctagactaaactcttgctgttttgttcactgctgtacagctacacttagcatagtggct

SEQ ID NO: 213134 - DNA, 201 bp, Homo sapiens
ttatggcaagtttatcagcccctccctccagctctatttaaataggtccttcctatttaaattattctgtcttatttcatctgttctttcttgtagctgaytttacaattggagagttcacggtagttacatgtgtttgtttaaggtctgtcttcctttctagactaaactcttgctgttttgttcactgctgtacagcta

SEQ ID NO: 213135 - DNA, 201 bp, Homo sapiens
ttggtttttccttggggaatagaatgttgtagaacataagattttggggtccgactgcctggaatcaaagcctagctcctctgcctgcttcaccatgcaascctgaccatattactaaacttctctgaggctctgtttcctcgcctataaaatgaggtttgtgccttccacctcatagagttatgtgagaaaacgactgtt

SEQ ID NO: 213136 - DNA, 201 bp, Homo sapiens
gtgttgaagcaagaggggtattaccttgggggaaatatgaagaaagtaatttatttgatgcaggaagttaatagacagtagagatagaagataaaagacasattagggaggagattaaataaaaacaaaagtggagggtttatctttaaaaggaatgaagacagcctcttctgaaatgggaggaaggaagtaaatctgagg

SEQ ID NO: 213137 - DNA, 201 bp, Homo sapiens
aaaacatgttttgtatgtgatcaatctagcttttcaatataccactttttgtaatttggtataataaaattaaattgtaagtaaacttaaaattgaagatraaaatagtggtatattcataagtctttataagtctgacaaaataaatcaggggaaacaatttatggcaagtttatcagcccctccctccagctctattta

SEQ ID NO: 213138 - DNA, 201 bp, Homo sapiens
catcaggatgcttggctttgaagagtgttgaagcaagaggggtattaccttgggggaaatatgaagaaagtaatttatttgatgcaggaagttaatagacmgtagagatagaagataaaagacagattagggaggagattaaataaaaacaaaagtggagggtttatctttaaaaggaatgaagacagcctcttctgaaat

SEQ ID NO: 213139 - DNA, 201 bp, Homo sapiens
gtgatccactccatcaggatgcttggctttgaagagtgttgaagcaagaggggtattaccttgggggaaatatgaagaaagtaatttatttgatgcaggargttaatagacagtagagatagaagataaaagacagattagggaggagattaaataaaaacaaaagtggagggtttatctttaaaaggaatgaagacagcc

SEQ ID NO: 213140 - DNA, 201 bp, Homo sapiens
ggcaaggaatgtgtgtgatccactccatcaggatgcttggctttgaagagtgttgaagcaagaggggtattaccttgggggaaatatgaagaaagtaattwatttgatgcaggaagttaatagacagtagagatagaagataaaagacagattagggaggagattaaataaaaacaaaagtggagggtttatctttaaaag

SEQ ID NO: 213141 - DNA, 201 bp, Homo sapiens
cagaagagatggcccaggaacaggtgggtggaaatgccacctcaaggcagaatgtgcactcagaagtctctcagctgtaatttatagttcttctgtcacargcaccttgacagcaacatatcccttatattttctcattttccatcaaaattccattctgttgggtcactctttgggcacagaggctgcaggccaggtagg

SEQ ID NO: 213142 - DNA, 201 bp, Homo sapiens
ctcttgatctgtccgctttttctttgactggaccactcccacctcttggtagccactgctttgattgtctttgtgttcaggattgtagtggtaaagccatrtttcacctcctgttatatattcattttcttctttttttttttttttttgaagaaatgcctcaggatcttgatcccatttgttgaaaatttccattgaaag

SEQ ID NO: 213143 - DNA, 201 bp, Homo sapiens
aaattttattttttgttttgctttgtttttaatgtcacagccagtgttgatacaggttctagaagatggtgctctcatatagtgctggtgggagtgtaaayttgtgcaaactctctggagtacagcctgacagtacgtgtcaaaatccctacaacatgtgcatatcatctgacttagcagtttcacatctaggaatttatc

SEQ ID NO: 213144 - DNA, 201 bp, Homo sapiens
gttaaactgatgagccaacaaatgagcctgagtataggtcctgtttccaagttattttacttgctttgagtctcagtttcttattgctaaaatgaggtaaygctatctcagtaaacttgtcttattttaaggtttttttttttaagaaactcaatactgttttttaatctatcctattggcaaattttattttttgttttg

SEQ ID NO: 213145 - DNA, 201 bp, Homo sapiens
tcatcatttgataagaagtacgaatcatttaacctttcttccacttctctctctattataggttgcgtaggaggctctgtctggtatcttgaaagaagaaytatacaggactcccctcacaagttcttacatcttctcaggaatgtcaataagcagtggattacatttcagcactttagcttcctcaaacgcatggtatgt

SEQ ID NO: 213146 - DNA, 201 bp, Homo sapiens
aattttaaaattagccgagcatggtggcacactcctgtcatcccagctccttagaggctgaggcaggaggattgcttgagccctggatttggaggttacartgagctatgattgcaccactgtactccagcctggggaacagagtgaaatcctgtctcagagaaaagaaaaattctaacctgttcatctcataacattatt

SEQ ID NO: 213147 - DNA, 201 bp, Homo sapiens
acctatgatttcaacaatttgggaggcaaaggtgggcagatcgcttgaggccagcagtttgagaccagcctgagcaacgtagtgagaccctgtctttacaraaaaaaattttaaaattagccgagcatggtggcacactcctgtcatcccagctccttagaggctgaggcaggaggattgcttgagccctggatttggagg

SEQ ID NO: 213148 - DNA, 201 bp, Homo sapiens
aagagagatagatagagagaaacattaaggaaatcgaatgagtaggaccttagctagatgaagtggattgctaaggagacataaaataagagctgagagcrcggagctgcagagagtttgaataccttgaggtgaagcaggtattttccagctctgtgggcccttttgtcatttattattctaggctctatcctgttctgt

SEQ ID NO: 213149 - DNA, 201 bp, Homo sapiens
aagcatgacaagtcatttaattaatctttccacattactgcttcctcatgtgtgaagaagaatcttaattgctagcctaggccaggtgcatggttcacacstatgatttcaacaatttgggaggcaaaggtgggcagatcgcttgaggccagcagtttgagaccagcctgagcaacgtagtgagaccctgtctttacagaa

SEQ ID NO: 213150 - DNA, 201 bp, Homo sapiens
agttttttgaggtgccatttgactcaaacatgaataggacaaagaacagaccgctggttcgtggacagatcaggtaaaatcacgaatacaagtgtcttccvcattataaaacattcatttgcttgttcatctgaatcatttcccactattttgctttgagctgcgaagtggaaataaaatacccacaaagaaacaaattga

SEQ ID NO: 213151 - DNA, 201 bp, Homo sapiens; identical to SEQ ID NO: 37625

SEQ ID NO: 213152 - DNA, 201 bp, Homo sapiens
acttcactagttgcagctcagcttccagcctcaccattcatctctgcttttctctgtactttcactgcatttttctctctgcatggcggccctgccaaccrctcttcacttaaatggactcatatcaaaatggcaacctcagccttagcccctaggtcctccagctgagttccctgtcccaattccaaatctttatgagag

SEQ ID NO: 213153 - DNA, 201 bp, Homo sapiens
gttacttaactgactctaagcatgacaagtcatttaattaatctttccacattactgcttcctcatgtgtgaagaagaatcttaattgctagcctaggccrggtgcatggttcacacctatgatttcaacaatttgggaggcaaaggtgggcagatcgcttgaggccagcagtttgagaccagcctgagcaacgtagtgag

SEQ ID NO: 213154 - DNA, 201 bp, Homo sapiens
gctcaccacttcactagttgcagctcagcttccagcctcaccattcatctctgcttttctctgtactttcactgcatttttctctctgcatggcggccctkccaaccactcttcacttaaatggactcatatcaaaatggcaacctcagccttagcccctaggtcctccagctgagttccctgtcccaattccaaatcttt

SEQ ID NO: 213155 - DNA, 201 bp, Homo sapiens
aatgagggagttagatttagagcctccttttattctctggcaaagaacacaccttagagtgcatatgttacatattagggacttacattgaagggtgaacmctttggtttggatgtggtttgtttgtcctcaccaaaacttgtgttgaaagttgatccctaatgttttggtgttgggaggtagggtctagtgggaggtgtt

SEQ ID NO: 213156 - DNA, 201 bp, Homo sapiens
ttccttctcttctgacttcatatttgacaggttgtccttctgtcttagacaaaaatctattaaattcgctgctccatccagttactcttctatttctcctytttgtagccgacttctggaaagggtggcctgctcaccacttcactagttgcagctcagcttccagcctcaccattcatctctgcttttctctgtactttc

SEQ ID NO: 213157 - DNA, 201 bp, Homo sapiens
tcaagcgattctcctgcctcagcctcctgagtagctgggattacaggcatgtgccaccacgcctggctatttctttcttttttttttttttttttttttgkatttttagtagagatggggtttcaccatgttggtcaggctggtctcgaactcctgaccttgtgatccgccctcctcagcctcccaaagtgctgggattgc

SEQ ID NO: 213158 - DNA, 201 bp, Homo sapiens
agcaccaacgtttaaaaaacatgttttgtatgtgatcaatctagcttttcaatataccactttttgtaatttggtataataaaattaaattgtaagtaaamttaaaattgaagataaaaatagtggtatattcataagtctttataagtctgacaaaataaatcaggggaaacaatttatggcaagtttatcagcccctcc

SEQ ID NO: 213159 - DNA, 201 bp, Homo sapiens
cctcattggttccttctcttctgacttcatatttgacaggttgtccttctgtcttagacaaaaatctattaaattcgctgctccatccagttactcttctrtttctcctttttgtagccgacttctggaaagggtggcctgctcaccacttcactagttgcagctcagcttccagcctcaccattcatctctgcttttctc

SEQ ID NO: 213160 - DNA, 201 bp, Homo sapiens
cttaataaaaggccattacagctactgttgcagcagtgcaagagcaccaacgtttaaaaaacatgttttgtatgtgatcaatctagcttttcaatataccrctttttgtaatttggtataataaaattaaattgtaagtaaacttaaaattgaagataaaaatagtggtatattcataagtctttataagtctgacaaaat

SEQ ID NO: 213161 - DNA, 201 bp, Homo sapiens
aagtgttttgccctaggagattatagctgccagagtctaacacttattttggaatgtttccgggggtccttgggaccccttttctgtcttatggtcttccrtgctgtaagacctggagaccaactggcctgaatggaggttgtggggcctgagggctctcccggcacctctgccagccctgtcgcctcattggttccttct

SEQ ID NO: 213162 - DNA, 201 bp, Homo sapiens
agatcgagaccatcctggctaacacggtgaaaccctgtctctattaaaaatacaaaaaattagccgagtgtggtggtgggtgtctgtagtcccagctactygggaggctgaggcaggagaatggcgtgaacccaggaggcggagcttgcagtgagccaagattgtgccactgcactccagcctgggcgatagagtgagact

SEQ ID NO: 213163 - DNA, 201 bp, Homo sapiens
tcactcacagagattattaattcctctgttcttaataaaaggccattacagctactgttgcagcagtgcaagagcaccaacgtttaaaaaacatgttttgkatgtgatcaatctagcttttcaatataccactttttgtaatttggtataataaaattaaattgtaagtaaacttaaaattgaagataaaaatagtggtat

SEQ ID NO: 213164 - DNA, 201 bp, Homo sapiens
tctaaaatatacctcagttcttctcaggaggataaaaccaagtgttttgccctaggagattatagctgccagagtctaacacttattttggaatgtttccrggggtccttgggaccccttttctgtcttatggtcttccgtgctgtaagacctggagaccaactggcctgaatggaggttgtggggcctgagggctctccc

SEQ ID NO: 213165 - DNA, 201 bp, Homo sapiens
tggggctgcacacgtagtggttttattgaaagataggagagtgaggccgggcacggtggctcacgcctgtaatcctagcactttgggaggccgagtcagawggatcacaagatcaggagatcgagaccatcctggctaacacggtgaaaccctgtctctattaaaaatacaaaaaattagccgagtgtggtggtgggtgtc

SEQ ID NO: 213166 - DNA, 201 bp, Homo sapiens
gtttttcttattcacacatttattctgtgttgttgaaaattagaactttttttgcaatattatcacaccctgttcaactctatttcagattgttcttatawaaattcaatccagcaagaatcactcacagagattattaattcctctgttcttaataaaaggccattacagctactgttgcagcagtgcaagagcaccaac

SEQ ID NO: 213167 - DNA, 201 bp, Homo sapiens
ggccaagaggaggggacagcaggagacaagtggttaaaagtgaacgttcccaatatttcttctaaaatatacctcagttcttctcaggaggataaaaccargtgttttgccctaggagattatagctgccagagtctaacacttattttggaatgtttccgggggtccttgggaccccttttctgtcttatggtcttccgt

SEQ ID NO: 213168 - DNA, 201 bp, Homo sapiens
tttaacaaaaaaagaatctggagaggcactttgattttcgtggaaatgtgttgaattcaatttgagacacattgagtttgtgatgttaaaacatctacatraaaaaaaaaaaaaacagcaatcaagtgacattacagaattggagcccaggagaaagatggggctgcacacgtagtggttttattgaaagataggagagtg

SEQ ID NO: 213169 - DNA, 201 bp, Homo sapiens
atagtgctgtttttcttattcacacatttattctgtgttgttgaaaattagaactttttttgcaatattatcacaccctgttcaactctatttcagattgytcttatataaattcaatccagcaagaatcactcacagagattattaattcctctgttcttaataaaaggccattacagctactgttgcagcagtgcaaga

SEQ ID NO: 213170 - DNA, 201 bp, Homo sapiens
gtggccaagaggaggggacagcaggagacaagtggttaaaagtgaacgttcccaatatttcttctaaaatatacctcagttcttctcaggaggataaaacyaagtgttttgccctaggagattatagctgccagagtctaacacttattttggaatgtttccgggggtccttgggaccccttttctgtcttatggtcttcc

SEQ ID NO: 213171 - DNA, 201 bp, Homo sapiens
ctttttctgaccacccccatcaaatagtgctgtttttcttattcacacatttattctgtgttgttgaaaattagaactttttttgcaatattatcacaccytgttcaactctatttcagattgttcttatataaattcaatccagcaagaatcactcacagagattattaattcctctgttcttaataaaaggccattaca

SEQ ID NO: 213172 - DNA, 201 bp, Homo sapiens
ctcttacacatcacacaggcagccagtgtccttgaacaccttccacttaacgaagctgcatatctgcttgcaacactcgtcctaataggataaaaggattwagtagttttagggtggccaagaggaggggacagcaggagacaagtggttaaaagtgaacgttcccaatatttcttctaaaatatacctcagttcttctca

SEQ ID NO: 213173 - DNA, 201 bp, Homo sapiens
gttcaagaaaattagtctttttctgaccacccccatcaaatagtgctgtttttcttattcacacatttattctgtgttgttgaaaattagaactttttttrcaatattatcacaccctgttcaactctatttcagattgttcttatataaattcaatccagcaagaatcactcacagagattattaattcctctgttctta

SEQ ID NO: 213174 - DNA, 201 bp, Homo sapiens
ttctcaccacggagtttatccctattacttggagccaaaccactgcatctgttctccttaggctgtgtcagcgcagccacctcacagcctcagggacccayggcttccattctggatactcacactggtaagtgggacttggcagaggccaaatcaagtagtttgtttctgacacctctgagcccatttctttgccagttt

SEQ ID NO: 213175 - DNA, 201 bp, Homo sapiens
aaaagaatttttttgttcaagaaaattagtctttttctgaccacccccatcaaatagtgctgtttttcttattcacacatttattctgtgttgttgaaaaktagaactttttttgcaatattatcacaccctgttcaactctatttcagattgttcttatataaattcaatccagcaagaatcactcacagagattattaa

SEQ ID NO: 213176 - DNA, 201 bp, Homo sapiens
cagttgggagactctgggttaaactgatgagccaacaaatgagcctgagtataggtcctgtttccaagttattttacttgctttgagtctcagtttcttaytgctaaaatgaggtaatgctatctcagtaaacttgtcttattttaaggtttttttttttaagaaactcaatactgttttttaatctatcctattggcaaa

SEQ ID NO: 213177 - DNA, 201 bp, Homo sapiens
tttgcatgcgtgagtgaatgaatataaaagaatttttttgttcaagaaaattagtctttttctgaccacccccatcaaatagtgctgtttttcttattcayacatttattctgtgttgttgaaaattagaactttttttgcaatattatcacaccctgttcaactctatttcagattgttcttatataaattcaatccagc

SEQ ID NO: 213178 - DNA, 201 bp, Homo sapiens
tgtagaggctttctccagaaactcatttccaagctccaatgtgggatttacacaggaaattaaagttaaattgtcttgatttgattaaggttttgcatttycttttgtttttgaagaaaggatattttattttgtaatttcaaagtcatttattgtggaagaatgaccaagaagtatgaaattaatttttgtctaaactaa

SEQ ID NO: 213179 - DNA, 201 bp, Homo sapiens
cttcagagatgtgtttcctagttcggttaaaattggagtttctgttcatgttctccttgttttcagagaagacagagagatgtagacaccgttcatctacyatcttttatcaaacctgaggtccttcagacttatatttttaaggtatcttatatatatatttttagtgatatcctttttgctggtctatcctaatttaat

SEQ ID NO: 213180 - DNA, 201 bp, Homo sapiens
gttcagtcccaggccatggagaacttggtcaccactgttgtgcagtgttgtcctagggcccaggttcttgctgagggctagaggcccttgtcacacttccrggcagtttcctcctgaagagagcctcagcatgtgcaggctggagttgcctccccggaggctagagaaaaagagcttttcaaaagtcctcacttaagagtg

SEQ ID NO: 213181 - DNA, 201 bp, Homo sapiens
ttcctcaagggtgtagccccacttcagcacttgggtccctgcactgagccacctgcctatctgatggagacacccccatccctggcaggagtgcctgaacyctattcaacttcctcaaacctggcaccaagcaacaagaaccttctctttctgggaagacccagacagggccagagtcagggccaagtattacagccttag

SEQ ID NO: 213182 - DNA, 201 bp, Homo sapiens
cagaattgtaaatagtattgcattgtaagtattgtattaaaaatagtcaccctttcctttgcaattaaagttgaatgtttatcctgcttatttccttgtckttagtgtttttacacctgctgtaaaaatgcataagataatacgttttgtcaacttgagttctggaatgggaagaattgcactactgggcttgatatgaat

SEQ ID NO: 213183 - DNA, 201 bp, Homo sapiens
ttccatggatgatgtgctagaaacatagaaaagacagtatcttttttcatccagatgaaatgatgcattagaattcctgaactaacacacacacacacacwcacacacacacacacacacacacacgagaactgccaagatagttacttaaccacgagtttatttgttaaattaggtaacaccttacaagcatttaaatca

SEQ ID NO: 213184 - DNA, 201 bp, Homo sapiens
ataagccaggcacagaaaaacaaacattgcgtattctcacttatgtataggatctaaaaaccaaaacaatggagcccatggagatagagagtagaaggackgttaccagaggctgggaagggtagtggggtggtggggatggttaatggtacaaaaaaataggatgaatgaataagacctagtatttgatagtacagcaga

SEQ ID NO: 213185 - DNA, 201 bp, Homo sapiens
agtatgtgtatgagtgattggatcaaaaaatatttatactttttaacccagtcattctttttttagaaattaacatatcctaagtgaaagtaaatacttayatctctttttaaaatgctgatcagaggtaggagaataaaaataattcttcccatgtgggttattatatatttaatgctttcatacacaaaattttaagaa

SEQ ID NO: 213186 - DNA, 201 bp, Homo sapiens
atctagagtcgtggtgcatttggctaaagagctcctgcatgtgaggaagtctggagaaaagtgctccagaggggtcacaatggagctgtgttaacctctgytgtcagcttctcaccacggagtttatccctattacttggagccaaaccactgcatctgttctccttaggctgtgtcagcgcagccacctcacagcctcag

SEQ ID NO: 213187 - DNA, 201 bp, Homo sapiens
agtggttactgggaaatagcggggggggggggggtggataggagggaattggctatagaggggcgtaagaaactttttgaaaagataaatttatatgttcyatatcttgattgtggtggtggttacactatgtttaccttttttttttttaactcagaactaactgtacacttgcaatgggtaaatttgtgtattgaaaat

SEQ ID NO: 213188 - DNA, 201 bp, Homo sapiens
atattatttcaatatagaaaaagtggtctcagtaaattgttttattcatataatgtaacactatataatatcatagaaattgcatttccagatgatatttratgacatggaaagtttttgagtcttaaatgagaaactattagaatataatagtgtgtacagtatgtgtatgagtgattggatcaaaaaatatttatactt

SEQ ID NO: 213189 - DNA, 201 bp, Homo sapiens
tcttcatctggttgcctccgtcactgttctaggggcttctggcactggtgcaaggcagagctgtgcttccttgagagtgtgccaagcatttactttggttrtttagttctagtctgggagcagacacaaaaggaaaaaaaagaaaataccaactccatgtgtctgaggtatcacttatagtttaaaaaaaatgattgtctt

SEQ ID NO: 213190 - DNA, 201 bp, Homo sapiens
catgtcgtatgattccatttatatgacattttggaaagccaaaactaggcacagaagtaagatcagtggttactgggaaatagcggggggggggggggtgkataggagggaattggctatagaggggcgtaagaaactttttgaaaagataaatttatatgttctatatcttgattgtggtggtggttacactatgtttac

SEQ ID NO: 213191 - DNA, 201 bp, Homo sapiens
cactgctgggagaggaatgtctcgtcttcttcatctggttgcctccgtcactgttctaggggcttctggcactggtgcaaggcagagctgtgcttccttgrgagtgtgccaagcatttactttggttatttagttctagtctgggagcagacacaaaaggaaaaaaaagaaaataccaactccatgtgtctgaggtatcac

SEQ ID NO: 213192 - DNA, 201 bp, Homo sapiens
agacagagacaaaagacagcatgtcgtatgattccatttatatgacattttggaaagccaaaactaggcacagaagtaagatcagtggttactgggaaatrgcggggggggggggggtggataggagggaattggctatagaggggcgtaagaaactttttgaaaagataaatttatatgttctatatcttgattgtggtg

SEQ ID NO: 213193 - DNA, 201 bp, Homo sapiens
aaaactcctaaataagattctggggagacattttcaaaacagttttctgtagaggctttctccagaaactcatttccaagctccaatgtgggatttacacrggaaattaaagttaaattgtcttgatttgattaaggttttgcattttcttttgtttttgaagaaaggatattttattttgtaatttcaaagtcatttatt

SEQ ID NO: 213194 - DNA, 201 bp, Homo sapiens
tgaaatgctgattcctgccagcagtcgccaggtgtctctcacactgctgggagaggaatgtctcgtcttcttcatctggttgcctccgtcactgttctagrggcttctggcactggtgcaaggcagagctgtgcttccttgagagtgtgccaagcatttactttggttatttagttctagtctgggagcagacacaaaagg

SEQ ID NO: 213195 - DNA, 201 bp, Homo sapiens
tcttttaaaataggttttgttttcccattttcttcacaatttccttaagttctgaatttacatcagtcatctgccactctacaatatctataacttgagayatgttcagaaatagaaaactcctaaataagattctggggagacattttcaaaacagttttctgtagaggctttctccagaaactcatttccaagctccaa

SEQ ID NO: 213196 - DNA, 201 bp, Homo sapiens
tttcccaaggagaatacagaggacagtacttaagttttagttatgttgattgcttgtgtgaaatgctgattcctgccagcagtcgccaggtgtctctcacrctgctgggagaggaatgtctcgtcttcttcatctggttgcctccgtcactgttctaggggcttctggcactggtgcaaggcagagctgtgcttccttgag

SEQ ID NO: 213197 - DNA, 201 bp, Homo sapiens
atgttttaaaatttaattttcttttaaaataggttttgttttcccattttcttcacaatttccttaagttctgaatttacatcagtcatctgccactctayaatatctataacttgagacatgttcagaaatagaaaactcctaaataagattctggggagacattttcaaaacagttttctgtagaggctttctccagaa

SEQ ID NO: 213198 - DNA, 201 bp, Homo sapiens
tgaaatagttacagtaaaaaccctttacattttaagcaacatagaaattttctataatttttttttgcaaatcaaaggggaaaatgtttatagctaaaatrccatttaatgagaaaaaaatcaatgcaatgacattgtcatttgtttcattttcccaaggagaatacagaggacagtacttaagttttagttatgttgatt

SEQ ID NO: 213199 - DNA, 201 bp, Homo sapiens
tttcttttaaacatgttttaaaatttaattttcttttaaaataggttttgttttcccattttcttcacaatttccttaagttctgaatttacatcagtcakctgccactctacaatatctataacttgagacatgttcagaaatagaaaactcctaaataagattctggggagacattttcaaaacagttttctgtagagg

SEQ ID NO: 213200 - DNA, 201 bp, Homo sapiens
aagtgaccttgaatatatgtaataaacaaggaatagtaagataattgactgtttttgaaatagttacagtaaaaaccctttacattttaagcaacatagamattttctataatttttttttgcaaatcaaaggggaaaatgtttatagctaaaataccatttaatgagaaaaaaatcaatgcaatgacattgtcatttgtt

SEQ ID NO: 213201 - DNA, 201 bp, Homo sapiens
gcatttcttttaaacatgttttaaaatttaattttcttttaaaataggttttgttttcccattttcttcacaatttccttaagttctgaatttacatcagkcatctgccactctacaatatctataacttgagacatgttcagaaatagaaaactcctaaataagattctggggagacattttcaaaacagttttctgtag

SEQ ID NO: 213202 - DNA, 201 bp, Homo sapiens
ttgtttcaaatgatggagaaagtgaccttgaatatatgtaataaacaaggaatagtaagataattgactgtttttgaaatagttacagtaaaaaccctttrcattttaagcaacatagaaattttctataatttttttttgcaaatcaaaggggaaaatgtttatagctaaaataccatttaatgagaaaaaaatcaatgc

SEQ ID NO: 213203 - DNA, 201 bp, Homo sapiens
tgaatgtaattatgccaaatatattttcttcttacattctttgcatttcttttaaacatgttttaaaatttaattttcttttaaaataggttttgttttcycattttcttcacaatttccttaagttctgaatttacatcagtcatctgccactctacaatatctataacttgagacatgttcagaaatagaaaactccta

SEQ ID NO: 213204 - DNA, 201 bp, Homo sapiens
tgcctgtttgttactgagctcccttttgtctatgttgtttcaaatgatggagaaagtgaccttgaatatatgtaataaacaaggaatagtaagataattgrctgtttttgaaatagttacagtaaaaaccctttacattttaagcaacatagaaattttctataatttttttttgcaaatcaaaggggaaaatgtttatag

SEQ ID NO: 213205 - DNA, 201 bp, Homo sapiens
aataaataaataaaataaaaaggtgtctgtgtgtgtgaaaccacaatctccacgttctgaatgtaattatgccaaatatattttcttcttacattctttgsatttcttttaaacatgttttaaaatttaattttcttttaaaataggttttgttttcccattttcttcacaatttccttaagttctgaatttacatcagtc

SEQ ID NO: 213206 - DNA, 201 bp, Homo sapiens
atggatgagttcaggggattttaaaggataattttgaatataatatagtttcaccttagggctgacctaaataaactgaataaactgcagctccactgttycaagaaattgaaaatgcatctggtcctaatacagctttgagtgccagtcttggtgctgcttgcctgtttgttactgagctcccttttgtctatgttgttt

SEQ ID NO: 213207 - DNA, 201 bp, Homo sapiens
taaataaataaataaaataaaaaggtgtctgtgtgtgtgaaaccacaatctccacgttctgaatgtaattatgccaaatatattttcttcttacattcttygcatttcttttaaacatgttttaaaatttaattttcttttaaaataggttttgttttcccattttcttcacaatttccttaagttctgaatttacatcag

SEQ ID NO: 213208 - DNA, 201 bp, Homo sapiens
gagtatcccccttcctcaagggtgtagccccacttcagcacttgggtccctgcactgagccacctgcctatctgatggagacacccccatccctggcaggrgtgcctgaaccctattcaacttcctcaaacctggcaccaagcaacaagaaccttctctttctgggaagacccagacagggccagagtcagggccaagtat

SEQ ID NO: 213209 - DNA, 201 bp, Homo sapiens
aatcacttgacaccaagagtttgagcattttttagagatgggaccccatttcttaaaataaataaataaataaataaataaaataaaaaggtgtctgtgtrtgtgaaaccacaatctccacgttctgaatgtaattatgccaaatatattttcttcttacattctttgcatttcttttaaacatgttttaaaatttaattt

SEQ ID NO: 213210 - DNA, 201 bp, Homo sapiens
taacaggattctttcagtcagctttcaaaactcattcagtgtagatctggtttgttttcttccttgaaaaaaattattaatataataccacagtctctgcrccgaacatcatgatgcatgcctataatcgcagctactcaggaggctgaggtgggagaatcacttgacaccaagagtttgagcattttttagagatgggac

SEQ ID NO: 213211 - DNA, 201 bp, Homo sapiens
acagtgtgggacttcctaggctgtgcatggggagtatcccccttcctcaagggtgtagccccacttcagcacttgggtccctgcactgagccacctgcctrtctgatggagacacccccatccctggcaggagtgcctgaaccctattcaacttcctcaaacctggcaccaagcaacaagaaccttctctttctgggaaga

SEQ ID NO: 213212 - DNA, 201 bp, Homo sapiens
acctgcacaccaccagccctcctgctcccggtcacgttcctcttccttagttccacctggagctcacctgacttgaccccaattccctctccctcttaacrcaactgtcctcttccctcttatttccctcaaacctttatagtgattgtgcagacatttgaggtggagaccatgaaagacagtgtgggacttcctaggctg

SEQ ID NO: 213213 - DNA, 201 bp, Homo sapiens
agagcacacctgcacaccaccagccctcctgctcccggtcacgttcctcttccttagttccacctggagctcacctgacttgaccccaattccctctcccycttaacacaactgtcctcttccctcttatttccctcaaacctttatagtgattgtgcagacatttgaggtggagaccatgaaagacagtgtgggacttcc

SEQ ID NO: 213214 - DNA, 201 bp, Homo sapiens
tggaatcaaagcctagctcctctgcctgcttcaccatgcaagcctgaccatattactaaacttctctgaggctctgtttcctcgcctataaaatgaggttygtgccttccacctcatagagttatgtgagaaaacgactgttcttataaagccgtcagtaaatgatactgctgtcatcattgttactacttttttcagaat

SEQ ID NO: 213215 - DNA, 201 bp, Homo sapiens
gtgtattgaaaattatgttctgttttagactagattttcagagcacttggtttttccttggggaatagaatgttgtagaacataagattttggggtccgaytgcctggaatcaaagcctagctcctctgcctgcttcaccatgcaagcctgaccatattactaaacttctctgaggctctgtttcctcgcctataaaatga

SEQ ID NO: 213216 - DNA, 201 bp, Homo sapiens
ttttgtggagtgttgtctatgtagaaaagcgtgctagttcccaaggttgcagagaggtaaataacatggtcttcattctcttggaatcacgtcgaggagawggcaacacacgtgcattaaaaggacactaagtgttgtcaaaggtacatttcactcaacaaatgtggttttttagtgcacatgccagccaggcatggtgct

SEQ ID NO: 213217 - DNA, 201 bp, Homo sapiens
actctagtgaacacagtcattattttccagaattgtacatacataaccttccatgtactttatggatgagttcaggggattttaaaggataattttgaatrtaatatagtttcaccttagggctgacctaaataaactgaataaactgcagctccactgtttcaagaaattgaaaatgcatctggtcctaatacagctttg

SEQ ID NO: 213218 - DNA, 201 bp, Homo sapiens
cttaatttaactgagtgattctcaaactctagtgaacacagtcattattttccagaattgtacatacataaccttccatgtactttatggatgagttcagrggattttaaaggataattttgaatataatatagtttcaccttagggctgacctaaataaactgaataaactgcagctccactgtttcaagaaattgaaaa

SEQ ID NO: 213219 - DNA, 201 bp, Homo sapiens
ccgatgcttgtagcatgaagaataatagagtaaaccccacagggaaacagaaccccatagaattctccacctctcctctactgagagtctccttaaaggcrgaatggtttgaatgcccagccatctaaatataggcttttcttttgttccctcttaatttaactgagtgattctcaaactctagtgaacacagtcattatt

SEQ ID NO: 213220 - DNA, 201 bp, Homo sapiens
aagacagagacaaaagacagcatgtcgtatgattccatttatatgacattttggaaagccaaaactaggcacagaagtaagatcagtggttactgggaaayagcggggggggggggggtggataggagggaattggctatagaggggcgtaagaaactttttgaaaagataaatttatatgttctatatcttgattgtggt

SEQ ID NO: 213221 - DNA, 201 bp, Homo sapiens
tcattttggtatttttttcttttttattttataggcaatctttcttctcttccttctagattaacaggattctttcagtcagctttcaaaactcattcagygtagatctggtttgttttcttccttgaaaaaaattattaatataataccacagtctctgcaccgaacatcatgatgcatgcctataatcgcagctactca

SEQ ID NO: 213222 - DNA, 201 bp, Homo sapiens
aaatacatttctgtttagccaggctgccgatgcttgtagcatgaagaataatagagtaaaccccacagggaaacagaaccccatagaattctccacctctyctctactgagagtctccttaaaggcagaatggtttgaatgcccagccatctaaatataggcttttcttttgttccctcttaatttaactgagtgattctc

SEQ ID NO: 213223 - DNA, 201 bp, Homo sapiens
atattgaataaattatgaaaggagaaaactcaggtgtgtatgtgtgtgtgcctgtgtgcgtctccaggcttgggatgctttcaaaaatccatctaggaatrggaagagccgatggtttttgtttttttaatcaaaggctgaatggtatgattaagagaaagagtatatagactaattgacctaaaataacaagaaatcagt

SEQ ID NO: 213224 - DNA, 201 bp, Homo sapiens
aatgagggagattcattttggtatttttttcttttttattttataggcaatctttcttctcttccttctagattaacaggattctttcagtcagctttcaraactcattcagtgtagatctggtttgttttcttccttgaaaaaaattattaatataataccacagtctctgcaccgaacatcatgatgcatgcctataat

SEQ ID NO: 213225 - DNA, 201 bp, Homo sapiens
cctgttcagtcaaatcctcacagccagcaccaacagaaatacatttctgtttagccaggctgccgatgcttgtagcatgaagaataatagagtaaaccccrcagggaaacagaaccccatagaattctccacctctcctctactgagagtctccttaaaggcagaatggtttgaatgcccagccatctaaatataggcttt

SEQ ID NO: 213226 - DNA, 201 bp, Homo sapiens
acttaaaagatcctcattacctgaaataggactgtggttacaaattctcaacctcttctctccctgggcaggatggtgctttccagggcagatgacacagwgggttggtgaactctcagttctctgccagggaccccatggagaaggtggttccagaggaggggaaggagaagatagacagaatcctgtagtttgcctgac

SEQ ID NO: 213227 - DNA, 201 bp, Homo sapiens
ctcccctctgaataagaaggctgaatctcagtggtcagcaatgagggagattcattttggtatttttttcttttttattttataggcaatctttcttctcwtccttctagattaacaggattctttcagtcagctttcaaaactcattcagtgtagatctggtttgttttcttccttgaaaaaaattattaatataatacc

SEQ ID NO: 213228 - DNA, 201 bp, Homo sapiens
cgtctctattgcctatgtgtatcttcacctttgttacagtgctatagctctgtctacctgtaattcattataagggagaggagcagaggtgacattagaaygtaatcccagagaaggtgcagctcccctgttcagtcaaatcctcacagccagcaccaacagaaatacatttctgtttagccaggctgccgatgcttgtag

SEQ ID NO: 213229 - DNA, 201 bp, Homo sapiens
tgtattgagcaaaacaaaatacttcggttgacacacacaaaaaaggagggcttttgagaaagacaaggaaaatctcacatttggagctggtattttagccrttttcccagctgaggttgctctttctgagccatttctagagcaaagcagacactgagctctgaatgatccaattccttcccccatttctaagttatcact

SEQ ID NO: 213230 - DNA, 201 bp, Homo sapiens
gcataattcaggggtcaccacgtactcccctctgaataagaaggctgaatctcagtggtcagcaatgagggagattcattttggtatttttttcttttttmttttataggcaatctttcttctcttccttctagattaacaggattctttcagtcagctttcaaaactcattcagtgtagatctggtttgttttcttcctt

SEQ ID NO: 213231 - DNA, 201 bp, Homo sapiens
tgatgatagcttggaccagggtggtcacagcagaagtgaagttcttctgttactcagctcaaaattcaggctggctaccattgcctactcttctctgaaaygttcccgtctctattgcctatgtgtatcttcacctttgttacagtgctatagctctgtctacctgtaattcattataagggagaggagcagaggtgacat

SEQ ID NO: 213232 - DNA, 201 bp, Homo sapiens
caggagaaaggaaaggtatgtgtctgtcacgtggcaggcattgggtgttatgggatccaggagtaatggagggattcagtagttggtccctgccctcaagraattagaaaaacagactaagagattggactacaatgctggaaactctgattttcgtagctgggacaataggaatcactcctccttaaaaattcctaagtc

SEQ ID NO: 213233 - DNA, 201 bp, Homo sapiens
taaaatagaccatagaatcccaggagagagacttggggcagctcctggcatgacttgatgatagcttggaccagggtggtcacagcagaagtgaagttctkctgttactcagctcaaaattcaggctggctaccattgcctactcttctctgaaacgttcccgtctctattgcctatgtgtatcttcacctttgttacagt

SEQ ID NO: 213234 - DNA, 201 bp, Homo sapiens
agtaaatttgaaggtatgagatttaatttggtcctaggactttcagtctaactttcatcattaattgtatgaaaaataagaaaggaaaacaggaagccctrataaattcttacctttgtggctgtggtgttaaaaacctgtattaaaagtcttatcttttaaccagaagtggttatagtttgtaatcagttaggcccctga

SEQ ID NO: 213235 - DNA, 201 bp, Homo sapiens
agaattcaactatctggctcaatcaggagaaaggaaaggtatgtgtctgtcacgtggcaggcattgggtgttatgggatccaggagtaatggagggattcrgtagttggtccctgccctcaagaaattagaaaaacagactaagagattggactacaatgctggaaactctgattttcgtagctgggacaataggaatcac

SEQ ID NO: 213236 - DNA, 201 bp, Homo sapiens
catgtgcagtgggagaagccagaaatgagttgtacaaatggggctggtgtgatcagatttaggttaaaagaacccctcagctgcctgggtaaaatagaccrtagaatcccaggagagagacttggggcagctcctggcatgacttgatgatagcttggaccagggtggtcacagcagaagtgaagttcttctgttactcag

SEQ ID NO: 213237 - DNA, 201 bp, Homo sapiens
gcaggtgaacaaagctattttttaagtagagtcctataaattaaaaataaggaggcagatcagagaattcaactatctggctcaatcaggagaaaggaaargtatgtgtctgtcacgtggcaggcattgggtgttatgggatccaggagtaatggagggattcagtagttggtccctgccctcaagaaattagaaaaacag

SEQ ID NO: 213238 - DNA, 201 bp, Homo sapiens
ggaactccatgtgcagtgggagaagccagaaatgagttgtacaaatggggctggtgtgatcagatttaggttaaaagaacccctcagctgcctgggtaaartagaccatagaatcccaggagagagacttggggcagctcctggcatgacttgatgatagcttggaccagggtggtcacagcagaagtgaagttcttctgt

SEQ ID NO: 213239 - DNA, 201 bp, Homo sapiens
accttggggagcccttggcgaggttggccggccaccggtgtggtgggggaaatgacctctggagtagcttggagtgaagaggtcacggagctagggtccaktcttgcactgtggctttagtggtccacacagcctcctccatccggcttctgcggaagagcggtgtcttcctgcttctttaggttttcagatagtggaagc

SEQ ID NO: 213240 - DNA, 201 bp, Homo sapiens
attgaccctatttggtgcaggtgaacaaagctattttttaagtagagtcctataaattaaaaataaggaggcagatcagagaattcaactatctggctcartcaggagaaaggaaaggtatgtgtctgtcacgtggcaggcattgggtgttatgggatccaggagtaatggagggattcagtagttggtccctgccctcaa

SEQ ID NO: 213241 - DNA, 201 bp, Homo sapiens
tggttccggctggctgcaaccttggggagcccttggcgaggttggccggccaccggtgtggtgggggaaatgacctctggagtagcttggagtgaagaggycacggagctagggtccagtcttgcactgtggctttagtggtccacacagcctcctccatccggcttctgcggaagagcggtgtcttcctgcttctttagg

SEQ ID NO: 213242 - DNA, 201 bp, Homo sapiens
ttctttataaattgtgttttatttaagcttttcaaagactctttaaaattcattgaccctatttggtgcaggtgaacaaagctattttttaagtagagtcytataaattaaaaataaggaggcagatcagagaattcaactatctggctcaatcaggagaaaggaaaggtatgtgtctgtcacgtggcaggcattgggtgt

SEQ ID NO: 213243 - DNA, 201 bp, Homo sapiens
cgggtagctgcacgtgcacgcagctgccagtctccaaagcagcagagatggatagttttatttcccagcttcattctttataaattgtgttttatttaagyttttcaaagactctttaaaattcattgaccctatttggtgcaggtgaacaaagctattttttaagtagagtcctataaattaaaaataaggaggcagatc

SEQ ID NO: 213244 - DNA, 201 bp, Homo sapiens
tcctgtaaatgtcagattttaatgaatctacaaataccatattctaaaacgtatgtgcttgtgtgttctgtgataaacctaaaaccagagccccatccacrtgggaggcagtgtcagcaaagcggtggtgagcaaggaagccggcggcgctgcctggatggggagcccgaccccaccgctcatgagctgtgcatccttcgc

SEQ ID NO: 213245 - DNA, 201 bp, Homo sapiens; identical to SEQ ID NO: 37621

SEQ ID NO: 213246 - DNA, 201 bp, Homo sapiens
aattcctatttaattaaagttttaagaaatactgtttgaaaagaacttttatttagtgtccttaaatttatccaaatgtcttgttttgattattcttaacygaaaccagaataattctggtgtttgaggttaaaagtatgatcctgaacttattgattaagtttagagaaagactgaaaacttgtggcatatttcgacctg

SEQ ID NO: 213247 - DNA, 201 bp, Homo sapiens
aaaggccagtgtggtgagaacataatgaacaaggggcagggtggcacaagatgaagacagaagggctggaactccatgtgcagtgggagaagccagaaatdagttgtacaaatggggctggtgtgatcagatttaggttaaaagaacccctcagctgcctgggtaaaatagaccatagaatcccaggagagagacttgggg

SEQ ID NO: 213248 - DNA, 201 bp, Homo sapiens
atccctgccttcattccagtccggtggggaaggtagaactttagccagtgaacagttgagctctaaaagatcattctaggtgggcatcaatggtgccaagraaagagacagaatgataatacagaacaattgggagagagcactccagagcgggaaggcactgggagggagtggattggagttgagaactgaaggagagtg

SEQ ID NO: 213249 - DNA, 201 bp, Homo sapiens
tcagaattgtgtcctcagcatctctggatgttacactctgtgctaaatgctggaatatgaccagcatgacctgatccctgccttcattccagtccggtggrgaaggtagaactttagccagtgaacagttgagctctaaaagatcattctaggtgggcatcaatggtgccaaggaaagagacagaatgataatacagaaca

SEQ ID NO: 213250 - DNA, 201 bp, Homo sapiens
actacttttttcagaattgtgtcctcagcatctctggatgttacactctgtgctaaatgctggaatatgaccagcatgacctgatccctgccttcattccmgtccggtggggaaggtagaactttagccagtgaacagttgagctctaaaagatcattctaggtgggcatcaatggtgccaaggaaagagacagaatgata

SEQ ID NO: 213251 - DNA, 201 bp, Homo sapiens
ttactaaacttctctgaggctctgtttcctcgcctataaaatgaggtttgtgccttccacctcatagagttatgtgagaaaacgactgttcttataaagcygtcagtaaatgatactgctgtcatcattgttactacttttttcagaattgtgtcctcagcatctctggatgttacactctgtgctaaatgctggaatatg

SEQ ID NO: 213252 - DNA, 201 bp, Homo sapiens
gagcacttggtttttccttggggaatagaatgttgtagaacataagattttggggtccgactgcctggaatcaaagcctagctcctctgcctgcttcaccwtgcaagcctgaccatattactaaacttctctgaggctctgtttcctcgcctataaaatgaggtttgtgccttccacctcatagagttatgtgagaaaacg

SEQ ID NO: 213253 - DNA, 201 bp, Homo sapiens
gactagattttcagagcacttggtttttccttggggaatagaatgttgtagaacataagattttggggtccgactgcctggaatcaaagcctagctcctcygcctgcttcaccatgcaagcctgaccatattactaaacttctctgaggctctgtttcctcgcctataaaatgaggtttgtgccttccacctcatagagtt

SEQ ID NO: 213254 - DNA, 201 bp, Homo sapiens
cttgattgtggtggtggttacactatgtttaccttttttttttttaactcagaactaactgtacacttgcaatgggtaaatttgtgtattgaaaattatgktctgttttagactagattttcagagcacttggtttttccttggggaatagaatgttgtagaacataagattttggggtccgactgcctggaatcaaagcc

SEQ ID NO: 213255 - DNA, 201 bp, Homo sapiens
tcttgattgtggtggtggttacactatgtttaccttttttttttttaactcagaactaactgtacacttgcaatgggtaaatttgtgtattgaaaattatrttctgttttagactagattttcagagcacttggtttttccttggggaatagaatgttgtagaacataagattttggggtccgactgcctggaatcaaagc

SEQ ID NO: 213256 - DNA, 201 bp, Homo sapiens
gatgaatagataaacaaaatacggctgaaatactactcagaaattaaaaggaacaaaccactggtacgtgcagtgacacgggtgtgtttcaaaagcactaygttaagtgaaagaagacagagacaaaagacagcatgtcgtatgattccatttatatgacattttggaaagccaaaactaggcacagaagtaagatcagtg

SEQ ID NO: 213257 - DNA, 201 bp, Homo sapiens
tccagagaaaggggcaaaatggtgctcagggtgttatgtccttgttgaaaaattacaaagccatagacaagttatcattgtactctgggaccgttttgtcyttgtgactcattttatttaacacatgtggttttgacacctcccgcttgtgccattgtgccaggctctgggggatggtgagaggaatgtggcaggcttgtg

SEQ ID NO: 213258 - DNA, 201 bp, Homo sapiens
gtatggacacatgtccatacaaagatctgtacatgaatattagcttaaatatcactaaagacaacctaaacatccctcagctgatgaatagataaacaaawtacggctgaaatactactcagaaattaaaaggaacaaaccactggtacgtgcagtgacacgggtgtgtttcaaaagcactacgttaagtgaaagaagaca

SEQ ID NO: 213259 - DNA, 201 bp, Homo sapiens
aaaacacaatgagataccactacacacctattagcataactaacatttattaaaaacaacaatacagtgctgacaagggtgtagaatacctgaagctctcktttattgctagtgtgaatgcagaatggtacaatcaattccaagaacagtttggcagatttcaataaatttaaacaaaatttaccatacaatcccattcct

SEQ ID NO: 213260 - DNA, 201 bp, Homo sapiens
tacaggcgttaaataagcaaaagattttcaacgtcagtaatcatacgggaaatgcaaattaaaaacacaatgagataccactacacacctattagcataaytaacatttattaaaaacaacaatacagtgctgacaagggtgtagaatacctgaagctctcttttattgctagtgtgaatgcagaatggtacaatcaattc

SEQ ID NO: 213261 - DNA, 201 bp, Homo sapiens
atgcttgcaaaggcagtggtgcattttagctggagtacacagggtgtgcatgatttgaagatgaggagaggaggattttagtcgaagaaataacctgagcycagagagggaagctgggaagcatacacatgtgcatgtgtgtggtgtggagaggcctagaatgtcagatggcaaaaaggaagtagttggccatacggcttg

SEQ ID NO: 213262 - DNA, 201 bp, Homo sapiens
ctccaaagaagaaatacaggcgttaaataagcaaaagattttcaacgtcagtaatcatacgggaaatgcaaattaaaaacacaatgagataccactacacrcctattagcataactaacatttattaaaaacaacaatacagtgctgacaagggtgtagaatacctgaagctctcttttattgctagtgtgaatgcagaat

SEQ ID NO: 213263 - DNA, 201 bp, Homo sapiens
cagtcagctaagatgatgccactgcactcaagtctgggtgacagagcaagaccctgtcaaaaaaaaaaaaaaaaaaagtgcgtgaaagatttaaataggcyctactccaaagaagaaatacaggcgttaaataagcaaaagattttcaacgtcagtaatcatacgggaaatgcaaattaaaaacacaatgagataccacta

SEQ ID NO: 213264 - DNA, 201 bp, Homo sapiens
gtgctgcaggttctccaagatattggaaagtcagtaaattgcagaagcctgcctttattgtccttccaagcctgtgtgcctcctctcacctactacttccyctcctccacttccttctttctccactagggctccacctaccctagacctgctccctcccacactctctttgccctccctagttaatttaacagtttgcct

SEQ ID NO: 213265 - DNA, 201 bp, Homo sapiens
cgaagcaggaggactgcttgagcccaggagtttgagaccagtctgggcaatatagtgagacctcatctttacaaaatttttttaaaaaattaggtatggtrgcatgtgcctgtagtcccaactacttgggaggctgaggagggaggatcacttgagcccaggaagcagatgttgcagtcagctaagatgatgccactgcac

SEQ ID NO: 213266 - DNA, 201 bp, Homo sapiens
cttccaggcagtttcctcctgaagagagcctcagcatgtgcaggctggagttgcctccccggaggctagagaaaaagagcttttcaaaagtcctcacttargagtgcacattcagacaagagcccttatttgtttaaggatagtctggatttggctaaactgctaatagtcatgtttaaaataattttttttcttttgaga

SEQ ID NO: 213267 - DNA, 201 bp, Homo sapiens
ccgaagcaggaggactgcttgagcccaggagtttgagaccagtctgggcaatatagtgagacctcatctttacaaaatttttttaaaaaattaggtatggyggcatgtgcctgtagtcccaactacttgggaggctgaggagggaggatcacttgagcccaggaagcagatgttgcagtcagctaagatgatgccactgca

SEQ ID NO: 213268 - DNA, 201 bp, Homo sapiens
agaaagaagtcttaaactcattaagaaaagaaccttaaaaatagacaaaaggggccgggcacagtggctcaggcctgtaatcctagccctttaggaggccraagcaggaggactgcttgagcccaggagtttgagaccagtctgggcaatatagtgagacctcatctttacaaaatttttttaaaaaattaggtatggtgg

SEQ ID NO: 213269 - DNA, 201 bp, Homo sapiens
acatgatgaagaactcatgtacagaatatagaaagaagtcttaaactcattaagaaaagaaccttaaaaatagacaaaaggggccgggcacagtggctcasgcctgtaatcctagccctttaggaggccgaagcaggaggactgcttgagcccaggagtttgagaccagtctgggcaatatagtgagacctcatctttaca

SEQ ID NO: 213270 - DNA, 201 bp, Homo sapiens
aatacaagccacagagtaggagataacatttgtaaaatacagacatgatgaagaactcatgtacagaatatagaaagaagtcttaaactcattaagaaaasaaccttaaaaatagacaaaaggggccgggcacagtggctcaggcctgtaatcctagccctttaggaggccgaagcaggaggactgcttgagcccaggagt

SEQ ID NO: 213271 - DNA, 201 bp, Homo sapiens
tctagaagatggtgctctcatatagtgctggtgggagtgtaaacttgtgcaaactctctggagtacagcctgacagtacgtgtcaaaatccctacaacatktgcatatcatctgacttagcagtttcacatctaggaatttatcttcggaatttcttctaaccagagctgtgaacaaaagtctacccataagatatttatc

SEQ ID NO: 213272 - DNA, 201 bp, Homo sapiens
atgacaacatgggctgctccccagtgaaactgggctcggcagaggactcttcgataaaacacaaaagccacaaaccatgcaagaaaagtagataaactgtrcttcatcaaaattaaaaacttctgctcttcagaagacacttaaaatgaaaatacaagccacagagtaggagataacatttgtaaaatacagacatgatga

SEQ ID NO: 213273 - DNA, 201 bp, Homo sapiens
gcaagggtatagaatacaaggtcagtattccaaaatcagctgtggaattccacttccagcatgacaacatgggctgctccccagtgaaactgggctcggcrgaggactcttcgataaaacacaaaagccacaaaccatgcaagaaaagtagataaactgtacttcatcaaaattaaaaacttctgctcttcagaagacact

SEQ ID NO: 213274 - DNA, 201 bp, Homo sapiens
agtaataagtaaatctagcaagggtatagaatacaaggtcagtattccaaaatcagctgtggaattccacttccagcatgacaacatgggctgctccccastgaaactgggctcggcagaggactcttcgataaaacacaaaagccacaaaccatgcaagaaaagtagataaactgtacttcatcaaaattaaaaacttct

SEQ ID NO: 213275 - DNA, 201 bp, Homo sapiens
ttctggagctcctgactagtatataataaggcaagagagagaaagaaaaggcacatacactggaaagaaatgaaattcttttcacaatgtgattgtttatrtggaaaattcaaaggaatctacagaaaagctactaggagtaataagtaaatctagcaagggtatagaatacaaggtcagtattccaaaatcagctgtgga

SEQ ID NO: 213276 - DNA, 201 bp, Homo sapiens
gttctggagctcctgactagtatataataaggcaagagagagaaagaaaaggcacatacactggaaagaaatgaaattcttttcacaatgtgattgtttaygtggaaaattcaaaggaatctacagaaaagctactaggagtaataagtaaatctagcaagggtatagaatacaaggtcagtattccaaaatcagctgtgg

SEQ ID NO: 213277 - DNA, 201 bp, Homo sapiens
gtcagtgttgttctggagctcctgactagtatataataaggcaagagagagaaagaaaaggcacatacactggaaagaaatgaaattcttttcacaatgtsattgtttatgtggaaaattcaaaggaatctacagaaaagctactaggagtaataagtaaatctagcaagggtatagaatacaaggtcagtattccaaaat

SEQ ID NO: 213278 - DNA, 201 bp, Homo sapiens
gtgaaggctgttctataggaactggaccttggtcagtgttgttctggagctcctgactagtatataataaggcaagagagagaaagaaaaggcacatacaytggaaagaaatgaaattcttttcacaatgtgattgtttatgtggaaaattcaaaggaatctacagaaaagctactaggagtaataagtaaatctagcaag

SEQ ID NO: 213279 - DNA, 201 bp, Homo sapiens
actattgagttgtttgaattccttgtacattctgggtattaatgctcttgtcacacgaacagttttaggcaccattttcaatactatattacagaggtgarcaaaacagaaaaattcttgctatcgtggagcttgcatgctagccattatacctggcaggtagctaatgcttaataatggatggatggacaggtggatgga

SEQ ID NO: 213280 - DNA, 201 bp, Homo sapiens
atcctgtaaatgtcagattttaatgaatctacaaataccatattctaaaacgtatgtgcttgtgtgttctgtgataaacctaaaaccagagccccatccaygtgggaggcagtgtcagcaaagcggtggtgagcaaggaagccggcggcgctgcctggatggggagcccgaccccaccgctcatgagctgtgcatccttcg

SEQ ID NO: 213281 - DNA, 201 bp, Homo sapiens
atttgcccacatttcaatggcattatttgtttgtttgtttgtttttactattgagttgtttgaattccttgtacattctgggtattaatgctcttgtcacrcgaacagttttaggcaccattttcaatactatattacagaggtgaacaaaacagaaaaattcttgctatcgtggagcttgcatgctagccattatacctg

SEQ ID NO: 213282 - DNA, 201 bp, Homo sapiens
gtctcaaactcctggcctcaagtgatctttctgtcttggcctcccaaagtgctgggattacaggcatgagccaccatgtatgtcttctttcaaaaaatgtsatgtcatttgcccacatttcaatggcattatttgtttgtttgtttgtttttactattgagttgtttgaattccttgtacattctgggtattaatgctctt

SEQ ID NO: 213283 - DNA, 201 bp, Homo sapiens
tgagtacagtggaccctcaacatactcatctcccagaatcaacaactatcaagacttttaccacacttgctccatcttgccctttaagtacttttaatgaycaaaacacttgtagctgtatgattaaattaaaacaaagtagatagtgcaggcaagtcagaagtctaaggatatatccaaagttcctctgctaattgataa

SEQ ID NO: 213284 - DNA, 201 bp, Homo sapiens
ccaagtgaaacaggtttctccttatcaaaccatcagatcttgtgaggcatattcactactacaagaacagtatgggggaaaccgctaccatgattcagttytctcccaccaggtccctcccacaacacgtggaaattatgggagtacaattcaagatgagatttgggtggggacacagagccaaaccatatcaggctgatg

SEQ ID NO: 213285 - DNA, 201 bp, Homo sapiens
agtttatatgaaggatggcttgttttttgtcgttttggcctttacagctgggactcctgttggtaacagtgtgtctgctctgtttctgtatcgcagctctrgttgtaagtaccactgcagctggatttgcattggctccgggcccttttgactggccctgtttcctgcttacttctgttgggacaggccttgcatcctgtg

SEQ ID NO: 213286 - DNA, 201 bp, Homo sapiens
gtccccgctgtacgtggacaccccttccctggactcactctgcaaaggggcctttaactgagcacctctgctctgtgccctcacaggtctcccaggcagcygcggacctcctggcctactgtgaagctcacgtgcgggaagatcctctcatcattccagtgcctgcatcagaaaacccctttcgcgagaagaagttctttt

SEQ ID NO: 213287 - DNA, 201 bp, Homo sapiens
ccctgctgccacaaggcctttgcacctgcagcttcctctgcctggcacactcttccctcctctctttgccagatggacttatttggtagatcttgactcargcatcactgaagactcaagccttctctgacctctctgacgaggtcaaatctatctctaggttcttattcactgcgaggctctcctttgagacccgtgtca

SEQ ID NO: 213288 - DNA, 201 bp, Homo sapiens
tcctacttactctccagcgtcactttcacacctcactccccctgaaaaccctgtactccatccacgctggtcatgattcaaacccacctactagccatgcyccctgctgccacaaggcctttgcacctgcagcttcctctgcctggcacactcttccctcctctctttgccagatggacttatttggtagatcttgactca

SEQ ID NO: 213289 - DNA, 201 bp, Homo sapiens
tttgcactgtggactggccctgaattctctcttgcatgagatccaagaaccctctcttggggtctggattgggacctctgttcttaacactgagaagaacrtggatgatagcaatccattagacagaattattcacacttacatctcctcagctcttcggggggtaagacgccagatcatgggcgggttttttttgttttt

SEQ ID NO: 213290 - DNA, 201 bp, Homo sapiens
atgggcaaccagcagccctcggggctgctctgtctatggagtagccattctcttattcctttactttcttaataaagcaagtttatttcactttgcactgyggactggccctgaattctctcttgcatgagatccaagaaccctctcttggggtctggattgggacctctgttcttaacactgagaagaacgtggatgata

SEQ ID NO: 213291 - DNA, 201 bp, Homo sapiens
ttgagatgacaataataagagtaataacaagcaacattgatctgatgtcagaggcatgtgaaccaaaaactccatcttgaataggggctgggtaaaatgargctgaaacctactgggctgcattcccaggcggttaaggcattctaagtcacaggatgagataggaggtcagcacaaaatacaggttgtaaagaccttgct

SEQ ID NO: 213292 - DNA, 201 bp, Homo sapiens
aagcagcctctgccatctccctgtggcagctctgacatgttgagttccagggcaatcacagagcagcttcacgctgggaccccacgaccatgagtcaaaakggcttgcctctgatcctgagctccagcccccatggaagtcaactactaatctgtgaattgtcagcagcccccctgctgctgggagccaggggagggagca

SEQ ID NO: 213293 - DNA, 201 bp, Homo sapiens
tgaccatcaggaatggatggaggagatagcctgctgcaaaaccctatcatcagacaccaccgttggggagggagccgcagcacaggccccagggggctctyctatgacacctctgaatgcaagctcagatgcccaggtcgcccagcccgtaggtattaatacactggggccggaatactgatggccatgccttgctccttc

SEQ ID NO: 213294 - DNA, 201 bp, Homo sapiens
atgcttgacatcattttaaaatacaaactacgatcctcggctatctggatggagaataagccatcagcaccacacaggtagggccctgtgaacaagatgcrcaaatgctgtggaaattgtgtcttttgggaagacagtgaggaatcccactgcgagttcccacttgatggcagagatgttgtcctctcaggctctcctgcc

SEQ ID NO: 213295 - DNA, 201 bp, Homo sapiens
ctgtgtgtatgttatacttcaataaaaagttgggctttgtgactagcaatcaagaatcctacttttttggcactttgctcaaatttttactcctctttggrtatcattaacattacattaatgataactaacatcgctagtggggcattttaagagcatgcttgacatcattttaaaatacaaactacgatcctcggctat

SEQ ID NO: 213296 - DNA, 201 bp, Homo sapiens
ttctgtgtgtatgttatacttcaataaaaagttgggctttgtgactagcaatcaagaatcctacttttttggcactttgctcaaatttttactcctctttrgatatcattaacattacattaatgataactaacatcgctagtggggcattttaagagcatgcttgacatcattttaaaatacaaactacgatcctcggct

SEQ ID NO: 213297 - DNA, 201 bp, Homo sapiens
ctctggttattattaacgaaaataaccccttcctaattaaacacctaacaatcagcagcatcttcgccggattcctcctcaccaacagtattattcctgcrtcatccccccaaacaaccataccactccacctgaagctcacagccctaggtgtgaccaccttaggcttcttactagcaatggagtttaatctcataacta

SEQ ID NO: 213298 - DNA, 201 bp, Homo sapiens
aaccccatctctaagaaaaatacaaaaattagccagcatggtggtgcctgcttgtaatcccagctacttgggaggctgaggcaggagaatggcttgaaccyggaaggcggaggttgcagtgagctgagattgtgctcactgcacaatctctttactctctccgatggaaactacggctcaacgttctttacagccacaggc

SEQ ID NO: 213299 - DNA, 201 bp, Homo sapiens
caaggaaaggggggcgggggaaccaatatttgttgagtgcgaacatcatgtgccaggtcttaagcaaaagagttaacttcttttttttttttttttttttttggagacagagtcttgctctgtcaggctggagtgcagtggcacaatctcggctcattgcaacctccaccccccggtttcaagcgattctcctgcctcagc

SEQ ID NO: 213300 - DNA, 201 bp, Homo sapiens
catgaaagttactactagtcctttcttgacattaagtgcttctccttaggggtgtgaatgaacccttagaagactgaaatagtaaccaaggaaaggggggygggggaaccaatatttgttgagtgcgaacatcatgtgccaggtcttaagcaaaagagttaacttcttttttttttttttttttttttggagacagagtct

SEQ ID NO: 213301 - DNA, 201 bp, Homo sapiens
gcatgaaagttactactagtcctttcttgacattaagtgcttctccttaggggtgtgaatgaacccttagaagactgaaatagtaaccaaggaaaggggggcgggggaaccaatatttgttgagtgcgaacatcatgtgccaggtcttaagcaaaagagttaacttcttttttttttttttttttttttggagacagagtc

SEQ ID NO: 213302 - DNA, 201 bp, Homo sapiens
tgcaacagtttgtctcttatctacctaggacctggaaggcccctccccactttgagttgtcttgcctttctggactgaaccaatgtacatctgacatataytgattgatgtctcatgtctccctaaaatatataaaatcaagctgtgccccgaccaccttgggcatatgttgtcaggagctcctgaggctgtgtcatgggt

SEQ ID NO: 213303 - DNA, 201 bp, Homo sapiens
aacaattccacccctaggtgtataccctacagaaatgtgtacatgtgttcatccagagacatgctctaaatcttcacaaaaacactctccataataacccygaacaggaaagcaccccaatgcccatgttggctggataagcacattagggtatattcacacgatggaatcccagactgcaatgggaatgagctgcaactc

SEQ ID NO: 213304 - DNA, 201 bp, Homo sapiens
aaatcagcagtcccaaacctttttggcaccaggggctggttttgtggaagacattttttccacagatgtggggtgggcgggatggtttcagaggaaactgytccaccttggatcatcaggcattagttagattctcataaggagcaatctagatctctcccatgcaccgttcacaatagggttcaccctcctatgagaatc

SEQ ID NO: 213305 - DNA, 201 bp, Homo sapiens
aagtcaaagtcatccctctgctcatgtgagacaaatgcacatctgatttgcttgctctgccctattgtttcactaagccagactaaggcataagtgactaktcctgtaaatcagcagtcccaaacctttttggcaccaggggctggttttgtggaagacattttttccacagatgtggggtgggcgggatggtttcagagg

SEQ ID NO: 213306 - DNA, 201 bp, Homo sapiens
aattccttgcagacaaaggacaggcagaagtcaaagtcatccctctgctcatgtgagacaaatgcacatctgatttgcttgctctgccctattgtttcackaagccagactaaggcataagtgactagtcctgtaaatcagcagtcccaaacctttttggcaccaggggctggttttgtggaagacattttttccacagat

SEQ ID NO: 213307 - DNA, 201 bp, Homo sapiens
aagccttctctgacctctctgacgaggtcaaatctatctctaggttcttattcactgcgaggctctcctttgagacccgtgtcatggttgcagttgtacayttgtgtaagtgatgactcaaggaagatctgtctcccccacaatgccataaaccctctgagagccggggttctaggtgtgaaaggaaaagaaatctccccg

SEQ ID NO: 213308 - DNA, 201 bp, Homo sapiens
caagccttctctgacctctctgacgaggtcaaatctatctctaggttcttattcactgcgaggctctcctttgagacccgtgtcatggttgcagttgtacrcttgtgtaagtgatgactcaaggaagatctgtctcccccacaatgccataaaccctctgagagccggggttctaggtgtgaaaggaaaagaaatctcccc

SEQ ID NO: 213309 - DNA, 201 bp, Homo sapiens
actcaagcatcactgaagactcaagccttctctgacctctctgacgaggtcaaatctatctctaggttcttattcactgcgaggctctcctttgagacccktgtcatggttgcagttgtacacttgtgtaagtgatgactcaaggaagatctgtctcccccacaatgccataaaccctctgagagccggggttctaggtgt

SEQ ID NO: 213310 - DNA, 201 bp, Homo sapiens
aaagtctcaaaaaaaaaaaaaaaaaaaaaagagccaaaaggctctcatctcctccatacctcatttaaagaaaaaatgcagggccaggcacagtggctcaygcctgtattcccagcactttgggaggccaaggcaggcagatcacttgaggtcaggagttcgagaccagcctggccaatatggtgaaaccccatctctaag

SEQ ID NO: 213311 - DNA, 201 bp, Homo sapiens
aaggcggaggctgcggtgagccgagatcgtgccattgcactccagcctgggcaacaagagtgaaactccaaaaagtctcaaaaaaaaaaaaaaaaaaaaaagagccaaaaggctctcatctcctccatacctcatttaaagaaaaaatgcagggccaggcacagtggctcacgcctgtattcccagcactttgggaggcca

SEQ ID NO: 213312 - DNA, 201 bp, Homo sapiens
gaaggcggaggctgcggtgagccgagatcgtgccattgcactccagcctgggcaacaagagtgaaactccaaaaagtctcaaaaaaaaaaaaaaaaaaaaaagagccaaaaggctctcatctcctccatacctcatttaaagaaaaaatgcagggccaggcacagtggctcacgcctgtattcccagcactttgggaggcc

SEQ ID NO: 213313 - DNA, 201 bp, Homo sapiens
tgggcgtggtggcacatgcctgtaatcccagctactcaggaggctgaggcacaagaatcgcttgaacccggaaggcggaggctgcggtgagccgagatcgygccattgcactccagcctgggcaacaagagtgaaactccaaaaagtctcaaaaaaaaaaaaaaaaaaaaaagagccaaaaggctctcatctcctccatac

SEQ ID NO: 213314 - DNA, 201 bp, Homo sapiens
ctagggcttgtccccgctgtacgtggacaccccttccctggactcactctgcaaaggggcctttaactgagcacctctgctctgtgccctcacaggtctcycaggcagccgcggacctcctggcctactgtgaagctcacgtgcgggaagatcctctcatcattccagtgcctgcatcagaaaacccctttcgcgagaaga

SEQ ID NO: 213315 - DNA, 201 bp, Homo sapiens
ccctgcctgctgtcagactgaggcatttaagaaccaaaaggctcggccagcacggtggcttacgcctgtaatcccagcactttgggaggcagaggcaggckgatcacctgaggtcgggaattcgagaccagcctggccaacatggagaaaccctgtccctactaaaaatacaaaattacctgggcgtggtggcacatgcct

SEQ ID NO: 213316 - DNA, 201 bp, Homo sapiens
ttgacaacaccactaccctgcctgctgtcagactgaggcatttaagaaccaaaaggctcggccagcacggtggcttacgcctgtaatcccagcactttggraggcagaggcaggctgatcacctgaggtcgggaattcgagaccagcctggccaacatggagaaaccctgtccctactaaaaatacaaaattacctgggcg

SEQ ID NO: 213317 - DNA, 201 bp, Homo sapiens
tgaatttgaatttgaatcagtccacttgacaacaccactaccctgcctgctgtcagactgaggcatttaagaaccaaaaggctcggccagcacggtggctyacgcctgtaatcccagcactttgggaggcagaggcaggctgatcacctgaggtcgggaattcgagaccagcctggccaacatggagaaaccctgtcccta

SEQ ID NO: 213318 - DNA, 201 bp, Homo sapiens
aagtgactgaatttgaatttgaatcagtccacttgacaacaccactaccctgcctgctgtcagactgaggcatttaagaaccaaaaggctcggccagcacrgtggcttacgcctgtaatcccagcactttgggaggcagaggcaggctgatcacctgaggtcgggaattcgagaccagcctggccaacatggagaaaccct

SEQ ID NO: 213319 - DNA, 201 bp, Homo sapiens
ggagtttttaaatctttacaaattgcattgtgatattctttatcctcatttggtagatgtaggttcctcatataaatatgaggaagctgagtttaggctgrgtgcagtgtctcacacctgtaatctcagcgctttgagaggccgaggagggcagattgctggagctcagaagttcaagaccagcctggtcaacagagcaag

SEQ ID NO: 213320 - DNA, 201 bp, Homo sapiens
aaggaaaggggggcgggggaaccaatatttgttgagtgcgaacatcatgtgccaggtcttaagcaaaagagttaacttcttttttttttttttttttttttggagacagagtcttgctctgtcaggctggagtgcagtggcacaatctcggctcattgcaacctccaccccccggtttcaagcgattctcctgcctcagcc

SEQ ID NO: 213321 - DNA, 201 bp, Homo sapiens; identical to SEQ ID NO: 37669

SEQ ID NO: 213322 - DNA, 201 bp, Homo sapiens
ttgcccgcagtcctagggatgcctcctctggactatgggattaggaggcagccatgcacctaaagacaggagagagaaagcaaaccgtcacacaaaggctygtggctccatgccccacaggtagaggaaatgggggcaggaaaaggccaagagtgagggtggaggaaggccaggaggttgactccagagctctctagggag

SEQ ID NO: 213323 - DNA, 201 bp, Homo sapiens
gaccccaacttcgggagtcggctttccggctccctggcgcaaccctgagggtggacgcccgaccccacccctgccctcggccctccagcgcagctgcccakcctggagccgcgcctgaagtgggcccgcagtccaggaaaggcgttcaccaaaccctaggccaagggctgggagccagtccccccaccccaacccagggga

SEQ ID NO: 213324 - DNA, 201 bp, Homo sapiens
ctcaggcctgctggcgtccaccatctgctccttgccgttgtcattccaggccgagacgcaccacagggaggggtcggccttcagcagcggataggtggccygaaagtactcgaagaagtccggggccacctccaggtcatcctccaccaccacggccgcggggaagcgaaactgccggaagacctggcccagcgcccagcg

SEQ ID NO: 213325 - DNA, 201 bp, Homo sapiens
ctgaaacacatgttgggatttgatcccctgtgtggtggtgctgccggaggtggggtctagtggtaggtgtttggatcacaaggggggcaggggcagatccytcctaacgtcctctggtgagtgagctagttccccagggataacaggctgttataaccaagcccagtctctcctgcatgccccatttctttctactttcag

SEQ ID NO: 213326 - DNA, 201 bp, Homo sapiens
agttccccagggataacaggctgttataaccaagcccagtctctcctgcatgccccatttctttctactttcagccatgtccctacaaaaacctacacagsagtgttgatggtaactttattcataatcactcaaaactggaaataacccaaaggcccatcaacagggaaatacagataaacaaattgtggtttactcata

SEQ ID NO: 213327 - DNA, 201 bp, Homo sapiens
acaatctccaaataattacacaatatgggtctttttgggaaaaacaaaaaagagcacatacactgtgattccattgacataaaactgccgaaaatagaaastaatctatattacagaaagcagatcagttgttgcctggggatggaggcagagaagggcagtagggtagttactacacaggggcattaggaagcttctaga

SEQ ID NO: 213328 - DNA, 201 bp, Homo sapiens
acagtgcttggcacatgtatgaggttcaagtggctggatggaagactgcttgcactattaccgaaatcagggagaaagatggccaacgcagcagcaagagmgtgaagtgtgacattttccagagatgaccgcacatatcccattccatatgctcttcttacaagtgataaagacactcctgcctccagagctgagggtcta

SEQ ID NO: 213329 - DNA, 201 bp, Homo sapiens
ccaccgaggggagggagggacagctcttccatagcaaatacctgtcgctgagccaggagtaaagtctggccgggaggaggacagacgcagaagaccagggrctccagcgcacagagccagtttcgccagcgatcaggtctgaggcctggattccacgaggccggtgcaagccaggagccagccccactccctcgcccagct

SEQ ID NO: 213330 - DNA, 201 bp, Homo sapiens
cggcgcgggggtcacaggcacacgcggctgggcgggaggggccgcggtgggcaccctcccccgctggctcgacagggcatccccgatctgctgcagcagcycacgctgccgctccagctccacctcggcgtcttgggccaggcgaatcacttcccgggtgaggctggcggggtcgccatcgagagcgctgactgagggtgg

SEQ ID NO: 213331 - DNA, 201 bp, Homo sapiens
ggtggaggtggacccaggcccaccgaggggagggagggacagctcttccatagcaaatacctgtcgctgagccaggagtaaagtctggccgggaggaggasagacgcagaagaccaggggctccagcgcacagagccagtttcgccagcgatcaggtctgaggcctggattccacgaggccggtgcaagccaggagccagc

SEQ ID NO: 213332 - DNA, 201 bp, Homo sapiens
caccatggaaaagcctagaacgggtctgcgcccggctggtgttttaaaggggaggaaggtgcggacctgaagaggaggtggaggtggacccaggcccaccraggggagggagggacagctcttccatagcaaatacctgtcgctgagccaggagtaaagtctggccgggaggaggacagacgcagaagaccaggggctcca

SEQ ID NO: 213333 - DNA, 201 bp, Homo sapiens; identical to SEQ ID NO: 37662

SEQ ID NO: 213334 - DNA, 201 bp, Homo sapiens; identical to SEQ ID NO: 37663

SEQ ID NO: 213335 - DNA, 201 bp, Homo sapiens; identical to SEQ ID NO: 37664

SEQ ID NO: 213336 - DNA, 201 bp, Homo sapiens; identical to SEQ ID NO: 37666

SEQ ID NO: 213337 - DNA, 201 bp, Homo sapiens; identical to SEQ ID NO: 37668

SEQ ID NO: 213338 - DNA, 201 bp, Homo sapiens
aatccattccagtcttaacccagactgacttggaatcctattatctcagtgttggaagggcctttaaaggtaatctaatccaacctcccttcagaagtcttcaattattatcatgttctccttggcctaacctcacaactgccattgctcacaatcccttacaaggcactcatccagcttgggtaaggggaagttgggaac

SEQ ID NO: 213339 - DNA, 201 bp, Homo sapiens; identical to SEQ ID NO: 37670

SEQ ID NO: 213340 - DNA, 201 bp, Homo sapiens; identical to SEQ ID NO: 37671

SEQ ID NO: 213341 - DNA, 201 bp, Homo sapiens
aactagtttgaggctcagggtaagtgcaaacgtgctgcaagccaccagacctggtggggagcatagccaggttttagaccgggcactcctgtgcgccccccaacacccccgcacacatcctccagcgccagtgctttgagagggctctgtctcctctcaggcgctgccgtgaagcctccgcttaagtggccagagcccaga

SEQ ID NO: 213342 - DNA, 201 bp, Homo sapiens; identical to SEQ ID NO: 37672

SEQ ID NO: 213343 - DNA, 201 bp, Homo sapiens
aggcccctgcgtggaggcgaggacctaaatcaaaactgctaaggggtcaccaggcatggtgaggggcctcacgggccaaaccctccctcggcctgtccttcaagcctcagcagctctgcggagtgagcgttatcatccccattctacagataactagtttgaggctcagggtaagtgcaaacgtgctgcaagccaccagac

SEQ ID NO: 213344 - DNA, 201 bp, Homo sapiens
agctctgcctggaagttagtgctgtgtgcacacacatgaaccaggagccatacaccctctcacaactggctgtgcccaaaaggatgatcaagcccagaccytggccagcagcggtgacctgcttctccaggaagcactgctcaggccaccatcaggagagtgcagcagcaacaaaggcaagccagacagcccagaggcatc

SEQ ID NO: 213345 - DNA, 201 bp, Homo sapiens
tgacaacgtaaatatcggccgttatttcactcctttctccccattttctttgctccactctaccacactcccgtctggtaccccaacagccaagcctaccrtcggggtctttgcatgtgcccatgtgccagctctgctcttccctatcttcttcacctggcacactctgattcgtgtctctgccaagatgccttccttgac

SEQ ID NO: 213346 - DNA, 201 bp, Homo sapiens
acttgctttaaaaaccatcagaggctgcactgcccacaaactcaaactcaaactcattatgatgacatccaaagcccttcagacagactgtctgaaacatyccttttcaaccttacctccaaccactaaccccatggaccctgcactctggcctcagcaggctgctttttccccagtaagcatatacctggacgctgctgt

SEQ ID NO: 213347 - DNA, 201 bp, Homo sapiens
ttgctttaaaaaccatcagaggctgcactgcccacaaactcaaactcaaactcattatgatgacatccaaagcccttcagacagactgtctgaaacatccyttttcaaccttacctccaaccactaaccccatggaccctgcactctggcctcagcaggctgctttttccccagtaagcatatacctggacgctgctgtgt

SEQ ID NO: 213348 - DNA, 201 bp, Homo sapiens
aggtgactccttctgtaacatcacagacagagccaggcctccctatgactacactcccacagcactctctccacgctgtaacagaatctgtggccacgctkacctgactcccaccttcctccttaggaaaaaagactctatgacctctgtgcccaccacagtgcttggcacatgtatgaggttcaagtggctggatggaag

SEQ ID NO: 213349 - DNA, 201 bp, Homo sapiens
ggcatccccgatctgctgcagcagcccacgctgccgctccagctccacctcggcgtcttgggccaggcgaatcacttcccgggtgaggctggcggggtcgycatcgagagcgctgactgagggtggcctgccaggtgctgggcgcgtccagaagaagaggagcagcagggcattccaggccacaaagaggatagcgcccca

SEQ ID NO: 213350 - DNA, 201 bp, Homo sapiens
cccacagcactctctccacgctgtaacagaatctgtggccacgctgacctgactcccaccttcctccttaggaaaaaagactctatgacctctgtgcccaycacagtgcttggcacatgtatgaggttcaagtggctggatggaagactgcttgcactattaccgaaatcagggagaaagatggccaacgcagcagcaaga

SEQ ID NO: 213351 - DNA, 201 bp, Homo sapiens
tccccgatctgctgcagcagcccacgctgccgctccagctccacctcggcgtcttgggccaggcgaatcacttcccgggtgaggctggcggggtcgccatygagagcgctgactgagggtggcctgccaggtgctgggcgcgtccagaagaagaggagcagcagggcattccaggccacaaagaggatagcgccccacagc

SEQ ID NO: 213352 - DNA, 201 bp, Homo sapiens; identical to SEQ ID NO: 37676

SEQ ID NO: 213353 - DNA, 201 bp, Homo sapiens
cccgacggggggccggggggaaacacctgtgccaaagcaagccggggccagctgtggcttcttcccttttgtttttccttggtgggtggggaatgagagcktcagttctgagtaaagaaagcgaagagagacctaccagcaggggaggcccaccagccctaggcgggaaggactcggtcacaagctttggcggaagcacca

SEQ ID NO: 213354 - DNA, 201 bp, Homo sapiens
caggcccctgcgtggaggcgaggacctaaatcaaaactgctaaggggtcaccaggcatggtgaggggcctcacgggccaaaccctccctcggcctgtccttcaagcctcagcagctctgcggagtgagcgttatcatccccattctacagataactagtttgaggctcagggtaagtgcaaacgtgctgcaagccaccaga

SEQ ID NO: 213355 - DNA, 201 bp, Homo sapiens
gcaggcccctgcgtggaggcgaggacctaaatcaaaactgctaaggggtcaccaggcatggtgaggggcctcacgggccaaaccctccctcggcctgtccttcaagcctcagcagctctgcggagtgagcgttatcatccccattctacagataactagtttgaggctcagggtaagtgcaaacgtgctgcaagccaccag

SEQ ID NO: 213356 - DNA, 201 bp, Homo sapiens
cgcaggcccctgcgtggaggcgaggacctaaatcaaaactgctaaggggtcaccaggcatggtgaggggcctcacgggccaaaccctccctcggcctgtccttcaagcctcagcagctctgcggagtgagcgttatcatccccattctacagataactagtttgaggctcagggtaagtgcaaacgtgctgcaagccacca

SEQ ID NO: 213357 - DNA, 201 bp, Homo sapiens
cccgcaggcccctgcgtggaggcgaggacctaaatcaaaactgctaaggggtcaccaggcatggtgaggggcctcacgggccaaaccctccctcggcctgtccttcaagcctcagcagctctgcggagtgagcgttatcatccccattctacagataactagtttgaggctcagggtaagtgcaaacgtgctgcaagccac

SEQ ID NO: 213358 - DNA, 201 bp, Homo sapiens
acccgcaggcccctgcgtggaggcgaggacctaaatcaaaactgctaaggggtcaccaggcatggtgaggggcctcacgggccaaaccctccctcggcctgtccttcaagcctcagcagctctgcggagtgagcgttatcatccccattctacagataactagtttgaggctcagggtaagtgcaaacgtgctgcaagcca

SEQ ID NO: 213359 - DNA, 201 bp, Homo sapiens
gcacccgcaggcccctgcgtggaggcgaggacctaaatcaaaactgctaaggggtcaccaggcatggtgaggggcctcacgggccaaaccctccctcggcctgtccttcaagcctcagcagctctgcggagtgagcgttatcatccccattctacagataactagtttgaggctcagggtaagtgcaaacgtgctgcaagc

SEQ ID NO: 213360 - DNA, 201 bp, Homo sapiens
cgcacccgcaggcccctgcgtggaggcgaggacctaaatcaaaactgctaaggggtcaccaggcatggtgaggggcctcacgggccaaaccctccctcggcctgtccttcaagcctcagcagctctgcggagtgagcgttatcatccccattctacagataactagtttgaggctcagggtaagtgcaaacgtgctgcaag

SEQ ID NO: 213361 - DNA, 201 bp, Homo sapiens
gcgcacccgcaggcccctgcgtggaggcgaggacctaaatcaaaactgctaaggggtcaccaggcatggtgaggggcctcacgggccaaaccctccctcggcctgtccttcaagcctcagcagctctgcggagtgagcgttatcatccccattctacagataactagtttgaggctcagggtaagtgcaaacgtgctgcaa

SEQ ID NO: 213362 - DNA, 201 bp, Homo sapiens
cgcgcacccgcaggcccctgcgtggaggcgaggacctaaatcaaaactgctaaggggtcaccaggcatggtgaggggcctcacgggccaaaccctccctcggcctgtccttcaagcctcagcagctctgcggagtgagcgttatcatccccattctacagataactagtttgaggctcagggtaagtgcaaacgtgctgca

SEQ ID NO: 213363 - DNA, 201 bp, Homo sapiens
gcgcgcacccgcaggcccctgcgtggaggcgaggacctaaatcaaaactgctaaggggtcaccaggcatggtgaggggcctcacgggccaaaccctccctcggcctgtccttcaagcctcagcagctctgcggagtgagcgttatcatccccattctacagataactagtttgaggctcagggtaagtgcaaacgtgctgc

SEQ ID NO: 213364 - DNA, 201 bp, Homo sapiens
gacacctactcaccaggtcctcccgacgtcctggccccgaacttggcctgctccggggcgcagggagcgagcccggtgcccaggcgcgtcccaagcgctgycgcggccgcctcgcctttcgactcgccagccctttctgcggcgcgccggggccggacggccgggcgggcaacgtggcccttccccggcaggcggggcggg

SEQ ID NO: 213365 - DNA, 201 bp, Homo sapiens
agaggaaatgggggcaggaaaaggccaagagtgagggtggaggaaggccaggaggttgactccagagctctctagggagtcaacatatatcctgacccagsaacgtatttttgagggagaggcagagagtgatgctggtggagggagagagaaaaagaaccccaactcccctctttctacctgtcagatttcatttcccct

SEQ ID NO: 213366 - DNA, 201 bp, Homo sapiens
gaaagcgaagagagacctaccagcaggggaggcccaccagccctaggcgggaaggactcggtcacaagctttggcggaagcaccatggaaaagcctagaaygggtctgcgcccggctggtgttttaaaggggaggaaggtgcggacctgaagaggaggtggaggtggacccaggcccaccgaggggagggagggacagctc

SEQ ID NO: 213367 - DNA, 201 bp, Homo sapiens
ggtctgagaggcaagaaaccagggtaaatgagtgccaaactgacctggggaaaagaggctctgagctcttgatagaggttacatggggagcagtgactggrgtaagaaggatagaaacaaggggccaggattctgggggtgggcctgggattggattatgtgcaaaaggaaaaaacaggaggataaacagtcacaagatta

SEQ ID NO: 213368 - DNA, 201 bp, Homo sapiens
atgttctccttggcctaacctcacaactgccattgctcacaatcccttacaaggcactcatccagcttgggtaaggggaagttgggaacaagtctataccyggacagagtaatggagaggtgtagcttccagtgtactcatctggataagatttcctgaatagtagcctccgcgaactcgccagctcaacaccttctgcac

SEQ ID NO: 213369 - DNA, 201 bp, Homo sapiens
aaccctccctcggcctgtccttcaagcctcagcagctctgcggagtgagcgttatcatccccattctacagataactagtttgaggctcagggtaagtgcmaacgtgctgcaagccaccagacctggtggggagcatagccaggttttagaccgggcactcctgtgcgccccccaacacccccgcacacatcctccagcgc

SEQ ID NO: 213370 - DNA, 201 bp, Homo sapiens
aaggggaagttgggaacaagtctatacctggacagagtaatggagaggtgtagcttccagtgtactcatctggataagatttcctgaatagtagcctccgygaactcgccagctcaacaccttctgcacaggcacagcaagacattaagtgggaaatgagacaggagccttacctttcttctcttgtctcagttgctctcc

SEQ ID NO: 213371 - DNA, 201 bp, Homo sapiens
tccagaagaagaggagcagcagggcattccaggccacaaagaggatagcgccccacagcacaagccctgcagactgcttcttcagcatcctggcccccacyggggagggcaggccaggggacggttcaaggctgccctgggcttgcccggctcccttgcccgcagtcctagggatgcctcctctggactatgggattagga

SEQ ID NO: 213372 - DNA, 201 bp, Homo sapiens
cagggcattccaggccacaaagaggatagcgccccacagcacaagccctgcagactgcttcttcagcatcctggcccccaccggggagggcaggccagggsacggttcaaggctgccctgggcttgcccggctcccttgcccgcagtcctagggatgcctcctctggactatgggattaggaggcagccatgcacctaaag

SEQ ID NO: 213373 - DNA, 201 bp, Homo sapiens
ccgcgcgcacccgcaggcccctgcgtggaggcgaggacctaaatcaaaactgctaaggggtcaccaggcatggtgaggggcctcacgggccaaaccctccctcggcctgtccttcaagcctcagcagctctgcggagtgagcgttatcatccccattctacagataactagtttgaggctcagggtaagtgcaaacgtgct

SEQ ID NO: 213374 - DNA, 201 bp, Homo sapiens
ctttgcttaaagttaaaaagcactacgtaaaaattccagaaaatatagacatgtcacaggtaatggaactctaactgaactgctttcatgttcgttcttagaccttggctggactcctgtatcatgtaccaggcccataatttcaggacggaaaaaaaagaaaggtagtcagagaagatacactaaataattcaagagttg

SEQ ID NO: 213375 - DNA, 201 bp, Homo sapiens
ctgcgccgggtcgttacctggttcccgcccgccccgtctcggctaggagccgcggcccgccgcgggtcgcaatccaggccccaggcccgatccccagcgcyggcccaggccccaccccctcgacccccagcggcccggccctcccctcgcactccttcccccctcccaccatccaccgcagccacttccgcccgtcctccg

SEQ ID NO: 213376 - DNA, 201 bp, Homo sapiens
gatcacctgagtctgggaggctgaggctgtagtgagctgtgattggattgtgccattgcactccagcctgggcaagagagtgagactctgtctcaaaaaawtttttttttattatatatatatatatatggcatactacaaaacctccataattacaactgcgtggtactggtacataaataaacagaccatccagtgaaa

SEQ ID NO: 213377 - DNA, 201 bp, Homo sapiens; identical to SEQ ID NO: 37667

SEQ ID NO: 213378 - DNA, 201 bp, Homo sapiens
ggtggcacgcacctgtggtcccagctactcaggaggctgagatgggatcacctgagtctgggaggctgaggctgtagtgagctgtgattggattgtgccaytgcactccagcctgggcaagagagtgagactctgtctcaaaaaaatttttttttattatatatatatatatatggcatactacaaaacctccataattac

SEQ ID NO: 213379 - DNA, 201 bp, Homo sapiens
tgctgggtagctgacttccccaagaagggctgctgccatgtgatcaggacccacgcccctgacatcaacccctcccccgtgttccagagcacggagcagcycggaactctgcggcctgtggttactgactgactgctcactaacttgtttctacatgaaaccacgaatcgtgcagggttctagagaaacaaagggccgcgc

SEQ ID NO: 213380 - DNA, 201 bp, Homo sapiens
cccagcactttgggaggccaatacaggaggatcacttgagcccaggagttcaagaatagcctgggcagcacacggagaccctgtctctacaagtaacaattaaaaaaaaaaaaaaaaaaagctgggcatggtggcacgcacctgtggtcccagctactcaggaggctgagatgggatcacctgagtctgggaggctgaggc

SEQ ID NO: 213381 - DNA, 201 bp, Homo sapiens
caatcccagcactttgggaggccaatacaggaggatcacttgagcccaggagttcaagaatagcctgggcagcacacggagaccctgtctctacaagtaayaattaaaaaaaaaaaaaaaaaaagctgggcatggtggcacgcacctgtggtcccagctactcaggaggctgagatgggatcacctgagtctgggaggctg

SEQ ID NO: 213382 - DNA, 201 bp, Homo sapiens
tgcagtagctcctacctgcaatcccagcactttgggaggccaatacaggaggatcacttgagcccaggagttcaagaatagcctgggcagcacacggagaycctgtctctacaagtaacaattaaaaaaaaaaaaaaaaaaagctgggcatggtggcacgcacctgtggtcccagctactcaggaggctgagatgggatca

SEQ ID NO: 213383 - DNA, 201 bp, Homo sapiens
gccagatgcagtagctcctacctgcaatcccagcactttgggaggccaatacaggaggatcacttgagcccaggagttcaagaatagcctgggcagcacasggagaccctgtctctacaagtaacaattaaaaaaaaaaaaaaaaaaagctgggcatggtggcacgcacctgtggtcccagctactcaggaggctgagatg

SEQ ID NO: 213384 - DNA, 201 bp, Homo sapiens
catactggccagatgcagtagctcctacctgcaatcccagcactttgggaggccaatacaggaggatcacttgagcccaggagttcaagaatagcctgggmagcacacggagaccctgtctctacaagtaacaattaaaaaaaaaaaaaaaaaaagctgggcatggtggcacgcacctgtggtcccagctactcaggaggc

SEQ ID NO: 213385 - DNA, 201 bp, Homo sapiens
aacaataaaaataagctgtgaggagggactcagccctaccagatatgaaaatactgcatactggccagatgcagtagctcctacctgcaatcccagcactytgggaggccaatacaggaggatcacttgagcccaggagttcaagaatagcctgggcagcacacggagaccctgtctctacaagtaacaattaaaaaaaaa

SEQ ID NO: 213386 - DNA, 201 bp, Homo sapiens
ccagctccctccggcctggccctctgcagaagcctgatgcccacccagctgtctcaccatgggaccccaggcggtgagggtgggtagccgaggactacagkctgctgggtagctgacttccccaagaagggctgctgccatgtgatcaggacccacgcccctgacatcaacccctcccccgtgttccagagcacggagcag

SEQ ID NO: 213387 - DNA, 201 bp, Homo sapiens
cggcctgtccttcaagcctcagcagctctgcggagtgagcgttatcatccccattctacagataactagtttgaggctcagggtaagtgcaaacgtgctgsaagccaccagacctggtggggagcatagccaggttttagaccgggcactcctgtgcgccccccaacacccccgcacacatcctccagcgccagtgctttg

SEQ ID NO: 213388 - DNA, 201 bp, Homo sapiens
cgcacacatcctccagcgccagtgctttgagagggctctgtctcctctcaggcgctgccgtgaagcctccgcttaagtggccagagcccagacctggaggyggagtgggagaagggcaggcccaccgaggccgccgtgtgcagtgtgcgatgtgcgggaagcccgtggcttccactttagctgactgcgcgcactgtggca

SEQ ID NO: 213389 - DNA, 201 bp, Homo sapiens
tttgagagggctctgtctcctctcaggcgctgccgtgaagcctccgcttaagtggccagagcccagacctggaggtggagtgggagaagggcaggcccacygaggccgccgtgtgcagtgtgcgatgtgcgggaagcccgtggcttccactttagctgactgcgcgcactgtggcaggagcctcgaacccaggcggatatg

SEQ ID NO: 213390 - DNA, 201 bp, Homo sapiens
tggaggtggagtgggagaagggcaggcccaccgaggccgccgtgtgcagtgtgcgatgtgcgggaagcccgtggcttccactttagctgactgcgcgcacygtggcaggagcctcgaacccaggcggatatgccagtcagaggccagtgtctgtcacctctgccctatgtttgcctaatggaggagtcaggggcctggggg

SEQ ID NO: 213391 - DNA, 201 bp, Homo sapiens
gaggtggagtgggagaagggcaggcccaccgaggccgccgtgtgcagtgtgcgatgtgcgggaagcccgtggcttccactttagctgactgcgcgcactgyggcaggagcctcgaacccaggcggatatgccagtcagaggccagtgtctgtcacctctgccctatgtttgcctaatggaggagtcaggggcctgggggct

SEQ ID NO: 213392 - DNA, 201 bp, Homo sapiens
ccaccccctccaagaatttaactcctcccacccttctccccggaaccccgtgccccgtgttcacaagagaagagggtgacactgcgacccttcctggactytgacccccacccgtccgccctgcggacgaccctcgctctaactgcgccgggtcgttacctggttcccgcccgccccgtctcggctaggagccgcggcccg

SEQ ID NO: 213393 - DNA, 201 bp, Homo sapiens
caccccctccaagaatttaactcctcccacccttctccccggaaccccgtgccccgtgttcacaagagaagagggtgacactgcgacccttcctggactcygacccccacccgtccgccctgcggacgaccctcgctctaactgcgccgggtcgttacctggttcccgcccgccccgtctcggctaggagccgcggcccgc

SEQ ID NO: 213394 - DNA, 201 bp, Homo sapiens
acccccacccgtccgccctgcggacgaccctcgctctaactgcgccgggtcgttacctggttcccgcccgccccgtctcggctaggagccgcggcccgccscgggtcgcaatccaggccccaggcccgatccccagcgctggcccaggccccaccccctcgacccccagcggcccggccctcccctcgcactccttccccc

SEQ ID NO: 213395 - DNA, 201 bp, Homo sapiens
gtgctaagacttctgagttttttgaattcatgagttcccaagagagggggttcactgtcagtggctccatccacacagtgtgccctgccctgtttccttcytccccacagagtgtgctcgggtgttccacacaggtggggcaaggctggtgctgtgtggaaagaactgggagaggctagagaacctatatgatgccttgat

SEQ ID NO: 213396 - DNA, 201 bp, Homo sapiens
ggagagctggaaaagagatgcccacctaaagctattcagaacagaaggctttgcgaaaaatttgctctccaaatagcgcacctttgtctggcattgcaccrggctgctaacatgcgatccctgatacggcctctaccctggagcctgtcctgacaccttaattgctccttcctcttgaatggtccttgtggaccagcttct

SEQ ID NO: 213397 - DNA, 201 bp, Homo sapiens
gtctcgcagacgctgcctccaagcacgcagccctgggcttctttgactgcctccgagccgaagtggaggaatacgatgttgtcatcagcaccgtgagcccractttcatccggtcgtaccacgtgtatccagagcaaggaaactgggaagcttccatttggaaatgtgagacttcagagggaagctggggcccctgggggc

SEQ ID NO: 213398 - DNA, 201 bp, Homo sapiens; identical to SEQ ID NO: 37683

SEQ ID NO: 213399 - DNA, 201 bp, Homo sapiens
gtgggtaacctaaagaagcagagagacaaagcaatcagatgccctgacaaccactgttaacatctgggctcttctctgaggagaccacaacttttatttatttttttttttttgagacagtttcactcttgttgcccaggctggagtgcagtggcacgatctcggctcactgcaacctctgcctcctgggtgctagtgatt

SEQ ID NO: 213400 - DNA, 201 bp, Homo sapiens
agagcaagccctcagtaaatcctggccacccgaatccttgtctcagagtctgcttcctaggaacccaacctaaagatactgtctcataaggttattgtgastattaaatgaactagagcgatatgtaagagatatgtacatatctttcaacagttcctacagcaagcaaactctccaaatctgtgagcttctattgctttt

SEQ ID NO: 213401 - DNA, 201 bp, Homo sapiens
cagggctcacgggacagaaacgttttctgcagtaaaagggtcagacactccaagagcctggtatactgagggagaatagtctaatcagtgtggtggaccaracccgtgcaggaagatggaccctgaaccctggggcccagcaccaactgcccagctaagaaagatcccaccaacgcatgcctgtaatcccagctactaggg

SEQ ID NO: 213402 - DNA, 201 bp, Homo sapiens
atagaagtggactgtgggccacctgcttgtccctggcctcacacttgctacctccccagctcctgcagctgagcatatagtcctcaggaagtcaaatgctrtatcagctatgactttggaggttataggcaacaggaacccaactcaagcatttattcacccaagtaaccagaaattcttattttggtcagagtcaggcct

SEQ ID NO: 213403 - DNA, 201 bp, Homo sapiens
gttggcatcaaggggaatgcctaggtatataaacaatagaggagtctgtaagactttgcagatgcttttggtgcctggtgatacaatcccctctccatccmcaatttcagctgcagtgatggtggaaggaaggctcccatgcatgctgacagcattctacctcatctctccacttttctgtcttggggctttctctaaagc

SEQ ID NO: 213404 - DNA, 201 bp, Homo sapiens
tgagaaaatgctatattgggtgagtcaggaatcagtccagaggaaaattaattagacagaaagtaggtttactttttaaataaaaagaaccctggctgagktgtctatccccagagaaaatgtggaggaaactggtgacatttgatttgaaaaaacatggtggtttgtctccattatctttagattgagatatctctaggg

SEQ ID NO: 213405 - DNA, 201 bp, Homo sapiens
ttcagtgggtgatcgacccaggtgcatcttgttaagataaaaaacaaagcataaggcagatagactaggctctctaagtggcccctagatgagtctcacamacaattcccagagaggatatcctgtatcaaaagggagcgaggtacacaaactcaaactccttcttcaagggcaagccagggcacacacatctgtcaatca

SEQ ID NO: 213406 - DNA, 201 bp, Homo sapiens
ctcttttgcatcccttcccccacacgtaaccgccctccgaaattatcagggcaggaaaccaggtccatcctatagacgaagacgcagaaggaagcgcagasagtggagtgtctcccgctggtcgccgcggtccgcgggtggcggagggggcctggaacctgtgactccggggacagcccacgcttcccgcccctcagcctt

SEQ ID NO: 213407 - DNA, 201 bp, Homo sapiens
tgtcaatcagaccagacaaaagacaacagggagtgtgccgccctggagagctggaaaagagatgcccacctaaagctattcagaacagaaggctttgcgaraaatttgctctccaaatagcgcacctttgtctggcattgcaccaggctgctaacatgcgatccctgatacggcctctaccctggagcctgtcctgacacc

SEQ ID NO: 213408 - DNA, 201 bp, Homo sapiens
aagatcatggatgccaattactttggccccatcacattgacgaaaggtctcgtgagtttgactttcccatgggtatctgggccaccagattctacagaggsctctgttaattagccagacagtcatcctattctatatggaattccccagtcccctcagaaaattccctacctattgggtgaaagctttcaccattcccat

SEQ ID NO: 213409 - DNA, 201 bp, Homo sapiens
gggctctgaccagccgggtccccacggaggtcataacccccgcccccaactggggcctttcagtctttttcaggaagctgacctacggcgtgcacccagtrgaggtggcggaggaggtgatgcgcaccgtgcggaggaagaagcaagaggtgtttatggccaaccccatccccaaggccgccgtgtacgtccgcaccttct

SEQ ID NO: 213410 - DNA, 201 bp, Homo sapiens
ggcaacaagaatgaaactccatctcaaaaaaaaaaatagatgctcatcatcaagagagggagggagcgaggagtgaaaatgcaccctcaacgtgtcccttyctcagcagtgggcattggccaagaggagcctagtgtggagaatgcgttactccccatctggatgtcagactcctggggttcacatcctggcttccctgct

SEQ ID NO: 213411 - DNA, 201 bp, Homo sapiens
gaacctgggaggcagagattgcagtgagctgagatcacgccactgcactccagcctgggcaacaagaatgaaactccatctcaaaaaaaaaaatagatgcycatcatcaagagagggagggagcgaggagtgaaaatgcaccctcaacgtgtccctttctcagcagtgggcattggccaagaggagcctagtgtggagaat

SEQ ID NO: 213412 - DNA, 201 bp, Homo sapiens
agtgggagaatgccttgaacccaggagttcacgaccagcctgggcaacacagggagacccccctctctacaaaaaatagggagttgaacaatgagaacacrtggacacagggaggggaacatcacacaccagggccagtcgcagggtggagggcagggagagggagagcattaggacaaatacctaatgcatgaggggctt

SEQ ID NO: 213413 - DNA, 201 bp, Homo sapiens
tttagcagttttctatgcttttcatctccaattagaaagcaaaggccagatggtcttctgccacatgcatccaaactacctggaagctacctgattacgagggttaccggaagtgagggcaaggatgtttgtgctgaaaatcccaggtttggatccctcgtgctcagtcccaaactgcagaggaaacctctaatactcagg

SEQ ID NO: 213414 - DNA, 201 bp, Homo sapiens
aagcgcagagctgagacttgtgggtggtaatggctggaccacttgcagacagagaagatcaataacctgccagtgttttccatgttagaactgggtggggyttccaagggtagggtcagatcaggcatccccttcctggtgtgccctggttgacagtggtaactggggaagccttaggttgcttaaagttaacattagttg

SEQ ID NO: 213415 - DNA, 201 bp, Homo sapiens
agacaaaagacaacagggagtgtgccgccctggagagctggaaaagagatgcccacctaaagctattcagaacagaaggctttgcgaaaaatttgctctcyaaatagcgcacctttgtctggcattgcaccaggctgctaacatgcgatccctgatacggcctctaccctggagcctgtcctgacaccttaattgctcctt

SEQ ID NO: 213416 - DNA, 201 bp, Homo sapiens
gaggctgaggcgggtggatcacttgaggtcaggagttcgagaccagcctggccaacatggtaaaaccccgtctctactgaaaatacaaaaattagctgggsgtgggggctcttgcctataatcccagctacttgggaggctgaggcaggaggattgcttgaacccaaaaggcggaagttgcagtgagccgagatcatgcca

SEQ ID NO: 213417 - DNA, 201 bp, Homo sapiens
ttaaaatcacccagcaactcgccagcccacgctttggaaacactggataaatgattgcaggactcattccacctctgccctgctgcaatctagttaccgcrgaggtagcggagccctgtgatgagggtaccgggggcaggggtctgcctgctgctgcctaactcagtctcaaagttttaaccatgatgcatcgtcctgtgt

SEQ ID NO: 213418 - DNA, 201 bp, Homo sapiens
gcctttcagtctttttcaggaagctgacctacggcgtgcacccagtagaggtggcggaggaggtgatgcgcaccgtgcggaggaagaagcaagaggtgttyatggccaaccccatccccaaggccgccgtgtacgtccgcaccttcttcccggagttctttttcgccgtggtggcctgtggggtgaaggagaagctcaatg

SEQ ID NO: 213419 - DNA, 201 bp, Homo sapiens
ggctccatccacacagtgtgccctgccctgtttccttcttccccacagagtgtgctcgggtgttccacacaggtggggcaaggctggtgctgtgtggaaaraactgggagaggctagagaacctatatgatgccttgatcagcgtggctgaccccagcaaggtaaggtcttctagcagtaggcgtgggtaactcctgggaa

SEQ ID NO: 213420 - DNA, 201 bp, Homo sapiens
tctggcaatatcctccatcccagaatcatctctgcttcttcgtctttttttttttttcagtcatttcattatctttgaatttcaaaatgggtggcttttaratcgagggctcccaaggtctgcaagagggaggagatctcacacataccctgactctctcattggttcagcagacattcaccccaaagctggtcctgttgg

SEQ ID NO: 213421 - DNA, 201 bp, Homo sapiens
gggaacatcacacaccagggccagtcgcagggtggagggcagggagagggagagcattaggacaaatacctaatgcatgaggggcttaaaacctagatgayaggttgataggtgcagcaaaccaccatggcacatgtatatatacctgtgtaacaaacctgcacattccgcacatgtatcccagaacttaaagtaaaataa

SEQ ID NO: 213422 - DNA, 201 bp, Homo sapiens
ggaacatcacacaccagggccagtcgcagggtggagggcagggagagggagagcattaggacaaatacctaatgcatgaggggcttaaaacctagatgacrggttgataggtgcagcaaaccaccatggcacatgtatatatacctgtgtaacaaacctgcacattccgcacatgtatcccagaacttaaagtaaaataaa

SEQ ID NO: 213423 - DNA, 201 bp, Homo sapiens
tcacacaccagggccagtcgcagggtggagggcagggagagggagagcattaggacaaatacctaatgcatgaggggcttaaaacctagatgacaggttgrtaggtgcagcaaaccaccatggcacatgtatatatacctgtgtaacaaacctgcacattccgcacatgtatcccagaacttaaagtaaaataaataaata

SEQ ID NO: 213424 - DNA, 201 bp, Homo sapiens
gggagagcattaggacaaatacctaatgcatgaggggcttaaaacctagatgacaggttgataggtgcagcaaaccaccatggcacatgtatatatacctrtgtaacaaacctgcacattccgcacatgtatcccagaacttaaagtaaaataaataaatagataaataaataaataagaaaaaaagaaaaggagtgaaat

SEQ ID NO: 213425 - DNA, 201 bp, Homo sapiens
gctgctgctggccctgggagcttcttcgtcctttgttggaattctttaatcctgaccacacctctgtgatgccccttcattaaatgatccctaatcacccsgtgttataggttgaattctgtctctcctataaaaagtatgattttctaacccccagtaccttagaacgtgaccttatctggaaataggggctttgcagac

SEQ ID NO: 213426 - DNA, 201 bp, Homo sapiens
ttctgttttggttatgtttttatatttcactacttagtatattttggtgtaatgcatccagctttttttccctcccagataggtattcaaataccattttwaaaaaaaaaacaaaaaaacaaaaaaaaaacagagtctcactctgttgcccaggctggagtgcagtggcatgatctcaatttactgcagtctccatctcct

SEQ ID NO: 213427 - DNA, 201 bp, Homo sapiens
tctgttttggttatgtttttatatttcactacttagtatattttggtgtaatgcatccagctttttttccctcccagataggtattcaaataccattttaaaaaaaaaaacaaaaaaacaaaaaaaaaacagagtctcactctgttgcccaggctggagtgcagtggcatgatctcaatttactgcagtctccatctcctg

SEQ ID NO: 213428 - DNA, 201 bp, Homo sapiens
ctacttgagtgcaatatgcccatgtgacaaatctgcacgtgttccccctgcatctaaacaaaatttgagaggaaaataaaataaatataaatatgcatttaaaaaaaaaaaaagaaatcagtgtcactaaatgcacattggtgggaaagcaccaatttaaaatcacccagcaactcgccagcccacgctttggaaacactg

SEQ ID NO: 213429 - DNA, 201 bp, Homo sapiens
aaaagagatgcccacctaaagctattcagaacagaaggctttgcgaaaaatttgctctccaaatagcgcacctttgtctggcattgcaccaggctgctaayatgcgatccctgatacggcctctaccctggagcctgtcctgacaccttaattgctccttcctcttgaatggtccttgtggaccagcttcttaactggccc

SEQ ID NO: 213430 - DNA, 201 bp, Homo sapiens
tggagcctgtgttttgttcacccaggcagcctcagcacctagctcaatgcttggttgacatcctcagaaaatgtgtatttaatgaataacctctaaaagtracatgtgatcagggaaggccctcatttggataagtgtgttcttgcaaatttgttttattgctttccagcttgattccaacatggttggagaatacgctct

SEQ ID NO: 213431 - DNA, 201 bp, Homo sapiens
attgcttgaacccaaaaggcggaagttgcagtgagccgagatcatgccactgcactccagcctgggtggcagagtgagaatccatctcaaaaaattaattwatttatttattttaaaaaaagaatggctatcggaatagccaacccctgcagttgagctgcttcagaggatacagctgaatgtcagccctgcctgtgtgtt

SEQ ID NO: 213432 - DNA, 201 bp, Homo sapiens
gcactccagcctgggtggcagagtgagaatccatctcaaaaaattaatttatttatttattttaaaaaaagaatggctatcggaatagccaacccctgcasttgagctgcttcagaggatacagctgaatgtcagccctgcctgtgtgttatcacctcaaaggtgcagtttctgtcctttaaacatttctgaaatcagact

SEQ ID NO: 213433 - DNA, 201 bp, Homo sapiens
agacttccagcctccagggctgtgaggcaataggtttctgttatttcaagcaacccaatttgtggcaatttgttacagtagccctagaacactaatagacrccatcaaattctagcctgggccttgaccgacgcagctaatccccagaagaaatttgcgagactcccttggggaaattcaggaaccacgggaaatgaccca

SEQ ID NO: 213434 - DNA, 201 bp, Homo sapiens
gagagtctaaagccaggccacctgcactggaagccggcctctgccatgtattagagggttggatatgagcaaatcccttaatcatttcgtgcctccctaasagataggtattgctattattattattttcattttagaaaacgagggataatagcaatacctatctcttagggttgttggaaggactgaaggttctggaat

SEQ ID NO: 213435 - DNA, 201 bp, Homo sapiens
tccatctcaaaaaattaatttatttatttattttaaaaaaagaatggctatcggaatagccaacccctgcagttgagctgcttcagaggatacagctgaaygtcagccctgcctgtgtgttatcacctcaaaggtgcagtttctgtcctttaaacatttctgaaatcagactgattgtctttccatccatagcatcttaca

SEQ ID NO: 213436 - DNA, 201 bp, Homo sapiens
gaggattcggtcattttttaccatctttcagcaatatattccaccacgtgggcttcacgctcagcagatatttccatcatcatgatgagatggactgcacrgctccaggtgcatgttccagctacttagaagctacgtagaaagagatttctctttcccaatagtttatactaaagtcctgacacctttgggtatgtggcc

SEQ ID NO: 213437 - DNA, 201 bp, Homo sapiens
atatgcattgtccaacatggcagcactggccacatgtggctgccgggcacttgaaacacggagccctgtgtctgagacactgaatttttaatgctatttawttataattaatttaaacttaaacagccatgtgtggctagcagctctagagttgggggtgtatgagaatcagcccatcttccagactgatttcattggcct

SEQ ID NO: 213438 - DNA, 201 bp, Homo sapiens
ctacggagcctggggttctccacattcccaggacacacttccagaagcttccctgctctgtagggtgactactcagcaggaaacaggagctgcaatgcctstaacccccacatacacacactcacactgtatgcgtatgtgctcaggcactcagtctgaaaaccacctccactgtatacaagggtgacctggccacgtcac

SEQ ID NO: 213439 - DNA, 201 bp, Homo sapiens
acccaggaggagtggcatctaggccccagtaactgccccagaccttaaagggactgccccaagacactgcaaggcgtgaagcagtcctcacactccacatagagagaaatacaggtggttttctcctcccacccccaaccacacatatctacaaaatgtttaaaatgaaaaaatgtgggtaacctaaagaagcagagagac

SEQ ID NO: 213440 - DNA, 201 bp, Homo sapiens
cccaggaggagtggcatctaggccccagtaactgccccagaccttaaagggactgccccaagacactgcaaggcgtgaagcagtcctcacactccacatagagagaaatacaggtggttttctcctcccacccccaaccacacatatctacaaaatgtttaaaatgaaaaaatgtgggtaacctaaagaagcagagagaca

SEQ ID NO: 213441 - DNA, 201 bp, Homo sapiens
ctttggaaacactggataaatgattgcaggactcattccacctctgccctgctgcaatctagttaccgcggaggtagcggagccctgtgatgagggtaccrggggcaggggtctgcctgctgctgcctaactcagtctcaaagttttaaccatgatgcatcgtcctgtgttttccagccctgcttcccaacatgatctccc

SEQ ID NO: 213442 - DNA, 201 bp, Homo sapiens
aaggaaaaggaactcaggaagtatctgattggtatatttcaaccaccatctctgtgaaacccctctccccacccaagctttgcccttttacttctctctcyttacatccatggcttccctccaattcgacgtctctgaaaaattgtctcatcctccaacaattgtctcaacaatcatgtacattctgctatatcaaccttg

SEQ ID NO: 213443 - DNA, 201 bp, Homo sapiens
ccaggaggagtggcatctaggccccagtaactgccccagaccttaaagggactgccccaagacactgcaaggcgtgaagcagtcctcacactccacatagagagaaatacaggtggttttctcctcccacccccaaccacacatatctacaaaatgtttaaaatgaaaaaatgtgggtaacctaaagaagcagagagacaa

SEQ ID NO: 213444 - DNA, 201 bp, Homo sapiens
caagagattcttctgcctcagcctcctgagtagctgggactacaggcacacgccaccacacccagctaatttttgtattttttagtagggacggggtttcmccatattggccaggctgatctcgaactcctgacctctggtgattcacccgccttgacctcccaaagtgctgggattacaggcgtgagccaccatgcccgg

SEQ ID NO: 213445 - DNA, 201 bp, Homo sapiens
ataatatccaagggaagtttggaatcccgttccgtacgacttgtaagttgctaagataaaaatatgatatcttctgttgtatgtcttatggtataaggcargagctgttatgtctaagactaggcagatggtcacaggggaaagggtccaaggatgacaccatctgctggattttctttcatccctatggttcctattttt

SEQ ID NO: 213446 - DNA, 201 bp, Homo sapiens
caggaggagtggcatctaggccccagtaactgccccagaccttaaagggactgccccaagacactgcaaggcgtgaagcagtcctcacactccacatagagagaaatacaggtggttttctcctcccacccccaaccacacatatctacaaaatgtttaaaatgaaaaaatgtgggtaacctaaagaagcagagagacaaa

SEQ ID NO: 213447 - DNA, 201 bp, Homo sapiens
ccgctgctcacatcctattgggagaactcagtcgcacctaagtgcaagggacgctgggaagtgcagtccacctgggggcccaggaagaagggcagagtgawtgggccacatacagcagtctttgccacatcctgccttttcctctcttccccagtccacttaggaatctccccactgctccttgtatttttaaactttctg

SEQ ID NO: 213448 - DNA, 201 bp, Homo sapiens
gaggcagagtttgcagtgagctgagattgtcccactgcactccagcctggatgacagagtgagactctgtcaaaagaaagaaagaaagaaagagagagagrgagagagagaggaaggaaggaagggaggaaggaaggaaggaaagaagaaaggaaggaaagaaggaaggaaggcaggccccatcaactgtcagccctacct

SEQ ID NO: 213449 - DNA, 201 bp, Homo sapiens
cttgaacccaggaggcagagtttgcagtgagctgagattgtcccactgcactccagcctggatgacagagtgagactctgtcaaaagaaagaaagaaagaragagagagagagagagagagaggaaggaaggaagggaggaaggaaggaaggaaagaagaaaggaaggaaagaaggaaggaaggcaggccccatcaactgt

SEQ ID NO: 213450 - DNA, 201 bp, Homo sapiens
ggccgaagccaacagagggtgggtaggagccgcaattgcgaagggagagggctgaaacttgattggtgaccagagagtagggatggcagctttgggacagragcagctggagccagggtcacagcagccaatcctgggacccaccaagggtgggctgccagcagaatgtggccacgacccagatccacgctgtagggtcct

SEQ ID NO: 213451 - DNA, 201 bp, Homo sapiens
tggaatattttgggggagcacttctccatcctcctcgcttctctctcaccttctacagggtccgttgtctgattctgtacatatctgcttcatttttctcytccctttgcaggctgtcattcttgatttactcagggtttctgtccaaacagctatggcttgcacatggccttgacttgctgagatgtcaagtctaaccct

SEQ ID NO: 213452 - DNA, 201 bp, Homo sapiens
catctcaaaaaattaatttatttatttattttaaaaaaagaatggctatcggaatagccaacccctgcagttgagctgcttcagaggatacagctgaatgycagccctgcctgtgtgttatcacctcaaaggtgcagtttctgtcctttaaacatttctgaaatcagactgattgtctttccatccatagcatcttacaat

SEQ ID NO: 213453 - DNA, 201 bp, Homo sapiens
ataggtattcaaataccattttaaaaaaaaaaacaaaaaaacaaaaaaaaaacagagtctcactctgttgcccaggctggagtgcagtggcatgatctcartttactgcagtctccatctcctgagttcaagagattcttcttcctcagccacccaagcagctgggattaaatttttgaatttttagtagagacggggttt

SEQ ID NO: 213454 - DNA, 201 bp, Homo sapiens
ttatttatttttttttttttgagacagtttcactcttgttgcccaggctggagtgcagtggcacgatctcggctcactgcaacctctgcctcctgggtgcwagtgattgtcctgcctcagcctcccaagtagctgggactacaggtgcccaccaccacacccagctaattttttttatttagttgagtcggggtttctcca

SEQ ID NO: 213455 - DNA, 201 bp, Homo sapiens
gacaatgggcgctttggccactgacccgtataggacaaatgcacgagtttcctgggaacatttgcaaaacacagtattggggactcagaattctctcaagsctgtctccacccccatcagtcatggtctggcttctctgaagctgaggaattgaggggcacagagtttcccatgtaaatgtcagaactgaagccatgccac

SEQ ID NO: 213456 - DNA, 201 bp, Homo sapiens
tagccactcgtgtcacatcctgagtgcacacggactgttttaagggcttgatctgtattttcagcattttctggaggaaatggaaaatgaagggcagggtrgtctgtgccgacatcctcactggcctctcctcggtcagaactcctgctgccatgcttctgcgacaccccagaatgacatgctcaactctccttgactcct

SEQ ID NO: 213457 - DNA, 201 bp, Homo sapiens
acggggtttcaccattttagccaggatggtctcgatctcctgacctcgtgatctgcccacctcagcctcccaaagtgccaggattacaagcgtgagccacygctcctggccctcagacatgtttttaagaagtcaggctagtccaacaacccaccatctcatgtcatcctcacttcctcctctacaagccccctgccacct

SEQ ID NO: 213458 - DNA, 201 bp, Homo sapiens
gttacatagttagtgcaacttttgctgttgtttttattatttttaatagagcatagatcccacacagccaaacattcattagtaactcagtaagtgtccaytgagtccactatgtcctgagcattgccccgagagtccctctggggggctgggcacttactctcatagtgctgccatcgtgagaacgtttgtaacctccct

SEQ ID NO: 213459 - DNA, 201 bp, Homo sapiens
tgcttagcctcttcggcatcccaatgggagccaatctgcacgctttgaggatggcttagttttcagtgggtgatcgacccaggtgcatcttgttaagataraaaacaaagcataaggcagatagactaggctctctaagtggcccctagatgagtctcacacacaattcccagagaggatatcctgtatcaaaagggagcg

SEQ ID NO: 213460 - DNA, 201 bp, Homo sapiens
caccgtgttagccaggatggtctcgatctcctgaccttgtgatctgcccgcctcagcctcccaaagtcctgggattacaggcgtgagccaccgcgcccggyccatcttcatagaaatttctaatagtcagtgctggtctagactgaaggaaaaataatcagaactaaaatgatcattgttacaccaacctaagggtagact

SEQ ID NO: 213461 - DNA, 201 bp, Homo sapiens
tgtttgtttgtttttgagacagagttttgttcttgtcgcccaggctggagtgcaatggcgtgatctcggctcactgcaacctccgcctcccgggttcaagygattctcctgcctcagcctcccgagtagctgggattacaggcatgtgccaccacgcccggctaattttgtattttttagtagagacgagggtttctccat

SEQ ID NO: 213462 - DNA, 201 bp, Homo sapiens
tgattgcctcggagaatttcgccagccgagcagttttggaggccctaggctcttgcttaaataacaaatactctgaggggtacccgggccagaggtatgtraatatcttcaaaggcctggttctgacacagtcatagggagtactcagtcagcctaggacctaaacaatttggaaatttcagaaaacaataagcttcccag

SEQ ID NO: 213463 - DNA, 201 bp, Homo sapiens; identical to SEQ ID NO: 37701

SEQ ID NO: 213464 - DNA, 201 bp, Homo sapiens; identical to SEQ ID NO: 37703

SEQ ID NO: 213465 - DNA, 201 bp, Homo sapiens; identical to SEQ ID NO: 37696

SEQ ID NO: 213466 - DNA, 201 bp, Homo sapiens
ccagcagccttttgccttaggtttcaggaccttctgaaccacccttgagggtgtgtgccagcaaatacctcaagtggacttctacttaggaccacttgagkgcacaacttcagcttctagaaggccaagtgtggctgcaattcaggatctgccccaaactcatcagcccttcccaagtttcccaggtgagaacagtatgag

SEQ ID NO: 213467 - DNA, 201 bp, Homo sapiens
cacttcccagacggggcgactgccaggcggaggggctcctcacttctcagatggggcagccgggcagagaccctcctcacctcccagacggggttgcagcygggcagaggtgctcctcacatcccagacggggcggcggggcagaggcgctccccacatctcagatgatgggcggccgggcagagacgctcctcacttcct

SEQ ID NO: 213468 - DNA, 201 bp, Homo sapiens
cttgaacgcctgggctcaagtgatcttctcgtctcagcctctcagagttctgggattacaagtgtaagcaaccatgcctggccttgtgtatttctttttgkttttttttgtgatggagtcttgctctgtcacccaggctggagtgcaatggtatgatctcggctcactgcaacctccacctcctgggttcaagcgattttc

SEQ ID NO: 213469 - DNA, 201 bp, Homo sapiens
ctccagcccccaaggtggtcctcaccattggctttggtcacttgtgcccgcttcacactaggactagtgaacactctgctcgttcctggtgaaagagtatrgggagtgagtcccaaggcccgctcacaggcacttctctcccaggtaaaggtggcgaggacagcggacagggtgctgctcacgctctgtggccctgaggcc

SEQ ID NO: 213470 - DNA, 201 bp, Homo sapiens
gttcgcaccctgttgagcccactgctagtttctgccctggataactgagtttctggggtctacatatattagtttctttcaggatacagatgtgtgtttgytgctttttgtgctatgtagattaagatgtgagactgttctcagagaagcatctagaaatgtcaggccctgactgcgctggcaatagtagttggggccatc

SEQ ID NO: 213471 - DNA, 201 bp, Homo sapiens
tgttcgcaccctgttgagcccactgctagtttctgccctggataactgagtttctggggtctacatatattagtttctttcaggatacagatgtgtgtttrctgctttttgtgctatgtagattaagatgtgagactgttctcagagaagcatctagaaatgtcaggccctgactgcgctggcaatagtagttggggccat

SEQ ID NO: 213472 - DNA, 201 bp, Homo sapiens
tgagatgaagtctcgctcttgtttcccaggctggagtgcgatggcgcgatctcggctcactgaatcctccacctcccaggttcaagcgattctcctgcctyggccccccgagtagctgagattataggcgcctgccaccacacccatctaagttttgtttttttgtttgtttgtttttgagacagagttttgttcttgtcg

SEQ ID NO: 213473 - DNA, 201 bp, Homo sapiens
gtggctcgcgcctgtaatcccagcactttgggaggccgaagcgggcagatcacgaggtcaggagatcaagaccatcctggctaacacggtgaaaccccgtytctactaaaaacacgaaaaattagccgagtgtggtggtgggcacctgtagtcccagctactcaggaggcgaaggcaggagaatggcgtgagcctgggagg

SEQ ID NO: 213474 - DNA, 201 bp, Homo sapiens
agtggaggctgaatctggattactgaaaaccgtttctgcattataaatgttggatttacacatgcagtggctttcagttgactctttcaccctcagaattacagtgttatattcgtttttgttttttacagtcatcatcaggcaaagaaaataaattacagaattagacatggcttttgcaaatgtgtgcatttttgtccc

SEQ ID NO: 213475 - DNA, 201 bp, Homo sapiens
gtggaggctgaatctggattactgaaaaccgtttctgcattataaatgttggatttacacatgcagtggctttcagttgactctttcaccctcagaattacagtgttatattcgtttttgttttttacagtcatcatcaggcaaagaaaataaattacagaattagacatggcttttgcaaatgtgtgcatttttgtccca

SEQ ID NO: 213476 - DNA, 201 bp, Homo sapiens
cctgaggcaggagaattgcttgaacctgggaggcggaggttgcagtgagctgccgagatggcgccattgcattccagcctgggcaacaagagcgaaactcsatctcaaaaaaaaaaaaaaaaaaaactgccataaataaaagataagtcacgcatccctctgcattacccttgggctcccagctctataccccctcccagg

SEQ ID NO: 213477 - DNA, 201 bp, Homo sapiens
gagacgagggtctgagctgaggccacagggaaaccagtgagggaggcaactactgaggagagttcagatgtggcaggggcagtggcaactgcttggaatarcaaccctggggaatagcaaccaggtcactacagttggaccccagcaacagccaccacctctgcagctctgccctcgcctggtgacatctctgctcggagc

SEQ ID NO: 213478 - DNA, 201 bp, Homo sapiens
gcccaggctggtcttgaactcctgggctcaagtgatctgtccaactcagcctcccaaagtgctggtattacaggcatgagccaccgcatccggctgacccytttttttttttttttttttttttgagacaaagtttccctcttgtcgcccaggctggagtgcagtggcacgatctcagcttactgcaacctctgcctcccg

SEQ ID NO: 213479 - DNA, 201 bp, Homo sapiens
caatgatgttttgtgtaaaggtttggtatgattttccttttatggtttttgttatttacatttcattttctatctttcttgcttttatatactttttggctttttttttttttttttttcagatggagtctcgctctgttgcccaggctggagtgctggagtgcagtggcacaatctcggctcactgcaagctccacctcc

SEQ ID NO: 213480 - DNA, 201 bp, Homo sapiens
gggcagagacgctcctcacttcctagacgggatggcggccgggaagaggcgctcctcacttcccagactgggcagccaggcagaggggctcctcacatccsagatgatgagcggccaggcagagacgctcctcacttcccagacggggtggcggccaggcagaggctgcaatctcggcactttgggaggccaaggcaggcg

SEQ ID NO: 213481 - DNA, 201 bp, Homo sapiens
tggcacaatctcggctcactgcaagctccacctcccgggttcacgccattctcctgcctcagcctcccaagtagctgggattacaggcgcccgccaccatrtctggctaattttttgcatttttagtagagacggggtttcaccgtgttagccaggatggtctcgatctcctgacctcatgatctgcccgtctcagcctcc

SEQ ID NO: 213482 - DNA, 201 bp, Homo sapiens
ttttgctatagacagggtttcaccatgttagccaggctggtctcaaactcctggcctcaagttgatctgcccacctcagccttccaaagtgctgggattasagatgtgagccaccttgcccagcctaatttctaaatttttgtagagacgtggtttcactgtgttgcctaggctgtggttgaactcctaggctcaaaggat

SEQ ID NO: 213483 - DNA, 201 bp, Homo sapiens
gccattctcctgcctcagcctcccaagtagctgggattacaggcgcccgccaccatatctggctaattttttgcatttttagtagagacggggtttcaccrtgttagccaggatggtctcgatctcctgacctcatgatctgcccgtctcagcctcccaaagtgctgggattacaggtgtgagccaccgcgcccagcccct

SEQ ID NO: 213484 - DNA, 201 bp, Homo sapiens
cccaggctggtcttgaactcctgggctcaagtgatctgtccaactcagcctcccaaagtgctggtattacaggcatgagccaccgcatccggctgacccctttttttttttttttttttttttgagacaaagtttccctcttgtcgcccaggctggagtgcagtggcacgatctcagcttactgcaacctctgcctcccgg

SEQ ID NO: 213485 - DNA, 201 bp, Homo sapiens
catattggccaggctggtctcaaactcctgacctcaagtgatccacccacctcggcctcccaaagtgctgggattacaggcgtcagccaccgcgcctgacsgcttttttttctttctttagagagacggggtctccctatgttgcccagggtggtcttgactcttgtggtcctgtgactccccagacttcaggtgtgcaag

SEQ ID NO: 213486 - DNA, 201 bp, Homo sapiens
cctcctgggttcaagcgattatcttgcctcagcctcctgagtagctggggttacaggtgcgcaccacacacccagctcatttttgtatttttagtagagayggagttttaccgtgttggtcaggctggtctcgaactcctgacctggggtgatgcacccgccttggcctcccaaagtgcttggattacaggaattgagcca

SEQ ID NO: 213487 - DNA, 201 bp, Homo sapiens
ggccaggcgggggctgccccccacctccctcccggacggggcggctggctgggcgggggctgcccccaacctgccggacagggcagctgccgggcagagaygctcctcacttcccagacggggcgactgccaggcggaggggctcctcacttctcagatggggcagccgggcagagaccctcctcacctcccagacggggt

SEQ ID NO: 213488 - DNA, 201 bp, Homo sapiens
atggcgtgatctcggctcactgcaacctccgcctcccgggttcaagcgattctcctgcctcagcctcccgagtagctgggattacaggcatgtgccaccaygcccggctaattttgtattttttagtagagacgagggtttctccatgttagtcaggctggtctcgaacccccgacctcaggtgatctgcccatctcggcc

SEQ ID NO: 213489 - DNA, 201 bp, Homo sapiens
tacattactcttacccgaggcagggtcttcttgcccagcccctggctgggactagacacagccacatgccccctcagcttctcagcaccccgttgcctctstgctcctccaaggaccgtttttagctgtgctgatgtttctgaggcaggtagccattcccacccgcccaggagacatttggttttttcccccactgtgtgt

SEQ ID NO: 213490 - DNA, 201 bp, Homo sapiens
cggcggcggcgtaggacggaggcgtcgctaggtacgtgcgcgggccgtgttccggtaggtgggcggcttcgggtccgagggccgcggcgtcccagagcccggggggtgcttcggcgtcctcgctgtcccccgccgtaccccaccctctgcagccgcaatgacgggaggggagcgcttgggtcgcgcctgggctggggatcg

SEQ ID NO: 213491 - DNA, 201 bp, Homo sapiens
ttccggtaggtgggcggcttcgggtccgagggccgcggcgtcccagagcccggggggtgcttcggcgtcctcgctgtcccccgccgtaccccaccctctgyagccgcaatgacgggaggggagcgcttgggtcgcgcctgggctggggatcgggcggcggccagccgcagcgccccagttccaggcacattcggtatgatg

SEQ ID NO: 213492 - DNA, 201 bp, Homo sapiens
ggaattacaggcgggcgccaccacacccagctaattttagtatttttagtggagatggggtttcaccatgttggccaggacagtcttgatttcctgacctygtggtctgcccgccttggcctcccaaagtgctgggattacaggcgtgaaccactgcacctggcctttttttttttattgagacacagtctcactctgtca

SEQ ID NO: 213493 - DNA, 201 bp, Homo sapiens
gcctttgaacttggggtgctctgcacttgtttactctgcgtagattgctctcatcccagatttcatggttggctcctttccacagctcagatttcagctcsgggacgttccctgacccagtctaaagtagccttgcacccatttattgcatctttctttcttttcttttcttttttttttttttgagacagggtcttgttc

SEQ ID NO: 213494 - DNA, 201 bp, Homo sapiens
gacgtggtttcactgtgttgcctaggctgtggttgaactcctaggctcaaaggatcctcctgccttgactcccctaagtgctgggattacaggcataagcmaccataccaggcccttttttttttttcccctggagacggagtcttgctttgtcacccaggctagagtgcagtggtgtgatctcggctcactacaacttcc

SEQ ID NO: 213495 - DNA, 201 bp, Homo sapiens
ctgcctcagcctcccaagtagctgggattacaggcgcccgccaccatatctggctaattttttgcatttttagtagagacggggtttcaccgtgttagccrggatggtctcgatctcctgacctcatgatctgcccgtctcagcctcccaaagtgctgggattacaggtgtgagccaccgcgcccagcccctacttcttgt

SEQ ID NO: 213496 - DNA, 201 bp, Homo sapiens
tcctaggctcaaaggatcctcctgccttgactcccctaagtgctgggattacaggcataagccaccataccaggcccttttttttttttcccctggagacrgagtcttgctttgtcacccaggctagagtgcagtggtgtgatctcggctcactacaacttccgcctcccgggttcaagcgattctcctgcctcagcctcc

SEQ ID NO: 213497 - DNA, 201 bp, Homo sapiens
gatgactcttaatgagcatgccgccttcaagcatctgtttaacaaagcacatcttgcaccacccttaatccatttaaccctgagtggacacagcacatgtktcagagagcacggggttgggggtaaggttatagattaacagaagaatttttcttagtacagaacaaaatggaatctcctatgtctacttctttctacaca

SEQ ID NO: 213498 - DNA, 201 bp, Homo sapiens
cgctcctcacttcctagacgggatggcggccgggaagaggcgctcctcacttcccagactgggcagccaggcagaggggctcctcacatcccagatgatgrgcggccaggcagagacgctcctcacttcccagacggggtggcggccaggcagaggctgcaatctcggcactttgggaggccaaggcaggcggctgggagg

SEQ ID NO: 213499 - DNA, 201 bp, Homo sapiens
actttttttttccccggagatggagttttgctcttgtcgcccaggctggagtgcagtggtgcaatctcggctcgctacaacctccacctcccgggttcaaygcattctcctgcttcagcctcctgagtagctggaattacagatgcccgccaccatgcccagctaatttttgtattattagtagagacagggtttcactat

SEQ ID NO: 213500 - DNA, 201 bp, Homo sapiens
gggactataataatagtacctgtccctttggactgctgttttgaggattaaatgaatttatgtaaagtgattagagcagttcttggctcactagaagctcdagatgttaccgattatgactgaatagtagctattattgatggttaactttttctcagaaaggaaccttattcttcatattagccacatgagcgttgtctc

SEQ ID NO: 213501 - DNA, 201 bp, Homo sapiens
ttgtattaaggcttgcttctcagtttgtgcaaccaggatgtggcccaggctctgctgctgcagctgcaatgatgggcccaccttgggaggaggtcagcctygcctccaactggaaagcctccccctgcctcagaccagccagccgcccccttgggtgagccacagatgatgggaatagtggttgccattggtcaccagcat

SEQ ID NO: 213502 - DNA, 201 bp, Homo sapiens
ggaccaccctaacatcctcattcaccagacccagggtcagctttaggaagctcatctggcggctggctaccagctcctctgtctccttgtcgtgggtaggmaggtgcaggtggtggcagaaggtgtagaggaaggccttggagcagagctgggtgagcatgctctggacatgcaggtagtaggtgctgccccgcttgatct

SEQ ID NO: 213503 - DNA, 201 bp, Homo sapiens
accaccaatcctgaaacctttcactccagatgtgctggtagtttctgagggggacaccaaggtaagaggaaggaaggttgggtcagggccttcagaacagrgagcctctctgcacatctcctcttccctgaggcttctcagatcccagagcccagtttttcctgtggtgcgctctatgctctgctggttatgtgtgcttac

SEQ ID NO: 213504 - DNA, 201 bp, Homo sapiens
gggtaattgtgtttttatttagtgcaatgtcctgggacaaggccttggaactgaagagaaaccattgttcagattctggctcttatatggctttagacaarttagctccctgggcctcaatttcctcttctgtaaagaagagaacacaaaatgtgtgtgagatagaagatgtgcaacaagttagttccctgagcagatcct

SEQ ID NO: 213505 - DNA, 201 bp, Homo sapiens
caaagtgctgggattacaggtgtgagccaccgcgcccagcccctacttcttgtttttcaatgttgtatccagtgaccttgctaaatttgcttattctaacrgttggcccctagcatcttgattttctaggtatattgtgttgtctgtgtgtaatgtcagtttttaaatttcttctttcctaatcgttatgccttttgtttc

SEQ ID NO: 213506 - DNA, 201 bp, Homo sapiens
gaggcgaaggcaggagaatggcgtgagcctgggaggtggagcttgcagtgagctgagattgtgccactgtactccagcctgggcgacagagcgagatgccrtctcaaaaaaaaaaaaagaaagaaagaaaggaatccccagaaggagactgtcagccacagctcctgcttcacttttgtgcatccaggtcctaggaacata

SEQ ID NO: 213507 - DNA, 201 bp, Homo sapiens
tagaatcccaggccatgtggtgggggtgctcaccttcctgacctcatctgctttgactgccttcatcctcgccttcgtttctcagagattccttcacggcmtagaattcgcctgcatttctacatgtccaactttgtttccaggtggttctgacaaccatttgatccttgtggatctccgttccaaaggcacagatggtgg

SEQ ID NO: 213508 - DNA, 201 bp, Homo sapiens
gctggatcctcttatgtgacagaggcccaggtaagatttggaggcatggggaggctggtgaccttgcaggtgacttcacttactaggtctttttccctgaygttgaggatcatgccacacatgagcaacagtgcctctacagaaatatccaatgttgtaatgactgatgttgcagtgagctgtgttggctgggggacttac

SEQ ID NO: 213509 - DNA, 201 bp, Homo sapiens
attcatcagatgagggaggtcagggcctccggaatccagaggctgcatttctctgtgggttgttaacaaaatattgatgacgcatctcagacccagacagmtgttaccctcatttttaggagcaaggggcacatcagaccactttgtgtactagtaattaagtcagagtggccaaacgtggttgtgcctccttgtgccttg

SEQ ID NO: 213510 - DNA, 201 bp, Homo sapiens; identical to SEQ ID NO: 37698

SEQ ID NO: 213511 - DNA, 201 bp, Homo sapiens; identical to SEQ ID NO: 37702

SEQ ID NO: 213512 - DNA, 201 bp, Homo sapiens
cagaacttccatgcttagggaaaggttacctcaacagcagttcctcagagagaagcatatcagctgggcgcggtggctcatgcctataatcccagcacttygggaggctgaggtgggtgggtcacttgagcccaggagtttgagaccagcctggccaacatgaagaaagcccgtctcttaccaaaaacataaaaaattagc

SEQ ID NO: 213513 - DNA, 201 bp, Homo sapiens
ccatgttggccaggacagtcttgatttcctgacctcgtggtctgcccgccttggcctcccaaagtgctgggattacaggcgtgaaccactgcacctggcctttttttttttattgagacacagtctcactctgtcacccagactggagtgcagtggcacaatctcggctcactgcagcctccacctctgaggctcaagtaa

SEQ ID NO: 213514 - DNA, 201 bp, Homo sapiens
tagagacgtggtttcactgtgttgcctaggctgtggttgaactcctaggctcaaaggatcctcctgccttgactcccctaagtgctgggattacaggcatragccaccataccaggcccttttttttttttcccctggagacggagtcttgctttgtcacccaggctagagtgcagtggtgtgatctcggctcactacaac

SEQ ID NO: 213515 - DNA, 201 bp, Homo sapiens
ctccatgccaggataaaggccaggcttgtgcttgattcttccctggccagtctgggtttgagcctaaaaagaaaaagaggggacagcccctatgatcccaytgtgatgtttttcttcctccaggagtgaaaagtgtggatcccaagactggcaaagagattctgtacaacctggagtctcttatcaattctgctgtgttcc

SEQ ID NO: 213516 - DNA, 201 bp, Homo sapiens
gagactgagatgggaggatcatctgagccctgaacatcaaggctgcagtgaactgtgatcacgccactgtactccagcctgggcaatgggagtgagacccygtctcaaaaaatataaaaataaaaaatttttttagctgggcatggtgctcatgcctgtaatcccagcacttggggaggccaaggcaggcggatcacttga

SEQ ID NO: 213517 - DNA, 201 bp, Homo sapiens
tagaagcctgttctattgcctgcaacaagaacacctgtccaggtgagaatcatccttgccttctccttcactcctctcccatctgcatttcttctggccaragttgtagctgatgaatatattggctccggggacagacctcacataaaaactgtagtgggggctgggcacggtggctcacgcctgtaatcccggcacttt

SEQ ID NO: 213518 - DNA, 201 bp, Homo sapiens
aatctctacctcactggttcaagctattctcctggtctcagcctgctgagtagctgggattacaggcatatgccaccatgcctggctaatttttgtttttktttttttttttttttttgagacagagtcttgctctgttgtccaggctggagtgcggtggcacgatctcagctcactgcaacctcctgggttcaagcgatt

SEQ ID NO: 213519 - DNA, 201 bp, Homo sapiens
acgcctgtaatcccggcactttgggaggccgaggcaggcggatcacttgaggtcaggaattcgagaccagcctggccaaaatggtgaaatcctgtctctaytaaaaatagaagaattagctgggcatggtggtgcatgcccgtaatcccagctacttggaaggctgaggcagaagagtcgcttgaacccgggaggcagagg

SEQ ID NO: 213520 - DNA, 201 bp, Homo sapiens
gaaggctaacgcggtgaaaccctgtctctactaaaaatgctgtggtggcacacaccacggtcccagctactcaggaggctgaggcagaagaattgcttgamcccaggaggcagaggctgcattgagccgagactgcgccactgcactccagcttaggcgacagtgagactccgtctcaaaaaaacaaaaacaaaaacaaaa

SEQ ID NO: 213521 - DNA, 201 bp, Homo sapiens; identical to SEQ ID NO: 37688

SEQ ID NO: 213522 - DNA, 201 bp, Homo sapiens
aaggcactaccccagcttaatgaaggttcaaagtggaaggatcctcctgtatgacctcgggccaggtccagaaaactctgttagccttgctgttgtcaccytaccactttgataataccatcagcctcacaggatccgggaaaaacctaccacaggctacagtgtctggcacctaatgtgctctgtgaacatgccccttac

SEQ ID NO: 213523 - DNA, 201 bp, Homo sapiens; identical to SEQ ID NO: 37689

SEQ ID NO: 213524 - DNA, 201 bp, Homo sapiens; identical to SEQ ID NO: 37691

SEQ ID NO: 213525 - DNA, 201 bp, Homo sapiens
aaaacctggtatccaaaggcagaagtatccaacaacgtctaagaaggagaggagtagttgtttggtggtggggattggaatttggagattagctgaatacrgtctgctggaagtgcacacctatgttggtggaggattataccaagataagtagaaatttgagctttggagggggatactctgtaccccttggagtagagg

SEQ ID NO: 213526 - DNA, 201 bp, Homo sapiens
taaggagactggattctgttcacaaagcatatacgaggtagtccaaggagttggccatcccaccacagcactgggccaggcagtcacagcagggggcatgracatggtcagttctgccctggggcattgctcaggcttttgagagcaggcgatgtctacaccaaaactagagaagtgtgtgtgtcgggcatcctgtgggca

SEQ ID NO: 213527 - DNA, 201 bp, Homo sapiens
agcgactactaaaagaacaagagatcgaagatcaaaaggtatgattcttttgaagaaaattatacagttcttttgtactttctaaccagctaaattatatmtgaaatggtaatttgtcatgaaaacttgcctgtggatcacatttggatattaaggtgttcctgcttattaaatgtacttggtgttggagagccaagtctg

SEQ ID NO: 213528 - DNA, 201 bp, Homo sapiens
gtagtcattctgtaaaggcttgttgagtcctaaactgggaagatgccattgtgctacctagtactttttattgtcatttcattctgagggaaaaacaaatygttttaggtgaaacaaactaaatgaaaggaatctaaaatgtttagctcagtttcaaatagacatatatcacatttgtgtcctaggaggtaggtcaaaagt

SEQ ID NO: 213529 - DNA, 201 bp, Homo sapiens
aattgaggccatttgattcatatgaaatgctatttggaaagcagttttttttgttgttttttttgttttttgcttttgtttttgtttttgttttgagacaragtcttgcttttgttgcccaggctggagtgcagtggcacgatctcagctcattgcaacctctgcctcccaggttcaagcgattgtactacctcagcctcc

SEQ ID NO: 213530 - DNA, 201 bp, Homo sapiens
ggaaatatcttccatcttccatccttgtttccatttctggatctttttgtgtttttttactttaacagttaagttttttacttttgtgattttttaatgtragggagcaccttatgttatccctaagctagtttggtgattacattatttgtcttggaaacagataaggagaagtagtgtccaggaatcctacagctggaa

SEQ ID NO: 213531 - DNA, 201 bp, Homo sapiens
atatgtagtcacattgggaagtattaccatcttaatgatattaagtcttccagtccatgaacttgggatttttccatctatttagatatttccttcagcartgttttgtgatttttagtatatacgtcctgcacctctttggttaaatttatcactaagtatttgatttttttattctactataaatggaattgtttcctt

SEQ ID NO: 213532 - DNA, 201 bp, Homo sapiens
attgctaaataaaaattgtatatattcaagatgtataataagatgattttatatttatatatatatacacacacacacattgtgaaataatgaccacaatcaaattaacatatccatcaccacatttagttaccatttgtgttttagaggggtgaggatggggtgggctttttgactgaggggcttgcactaggataatca

SEQ ID NO: 213533 - DNA, 201 bp, Homo sapiens
cctcgtgtgcatgtgtggggattgcagcgtgaggaacgagtgcagagcagcagtactctttatgcaggggagatggcctcatacttctgcccacagtccaytgatgagagcggaacccctgccatgactagccacgcagggggctgagaaacagctctaggaagaaagtggagagcagattgcctggggtggagggagggg

SEQ ID NO: 213534 - DNA, 201 bp, Homo sapiens
ggactggtgggtgtcagggtcagtccaagtaaaggcaaaaaggggctgggaagagggatgtaaggggatggtaaagaaggcatctttgaggtcaataacaraataatgagttgtggaaggcggtattgaggataggagagtataagggttaggcatgacaggatgaatggggaggacaatctgattgatgaaacgaaggtc

SEQ ID NO: 213535 - DNA, 201 bp, Homo sapiens
cacctgggaaaacacgtgtcaggtaattcaaattcttcactgctctgcacatgcacatatccgtgatgacaggaaaaaagtattgatatggaggttgcaartaagttttaataagtagatgaatttgcacatatagaattcacaagtattgagagtcagctgtacatactttttaatcttaatttttttctccataatatg

SEQ ID NO: 213536 - DNA, 201 bp, Homo sapiens
tcttacagtcaaggtacgaaattaaatctctgttttaattattgggtatgtgattatagttgctatgtctttccagaaaggatttgtggtggctcaaccawgtgtgttaaagcattttctgtaatgtaaggaaatcaaggggaatgaattattagggtaggcaaaatatggggaaatctagaaataaagtcagtacccaaa

SEQ ID NO: 213537 - DNA, 201 bp, Homo sapiens
tgacaccacagtgggggtggagggggtccacttgttaccaactgataggaataaaaggctcagcttcctacttggccttccctgacaacaccctaggaggkgtgtcgccttgttacagcctctcgagggtcaaagtctaagttcccttctcagcctttgctgacatagatggggctgggtacccctcatttttttctgtgg

SEQ ID NO: 213538 - DNA, 201 bp, Homo sapiens
ttacaagaacgatctgatcttacagtcaaggtacgaaattaaatctctgttttaattattgggtatgtgattatagttgctatgtctttccagaaaggatwtgtggtggctcaaccatgtgtgttaaagcattttctgtaatgtaaggaaatcaaggggaatgaattattagggtaggcaaaatatggggaaatctagaaa

SEQ ID NO: 213539 - DNA, 201 bp, Homo sapiens
aaccatatagtcccagagaaaaatgtaaagcagagtgaatatcccgggaggttggatggaagcacctcctccaaggcagactgacattcagcagttacatrcaccgaggaggtaaatggaataaatggaaagataaatggaagtgtaattcaagcagatttagcagtacactacagccttttttaaggcatgaaaattttt

SEQ ID NO: 213540 - DNA, 201 bp, Homo sapiens
cagtcttgaacagctgtcttaccaaccaccatgggaagagttacagaaagctttttctccaaaacatgcgcataagagctgtgcaacctgtgttacagagytgaactataaaacgtaaaattgccttacattatcgacatcccgctaaccatatagtcccagagaaaaatgtaaagcagagtgaatatcccgggaggttgg

SEQ ID NO: 213541 - DNA, 201 bp, Homo sapiens
gctcctggagcctcagggcagaggaagtcagccagtcttgaacagctgtcttaccaaccaccatgggaagagttacagaaagctttttctccaaaacatgygcataagagctgtgcaacctgtgttacagagttgaactataaaacgtaaaattgccttacattatcgacatcccgctaaccatatagtcccagagaaaaa

SEQ ID NO: 213542 - DNA, 201 bp, Homo sapiens
ttttagccaccctagtgagcatgaggtagtatctcactgtggttttgatcctgtttcccccaaatggctaatgatgctgagcctcttttcttgtttttttktttgtttgtttgtttgtttggccatgcgtatacctttggagacatatctattcaggtgctttgcccattttttaaattgggttgtttttttgtttttaaa

SEQ ID NO: 213543 - DNA, 201 bp, Homo sapiens
cttgggctcaagcgatcctcctgcctcagcctgccaaagtgctggtattacaggtatgagccaccacacctggccaaaacttagctttagctttttttttytcccccgcaagacagtcttgccctgtcgtcaggctggagtgcagtggcgccatcttggctcactgcaacctcctccccgaggttcaagcagttctcctgc

SEQ ID NO: 213544 - DNA, 201 bp, Homo sapiens
taatagtcctgactctccactcgccctcctgtgacactgcccaggaggagatggggagggtgcccactactcccaagtgcaggtggaagttagggctctcyatgtgttctttgctgacaccacagtgggggtggagggggtccacttgttaccaactgataggaataaaaggctcagcttcctacttggccttccctgaca

SEQ ID NO: 213545 - DNA, 201 bp, Homo sapiens
ctgagctttcaattcattcagaatatttttttaggaataaatcttgtaaggtgaaagtgctggggaatatgtaacagatcttgtcttcagagttactgaaatgtaagatgtctgctttttctcttttaaagaatcctcgcaaggctcgtgtaactcggcgtttcattgtagtagaaggattgtatatgaatactggaacta

SEQ ID NO: 213546 - DNA, 201 bp, Homo sapiens
agctaatgctgtgagctgaaaaacgtctgagagaagatagtactgttgttcatctcaaaataacccatcacaaacactgagctttcaattcattcagaatatttttttaggaataaatcttgtaaggtgaaagtgctggggaatatgtaacagatcttgtcttcagagttactgaaatgtaagatgtctgctttttctctt

SEQ ID NO: 213547 - DNA, 201 bp, Homo sapiens
ggttacggcaatgctggccacacctagttgcaggagcagctgacagaagtggtcttttgttccagggcagtggccttaattttttcatttctttttttttycccttgcctttagtctgcttgatcaggttttcttgattagacttcccttattcttttcttctcctcatgcttaacataagtaattcctgtccaatttttt

SEQ ID NO: 213548 - DNA, 201 bp, Homo sapiens
tgtgcctttcctaggccaggccctgtcctgagcctcatccgcctagacagcctctcaggcaggctcttctaggccacatggctgtgcagtatacagaccgrgtgtgcaggcagcctctgctgcctagctggcttcagctgtcctatgtcccaaatgtttgagccacgtaatctggaataacagatttgtggagaacttcat

SEQ ID NO: 213549 - DNA, 201 bp, Homo sapiens
agggggcattgataatagaggatccttgtgtagtgagaaaacctctttctgcccagttgacagggtggcggtggaggatgtgaagggcgtatttagagtcmattagatattaacatgcagtcctttgccaagagttagggcatgagttagtgctattaattcagcttgttgagaggttgtaaatggggagagtgcagcagt

SEQ ID NO: 213550 - DNA, 201 bp, Homo sapiens
tcatattcataaaagtaatggctctcttgtttcccagttaatatctgtaggttttaggtattatagtcttatcaattcgagaccatttcctccgatctagktttctaagagttttataaatagatgttgaacttcatcaaatgttatttctgcatctaagatcattgcatgacttttctttattatgttgtattttctgaa

SEQ ID NO: 213551 - DNA, 201 bp, Homo sapiens
ctcctctgaaaaattagccttgcagaaaactcacttgctcaccattttacaaagccaggctttcctatgtgtagttgggggaggcattgtgtgtgggcatmgcacacattcctggacggctggctgtccccgcagcacagctcagggacagtccactcacagtcaccctgaagtcaggatgctcttgtaaacggaaaggaa

SEQ ID NO: 213552 - DNA, 201 bp, Homo sapiens
acccctcttccaagtcctgggatgctggacatctgctttcagaagaatctggacttttatgtgggctgctgctgctcctttgagaagaatctgacatatayctagtatgtatttgagaatgaaaatgggcatgattctgcttccttgtccagaggctgtagctatgagcaatgctactaggtttctggggtcataatggca

SEQ ID NO: 213553 - DNA, 201 bp, Homo sapiens
tactggcaaaccgaatccagcagcacatcaaaaagcttgtccaccatgatcaagtgggcttcatccctgggatgcaaggctggttcaatatatgcaaatcrataaatgtaatccagcatataaacagaaccaaagacaaaaactacatgattatctcaatagatgcagaaaaggcctttgacaaaattcaacaaccttcat

SEQ ID NO: 213554 - DNA, 201 bp, Homo sapiens
actgtttctcttccttagtgatggataaaatacaattgatgacatcttagattcagtgaaatacaataaacctcttctctatcacccgtctgttaactttrtctttggtatctttcgttgaaccaaatttcttaattttgacttggtcagatgcatccatcttggccttacggtttgtattcttaaagacttggttaagaa

SEQ ID NO: 213555 - DNA, 201 bp, Homo sapiens
tcactggtccgcagggggagggccagggaagtcgcgctgtgccaaaggtgcagagcgcttttatggatgctgggtgaggagtgggcggggtaggggcgggrtaggttgagtttcgtgcttctgagtgtgacacgccctagtgggcatgcgcgttggtccgggtggcgggaacaggaaaggtgaacccggaaatgctgagtc

SEQ ID NO: 213556 - DNA, 201 bp, Homo sapiens
ggcgagacaaagagggcaaaaatctttactgagctctcgggcgaggttcactggtccgcagggggagggccagggaagtcgcgctgtgccaaaggtgcagmgcgcttttatggatgctgggtgaggagtgggcggggtaggggcgggataggttgagtttcgtgcttctgagtgtgacacgccctagtgggcatgcgcgtt

SEQ ID NO: 213557 - DNA, 201 bp, Homo sapiens
gtgttttctttgcctatatttataattttaccatatatgcctgttgccataaaaatacttggtttattttaaaatgtgatacaagatattttcctgagtaktattgttctgattctgatctgatcaaacaggagcttctattctttacttctgtagatctcttcagtcttataaaacttttatatattctgaaatcaaacc

SEQ ID NO: 213558 - DNA, 201 bp, Homo sapiens
atggctaatgatgctgagcctcttttcttgtttttttttttgtttgtttgtttgtttggccatgcgtatacctttggagacatatctattcaggtgctttscccattttttaaattgggttgtttttttgtttttaaaagaattccttgtatattctggatactagatgtttatcagatacatgatttgcaaatattttct

SEQ ID NO: 213559 - DNA, 201 bp, Homo sapiens
aagaagccattatatactcatatggatttgccaccatagccagtgctattcctgcttactctaaaagaggggacattgtttttgtgtaagtaaactttacstagttttctaatagcagttcctttgaaataatactgactgtcttagagaaatacttcattagaagttatctgcataaaataatgctgctttttgtttttc

SEQ ID NO: 213560 - DNA, 201 bp, Homo sapiens
gttcttttatttgttctttagtagagaaaaagaattataaggcagtttaaccatttaacttttttaactgaaatagatgttcatttggatttggaagacckcctggcaaaatttatgaagacagaagaagccattatatactcatatggatttgccaccatagccagtgctattcctgcttactctaaaagaggggacatt

SEQ ID NO: 213561 - DNA, 201 bp, Homo sapiens; identical to SEQ ID NO: 37723

SEQ ID NO: 213562 - DNA, 201 bp, Homo sapiens
ccagaattggtaagcaaccatgttcagctgtaattttaatatttggactatttgacagatgtgccttttgtttatgaccgcttttagtgtataacgtctgygttgctttgcgcattaggcctcataagcatattttgctcagatcagggaagaagaacaacactgaatgccagtgctggccttcaaagagtaatcaagact

SEQ ID NO: 213563 - DNA, 201 bp, Homo sapiens; identical to SEQ ID NO: 37724

SEQ ID NO: 213564 - DNA, 201 bp, Homo sapiens
gcattttccaggaaagacttggcccacaaatgcagaaaagttaaccaggttttgagaatcaggctagtataacttttccatattttaagtcatatactcaktctttacacctgtctcttctttatattctgttagagttggaggaggaaggaaggagctctgtgggttaaagaataggaaatgtttgttttgaactcttaa

SEQ ID NO: 213565 - DNA, 201 bp, Homo sapiens
ggaaaggaatgaatagaaattaagggagcttcgaaagtaaattgttaagaataggctaaaagtcacaggaggcagtatatgcaggtgtagtaaattttatrtgcaggtgttagaagtgtatgtttcatatcttacttgtttttgactcactcttaggctcctgcttaccatcttattttggaagggattctgatcctctgg

SEQ ID NO: 213566 - DNA, 201 bp, Homo sapiens
gatcttacagtcaaggtacgaaattaaatctctgttttaattattgggtatgtgattatagttgctatgtctttccagaaaggatttgtggtggctcaacyatgtgtgttaaagcattttctgtaatgtaaggaaatcaaggggaatgaattattagggtaggcaaaatatggggaaatctagaaataaagtcagtaccca

SEQ ID NO: 213567 - DNA, 201 bp, Homo sapiens
atcaatagaaaaagagagaatcctccctaactcattttatgaggccagcatcatcctgataccaaagctgggcagagacacaaccaaaaaagagaattttrgaccaatatccttgatgaacattgatgcaaaaatcctcaataaaatactggcaaaccgaatccagcagcacatcaaaaagcttgtccaccatgatcaagt

SEQ ID NO: 213568 - DNA, 201 bp, Homo sapiens
gccgaattctaccagaggtacaaggaagaactggtaccattccttctgaaactattccaatcaatagaaaaagagagaatcctccctaactcattttatgrggccagcatcatcctgataccaaagctgggcagagacacaaccaaaaaagagaattttagaccaatatccttgatgaacattgatgcaaaaatcctcaat

SEQ ID NO: 213569 - DNA, 201 bp, Homo sapiens
ctgtgcgattccacagctggcgttctggcctgtgtgcctcatgatcatggatacagcatctattcttattttttcctgtagttctggggtacttagcaccrtggcatatctgtaataagcacgtgcacacctcgaaggaggtcttcacttcagcatagaagttgaccatggcatgctctgggctccagtcttctacaaaga

SEQ ID NO: 213570 - DNA, 201 bp, Homo sapiens
tttaggtgtcagcctaagtgcatcacttcatgaatatacacattctcatgatgaatatgcatgatcttgccattttatactaactctgctctaggctaacrtttcacatttacacaatttagaaaaatctataggcaaaatctgaaaacagcccattccactgattaatttcttttacaaagtataaaaagatgtttctta

SEQ ID NO: 213571 - DNA, 201 bp, Homo sapiens
taaagaaaaaaagagagaagaatcaaatagatgcaataaaaaatgataaaggggatatcaccactgatcccacagaaatacaaactaccatcagagaatamtacaaacacctctacgcaaataaactagaaaatctagaagaaatggataaattcctcgacacatacacccttccaagactaaaccaggaagaagttgaat

SEQ ID NO: 213572 - DNA, 201 bp, Homo sapiens
aattggaatgatgcttcccatcagtcgcaagcttctgtacgttcactgtgccttgacattgtggacttctaacattatttctccgtgagcgatcttcaagsctggaagggacttacagctgtgtgtgtgtttcccttcttcagcatttctggattaaaagtggtgggggagtccctttctccagcctttcacctacaactg

SEQ ID NO: 213573 - DNA, 201 bp, Homo sapiens
atttggatattaaggtgttcctgcttattaaatgtacttggtgttggagagccaagtctgattgtaattgccttgtcattgccgtaattacatatagcaarttggagggaggtaatccaagcagctttctgagagatcaagagaggctgaaaaacagcatgtgcttagtgaggcagggagatgtctactcatagctgggca

SEQ ID NO: 213574 - DNA, 201 bp, Homo sapiens
cctctcctcctccaaaggaacgcagttcctcacaagcaatggaacaaagctggatggagaatgactttgacgagttgagagaagaaggcttcagacgatcraactactctgagctacaggaggaaattcaaaccaaaggcaaagaagttaaaaactttgaaaaaaatttagacgaatgtataactagaataaccaatacag

SEQ ID NO: 213575 - DNA, 201 bp, Homo sapiens
acggagtttttttccataagggtgattcattagataggtgatgttggcctgctaggattataagaggtagtagtcaggctgtttggattagaagaggtgaygttaatgcgtcagaagaaaaagttaatgagaagttagatgaattattgtttggttgattaaaaaataatagggtaatgaggctgatgaataggctatgag

SEQ ID NO: 213576 - DNA, 201 bp, Homo sapiens
tgcgagctgaagcagggtgaggcattgccttacttgggaagcgcaaggggtcagggagttccctttcctagtcaaagaaaggggtgacagacggcacctgraaaattgggtcactcccaccctaatactgcgcttttccgacacgcttaaaaaacggcccaccaggagattatatccctcacctggctcggagggtcctac

SEQ ID NO: 213577 - DNA, 201 bp, Homo sapiens
gggctgaggatgagggtaagtcatatgataccgtagcctcctaactactgagctggcaatagagacttctatgtgggctttagggagtcataggtgaagtycgtataggggtatttttactataaaagccataatacatgctagtcatataaggttgttagatcagaagtttaatagttcttgattagtaaacattattat

SEQ ID NO: 213578 - DNA, 201 bp, Homo sapiens
actttgaatatatcatcctcatctttcctagccttcaaggtttctgctgtgaaaactgatagtctaatggagacttgcttatttgtgatctgatgcttctytcttgctaattttagaagtttttctttgtgtttgacttttgacaaattgattataatgtgccttagaaaaggcctttttgggttgaatatgtccctttaa

SEQ ID NO: 213579 - DNA, 201 bp, Homo sapiens
ccaggtgctggctggcacccagtggccctgtcttggacggccctgtcccccgggttacagggccagaacctggaagcagagcacaggaccagccagatccygccaggctcccccggggcctttccagtgcctctgtgccgcctggagcaaggcccgccttctccatggctgccgtggcctcaagggccaccagccttgctt

SEQ ID NO: 213580 - DNA, 201 bp, Homo sapiens
ctcaggcgcgctacttggagaaagaagagaagtgtctccctcctcccaggtcagttgacgttaaaatatgaccttatttttttcccctactctgagctctrtgaaatacgttatcttttgaaaaattttgaaagactatcataggctatggaagaatatctgtcattaaaatatagtacattacctgtcttctgctcttaa

SEQ ID NO: 213581 - DNA, 201 bp, Homo sapiens
tggaaaagtgaattaaagctaccgttgcaggatttcagcgttcccccagtttaattaccaccatgtctgaagtccaggttgcagatgtcttctttttcttyctacagtgcatgaacagaagtattgcattaactcaggcgcgctacttggagaaagaagagaagtgtctccctcctcccaggtcagttgacgttaaaatat

SEQ ID NO: 213582 - DNA, 201 bp, Homo sapiens
attttattttttaaagacagggtttcactctgtcgcccaggctagagtgcagtggtgcgatcagctcactgctgcgttgacctcccagactcaagcgatcytcccacctcagactcccgagtagctgggaccacataccaccatgcccaactaatctttttttttttttaatagagacgggggcttgctgtgttgcccagc

SEQ ID NO: 213583 - DNA, 201 bp, Homo sapiens
tcaaccaacataaagtttatctgcaccacacttaacaactaatggaaagttttaaatttctaggcttgggtcagtttgaccagattgcagctaagaaaccraaaacttagttcactcacattggtttatttgtgtaaaaccagatcatctgttttaaagaatcgtgactttgtttttctgaaaatgaaacaaactcattaa

SEQ ID NO: 213584 - DNA, 201 bp, Homo sapiens
gaaaagtgcggacaaattcataaagctttacaagggtgagttttatatattttcaaccaacataaagtttatctgcaccacacttaacaactaatggaaarttttaaatttctaggcttgggtcagtttgaccagattgcagctaagaaaccaaaaacttagttcactcacattggtttatttgtgtaaaaccagatcatc

SEQ ID NO: 213585 - DNA, 201 bp, Homo sapiens
tcgtatcaccaccctggaccactgcagctgcaggtctcacacccagttgcctactcagtatccacagttggaagactccatggcacctcacagtaaacacrcattcataagggtcgcaggggcaaaccgtgctggtatctagatggttacagagaacagtaaacaaaatagcaaagaggccaatgtgacaggaggaaagga

SEQ ID NO: 213586 - DNA, 201 bp, Homo sapiens
caaatagactctcaaacgtatttttttcatctaggtatttttgcagtgttgaaggaaaagtgcggacaaattcataaagctttacaagggtgagttttatrtattttcaaccaacataaagtttatctgcaccacacttaacaactaatggaaagttttaaatttctaggcttgggtcagtttgaccagattgcagctaag

SEQ ID NO: 213587 - DNA, 201 bp, Homo sapiens
cacctgaccccgtccagcctcctgtcaaccagtgcgcaagtgcgagtaggcggtgcccagcgctccgccgccccgccctctgcggaggtgataacgacacygagcagcgacgcgcacttttgggacgcgcttgtgacccgccttccggaaggaagcggctaactatggcgaccgccacggagcagtgggttctggtggaga

SEQ ID NO: 213588 - DNA, 201 bp, Homo sapiens
gaggtgtccaaacatcctggagttgcgagcagacagcacgggtttcttccttgaggggggggctccagaccacaggaggcaggaccctctgtggggtgccygtgttccgagggataagacacagcctcacaggggcgccatcccacctgactggaaaagaaggcccaagatgtcgctgacggttgaagaggagtgggaaac

SEQ ID NO: 213589 - DNA, 201 bp, Homo sapiens
gcctcaggagatagacatggaagcttagccggtgggggcccctcatctctctcccacctcagttgcaggggaggggtcggttgcagctgcagcggtggccycgacagttttcttttgcgggacctgtggccggcagctctgggtggagaagacctacttgatccaagagctgcaggatccttgggctgcatgtcctccccc

SEQ ID NO: 213590 - DNA, 201 bp, Homo sapiens
ctcctcacttcccagatggtggggcggctgggcagaggcgctcctcacttcccagatggtggagcagccgggcagaggcgctcctcacttcccagatggtrcaggcagagatgctcctcaggtctcaatctcttgacctcctgatccacccgcctgggcctcccaaagtgctggattacaggcgtgggccaccacgcctgc

SEQ ID NO: 213591 - DNA, 201 bp, Homo sapiens
gggcagaggcgctcctcacttcccagacggtgcaggggctgggcagaggcgctcctcccttacaaacggtgagggggccgggcagaggtgctcctcacttkccagacagggtggcggctgggcagaagtgctcctcacttcccagatgggacggcggccaggcagaggtgcttctcatttcccagatggtgaggaggccgg

SEQ ID NO: 213592 - DNA, 201 bp, Homo sapiens
ggtggccaggggcagggagtctcagcaggtgtggagacagcaggggcaggctgggtgccactgcagtttgccatgtcttacttttttttttttttttttttgagacggagtcttgctttgtcaccaggctggagtgcagtggtgcgatctcggctcactgcaacctccacttcctgggttcaagccattctcctgcctcag

SEQ ID NO: 213593 - DNA, 201 bp, Homo sapiens
ggaggtttggagggttttgtttgtgttttaatattctcagagggcctaattagtttgtgtgtgtggcgggtcacctagctaatgctgtgagctgaaaaacrtctgagagaagatagtactgttgttcatctcaaaataacccatcacaaacactgagctttcaattcattcagaatatttttttaggaataaatcttgtaa

SEQ ID NO: 213594 - DNA, 201 bp, Homo sapiens
aaaaccggcgaagaaggatacttctgagataataggagcatcctgtatcggaggcctttttggacaattgctgtgtggtggccttggaatgtactttctcrgacaatatcacgtcatcattgatatatagtcagtgtgttggttagtaggcctaaagttaaaagagtggtagaattaaagtgaaatcctatggttaggcca

SEQ ID NO: 213595 - DNA, 201 bp, Homo sapiens
tgtggaagggtgaaatagactcctaagaggattgtggtaagtagtgcttgaattgtttgtttttggttaccttctgttaggctgtgatgggctcaagtcaytgaaactcctgatgcaagtaatatagacgtatttaggagaggtgcttctgaagggttcaggggaagaatagctgttgggggtcaatgtcctcctaattct

SEQ ID NO: 213596 - DNA, 201 bp, Homo sapiens
aacattgatttattttcaaatattgaaccagccttgcatacctgaaataaataccacttggttatggggtataattttttttttataaaaagctaaattcratttgccagtcttttgttaaggattttgaatctgtgttcatgagggagattgtcctataatacactttttttgatacttactttggttttggtagcagaa

SEQ ID NO: 213597 - DNA, 201 bp, Homo sapiens
aaggactcatggatgaagagcaaacaatgatgtataaatattcaaacatgttttatttatttgctatgctcatgttaacaatcagtgattggtcagcttasaaaaacaagcattcctttttgagaatgttgacaagaccctttaaacccaatttggtggatctcttttccttgcagagatagagctgcctgctttgctatt

SEQ ID NO: 213598 - DNA, 201 bp, Homo sapiens
gagtagtcttgtatagtgtacccaaaaaagaaccactgaaattaaataatccgatggttaatattgggattctgtgttagattttatttatttatttattwgagacggagttttgctcctgttgcccaggctggagtgcagtggtgtgatctcggctcaccacaacctccacctcctgggttcaagcgattctcctgcctc

SEQ ID NO: 213599 - DNA, 201 bp, Homo sapiens
accaaacctagctaattttttgtatttttagtagagatggggtttcaccatgttggccaggctggtcttgaactcctgggattacaggcgtgagccactgygcctggcctcctcttttcctttttaacatcacagccagagtaatctttttaaaatgtaaatcctattttgtcacattttatttaatacaatttagagctt

SEQ ID NO: 213600 - DNA, 201 bp, Homo sapiens
ctcactacaacctccgcctcccgggtttaagcgattctcctgcctcagcttcccaggtagctgagattacaggcatgtgccaccatgcccggccaattttktatttttattagagacggggtttctgcatgttggtcaggctggtctcgaactcccgacctcaggtgatccgcccgccttggcctcccaaagtgctgggat

SEQ ID NO: 213601 - DNA, 201 bp, Homo sapiens
ccaggcagtcacagcagggggcatggacatggtcagttctgccctggggcattgctcaggcttttgagagcaggcgatgtctacaccaaaactagagaagygtgtgtgtcgggcatcctgtgggcatcgtggctttccatcagatgaggtggtgtgtgctttgctcagggttttcagtggcttggagacctccaggttcat

SEQ ID NO: 213602 - DNA, 201 bp, Homo sapiens
ccttttctggttatttcctataaatggcatcatataatatatgaccttttctttctggcttcattcacttgatgtttttaaagttcattaacattgtataycatgtatcagtatttcatacctttttaatgctgagttatagtccattgcatggataataccacgttttgttttatatgttcatccacagatggatatttg

SEQ ID NO: 213603 - DNA, 201 bp, Homo sapiens
cctttttaatgctgagttatagtccattgcatggataataccacgttttgttttatatgttcatccacagatggatatttgggttctttctacctttttgytattgcaaatagtgctgttgtgaacatttgtgtacaggtatttgtttgaattcctgttttcagttcttttatgtatatatctagcagggtaattgctgga

SEQ ID NO: 213604 - DNA, 201 bp, Homo sapiens
agtattgagagtcagctgtacatactttttaatcttaatttttttctccataatatgttctatatggtgctaatcattagtattttaacgtttatataacrcttaggttaagttaaaatacaaatacaaagcaagaatcttcctggaggaaagcctttcatttggagtcctaggagagcatggccgaggagtcactgaaca

SEQ ID NO: 213605 - DNA, 201 bp, Homo sapiens
tcacaagtattgagagtcagctgtacatactttttaatcttaatttttttctccataatatgttctatatggtgctaatcattagtattttaacgtttatrtaacacttaggttaagttaaaatacaaatacaaagcaagaatcttcctggaggaaagcctttcatttggagtcctaggagagcatggccgaggagtcact

SEQ ID NO: 213606 - DNA, 201 bp, Homo sapiens
ttagctcagtttcaaatagacatatatcacatttgtgtcctaggaggtaggtcaaaagtcaaataatatttgttgttataggataaaatagactttaaatraacctgactagatagtagccgagatcgtgccactgcactgcagccagcctgagtgacagagcgagatgccatctcaaaaataataataataataatagta

SEQ ID NO: 213607 - DNA, 201 bp, Homo sapiens
gacaggccaaggtggggcccagagggcctgtaaggaggcacagactccctggtgggaggctggggccatgagacccggtcctgcactcaggaagccacatygcaggcagacttttttagatgaggaagcactgcccagagtgcctcgtttccctttctttgttggaattggaatgatgcttcccatcagtcgcaagcttct

SEQ ID NO: 213608 - DNA, 201 bp, Homo sapiens
cccatgaggaaggccagctagaccactgttttagcgaggaaatagtcttattttgtacctgtgactacttttaatatcgaacagctttgggttttattttyttataatttatttgtctttgctgtgagttaatttgtcatgtataatgaaatggtaaaaatgtataaaatgagacagtttcagatgggccatgagactaca

SEQ ID NO: 213609 - DNA, 201 bp, Homo sapiens
tgaaaggtttaaacatgctttttaaaaagggcaggagtgcagagtttctcaaaactctgctggatctatgaaacactaaggaaaacactagctgtgttctsacaatccattaacatggccatcagtaagtaatgattgaatgcctactgtgtgcccagaatggaacttggtgctgagggctggacccaaagatgaggaccg

SEQ ID NO: 213610 - DNA, 201 bp, Homo sapiens; identical to SEQ ID NO: 37726

SEQ ID NO: 213611 - DNA, 201 bp, Homo sapiens
acttagcaccgtggcatatctgtaataagcacgtgcacacctcgaaggaggtcttcacttcagcatagaagttgaccatggcatgctctgggctccagtcytctacaaagatgtagggcaggaactaccagttgtcagcacagcaccatcccacattgctcttctaatggagcctttcaccccagatgttctttctcgtct

SEQ ID NO: 213612 - DNA, 201 bp, Homo sapiens
gtcatggaagagggttacctttaaaagtaaagagaaatcatcaaagaaaacagcaacacaaacgagacacaatacctaccactcatgggccactatgtagraattttaacagtgatctctaaggtaggctgtaataactgtggcttcccctattttaataatgcattgtaacaattgttaacagtgattaagtttcgcaaa

SEQ ID NO: 213613 - DNA, 201 bp, Homo sapiens
ctctcctgcaatccaacttgtgaggcttgtgtgtgcgcgcgcgtgtccttgcgtgtgtgtgtgtgtgcacgcgtgcgtttagatggaggttggcttcccabccacccaggcttggcccaaagtccgtggtacacacgtgcataactcctacccccacctcgcctgcctgctgtaccaggcgttgattccctcttcctgcgt

SEQ ID NO: 213614 - DNA, 201 bp, Homo sapiens
acgctttaagacacaaggaggacacgctttaagacacaagtcctctcccttagtctcgcccacgctgggaagctggtggggtcgtgtttgaatagcaaagrtgtgcgaacaaaacaaattaggaaaactgcagagtaccttagcctttctagacgctgcaagagccttctctcctccctgtccaaatactaatcctgccgg

SEQ ID NO: 213615 - DNA, 201 bp, Homo sapiens
accttcctcaaatgccactgcaaactgggtctcctcgcccacttcaccctctcctgcaatccaacttgtgaggcttgtgtgtgcgcgcgcgtgtccttgcrtgtgtgtgtgtgtgcacgcgtgcgtttagatggaggttggcttcccagccacccaggcttggcccaaagtccgtggtacacacgtgcataactcctaccc

SEQ ID NO: 213616 - DNA, 201 bp, Homo sapiens
caaggaggacacgctttaagacacaagtcctctcccttagtctcgcccacgctgggaagctggtggggtcgtgtttgaatagcaaagatgtgcgaacaaamcaaattaggaaaactgcagagtaccttagcctttctagacgctgcaagagccttctctcctccctgtccaaatactaatcctgccgggagtgaggcctgg

SEQ ID NO: 213617 - DNA, 201 bp, Homo sapiens
ggggcggcggggggagggggggttccggggaacacatggctccagcacaggagatgccagggtgcagtgggatgagaggtgaggagagcaggtcaggttascaagggcattgaatgccagaaacatttggacttttattctgcagacaacagggaggcagcggcttttatgctcaaaaggaatgagtcccagtggctggca

SEQ ID NO: 213618 - DNA, 201 bp, Homo sapiens
ccgggaggcagaggttgccgtgagccgagatcgtgccattgcactccaccctgcattccagggtgacagagtgagactctatatctcaaaaaaaaaaaaaaggaaagctaattcactctggtggggtggtggggggtgaaagtaccgggtaagactttcctgagaaaccggaggtgaactagggtttagaagcatgaatag

SEQ ID NO: 213619 - DNA, 201 bp, Homo sapiens
tcgcttgaacccggcaggtggaggttgcagtgagccgagatcacaccactgtactctagcccgggcaacagagcaagactccatctcattaaaaaaaaaaacaccaaaaacaaaaaacaagcaaaccagaaaatatgcatcacagacatattttcctggacttcatttgtgttaccaggctgattgtaatccatgccatga

SEQ ID NO: 213620 - DNA, 201 bp, Homo sapiens
cccacaacttgctcaacaactgccttccccagagcgcgtgcgggactcctggaaggaagatgccttatttgggtaccagtttcttaatggcgccaaccccrtggtgctgaggcgctctgctcaccttcctgctcgcctagtgttccctccaggcatggaggaactgcaggcccagctggagaaggagctggaggtatggac

SEQ ID NO: 213621 - DNA, 201 bp, Homo sapiens
atgtgcagaaaaagacaaagataggcgtgtatttgctcagtaatattagtgcacagaagagactggtaactgtgattgctgggagtggagcaactgggtgscttggggccaagaggagggagaaactagtgaatatcactttgtaccttttgaattttgaatcacatgaatgtacttcccagtaaacaagcagggccggac

SEQ ID NO: 213622 - DNA, 201 bp, Homo sapiens
aggggcctgtctcagactggccccttccctccctccctgacgctggagttagtgagaaggaggccagagccagggctctgtgagaggagagggggcaggcmgggagtcagtctgtcgcaggatctgtcccttacctgatccaaagcacagaagatggatggctggtgcacagaaggagctaagccctgcttctcccaggcc

SEQ ID NO: 213623 - DNA, 201 bp, Homo sapiens
ccctgacgctggagttagtgagaaggaggccagagccagggctctgtgagaggagagggggcaggccgggagtcagtctgtcgcaggatctgtcccttacstgatccaaagcacagaagatggatggctggtgcacagaaggagctaagccctgcttctcccaggcctctgtcaagccagcagggtcccactccttagctc

SEQ ID NO: 213624 - DNA, 201 bp, Homo sapiens
gaaaactgcagagtaccttagcctttctagacgctgcaagagccttctctcctccctgtccaaatactaatcctgccgggagtgaggcctggaaggaggcmggggaagcgggagaagaggtctgggccaaggagagttctatctgcgaagactccaggctcagagcgctactcacctgtctccagggcgacggcagcggcc

SEQ ID NO: 213625 - DNA, 201 bp, Homo sapiens; identical to SEQ ID NO: 37746

SEQ ID NO: 213626 - DNA, 201 bp, Homo sapiens
gatccaaagcacagaagatggatggctggtgcacagaaggagctaagccctgcttctcccaggcctctgtcaagccagcagggtcccactccttagctcgratcatgcacaggtgccccatggcgcaatgcaaagagcagaggctttggaatcagggttccagtcctggtcctgctcctccatttagacaaacccctgcaa

SEQ ID NO: 213627 - DNA, 201 bp, Homo sapiens; identical to SEQ ID NO: 37747

SEQ ID NO: 213628 - DNA, 201 bp, Homo sapiens
acagaagatggatggctggtgcacagaaggagctaagccctgcttctcccaggcctctgtcaagccagcagggtcccactccttagctcggatcatgcacrggtgccccatggcgcaatgcaaagagcagaggctttggaatcagggttccagtcctggtcctgctcctccatttagacaaacccctgcaagcctcagagt

SEQ ID NO: 213629 - DNA, 201 bp, Homo sapiens
tggatggatggatggatagatagatgggtggatagatagatgggtggatggatggacagatggatggatggatggatggatggatggatggatggatggayggacggatggacggacggatggatggatgaagacatgaatagatgcatggatgatggatggagaggtgactagatggatggatttgttcacctccgcaaa

SEQ ID NO: 213630 - DNA, 201 bp, Homo sapiens
gcagggatggcacaggaccagccactccagcagaggaactgtttgtggaacccagcagggaaagaaattcgactttgagagcagcagctttggcagcttaraaatcatctggaggcttcccgtgcacacattaaacctcaagctccaggtagcccagccctggttctgtaagcggccagataggcccacccaggctcttgg

SEQ ID NO: 213631 - DNA, 201 bp, Homo sapiens
gagacttgggtccctctggtgggctggagtcaagggggcatggttggtggggttggaaggaccaagagctcagatcccacaacttgctcaacaactgcctkccccagagcgcgtgcgggactcctggaaggaagatgccttatttgggtaccagtttcttaatggcgccaaccccatggtgctgaggcgctctgctcacct

SEQ ID NO: 213632 - DNA, 201 bp, Homo sapiens
ccgcatggagggggtacccgagacagtgcagggagaggggcaggcaggaccctacatagcattttctccacagtcaatggcgctggtctcctcacaagcayagtcttgttttctgttgacttatgcaagaagagggagggggccacataatcattttggtgcttggtgcttctaaaagtcttactccttccctgggtggca

SEQ ID NO: 213633 - DNA, 201 bp, Homo sapiens
ttctaaaagtcttactccttccctgggtggcaccaggtcacagctacagccccatctggagggtgccttggggtggacctgggactcgtgtggtcctggtrggcatcctcagagcactgcagaaaaggacagcgtggggaggagccgcaatggctgacatgagcccccagaagctcagaagggtcactgtgcccatttcac

SEQ ID NO: 213634 - DNA, 201 bp, Homo sapiens
gggacaggcgtcatggcttacacctgtaatcccagcattttgggaggccaaggtgggcagatcacttgaggtcaggagtttcagatcagcctggccaacayggtgaaaccccgtctctactgaaaatacaaaaattagctgggcatggtggcaggtgcctgtaatcccagcaactcaggaggctgaggcaggagaattgct

SEQ ID NO: 213635 - DNA, 201 bp, Homo sapiens
ccggtctcccagacactcctgcactgtggacgggggtggcccatgtggaagagtcaggaaacagaggaagggaaggagagccttttccccctctgtcctckcagagcctgccaaggaacagtctctcctccaacatcctcctccactggaccatgtagggaaaacatcgcagggtgaggggccatctggtatggcccttcc

SEQ ID NO: 213636 - DNA, 201 bp, Homo sapiens
ttaaaggaaagagcctagagctgttccaaggagccccttcccagagcctgaccctctggggttggcaacaggagtgaacaaaacagacaaaaatccctgtyctcatagggcttacattcttacagaggtgggagagacagaccaaataaaaagtaaattgcatagtatgtcagaagatgaaaagtacaatagagaaaagtc

SEQ ID NO: 213637 - DNA, 201 bp, Homo sapiens
gactacaggcgtgcaccaccatgcccggctaatttttgtatgttttagtggagatgggatttcaccatgttggccaggctgatctcaaactcctgacctcrtgatccacctgcctcggcctcctaaagtgctgggattacaggcatgagccaccacgcccggccctaccctctcattttatttaacattttaacgttaagc

SEQ ID NO: 213638 - DNA, 201 bp, Homo sapiens
ggagccccttcccagagcctgaccctctggggttggcaacaggagtgaacaaaacagacaaaaatccctgtcctcatagggcttacattcttacagaggtsggagagacagaccaaataaaaagtaaattgcatagtatgtcagaagatgaaaagtacaatagagaaaagtcaaggaggctgcagagagagagtgtggagc

SEQ ID NO: 213639 - DNA, 201 bp, Homo sapiens
tatgctctcaaccagcagccgctgttggtacaagaggaataaatgcctagtcttctacctactgtatctactcctaaggatactgagggtgtgatgtggtygggagaaaccctggaggccatcagaagagcaggggatattcaagcctaagatgggaagaatgggtagacaccacttcattctgctatctgaagggctgtc

SEQ ID NO: 213640 - DNA, 201 bp, Homo sapiens
atctttatttctatgaagaatagttgcattgtgttagatagaaaagaatattttattttattttattttattttattttattttattttattttattttawtttatttttgagacagtctcactctgtcagccaggctggagtgcagtggcacaaccttggctcactgcaacctctgtctcccaggctcaagcaattgtcc

SEQ ID NO: 213641 - DNA, 201 bp, Homo sapiens
ctctaagttttctcccaattagtgccccctcttgagttcctggccatctgttaaatgtgtgccatgacagacgatggacagtagagggcagacaatccccrcacagcagcaaaggctggacttcggaggagttggaaaccacaggcgaatgccaagcaggacagaagcctgaagccaggcctgaagcttctgaaagagaca

SEQ ID NO: 213642 - DNA, 201 bp, Homo sapiens; identical to SEQ ID NO: 37751

SEQ ID NO: 213643 - DNA, 201 bp, Homo sapiens
tctgggccaaggagagttctatctgcgaagactccaggctcagagcgctactcacctgtctccagggcgacggcagcggccataacaggcaaagacagcgratcgccacctgcctaacagaggaaaagcccggaggggcgggaggagttccggaaaccacggctccctcttgcgatcccggggcaccgaggaatatgggga

SEQ ID NO: 213644 - DNA, 201 bp, Homo sapiens
agcggccataacaggcaaagacagcggatcgccacctgcctaacagaggaaaagcccggaggggcgggaggagttccggaaaccacggctccctcttgcgrtcccggggcaccgaggaatatggggacggtggctccgctcatccccggccaggcccgcttagcccgcgctggctccggaatggcgagggggcggtgccgg

SEQ ID NO: 213645 - DNA, 201 bp, Homo sapiens
tttaaaaaccgtttcaaccgctagcgctgttggatctctacctttcaggctttatcacctggggtggagtgggtggtgagagggaagggatggggagtcaagacaggagaacgctctcgatttcccgacccacctcccgtcatatctcatgtcacatctaccgggtgttctacccggtcctgttaactttttttcttccgc

SEQ ID NO: 213646 - DNA, 201 bp, Homo sapiens
ttttaaaaaccgtttcaaccgctagcgctgttggatctctacctttcaggctttatcacctggggtggagtgggtggtgagagggaagggatggggagtcaagacaggagaacgctctcgatttcccgacccacctcccgtcatatctcatgtcacatctaccgggtgttctacccggtcctgttaactttttttcttccg

SEQ ID NO: 213647 - DNA, 201 bp, Homo sapiens
aggaggcaccagaagagcagtttctgcagaatgctggaggcaaagcagcttgcagggtgctaatgcactgagctggtaggaaggggaggggaggaaatggragctgtagggagaggcaggagtgggatggggaaagcagaacaggtttggaggacgaggttaacatgcaaggggggcgggaatcgctgagtgccgggcact

SEQ ID NO: 213648 - DNA, 201 bp, Homo sapiens
cctggccaggtttggacaatttagttatgacccagtgtcaaagtttttattacaatgttgcggcaagaaatgaggcttttgctaagtcaattcaacaagtrtctataggtaaggacactttacaggaaaagagaatgactagataatcattgttagactggatacaagaaaaagaaagaaaagttctagttaaggattatt

SEQ ID NO: 213649 - DNA, 201 bp, Homo sapiens
tccatctgcttccccatccacacggacagccccgaggcctgggaagcaccaggagggcagtcatctcagcgctcccagcttgcagttccttcagggccagrgcaagcttggcccatcctcccctcccgaccctctctctctacacctcataggtgacctcatccattcccaccattttcatccccgtcctcactctgctgt

SEQ ID NO: 213650 - DNA, 201 bp, Homo sapiens
catctttatttctatgaagaatagttgcattgtgttagatagaaaagaatattttattttattttattttattttattttattttattttattttattttattttatttttgagacagtctcactctgtcagccaggctggagtgcagtggcacaaccttggctcactgcaacctctgtctcccaggctcaagcaattgtc

SEQ ID NO: 213651 - DNA, 201 bp, Homo sapiens
gtagaatcaagcacagaaaatgtgcatagtatgctcccatatgtaatacagttaatggatatctattacataatgtttctagattatataatatttctagragaatgtgtaagaaactgttgacagcggttccctttcggtgtggatggtttggggactaaaggtctgaagtgagaggcaaacatctcaataccttttgtg

SEQ ID NO: 213652 - DNA, 201 bp, Homo sapiens
tgaatagatttttaaaaaggtttctggtaggttgggacacaaacccttttcagaggctgtgtgactaaggggagaaagtacctggaggaagggattgtggrctaagaataggacagccagctgtagtttgtttgttttcagacagagtctcactctgtcgcccaggctggggtgcagtggtgtgatctcggctcactgcaa

SEQ ID NO: 213653 - DNA, 201 bp, Homo sapiens
gacaagcaggagggagaggaaggaccagtcctcaggggcaagacagactgggcagaggctaaggtagaggagtcaggagattcctaggggacagttggacyggggccagactaagccaggctaaggagcatgaagtgggaagctggagaaggctgtgatgaaacatgctataggcacgcggtgtgggcagtggtgtttagg

SEQ ID NO: 213654 - DNA, 201 bp, Homo sapiens
atgttgacccagacaacaggggaccaaggagttgaaggaggctcactggagaggtgggacagggggccagtcgattaaaacagaaccaagtgatgaagggmgtaggttggcctgtggtgcactgtgggtggcaagccaggtgtcgtcctgaagttggcaactcagattcctcatcctttggtggtggccacaggaggagtt

SEQ ID NO: 213655 - DNA, 201 bp, Homo sapiens
catgatccattacctggtacaaagtaggtgatggagacaagttagcttctctctctctctctctctctctctctctctctctctcctctctctctctctcttcccccttggaggaatccgagtgggaagaagatgctttatgttgatagcagcctttgacctcttcctgcacccagggaggcacattgttcgaagctgact

SEQ ID NO: 213656 - DNA, 201 bp, Homo sapiens
  misc_feature (1)...(201): n = A,T,C or G
tcccttccagagtgacagagatgatctgaggctgctcaaggtgagctggaagggacatgggcactggtaggtggttgtcttagctctcaaccaggggatcngattcccatttaaactatctaggacgaagcgagtgaaaaccagagccctgtgtgggggatgcttgaggcagagcgggtacagcagcctgcatcctgatcc

SEQ ID NO: 213657 - DNA, 201 bp, Homo sapiens
acatgatccattacctggtacaaagtaggtgatggagacaagttagcttctctctctctctctctctctctctctctctctctctcctctctctctctctcttcccccttggaggaatccgagtgggaagaagatgctttatgttgatagcagcctttgacctcttcctgcacccagggaggcacattgttcgaagctgac

SEQ ID NO: 213658 - DNA, 201 bp, Homo sapiens
gcctccctcacagagataatggcaaggcttgggaaagatgggtccagcagcccactgaggggttcccttcatttctgagcctaccctccagctgcccatgwccatctctgcatctgggcttggaggaagaggtggcccattggctgggttttggtggtgtgtggacatcgttgggtcattttggggtgtgaaccccaaaac

SEQ ID NO: 213659 - DNA, 201 bp, Homo sapiens
cacatgatccattacctggtacaaagtaggtgatggagacaagttagcttctctctctctctctctctctctctctctctctctctcctctctctctctcycttcccccttggaggaatccgagtgggaagaagatgctttatgttgatagcagcctttgacctcttcctgcacccagggaggcacattgttcgaagctga

SEQ ID NO: 213660 - DNA, 201 bp, Homo sapiens
tcccgacccccaggacagtgcgacttcatgtcccccaggtatcctcagtgctcaaggcatccctgggaagtaggcagagtggatgggttctctatgcccgygcgcatttggaaaatgacctcagagaagtgacaggaggcaacagcttaggccattcagggaaacggtcacagagcccagtgttccgtgagtccaggttca

SEQ ID NO: 213661 - DNA, 201 bp, Homo sapiens
gagaagtgacaggaggcaacagcttaggccattcagggaaacggtcacagagcccagtgttccgtgagtccaggttcattgctcaccccagtgccttaacyatcctacaaggacgtgccagcttccctgtggacctcctcaggctctttctgatgcctgctctgcaagcttccctcatggtcactaaccatcgcttcacta

SEQ ID NO: 213662 - DNA, 201 bp, Homo sapiens
tggcttgcacctgtaattccagcactttgggaggtcgaggcaggaggatcacctgagcccaatagttggagaccagcctaggcaacgtggtgaaaccctgyctctacaaaaatacaaaaattagcacctgtaacttttggtgtagtggcatgcacctgtagtcccagctatttgggaggctgaggtgggaggatcacctgg

SEQ ID NO: 213663 - DNA, 201 bp, Homo sapiens
tagcaggatggttaaataaaatatgacacatacaaataatggaatagtatgcagctgtaaagaattggatttttttttctttttgtgctaatcaggaaagmtctccaagataaccaaggcttcatggttagattttttaaaaattaagatgaatggccgggcgcagtggctcacgcctgtaatcccagcactttgggaggc

SEQ ID NO: 213664 - DNA, 201 bp, Homo sapiens
gagggcgtgcaagatggaatggttgatagaaacaaggtcaaatgaagaaatgtgactggcccctggtgctagggattcggggagtgtgcagagtaagagartcaggatcagagtgctgtggctgttcatcaggaggcgatatggaacaacagagaggaaattcatgggattaagggcagataggcttggatgtgaatcctg

SEQ ID NO: 213665 - DNA, 201 bp, Homo sapiens
cagggatctttccatactaccctgaagctggtacgtctttgcaatggatgacagaaggaaatgcaaaaaaaaaaaaaaaaaaaaaaaaaaaaaaaaaaccrtagccactgattttcctataagctctgctttcttctcactcccaactcaaaaacatgctagtccatagaacagaatgccttagcctggcactcagcagct

SEQ ID NO: 213666 - DNA, 201 bp, Homo sapiens
aggcttggcccaaagtccgtggtacacacgtgcataactcctacccccacctcgcctgcctgctgtaccaggcgttgattccctcttcctgcgtgttttckgtccaaatccttttctttttctccctcccgtcaagatagtggtttccactccctgctctcgccaggacaccgccttttggactggggctgaattctgccc

SEQ ID NO: 213667 - DNA, 201 bp, Homo sapiens
gtcctgagggaccctggagaagctcagctgctcggcctccttcccacacgagagtagctgcggagggagggcgtgcaagatggaatggttgatagaaacarggtcaaatgaagaaatgtgactggcccctggtgctagggattcggggagtgtgcagagtaagagagtcaggatcagagtgctgtggctgttcatcaggag

SEQ ID NO: 213668 - DNA, 201 bp, Homo sapiens
gggttttggtggtgtgtggacatcgttgggtcattttggggtgtgaaccccaaaactctgtacaaggtgtgccagaaggttcggtagtcctgaggagggtragggctgtgtgtgtggtcttgtggctcttcctaagtctcaatatgtgtcacattagcccagtcagggaaatgatccaagtcaaatatggcccgtccccag

SEQ ID NO: 213669 - DNA, 201 bp, Homo sapiens
ccaacgcgcctggccctaagccagcgatttctattgaatccaagacttactttgtctcaccctccacccaggcaacagtcagccagccgggcatgaagccrgggtctcgggagaaccacaggatgaccagcaggaagaagcagatcagcacgttgatctccgcgaaggacaagggccccagcttccggtactcctcctgca

SEQ ID NO: 213670 - DNA, 201 bp, Homo sapiens
cgggtgcccctcccgccaggccccaccggggctgagcctcttctgtcgcccgcaggagacagaactcaaggtggaagtaccggagtacctggggccgctgmtgtttgtgaaactgcgttaacgtcacttccttcaggttctgcagctggatctccgtgtagggccccggagccggggacgaggtcaggttcccttgttacc

SEQ ID NO: 213671 - DNA, 201 bp, Homo sapiens
ctgcctgctgtaccaggcgttgattccctcttcctgcgtgttttcggtccaaatccttttctttttctccctcccgtcaagatagtggtttccactccctsctctcgccaggacaccgccttttggactggggctgaattctgccccttgaagctctgctccttggagctgggggccccagcggtaggcggagttgattgg

SEQ ID NO: 213672 - DNA, 201 bp, Homo sapiens
tcctgcgtgttttcggtccaaatccttttctttttctccctcccgtcaagatagtggtttccactccctgctctcgccaggacaccgccttttggactggsgctgaattctgccccttgaagctctgctccttggagctgggggccccagcggtaggcggagttgattggagacctgccacccacattccgaccccaagcg

SEQ ID NO: 213673 - DNA, 201 bp, Homo sapiens
atgcgcccccgtcggcctctggccgattctctttgccaagggcccgcgcattgggctcaaagcgcgcggaggccacgggggtggggggctttagggcagtyggtggcacacagtaagcgctcaataaatgttgccgctacccgatctccttggaattgagggcatgctcctgtgcgcccctcattgcacagagctcccttg

SEQ ID NO: 213674 - DNA, 201 bp, Homo sapiens
caaagtggctggagcctgggggaggggcgtgatgctgaagaggcaggggtcacacagaaggacggagtgatgaggctctcctggcaggggcgagaagaggmgctcaccaaaagtcactggccaagccctcctctggccttctaggccgtactgtgggcgacgaccctcgaggcctgttccagaaacaccaggaagaggagc

SEQ ID NO: 213675 - DNA, 201 bp, Homo sapiens
ttgatattagctgtgtacataggtaactggtttctaacaagaggtcataatctcattaaaattcatcagaaagtggcttaagcatttaatcaggcatacarttgatttccaagaagagttttgtggcttatattcccaaaacatccttgtcccagccagcgtgtgggacaatcttttattttacagtgtatatattttatg

SEQ ID NO: 213676 - DNA, 201 bp, Homo sapiens
gcaatgcaaaatggactaaaacagtaagtcccaatgtgcataaattttagtatgtatcatatgatatggatcaggatctccaaaaataagaatgtgtatgrtctaggaaggtctcaaaatggctctttcaaggtgtctatacactgatatccaggctccaaggagatgatagtgtggagccttctctctaaaagtcctaag

SEQ ID NO: 213677 - DNA, 201 bp, Homo sapiens
gaaggaatgaaggaatggtcgggatgaatttcttgcctgtggttcactgatgagaagctggggaaggctgaagcaaactcacacgtgcccctgacctcggytgctccttctgtcagataaactcctgtttgtcctcaaattcctgctccatttccacctccccaaggagacttgcctagtccttgactctgagcccacttc

SEQ ID NO: 213678 - DNA, 201 bp, Homo sapiens
tcccaaagtgccaggattacaggctcaagccaccgcgcccagcctatagtcttaatattccctattttaaaaaatattcatggcggccatactagagcccmcgggatatagcggagagcactgccctcatggtctttagatacacgtctttcatggttctgttgaatgacttccttacaacacattcccaggagcagaatt

SEQ ID NO: 213679 - DNA, 201 bp, Homo sapiens
gagtgtgttatttcattctgtcttcacagcaaccccatataaatagcaagaagtggaggagctaaagcacgcagattaaggttaaggaacttgcctggccrggcacagtggctcacgcctgtaatcccagcactttgggaggccgaggcaggtggatcacctgaggtcaggagttcgagaccagcctggccaacatggtga

SEQ ID NO: 213680 - DNA, 201 bp, Homo sapiens
caagaagagcgaaactctgtctcaaaaagaaaaagaaaaaggaacctgcctggactcacattcggttactaagagttggagcccgagttggagcctgtgcygttgggccccagggcccttgtacttcatgtcacctccatgccacagctcctgttcccagctgtgatgctggaatgtggattggaaccaagtcataaagaa

SEQ ID NO: 213681 - DNA, 201 bp, Homo sapiens
agggccaactgccctttctccacacggccctcccaggcccagtcccacctccccatagccttgcgggggaggcagaacagcatcctttcatccaggcgctkcaggacctgctctatccaggcccttcatgcaccatctcatttactcctcccgtcactctgccaagggggtgtggttagtgttatcacaatttccagttga

SEQ ID NO: 213682 - DNA, 201 bp, Homo sapiens
agctgggactgagttgtcctaacatccctggaccacacagcgcatccacaggcaactggcccgagaccgccaggcctgctcctggctgtgcctcagcaatkccttggtggtcccatgttcttgggcaacttgctgagcccttaggcctaaggaagctcaggcccagtgcctgtctcccagcccccctcttctcctggtgca

SEQ ID NO: 213683 - DNA, 201 bp, Homo sapiens
tttcttctcactcccaactcaaaaacatgctagtccatagaacagaatgccttagcctggcactcagcagcttttcccacaaccgacagctacctctctcmactccccaggatcccttatccctgtgctcaccaagccaggcttccaggagtcctcagtcatgtgcaccattgcctttccttgtgctgctccatcttccca

SEQ ID NO: 213684 - DNA, 201 bp, Homo sapiens
ctgctgtggccagagcaagctggctggtcagtcccccaccccaatatgtctcccaggacgcttacccccagatcccacccaacccaggggaattgaaagawgcagggtggggagaccagagacttgggtccctctggtgggctggagtcaagggggcatggttggtggggttggaaggaccaagagctcagatcccacaac

SEQ ID NO: 213685 - DNA, 201 bp, Homo sapiens
gaaaaataatccaattagatttataaaataaatttgagcacttggtccatggttggtgctttggtcagcaggaggggtacaaagaggagtggcaaagcagyggaggcctcaggggcagaggcatccagggtccacaaatccacgtcacagtcagacctgggtctccaaagcctggtctgagtctggcctggacattgctgc

SEQ ID NO: 213686 - DNA, 201 bp, Homo sapiens
aagttgtaccggtgagccctcctcccctgaccccacgtgagctgctgatgcttccagcacccacgcctgatttccttcctgccctacaggtggggaaactkgaaggatgggttaattctgaatgtggctggggcaaaactatgtgacctccctgtggatgagcaatttctggaagacaagagtgttgactttaaggtttcg

SEQ ID NO: 213687 - DNA, 201 bp, Homo sapiens
caaagcagtggaggcctcaggggcagaggcatccagggtccacaaatccacgtcacagtcagacctgggtctccaaagcctggtctgagtctggcctggayattgctgcctcgtcagggacccacaatatggccatgtgttcctgtgaaatggaagggctcctccccactgtcaggttacttaccatggaggcaaagatgg

SEQ ID NO: 213688 - DNA, 201 bp, Homo sapiens
ggccccaccggggctgagcctcttctgtcgcccgcaggagacagaactcaaggtggaagtaccggagtacctggggccgctgatgtttgtgaaactgcgtwaacgtcacttccttcaggttctgcagctggatctccgtgtagggccccggagccggggacgaggtcaggttcccttgttaccgctgggtggaggtcgacg

SEQ ID NO: 213689 - DNA, 201 bp, Homo sapiens
atggactcaccatccaccagccatccagcccagcaggctgggagtcatgctgccggtctctgttcccctccttccttatacccagtcagtcaccaagtcayccaaatgtctcacatccatctcctcctcttcagtgctccacagttttggaagctcaggagaatgatttcaaccagaaattgaaggtttagatttagggct

SEQ ID NO: 213690 - DNA, 201 bp, Homo sapiens
aggccccaccggggctgagcctcttctgtcgcccgcaggagacagaactcaaggtggaagtaccggagtacctggggccgctgatgtttgtgaaactgcgytaacgtcacttccttcaggttctgcagctggatctccgtgtagggccccggagccggggacgaggtcaggttcccttgttaccgctgggtggaggtcgac

SEQ ID NO: 213691 - DNA, 201 bp, Homo sapiens
atgtttgaaaaagctgctttattgcatccctgctcagaataccagcaccagccaactggcaccccttatcaaaagtctgagtttcagatctccagggtccytcctccaagtttctgaagttttaataattccaggttctgttctttcctgtctactggtagggtagagcatcctttcatacgcttattacccctgtgggtt

SEQ ID NO: 213692 - DNA, 201 bp, Homo sapiens
agtctcagaatgatgctcaaaccctttgccccattctgtcctgaaggctggccgacctcactatcaaaaactaaatgttctgacgctgggcatggtggctyacgcctataatcccagcactttgggagactgaggcgggcagatcacgaggtcaagagatcgagaccatcctggccaatatggtgaaaccctgtctctact

SEQ ID NO: 213693 - DNA, 201 bp, Homo sapiens
tcctgaaatgccctttcatatatgtgcccctccctagtctgtgaagtctgccacgaacagggaccgtatctcaatctcctctgtaatctctgtgcctggcmtaacactagggacataataggaatgttggatggatggatggatagatggatggatggatggatggatggatggatggatggatggatagatgggtggatg

SEQ ID NO: 213694 - DNA, 201 bp, Homo sapiens
ggagccgccgtcggtcctctcgctttctctattttaaaaaccgtttcaaccgctagcgctgttggatctctacctttcaggctttatcacctggggtggartgggtggtgagagggaagggatggggagtcaagacaggagaacgctctcgatttcccgacccacctcccgtcatatctcatgtcacatctaccgggtgtt

SEQ ID NO: 213695 - DNA, 201 bp, Homo sapiens
ccccaccccgatacgtctcctcctctcagaggctccgaggaagggcgtgggcgctggagggagcagggctcagccgggtgcccctcccgccaggccccacyggggctgagcctcttctgtcgcccgcaggagacagaactcaaggtggaagtaccggagtacctggggccgctgatgtttgtgaaactgcgttaacgtcac

SEQ ID NO: 213696 - DNA, 201 bp, Homo sapiens
ctcatccctccctctggctcatttcttccccaggagggaaagaaggaggtaaagaaagttatatttttgtgtgttttccaacatgttcctcacctcctacrctgctacatacttagctaaagaaaaattttgaagtagctaccatgttaagtagccagtagaaggaccaaaagtagtagcaaacaatattgacaaggattg

SEQ ID NO: 213697 - DNA, 201 bp, Homo sapiens
tcacctggggtggagtgggtggtgagagggaagggatggggagtcaagacaggagaacgctctcgatttcccgacccacctcccgtcatatctcatgtcayatctaccgggtgttctacccggtcctgttaactttttttcttccgcgaaagcccaaattcccatcactgctctagctctctcccagatccccaaatccgg

SEQ ID NO: 213698 - DNA, 201 bp, Homo sapiens
tctggctcagtccccccaccccgatacgtctcctcctctcagaggctccgaggaagggcgtgggcgctggagggagcagggctcagccgggtgcccctccygccaggccccaccggggctgagcctcttctgtcgcccgcaggagacagaactcaaggtggaagtaccggagtacctggggccgctgatgtttgtgaaact

SEQ ID NO: 213699 - DNA, 201 bp, Homo sapiens
ccacctgccgtccccgtcccctcagaaccgagtcctggggccacctgctcggcgcggtccctctctctctggctcagtccccccaccccgatacgtctccrcctctcagaggctccgaggaagggcgtgggcgctggagggagcagggctcagccgggtgcccctcccgccaggccccaccggggctgagcctcttctgtc

SEQ ID NO: 213700 - DNA, 201 bp, Homo sapiens
ccacctgccgtccccgtcccctcagaaccgagtcctggggccacctgctcggcgcggtccctctctctctggctcagtccccccaccccgatacgtctccscctctcagaggctccgaggaagggcgtgggcgctggagggagcagggctcagccgggtgcccctcccgccaggccccaccggggctgagcctcttctgtc

SEQ ID NO: 213701 - DNA, 201 bp, Homo sapiens
cacaggagatgccagggtgcagtgggatgagaggtgaggagagcaggtcaggttagcaagggcattgaatgccagaaacatttggacttttattctgcagrcaacagggaggcagcggcttttatgctcaaaaggaatgagtcccagtggctggcacagagaaggcaagtgtgcaaagctggtcgaatgaattccgtggcc

SEQ ID NO: 213702 - DNA, 201 bp, Homo sapiens
ccacctgccgtccccgtcccctcagaaccgagtcctggggccacctgctcggcgcggtccctctctctctggctcagtccccccaccccgatacgtctccycctctcagaggctccgaggaagggcgtgggcgctggagggagcagggctcagccgggtgcccctcccgccaggccccaccggggctgagcctcttctgtc

SEQ ID NO: 213703 - DNA, 201 bp, Homo sapiens
cggagcttatgctctcaaccagcagccgctgttggtacaagaggaataaatgcctagtcttctacctactgtatctactcctaaggatactgagggtgtgrtgtggtcgggagaaaccctggaggccatcagaagagcaggggatattcaagcctaagatgggaagaatgggtagacaccacttcattctgctatctgaag

SEQ ID NO: 213704 - DNA, 201 bp, Homo sapiens
gtcttctaagccacagtaaggaatttgagattattctaaggtcaacaggaaaacattgaagggtttccaacaggggaacgacatgatgccatttacatttwaaaaatatccttttggcttctgtgtgtagaatgtgggacagtggttctcaactaagtgtgattttgtcccccagaggatatatggcaacctctagagaca

SEQ ID NO: 213705 - DNA, 201 bp, Homo sapiens
caatggctacaggtctggatgttccgtggcattcccaagtcacatgacatcgttttgaaactctgtcattcataaatggggcatcccttatgacaacagcrttatagtccgacgggagtaaataaaaacagctgtgttaccatgtcagcaaccttgaggtgcccataggtgaacacgatggcatttggaggggtggccaca

SEQ ID NO: 213706 - DNA, 201 bp, Homo sapiens
cggctcccgcttgttctcgggaccaaatccaaagcccctggcgccaccttcgagagcctccggacctgctgaccccccacacctgggctctgagctccagmtccaagatgctgctcgccctcccttccccgccgctctctttctgcgcgcctttcccctgccttccctttctgtcactctccctggctgagccctctccgc

SEQ ID NO: 213707 - DNA, 201 bp, Homo sapiens
ctaacatccctggaccacacagcgcatccacaggcaactggcccgagaccgccaggcctgctcctggctgtgcctcagcaattccttggtggtcccatgtycttgggcaacttgctgagcccttaggcctaaggaagctcaggcccagtgcctgtctcccagcccccctcttctcctggtgcacattgcactgctcccttg

SEQ ID NO: 213708 - DNA, 201 bp, Homo sapiens
  misc_feature (1)...(201): n = A,T,C or G
ggtgacacacagtaaaggctcaataaatgttcccgctactcgatctccttggaattaaggggatgctcctgagcgcccctcattccacacagctctggtgnctggaaactgcggtcgccggagcggtcgtcggtcctcccggtttctctattttaaaagccatttcaaacctccagcggcctcgccacctctgctgcagac

SEQ ID NO: 213709 - DNA, 201 bp, Homo sapiens
agctccctccagcctcagtcaggttccaggaagagaccagggcaagcctgaagctgcgggctgggcctcaccatcctgggaaaattctgagcctccctcayagctcagcactcaggcaggcacccagcaaaccacagctgtggtttccagagagccaggcctcccaccgcagggacagtaagctgagaagcgctgtagcta

SEQ ID NO: 213710 - DNA, 201 bp, Homo sapiens
ctcatagggcttacattcttacagaggtgggagagacagaccaaataaaaagtaaattgcatagtatgtcagaagatgaaaagtacaatagagaaaagtcmaggaggctgcagagagagagtgtggagcagatgagggagttgtcatctgaactaggctgagaagggaccactgagcaaagattggagcagtgagggagca

SEQ ID NO: 213711 - DNA, 201 bp, Homo sapiens
ctcgcgatctgcccgccttggcctcccaaagtgctgggattacaggcgtgagccaccgcgctcagcctaatctcacatccgtttaaaactaacattaactrttgaataaaaacaattagccaaacttagtatgtcctgaaatagaatgatctccaaataaattcttaattggtggaggggggtaggtagaatcaagcacag

SEQ ID NO: 213712 - DNA, 201 bp, Homo sapiens
caggacgcttacccccagatcccacccaacccaggggaattgaaagaagcagggtggggagaccagagacttgggtccctctggtgggctggagtcaaggrggcatggttggtggggttggaaggaccaagagctcagatcccacaacttgctcaacaactgccttccccagagcgcgtgcgggactcctggaaggaagat

SEQ ID NO: 213713 - DNA, 201 bp, Homo sapiens
ggttccctttcggtgtggatggtttggggactaaaggtctgaagtgagaggcaaacatctcaataccttttgtgccactggaatttcttttactgtgttcmtattaattttttactataaaaagtagtttaaaaatttcttgaccagataacagggtgttctgagattgaactttaatatttctctgcccttgatagcagg

SEQ ID NO: 213714 - DNA, 201 bp, Homo sapiens
gggagactgaggcgggcagatcacgaggtcaagagatcgagaccatcctggccaatatggtgaaaccctgtctctactaaaaatacaaaaattagctgggygtggtggcacgcgcctgtagtcccagttacttgggtggctaaggcacaagaattgcttgaacccaggaggtggaggttgcaatgagccaagattgcacca

SEQ ID NO: 213715 - DNA, 201 bp, Homo sapiens
catctacctacagacttcctgaaaagtaaacattaattgaccttctggtttaagccactgtttgctgggccttctcttatttgccatcaaaagcaaataaragagcatgtatggctaagttaagtgttcagaatcacacatcgagttagtggcagttaccgttccaacccagatcttccaactccatgcccactgctcctt

SEQ ID NO: 213716 - DNA, 201 bp, Homo sapiens
actttgggagactgaggcgggcagatcacgaggtcaagagatcgagaccatcctggccaatatggtgaaaccctgtctctactaaaaatacaaaaattagytgggcgtggtggcacgcgcctgtagtcccagttacttgggtggctaaggcacaagaattgcttgaacccaggaggtggaggttgcaatgagccaagattg

SEQ ID NO: 213717 - DNA, 201 bp, Homo sapiens; identical to SEQ ID NO: 37739

SEQ ID NO: 213718 - DNA, 201 bp, Homo sapiens
tttacccagaggagctcaaacgctggcatgaaagactctgaagtggcatagccagtggaaattaacagctgtgtccactctgggcctcaggtgagggaggrcctagatagcccactgtggcccccagagcgccatcactgcccatacttggagtgtgatcctagctatttggggatggcaggggaagcatctcccagaaaa

SEQ ID NO: 213719 - DNA, 201 bp, Homo sapiens
cttcagggccagggcaagcttggcccatcctcccctcccgaccctctctctctacacctcataggtgacctcatccattcccaccattttcatccccgtcytcactctgctgtctcctaaatctgtatttccagccagctggcctactatgtggatttacatacccatatgccttctggaaatgtccatccagatgtccca

SEQ ID NO: 213720 - DNA, 201 bp, Homo sapiens
aggcaggagcgcaccttcccacctgccgtccccgtcccctcagaaccgagtcctggggccacctgctcggcgcggtccctctctctctggctcagtccccscaccccgatacgtctcctcctctcagaggctccgaggaagggcgtgggcgctggagggagcagggctcagccgggtgcccctcccgccaggccccaccgg

SEQ ID NO: 213721 - DNA, 201 bp, Homo sapiens
aaaactgcagagtaccttagcctttctagacgctgcaagagccttctctcctccctgtccaaatactaatcctgccgggagtgaggcctggaaggaggccmgggaagcgggagaagaggtctgggccaaggagagttctatctgcgaagactccaggctcagagcgctactcacctgtctccagggcgacggcagcggcca

SEQ ID NO: 213722 - DNA, 201 bp, Homo sapiens
tctttcagcactttttcatagctacaaaagattactaataacctgtgtccactacaagagactagtagaatttatggcgttacagcaaatggcagccttascaaagaacaaggaagctctttatgcatggatatggaatgacctcctgttgcactatggaaaaacgagatgcagaataaggcatgctacaatgtgcagaaa

SEQ ID NO: 213723 - DNA, 201 bp, Homo sapiens
cgaattagggtttagaagcatgaccagactaacccagaagtgagttctttgagagaacagcaggggcggcggggggagggggggttccggggaacacatgsctccagcacaggagatgccagggtgcagtgggatgagaggtgaggagagcaggtcaggttagcaagggcattgaatgccagaaacatttggacttttatt

SEQ ID NO: 213724 - DNA, 201 bp, Homo sapiens
cggtcgtcggtcctcccggtttctctattttaaaagccatttcaaacctccagcggcctcgccacctctgctgcagaccttccaagcccttctgaagccgraatgatttctccctaattcactccccctgcttaacacattcgaacggctcccgcttgttctcgggaccaaatccaaagcccctggcgccaccttcgagag

SEQ ID NO: 213725 - DNA, 201 bp, Homo sapiens
cccacttcaccctctcctgcaatccaacttgtgaggcttgtgtgtgcgcgcgcgtgtccttgcgtgtgtgtgtgtgtgcacgcgtgcgtttagatggaggwtggcttcccagccacccaggcttggcccaaagtccgtggtacacacgtgcataactcctacccccacctcgcctgcctgctgtaccaggcgttgattccc

SEQ ID NO: 213726 - DNA, 201 bp, Homo sapiens
actcctggaaggaagatgccttatttgggtaccagtttcttaatggcgccaaccccatggtgctgaggcgctctgctcaccttcctgctcgcctagtgttycctccaggcatggaggaactgcaggcccagctggagaaggagctggaggtatggacatcagagccctgaggaagctcagcagtgaagtggggtggcctag

SEQ ID NO: 213727 - DNA, 201 bp, Homo sapiens
cttggggccaagaggagggagaaactagtgaatatcactttgtaccttttgaattttgaatcacatgaatgtacttcccagtaaacaagcagggccggacrtgatggctcatggctgtaatcccagcacttggggaggccgaggcaggtggatcacttgaggtcaggagttcaagaccagcctggccaacatggtgaaacc

SEQ ID NO: 213728 - DNA, 201 bp, Homo sapiens
ggacctagtgggaggtatttggaccatgggggcggatccctcatgaatggcttagtgccattcctgcagaattgagttctcactcctggttccagcggggratatcgctgctaaaaacagtctggcagctcccctctctcttgctcttttgctctctccctgtgatgcctgctctccttcaccttccatcatgagtagaag

SEQ ID NO: 213729 - DNA, 201 bp, Homo sapiens
ctcctgcagcaccttgagggcagccttctcgtttttcttgctctctagcccgcagccccaggactttttaaaactggagaatgcaaagatgagagaagggyagggcagactggttggctcaggtgctggtcagatggagcctaaatgttctacagcagaatgtagcaaaaagacacataatgctgtcctcgcctgctatgg

SEQ ID NO: 213730 - DNA, 201 bp, Homo sapiens
cattacacccagctaatttttctttttgttttggtatttttagtagaaacgggttttcacagtgttggccaggctggtctcaaactcctgacctcgggtgrtccgcctgcctctgcctcccaaagtgctgggattacaggcataagccaccgcccctgccccaaagtgttgggattacaggcgtgagccacggtgcctggc

SEQ ID NO: 213731 - DNA, 201 bp, Homo sapiens
gggctccacagcgcgctcgtccagggcgcggcagcgctcagcccagcgcttggcacagtcagtgaccacagggaggagaaagtgaaggcaggagcgcaccytcccacctgccgtccccgtcccctcagaaccgagtcctggggccacctgctcggcgcggtccctctctctctggctcagtccccccaccccgatacgtct

SEQ ID NO: 213732 - DNA, 201 bp, Homo sapiens
tgaaaaggattctctgaatgtgccgggtacgtttgaacctctgtgcctcagtcttggttcctctcccttttgccacgtctctggcagataattccacctayggaacactgaaggctgaggtcagaggccacctgccctagaaggccttaccccctcaattcattcgacatgtatttcttgggcacctactatgtgccagag

SEQ ID NO: 213733 - DNA, 201 bp, Homo sapiens
  misc_feature (1)...(201): n = A,T,C or G
cgggtgcccctcccgccaggccccaccggggctgagcctcttctgtcgcccgcaggagacagaactcaaggtggaagtaccggagtatctggggccgctgmtgtttgtgaaactgcgcaaacgtcacttccttcannnnnnnnnnnnnnnnnnnncatcataatctaacctcactcagtctacccacaagttactgtgaat

SEQ ID NO: 213734 - DNA, 201 bp, Homo sapiens
cgctggcatgaaagactctgaagtggcatagccagtggaaattaacagctgtgtccactctgggcctcaggtgagggaggacctagatagcccactgtggyccccagagcgccatcactgcccatacttggagtgtgatcctagctatttggggatggcaggggaagcatctcccagaaaagatgacctgcctgggagaaa

SEQ ID NO: 213735 - DNA, 201 bp, Homo sapiens
acttcaccctctcctgcaatccaacttgtgaggcttgtgtgtgcgcgcgcgtgtccttgcgtgtgtgtgtgtgtgcacgcgtgcgtttagatggaggttgkcttcccagccacccaggcttggcccaaagtccgtggtacacacgtgcataactcctacccccacctcgcctgcctgctgtaccaggcgttgattccctct

SEQ ID NO: 213736 - DNA, 201 bp, Homo sapiens
agcactgcaacatcaccgtacagaacacagaagctcttggggacgtgattctgaaaaggattctctgaatgtgccgggtacgtttgaacctctgtgcctcwgtcttggttcctctcccttttgccacgtctctggcagataattccacctacggaacactgaaggctgaggtcagaggccacctgccctagaaggccttac

SEQ ID NO: 213737 - DNA, 201 bp, Homo sapiens
tggcaggcacctgtaatcccagctactcgggaggctgaggcaggagaatctcttgaacccgggaggtggaggttgcagtgagccaagatcacaccattgcrctccagcctgggtgacaagagtgaaactctgtctcaaaaaaagtgtgtgagtgtgtaaaatatccagaaaaatatttgagaaattaacagaggtcatctc

SEQ ID NO: 213738 - DNA, 201 bp, Homo sapiens
gaatgatttcaaccagaaattgaaggtttagatttagggctttgggctgagaagagattgtccagggagagaatgaagtgtaaaaagaggagaggccaagkacagagcctgggcagacactcctgtttcagggagaacagagaagtcagcaacgaaggctgagcaggaatagtctgagtccgaagtaaagctggagactgt

SEQ ID NO: 213739 - DNA, 201 bp, Homo sapiens; identical to SEQ ID NO: 37750

SEQ ID NO: 213740 - DNA, 201 bp, Homo sapiens
aaagaaagttatatttttgtgtgttttccaacatgttcctcacctcctacgctgctacatacttagctaaagaaaaattttgaagtagctaccatgttaartagccagtagaaggaccaaaagtagtagcaaacaatattgacaaggattggaaagaaagatttccctcagacaaatcaaagcagagattattgtgatcaa

SEQ ID NO: 213741 - DNA, 201 bp, Homo sapiens
catctgttaaatgtgtgccatgacagacgatggacagtagagggcagacaatccccgcacagcagcaaaggctggacttcggaggagttggaaaccacagrcgaatgccaagcaggacagaagcctgaagccaggcctgaagcttctgaaagagacagggcacacgtacctggtcctcctaggcatcgcagcactctctgt

SEQ ID NO: 213742 - DNA, 201 bp, Homo sapiens
tgaggccgatggagcgagactgcggaaaaacagcactgcaacatcaccgtacagaacacagaagctcttggggacgtgattctgaaaaggattctctgaaygtgccgggtacgtttgaacctctgtgcctcagtcttggttcctctcccttttgccacgtctctggcagataattccacctacggaacactgaaggctgag

SEQ ID NO: 213743 - DNA, 201 bp, Homo sapiens
agggatggctctgctggtgtaagacagggcctctctgctgccacacccttggcttagtaaagtttgtgctctaccaagcacctctctgctgccaactgtcrtcctagagaccctggggctcagccaggggcttcaggtttccagcataaggggtgaccttggtattactagtggcccaggagccagagcctgcatttggtg

SEQ ID NO: 213744 - DNA, 201 bp, Homo sapiens
gcgactccatggtgaggggacggggcacggaaggtggaaaggcgcgctccctcctcccttttttcctccctatggtgggcagttggtgacacacagtaaasgctcaataaatgttcccgctactcgatctccttggaattaaggggatgctcctgagcgcccctcattccacacagctctggtgcctggaaactgcggtcg

SEQ ID NO: 213745 - DNA, 201 bp, Homo sapiens
ttgctactgcctctcttccagagcagcacaagaaggaaataaaatggacttgcgggggaaagaagatgcttgtctctcatgtctgtctcttacaggggggcttctgaagattcccacagcctctctggagttgttgccccactttggggtctttgtccgagtaacttcaagtagattggcccacgggcaggggttgtttgc

SEQ ID NO: 213746 - DNA, 201 bp, Homo sapiens
ccaggtagcccagccctggttctgtaagcggccagataggcccacccaggctcttggcagcaggggaggagctggtggctctgaaaacagcactggctatsaccacaggggccaagaggactttgtcccctggctcctgctctttctccagcctcaggactccctcacctcctccgtccattcccttgccttcaggagtcc

SEQ ID NO: 213747 - DNA, 201 bp, Homo sapiens
atgaatagatgaatagactaatccaggagcaagttcttttgagagaacagcaggtggggttctggggaacacatggctccagcccaaaaagaaactggagmcgaattagggtttagaagcatgaccagactaacccagaagtgagttctttgagagaacagcaggggcggcggggggagggggggttccggggaacacatg

SEQ ID NO: 213748 - DNA, 201 bp, Homo sapiens
taatatcgtagagcagagaacacacactgagctctcagtctcccccaggcactgtttgcagcactctacatgtactaactcatgcactcctcacacctagrtgaagtaggtcaggacactgaggattgagaagcttaggtgacttacccagcattcctggctaggaagaagcagagccaggatccaaacccaggctagctg

SEQ ID NO: 213749 - DNA, 201 bp, Homo sapiens
gggttttcacagtgttggccaggctggtctcaaactcctgacctcgggtgatccgcctgcctctgcctcccaaagtgctgggattacaggcataagccacygcccctgccccaaagtgttgggattacaggcgtgagccacggtgcctggctggtaaacattatttcgtgaaacttttttgtttggaatcgcagtgtaaaa

SEQ ID NO: 213750 - DNA, 201 bp, Homo sapiens
tgtttaataggaaggaaggaaggaaagaggaaagggtaagaaaggaggtgggtttggacaatttattttattatttatttatttatttttgagacagagartcggtctatcacccaggctggagtacggtgcccagcgtctgcctcccgggttcaagcgattctcttgcctcagcctcccgagtagctgagattacaggtg

SEQ ID NO: 213751 - DNA, 201 bp, Homo sapiens
atggcttagtgccattcctgcagaattgagttctcactcctggttccagcgggggatatcgctgctaaaaacagtctggcagctcccctctctcttgctcytttgctctctccctgtgatgcctgctctccttcaccttccatcatgagtagaagtcccctgaagccctcgccagaagcagaggctggtaccatgcttctt

SEQ ID NO: 213752 - DNA, 201 bp, Homo sapiens
tcaataaatgttcccgctactcgatctccttggaattaaggggatgctcctgagcgcccctcattccacacagctctggtgcctggaaactgcggtcgccsgagcggtcgtcggtcctcccggtttctctattttaaaagccatttcaaacctccagcggcctcgccacctctgctgcagaccttccaagcccttctgaag

SEQ ID NO: 213753 - DNA, 201 bp, Homo sapiens
ctggtcaaccttttctatttctctatagcgcctactaaaatgggacttgatattatttattcattgcttaattgtttatgatctatgttccccacgggagrgcaaggactttgacttgtttactcctatatccccaaacctagaacagcgtctggcacagagccagcatgcagtaagtgttggtggaaggaataaatgaag

SEQ ID NO: 213754 - DNA, 201 bp, Homo sapiens
gatggctgccgggggcactgcgtgcaagggctccatctgcttccccatccacacggacagccccgaggcctgggaagcaccaggagggcagtcatctcagygctcccagcttgcagttccttcagggccagggcaagcttggcccatcctcccctcccgaccctctctctctacacctcataggtgacctcatccattccc

SEQ ID NO: 213755 - DNA, 201 bp, Homo sapiens
ttgtcttagctctcaaccaggggatccgattcccatttaaactatctaggacgaagcgagtgaaaaccagagccctgtgtgggggatgcttgaggcagagygggtacagcagcctgcatcctgatccctcggctacctggcctccctcacagagataatggcaaggcttgggaaagatgggtccagcagcccactgagggg

SEQ ID NO: 213756 - DNA, 201 bp, Homo sapiens
gtcctgatgactgggcgatcagaacaggagacttaccttcctcagtctggctgcggaagttaaacttgggcttctgtgaaggcacaatgaatagcagggtrgccacaaagatggccacagtggcatcggagacatacctaggtggggaaaagcacagctcatctgcgacagagacagtcactcaacaaacccatcacaact

SEQ ID NO: 213757 - DNA, 201 bp, Homo sapiens
gcggagttgattggagacctgccacccacattccgaccccaagcgacctccgagagggcggggtctcaggctgggttatttagctcgtccacccttcttcwccaccagaaggagcgaaacatctttgagcaagatgggtctctaccgcatccgcgtgtccactggggcctcgctctatgccggttccaacaaccaggtgca

SEQ ID NO: 213758 - DNA, 201 bp, Homo sapiens
caacctctcacaggctgggaatcttgttctggattaattagtttcatttttgttgttgttgttgttttgagatggagtctcgcacagttgcttgggctggygtgcaatggcgtgatctcgctcgctgcaacctccgcctcccggattcatgcgattctcctgcctcagcctcctgagtagctgggattacaggtgcacacc

SEQ ID NO: 213759 - DNA, 201 bp, Homo sapiens
ggttggcttcccagccacccaggcttggcccaaagtccgtggtacacacgtgcataactcctacccccacctcgcctgcctgctgtaccaggcgttgattycctcttcctgcgtgttttcggtccaaatccttttctttttctccctcccgtcaagatagtggtttccactccctgctctcgccaggacaccgccttttgg

SEQ ID NO: 213760 - DNA, 201 bp, Homo sapiens
ggtgcgagagaagctggggggatgcgcgtgtggagaagagggcgcaggatgggggtgctggaacctggagcgcagggctctttgggagtgtcgaaggggckgtggctgcagctggcacaaagtggctggagcctgggggaggggcgtgatgctgaagaggcaggggtcacacagaaggacggagtgatgaggctctcctgg

SEQ ID NO: 213761 - DNA, 201 bp, Homo sapiens
ggttcccttgttaccgctgggtggaggtcgacggcgtcctgagcctgcctgaaggcaccagtaagcgcggggctgggggtgtcaggaggcctctggggtgsgagagaagctggggggatgcgcgtgtggagaagagggcgcaggatgggggtgctggaacctggagcgcagggctctttgggagtgtcgaaggggcggtgg

SEQ ID NO: 213762 - DNA, 201 bp, Homo sapiens
ttttctcccaattagtgccccctcttgagttcctggccatctgttaaatgtgtgccatgacagacgatggacagtagagggcagacaatccccgcacagcrgcaaaggctggacttcggaggagttggaaaccacaggcgaatgccaagcaggacagaagcctgaagccaggcctgaagcttctgaaagagacagggcaca

SEQ ID NO: 213763 - DNA, 201 bp, Homo sapiens
tcaagcctaagatgggaagaatgggtagacaccacttcattctgctatctgaagggctgtctttgtcagaggcagcctcaagagcagaactagaatcaaayggtgaaaagctaggaggatttgggctcagaaaaaaaaaaaagaaagactttaaaaaatgtattataaaatctggccgggcgtggtggctcacgcctgtaa

SEQ ID NO: 213764 - DNA, 201 bp, Homo sapiens
  misc_feature (1)...(201): n = A,T,C or G
gtgttgggattacaggcgtgagccacggtgcctggctggtaaacattatttcgtgaaacttttttgtttggaatcgcagtgtaaaatatatttctgggagncatggtcaaaagagttggagaaaagtgcgtctctaagttttctcccaattagtgccccctcttgagttcctggccatctgttaaatgtgtgccatgacag

SEQ ID NO: 213765 - DNA, 201 bp, Homo sapiens
gcagggcaggcacaaggggcatagcatccccagaacatgatgaagggcacctttgaaaagctagagaggctttggatagagctggaattgtctggtgacaygtgctcattcatactacatggtcattatactacgtggtcttagaatatgtcaaattctcaccttttcatccacccacaattcactgagttcccgttcagt

SEQ ID NO: 213766 - DNA, 201 bp, Homo sapiens
  misc_feature (1)...(201): n = A,T,C or G
cataagccaccgcccctgccccaaagtgttgggattacaggcgtgagccacggtgcctggctggtaaacattatttcgtgaaacttttttgtttggaatcncagtgtaaaatatatttctgggagtcatggtcaaaagagttggagaaaagtgcgtctctaagttttctcccaattagtgccccctcttgagttcctggcc

SEQ ID NO: 213767 - DNA, 201 bp, Homo sapiens
ttatactacgtggtcttagaatatgtcaaattctcaccttttcatccacccacaattcactgagttcccgttcagtgccagcttctgtgatgggtaatagyggtgggaaacatgcagaactggatgatcaagtttagaatgagatcgtgcctactgtcggagcagtccaggaggggtgaccccaggatcccttcttccttt

SEQ ID NO: 213768 - DNA, 201 bp, Homo sapiens
tatactacgtggtcttagaatatgtcaaattctcaccttttcatccacccacaattcactgagttcccgttcagtgccagcttctgtgatgggtaatagtrgtgggaaacatgcagaactggatgatcaagtttagaatgagatcgtgcctactgtcggagcagtccaggaggggtgaccccaggatcccttcttcctttg

SEQ ID NO: 213769 - DNA, 201 bp, Homo sapiens
catggtctttagatacacgtctttcatggttctgttgaatgacttccttacaacacattcccaggagcagaattaccacattaaaaggtatgaacattttyatagctctggaagcgtattgcccaatttctcccctaaaaaggtggtgttaatttacactgccactggcagtgtgtgtaagctggtttcagcacagcttca

SEQ ID NO: 213770 - DNA, 201 bp, Homo sapiens
aggcttttgctaagtcaattcaacaagtgtctataggtaaggacactttacaggaaaagagaatgactagataatcattgttagactggatacaagaaaaagaaagaaaagttctagttaaggattattagatttattaaaagacagttaaaggcccttggattccttccctccagggttgatattagctgtgtacatagg

SEQ ID NO: 213771 - DNA, 201 bp, Homo sapiens
tgttaatttacactgccactggcagtgtgtgtaagctggtttcagcacagcttcaacagcatgagacattataattttgttaatgtttgctaatttcatargtgtgaaatgaatggcacatcagggggactttaatttgcgttccctggtgatcgtgagggtgagcctgtttggaggtgctgatgtgcacagtctgcctag

SEQ ID NO: 213772 - DNA, 201 bp, Homo sapiens
ataatggcaaggcttgggaaagatgggtccagcagcccactgaggggttcccttcatttctgagcctaccctccagctgcccatgaccatctctgcatctrggcttggaggaagaggtggcccattggctgggttttggtggtgtgtggacatcgttgggtcattttggggtgtgaaccccaaaactctgtacaaggtgtg

SEQ ID NO: 213773 - DNA, 201 bp, Homo sapiens
cacacctctgcctgcctcccgccgactgctgttcttactgtccctctaagcctgtctgtctcagtgtcttagcctctgattcctctgagtttctctggttyctaactggccaggtgtggagctggttcatggaggtcctagccaagccctgacaagctgcagtctagaggcggggcgcagggttctgggcacagggctcca

SEQ ID NO: 213774 - DNA, 201 bp, Homo sapiens
ctgtggctgtcatgttggagtctcagaatgatgctcaaaccctttgccccattctgtcctgaaggctggccgacctcactatcaaaaactaaatgttctgrcgctgggcatggtggctcacgcctataatcccagcactttgggagactgaggcgggcagatcacgaggtcaagagatcgagaccatcctggccaatatgg

SEQ ID NO: 213775 - DNA, 201 bp, Homo sapiens
tcagctgggctgacctgctcgattggatccagtgattctgagatcccagaagtagctgggagtgagcaggctgtccctcagtgactccctcttaggaagtrttccagaagccccaccctcaggacaactcaccagacagtgttgtgtgtcctggccgttgggggtgtgtggtctgaaagagccagaaagtggtgtccccaa

SEQ ID NO: 213776 - DNA, 201 bp, Homo sapiens
gtgtctgtatggccagccgggaatcaagaaccattcaccctccaccagcaagggtggggctgccctgagctttcaggcagctgttttatggaattattaaytttaatgtacagatggttttattttctgctcattttcacatattctaagaacccttaaatgttatactatatagtcttttttttttttttttttttttga

SEQ ID NO: 213777 - DNA, 201 bp, Homo sapiens
caaccagaaattgaaggtttagatttagggctttgggctgagaagagattgtccagggagagaatgaagtgtaaaaagaggagaggccaaggacagagccygggcagacactcctgtttcagggagaacagagaagtcagcaacgaaggctgagcaggaatagtctgagtccgaagtaaagctggagactgtgctgagctg

SEQ ID NO: 213778 - DNA, 201 bp, Homo sapiens
gcaaaggccatttttatctgctacacgtcaggcaaaacctgcgccaactgccaaagcctccacctcaaatctagcaaataagagagaggacggtatggatkacgttatatttaaaacaagcccacacaatgcctgtaatttttcattctgactccgtaattataactcaagaccagtcagatcatagttatccccacaccg

SEQ ID NO: 213779 - DNA, 201 bp, Homo sapiens; identical to SEQ ID NO: 37740

SEQ ID NO: 213780 - DNA, 201 bp, Homo sapiens
gcagtcagttctagaccctgagcatctcccgcgtccctgcccaatatccgtcccgcccccgaccgcccgcgtcctcttgaacctgcggagccctgctcccygcactccacgcccttgctccgagcttccgagaaagcggggcaaagggagccaggaagagagaaaatgcgcacggagcaggtggccccgcgactccatggt

SEQ ID NO: 213781 - DNA, 201 bp, Homo sapiens
acagggcagcatgatgtacagcggattgaggccgatggagcgagactgcggaaaaacagcactgcaacatcaccgtacagaacacagaagctcttggggaygtgattctgaaaaggattctctgaatgtgccgggtacgtttgaacctctgtgcctcagtcttggttcctctcccttttgccacgtctctggcagataatt

SEQ ID NO: 213782 - DNA, 201 bp, Homo sapiens; identical to SEQ ID NO: 37748

SEQ ID NO: 213783 - DNA, 201 bp, Homo sapiens
gtgagagcaaggggaggctgggtgagagggaggtgtcctggtctagtggaagccaaggggcttatgggctgcactgcactgcactggaccggctcaaggtsggtgcctgtggctgtcatgttggagtctcagaatgatgctcaaaccctttgccccattctgtcctgaaggctggccgacctcactatcaaaaactaaatg

SEQ ID NO: 213784 - DNA, 201 bp, Homo sapiens
gccagccaaggcgtctcggcaaatgttgacccagacaacaggggaccaaggagttgaaggaggctcactggagaggtgggacagggggccagtcgattaawacagaaccaagtgatgaagggcgtaggttggcctgtggtgcactgtgggtggcaagccaggtgtcgtcctgaagttggcaactcagattcctcatccttt

SEQ ID NO: 213785 - DNA, 201 bp, Homo sapiens
cgttaacgtcacttccttcaggttctgcagctggatctccgtgtagggccccggagccggggacgaggtcaggttcccttgttaccgctgggtggaggtcracggcgtcctgagcctgcctgaaggcaccagtaagcgcggggctgggggtgtcaggaggcctctggggtgcgagagaagctggggggatgcgcgtgtgga

SEQ ID NO: 213786 - DNA, 201 bp, Homo sapiens
aggtaatctgcctgcctcagcctcccaaagtgctgggattacaggtgtgagccaccacgcctggcccattttttcttttgagtatggaagtttaaatatamatgctgattaaccaatagaactgactgtgggagttaggcttcgcccttggctccaaccctctaccttctaaagtcagcttcctgtctaaggctaggtctc

SEQ ID NO: 213787 - DNA, 201 bp, Homo sapiens
tgcgttaacgtcacttccttcaggttctgcagctggatctccgtgtagggccccggagccggggacgaggtcaggttcccttgttaccgctgggtggaggkcgacggcgtcctgagcctgcctgaaggcaccagtaagcgcggggctgggggtgtcaggaggcctctggggtgcgagagaagctggggggatgcgcgtgtg

SEQ ID NO: 213788 - DNA, 201 bp, Homo sapiens
caggggcctggaagcagaggtgagcaccgtccttggaccagaccttgggcaggtctatcccagagcatctgcaccctcgaagattcccaaatgctgctctmccctggacctgaccagggtcccagggtcagatgggccaagccctggttgtccggcacacttgtcacagacaggctgctattgcccaaaggggcctaaatt

SEQ ID NO: 213789 - DNA, 201 bp, Homo sapiens
ctggaagcagaggtgagcaccgtccttggaccagaccttgggcaggtctatcccagagcatctgcaccctcgaagattcccaaatgctgctctaccctggmcctgaccagggtcccagggtcagatgggccaagccctggttgtccggcacacttgtcacagacaggctgctattgcccaaaggggcctaaattcagagaa

SEQ ID NO: 213790 - DNA, 201 bp, Homo sapiens
ccttggaccagaccttgggcaggtctatcccagagcatctgcaccctcgaagattcccaaatgctgctctaccctggacctgaccagggtcccagggtcasatgggccaagccctggttgtccggcacacttgtcacagacaggctgctattgcccaaaggggcctaaattcagagaagaagaagaagaagaaaaacatcc

SEQ ID NO: 213791 - DNA, 201 bp, Homo sapiens
gagctgggactgagttgtcctaacatccctggaccacacagcgcatccacaggcaactggcccgagaccgccaggcctgctcctggctgtgcctcagcaaytccttggtggtcccatgttcttgggcaacttgctgagcccttaggcctaaggaagctcaggcccagtgcctgtctcccagcccccctcttctcctggtgc

SEQ ID NO: 213792 - DNA, 201 bp, Homo sapiens; identical to SEQ ID NO: 37754

SEQ ID NO: 213793 - DNA, 201 bp, Homo sapiens
ggctgggcacagtggcttgcacctgtaattccagcactttgggaggtcgaggcaggaggatcacctgagcccaatagttggagaccagcctaggcaacgtkgtgaaaccctgtctctacaaaaatacaaaaattagcacctgtaacttttggtgtagtggcatgcacctgtagtcccagctatttgggaggctgaggtggg

SEQ ID NO: 213794 - DNA, 201 bp, Homo sapiens
ttggtggtcccatgttcttgggcaacttgctgagcccttaggcctaaggaagctcaggcccagtgcctgtctcccagcccccctcttctcctggtgcacaytgcactgctcccttgcctcagccacaccagaggacgagcccactccctgcacagggccttgttctcacgtccccacgtggatggttccctcttccagcca

SEQ ID NO: 213795 - DNA, 201 bp, Homo sapiens
aaaatacccagcctctctgattatctgtttcctcttctgtgcaactgaggctcgttcaactaggtataaaaattataaggctgggcacagtggcttgcacytgtaattccagcactttgggaggtcgaggcaggaggatcacctgagcccaatagttggagaccagcctaggcaacgtggtgaaaccctgtctctacaaaa

SEQ ID NO: 213796 - DNA, 201 bp, Homo sapiens
cttaggcctaaggaagctcaggcccagtgcctgtctcccagcccccctcttctcctggtgcacattgcactgctcccttgcctcagccacaccagaggacragcccactccctgcacagggccttgttctcacgtccccacgtggatggttccctcttccagccaatggtgcatcttacacatgcttctgttttaaccctc

SEQ ID NO: 213797 - DNA, 201 bp, Homo sapiens
aagaaaaaaacaagaatctagaaaactcccatttgtctttaaaactctgcctagaatagatccgatgaagactttgctgattcacacagaccaagctaacyccatttactaggctgtatccttgaggacagggacagagcttgattcttctctgtgaccccatctctcagcacagaagaagcgtcaaccaagggtcagtaa

SEQ ID NO: 213798 - DNA, 201 bp, Homo sapiens
aaactcccatttgtctttaaaactctgcctagaatagatccgatgaagactttgctgattcacacagaccaagctaaccccatttactaggctgtatcctygaggacagggacagagcttgattcttctctgtgaccccatctctcagcacagaagaagcgtcaaccaagggtcagtaaatgtagaactgaattgctcttt

SEQ ID NO: 213799 - DNA, 201 bp, Homo sapiens
cgcacacacatactgcacactgcttcagccccggattaagggcatcatgacctgaaccagccaagtgcccatgttattgggctgaaaccaccccaggctgraatgccagggatgtttgctaaggaagaaaacactgaaatcctaactttaaaaaaagaaacacagtgaataggtgttctatttatatgaaaatcaggtctg

SEQ ID NO: 213800 - DNA, 201 bp, Homo sapiens
gtcaagggggcatggttggtggggttggaaggaccaagagctcagatcccacaacttgctcaacaactgccttccccagagcgcgtgcgggactcctggarggaagatgccttatttgggtaccagtttcttaatggcgccaaccccatggtgctgaggcgctctgctcaccttcctgctcgcctagtgttccctccaggc

SEQ ID NO: 213801 - DNA, 201 bp, Homo sapiens
gcacacacatactgcacactgcttcagccccggattaagggcatcatgacctgaaccagccaagtgcccatgttattgggctgaaaccaccccaggctgamatgccagggatgtttgctaaggaagaaaacactgaaatcctaactttaaaaaaagaaacacagtgaataggtgttctatttatatgaaaatcaggtctgt

SEQ ID NO: 213802 - DNA, 201 bp, Homo sapiens; identical to SEQ ID NO: 37744

SEQ ID NO: 213803 - DNA, 201 bp, Homo sapiens; identical to SEQ ID NO: 37753

SEQ ID NO: 213804 - DNA, 201 bp, Homo sapiens; identical to SEQ ID NO: 37755

SEQ ID NO: 213805 - DNA, 201 bp, Homo sapiens; identical to SEQ ID NO: 37756

SEQ ID NO: 213806 - DNA, 201 bp, Homo sapiens
cctctgccaacgatgaagaatcactggtcccaaaatgtcaatagtgccaaggctgagaaacactgacagttctagcagcttggaaagctagagcatggtcyattgggacagcgcaccactttaaggaacagtcatggaagagggttacctttaaaagtaaagagaaatcatcaaagaaaacagcaacacaaacgagacaca

SEQ ID NO: 213807 - DNA, 201 bp, Homo sapiens
tctgccaacgatgaagaatcactggtcccaaaatgtcaatagtgccaaggctgagaaacactgacagttctagcagcttggaaagctagagcatggtccaytgggacagcgcaccactttaaggaacagtcatggaagagggttacctttaaaagtaaagagaaatcatcaaagaaaacagcaacacaaacgagacacaat

SEQ ID NO: 213808 - DNA, 201 bp, Homo sapiens
gcatggtccattgggacagcgcaccactttaaggaacagtcatggaagagggttacctttaaaagtaaagagaaatcatcaaagaaaacagcaacacaaaygagacacaatacctaccactcatgggccactatgtagaaattttaacagtgatctctaaggtaggctgtaataactgtggcttcccctattttaataatg

SEQ ID NO: 213809 - DNA, 201 bp, Homo sapiens
taggccaggccccacccgcagcagacacaccacagccagggcaggttcaaaaacagttttatttcattattatccaagtacctttgaaaagataattaattgtacaagtgtcatcgcatgaaaaacagactcgggcagcccctgctggcctagcctgagaaatgtacatatttacacgggccctcagaaaggaggacccag

SEQ ID NO: 213810 - DNA, 201 bp, Homo sapiens
ctaggccaggccccacccgcagcagacacaccacagccagggcaggttcaaaaacagttttatttcattattatccaagtacctttgaaaagataattaattgtacaagtgtcatcgcatgaaaaacagactcgggcagcccctgctggcctagcctgagaaatgtacatatttacacgggccctcagaaaggaggaccca

SEQ ID NO: 213811 - DNA, 201 bp, Homo sapiens
cctaggccaggccccacccgcagcagacacaccacagccagggcaggttcaaaaacagttttatttcattattatccaagtacctttgaaaagataattaattgtacaagtgtcatcgcatgaaaaacagactcgggcagcccctgctggcctagcctgagaaatgtacatatttacacgggccctcagaaaggaggaccc

SEQ ID NO: 213812 - DNA, 201 bp, Homo sapiens
acctaggccaggccccacccgcagcagacacaccacagccagggcaggttcaaaaacagttttatttcattattatccaagtacctttgaaaagataattaattgtacaagtgtcatcgcatgaaaaacagactcgggcagcccctgctggcctagcctgagaaatgtacatatttacacgggccctcagaaaggaggacc

SEQ ID NO: 213813 - DNA, 201 bp, Homo sapiens
cacgcaggcctgggtggcccgctggggaatgagcagaaaccctgcccagggcaccctgacactgttggagaggagctttactgcagggaggccctcaacasacacccacttagtgtcaccggcggccgccaggcttcaggccccactccactcccagctctctccctcctccaatggctatgcctgtcccccaggtgcacc

SEQ ID NO: 213814 - DNA, 201 bp, Homo sapiens
tgaggagtttggtgtgacggagtaccctacgctcaagttcttccgcaatgggaaccgcacgcacccggaggagtacacaggtgaggggcaggccggtcattgggggggcggtggccaggccgaggctgagggggactccctgcaggaccacgggacgctgagggcattgccgagtggctgcgacggcgggtggggcccagt

SEQ ID NO: 213815 - DNA, 201 bp, Homo sapiens
atgctggacagtcagcgtctcctttgatggagacaggagaaggctctcgggcagcttcgagtctgatgccacgggaccctctcctgccacagctgcttctragcgtggtacccgagctcaagccccgggacggcggctctacgatgggacctggcttgggacgccagggctggggtgggcaggaccgggaggaccctcagg

SEQ ID NO: 213816 - DNA, 201 bp, Homo sapiens
ggcccgaacaacccaccctgcgcaggctccagtttgcagggtagacaagacaccgagtcccctcctaggcctgccttggtggtacccgatactgcagcgcrccccacattcatgatcccggcaccaaccccctgagttccctggaccgcactttggggagcttccgatcaggggtgctgggatcccaccacctcatcccct

SEQ ID NO: 213817 - DNA, 201 bp, Homo sapiens
cgatcaggggtgctgggatcccaccacctcatcccctctggtgggatgacatctcgtcccgagagtctgtccttcagtctcttggcatgaattccccaccratagcgtggacactggctctggggcgtgcgtggcaactcggtctgcacctcagggaggctgagggccccccggcgccacaactgaggccatcctggggca

SEQ ID NO: 213818 - DNA, 201 bp, Homo sapiens
acagaaatttccacttcacctctgattggtctcgggccaatccttcatagggtgtagccaattggaggcctctaaagggcacaagggctgtggtcaggttyctttgcttaataaaaatcctaattacagaggctctggagctacttgctccagcccactcccactctgtgaattgccttccgttaaatctgtgctttcctt

SEQ ID NO: 213819 - DNA, 201 bp, Homo sapiens; identical to SEQ ID NO: 37758

SEQ ID NO: 213820 - DNA, 201 bp, Homo sapiens; identical to SEQ ID NO: 37759

SEQ ID NO: 213821 - DNA, 201 bp, Homo sapiens; identical to SEQ ID NO: 37760

SEQ ID NO: 213822 - DNA, 201 bp, Homo sapiens
gccgaggctgagggggactccctgcaggaccacgggacgctgagggcattgccgagtggctgcgacggcgggtggggcccagtgccatgcggctggaggaygaggcggccgcccaggcgctgatcggtggccgggacctagtggtcattggcttcttccaggtgagccactgggcatggggggccgggccatgagggcagt

SEQ ID NO: 213823 - DNA, 201 bp, Homo sapiens
cccagaagaccaaggagggcgcagtgaggagggctgtgggctggacgtcccggatgagagaagggcacagtgaggagggctgtgggctggacatccaggatgacaagaggacacagcgaggagggctgtgggctggacgtccaggacgacacttctacatctgcacggctttcagaaccacgtagctttccgaccgtgcag

SEQ ID NO: 213824 - DNA, 201 bp, Homo sapiens
caggtgagccactgggcatggggggccgggccatgagggcagtgactgtgggtgggaccgggtggcctcacagggccaggcccctcaggacctgcaggacraggacgtggccaccttcttggccttggcccaggacgccctggacatgacctttggcctcacagaccggccgcggctctttcagcagtttggcctcaccaa

SEQ ID NO: 213825 - DNA, 201 bp, Homo sapiens
agcccagaagaccaaggagggcgcagtgaggagggctgtgggctggacgtcccggatgagagaagggcacagtgaggagggctgtgggctggacatccaggatgacaagaggacacagcgaggagggctgtgggctggacgtccaggacgacacttctacatctgcacggctttcagaaccacgtagctttccgaccgtgc

SEQ ID NO: 213826 - DNA, 201 bp, Homo sapiens
cgtggtgcacccactgcaaggagatggcccctgcctgggaggcattggctgagaagtaccaagaccacgaggacatcatcattgctgagctggatgccacrgccaacgagctggatgccttcgctgtgcacggcttccctactctcaagtacttcccagcagggccaggtcggaaggtatggcggacaggtggctggggag

SEQ ID NO: 213827 - DNA, 201 bp, Homo sapiens
gctacggagcccagaagaccaaggagggcgcagtgaggagggctgtgggctggacgtcccggatgagagaagggcacagtgaggagggctgtgggctggacatccaggatgacaagaggacacagcgaggagggctgtgggctggacgtccaggacgacacttctacatctgcacggctttcagaaccacgtagctttccg

SEQ ID NO: 213828 - DNA, 201 bp, Homo sapiens; identical to SEQ ID NO: 37757

SEQ ID NO: 213829 - DNA, 201 bp, Homo sapiens
tccccctgcctcttctcaggtgattgaatacaaaagcaccagggacctggagactttctccaagttcctggacaacgggggcgtgctgcccacggaggagyccccggaggagccagcagccccgttcccggtgggtgtccctaagccagggctccaggcctctgcacaaatcctctttacacagggctggcaggggcgggg

SEQ ID NO: 213830 - DNA, 201 bp, Homo sapiens
ggccctcagaaaggaggacccaggactgcacagccggcggctggaggcaggtgcagtgctccgtcgccgattcacacagtggcaggcaagagacaagctgkgttgaaggcactcggtggcgcgtacaattgacagaggccctgcaggcctctgcatccgggcctgggccccagccagacctgggtacgtgggcaaatccca

SEQ ID NO: 213831 - DNA, 201 bp, Homo sapiens
  misc_feature (1)...(201): n = A,T,C or G
gacctcctgaaccctgcagaggacccctggcaaagcgcctgtcctggtttcccccagccctatctcctgagccaggagataccccctgattgggatcagcngccagttaagaccctcgtgggcaagaattttgagcaggtggcttttgacgaaaccaagaatgtgtttgtcaagttctgtgagtgttgagggaggcagggg

SEQ ID NO: 213832 - DNA, 201 bp, Homo sapiens
gaagaccaaggagggcgcagtgaggagggctgtgggctggacgtcccggatgagagaagggcacagtgaggagggctgtgggctggacatccaggatgacaagaggacacagcgaggagggctgtgggctggacgtccaggacgacacttctacatctgcacggctttcagaaccacgtagctttccgaccgtgcagagcc

SEQ ID NO: 213833 - DNA, 201 bp, Homo sapiens
ctcccaaacttgaagaggacctccctgtcaggccctgcagaggatctcccccccacctgcccccggccccgcacaggacctcccccccaccgccccccccmcacagaacctccccctgccgctgaccccgcacaggacctcccccccaccccccaggccctgcacaggacctcctgaaccctgcagaggacccctggcaaa

SEQ ID NO: 213834 - DNA, 201 bp, Homo sapiens
agaagaccaaggagggcgcagtgaggagggctgtgggctggacgtcccggatgagagaagggcacagtgaggagggctgtgggctggacatccaggatgacaagaggacacagcgaggagggctgtgggctggacgtccaggacgacacttctacatctgcacggctttcagaaccacgtagctttccgaccgtgcagagc

SEQ ID NO: 213835 - DNA, 201 bp, Homo sapiens
ccggagaggccacgttcagcatgagctggggcagggggcttgtggggtctcttactccagggtaccatctcgcttggatcccagtgagccctcccatgccscacacccaggtggggtgaggtggcccaggtctggctgccctgtctgcaggggtgggcacccatggtagctgtgaggcagaatagggaatgagggtagcca

SEQ ID NO: 213836 - DNA, 201 bp, Homo sapiens
ccacagttctccctccccccactaaaccccacagttctcccaaacttgaagaggacctccctgtcaggccctgcagaggatctcccccccacctgcccccrgccccgcacaggacctcccccccaccgccccccccacacagaacctccccctgccgctgaccccgcacaggacctcccccccaccccccaggccctgcac

SEQ ID NO: 213837 - DNA, 201 bp, Homo sapiens
cagaagaccaaggagggcgcagtgaggagggctgtgggctggacgtcccggatgagagaagggcacagtgaggagggctgtgggctggacatccaggatgacaagaggacacagcgaggagggctgtgggctggacgtccaggacgacacttctacatctgcacggctttcagaaccacgtagctttccgaccgtgcagag

SEQ ID NO: 213838 - DNA, 201 bp, Homo sapiens
ggagcccagaagaccaaggagggcgcagtgaggagggctgtgggctggacgtcccggatgagagaagggcacagtgaggagggctgtgggctggacatccaggatgacaagaggacacagcgaggagggctgtgggctggacgtccaggacgacacttctacatctgcacggctttcagaaccacgtagctttccgaccgt

SEQ ID NO: 213839 - DNA, 201 bp, Homo sapiens
cggagcccagaagaccaaggagggcgcagtgaggagggctgtgggctggacgtcccggatgagagaagggcacagtgaggagggctgtgggctggacatccaggatgacaagaggacacagcgaggagggctgtgggctggacgtccaggacgacacttctacatctgcacggctttcagaaccacgtagctttccgaccg

SEQ ID NO: 213840 - DNA, 201 bp, Homo sapiens
acggagcccagaagaccaaggagggcgcagtgaggagggctgtgggctggacgtcccggatgagagaagggcacagtgaggagggctgtgggctggacatccaggatgacaagaggacacagcgaggagggctgtgggctggacgtccaggacgacacttctacatctgcacggctttcagaaccacgtagctttccgacc

SEQ ID NO: 213841 - DNA, 201 bp, Homo sapiens
tacggagcccagaagaccaaggagggcgcagtgaggagggctgtgggctggacgtcccggatgagagaagggcacagtgaggagggctgtgggctggacatccaggatgacaagaggacacagcgaggagggctgtgggctggacgtccaggacgacacttctacatctgcacggctttcagaaccacgtagctttccgac

SEQ ID NO: 213842 - DNA, 201 bp, Homo sapiens
aaaacagttttatttcattattatccaagtacctttgaaaagataattaattgtacaagtgtcatcgcatgaaaaacagactcgggcagcccctgctggcctagcctgagaaatgtacatatttacacgggccctcagaaaggaggacccaggactgcacagccggcggctggaggcaggtgcagtgctccgtcgccgatt

SEQ ID NO: 213843 - DNA, 201 bp, Homo sapiens
cctcatcccctctggtgggatgacatctcgtcccgagagtctgtccttcagtctcttggcatgaattccccaccgatagcgtggacactggctctggggcrtgcgtggcaactcggtctgcacctcagggaggctgagggccccccggcgccacaactgaggccatcctggggcagcacagcagctcctctcacgtggaca

SEQ ID NO: 213844 - DNA, 201 bp, Homo sapiens
agcaactctgggtttccccatggggggatgctggagcccagcagccaaacgggcgggagggtcgtgtctcagaacggcgggagtggtcccacggctcagcrggcatcccctgccatcatgtggggccacgggtaccaggggaaagcgcagacgcaacctgagagacccctgctcagcccagcaaggatgggctcaggaagc

SEQ ID NO: 213845 - DNA, 201 bp, Homo sapiens
ggcaactttgggggcgcgcatggggacctcgcggcgccgaccccccggctggggtctggcaggggtgggggacttcatccaggctccagccctgtggggargggaccaggtgcggacgggtcggcttgggaagcggcggcgctgggaccctctccccctggacaccgccgcctggagcccctctgtcttgggtggggctgg

SEQ ID NO: 213846 - DNA, 201 bp, Homo sapiens
agcccagggatttggagacagccgcccccggcacccgagcaccatggggaggaactcctagactgtgggaaagtgttcagagaccccagtccagagcaggrtggtggagggccctagagggtcagtaggcttggggggccgccgagggccctagagggtcagtaggtttgggggccgccgagggccctagagggtcagtag

SEQ ID NO: 213847 - DNA, 201 bp, Homo sapiens
ccctagagggtcagtaggtttgggggccgccgagggccgctgctctctagcaggtagcccctgaccctgggctgccctcatctgaagtcttcgctcccccrccctttggtctccgagtcagggagggggcccttgtggacatctgggccagaggagctgcaggcctggcggtctctggaggcccctcctgaaggtctgggt

SEQ ID NO: 213848 - DNA, 201 bp, Homo sapiens
ccccggaggagccagcagccccgttcccggtgggtgtccctaagccagggctccaggcctctgcacaaatcctctttacacagggctggcaggggcggggrcaggggtaggctgggagcagagcttcgagctgcacttgtgaccctttctaggagccaccggccaactccactatggggtccaaggaggaactgtagctgc

SEQ ID NO: 213849 - DNA, 201 bp, Homo sapiens
cctcagctccacgcaggcctgggtggcccgctggggaatgagcagaaaccctgcccagggcaccctgacactgttggagaggagctttactgcagggaggmcctcaacacacacccacttagtgtcaccggcggccgccaggcttcaggccccactccactcccagctctctccctcctccaatggctatgcctgtccccc

SEQ ID NO: 213850 - DNA, 201 bp, Homo sapiens
gggggtcctgtggagtcatgagcaccctccctactgtagacgtctgccaagatcttcgcggccaggatcctcaaccacctgctgctgtttgtcaaccagaygctggctgcgcaccgggagctcctagcgggctttggggaggcagctccccgcttccgggggcaggtactggggggctgggggaaaggggcagcgggagag

SEQ ID NO: 213851 - DNA, 201 bp, Homo sapiens
cttgaagtagtatctgcaggacggaggtgaggagggcagtgagcaggcagcaccgcagatgggaaggaggcctgtggcaggggacggcgtgtccacaccccatcccgaggagcctcctgtccatgccccacggcccccactgcatgtgcgccccctcccagggcaacagtgaacagtgcaatgaccacatgtgggtgaagt

SEQ ID NO: 213852 - DNA, 201 bp, Homo sapiens
ccaaggtggatgggcccgcgcagcgcgagctggctgaggagtttggtgtgacggagtaccctacgctcaagttcttccgcaatgggaaccgcacgcacccsgaggagtacacaggtgaggggcaggccggtcattgggggggcggtggccaggccgaggctgagggggactccctgcaggaccacgggacgctgagggcat

SEQ ID NO: 213853 - DNA, 201 bp, Homo sapiens
gaggacccaggactgcacagccggcggctggaggcaggtgcagtgctccgtcgccgattcacacagtggcaggcaagagacaagctgtgttgaaggcactyggtggcgcgtacaattgacagaggccctgcaggcctctgcatccgggcctgggccccagccagacctgggtacgtgggcaaatcccagagggaaagtaga

SEQ ID NO: 213854 - DNA, 201 bp, Homo sapiens
gaaccgcacgcacccggaggagtacacaggtgaggggcaggccggtcattgggggggcggtggccaggccgaggctgagggggactccctgcaggaccacrggacgctgagggcattgccgagtggctgcgacggcgggtggggcccagtgccatgcggctggaggacgaggcggccgcccaggcgctgatcggtggccgg

SEQ ID NO: 213855 - DNA, 201 bp, Homo sapiens; identical to SEQ ID NO: 37770

SEQ ID NO: 213856 - DNA, 201 bp, Homo sapiens
tgtctgaaaacaaacaaacctcaattgtctgttatacacttgcaatggacaattcaaataagaaaacaattccattcacaatagcagcaaaaagaacaggytttttcaagactcattaagtaagttctagcagtgggagacctaaccatttcaaatagtagcatgctgtgctatctacccaaatattaccgtacctgtgaa

SEQ ID NO: 213857 - DNA, 201 bp, Homo sapiens
tgctaggatgaagccaggtcggacatgacagctcacactggtgagagccgtgttctcccagggcacacagggcaatgaggtgttccctttgtgttgtgtgyaccgtgccatcgttgcctgttacctgacaccccaaggggttggcacggggcaacttggggggaaatgaggctcccaaaagctggggcctgggcgggtcca

SEQ ID NO: 213858 - DNA, 201 bp, Homo sapiens
tgttttccaatacagatcacatgctgggccataaaccaagtctcaattaatttaaaatagtttaagtggtagagaatatgtcctctttcattaattaattwatttatttatttattttgagacggagttttgcccttgttgcccaggctggagtgcaatggctcaatcttggcttgctgcaacctccgcctcccgggttca

SEQ ID NO: 213859 - DNA, 201 bp, Homo sapiens
atgagctctgggcctgtggtggccatggtacggcagggcaggggtggtggaagggcctgtgggtaaagggcgtgtgggtgtgtctttccccccagcaaagsgaggggccctggattgagcccaggggcccttggtgttccccacttctccccaaccattatctctcgctgcaggtctgggaagggtacaatgtcgtccgcg

SEQ ID NO: 213860 - DNA, 201 bp, Homo sapiens
tcacctggtggggaaagtgtgtttctccctggttccctgccactcattcacctcagacacagggtgggctctgggttcttcctcatgtggaaagtcggggyttcagaccatgtctgtcgtcatccagaagggatggagtcaaaagtgaggctggagttttgcaggatctccagacttccctgaggccactgagctgggctg

SEQ ID NO: 213861 - DNA, 201 bp, Homo sapiens
gggatctattctgcggtgggggtgctgcccatgctggtgttatctgcaaggtgcctgaggtcagggcatcacagctgctgtgctagtgcccacgtttactstctgcggctcctccttacctcaatgccacccaggcaccagagagcgtccttgccgagcactaccaggacctgcggaggaagcccttctaccctgccctca

SEQ ID NO: 213862 - DNA, 201 bp, Homo sapiens
ctttgagaggcggggcttcacgctggtggggatgaagatgctgcaggtagtgggactctgggcttgtgggtgtccctgtggggatggggttgggggatccktctcggcctttcacatcccagccagcgccggggcagggcctggctttggcagttgaaggggcaggagggatctattctgcggtgggggtgctgcccatgc

SEQ ID NO: 213863 - DNA, 201 bp, Homo sapiens
agagccgtgttctcccagggcacacagggcaatgaggtgttccctttgtgttgtgtgtaccgtgccatcgttgcctgttacctgacaccccaaggggttgscacggggcaacttggggggaaatgaggctcccaaaagctggggcctgggcgggtccacgaggctgtaagaggccgaggccaggctggaacccggtttccc

SEQ ID NO: 213864 - DNA, 201 bp, Homo sapiens
agccgtgttctcccagggcacacagggcaatgaggtgttccctttgtgttgtgtgtaccgtgccatcgttgcctgttacctgacaccccaaggggttggcrcggggcaacttggggggaaatgaggctcccaaaagctggggcctgggcgggtccacgaggctgtaagaggccgaggccaggctggaacccggtttcccag

SEQ ID NO: 213865 - DNA, 201 bp, Homo sapiens
gccgtgttctcccagggcacacagggcaatgaggtgttccctttgtgttgtgtgtaccgtgccatcgttgcctgttacctgacaccccaaggggttggcayggggcaacttggggggaaatgaggctcccaaaagctggggcctgggcgggtccacgaggctgtaagaggccgaggccaggctggaacccggtttcccagc

SEQ ID NO: 213866 - DNA, 201 bp, Homo sapiens
aacccggtttcccagctccactgttactccttccctgtctgcagtcacaggcttgctcccctagacagagggcaacgggagcagcagatggtccctgggaytcctcagggtgcacatgaagcctgagcctcacattgctcctgtcctggcacaggaatgtcatccacgccagcgactccgtggagggggcccagcgggaga

SEQ ID NO: 213867 - DNA, 201 bp, Homo sapiens
ggccctggattgagcccaggggcccttggtgttccccacttctccccaaccattatctctcgctgcaggtctgggaagggtacaatgtcgtccgcgcctcragggccatgattggacacaccgactcggctgaggctgccccaggaaccataaggggtgacttcagcgtccacatcagcaggtacgggggtcctgatacac

SEQ ID NO: 213868 - DNA, 201 bp, Homo sapiens
cctggcacaggaatgtcatccacgccagcgactccgtggagggggcccagcgggagatccagctgtggttccagagcagtgagctggtgagctgggcagaygggggccagcacagcagcatccacccagcctgaggctcaagctgcccttaccaccccatcccccacgcaggaccaactacctccgtcagcaagaacccaa

SEQ ID NO: 213869 - DNA, 201 bp, Homo sapiens
tgaaagggtgaggtggcagtgcctctgacctcttgccttttgaaggagggccctcctggacccgggagcggaccctggtggcggtgaagcccgatggcgtscaacggcggctcgttggggacgtgatccagcgctttgagaggcggggcttcacgctggtggggatgaagatgctgcaggtagtgggactctgggcttgtg

SEQ ID NO: 213870 - DNA, 201 bp, Homo sapiens
tcatgtggaaagtcggggcttcagaccatgtctgtcgtcatccagaagggatggagtcaaaagtgaggctggagttttgcaggatctccagacttccctgwggccactgagctgggctgtgcctctgtggacctcagggtggtcgctgagctgggctgtccctccctggaccttgaggtggtccctgagctggctctgcct

SEQ ID NO: 213871 - DNA, 201 bp, Homo sapiens
ggctctgtccagattctgtgggacatacagggtctgggctcctctggaaaccagggacccgatgccggagggtagcttggctctggagcagcctgggactrtaggaaggtgaggacgtcttctgtttccctggcagcgtcccctccagaggaggacggctggggcggagctcagcgctgaccctgggtctggaagcgacag

SEQ ID NO: 213872 - DNA, 201 bp, Homo sapiens; identical to SEQ ID NO: 37786

SEQ ID NO: 213873 - DNA, 201 bp, Homo sapiens; identical to SEQ ID NO: 37787

SEQ ID NO: 213874 - DNA, 201 bp, Homo sapiens
attttgccattaggcactttttttttttttttttgagatggagtctcactgtgtcgcccaggctggagtgcagtgacacgagctcggctcactgcaacctstacctcccaggtccaagtgattcttgtgcctcagcctcctgagtatctgggatcacacctagctaacttttgtatttttaatagagatgggatttcactg

SEQ ID NO: 213875 - DNA, 201 bp, Homo sapiens; identical to SEQ ID NO: 37788

SEQ ID NO: 213876 - DNA, 201 bp, Homo sapiens; identical to SEQ ID NO: 37790

SEQ ID NO: 213877 - DNA, 201 bp, Homo sapiens; identical to SEQ ID NO: 37791

SEQ ID NO: 213878 - DNA, 201 bp, Homo sapiens
agcctgaccaacatggtgaaaccccatctctgctaaaaatacaaaactaagctgagcgtggtggtgcatgcctataaccccagctactcaggaggctgagrcacaaaaatcgcttgaacccaggaggcagaggttgccagcgagctgggattgtgccactgcactccagcctgggcaacagagtgagaccctgtctcttaa

SEQ ID NO: 213879 - DNA, 201 bp, Homo sapiens
ggttttataatctttataagcattttccagtgttagaattcttcataagattttttttaagtatgaatatctgcattatttccttttagattaccaaagtygtgtatagtatttgacacaatgcagaaaatagtgatttataatgtagaaagtttaaaagtctcccataatcctgcccctccagagataactactgttaac

SEQ ID NO: 213880 - DNA, 201 bp, Homo sapiens; identical to SEQ ID NO: 37792

SEQ ID NO: 213881 - DNA, 201 bp, Homo sapiens; identical to SEQ ID NO: 37793

SEQ ID NO: 213882 - DNA, 201 bp, Homo sapiens
tctcattgtagcaaatttcacaaataagaaaaaaggaagttacccacaattccacaattcagtagtttagcctatttcctaatagcctagtttttattgtrtttttttacatagtaaattatatgtataatttatatttggttttataatctttataagcattttccagtgttagaattcttcataagattttttttaagt

SEQ ID NO: 213883 - DNA, 201 bp, Homo sapiens; identical to SEQ ID NO: 37795

SEQ ID NO: 213884 - DNA, 201 bp, Homo sapiens
gaatatgacgctggtagcagaagtcagagcacagctgagggacatctgcttaaaggtatcgtctggtcctagtgttctgtgggtgacaaagctgtcacttkgttcaaggtagaaattttgaagttgcttattgctagtgattataaaaggatttctcattgtagcaaatttcacaaataagaaaaaaggaagttacccaca

SEQ ID NO: 213885 - DNA, 201 bp, Homo sapiens
acttttgaatgaggggcttgtccaagatggtgatgttcctgctttgtcaatccagaccctatagttataaaaaggaggagggacggcatgttctttctggmtacttcctgcaacgaggggatggagagtttcctggtctcgggttgactaggagcaatgccgtctgtagatgtttttgggtagttgtttgtgaaattgcca

SEQ ID NO: 213886 - DNA, 201 bp, Homo sapiens
gcgtccccttcccctgcccggtttaatgaccaaccattaatattaatgactgccattaataatggagtcatcttctgttggtcaagagtgaattgtggaarttaatggtgagaatatgtttgaagacttctgaatcatccgtgtgtcaatgcggctttttggttttcttcctccttttagggctatcgcaaagtgatcatt

SEQ ID NO: 213887 - DNA, 201 bp, Homo sapiens; identical to SEQ ID NO: 37797

SEQ ID NO: 213888 - DNA, 201 bp, Homo sapiens
tgttcctgattcctcaaaaaatcttgactctaaggcctattttattgtctgtctctgaatccctataaagcttcaagtctgtatgacattcttaacgccarattatatattgtcttgtactgttcctagctggtacatgtatattagtcttgtctccctcatgagaatgtaagctccttaagggcagggaccatgtcttaa

SEQ ID NO: 213889 - DNA, 201 bp, Homo sapiens; identical to SEQ ID NO: 37798

SEQ ID NO: 213890 - DNA, 201 bp, Homo sapiens
agtgagctgctttcttgcctattcttccgagagttctttaccagctcctgagagatcaggggctctattggtcccatgtgctttgctttcaaaatctgtcstcaggttggataaattagttgctttccttgaacatcttaagccttcagtaacctctcttaactctcttatctatatatcattctagaaaaattgtaagca

SEQ ID NO: 213891 - DNA, 201 bp, Homo sapiens; identical to SEQ ID NO: 37803

SEQ ID NO: 213892 - DNA, 201 bp, Homo sapiens
ataaaacaactttgtgagttgtgtcatcaagatgaataaggaggccaggtgcggtggctcacgcctgtaatccctgcactttgggaggccgaggcaggtgkatcacctgaggtcaggagttcaagaccagcctggccaacatggtgaaaccccatctctactaaaaatacaaaaattagccaggcatgatggcgggtgcct

SEQ ID NO: 213893 - DNA, 201 bp, Homo sapiens
catgaatgatggctgctggtgcattaggttaccactggctttgatgaattctcccactcatgaggttttgactgttttagattttatcctgtctgtgtatmcctctgcacatttgttctgttaatactgggctgaaaaaaaatacatattaaaaaatacgtatttttacatatatacataaatatacatataattattaaa

SEQ ID NO: 213894 - DNA, 201 bp, Homo sapiens
ttaaagagacagggtctcactgtgtggcccaggtggaggtgcagtgactattcacaggctccatcacagcctccaactcctgggctccagcgatccccccrcctcagcctcccaagtagctgggaccacaggcatgcgccagtgttcctagctatgaaacgatagattctgtactatcagcaccatcaataaagttccttg

SEQ ID NO: 213895 - DNA, 201 bp, Homo sapiens
ggcatgctgggagatgcagtccctttttctaaagactggggcggccgtgaggtcatcggtggtcgccgggagccgccagcacgtggcggcgaggaaggggyggtgtgctcctgttgtctgcacctgagagggggcaggagctctcggcgcttgcgcctcccgccgcggtgccctcccgacatgccggaggaggcgggcttc

SEQ ID NO: 213896 - DNA, 201 bp, Homo sapiens
cttaccctgactccaatgggaagaaagatggcagcatttcctttagaacccaaatttgccaaagtaaatgataccctctcctcagtcctctttctgtacaytacagttaaccgtcccaaagtagtaccatctacccagtgcttctagattaatctcactttttctcttacataattaccaacccctagtttgcaaatagcc

SEQ ID NO: 213897 - DNA, 201 bp, Homo sapiens
ctttatgaaatggtacactgactaatccagaagacatttccaacagtttgccagtggttcctcactacactggtactgaaagtgtaatttcttagagccaraaaactggagaaacaaatatcctgccacctctaacaagtacatgagtacttgatttttatggtataaggcagagccttttcttcctcttcttgatagatg

SEQ ID NO: 213898 - DNA, 201 bp, Homo sapiens
ttcactgttttactatatgcgtatgtatccctaaaccacctgttgtttgtaagtttatgttagttattcttgagtaagcggttttcattcagcttgttccrtatagtatatttgtgctgatgctttttcacactaagtgctattccattctgtgaataaaccaaaatgcatttatccatccttcagttgataaatattgct

SEQ ID NO: 213899 - DNA, 201 bp, Homo sapiens
atgcgtatgtatccctaaaccacctgttgtttgtaagtttatgttagttattcttgagtaagcggttttcattcagcttgttccgtatagtatatttgtgytgatgctttttcacactaagtgctattccattctgtgaataaaccaaaatgcatttatccatccttcagttgataaatattgctttaaaaaagcaatgag

SEQ ID NO: 213900 - DNA, 201 bp, Homo sapiens
acttcatttttttggacttttggctcctttttatgtctctgtttctttagatcacattcaggcggccattgcccaactggacctgttaggtgctcttgaasataaggatgaccagcttaccctgactccaatgggaagaaagatggcagcatttcctttagaacccaaatttgccaaagtaaatgataccctctcctcagt

SEQ ID NO: 213901 - DNA, 201 bp, Homo sapiens; identical to SEQ ID NO: 37802

SEQ ID NO: 213902 - DNA, 201 bp, Homo sapiens
gtacagcctaggacttagacagaagtgcagttaaggtctggcttatttcagcatttagctccatgtgtcctaggttttacctagctgcaaagcaggcaagttctacagctaagagttatggtgacattttataaagcattcaggaggcctaatcacttttaaattgtaaaacatttcttgcatacatttcctctcataaaa

SEQ ID NO: 213903 - DNA, 201 bp, Homo sapiens
ccaatgggaagaaagatggcagcatttcctttagaacccaaatttgccaaagtaaatgataccctctcctcagtcctctttctgtacattacagttaaccrtcccaaagtagtaccatctacccagtgcttctagattaatctcactttttctcttacataattaccaacccctagtttgcaaatagccctgattcatgtt

SEQ ID NO: 213904 - DNA, 201 bp, Homo sapiens
gcggtagtttccctgtttctggtccgtgctcctccagctgggccttcttcccctgaccttgctgatccttggtgaccacctccgaatgtcagaatccacawcgttaggctcacaatgtgggctgcttttgccccagtgggtccagttgccccaacacgctgtgtagtgctgaccagtgtttacgtgtggggtcggctccat

SEQ ID NO: 213905 - DNA, 201 bp, Homo sapiens; identical to SEQ ID NO: 37789

SEQ ID NO: 213906 - DNA, 201 bp, Homo sapiens
attctaatcatttattgggtatgatgagacaaatatcccaatctgggaaacttcaagtttttctttagtttaaattattaacacttttcttatagttcatrttttttgatataaagatattttcctacgtttctttttggcacctgaagttttttctctgaattcaactgtgttctaaaaatgttgttatattttctctat

SEQ ID NO: 213907 - DNA, 201 bp, Homo sapiens
gaccctggtctcatgctcttcacaggtgtaacctggccagtgtgatgcttcagcttctagcaatgaaagtcccaaatgtgctcacctttgacttcatgtcraagccatctccaggtaagtgaaatccacagttttgcagaaggtgggtgaggagacaaacaacaacaaatggacacttccaaaaaaataaagtatattggt

SEQ ID NO: 213908 - DNA, 201 bp, Homo sapiens
ctaatcacttttaaattgtaaaacatttcttgcatacatttcctctcataaaatttttcatgactttcacagactatctctgacactattgatcgtggatmcatcccatcgagagctatttcaacaaagctgtgtgggtaacagctgatttgtcattgagctgagggctgaaagcagggggaagaggcttctgttttgagg

SEQ ID NO: 213909 - DNA, 201 bp, Homo sapiens
cagtaagtataatgcaaatattacaaaacttgaaagaatccaaagttcaaaacacttctggttccaagcattttgtattttactttagcaacgctctgttkccctggtataggagcatgaaagatagagacatggatcaaagtttggggttttgcctagtggattcagcaggaagattgcagaataatcaaatcctttgtc

SEQ ID NO: 213910 - DNA, 201 bp, Homo sapiens
agtatttcaatggcgcccccgtcctctacctagagggtcggcagcatccgatccaggtgttttacaccaaacagcctcagaatgattacctgcacgccgcrcttgtctccgtcttccagatccaccaggtatggtgctgggggcaaattcctgaaaagttctcttttatcttgcagttggtagtgagaacattgagccttg

SEQ ID NO: 213911 - DNA, 201 bp, Homo sapiens
tcccacagttttcccctgagtgtttcatgtttgtaactaacaaattcaggtggcaggcgccatgagtgagatcacctacactccaggtccgcgaaggagtyctgaggcgggtatgtgagacaggaagtagaggcaggaaagaagagcccaggttgagcaaacttgggcacacagggtcagggacctgggcagagggtctgg

SEQ ID NO: 213912 - DNA, 201 bp, Homo sapiens
ctgtggagctgcagcgccggagtctgcccatcttccaagcgcgggggcaactgttggcccagctccgaaacctggacaacgcggtcctcatcggtgagtgsccgcgccggcgggctcttccttgcacttcgtccgtggcttagctagagcagtttttcttacatgcctctcaatccctttcgttcgtggcttcaacaaacc

SEQ ID NO: 213913 - DNA, 201 bp, Homo sapiens
ggtgcagtgactattcacaggctccatcacagcctccaactcctgggctccagcgatccccccgcctcagcctcccaagtagctgggaccacaggcatgcrccagtgttcctagctatgaaacgatagattctgtactatcagcaccatcaataaagttccttgacctctggaaccagtgaaggtcatcatgcgagtcctt

SEQ ID NO: 213914 - DNA, 201 bp, Homo sapiens
cacacccataatcccagcactttgggacgggcagatcatgaggtcaggagaaaatcctggctaacactaaaaccctggctctagtaaaaattaaccgggtrtggtggcacgtgcctgtagtcccagctactcgggaggctgaggcaggggaatcgcttgaacctgggaggtggaggttgcagtgagtcgagatcgcgccac

SEQ ID NO: 213915 - DNA, 201 bp, Homo sapiens
aacagcaggtggaaagtgggtaagcggccactagagggaattaaacagcttcggacagcggactcggcagcgcagcaagaaagctccggaatccggattcraggcttcccgggctgcaccggaggtctccagcagagggcgcgattccgcccgctggccttaggtcgtcagagcgccggcgcgggaagcgcttccgggcag

SEQ ID NO: 213916 - DNA, 201 bp, Homo sapiens
tctctcacgaatcacgggaagggagatatttaacagggcgagtttcatggaaacgagcttcagaagatacccttcacatgagctgaagcttacggtgtatwctctggaaatcacatttcctgtaagagcaaacagctacttggcattctccgtggtaaattagcaaatcatctaagaacttttaggagggtaaggaagaac

SEQ ID NO: 213917 - DNA, 201 bp, Homo sapiens
aatgagacccagctgggaaggactcggtgatacccactgggatcttttatcctttgttgcaaaagtgtggacacttttgacagcttggcagattttaactycagaagcactttatgaaatggtacactgactaatccagaagacatttccaacagtttgccagtggttcctcactacactggtactgaaagtgtaatttct

SEQ ID NO: 213918 - DNA, 201 bp, Homo sapiens
agctttcttacactgagccagaaaattttcatgttaaagcagtagcttaccaactttccttgattataaccgccattaagaagtacttttggctgggcacrgtggctcacgcctgtaatcccagcactttgggaggccgaggcgggtggatcatgaagtcaggagatcgagaccctcctgactaacatggtgaaacctcgt

SEQ ID NO: 213919 - DNA, 201 bp, Homo sapiens
aaaagaaaaataattcagttctgaccagcagctttcttacactgagccagaaaattttcatgttaaagcagtagcttaccaactttccttgattataaccrccattaagaagtacttttggctgggcacagtggctcacgcctgtaatcccagcactttgggaggccgaggcgggtggatcatgaagtcaggagatcgaga

SEQ ID NO: 213920 - DNA, 201 bp, Homo sapiens
cctctgggagcttcccttctggtgttggaggaggacggacacatttaaacgcttctgtacaacacaggatggtcagtgctggaagagagatgaacaaggcrctacggagcccagaggagggccactgtgcagccaggggagcgtgtttgaggcctaactcatcttagagtttgcgaggcaggcagtgtgagggcaggtgtt

SEQ ID NO: 213921 - DNA, 201 bp, Homo sapiens
ggagaaacaaatatcctgccacctctaacaagtacatgagtacttgatttttatggtataaggcagagccttttcttcctcttcttgatagatgaggccayggtgtaaatggaagtttcagagaggacaaaataaaacggaattccatttttctctcactgtattaaagcttttgtgtgtgatcttttaaattctgataat

SEQ ID NO: 213922 - DNA, 201 bp, Homo sapiens
gggaccatctgtattcagaggttgaggggaagaactcagtagggagggaggcagaagatagaatcgagctaacagagcaaagatcaggaggcatgggggaygggggaacttggccacaagggctagatgcagggctggtctggaagaggaggaaggctaagaggctgcagggctagagaacggatgtaaggatggtgcact

SEQ ID NO: 213923 - DNA, 201 bp, Homo sapiens
aatgtgctcacctttgacttcatgtcgaagccatctccaggtaagtgaaatccacagttttgcagaaggtgggtgaggagacaaacaacaacaaatggacrcttccaaaaaaataaagtatattggtcatctccttttgtttatttaattttgtggatgacaacattagttattagagaagcatctgaaaatcatgaaatg

SEQ ID NO: 213924 - DNA, 201 bp, Homo sapiens
taaggatgaccagcttaccctgactccaatgggaagaaagatggcagcatttcctttagaacccaaatttgccaaagtaaatgataccctctcctcagtcytctttctgtacattacagttaaccgtcccaaagtagtaccatctacccagtgcttctagattaatctcactttttctcttacataattaccaacccctag

SEQ ID NO: 213925 - DNA, 201 bp, Homo sapiens
gagggattcctggattcttctagtgatactgaaaagcacacttgactaaagcatagtgttttttgtttgttatggaaatacggtatacgttcatttaaaartaaatggacatacaaattgcatctccttaggagatacattttatatacatttcggtgcgtttttttccagtatggatttctatttgtttctctcttcctc

SEQ ID NO: 213926 - DNA, 201 bp, Homo sapiens
gttaattttcttttcaagttttgctctgagaagccctgctttataagttaatagagagccagtgccaccaaggagagtaaataagctctgtttacaagtarcctttagatgaggctgaacctggggaagcttactctgtccccaggtcctgtcagcttccactgaggcctcccagggcactcaggatgagtatgccctgcc

SEQ ID NO: 213927 - DNA, 201 bp, Homo sapiens
gtggaactgtgcgttgcttgccaagctttttgtttccctaaggtttttgaggttttctttgtttttggtaactttcaatttttttttttttttttttttttggacagagtttcactcttattgcccaggctggagtgcagtggcgcgatcttggctcactgcaacttctgcttcgtaggttcaagtgattctcctgcctca

SEQ ID NO: 213928 - DNA, 201 bp, Homo sapiens
ggtgtggaaaggggagatgttgatcaaagggtacaaaatttcagttaggagaaataaggtctgatgatctgccttacagcatggtgactatagttaatatrgttaatattataatagtattgtatacttcaaaattggtaaaagagtggattttaaaagttgtcaccacaaagaaatgataagcatgtgagctgatggata

SEQ ID NO: 213929 - DNA, 201 bp, Homo sapiens
taatcccagtactttgggaggccaaagaaagattgcttgagcccaggagttcgagaccaacctgggcaacatagtgagaccctgtctctacaaaaaaattyttaaaattagctagacatggtagtgaatgcctgtagtctcagctgctcgagaggctaagttggaagtatcacctgagcccaggagttgaggctgcagtga

SEQ ID NO: 213930 - DNA, 201 bp, Homo sapiens
gacaagttgctgctatttgtgttggagtgaagtgtctgagaagccccagcctccagtacaacaggtggtcaccttggggtgtggactcaatcttctctctrtggtcctttctggaaagctgggaagggctaattgacacacaaacacctcccatctctccacagaatggctgacctctcggagctcctgaaggaagggacc

SEQ ID NO: 213931 - DNA, 201 bp, Homo sapiens
ttccattgttgactgttgtttgagcagtcatgccctttgttcttaggctgtgtgttgtttttttcctaacatcatagtatggctgggtattattttgatasagattacaattactattactatttcttgaagtgtatttcccagagtggaatattttaggatctttttttctcttttgtgggggtggggaacatgtagctt

SEQ ID NO: 213932 - DNA, 201 bp, Homo sapiens
cgaggcgggtggatcacaaggtcaggagatcgagaccatcctgtgaatggcgaaaccccgtctccactaaaaatacaaaaaattagctgggcgtggtggcyggcgcctgtagtcccagctccttgggaggctgaggtgggagaatggcgtgaacccgggaggcggaggttgcagtgagctgagaacaccagcctgggagac

SEQ ID NO: 213933 - DNA, 201 bp, Homo sapiens
atccttttttctttttaaaaacttgtgcgtttcctcatctgggctgagaaagggtaaacgcaggcaaagctggctctgttcagtcttttaccacataaaasactgcagggcagcctttccttactctgtatagggacagctcatgctaaacctgagcttccaggccctgttctgcatcattagcctctcatagccctgtca

SEQ ID NO: 213934 - DNA, 201 bp, Homo sapiens
gtgttcctgccgaagcacgcctacttaccccgctgagcagagcctgagcctgcaacctccagagacctggggaaagccacatgctccgcttcccgcccccsgcaagggcgtgtcagctacaaggggcgtgtcatctctaggccccgccccgcgctgcgtgcccacgttgcgccggcctcgcgccagtccgctgggctgcag

SEQ ID NO: 213935 - DNA, 201 bp, Homo sapiens
ccctcagtatctgtggagattagttccaggacccctcaagggtaccaagatccaggatgctcaagtttcttttcttttcttttttttttttttttttgagwcggagtcttgcactgtcacccaggctggagtgcagtggtacgatttcggctcactgcaatctccacctcccgggttcaaatgattctcctgcctcagcct

SEQ ID NO: 213936 - DNA, 201 bp, Homo sapiens
agattgcagtgagctgagatcgcatcactgcactccagcctgggtgacagagtgagaccctgtctcagaaaaaaataaattatcacaagacaaaatttgtrcttatcaggagttcacagttaagacatatataagcttacttggtgaaattagaaaaagttatcagataaaacattcaggtttaaacactggtgagggtgt

SEQ ID NO: 213937 - DNA, 201 bp, Homo sapiens
tgtggactcaatcttctctctatggtcctttctggaaagctgggaagggctaattgacacacaaacacctcccatctctccacagaatggctgacctctcrgagctcctgaaggaagggaccaaggaagcacacgaccgggcagaaaacacccagtttgtcaaggacttcttgaaaggcaacattaagaaggagctgttta

SEQ ID NO: 213938 - DNA, 201 bp, Homo sapiens; identical to SEQ ID NO: 37821

SEQ ID NO: 213939 - DNA, 201 bp, Homo sapiens
gtttttggctcagtacaacctccaccattgtgggctcaagcaatcctcctgcctaggactcctgagtagctgggatgacaggcatgtgccaccacgcccarctaatttttgtagtttttttgtagagacagggtttttgccttgttgcccaggctggtatacatttctttatataaggagggggcaagtaacacagtgtta

SEQ ID NO: 213940 - DNA, 201 bp, Homo sapiens; identical to SEQ ID NO: 37823

SEQ ID NO: 213941 - DNA, 201 bp, Homo sapiens
gcaccctcacacacctcggctcttgtgaacactagtgttcctgccgaagcacgcctacttaccccgctgagcagagcctgagcctgcaacctccagagacstggggaaagccacatgctccgcttcccgcccccggcaagggcgtgtcagctacaaggggcgtgtcatctctaggccccgccccgcgctgcgtgcccacgt

SEQ ID NO: 213942 - DNA, 201 bp, Homo sapiens
ctctgctcctgcagatattcaatgaactggaccaggccggctccacactggccagagagaccttggaggatgggttccctgtacacgatgggaaaggagayatgcgtaaatgccctttctacgctgctgaacaagacaaaggtaggtctgtgtgtcctgagctcccctcctggggcaggtgtagcaggagactccactgat

SEQ ID NO: 213943 - DNA, 201 bp, Homo sapiens
gtatcacctgagcccaggagttgaggctgcagtgagctctgattgacccagtgcacttcagcttgagcaacacagcaagaccctgtctcaaaaaaaaaaaagaagttgggcacagtggctcaggcctgtaatcccagcactttgggaagcctaggtgggcggatcacctgagatcaggagtttgagaccagcctgacctct

SEQ ID NO: 213944 - DNA, 201 bp, Homo sapiens
tcttattctatttttttttttttttttttttttttttttgagacagtcttgctctgtcacccaggctggagtgtggtggcacaatctcagctcactgcaamctccgcctcctgggttcaagcgattctccagcctcagtctcctgagtagctgggattacaggcgtatgccaccatgcctggctaatttttgtatttttag

SEQ ID NO: 213945 - DNA, 201 bp, Homo sapiens
ctcaggaggctgaggcaggagaatcacttgaacccgggaggcagaggttgcagtgagctcagaccgtgccattgcactccattgtttcgctgcaacgagarggaaactccatctcaaaaaaaaaaaaaaaaaaaacaggcttgagtatacctctcacagccctggagaatgcctgagctgttggacagttgccttttccat

SEQ ID NO: 213946 - DNA, 201 bp, Homo sapiens
atgagccgctgcatccagcctcaaatttatctctgtatcttcttctaaattacagtatcacacccgtgcatatgcccaaaaatttttttttttttttttttgagacggagtcttgctctgtcgcccaggctggagtgcagtggtgcgatctcggctcactgcaggctccgcctcccaggttcacgccattctcctgcctca

SEQ ID NO: 213947 - DNA, 201 bp, Homo sapiens
gttaagggggtagggctgaaagttcccaccctctaatcacatggttggttccccaggcaatcagcccccatctaggagcccaccaagagttacttacttacaacaaaagatgctcctattacccaggaaattccaagggatttaggaaattacaaaagttttaggagctctgtgtcaggaactgaggttaaagaccaatat

SEQ ID NO: 213948 - DNA, 201 bp, Homo sapiens
ctgcaatctctgcctctggggttcaagcagttctcctgcctcagccttccaagtaactgggactacaggcatgcaccaccatgcctggctaatttttgtayttttggtagagatggggtttcgccatgttggccacgctggtctccagctcctgacctcaagcgaaccaccctccttggcctcccaaagtgctagtattac

SEQ ID NO: 213949 - DNA, 201 bp, Homo sapiens
ggttaagggggtagggctgaaagttcccaccctctaatcacatggttggttccccaggcaatcagcccccatctaggagcccaccaagagttacttacttacaacaaaagatgctcctattacccaggaaattccaagggatttaggaaattacaaaagttttaggagctctgtgtcaggaactgaggttaaagaccaata

SEQ ID NO: 213950 - DNA, 201 bp, Homo sapiens
caccacacccagttaatttttgtatttttagtagagacggggtttcaccatgctggccaggctggtctcaaactcctgacctcaagtggtccacccacttyggcctcccaattagaattagaggtggagcgaccgtgcccggctaagggcctactattttttttttttttttttgagacagagtttcactcttgtcaccca

SEQ ID NO: 213951 - DNA, 201 bp, Homo sapiens
aatcctcctgcctaggactcctgagtagctgggatgacaggcatgtgccaccacgcccagctaatttttgtagtttttttgtagagacagggtttttgccwtgttgcccaggctggtatacatttctttatataaggagggggcaagtaacacagtgttatgctaccaatcaggctttcagagaccataaaacaaaatcta

SEQ ID NO: 213952 - DNA, 201 bp, Homo sapiens
aggttaagggggtagggctgaaagttcccaccctctaatcacatggttggttccccaggcaatcagcccccatctaggagcccaccaagagttacttacttacaacaaaagatgctcctattacccaggaaattccaagggatttaggaaattacaaaagttttaggagctctgtgtcaggaactgaggttaaagaccaat

SEQ ID NO: 213953 - DNA, 201 bp, Homo sapiens
tggagtgcagtggtgtgaccttggttcactgcaacttccacctcccaggtttaagcgattctcctgcctcagcctctggagaagctgggattataggcgtytgccaccacgcctggctaattttttgtatttttagtagagacggggtttcaccatgttagtcaggctggtctcaaacttctgatgtcaggtgatccacct

SEQ ID NO: 213954 - DNA, 201 bp, Homo sapiens
ttacaggtgtgagccattgcgccgagcctcatccagctaattttataatttttggggggaggtagcaacagagatctccatatgttacccaggctggtctsaaactcctggcctcagtgatcctcctgcctcagcctcccaaagtgttgggattacaggcgtgagccaccgcgcccagcccattattcttatatctgagat

SEQ ID NO: 213955 - DNA, 201 bp, Homo sapiens
gaggttaagggggtagggctgaaagttcccaccctctaatcacatggttggttccccaggcaatcagcccccatctaggagcccaccaagagttacttacttacaacaaaagatgctcctattacccaggaaattccaagggatttaggaaattacaaaagttttaggagctctgtgtcaggaactgaggttaaagaccaa

SEQ ID NO: 213956 - DNA, 201 bp, Homo sapiens
catccagctaattttataatttttggggggaggtagcaacagagatctccatatgttacccaggctggtctgaaactcctggcctcagtgatcctcctgcytcagcctcccaaagtgttgggattacaggcgtgagccaccgcgcccagcccattattcttatatctgagattcacctttaattgccctctgtcatcagca

SEQ ID NO: 213957 - DNA, 201 bp, Homo sapiens
gctaggatggatcacaaaaggcttacttaggtagctctgaatataatatcaggcctacaatattatcacttatgttgttttttggatcttatttttagaarcagcacaagctttttcttggaggaaatatagcaaggaagaggggagctgttctgactgaagcagggtatgggaggcccacagcctttcctgctttgcctc

SEQ ID NO: 213958 - DNA, 201 bp, Homo sapiens
tcactatgttggccgggctggtctcctactcctgacctcaggtgatccgtccaccttggcctcccaaagtgctggggttataggcatgagtcgctgcgccyggcttttttattttttattttttatttttttgaaacagagtctggctctttcacccaggctggagtacagtgatctgatctgagctcactgcaatctctg

SEQ ID NO: 213959 - DNA, 201 bp, Homo sapiens
cgggaggcagaggttgcagtgagccgagatcacgccattgcactccagcctgggcgacagagcaagactccatctaaaaaaaaaaaaaaaaaaaaaaaaaatcgcttctgatgagccggttgtcgtggcctgtggctgtccatccttacgtactgtgttttgttgatggcgctacaaaccagacaaggtggagtgtgattg

SEQ ID NO: 213960 - DNA, 201 bp, Homo sapiens
aattgatgaagggatgagaggggtattagactcatgtcctcttttgaatgcacactgcttttgtggtccggcagggtttctcagcgttagtgctgttgacrttttgggctagattgtttgtggtggtggggtatgtgtgtgtgtgtgtgcgtgcgtgcaagcacatttgtgcgctataggacattgagtagtatccctgac

SEQ ID NO: 213961 - DNA, 201 bp, Homo sapiens
ataggcgtatgccatcacatctggctagtttttgtatttttagtagacgcagggttttaccatatttgccaggctggtctcgagctcctgaccttgtgatycacctgccttggcctcccaaagtactgagattacaggtgtgagccactgtgcctaacccccatatactttcaaacaaaaaatggaaatatcactgtctcc

SEQ ID NO: 213962 - DNA, 201 bp, Homo sapiens
caatcctgaaaggtttctttgaagagctggagtgtctagaaagctttcctagaaagctagtgtacattttgctaagtaatcactgtgtcacttagattttytgctctttaagtgtggttatgagatgtgttccaaacaatttgttactaaccatgaagttgatgaatgctttgcctttaaaaaaataagtttgggtggggt

SEQ ID NO: 213963 - DNA, 201 bp, Homo sapiens
gaatctgaagccttgctctgattctgaaagggatttgcaaccaaaaaaggataaggattgttctgacaagtaccctttcttcccatcttcaaaagtacacmtctcttaatttgtgtcttcaaacacaaattgtgttcaaaaaaggaagtatttgagtagattaaagacagaaaccctaggacattcctttgtaaacaaaca

SEQ ID NO: 213964 - DNA, 201 bp, Homo sapiens; identical to SEQ ID NO: 37818

SEQ ID NO: 213965 - DNA, 201 bp, Homo sapiens
ctgaggtcgggagatagagaccagcctgaccaacatggaaaaaccccatctctactaagaaaaaaataataataatacaaaaattagctgggcatggtggygtgtgcctgtaatccgagctacttgggaggccgaggcaggagaatcacttgaacctgggaggcagaggttgcgatgagccaagattgtgccactgcattc

SEQ ID NO: 213966 - DNA, 201 bp, Homo sapiens
ctctaaccgtcttgcaaagatctttaaagtgtatccagcactgctattttttagctcagaaataccttagaggtttcctacttaaaaggtttttttaaaawatatatatatatttaaaaataagggttttaaaaaagcacatatttgtatttaaacaattcattctctaaaagagaaacatgaacttaaataattttatta

SEQ ID NO: 213967 - DNA, 201 bp, Homo sapiens
gaggtcgggagatagagaccagcctgaccaacatggaaaaaccccatctctactaagaaaaaaataataataatacaaaaattagctgggcatggtggtgygtgcctgtaatccgagctacttgggaggccgaggcaggagaatcacttgaacctgggaggcagaggttgcgatgagccaagattgtgccactgcattcca

SEQ ID NO: 213968 - DNA, 201 bp, Homo sapiens
atcccagcactttgggagaccaaggcgggtggatcacctgaggtcaggagttcgagaccagcctggctaacattgtgaaaccccgtctctactaaaaatamaaaaattagccttgcaaaaagtagcctgtaatcccagctactcgggaggctgagcaaggagaattgcttgaacctgggaggcagaggtttcagtgagcca

SEQ ID NO: 213969 - DNA, 201 bp, Homo sapiens
tccctcagtatctgtggagattagttccaggacccctcaagggtaccaagatccaggatgctcaagtttcttttcttttcttttttttttttttttttgaracggagtcttgcactgtcacccaggctggagtgcagtggtacgatttcggctcactgcaatctccacctcccgggttcaaatgattctcctgcctcagcc

SEQ ID NO: 213970 - DNA, 201 bp, Homo sapiens
cggtgctggctgagctcagcaacctgctctcttccttcagttcaggtttctccagggcaaagaagtctttattgttcctttctgtatgaccagatgggaamtgaattataatatagtccttagattatattcccacctggtagcaatgcactgagttacctgacctgaaatttgttggacttagtctccatggaggaggat

SEQ ID NO: 213971 - DNA, 201 bp, Homo sapiens
ccacttagcctccctgtgtttgtggggtaacaacccgagttcatgttgtgggcatctcatgcagtgtagtagctggtcactgtcaagtgtcactatttcaytgagtcagaagcctgcagaattgttctcattccagggagtgagtcagtctgctgttgcttactctcggtgctggctgagctcagcaacctgctctcttcc

SEQ ID NO: 213972 - DNA, 201 bp, Homo sapiens
cctaacttttaattttgatacggtcttttttttttttttttttttttttttaagacagtttcgctcttgttgcccaggctggagtgcaacggcgtgatctyggctcactgcaacctctgcctcctgggctcaagagattctcctgcctgagcctcccgagtagctgggattacaagtgtgcaccaccatgcccggctattt

SEQ ID NO: 213973 - DNA, 201 bp, Homo sapiens
cacccggcctcatatgcccaaattttaaaggaggcaccacattcaagtccaaatgcctaaaggtagaaggatcaagaaacagtagtatgaggccatttgasaagtatatatagttatccctcagtatctgtggagattagttccaggacccctcaagggtaccaagatccaggatgctcaagtttcttttcttttcttttt

SEQ ID NO: 213974 - DNA, 201 bp, Homo sapiens
ttcacccacctccacgtcccaaagtgctatgattacaggggtgagccaccatgtcaggcctttttctgaatatttttaatctgaggttggttgaatccacwgatgcagagcccatggatatggagggctgactgtactgtattgagcttctaaggtatgcagagtattggcactgaggggatgtgcaaatacaacaacaaa

SEQ ID NO: 213975 - DNA, 201 bp, Homo sapiens
ggaagctgggtgaggccgggcagaaggacgaagaagggcgtggaggggctgtcaggggagggcgaaaccgcggacgccgctctccagaagtcgtctccccrggggcgcggggaggcctgaatggctctctttggcgtccccgttgggcccaccctctcccagcgtcacggctatgctgggcgaggtgacccccggggtcgt

SEQ ID NO: 213976 - DNA, 201 bp, Homo sapiens
acaaaacagtaaaatcactttgtaaggtttatgagagttttgagaggccagggaagttaaagagtggagaaatggagaaaatgggagaacttgtactgaayccattaggacagaggaggaagggaagagaaggaaggaggccaaagaaagaagaaacccttcttagagcactcagggtcttactgaaaactttacccataa

SEQ ID NO: 213977 - DNA, 201 bp, Homo sapiens
acttcacgagtgaaccctggtacgccctggagcagagtcggactgggagggatcaagtgtgggggcagccggttagtccggacgcgggtttacctattacyttctgagcgcagtgctctgggtggattaattgccctgcaaaagctgccgggacctccttgcagtctttgcacgaggcctgcctgtgtcatgccatttaaa

SEQ ID NO: 213978 - DNA, 201 bp, Homo sapiens
tgtaaacaaacagccttttaccaaacaccaactgtcaagggacttgcctgagtacttgtccaaaggacagcgtgtccccatgtgtaggcagtggtctaatytggttcctaggagaggactgctgaggccacagcaacttaactggctagtgtgggtgaggcagaagtgtttgaagctcaaggtctgtcaaggacagctgat

SEQ ID NO: 213979 - DNA, 201 bp, Homo sapiens
atgcataaatgcagtgtggtacgagtgcctctgtagcccataacttcagtttccttgttgctagcagtctgtggtgacactatactaatctcacatgcagsaaccaatgaggattagccagggacacaggaggagtcaccttgcattcagaatgactcaagtttagtctcaacttgaccattagctctctgagtgatcttg

SEQ ID NO: 213980 - DNA, 201 bp, Homo sapiens
ctccagcctgggcgacagagcaagactccatctaaaaaaaaaaaaaaaaaaaaaaaaaatcgcttctgatgagccggttgtcgtggcctgtggctgtccatccttacgtactgtgttttgttgatggcgctacaaaccagacaaggtggagtgtgattgaagaaagaaacgctggccggtgcagtggctcactcctgtaat

SEQ ID NO: 213981 - DNA, 201 bp, Homo sapiens
agacacagaaactacatggttttttggaaggtcacgaacttttcaaggaactagtgggcaactggaaatgatatgtgaaagagtagagggagctctggccyagctgccagaaaactctgggcaggtcaggtctgggaacagtggctaatccaggcccagcttcccactgttgatttggacatacaggcctaagataagaga

SEQ ID NO: 213982 - DNA, 201 bp, Homo sapiens
ttcttgttcttcctcagtgtttaacaatcacccaattgctcattctcaccagcgacttcctcagtaagagctcaatatttgaggtggtgctgcattttgtsaaacattcatgcgtgttagcccacttagtcttcgcagcacacagtggattaatggatttttaaaagctggtatttatgcacgatggaatactactcaacc

SEQ ID NO: 213983 - DNA, 201 bp, Homo sapiens
cggctcttgtgaacactagtgttcctgccgaagcacgcctacttaccccgctgagcagagcctgagcctgcaacctccagagacctggggaaagccacatrctccgcttcccgcccccggcaagggcgtgtcagctacaaggggcgtgtcatctctaggccccgccccgcgctgcgtgcccacgttgcgccggcctcgcgc

SEQ ID NO: 213984 - DNA, 201 bp, Homo sapiens
ctcaaggtcctgaggggaatgaggagctgagctcagtcccttttggccccctttctctttccctcctcattttaagtatggaagctcacttatttcctttwtgtattggccatttgtgtagggttttgtttgaaaaagggcttgaggctgggcgtggtggcccacgcctgtaatcccagtactttgggaggccaaagaaag

SEQ ID NO: 213985 - DNA, 201 bp, Homo sapiens
tgttggttaccagcggctgggggaagggaagggtgggtgtggaaaggggagatgttgatcaaagggtacaaaatttcagttaggagaaataaggtctgatsatctgccttacagcatggtgactatagttaatatggttaatattataatagtattgtatacttcaaaattggtaaaagagtggattttaaaagttgtcac

SEQ ID NO: 213986 - DNA, 201 bp, Homo sapiens
gggcggccggaagctgggtgaggccgggcagaaggacgaagaagggcgtggaggggctgtcaggggagggcgaaaccgcggacgccgctctccagaagtcrtctccccgggggcgcggggaggcctgaatggctctctttggcgtccccgttgggcccaccctctcccagcgtcacggctatgctgggcgaggtgaccccc

SEQ ID NO: 213987 - DNA, 201 bp, Homo sapiens
ggccacagaagcaaagcattgctcatttgggtggttcccaacacagacacatggacgtgggtactactctcaaggagcaggccacagttatcccttgtgtmctgagtccttggagcagaatgtcatgtctgcttgtcctgtgttccctgacaagttgctgctatttgtgttggagtgaagtgtctgagaagccccagcctc

SEQ ID NO: 213988 - DNA, 201 bp, Homo sapiens
tctgcaggacccctggggcacttggggttggtgtgacgggcacctggccaacctgtgttctcctcacccctgccagtcctgcatgctcccaccctgccacrgtctcaatgagaacgggagggcctgtgagctggaagaggggtgtctagaaacaggcccctgacattcaattctcttctcatagaggacgaagacttctcc

SEQ ID NO: 213989 - DNA, 201 bp, Homo sapiens
agcgggatgctgggagcgggctggtgacgcgtctccgtgagcggccagccctgctggtcagcagcacgagctggacaggtctgcaggacccctggggcacytggggttggtgtgacgggcacctggccaacctgtgttctcctcacccctgccagtcctgcatgctcccaccctgccacggtctcaatgagaacgggaggg

SEQ ID NO: 213990 - DNA, 201 bp, Homo sapiens
gctcagaacctgaggacccagtcacggagcggtcggccttcacggagcgggatgctgggagcgggctggtgacgcgtctccgtgagcggccagccctgctsgtcagcagcacgagctggacaggtctgcaggacccctggggcacttggggttggtgtgacgggcacctggccaacctgtgttctcctcacccctgccagt

SEQ ID NO: 213991 - DNA, 201 bp, Homo sapiens
cactctccgttcagggcccggtaggcctcccatcctcagctgccttctctcctgctcgccactgccctggcctctccccttctcactgcagacctgggaayccactcatccaggggttggcaaactaaggctacaggccagtctgctgcttttgtaaatcaagtttcactgggacacaacacactcattgccttctgagtt

SEQ ID NO: 213992 - DNA, 201 bp, Homo sapiens
agacagggtttcaccacgttggccaggctggtctcgaactcctgacctcaaacgatccacctcccaaagtgctgggattacaggcatgagccaccgcgccyggcctgtatttcttccttttacagcaagagagaggatgttcactttggcagtgatacacagtgtccttctatttatttttttaaatttgtatttatttat

SEQ ID NO: 213993 - DNA, 201 bp, Homo sapiens
aagccgtgaccttacagcctttgcagtggtagcacagggtggctgagatcgctagtgaggccttcattgtatttcttccttttttttttttttttttttttgagacagtctcactctatgtcccagactggagtgcaatggcgccatctcggctcactgcagcctccgccttctgggttcaagcaattctcctgcctcagc

SEQ ID NO: 213994 - DNA, 201 bp, Homo sapiens
gcccatcgccatacagctaggaagtggtggaatcaggatttgaacgtaggtcgtcagtgtggttctatagtatacacacgcacgcatacgcgcgcacacasaaacacacatatatttttttgagacagagtttcgctcttgccgcccaggctggagtgcagtggcgtgatctcggctcactgcaacctctgcctgccgggt

SEQ ID NO: 213995 - DNA, 201 bp, Homo sapiens
gtcatcatctgagacttggattccccaagcgtccttcttttcctggagcctctgagtcctctattcctgaggcctttcttcagccctcccaatagccccgycatgatttcattgcagggctgtgaccgtctacgacaagcccgcatctttctttaaagagacacctctggacctgcagcaccggctcttcatgaagctggg

SEQ ID NO: 213996 - DNA, 201 bp, Homo sapiens
taacagagtgagactctgtctcaaaatataaaatgaaatgaaatgaaatgaaatataaaataaaataaaataaaataaaataaaataaaataaaataaaatgaaaacaagacacctggagcagggcgtggtggctcacacctgtaatcccagcactttgggaggctgaggtgggcggatcacttgaggttatgagtttgag

SEQ ID NO: 213997 - DNA, 201 bp, Homo sapiens
gtaacagagtgagactctgtctcaaaatataaaatgaaatgaaatgaaatgaaatataaaataaaataaaataaaataaaataaaataaaataaaataaaatgaaaacaagacacctggagcagggcgtggtggctcacacctgtaatcccagcactttgggaggctgaggtgggcggatcacttgaggttatgagtttga

SEQ ID NO: 213998 - DNA, 201 bp, Homo sapiens
tgacccacccctcttgcctagcagggtcggcggacctgggtgtctgtctgcacacgtcctccagtggcctggacctgcccatgaaggtggtggacatgttygggtgctgtttgcctgtgtgtgctgtgaacttcaagtggtaggagcagaacccaaatccttctggggatagctttgcagatccaccgctgagggggaagc

SEQ ID NO: 213999 - DNA, 201 bp, Homo sapiens
aggctgcaaagaacaccgacacccccttgttacccacagatgggtgggactgcgttggccagaggccgagaggagggtgctcacaggggaatgggcagcaygtagaggccgggaggtgctccagggcaccaagtgtgggaaagtgggacatgcggggaagtttccagaaactgtgatgtcaagttggaggcggagtgctgc

SEQ ID NO: 214000 - DNA, 201 bp, Homo sapiens
ggagtgtcttgggcctggggccacgtggcagggacagagatgggtccatggcagtgtctgctcttctctgtgaaggcaaagggcctctgagggagtattayagccgcctcatccaccagaagcacttccagcacatccaggtctgcaccccctggctggaggccgaggactaccccctgcttctaggtgagaggccagcag

SEQ ID NO: 214001 - DNA, 201 bp, Homo sapiens
ttctctcctgctcgccactgccctggcctctccccttctcactgcagacctgggaacccactcatccaggggttggcaaactaaggctacaggccagtctsctgcttttgtaaatcaagtttcactgggacacaacacactcattgccttctgagttgtctacagccgcctttgagctgcaatagcagaatcgcgttttgc

SEQ ID NO: 214002 - DNA, 201 bp, Homo sapiens
ccagtacggagtcaaagttgtacttcaggctatgtacttgctgtggaagttgatgtggagggagccaggtgcctatatctttctccaggtgtgtatcagcytctgcctccctctgtgagagccatgttagcagtttactttccagcacaaattggtactatattgcatattcatatgtgtgtgtgttgtgtgtatgggcgt

SEQ ID NO: 214003 - DNA, 201 bp, Homo sapiens
gttggaggcggagtgctgctggggtgtgaagggtctcgagtccaagtgagggagttagggacttgggaggggttgttgttgggtcggggacctggggtcakccaggtggtgacctgggatggggtggggacaggcaatgaggtaagctctgctctttatttttttgcagatgcttttctcaaactttcctgatcctgcggg

SEQ ID NO: 214004 - DNA, 201 bp, Homo sapiens
tctagattagtttaattgagcacctactgtttgccaggcatcatgttaagtgaaggtaggtaagattcaggccctatctctgtgtgcctcctagagcaatstgaacaagaattggccgcattctctgttctggctagtgaggagcagagagaggttttgaaatatcttactttccaaaacactgtccgtgattcagcctga

SEQ ID NO: 214005 - DNA, 201 bp, Homo sapiens
tccactatccagacaatctagattagtttaattgagcacctactgtttgccaggcatcatgttaagtgaaggtaggtaagattcaggccctatctctgtgkgcctcctagagcaatctgaacaagaattggccgcattctctgttctggctagtgaggagcagagagaggttttgaaatatcttactttccaaaacactgt

SEQ ID NO: 214006 - DNA, 201 bp, Homo sapiens
aggtgctccagggcaccaagtgtgggaaagtgggacatgcggggaagtttccagaaactgtgatgtcaagttggaggcggagtgctgctggggtgtgaagrgtctcgagtccaagtgagggagttagggacttgggaggggttgttgttgggtcggggacctggggtcagccaggtggtgacctgggatggggtggggaca

SEQ ID NO: 214007 - DNA, 201 bp, Homo sapiens; identical to SEQ ID NO: 37858

SEQ ID NO: 214008 - DNA, 201 bp, Homo sapiens
ttgcctttaatccctgtttagaatctgctatcctagggtgatggggtagagtgggacttcctagggatggctctgtggtgggaaaattccactatccagasaatctagattagtttaattgagcacctactgtttgccaggcatcatgttaagtgaaggtaggtaagattcaggccctatctctgtgtgcctcctagagca

SEQ ID NO: 214009 - DNA, 201 bp, Homo sapiens
gcgttggccagaggccgagaggagggtgctcacaggggaatgggcagcacgtagaggccgggaggtgctccagggcaccaagtgtgggaaagtgggacatrcggggaagtttccagaaactgtgatgtcaagttggaggcggagtgctgctggggtgtgaagggtctcgagtccaagtgagggagttagggacttgggagg

SEQ ID NO: 214010 - DNA, 201 bp, Homo sapiens
gggtggcctgggcaaaggactctgggaagggtggctgcagggggatgacggttaggcagcggaggttaggccagtcctgggcgtagagcctgctgtccacrggatgctggggagagggctgcccgccctgtccttctcagccctgattctccaggctcacaggctagatctttgatctagcaattgcaattcaacccagaa

SEQ ID NO: 214011 - DNA, 201 bp, Homo sapiens
ttgttccaataaaactttatttacaaacacaggctgtgggctggatttggcctgcaggctgtagtttgtgatccttgattcagacagtttagcaaggctgmaaagaacaccgacacccccttgttacccacagatgggtgggactgcgttggccagaggccgagaggagggtgctcacaggggaatgggcagcacgtagag

SEQ ID NO: 214012 - DNA, 201 bp, Homo sapiens
attaaggggtgtggctttgttccaataaaactttatttacaaacacaggctgtgggctggatttggcctgcaggctgtagtttgtgatccttgattcagasagtttagcaaggctgcaaagaacaccgacacccccttgttacccacagatgggtgggactgcgttggccagaggccgagaggagggtgctcacaggggaa

SEQ ID NO: 214013 - DNA, 201 bp, Homo sapiens
ttctgcaaaggttacttgtttcttattgcaaaaagtaatacatcattcttgccaacagaatgattggcaggattttcagtaaaggtccaggtcggaagtcrtttagactgggttccccagtctctgtcagaaccatggtactctgttggggtgtgaaagtagccacagatcatctgtagattaaggggtgtggctttgttc

SEQ ID NO: 214014 - DNA, 201 bp, Homo sapiens
tctgggacagagccatgtggtaacgactggaacgggagtatgcctgtctccaaaaagagggctgtgggttgaaggtcaccttaagaggcacccctgtcctktgatgtcaccctggaggcccagagtaactcttctggaagccccatcatgtccatgcccgacagcgtccattgttcccttttcccagagccaagagctggg

SEQ ID NO: 214015 - DNA, 201 bp, Homo sapiens
ccaggcctttatacccttcagatgccaaatctaagaaccagctcccggaaaccacaccccctgttccaacccccagcctggcttgagcatggggtgtgtgkgggagcccaggtgggcaccccaggggtctggtgtcttctacaggcagctctcaggctcccttggttctctctgcagtttacatgagctggtgaaacatga

SEQ ID NO: 214016 - DNA, 201 bp, Homo sapiens
ggtaacagagtgagactctgtctcaaaatataaaatgaaatgaaatgaaatgaaatataaaataaaataaaataaaataaaataaaataaaataaaataaaatgaaaacaagacacctggagcagggcgtggtggctcacacctgtaatcccagcactttgggaggctgaggtgggcggatcacttgaggttatgagtttg

SEQ ID NO: 214017 - DNA, 201 bp, Homo sapiens
aacccaaatccttctggggatagctttgcagatccaccgctgagggggaagcagtgcagagggagctgcccacagtgaggccctgcccctcggtcagtccrgcacacactggaggccatgaggaggagccctgcggttactgtggctgggctgagcctcactgaagtagttgcttccatttagagctcatgttatatttag

SEQ ID NO: 214018 - DNA, 201 bp, Homo sapiens
gaaatggggttacgccatgttggccaggctgttctcgaactcctgacctcaggtaatccgcccccctcggcgtcccaaagtgctgggattacaggcgtgcrccaccgcgcctggcctatcgttatacttttaatcccttcccttgatcactttttctttaaaaaatttttctttcttttttagctgaaggaagaatacttt

SEQ ID NO: 214019 - DNA, 201 bp, Homo sapiens
gcaatctgaacaagaattggccgcattctctgttctggctagtgaggagcagagagaggttttgaaatatcttactttccaaaacactgtccgtgattcakcctgagttgggagattatctgactttagattgctgcttctggtacattaaagggatcattctcatttttcagactccaaaccccatgatgagctcttgca

SEQ ID NO: 214020 - DNA, 201 bp, Homo sapiens
caatctgaacaagaattggccgcattctctgttctggctagtgaggagcagagagaggttttgaaatatcttactttccaaaacactgtccgtgattcagyctgagttgggagattatctgactttagattgctgcttctggtacattaaagggatcattctcatttttcagactccaaaccccatgatgagctcttgcag

SEQ ID NO: 214021 - DNA, 201 bp, Homo sapiens
tttcattcctcatccctcaacgcagagctctgcagacagatgttttcatttgttcttcatgtccagcttttccccacagtgtgcagggcagcggtgtctgytccctcattattctccacgttggtatcttgagagggtagctcaaccccatctcaggaagaagtgggaacagcactagttgcctttaatccctgtttagaa

SEQ ID NO: 214022 - DNA, 201 bp, Homo sapiens; identical to SEQ ID NO: 37851

SEQ ID NO: 214023 - DNA, 201 bp, Homo sapiens
aagtgtgttaagtgaatccattgcgtggtctcacgtaattctcctagtaagtggaacccaggtgcgtggaactccagggctagtgctggtagctacgtccstgtgcagctacccttgtcaggctatgtctgagctgacaggatatttcattcctcatccctcaacgcagagctctgcagacagatgttttcatttgttctt

SEQ ID NO: 214024 - DNA, 201 bp, Homo sapiens
acttacattttcagatgtcccagccaggctgtgtggctgcttggccagcttaagccacttgtgtttggggctgttgggggccttatctgattttcactctycttgggggatgctgcctcactgtgctgggaggatttgtgttcccagggcagagaccagtgctctgacccacccctcttgcctagcagggtcggcggacct

SEQ ID NO: 214025 - DNA, 201 bp, Homo sapiens
gaggtggaggttgcagtgagctgagattgtgccactgcactccagcctgggtgacagaatgagactctgtctcaaaacaaaacaacacaacaacaaaaaaaccaaattgtggttacgtataaaaagtgtcaacttacattttcagatgtcccagccaggctgtgtggctgcttggccagcttaagccacttgtgtttgggg

SEQ ID NO: 214026 - DNA, 201 bp, Homo sapiens
ttcattgcagggctgtgaccgtctacgacaagcccgcatctttctttaaagagacacctctggacctgcagcaccggctcttcatgaagctgggcagcatrcactctccgttcagggcccggtaggcctcccatcctcagctgccttctctcctgctcgccactgccctggcctctccccttctcactgcagacctgggaa

SEQ ID NO: 214027 - DNA, 201 bp, Homo sapiens
cgatgtgtcaaacagcgtcgcctctcccagtgagatggttctcctttgcctccgtctctttccccgttgatttctccaagtggggagtcgtgccttggtcytgatgcgtctctagagctgcatcttccagcttcgagtgagcagagcagttggaggctgaaggccttttcctggcaggactctccacctagtctttgtttt

SEQ ID NO: 214028 - DNA, 201 bp, Homo sapiens
aggaggcggggggaacagggtgggcgggatgtactttttctgaaaaggtggctctggaggccactgggggacgggacctgggctctggctgaactcccagsaggaggctacttcctggtgtgccagcccctccctgccaggtggccccaggggccgtttaccaaggggtttgaggaggccacgtcctttcagcctgccacg

SEQ ID NO: 214029 - DNA, 201 bp, Homo sapiens
ccagcacatccaggtctgcaccccctggctggaggccgaggactaccccctgcttctaggtgagaggccagcaggaggctcagggaggaggcggggggaasagggtgggcgggatgtactttttctgaaaaggtggctctggaggccactgggggacgggacctgggctctggctgaactcccaggaggaggctacttcct

SEQ ID NO: 214030 - DNA, 201 bp, Homo sapiens
cgtctgtgtgataacaggtactgcctgggaccctgggtgtctgtttggttgggggatggcggagggggaggggcacgcagcctttaccctgtgcttcccaygatcttgtctccttaatcctcactgcagctctgccatagggtcttatactgcttgacatgggggaaactgaggctcagaggcagggcagggagcccagat

SEQ ID NO: 214031 - DNA, 201 bp, Homo sapiens; identical to SEQ ID NO: 37843

SEQ ID NO: 214032 - DNA, 201 bp, Homo sapiens; identical to SEQ ID NO: 37844

SEQ ID NO: 214033 - DNA, 201 bp, Homo sapiens
tctggacctgcagcaccggctcttcatgaagctgggcagcatgcactctccgttcagggcccggtaggcctcccatcctcagctgccttctctcctgctcrccactgccctggcctctccccttctcactgcagacctgggaacccactcatccaggggttggcaaactaaggctacaggccagtctgctgcttttgtaaa

SEQ ID NO: 214034 - DNA, 201 bp, Homo sapiens
caatgaggtaagctctgctctttatttttttgcagatgcttttctcaaactttcctgatcctgcgggcaagctaaaccagttccggaagaacctgcgggartcgcagcagctccgatgggatgagagctgggtgcagactgtgctccctttggttatggacacataactcctgggccagaggctataaaaccccaggaccc

SEQ ID NO: 214035 - DNA, 201 bp, Homo sapiens
tatttttttgcagatgcttttctcaaactttcctgatcctgcgggcaagctaaaccagttccggaagaacctgcgggagtcgcagcagctccgatgggatkagagctgggtgcagactgtgctccctttggttatggacacataactcctgggccagaggctataaaaccccaggacccctgctgtccttcccgcagcttc

SEQ ID NO: 214036 - DNA, 201 bp, Homo sapiens; identical to SEQ ID NO: 37848

SEQ ID NO: 214037 - DNA, 201 bp, Homo sapiens
tccagggcaccaagtgtgggaaagtgggacatgcggggaagtttccagaaactgtgatgtcaagttggaggcggagtgctgctggggtgtgaagggtctcragtccaagtgagggagttagggacttgggaggggttgttgttgggtcggggacctggggtcagccaggtggtgacctgggatggggtggggacaggcaat

SEQ ID NO: 214038 - DNA, 201 bp, Homo sapiens
tcgtcattgactggcacaactatggctactccatcatgggtctggtgcatggccccaaccatcccctcgttctgctggccaagtggtgagagtctaggaaragggtaaaataccgtcccctaaaccactcaaggatgagtgagaagaagggccatagtgggcctccggaagtcggttccttgtgggctctgcaggaggtgg

SEQ ID NO: 214039 - DNA, 201 bp, Homo sapiens
tctattcctgaggcctttcttcagccctcccaatagccccgtcatgatttcattgcagggctgtgaccgtctacgacaagcccgcatctttctttaaagasacacctctggacctgcagcaccggctcttcatgaagctgggcagcatgcactctccgttcagggcccggtaggcctcccatcctcagctgccttctctcc

SEQ ID NO: 214040 - DNA, 201 bp, Homo sapiens
tggcccattctgcaaggtagagggcggcgtcccatgtgaccaggcctgtggtaccgtaggagatgatggccgtgctctcggagagtgtgaccgagcctccygagggctgcaccaagagaaggcgagagagtcagtccagcgatcagaaggcaagtggcttagaagacaagtagccccaccacatggctgaataaaccatga

SEQ ID NO: 214041 - DNA, 201 bp, Homo sapiens
tccagcacatccaggtctgcaccccctggctggaggccgaggactaccccctgcttctaggtgagaggccagcaggaggctcagggaggaggcggggggarcagggtgggcgggatgtactttttctgaaaaggtggctctggaggccactgggggacgggacctgggctctggctgaactcccaggaggaggctacttcc

SEQ ID NO: 214042 - DNA, 201 bp, Homo sapiens
gtggcagggacagagatgggtccatggcagtgtctgctcttctctgtgaaggcaaagggcctctgagggagtattatagccgcctcatccaccagaagcayttccagcacatccaggtctgcaccccctggctggaggccgaggactaccccctgcttctaggtgagaggccagcaggaggctcagggaggaggcgggggg

SEQ ID NO: 214043 - DNA, 201 bp, Homo sapiens
accttctctcaagggccctgtcttcgtcccagaagtggttgttttcctcctgtggtctctgaaggacacagggcatggctctgggacagagccatgtggtracgactggaacgggagtatgcctgtctccaaaaagagggctgtgggttgaaggtcaccttaagaggcacccctgtcctgtgatgtcaccctggaggccca

SEQ ID NO: 214044 - DNA, 201 bp, Homo sapiens
ggccagtgcttaccccgccatgtttgcagcccgaggccagctggctgcaggtgaaaggctatgcgtcaggggtcagggtgcacacacccctgcaggtctcrgggctcctgggttgcttctggaagggcccggatggggcctgactggagctgctgaggggtggagcttctgggaaagggatccctcctaggggggagtgtc

SEQ ID NO: 214045 - DNA, 201 bp, Homo sapiens
gctggagaagtgggccacagttgctgcagctgatgtgacagggagggaagaagggccagtggtagcagtgggacgtggagctgggaaggtcatctgctgtmctctgagcccaactataacatctctgttatactctgcacggccagccttcaggtgcacatccagcctccgtgtgcatgtccagctgctgcgtgtacttcc

SEQ ID NO: 214046 - DNA, 201 bp, Homo sapiens
aaaaggctgggtccacccagtgggcggtcgggtgccaggccagtgcttaccccgccatgtttgcagcccgaggccagctggctgcaggtgaaaggctatgygtcaggggtcagggtgcacacacccctgcaggtctcagggctcctgggttgcttctggaagggcccggatggggcctgactggagctgctgaggggtgga

SEQ ID NO: 214047 - DNA, 201 bp, Homo sapiens
caaggtgactcagtgaggagggagaaaagcggaagcggtgtgggaagaggccgggtctgggccagctgctggtcctgctctcctccctcctctggcctctrggctcccaggagtggtttggaacccgcgccatatgctctgggggctgtgccagggcaggaggagtcctcgtgtcccctgtgcacaacacagacaaaaggc

SEQ ID NO: 214048 - DNA, 201 bp, Homo sapiens
ccatgttggccaggctggtcttgaactcctgacctcaggtgatccacccgccttggcctcccaatatgctggaattacaggcacgaatcactgtgcccggycatgtcattggtgccttaaccaagcctcttaatttttcaaacggaagagcccctgtcccacagttactgctgctgagccctttcaaggtgactcagtgag

SEQ ID NO: 214049 - DNA, 201 bp, Homo sapiens
gatttgaatctgtagataccaagctttctactttttcagtagtttccaagcatcttttttttgttgttgttacgtcattggtgtcttttttttttttttttgagacagagtctctgtcgcccaggctggagtgcagtggtgcgatctcggctcactgcaacctccgcctcccacattcaagcaattctcatgccccagcct

SEQ ID NO: 214050 - DNA, 201 bp, Homo sapiens
cccaaccatcccctcgttctgctggccaagtggtgagagtctaggaagagggtaaaataccgtcccctaaaccactcaaggatgagtgagaagaagggccrtagtgggcctccggaagtcggttccttgtgggctctgcaggaggtggggtgaggctggtgaatcaggccgaatgctggttccaaatgatagaaacaggcc

SEQ ID NO: 214051 - DNA, 201 bp, Homo sapiens
cctgtgcttcccacgatcttgtctccttaatcctcactgcagctctgccatagggtcttatactgcttgacatgggggaaactgaggctcagaggcagggyagggagcccagatttgaatctgtagataccaagctttctactttttcagtagtttccaagcatcttttttttgttgttgttacgtcattggtgtcttttt

SEQ ID NO: 214052 - DNA, 201 bp, Homo sapiens
ccctccaggagagtatctcacacaggctggtggcctccccgccagagcagtgctctttctccacctgaccaggtgactctggctattgtttatttaaaaawttttttctgaatgggcatggtggctcaaacctgtaatcctagaactctgggaggccgaggcaggcagatcatctgaggtcaggagttcgagaccaacctg

SEQ ID NO: 214053 - DNA, 201 bp, Homo sapiens
gcttattatcaagagctctgtaaagataacagactcatcaccatgtgtgttgtgactatttttactgggtttattgcctagcatggtctgggtttcctccycttcaagtctctatctttcctagaaccccccaggtctgcctagcattgctgtctgctggttcgtgggctgcctttgtggaagcaagctcgtcattgactg

SEQ ID NO: 214054 - DNA, 201 bp, Homo sapiens
acttctccatcctgctggcagctttagaaagtaggtgtgtggctgcggtgaggagctctgggcttgtcgggggccactgagctgtaagctgcttgcctggyctgcagcatgttcctgtcccaggccactgggtggggcagcctggggacagcgggggtggtggaagtgggccgccctgaatccccagttgggtcattgagt

SEQ ID NO: 214055 - DNA, 201 bp, Homo sapiens
aggtgcccaccacaactgcctaatttttgtatttttagtagagacagggtttcaccatgttggccaggctggtcttgaactcctgacctcaggtgatccayccgccttggcctcccaatatgctggaattacaggcacgaatcactgtgcccggccatgtcattggtgccttaaccaagcctcttaatttttcaaacggaa

SEQ ID NO: 214056 - DNA, 201 bp, Homo sapiens
gtgctgggattacaggcgtgcgccaccgcgcctggcctatcgttatacttttaatcccttcccttgatcactttttctttaaaaaatttttctttcttttytagctgaaggaagaatacttttttttttaaatcaatttttaatatatagaagcaccttcctcttttatttatttatttttatttttcctgagatggagtc

SEQ ID NO: 214057 - DNA, 201 bp, Homo sapiens
cagggcccggtaggcctcccatcctcagctgccttctctcctgctcgccactgccctggcctctccccttctcactgcagacctgggaacccactcatccrggggttggcaaactaaggctacaggccagtctgctgcttttgtaaatcaagtttcactgggacacaacacactcattgccttctgagttgtctacagccg

SEQ ID NO: 214058 - DNA, 201 bp, Homo sapiens
agtcctctattcctgaggcctttcttcagccctcccaatagccccgtcatgatttcattgcagggctgtgaccgtctacgacaagcccgcatctttctttmaagagacacctctggacctgcagcaccggctcttcatgaagctgggcagcatgcactctccgttcagggcccggtaggcctcccatcctcagctgccttc

SEQ ID NO: 214059 - DNA, 201 bp, Homo sapiens
aaactttatttacaaacacaggctgtgggctggatttggcctgcaggctgtagtttgtgatccttgattcagacagtttagcaaggctgcaaagaacaccvacacccccttgttacccacagatgggtgggactgcgttggccagaggccgagaggagggtgctcacaggggaatgggcagcacgtagaggccgggaggtg

SEQ ID NO: 214060 - DNA, 201 bp, Homo sapiens; identical to SEQ ID NO: 37853

SEQ ID NO: 214061 - DNA, 201 bp, Homo sapiens; identical to SEQ ID NO: 37852

SEQ ID NO: 214062 - DNA, 201 bp, Homo sapiens; identical to SEQ ID NO: 37855

SEQ ID NO: 214063 - DNA, 201 bp, Homo sapiens; identical to SEQ ID NO: 37854

SEQ ID NO: 214064 - DNA, 201 bp, Homo sapiens
cctgctgaggggcaatttgaaatactgagggcctgggaggtggtctttggtttggggaagctgggggaggagggggcagagtttctttcttagccagccakggggtccaggcagttttggtcctaggacgtctctctgtgcattcccaagtaattgcaaggcttcttcttgtcatcatctgagacttggattccccaagcg

SEQ ID NO: 214065 - DNA, 201 bp, Homo sapiens; identical to SEQ ID NO: 37856

SEQ ID NO: 214066 - DNA, 201 bp, Homo sapiens
tcccaggcaagcccatttccgagctttctctgcatcttgagaggaacaggcgatgataccctggcggtgataaataacccagaatcgcgcatgccgtgttmcggctctaccctgcgatcagggctcagtctccgttaggagagaatgtgtacaatgctcactgaatccctttgccccacgttgagagcaagccgtgacctt

SEQ ID NO: 214067 - DNA, 201 bp, Homo sapiens; identical to SEQ ID NO: 37857

SEQ ID NO: 214068 - DNA, 201 bp, Homo sapiens
tgctgttggtagctggagaagtgggccacagttgctgcagctgatgtgacagggagggaagaagggccagtggtagcagtgggacgtggagctgggaaggycatctgctgtactctgagcccaactataacatctctgttatactctgcacggccagccttcaggtgcacatccagcctccgtgtgcatgtccagctgctg

SEQ ID NO: 214069 - DNA, 201 bp, Homo sapiens
atgactttttacatctattttggtggtggagagggtctttcttctgcttattatcaagagctctgtaaagataacagactcatcaccatgtgtgttgtgaytatttttactgggtttattgcctagcatggtctgggtttcctcctcttcaagtctctatctttcctagaaccccccaggtctgcctagcattgctgtctg

SEQ ID NO: 214070 - DNA, 201 bp, Homo sapiens
gtcgcccaggctggagtgcagtggcacaatcatagcttaactgcagcctcatcctcctgggctcaagtgatcctacctcctcagcctcctgagtagctggrgctgcaggtgtgtcccaccacacctggctaatttttaaattttttgtagagatgaggtctcactgtgtttcctaggccggccttgaactcctgggctcaa

SEQ ID NO: 214071 - DNA, 201 bp, Homo sapiens
gtcttgaactcgacctcaggtgatctgctcacctcagcctcccaaagcctcagcctcttacagtgttgggattacaggcgtgagacactgtgacccgggaygattttcaatcacagttttttgttacgagtggaaaatgcgtatttataagaatgaagtagtacagacatgaatgtgtagaaatctctataatcctgccat

SEQ ID NO: 214072 - DNA, 201 bp, Homo sapiens
ggggcacttggggttggtgtgacgggcacctggccaacctgtgttctcctcacccctgccagtcctgcatgctcccaccctgccacggtctcaatgagaaygggagggcctgtgagctggaagaggggtgtctagaaacaggcccctgacattcaattctcttctcatagaggacgaagacttctccatcctgctggcagc

SEQ ID NO: 214073 - DNA, 201 bp, Homo sapiens
aggctggtcttgaactcgacctcaggtgatctgctcacctcagcctcccaaagcctcagcctcttacagtgttgggattacaggcgtgagacactgtgacmcgggacgattttcaatcacagttttttgttacgagtggaaaatgcgtatttataagaatgaagtagtacagacatgaatgtgtagaaatctctataatcc

SEQ ID NO: 214074 - DNA, 201 bp, Homo sapiens
gtcacaaagaaaactatagtttataaatagcgatgtctagacgtattttatgtagaatttttagcaatttgaatggatatgtgttgcattttcttttctcktttgaaagaacatttcacttaaaaaatagttaaatcatagtttgttaaatgagacttgatagcagcaaacagccctcctctgctgtatcataaatgcctg

SEQ ID NO: 214075 - DNA, 201 bp, Homo sapiens
gggttgaaaccttgttgctttgacttatgctgttattgttactttctgcccccactgcaattcttttttacatctgatcacataatctctttctgattctytaatgtgtatatgatttttatgtcctttttggaggttttatctgatgttccctttttattattagggataataatatccctaataatagttatattatca

SEQ ID NO: 214076 - DNA, 201 bp, Homo sapiens
ggcggtgagctgtaagttatatttccattgggagagacttactttgctgtatcccactagaatctaaggaaaaatcacaataaaggctcatactttaagayattctggaagatgggagaccatgtagcctaatggagacagtatgagctccatcactagctagtgtatctcaggtaagttacttagactctgtaaagtttg

SEQ ID NO: 214077 - DNA, 201 bp, Homo sapiens
ccgtgtgcaagtgctttgtccagtggattatctttcttgatccttacggcaaccctgtgaagtaagcactatctttggcctattgtagatgagacaactcrggcttagaaaggctaagtaacttgcacaagatcctacagctggtaaataaatactggtttactatgtaacatcatggcatgcaaatactagtgaatgatg

SEQ ID NO: 214078 - DNA, 201 bp, Homo sapiens
ttacagttgccttctttataatctgacaaaagaattgttgaaccctaaatcgtacatgtgaaaggttgaataataacctttgcactagatttacttttgcsataagtgttcactaatctttatgtcattgaagcagacaaagcgtgttggatagaaatatttctgttatgaatatggtatgtacagaattgttgaaaaata

SEQ ID NO: 214079 - DNA, 201 bp, Homo sapiens
tggacacggaaagaaaaaagatggcttctgagaggtggataaattcttactcaaacagaaggatacttaataatagcaaggggaagccagaaaattgctgkccaagatcactgcttttagtttaggtctggggtttttccaagtcttcctcaagcatggaagtccctctttaatttcttcaatactaaagagaaaactttt

SEQ ID NO: 214080 - DNA, 201 bp, Homo sapiens
ggaccacaggcacccaccaccatgcccggctagttttttgtatttttagtagagacggggtttcaccgtgttagccaggatggtctcgatctcctgacctygtgatccgcccgcctcggcctcccaaagtgctgggattacaggcttgagccaccgcgcccggccaataacgtcttttattataccacgattggttattta

SEQ ID NO: 214081 - DNA, 201 bp, Homo sapiens
ctggacacggaaagaaaaaagatggcttctgagaggtggataaattcttactcaaacagaaggatacttaataatagcaaggggaagccagaaaattgctkgccaagatcactgcttttagtttaggtctggggtttttccaagtcttcctcaagcatggaagtccctctttaatttcttcaatactaaagagaaaacttt

SEQ ID NO: 214082 - DNA, 201 bp, Homo sapiens
gcccaggctggagtgcagtgggacaatctcggctcactgcaagctccgcctcccgggttcacgccattctcccgcctcagtctccagattatttgggactrcaggcgcccgccaccacgcccggctaattttttgtttttgtatttttagtagagatggggtttcaccgtgttagccaggatggtcttgatttcctgacct

SEQ ID NO: 214083 - DNA, 201 bp, Homo sapiens
gaccactgtaattttttccattttgctttgcttctcagattcctttttgccagcttttctgtccagcaaagggactcttgagcagttcatcttccccagcrtgttctcctgactcaaaggaaagatttttgtaatgtgttttaatgatttgcatagcaacaggctcattataaacacatggttttcacatttttctggaca

SEQ ID NO: 214084 - DNA, 201 bp, Homo sapiens
accgaggcgggcggatcacgaggtcaggagatcgagaccatcctggctaacatggtgaaacccgatctctactaaaaaaatacaaaaaaaaaaaaaaaaaattagcccggcttggttgggggcacctgtagtcccagctacgcgggagtctgaggcaggagaatggcgtgaacctgggaggcggagcttgcagtgagccga

SEQ ID NO: 214085 - DNA, 201 bp, Homo sapiens
taggcgaggcttgtgcgcccgctcccgccctggccaccagtgcccacccggtcggcctggcacagccatgatcaaggcgatcctaatcttcaacaaccacrggaagccgcggctctccaagttctaccgcccctacagtgaagatacacaacagcaaatcatcagggagactttccatttggtatctaagagagatgaaaa

SEQ ID NO: 214086 - DNA, 201 bp, Homo sapiens
gttgcccaggctggcctcaaactcctaggctcaagtagtccttccacctcggtctcctgagttgatgggattacaggcgtaagcctggccactccacttcyttccccattccctgtgctccgctccctacttccccttttcaactcaagaagccattctgtcttgtctgacacgaaagactattctgttctgagctctttg

SEQ ID NO: 214087 - DNA, 201 bp, Homo sapiens
gccagccctgacgccaggtgcagcaggatctcgttgagctgctccatctgcagggtgtagcggacctccacctccctcaggctgttctccaagctggcctkcagatttttcatggagtccaggtcgatctccaaggactggaccgtacgtcccagctccgtgagtgtcatctcagcagctccaacctgggcggactgggtg

SEQ ID NO: 214088 - DNA, 201 bp, Homo sapiens
catggtctccttctcgttctggatgcctcctattcctgccaggcccccagccatccctgcggccaggccccgggaccccaagccatcccagaagctggtgkagcaggacacggagatctggaaaccagagcccctggcacgtgcataggctctggccacgctgttgaccagctgggcggctggacagagcccagggaccag

SEQ ID NO: 214089 - DNA, 201 bp, Homo sapiens
cgctgttgaccagctgggcggctggacagagcccagggaccagtaattggtggagaagttggagcaagtggtgaaactcatgctgtctggggaggagaacragaggacaggacccaggctttgccaacgacctcagtatactactacttcaatacatatttattctgacattaaaataagacagtgaaaaagtaaaaacaa

SEQ ID NO: 214090 - DNA, 201 bp, Homo sapiens
gctctgagacttcacagcaggggcaagaagacttgcagggcagatacgagaaatcttcaggccacttaattcagagtccattggcagaataggcagagaakgtgtgtgtgtgtgtgtgtgtgtgtgtgtgtgtgtgtgtgtgttaggctgggttgtagagatgggttttggaaatgatagttgggtcttgaaactactatt

SEQ ID NO: 214091 - DNA, 201 bp, Homo sapiens
gtgggtctccaggtgtgcaaaagtattttcattctcggattctgttatgaggacctggtccttatcagtggtttatcccgctggcctacaaataagtgatrtgatgagaatcctctcaagctcagaatgaacaggatgtggcacctgctacatcaaacaaagataaacacaggcagaggtcactttccatcttttatagaa

SEQ ID NO: 214092 - DNA, 201 bp, Homo sapiens
caacagtgaatgttcaatgcaaggaatagctttttaaaacatatggcaaatttgtggttctttagaatccattgtcatatagtggttaatatatatatatwtttttttgagacacactctttcgcccaggctagagtgcagtggtgccacttcggctcactgcaacctccacctcccaggttcaagcgattctcatgcttc

SEQ ID NO: 214093 - DNA, 201 bp, Homo sapiens
tttacatggctctctcctgttttgggcacgtctgctgaactggacttggaatgaagatttcacttgtggggaggggtgggtgaaatattttaaaagcaacrcgtacccggcctctgagttcctggtgccttatttgtagttctgtggtaatacagcccatgctttcagaacaccacacggacctgctcactctgagaagca

SEQ ID NO: 214094 - DNA, 201 bp, Homo sapiens
caagaatattaaaaccaattaccctaccactcaagtatatccactgtgtttttatatattatttctaaactttctattaattatataactgtaatcatgtyatatatttagaataatagtcacatagagcaatatattgtgagaatactttttctgcttttcttcccatttatctttttagtcacacttttctctgttgcc

SEQ ID NO: 214095 - DNA, 201 bp, Homo sapiens
gggaggatagaaaagaaaagaatggaaggaagcaggtggacgtttgctctggcaggtgacccagatgaactagacttggggaaagatttccccaagtcttrtgttcctgtcttgtcctttagtctccttccaaatccagctttctaagtgctgcagtttttcattgtaagcctagagggccatccagttgtgctttatcac

SEQ ID NO: 214096 - DNA, 201 bp, Homo sapiens
tttattggcaattgaatatattcaaatggcatttttcctttaattcctatctgacctttagaaaatcagatagtgacttttggaatggtatttgaattackgttggtatgtgtatactctgactccaaattaatgttagtcactttattgtctaaaaacgctacccaggcaccattagaagtgactctagcttggccgggc

SEQ ID NO: 214097 - DNA, 201 bp, Homo sapiens
attgagcagtggggaaggtggtatggttgagtggttgccaatactgaatgactgcaagcccctgaggctgagacattcctgagggcaaggaaaagctgtgkgtaattgtcctaggtccctgggctcttggagagtccaagtgacagcattgcccaggacctcgatgacagaagaggggtggcaatcactgttggaagtgat

SEQ ID NO: 214098 - DNA, 201 bp, Homo sapiens
ttagctgggcgtggtggtgtgcgcctgtaatcccagctacccaggaggctgaggcaggagaatcgctggaacccaggagacaggggctgcagcgagctgaratcatgccactgcactccagcctgggtgacagcgcaagcctccgtcttaaaaaaaaaaaaaaaaaaaaagttgactttagcttgttccttgagagtccct

SEQ ID NO: 214099 - DNA, 201 bp, Homo sapiens
aggaagctgctcacataaaaatgacattttagtgtggctttccctacttggtttcatcgtagtgcattttttgtaagtggttcagggatgtggttcttgtscctgaggactggctcttctgtcttcttttctcatcattgcagtaaacttattgcagaactcatggcaccagagctgtgtgttctagttttcttaagaaaa

SEQ ID NO: 214100 - DNA, 201 bp, Homo sapiens
attggaccaggtgattcggctagccggcctagctgtgcaaggtaagacatagttatgagcagcatgtgaaattccattttctgtttgatcatggtgttgcyggcctctcagagtgagaagttagatttacttaaatgatcccttagtaatgctccctttttatttcaagttatcttacgtgaaaaatgcaaagttagtgat

SEQ ID NO: 214101 - DNA, 201 bp, Homo sapiens
tgaggcaggagaatcgctggaacccaggagacaggggctgcagcgagctgaaatcatgccactgcactccagcctgggtgacagcgcaagcctccgtcttaaaaaaaaaaaaaaaaaaaaagttgactttagcttgttccttgagagtcccttaggccatgtaagatgaaactactctgggcagatgtgtaacgggccaag

SEQ ID NO: 214102 - DNA, 201 bp, Homo sapiens
ggaagctgctcacataaaaatgacattttagtgtggctttccctacttggtttcatcgtagtgcattttttgtaagtggttcagggatgtggttcttgtcyctgaggactggctcttctgtcttcttttctcatcattgcagtaaacttattgcagaactcatggcaccagagctgtgtgttctagttttcttaagaaaac

SEQ ID NO: 214103 - DNA, 201 bp, Homo sapiens
tttaggcttcaagtctaagggcgaaaatctcactttcatctaacaaatcccaccataatctgccaagaacagccaccaggggctcctgcagcagctgtgargaggcgatccttcctctctcaaagcttgatatggggagagatttgctgcagttcgtgtataataaagtggaagaggatgatactttttaaagcacacgaa

SEQ ID NO: 214104 - DNA, 201 bp, Homo sapiens
aattacaaattatttggcctgtttgtgatctgccttaccgaacttttgagtttgaaaggtgatgtgtttctagaatgcattcaggaacgcacactgttgartgtagctttggcagtcgtgttgtcgtgggtctccaggtgtgcaaaagtattttcattctcggattctgttatgaggacctggtccttatcagtggtttat

SEQ ID NO: 214105 - DNA, 201 bp, Homo sapiens
cctggccaccagtgcccacccggtcggcctggcacagccatgatcaaggcgatcctaatcttcaacaaccacgggaagccgcggctctccaagttctaccrcccctacagtgaagatacacaacagcaaatcatcagggagactttccatttggtatctaagagagatgaaaatgtttgtaatttcctagaagggggatta

SEQ ID NO: 214106 - DNA, 201 bp, Homo sapiens
ctgttaatagcaggaattgctgtaagtaatgtctagaatcatctgcttgagggacttagggatttgcagaggggaaaacagaatttaatttttaaaaaagwactatttaatttaaagaacaaattctcccacgaactaattgactcccagctggtcctgtctggatccaggactgtacattgggtaccagccaaataatta

SEQ ID NO: 214107 - DNA, 201 bp, Homo sapiens
gaaactactctgggcagatgtgtaacgggccaagtccattttgaatttttgcacctcctcctaccatcccccatcctcacccatgtggtctagtggaaagwgcacgcctgtggaatttcagaaacctgagtcccaagtcactaattagctattttggttttaggcaagttacttagccacccatgactcagtttctttgtc

SEQ ID NO: 214108 - DNA, 201 bp, Homo sapiens
ctgctacatcaaacaaagataaacacaggcagaggtcactttccatcttttatagaaatgacctttatcagcatcacaggcatgtcctgctgtgtacacarggttttacatctagaggcatctgtgttgtgggaatatattccaagtatgtgtttttaaggttgtttgttcctctattcccatgaacagatatcagtatta

SEQ ID NO: 214109 - DNA, 201 bp, Homo sapiens
ccaggctggtcttgaactcctggactcaagcagtcctactgcctcagcctcccaagtagctgggattacaggcatgagccaccacgcccagccctcttcayttttactgccttgatacgtgcatactgtttcctcttctaggcccacttcatatagaagtagtttcaaaaacttgtaaatcagcttgcaatgaggaattga

SEQ ID NO: 214110 - DNA, 201 bp, Homo sapiens
tgaggcaggagaatcacttgaacccaggaggcagaggttgcagagagccgagattgtaccactgcactccagcctgggtgacagagcaagactctatctcaaaaaaaaaaaaaaaaagaatctgattactctcaaatactatttcagtgcaaaaatagattcccagccccagtgttcagtgacaggaactcaaggatcctg

SEQ ID NO: 214111 - DNA, 201 bp, Homo sapiens
ctcagggcccctagttgtcaaatctgtggttgcttaacaagggggtatgttctgagaattgacttattaggcaatttagtcgttgagcaaacattatagartatatttacacaaacctagatggtagagcctactacacacctaggctagatggtgtagcctattgctcctaggctacagacctgtatagcatgttactgt

SEQ ID NO: 214112 - DNA, 201 bp, Homo sapiens
ttataatcttctggggctactgtcgtgtatgtggtccgtcattaattgagatgtcatgtagtgcatgacagattgctctgggttcattcttggttaggaargacttccagtaagaggtatataagaaaaatgggatgatatggggatatgtggggaagtggatgtgtttctgcgagagactgtgttgacctcgggatgcca

SEQ ID NO: 214113 - DNA, 201 bp, Homo sapiens
ctgacctcaggtgatccacccattttggtctcccaaagtgctgggattataggcgtgagccaccacgcctggccgttctttcttgtttctgtttatactgkcacatttagtatttatacatctttttctctcaaggaaggcatctgccgttttaattggatgattatatcagagggctcttttctatatcttagctagagc

SEQ ID NO: 214114 - DNA, 201 bp, Homo sapiens
aacagatgactctttttccctcaaatgccttctgtgaaatgacatgtggagctgttaggcattgtgaatctgttttatttaccccagtgttacagaaagamggaaggcaattttagcttctttaaagagacactggcctggggtaaataacaatttagtccaggtgggtagaaaagaatgcttatgacattcttttcatca

SEQ ID NO: 214115 - DNA, 201 bp, Homo sapiens
tcagagtgatggaggaaagtatatggtgcatgcagaacagtaaaagcggggactggaggggggcctgtagattgcatttagcctgctcctctcttcctacygtggagagatgaccatcagtgcagtggttatgggtgagtttcatgaggaaggtaatgagcccctttctgttcccacctgctgctgaactacttgacattt

SEQ ID NO: 214116 - DNA, 201 bp, Homo sapiens
ttagctgttgttcattttctcattgcatctctaccaaatgatgggcagacagactgattcatacctgactgttctgcatatattctgcatatatatatatrtatatattttttttttttttttttgagacagggtttttttctgtcactcaggctggagtgcagtggcatgatcatagcttactgtggcctcgaaccccgc

SEQ ID NO: 214117 - DNA, 201 bp, Homo sapiens
acgcacccctccctgcacagccctgctgagccaagcagatgctagaaggcatggggggtatcatgaccccctccacctcacacacatgttgcctccagaawgggggttcatcttgggctactcacatagccccgtggaatccatgctgaaaagcagactccccaaagtctactttaaaacccaaaaatgaagtcaagcctc

SEQ ID NO: 214118 - DNA, 201 bp, Homo sapiens
cctccagtttttaagcaattctcctgtctcagcctcctgagtagctggaattactagctgggattacaggctcgtgccaccacatccgactgatttttgtmtttttagtagagacagggtttcatcatcttggtcaggctggtctcaaactcctgacctcaggtgatccgcccacctcagcctcctaaagtgctgggatta

SEQ ID NO: 214119 - DNA, 201 bp, Homo sapiens
ggtgctagactttacaacaactagatctcgggagaactcagtatcctgaggatagcaccaagccagaagggatccacccctatgacctgaacacctctgawatcggggattacaattcaacatgtgatttggtgaggacatatattcaaaccatatcaatgagaaacatttatttcacttcctgccatgtataaagctcca

SEQ ID NO: 214120 - DNA, 201 bp, Homo sapiens
cctgccatgtataaagctccatgttatgattatagaaggttacaaagctgacgcccacacaggtctttcccttcaggactctgactggggaggtgagacamacctgagagtgattgtaggatgagagactctgtgatacaccaggaactgtagagacacggcctcatggattttataagaccaagggaatgtcatatcaat

SEQ ID NO: 214121 - DNA, 201 bp, Homo sapiens
gctgacgcccacacaggtctttcccttcaggactctgactggggaggtgagacaaacctgagagtgattgtaggatgagagactctgtgatacaccaggarctgtagagacacggcctcatggattttataagaccaagggaatgtcatatcaatttcccctggggaaaaaaagaacaatgggcaacactggatgatatac

SEQ ID NO: 214122 - DNA, 201 bp, Homo sapiens
acaggtctttcccttcaggactctgactggggaggtgagacaaacctgagagtgattgtaggatgagagactctgtgatacaccaggaactgtagagacayggcctcatggattttataagaccaagggaatgtcatatcaatttcccctggggaaaaaaagaacaatgggcaacactggatgatatacacatgctgttgg

SEQ ID NO: 214123 - DNA, 201 bp, Homo sapiens
ccttctggggaggattttataagttttttatattttaagtaccttctttagaggtctttatattataagctttctatattttattttatttttagagattragtctctctctgtcacccaggctggagtgcagtggcacaatcttggctcactgcaacccttgcctcccaggctcaagtgatactcccaccttagcctcta

SEQ ID NO: 214124 - DNA, 201 bp, Homo sapiens
ctgaaactatgagaagagtaggaagggaacttgtccacactttctgagtgctcactagcactgttttctcatttacttctcacaaataggtagggtatgtrttaacttcataagtgagtagactgaggctaaaagaggataagtactttgccattcattctgcccctctctggttaaagccagtacttgcatgaaagtttg

SEQ ID NO: 214125 - DNA, 201 bp, Homo sapiens
gctcaagcaatccacctgcctcagatcatggatataaagctttgtatagtctagagggactagggaagggtccctttccctccctactcctcctgcctccwgttatatttttctttccatgtcatctcagaagaaaggtaagtttcactttgctgatgtgttcctgcatattttcatttatggcctctggctagtgctatg

SEQ ID NO: 214126 - DNA, 201 bp, Homo sapiens
agaaaggtaagtttcactttgctgatgtgttcctgcatattttcatttatggcctctggctagtgctatgattagatttttgggtatttcttactttatgttttttttttttttaatattatgctcattaaatttggtgagttgacctagcagtaccatctcaagcttctttagattcaatgtgcactttgtcttgagtta

SEQ ID NO: 214127 - DNA, 201 bp, Homo sapiens
tgtattccaaattactttcatcacggaaaggtgaaagtctaagtctttaaaaaaaaaaaaaagatttagggggttcaagtgtagttgtttttttgttttgtttttttttttttgagatggaattttgctcttgtcacccaggctggagtgccgtggtgtgatcttggttcactgaaacctctgcctcccaggttcaagtga

SEQ ID NO: 214128 - DNA, 201 bp, Homo sapiens
ctgcctcccaggttcaagtgattctcctgtgtcagcctcccgagtagctgggattacaggcacctgccaccatgcccggctaatttttatatatatatatwttttttagtagagatggggtttcgccatgttggcccggttgggcactcaagtgcagttttttttttttttttttgagatggaatttcactcttattgccc

SEQ ID NO: 214129 - DNA, 201 bp, Homo sapiens
ccactggttcatactttcctatccatagaggactgctctaagtctatatggcaaatttggaaaatcttccctcaaatgctgcatctacgggatggtgggtragtggcccagagcaattcttatgcatcagtaggacccatacatgcggcatgtcttaaaatcatagtcgtggcttcatgatatctttgtagagcgtttgag

SEQ ID NO: 214130 - DNA, 201 bp, Homo sapiens
tcatgcctgtaatctcagtattttgggaggctgaggcgggcagatcgcatgagtctaggagttcaagaccagcctggccaacgtggcaaaaacttgtctcyacaaaaaaacacaaaaattaaccgggcatgatgatgtgcgcctgtggtcccagctacttgagaggttgaggtgggaggattgcttgagcctggagagaga

SEQ ID NO: 214131 - DNA, 201 bp, Homo sapiens
tgaggtgggaggattgcttgagcctggagagagaggttgcagtgagccaagattgcattactgcactctagcctgggcaacagagcgagatgctgtctcaraaaataatacgtatttttttagcatctaaaaacattgtagtgaaaaacacataaaattttttaagtgtgcaactcattagttgtgctgcaatctccagaa

SEQ ID NO: 214132 - DNA, 201 bp, Homo sapiens
tgggcaacagagcgagatgctgtctcaaaaaataatacgtatttttttagcatctaaaaacattgtagtgaaaaacacataaaattttttaagtgtgcaaytcattagttgtgctgcaatctccagaaattttcatcttgcaaaactgaaactccacccattaaacaacacctctccattttctcctgccctcagcccctg

SEQ ID NO: 214133 - DNA, 201 bp, Homo sapiens
ataatacgtatttttttagcatctaaaaacattgtagtgaaaaacacataaaattttttaagtgtgcaactcattagttgtgctgcaatctccagaaattytcatcttgcaaaactgaaactccacccattaaacaacacctctccattttctcctgccctcagcccctggtaacccccattctgctctgtttccatgaac

SEQ ID NO: 214134 - DNA, 201 bp, Homo sapiens
ctcttgtgttctgtgctttaataagttgaggggaattcatgagtagtaaacatctaagggctgtctatttgaattttggcttccccccactgtttttcttkgggttgggggtgggtgggtcatttcatattcttttctgtacctatcaagaaatcagattggcttaccttagaggtaaacatgatactctgccaacataaa

SEQ ID NO: 214135 - DNA, 201 bp, Homo sapiens
ttcagaaagctgaaccatctgataatggcagagtttagtgtattcagaaaggattgaaaaactaaagtggacctataggaaaagtaaataagtgatctttrtatttcattgcaatgtcattacaggcatacaccattttattgcgtttcacaggtattgctgttttcttgtatagatggaaggtttgtgacaaccatgcat

SEQ ID NO: 214136 - DNA, 201 bp, Homo sapiens
aaaagttgaataccagtaagcagtaaagaaggctttaaaaaaaagatgacagggatgctttcttttcaactttgtcatcgtctgaatgacagtagctaacrgcttcagtttgtggaaggcctagactgtcagttacctctgatcaaaaaatttccccagtattggctgctcagggagtcggggccaaggcagcgagcaagt

SEQ ID NO: 214137 - DNA, 201 bp, Homo sapiens
ttcttctaaccaggtggaatgacatggggaatatcactcataacaagtcgaccattctagtggagctcatcaacaaagaagagactgccctctttcacacrgtaagcacaacagacaaacagtcagggtctgacaagacactggcttttggacttttcaactcctaatgtcctttccttgctctccctatcttgagataat

SEQ ID NO: 214138 - DNA, 201 bp, Homo sapiens
tttcaatagatgtttcacacagattcaagaaaattatagtaattggatatataacttagtaattggataaataattctccattgaacttattctgtcaaamattcacacacatacgtgaatacacacatacatatatacatacatattaccacttgaagatccatcctagtactagacatgaatagctcttcttcataata

SEQ ID NO: 214139 - DNA, 201 bp, Homo sapiens
tttgagggattagctattattgtcctttgacaatgctgtttgtgaactggcataagtctgctcatttatgtcagttcataaaccgtaacttacttattggwtttttttaaataaggcaagaaaacacagtaaaccaattttgccttgctgtgtatttctattcccttgtacaaatccctccccactgtgtttttctttaaa

SEQ ID NO: 214140 - DNA, 201 bp, Homo sapiens
aaggaacaagatgatggtagggtggttccccacatctgtctaaatatttgttaaaaaaaggacaaagagttgtgatttttaagtgctttgaataattcatrtctttccattaaagaaaaaaaaaaaaggaagtaactggccgggtgcgttggctcacgcttgtaaccccagtactttgggaggccaaggcgggtggatcac

SEQ ID NO: 214141 - DNA, 201 bp, Homo sapiens
gcctggctaatttttatttatttatttatttatttgtagagacagggtctcattgtgttgtccaggctggttttggactcctgggcttaagtaacccttcygcctcaacctcccaaaatgctgggattacaggcatgagccaccacacccagcctcctagcactttcttgagtggacagtattgcatagtgaaaaacgcat

SEQ ID NO: 214142 - DNA, 201 bp, Homo sapiens
cacccttgtaagataaggcatagggcatgggctctgccaagacacttaggaactccagaacttgcagcttatcaaacatgagtgttgatctgtttggcggsggggggcttctgtgtgtgtggaatatggtaccattgacaggtcccttctggagcatgaccatggcgtttcttttgcatttacagctatcttccagagggc

SEQ ID NO: 214143 - DNA, 201 bp, Homo sapiens
tgccgtagatagtgtttcctgtgatggatctgggcagagtaaattgcaaacctggaatggatttaccattctcagtgccattaacaacattcccaattcaygagaggaggttaaaataataataacaggagtttggaagacattgattccaagtctcatgaatgattttgaggggttcaaactttagcagaggaagtaact

SEQ ID NO: 214144 - DNA, 201 bp, Homo sapiens
tgtagcatgtggttacaagtataggcattggactcttggtcttgggttcagcttactcttctgtcatttattagctgggtgacaatggaaaagttactgartcttttgaggcgtaagtttcctacctataaaatggcaataataatgcttacttcacagggctgttgtaaatattaaaagagttcctgtatggaaaatgta

SEQ ID NO: 214145 - DNA, 201 bp, Homo sapiens
aattggaggatctgacaacaaactgatttatagacattacacaacgttatattttgtcttctgtgtagattcttcagaaagtgaacttggcattttagatstcattcaagtatttgtggaaacattagacaaatgttttgaaaatgtctgtgaactggatttgattttccatgtagacaaggttcacagtattcttgcaga

SEQ ID NO: 214146 - DNA, 201 bp, Homo sapiens
taaatattaaaagagttcctgtatggaaaatgtatagtgctgtgtttaataatttataattgttcaaatttgagagtcttaataaacaacttaaaaaaaamccattttttgttaaagaaaatattgaacaaccatcttgtgccaggcacttttttagaacttggtgaaatgaagataaataaggtacaattttaccttcaa

SEQ ID NO: 214147 - DNA, 201 bp, Homo sapiens
tggaactgtgaagtttttttttcttttgcaaataacatttgcatatcacagaagttttatgactcattcttggtaaagaaagcaggtgatatccatgaatrgtttgtcatcttttagagacgagtagaatgattgctatcgaattttcatttaacttaaacacagctgtgtagagacaatataaagtggtcctttcctcag

SEQ ID NO: 214148 - DNA, 201 bp, Homo sapiens
ttagaacttggtgaaatgaagataaataaggtacaattttaccttcaagacatgcacagaacaataggggagtccagcctttaaataaacagttaatatcraatgtggtccaagctaaaatagaatgcaggggtaggcccaaaaggcgatggctgtccttagtgttgtgcagtgtgcaatccagcccactgaacactgcag

SEQ ID NO: 214149 - DNA, 201 bp, Homo sapiens
cagtctccacctcctggctcacgtgatcttcctgccttggtctcccaaagtgctgggattacaggtgtgagccacacacccagccaaaatatatttaatctttttttttttctagttgagacaggatcttgctctattgcccagactggagtgcactggtacgatcatgactcactacagcctcaacctcctgagctcaag

SEQ ID NO: 214150 - DNA, 201 bp, Homo sapiens
gccagtttttatatttaggaaaaaagctagcggaaattggctcttcccagttctgagaagtttttcgattaatgctattgatgattcctaacttgttatcmgtcttagtttcctttccttagtaatcgaaggaattgtccttggcttcccttcttcatagtaatctcactgctgcctaagcagtggatgcatggttacgtg

SEQ ID NO: 214151 - DNA, 201 bp, Homo sapiens
agtttttatatttaggaaaaaagctagcggaaattggctcttcccagttctgagaagtttttcgattaatgctattgatgattcctaacttgttatcagtyttagtttcctttccttagtaatcgaaggaattgtccttggcttcccttcttcatagtaatctcactgctgcctaagcagtggatgcatggttacgtggcc

SEQ ID NO: 214152 - DNA, 201 bp, Homo sapiens
cagtgtctctctgtctctgtgtctgggcttaggtttaccctgagagagttcattgtaaatctgtgctgaactgactattcgctctgagttggaatattttytgcttattacaaactcgatttttttgagacaaagtctaactctgttgtccaggcaggagtccagtggcacaatcataacttactgcagcctcaaactccc

SEQ ID NO: 214153 - DNA, 201 bp, Homo sapiens
ttggacattgaccagatccttctccttgaagcgttaccatctcgggtagtcccctgctcgagatgtttctcctgcttccctgggtgttccctttcactgtytgttgaaggttctcctcctgctggtcacccattgaatgtaggtgtcaggtgtcatctagcattggatcccatgtcctcctgtcacacttttttttttttc

SEQ ID NO: 214154 - DNA, 201 bp, Homo sapiens
gttctaaaaattacaacctttaattctacagcagtaaaggagatattgaggaaatgtgactaatcaggaacatctgaggaagggagctttaagatttgcargcaaaatagcaaatgcccacaccctcatgtgaccttaagcactttctattcttataggatttggccctggaagaggctgttctggaggagctgacccaga

SEQ ID NO: 214155 - DNA, 201 bp, Homo sapiens
acgtggtcaacccaaaaagaacttctgttcccattgatattcaaagatagcaagatgactcatatttttcacttctcttcccctagcacaaatatagccastcttatctgtcctatttcccatggttgctattggtagatggttagcggggagaaatgctctccttttgttctggtactgttcaggcctggctagtaagat

SEQ ID NO: 214156 - DNA, 201 bp, Homo sapiens
catgtcatctttagtgtgggggactggattatcaaagatccaaggatgtgaaagagcagccaacattttgggggctgagaaggcatccctctgaatcaccrggtcaagctagagtttataacaaatggtgggaggtgtgtggagatgtgtatggtaataatggctttcaacagactattggttttctcagtgagaaggcga

SEQ ID NO: 214157 - DNA, 201 bp, Homo sapiens
ggcttgtgcgcccgctcccgccctggccaccagtgcccacccggtcggcctggcacagccatgatcaaggcgatcctaatcttcaacaaccacgggaagcygcggctctccaagttctaccgcccctacagtgaagatacacaacagcaaatcatcagggagactttccatttggtatctaagagagatgaaaatgtttgt

SEQ ID NO: 214158 - DNA, 201 bp, Homo sapiens
atttttacttttaagtacttccagtcactcaaattagagcaactaattattcctcatatgcatcgggggacagtgtagcatgtggttacaagtataggcaytggactcttggtcttgggttcagcttactcttctgtcatttattagctgggtgacaatggaaaagttactgaatcttttgaggcgtaagtttcctaccta

SEQ ID NO: 214159 - DNA, 201 bp, Homo sapiens
cctggctcacgtgatcttcctgccttggtctcccaaagtgctgggattacaggtgtgagccacacacccagccaaaatatatttaatctttttttttttcyagttgagacaggatcttgctctattgcccagactggagtgcactggtacgatcatgactcactacagcctcaacctcctgagctcaagtgatcccacctc

SEQ ID NO: 214160 - DNA, 201 bp, Homo sapiens
agagactgccctctttcacacggtaagcacaacagacaaacagtcagggtctgacaagacactggcttttggacttttcaactcctaatgtcctttccttkctctccctatcttgagataataaatactcccttgaagagatgctttctaatacttggtcagtgctgtcattactcattccaggatagtggtgatgaaata

SEQ ID NO: 214161 - DNA, 201 bp, Homo sapiens
agtgcactggtacgatcatgactcactacagcctcaacctcctgagctcaagtgatcccacctcagcctcccaagtagctgagactacaggcacatgccamcatgcccagcaaatttttaaattttttgtacggatgggatctcactatattgcccaggctggtctcaaactcctgggctcgagtgatcctcccgcctcag

SEQ ID NO: 214162 - DNA, 201 bp, Homo sapiens
tcaagtgatcccacctcagcctcccaagtagctgagactacaggcacatgccaccatgcccagcaaatttttaaattttttgtacggatgggatctcactrtattgcccaggctggtctcaaactcctgggctcgagtgatcctcccgcctcagcctcccaaagtgctgggattatagatgtgagacactgtgcccagggt

SEQ ID NO: 214163 - DNA, 201 bp, Homo sapiens
ctcactatattgcccaggctggtctcaaactcctgggctcgagtgatcctcccgcctcagcctcccaaagtgctgggattatagatgtgagacactgtgcycagggtaatatgtttagcctttatgaagtcttggaaactagattatggtggatatttggctttgccattagaagtagtttaggtatatcataaattttgt

SEQ ID NO: 214164 - DNA, 201 bp, Homo sapiens
cctgaatacatcctatgcaaataattgacataaggataacacagtttcatttatgttttccctatttttttctgtgatattgttatttttaacattattgygctatattttattatggaacacttttttacacaactaaatcactctgtctttattttgatcatttgttccaagtcttcaacattttttcgtaacgtttaa

SEQ ID NO: 214165 - DNA, 201 bp, Homo sapiens
gtttgtgatctgccttaccgaacttttgagtttgaaaggtgatgtgtttctagaatgcattcaggaacgcacactgttgagtgtagctttggcagtcgtgytgtcgtgggtctccaggtgtgcaaaagtattttcattctcggattctgttatgaggacctggtccttatcagtggtttatcccgctggcctacaaataag

SEQ ID NO: 214166 - DNA, 201 bp, Homo sapiens
ggacaaatatgatatgctgctatttaacatggctttcagaaggatccaggcctggttcctattgtcagcaaacagtcatgctctgggaaagctgaatgtgmtagggtccctgctcccagaaaccagatagggtctttgctcctagagtttagagaacaggacaaacaagaaacaaagcaaggggaacggcttgtgctgcgg

SEQ ID NO: 214167 - DNA, 201 bp, Homo sapiens
aaaaaaaaagaatacttactctgttttcatggattaagttttctgtgtttaaccagctctcacatggcttaataacagtcacactgtaacattattaaaayatgaaaagacgaatttggcattttacccagctccatgagacgaattgcgctatttatcacattattccttgaactttggtgttgccttaaaattgtacag

SEQ ID NO: 214168 - DNA, 201 bp, Homo sapiens
ctagagtttagagaacaggacaaacaagaaacaaagcaaggggaacggcttgtgctgcggtacagaaacaggaaagaacatggaattttcagggaaaggcrgaattcagtttgcactgatgtgtgtgtgtatgtgtgtgtgtgtgttagaattttcagggaaaggcagagttcagtttgcactgatctgtgtgtgtgtgtg

SEQ ID NO: 214169 - DNA, 201 bp, Homo sapiens
ctagcagtaatgaataattacgaaggaccagatgtttttaaacctttcctctaatgctcacagccatccttccaagctaatctgccttttcttcatgttartgatgagggacctgaggctccacatgccccacagatgttgtcattccagggtagtcagggcagtcatttgctggcttcagatttctttcaataatttttt

SEQ ID NO: 214170 - DNA, 201 bp, Homo sapiens
gaattttcagggaaaggcagagttcagtttgcactgatctgtgtgtgtgtgtgtgtgtgtgtgtgtgtgtgtgttggaattttcagggaaaggcagagttyggcttgcattgatctgtgtgtgtgtggaggggaattttcagggaaaggcagagttcagtttgtttgcactgatgtgtgtgtgtgtgtgttgtgtatgtgt

SEQ ID NO: 214171 - DNA, 201 bp, Homo sapiens
atgtaacagattatccccttttccccttctgtgagagccaaggtgccttatatcggttaaaatctggtgaaacctgtggtgaattgattgtttctgtctgyccctcagtggttctgaaacattaggaggttgtccttgagagaaatctcagcacttcactcagtgagccgatgcctcaagccacttgtatttggaaccata

SEQ ID NO: 214172 - DNA, 201 bp, Homo sapiens
gtgacctttacagaacttcttttcctcctaacagtgctcattgtatttctttcacctgatcacgtgctaattgacttattaaaattttctccaagaagcaraaaagggaaataatataaatagatcagtttgttgattggctaacagctctgatgaaagagtgagcttataaggcactttaaagtatagtcttttaaatca

SEQ ID NO: 214173 - DNA, 201 bp, Homo sapiens
tgtggggaataaaacattgctgtgaagtgtaaggtcatcagaggactccaaggaggagcatgacatggttaccttgcatgttaggtaaagaactcagtagmactcagtagtagaaaagagtggggatcggccaggcgtggtggcttgcgcctgtaatctcagcactttgggaggccgaggcaggcggatcacgaggtcagg

SEQ ID NO: 214174 - DNA, 201 bp, Homo sapiens
aactgcagttacgtgaactctggcaaactttctgaattcacataaatggatagttttaccatgtaaagtgttagctttgaagttttcttttgagggaagaratacaatgtgttaaaattaaattatgtttgtttttgtttgaatggctgaaagatgaacatgatgcaaattttaaaagtacaaatctttttggcatacagt

SEQ ID NO: 214175 - DNA, 201 bp, Homo sapiens
gttcatctattaatgttaaagccagtgttataggtgttgttaaataacacaaggttcaattgatagtccactgtgatcaatagccttagaaacctgttttyggccttgtctagaattacttactttcctcattggacttttcaactgtagcagaattattaacaggtttttttaagcctgtaaaaggcgagttagatatct

SEQ ID NO: 214176 - DNA, 201 bp, Homo sapiens
catttcactcctgctcggcagcctcctggtccaccttccagaggccaatagttgatagttattaatatattcttcagagatattttgtatgtataccagcatatatatatatatatgcctaccctctttttccacacactcattctactgatcagtctctctagggttctatatcactatggtctcttattttgacaggca

SEQ ID NO: 214177 - DNA, 201 bp, Homo sapiens
atttcactcctgctcggcagcctcctggtccaccttccagaggccaatagttgatagttattaatatattcttcagagatattttgtatgtataccagcatatatatatatatatgcctaccctctttttccacacactcattctactgatcagtctctctagggttctatatcactatggtctcttattttgacaggcat

SEQ ID NO: 214178 - DNA, 201 bp, Homo sapiens
gttttgccctatggcagggtgtatttgtagggagtcttttttcttatttattggtctatctagctaaggagttaattaagaataaaagctcaggagtcctrtaggaactggcttccaggggcccagtgggaatagtgggaaggctgtgtttgaatttgccctactgatggtgattgtctgcattccttggctggggagtta

SEQ ID NO: 214179 - DNA, 201 bp, Homo sapiens
ttctaagtgctgcagtttttcattgtaagcctagagggccatccagttgtgctttatcacaggggtcccagaccagtaccagtccctggcctgttaggaastggcatcacaggaggaggtgagtaccgcctgagctctgcctcctgttggatccacagcagcagttgattctcataggagaaggaaccctatcgtgaacag

SEQ ID NO: 214180 - DNA, 201 bp, Homo sapiens
tcacttgaaccagggagttggaggttgcagtgaaccaagatcgcgccactgcactccagcttggtgacagagtgagatactgtctcaaaaaaaaaaaaaaraagaaagaaaagagtggggatcagctgggcacagtggctcatgcctgtaatcccagcactttgggaggctgaggcgggcagatcgcctgaagtcaggagt

SEQ ID NO: 214181 - DNA, 201 bp, Homo sapiens
gttttgtttttttctctgaaaacttgtccctcttccgcagcatgaagttattcaggttcagtctaaatagccatctttaacagactgtggaagattctgcrctgcggtggtgggtagacagggccctttgcacacttggttctgcaatggggaaggtcagcaagtggtcttgacagctacacactcattgttgtgggccac

SEQ ID NO: 214182 - DNA, 201 bp, Homo sapiens
tttcactcctgctcggcagcctcctggtccaccttccagaggccaatagttgatagttattaatatattcttcagagatattttgtatgtataccagcatatatatatatatatgcctaccctctttttccacacactcattctactgatcagtctctctagggttctatatcactatggtctcttattttgacaggcatt

SEQ ID NO: 214183 - DNA, 201 bp, Homo sapiens
ttcactcctgctcggcagcctcctggtccaccttccagaggccaatagttgatagttattaatatattcttcagagatattttgtatgtataccagcatatatatatatatatgcctaccctctttttccacacactcattctactgatcagtctctctagggttctatatcactatggtctcttattttgacaggcatta

SEQ ID NO: 214184 - DNA, 201 bp, Homo sapiens
agccccgtccaagccgggagttgggcccgaggttggaggccgccttggcgctccgggcgccctgcagatgacttgggcagacgctggcaacgccaacttgmgattggcggcccgggacgcctggcagggcagcctggggcgcggggtggccgggccgcaggggtgttatctcgcggtgggagctgcccgcggtgaggcgca

SEQ ID NO: 214185 - DNA, 201 bp, Homo sapiens
ccagaaactagagctaaaccacagctctggaatttgccatcaggagagtgggatcttccactggctgcccttaaccatttcttcctttgatgctattttgrttttagtggaatcctgccagcagaagctgaactgatgtacatcaatgaagttgaacgtttggatggatttggacaggaaatcttccctgtaaaggtaata

SEQ ID NO: 214186 - DNA, 201 bp, Homo sapiens
ttagttttaaataagaaatacttcccccagtactttgttataatattttaagcataacttgtattatttttctgaatataaaagtaataatgatcattatrgaaaatataagaaatataaaacattttataaagcagaaaataaaaatcacccagaaccctatcagctatgagtactcatggccatcatttcttttgtcct

SEQ ID NO: 214187 - DNA, 201 bp, Homo sapiens
caagccgggagttgggcccgaggttggaggccgccttggcgctccgggcgccctgcagatgacttgggcagacgctggcaacgccaacttgagattggcgscccgggacgcctggcagggcagcctggggcgcggggtggccgggccgcaggggtgttatctcgcggtgggagctgcccgcggtgaggcgcaaagctggtc

SEQ ID NO: 214188 - DNA, 201 bp, Homo sapiens
gcagctgcccgacgctcccaatcacaccccaccaccaccgggaaggaatcttgaggggagcggagttttcctgccctctcactaggccccagtggtgccascgaactcctgggcgtcgaggctcctacttgggtggtcgagctggctcgtagaaaaaaagctgtggccaaacaatttcagatcaggtcttcacctcaaact

SEQ ID NO: 214189 - DNA, 201 bp, Homo sapiens
aggacagaaagtttccctagccatctgggggcctgaggggcatttatggccatgttggtgcagtgttgctgggatagcattctctccacccccaatatcaraaataaatctagaagcacgttagccacttatgggaaccacaagtagcttacagaggagccaaggcctccctaattggatacacctccatgcctgctgctg

SEQ ID NO: 214190 - DNA, 201 bp, Homo sapiens
aaataaatctagaagcacgttagccacttatgggaaccacaagtagcttacagaggagccaaggcctccctaattggatacacctccatgcctgctgctgttttaccacaagcagctgttgtatgatcatctacattttaattggcccatgctcggtttcattaaaatggtattgattcttcttttttgtcccccacattc

SEQ ID NO: 214191 - DNA, 201 bp, Homo sapiens
gattccacacacaatatctagcttgtattggtacctaatagtaactactccctctatgcatctcacggcatctccttttctttttctttttttaattgagrcggagttttgctcttggtgcccaggctggggtgcagtggcgggatcttggctcactgcaacctccgcctccagtttttaagcaattctcctgtctcagcc

SEQ ID NO: 214192 - DNA, 201 bp, Homo sapiens
tttagcatacatttatgtctgtgctttccagttttaaaatatattgatttttcagattttaatgatttgagatgggatgtttttcacagttttgaggtgtrcatttttaggggtagtgttttcatccatgtaaagttaagttggagatgaatctttatataagtggtattttagaatcaaaggaatggggcgtttggtatg

SEQ ID NO: 214193 - DNA, 201 bp, Homo sapiens
atgcaaccacgggcttgaaggtcaagcaccttttgtctgggcaagaaaggacggtgtggcatttacaatatactgactggccagatcacggctgtccagargatgtccaaggatttttatgtaagtgtttttcttcccagtctgctacctgactgacttttatgatctgtgtcaataattcatctgttggagatgaaatgg

SEQ ID NO: 214194 - DNA, 201 bp, Homo sapiens
cacatcagattttgaagacatagtatgagaaaactaaaatactcattaattatatgtatgtttgagtacaggttgcaatgatattttgaacgtgttttaartaatatttattaaaagtaatttcacttttggtacttttaaatcaatgtggcttctagaagatttaaaattaaatatgtaactcacatttgatttctgctg

SEQ ID NO: 214195 - DNA, 201 bp, Homo sapiens
ttttggtacttttaaatcaatgtggcttctagaagatttaaaattaaatatgtaactcacatttgatttctgctgaacagtgctattctaagaaacgcaargggggcatttaatggtaatagtgagtataagcatcctaataaaatgtaaaaatatgctagaataaccttggctctacttttaacttaacaagtggaagaa

SEQ ID NO: 214196 - DNA, 201 bp, Homo sapiens
accttggctctacttttaacttaacaagtggaagaaggataaatgatataacaaaggcacctgagatacccttcagttcattggtaaaccctatttgaggyagagaactgctgtgaggaaatccagcgctctggagaatggtgactttcataactctcggctctctcctaaggctaagcctaagagccttggtttttaaaa

SEQ ID NO: 214197 - DNA, 201 bp, Homo sapiens
attgtcacaaaactggaaaaacaaaaccctcaaaaaatatttcccttttaatagctaaggtgggggattataccatctctttacaaataaatgaacaaacaaataaaaaccaccccaaactactttttaatagattttatttctttagagcagttttagtttcacagcaagattgaacaaaaggtacggagagttcccata

SEQ ID NO: 214198 - DNA, 201 bp, Homo sapiens
gcagaaaataaaaatcacccagaaccctatcagctatgagtactcatggccatcatttcttttgtccttttctctctcattgtgtttctctctctctctcrtgtgtgtttctaatgaaattgacagcaacatgctgatatagttttatattttccttttttttccccctaagaatagctgatggcttgggctgtttcctca

SEQ ID NO: 214199 - DNA, 201 bp, Homo sapiens
atacattttagggagacatgagacatcagtcaatattgtttctgtctggaaaggcaggacaacttgaagcaaaggcaggaagacttgaagtagggaggggscttccacgtcacaggtaggtgagaagcaaatggttgcattcttttgtttctgattagcctctccaaaggaggcaatcagatatgcatttatctcagtgag

SEQ ID NO: 214200 - DNA, 201 bp, Homo sapiens
ttgtcacaaaactggaaaaacaaaaccctcaaaaaatatttcccttttaatagctaaggtgggggattataccatctctttacaaataaatgaacaaacaaataaaaaccaccccaaactactttttaatagattttatttctttagagcagttttagtttcacagcaagattgaacaaaaggtacggagagttcccatat

SEQ ID NO: 214201 - DNA, 201 bp, Homo sapiens
tgtccttttctctctcattgtgtttctctctctctctcgtgtgtgtttctaatgaaattgacagcaacatgctgatatagttttatattttcctttttttyccccctaagaatagctgatggcttgggctgtttcctcacagaacttttcctatgcatgtatatatacataatatgaaatgtagagaaagttttgaaaaaa

SEQ ID NO: 214202 - DNA, 201 bp, Homo sapiens
tgtacctttgcaccaggtcccataggcttccagtgatatcatgttttctgtattataaataatgcaaaagtgacatcctttttcatagatgtatgtagaascttgtagcatagattaaaagtggaatgactgggctaaatgctatacacacttaaattttgatggataatgccaaatttctgcttaaaaatgttttacctg

SEQ ID NO: 214203 - DNA, 201 bp, Homo sapiens
tgtcacaaaactggaaaaacaaaaccctcaaaaaatatttcccttttaatagctaaggtgggggattataccatctctttacaaataaatgaacaaacaaataaaaaccaccccaaactactttttaatagattttatttctttagagcagttttagtttcacagcaagattgaacaaaaggtacggagagttcccatatg

SEQ ID NO: 214204 - DNA, 201 bp, Homo sapiens
aatagggaagcaccataaggaattcagagaaaaatcagaatttttagaataattcttatttgccctgaacggatgggctaagtgtcaagaactatgaggattttttattttccagtgccttccttccttattagaggtttaaatttgctccggggaagcaaacatcaaccctttgattacatattatagcccccctgggtt

SEQ ID NO: 214205 - DNA, 201 bp, Homo sapiens
gtcacaaaactggaaaaacaaaaccctcaaaaaatatttcccttttaatagctaaggtgggggattataccatctctttacaaataaatgaacaaacaaataaaaaccaccccaaactactttttaatagattttatttctttagagcagttttagtttcacagcaagattgaacaaaaggtacggagagttcccatatgt

SEQ ID NO: 214206 - DNA, 201 bp, Homo sapiens
agttgattaaagaatgttaggataactctgtctgcctttaactagagtacaaaagctagctgctgtatctttgcagccttgatttccctttttgaagcccraatataaacagtaaactgcaacacttctagtgtaatgccagccactggttatttgaactttaatgttgtctttcatctgagaagcctagagtatttgaca

SEQ ID NO: 214207 - DNA, 201 bp, Homo sapiens
aaataaaaaccaccccaaactactttttaatagattttatttctttagagcagttttagtttcacagcaagattgaacaaaaggtacggagagttcccatatgtcccctgccctcaaaactacttttaagggcccttattctctagaatctttccataataccaaaagatggacattttgacgctgtagtatccacacacc

SEQ ID NO: 214208 - DNA, 201 bp, Homo sapiens
ttcctcaggcttggtatggtggtcactttttcactgcaccagtttgaatgattccattcctggttgctttagagctgcagagaggcttggttaatggcctygtatccctagccaggttcatgtaaagcactaattagatgtttccatgttgctggatctccttggctatcgtctccagtccagacctctctgcttgctacc

SEQ ID NO: 214209 - DNA, 201 bp, Homo sapiens
gaagcaataaatactgcagagcaaaagtatttttgttaggaaatgaagtacgtttctaaatctgtgagcacaaaactgaaatggaaaattactgagcaaawtataagctcaggaccaagaatgccaggagagtttttttttgtttagaaaagaaacatgaagtgttgtttatctgtgggtatgaaaaatgtattaaaataa

SEQ ID NO: 214210 - DNA, 201 bp, Homo sapiens
ggggattattaattggaggatctgacaacaaactgatttatagacattacacaacgttatattttgtcttctgtgtagattcttcagaaagtgaacttggyattttagatgtcattcaagtatttgtggaaacattagacaaatgttttgaaaatgtctgtgaactggatttgattttccatgtagacaaggttcacagta

SEQ ID NO: 214211 - DNA, 201 bp, Homo sapiens
attccattcctggttgctttagagctgcagagaggcttggttaatggcctcgtatccctagccaggttcatgtaaagcactaattagatgtttccatgttrctggatctccttggctatcgtctccagtccagacctctctgcttgctaccaaacagttgggtttatctggtgcttagatccatctgagtgtctgctatac

SEQ ID NO: 214212 - DNA, 201 bp, Homo sapiens
tcccctgccctcaaaactacttttaagggcccttattctctagaatctttccataataccaaaagatggacattttgacgctgtagtatccacacaccaayctgccactgaagaaactagccgattttttagtatatgcttaaatgtatgtttcctgtgttaaaatgcagtacaccaaaccaaataaatgaggaagctgct

SEQ ID NO: 214213 - DNA, 201 bp, Homo sapiens
gattacaacacagtggtagaatgtgaaatcagtttagtggtcatgaccaggtgtgtgtgtgtgtgtgtgtgtgtgtgtgtgtgtgtgtgtgtgtgtttcartgaaatcgactagaaaagagaaaagaatggaaagtgtcagagtacattgcacatagtaagcagtaactattatttctgtaacaagtaaatcctaagttat

SEQ ID NO: 214214 - DNA, 201 bp, Homo sapiens
gtgggtatgaaaaatgtattaaaataacacatgaggccgagtgtggtggctcatgtctgtaatcccagcactttgggaggccgaggcagggcggatcaccrgaggtcgggagttcgagaccagcctgaccaacatggtgaaaccctgtctctactaaaaatacaaaattagctgggcatggtggcgtgtgcctgtaatccc

SEQ ID NO: 214215 - DNA, 201 bp, Homo sapiens
aatatgatgggatcctcttggtgtcatggagaaggtggtttctatttgcaatcatccaccatgctttcttcaaccatgtggcaatgtttagcagctaagckcagctttcaaaattgagctagagtttaaattggcaagttaaccacaaaccagcctggtggggtctcagctgggcttgacaggattagtagttccttggat

SEQ ID NO: 214216 - DNA, 201 bp, Homo sapiens
catgaagcactgcttttcaaactggattacaacacagtggtagaatgtgaaatcagtttagtggtcatgaccaggtgtgtgtgtgtgtgtgtgtgtgtgtgtgtgtgtgtgtgtgtgtgtttcaatgaaatcgactagaaaagagaaaagaatggaaagtgtcagagtacattgcacatagtaagcagtaactattatttc

SEQ ID NO: 214217 - DNA, 201 bp, Homo sapiens
tctcttacctcctcttccctcctcttttttctctctgtctctttcttctgttcccttcttttttttctttctcgttttgagatggagtctcgctctgtctyccaggctggagtgcagtggtgctatctcggctcactgcaacctccacctcccaggttcaagcgattctcctacctcagcctcctgagtagctgggattac

SEQ ID NO: 214218 - DNA, 201 bp, Homo sapiens
tgcggtgagctgagatcgcaccattgcactccagcctgggcaacaagagcgaatttccgttgcgaagtaaataaataaataaataaataaataaataaataaaataaaatagcacatgataactgttctgaaaagcacttttcctcccccatcttaatttgataatgtcagtcttgtctaagtaccttttctcctggagtg

SEQ ID NO: 214219 - DNA, 201 bp, Homo sapiens
cttgcaagaacttgtccctgtgttttggaatagaggagtatattttgccagtgttttcccccctgggttccaagcagccgttaacacagaacagagatttwtttgctccagaggtggaatcacatgtgtgaaatctacctcagcagcactgcttgttgtgtttttaatgcagtttttaatacccttctgtcaatacttgga

SEQ ID NO: 214220 - DNA, 201 bp, Homo sapiens
accatatattgtttacacatatacacaggcacacacatacacattttctttatacctttactacatatatacatgcatactatatgtgtgtgtacatataacatacatactatatgtgtgtgtacatataacatacatacatatatatgtgtgtgtgtgtagtaaaagtataaggaaataccagaaggataaacacaaaag

SEQ ID NO: 214221 - DNA, 201 bp, Homo sapiens
ttactgcagattttctgaccaattgttattcctctccttaatggtacttagtttgcttcagaagatttgaattaaattttggttttggtgtcatctttcamatgtcctttttattccttcagtgttgatttttaaaccactgtccccctacttgtaatagctacagtaataggtaattattaggcattgttatctgggcca

SEQ ID NO: 214222 - DNA, 201 bp, Homo sapiens
ccatatattgtttacacatatacacaggcacacacatacacattttctttatacctttactacatatatacatgcatactatatgtgtgtgtacatataacatacatactatatgtgtgtgtacatataacatacatacatatatatgtgtgtgtgtgtagtaaaagtataaggaaataccagaaggataaacacaaaaga

SEQ ID NO: 214223 - DNA, 201 bp, Homo sapiens
tgtaatagctacagtaataggtaattattaggcattgttatctgggccagggactctgatagtgctttatatacattatcttatttaatcttttcactgaygccgtgacatgtagttactgttttcatcttacagatgagggaaccaacgctcagagagtttaaatagtatgccaaagattttacagttggctgaaattca

SEQ ID NO: 214224 - DNA, 201 bp, Homo sapiens
atagacccgtggaccttgcaagaacttgtccctgtgttttggaatagaggagtatattttgccagtgttttcccccctgggttccaagcagccgttaacamagaacagagatttatttgctccagaggtggaatcacatgtgtgaaatctacctcagcagcactgcttgttgtgtttttaatgcagtttttaatacccttc

SEQ ID NO: 214225 - DNA, 201 bp, Homo sapiens
catatattgtttacacatatacacaggcacacacatacacattttctttatacctttactacatatatacatgcatactatatgtgtgtgtacatataacatacatactatatgtgtgtgtacatataacatacatacatatatatgtgtgtgtgtgtagtaaaagtataaggaaataccagaaggataaacacaaaagac

SEQ ID NO: 214226 - DNA, 201 bp, Homo sapiens
ccaacaaagatgcagatcacacagctgcttcctgatagagtgtctatgaaaatcttacatagaaatattatattatcttcttcttttggccagatctcttycactattttccatctgctctctgaaaaaagctgtcactttgtataaactgtgcccatcgggcattgttaaccgaggagcattcccttccttggtattctc

SEQ ID NO: 214227 - DNA, 201 bp, Homo sapiens
atatattgtttacacatatacacaggcacacacatacacattttctttatacctttactacatatatacatgcatactatatgtgtgtgtacatataacatacatactatatgtgtgtgtacatataacatacatacatatatatgtgtgtgtgtgtagtaaaagtataaggaaataccagaaggataaacacaaaagaca

SEQ ID NO: 214228 - DNA, 201 bp, Homo sapiens
ttatttttatttttaatttttttaaacttttattttagttttgggggcacatgtgaaggtttattacataggtaaacacatgtcacaggggtttgttgtasgtattatttcatcacccaggtattaagcccagtaccccatggttatcctctctgctcctctccctccttccaccctccaccctcaggtaggccccagtgt

SEQ ID NO: 214229 - DNA, 201 bp, Homo sapiens
gtttacacatatacacaggcacacacatacacattttctttatacctttactacatatatacatgcatactatatgtgtgtgtacatataacatacatactatatgtgtgtgtacatataacatacatacatatatatgtgtgtgtgtgtagtaaaagtataaggaaataccagaaggataaacacaaaagacagggtatg

SEQ ID NO: 214230 - DNA, 201 bp, Homo sapiens
gatttttgcccatgtttaaattagattacctggatgcagagtacctgagccaaattgtttactgcccgccagaagtctttattgagttacagcgtaaggarctttattagtatgactgatagaggaaacatcctttgaatccaccttctctccattacatgaaaagctctatttgaaagtggcatctaccgtattacccaa

SEQ ID NO: 214231 - DNA, 201 bp, Homo sapiens
aaaggccctctgatcacagatcagagcttgtgaattattattattttttttatctctggtaacaagctgatagggtgagtgagaaggatcaaagagacatwctttgatttatcactgagtaataatcctttcccaagaaagacaagttaattactttttgtcttagacccagttagggtcaccttacagtgcaggtggaaa

SEQ ID NO: 214232 - DNA, 201 bp, Homo sapiens
gaataggcaaggtcagagacagaaagtaggtgagaggttaccaggggctggggcaaagggggattgggaaattacaaatttttttctgaggcggagtctcrctctgtcacccaggctggagtgcagtggcacaatctcagctcactgcaacctccgcctctcagattcaagcaattctcctgcctcagcctcccaagtagc

SEQ ID NO: 214233 - DNA, 201 bp, Homo sapiens
ccaccttcatttccaggtcttcctaacccatcactgggattcaacctgaaaagaacaatcaaggcccaaagttttaaggaagccaagttcctggggtcagraattgaatctgtagcaaccttgttacttttggaaaaccttaagaacattctcaacctcacagttctggccagccccactagagtagtgctaagagatttt

SEQ ID NO: 214234 - DNA, 201 bp, Homo sapiens
gccctccctgctcactgcaggcctcagagcaaagggaagcagaggtggagaaccggtcactggctctggacacttttgcttgggagcaacaatcacttccygcttccattcccatttcactggccccaaagctagtcccaggagtaatgaggtaggcaggcatgaccctgttgggaaggcagcagacatttggaaccgtgg

SEQ ID NO: 214235 - DNA, 201 bp, Homo sapiens
actgacttttatgatctgtgtcaataattcatctgttggagatgaaatggaaaaagaggatgctttctcttaagtggcaaaagtattataatattgaaatrtatattcctttcttactatgtagaacagagtataataatacatgtcacttattctgtttacctttcatgcacgtaagctaagactgtgatcaacatattg

SEQ ID NO: 214236 - DNA, 201 bp, Homo sapiens
ccagattgacttctcttcattcaccatggctgcaccataaggtagccaagcctaattttaggaactccgaaacagttgtaacttaaaatttgctttgatgrattccattaggccaccttcatttccaggtcttcctaacccatcactgggattcaacctgaaaagaacaatcaaggcccaaagttttaaggaagccaagtt

SEQ ID NO: 214237 - DNA, 201 bp, Homo sapiens
cgggtcaagctagagtttataacaaatggtgggaggtgtgtggagatgtgtatggtaataatggctttcaacagactattggttttctcagtgagaaggcraaagtcaaccctggatcatcccacaactaccttatcacaaagaataaaacagtgcattgccaagtgtgtgccgtagtgtgattgacattccattgctgag

SEQ ID NO: 214238 - DNA, 201 bp, Homo sapiens
ggatagggaagaatgaatgaaaagagctattccctggcaccacagaacttacgcggcaacccaaaatatgcctggaaataacctgttataatggagagccrtgttataacagtagaaatcataactcagttctaaaaattacaacctttaattctacagcagtaaaggagatattgaggaaatgtgactaatcaggaacat

SEQ ID NO: 214239 - DNA, 201 bp, Homo sapiens
gaaggtggtttctatttgcaatcatccaccatgctttcttcaaccatgtggcaatgtttagcagctaagcgcagctttcaaaattgagctagagtttaaaytggcaagttaaccacaaaccagcctggtggggtctcagctgggcttgacaggattagtagttccttggataatacacaggaagttgattggtgcacatgc

SEQ ID NO: 214240 - DNA, 201 bp, Homo sapiens
ggacttttcttcctgctagagaactgaatttgacagttctaaagttaggatgttctggctgtgagtagatacaaactctgtcctccagattacctgcctcycccaattctgccctgcactggacaccccgtttcttccatagttatgtaattatttcactggataattacctggtgagtcaccctgaaatattctgtgtcc

SEQ ID NO: 214241 - DNA, 201 bp, Homo sapiens
tttcttcctgctagagaactgaatttgacagttctaaagttaggatgttctggctgtgagtagatacaaactctgtcctccagattacctgcctcccccarttctgccctgcactggacaccccgtttcttccatagttatgtaattatttcactggataattacctggtgagtcaccctgaaatattctgtgtcctctgg

SEQ ID NO: 214242 - DNA, 201 bp, Homo sapiens
agagtttaaatagtatgccaaagattttacagttggctgaaattcaaacatagtattgaaattcagtgctctttcttcagatcccaagcttttcactagtrtagtgtctttagattttttcaccttaatgagtaactctgtgtgtccctttctgggatgatgctgagagaggagaaaatacatctcaccactaatgctggt

SEQ ID NO: 214243 - DNA, 201 bp, Homo sapiens
agggctcttttccaactttaataattgctgcatagcatgttaattacatatattacataatttattatatggagactcactcctaggcatccaaaataccrtggaataccctcatacagccctgtgttccctacaggaattcagtataatgcagagctactttggacccttttcagataagtttcttgaattgaataccca

SEQ ID NO: 214244 - DNA, 201 bp, Homo sapiens
ggcaggaatcgccaacctctctaagcttggggaacattagcctgtgtgatagggctgacaacaagatgactggtacaaggagtgaggtaagaaagagagargaggggccgggtgctgtggctcacacctgtaatcccagcactttgggaagccaaggcgggcggatcacaaggtcaggagatcgagagataccatcctggc

SEQ ID NO: 214245 - DNA, 201 bp, Homo sapiens
catagcatgttaattacatatattacataatttattatatggagactcactcctaggcatccaaaataccatggaataccctcatacagccctgtgttccmtacaggaattcagtataatgcagagctactttggacccttttcagataagtttcttgaattgaatacccaaatgacttcatgttaaggttagcttaagcc

SEQ ID NO: 214246 - DNA, 201 bp, Homo sapiens
cgccaacctctctaagcttggggaacattagcctgtgtgatagggctgacaacaagatgactggtacaaggagtgaggtaagaaagagagaggaggggccrggtgctgtggctcacacctgtaatcccagcactttgggaagccaaggcgggcggatcacaaggtcaggagatcgagagataccatcctggctaacatggt

SEQ ID NO: 214247 - DNA, 201 bp, Homo sapiens
ctgacaacaagatgactggtacaaggagtgaggtaagaaagagagaggaggggccgggtgctgtggctcacacctgtaatcccagcactttgggaagccarggcgggcggatcacaaggtcaggagatcgagagataccatcctggctaacatggtgaaaccctgtctctactaaaaacacaaaaaattagctgggcgcct

SEQ ID NO: 214248 - DNA, 201 bp, Homo sapiens
ggagtaaagttaaggaggaaaatgttgcgagagcaggagttttgatgattgtccctactaaataagaggagacaagaagccatcagtagaagaggagaacmaggtattgcagctactcagtgtctgctttagcttggagaaaccgtgtgctgcctttgaaatgatgttttcccctctcatctgtaaagtgagggatttgtg

SEQ ID NO: 214249 - DNA, 201 bp, Homo sapiens
agaaagagagaggaggggccgggtgctgtggctcacacctgtaatcccagcactttgggaagccaaggcgggcggatcacaaggtcaggagatcgagagayaccatcctggctaacatggtgaaaccctgtctctactaaaaacacaaaaaattagctgggcgcctgtagtcccagctactctggaggctgaggcaggaga

SEQ ID NO: 214250 - DNA, 201 bp, Homo sapiens
agtttttagattttaaatttctgatataaggatgctcttgaaatttttaagtgtattttaaggcaatattctgcttgcttgctttttctttttctttttcttttttttttttaatttgagacggagtcttgctctgtcacccaggctggagtgcagtggcacgatcttggcttactgcagcctccacctcccaggttcaag

SEQ ID NO: 214251 - DNA, 201 bp, Homo sapiens
cctggctaaattttcttctaattttgtagagatgaagtctcgctgtatttcccaggctgtcttgaactcctggcctcaggtgatccttctaccttggcctmccaaagtgcttatttttttcactttcgttctttccttttttttttatttttatttttaaatcaaaaggtattgtaagtagatggcataattgcaaacaga

SEQ ID NO: 214252 - DNA, 201 bp, Homo sapiens
tgacaggactaaacctcatcgctttaaaaaaatatattgtacaatttggggagacagttaagttgtcagaacaggactatgcaggcacatatagaacaacraagtgaatctgctcttactaatgagaaaatgtttggattatagctactttaaaaaatctcgactgggcactgtggctcacgcctgtaatcccagcacttt

SEQ ID NO: 214253 - DNA, 201 bp, Homo sapiens
ctttacacggtgctaggaacacagcattaagttaataaatacttgctgattcttggctctcggccattaagtgcaaggtaatgagtgatgagggtgaaacrtggactagaaattagtgtatattgaaaaaagttctgtctgtaagaaaaatgaagtattgttactctagacagacctatcctgtaaggcctattggtgaga

SEQ ID NO: 214254 - DNA, 201 bp, Homo sapiens
caacatccctataccgccttctgtatagatccgtaagtcaagactcaccagtattgtctggactgtgatatgtctagctttgtattcagattttctttcartagatgtttcacacagattcaagaaaattatagtaattggatatataacttagtaattggataaataattctccattgaacttattctgtcaaacattca

SEQ ID NO: 214255 - DNA, 201 bp, Homo sapiens
catttgccctctgtgatcctgaagaattcatccccactagattatgagctttctgaagacaaaagccaggttgtactcatctttagatccacagtgtctgrcgcctttcagttgctcagtgaaaatgggtgaaagttaatgatgctcctgaatgttctggtatttggcattttacaaagggcagatattgttaagaaaaag

SEQ ID NO: 214256 - DNA, 201 bp, Homo sapiens
atttgccctctgtgatcctgaagaattcatccccactagattatgagctttctgaagacaaaagccaggttgtactcatctttagatccacagtgtctgaygcctttcagttgctcagtgaaaatgggtgaaagttaatgatgctcctgaatgttctggtatttggcattttacaaagggcagatattgttaagaaaaaga

SEQ ID NO: 214257 - DNA, 201 bp, Homo sapiens
gaacatttcacttaaaaaatagttaaatcatagtttgttaaatgagacttgatagcagcaaacagccctcctctgctgtatcataaatgcctggaacattrttgagtaaacacagtgacatttcttctaaccaggtggaatgacatggggaatatcactcataacaagtcgaccattctagtggagctcatcaacaaagaa

SEQ ID NO: 214258 - DNA, 201 bp, Homo sapiens; identical to SEQ ID NO: 37883

SEQ ID NO: 214259 - DNA, 201 bp, Homo sapiens
gtgcctgtacagagagttgttttggggatgattaaagtgttttatggtaggtgggctttgtgagagcagcacagctgtgtctgtcttaaacagttttatcyctattgtctagtgtagtgcctggcccctacaaggtacgtgataaatatttgtaataatcaatttctattaaaaatgtggctcaaattactgtgaaacata

SEQ ID NO: 214260 - DNA, 201 bp, Homo sapiens
aattaggaaggatgaaatctcagaataaggagagtcctttaaattgaagaacttaccttaataaaaaactgtacatgtcctgggtttttttttttttttttatggtaacactgagaatgagggaaagtattatagcatttgggacctgttgcttgaaggcgtctttgatttcaactctaaagaatttgctaatacttccaa

SEQ ID NO: 214261 - DNA, 201 bp, Homo sapiens
attattatccaaacagaggatggtagaagtattaatgagcagacgcatcatatgagtgaaaaagcggtggcagggaattacaggttggggcaccaggtgargggtaaaagatggttagaaattggttccaagtaggatgggaagcagtagcttatctttcctcatctggtgcttattttggtgtatctccttttagataag

SEQ ID NO: 214262 - DNA, 201 bp, Homo sapiens
ctggtataagggaatgatgactggaggaaaggctggaaaccccaggtaaagaactcatccatccttgacatagagagtaaacatgctaagtcaggtacttwtttgtgtctatattgcctcatttttaaagtaggagcaaaaatagctgccataaagagttggtgtaagaatcggactctatacagctaagagacaatatta

SEQ ID NO: 214263 - DNA, 201 bp, Homo sapiens
tacccaggacaatcatggaaactgtgtacaccttggcattttctttatggggattttcgtgaggaacagaattggaagacaagcggtaatatacaggtagkcttatttgtttgtttttcttttttcttttttaccttgaggaactgtaatgttaatgttacattaacatccaaatgagttaagagccaaactgtggataag

SEQ ID NO: 214264 - DNA, 201 bp, Homo sapiens
gtgacaaattgagaaaaaaggaaaaaaatatctatctctctatctatatagtccactaggatgtgtggtgggtgagttcctgtaggacctgaccccgccgrcacagctggtcaccttattgctgtgatgttgtctatgatttattctactcatgggtgagaaatgggatgtgatgcctgtgggttttgaaataacgtgtat

SEQ ID NO: 214265 - DNA, 201 bp, Homo sapiens
cctactaaagggtggcttcacaatgtgcaaccctgagctccaggctctgtatcatgttgcacacttgctggaaggctggaagtaaaaaccttattaatagkagcataaattcaagggagaaaatttttaaaaatggaaaaagggttaagaaagagagtgactggggtctactttagatcaggggggtggccaaggaccctc

SEQ ID NO: 214266 - DNA, 201 bp, Homo sapiens
ttgtgacaaattgagaaaaaaggaaaaaaatatctatctctctatctatatagtccactaggatgtgtggtgggtgagttcctgtaggacctgaccccgcygacacagctggtcaccttattgctgtgatgttgtctatgatttattctactcatgggtgagaaatgggatgtgatgcctgtgggttttgaaataacgtgt

SEQ ID NO: 214267 - DNA, 201 bp, Homo sapiens
agtacaggtcctcctgcctcatccctcctcctctttgtgtgggtttcagctgcaaaactgtcattcacgctaggggactcctactaaagggtggcttcacratgtgcaaccctgagctccaggctctgtatcatgttgcacacttgctggaaggctggaagtaaaaaccttattaataggagcataaattcaagggagaaa

SEQ ID NO: 214268 - DNA, 201 bp, Homo sapiens
tagatttgtttaattttcttttgcttctctaatagctgcccttcatagggttgtaatccattttccttgcaataatgccttatgaagccatctgcatcccrcttacatttctgcagcccatatatagtcatattttgggtcattgaaaaatcagagtaaacttttctctgcttctagaaaactgacttctcaatctctgga

SEQ ID NO: 214269 - DNA, 201 bp, Homo sapiens
gggagtctcaggctgctctgggcaaatcgacatagacgccaactccaggcacccagctccacatgccatcatccttatcagctgaaaagagaccagaagcygttgttcctggagagtcctctgttctttgggggaagaaaaaatatctttttcttcttttgccaagccaaacatagtttttctgctgtaactagagaactc

SEQ ID NO: 214270 - DNA, 201 bp, Homo sapiens
ccaaacttacattctttcctgtttgtgtgtttttgtatatcataaaaattccaatcatctatacatgttgtttaaagtttactttttatttcactagttaygcattgcaaatgatgtcccatagaatatgtagtagagattgtttttgctgggataaatgcgtaccaagccagccacattctttcctaggtgtttacagtg

SEQ ID NO: 214271 - DNA, 201 bp, Homo sapiens
ttttttataaacgtacatctgagaggcaggcggatagggaagaatgaatgaaaagagctattccctggcaccacagaacttacgcggcaacccaaaatatrcctggaaataacctgttataatggagagccgtgttataacagtagaaatcataactcagttctaaaaattacaacctttaattctacagcagtaaaggag

SEQ ID NO: 214272 - DNA, 201 bp, Homo sapiens
acacagcattaagttaataaatacttgctgattcttggctctcggccattaagtgcaaggtaatgagtgatgagggtgaaacatggactagaaattagtgyatattgaaaaaagttctgtctgtaagaaaaatgaagtattgttactctagacagacctatcctgtaaggcctattggtgagaaagagcagttgaaataaa

SEQ ID NO: 214273 - DNA, 201 bp, Homo sapiens
gtgagagcagcacagctgtgtctgtcttaaacagttttatccctattgtctagtgtagtgcctggcccctacaaggtacgtgataaatatttgtaataatmaatttctattaaaaatgtggctcaaattactgtgaaacataatcttaatttaacaaatttaacttacttttcttggcccataagtacaagtagaagatta

SEQ ID NO: 214274 - DNA, 201 bp, Homo sapiens
tcaacaaagtgctttcaaaccttcttcacagactaattgcaaagtatatattgatggagcttttttgccctgttgctcttctaattggatgtaacagtcgttttttttttttgagacggagtcttgctctgtctcccaggctggagtgcagtggcgtgatctctgcttgttgcaacctctccttcctgggttcaagggttc

SEQ ID NO: 214275 - DNA, 201 bp, Homo sapiens
ttcctgtttgtgtgtttttgtatatcataaaaattccaatcatctatacatgttgtttaaagtttactttttatttcactagttatgcattgcaaatgatrtcccatagaatatgtagtagagattgtttttgctgggataaatgcgtaccaagccagccacattctttcctaggtgtttacagtgagacacacccaaatg

SEQ ID NO: 214276 - DNA, 201 bp, Homo sapiens
gcaaagtatatattgatggagcttttttgccctgttgctcttctaattggatgtaacagtcgttttttttttttgagacggagtcttgctctgtctcccakgctggagtgcagtggcgtgatctctgcttgttgcaacctctccttcctgggttcaagggttcaagtgattctcctgcctcagcctcctgagcaactggga

SEQ ID NO: 214277 - DNA, 201 bp, Homo sapiens
ctaacttttgtatttttagcagagacggggtttcaccgtgttggccaggctggtctcgaactcctgacctcagctgatctgcccacctcagcctcccaacrtgctgggattacaggcatgagccaccgcacccagctggatgtaatagtctttgatgcaccttctttaattctagtctggctgatctctcataaggtgttc

SEQ ID NO: 214278 - DNA, 201 bp, Homo sapiens
acactgtcagcaggcggtgagctgtaagttatatttccattgggagagacttactttgctgtatcccactagaatctaaggaaaaatcacaataaaggctyatactttaagacattctggaagatgggagaccatgtagcctaatggagacagtatgagctccatcactagctagtgtatctcaggtaagttacttagact

SEQ ID NO: 214279 - DNA, 201 bp, Homo sapiens
tgagtttgaaaggtgatgtgtttctagaatgcattcaggaacgcacactgttgagtgtagctttggcagtcgtgttgtcgtgggtctccaggtgtgcaaawgtattttcattctcggattctgttatgaggacctggtccttatcagtggtttatcccgctggcctacaaataagtgatgtgatgagaatcctctcaagct

SEQ ID NO: 214280 - DNA, 201 bp, Homo sapiens
gaagatgggagaccatgtagcctaatggagacagtatgagctccatcactagctagtgtatctcaggtaagttacttagactctgtaaagtttgatttacwgttctgtagactgaggataatgcctctacagagttgatgacatgggtatgagagataacatatgtacagtttagtatggaggaagtgctccatagatggt

SEQ ID NO: 214281 - DNA, 201 bp, Homo sapiens
gtgaagatttctcccagatgggagaaaaataacttctttttaaagtaggcaacatattcgaagggatgtctggaataatgatttcatgtttacagggctgkggctcttaattaaatactttaccttcctcttattattcgctgttaagtaaaaggctactgggaaagatgtcaatgaattacttagtaatgcaccctaccc

SEQ ID NO: 214282 - DNA, 201 bp, Homo sapiens
tgtgaacaaggactcaccaatgaaatataaaagactaggccgggtgcggtggctcacgcctgtaatcccagtactttgagaggccaaggcgggcggatcaygaggtcaggagatcgagaccatcctggctaacatggtgaaaccccgtctctactaaaaaatacaaaaaattagctgggtgtggcggcgggcgcctgtagt

SEQ ID NO: 214283 - DNA, 201 bp, Homo sapiens
agctattctcttgccccagcttcccgaggagctaggaccacaggtgtgtgctgccatgcctggctaattttttaattttttatagagactaggtgatactrtgttgatcaggctggtcttgaactcctgggctcaagagatcctcatgccttggcttcctgaagtgctgggattacaggcatgagccaccacatccaacac

SEQ ID NO: 214284 - DNA, 201 bp, Homo sapiens
aaactctttctccccaaaactagcagcaagcaaacaaagacctaaaaattttaatccagaatcttcccccagggggttcccgagaattgagagaccagggycatttgtaagaatattatatcttttggtggtaagtccttgggtactgtaaacccagaaaatctgagacaggtctcagttaatgtagaaagtttattctgc

SEQ ID NO: 214285 - DNA, 201 bp, Homo sapiens
acagagtctcgctctgtcacccaggctggagtgcagtggtgcgatctcggtccactgcaacctccacctccggggttcaagcaattctcatgcctcagacyctcgagtagctgggattacaggcacatgcaccaccacacccagctaatttttgtatttttagtggagatggggtttcaccatgtgggccaggctgatctc

SEQ ID NO: 214286 - DNA, 201 bp, Homo sapiens
agacaagttaattactttttgtcttagacccagttagggtcaccttacagtgcaggtggaaagaaagcaggactgctgagaggagctcaggacccattttycaggactattgccttctcaaaactttggagagcagtgaaaatagattcccaagtgaaagaggtggcagaaataaaaaaaaagaaagaaaaactctttctc

SEQ ID NO: 214287 - DNA, 201 bp, Homo sapiens
agagaaactttaattcaaggaagcaccaggagtttgatatcgaggcctatgcagtgatcctaagttctctcatcatggcttttttttttttttttttttttgacagagtctcgctctgtcacccaggctggagtgcagtggtgcgatctcggtccactgcaacctccacctccggggttcaagcaattctcatgcctcaga

SEQ ID NO: 214288 - DNA, 201 bp, Homo sapiens
ggcacagtcccttcctaggctcaacttttgaagggatgatggcctggaaactcattggcctataccccaatcattagaaatatgtaagcacacgcaaagcrttttttataaacgtacatctgagaggcaggcggatagggaagaatgaatgaaaagagctattccctggcaccacagaacttacgcggcaacccaaaatat

SEQ ID NO: 214289 - DNA, 201 bp, Homo sapiens
agatgtgtgtaatcagttcttctgagcccatagtagtcagcacatcacaggttccaggggcctggggttcagctggtagagatgctgactagtcagctacrcaactgttgccttacagagctctctggagatgttttagccgtcatggcttcctctgcccccgtgaccatcaagtaacatcagaatgagcctactctgcct

SEQ ID NO: 214290 - DNA, 201 bp, Homo sapiens
agcattaaaagacataatacattgtgaaatacctagtatgaaatacataatacaagttgccacatggtaaattctcaataactgtttatttagttgtcatmttattattgttattagcactattattctgtctctatgtcttgcaaatataagaccgttgaagagtgtgttttccaggtaacatcactctatgcttttttt

SEQ ID NO: 214291 - DNA, 201 bp, Homo sapiens
gatataatttaggtgttagtgaaagaaaaacaagaaagcaaagcaagggatattttgaagtaaaataggcaaaatctggcaacttatcagtgatggcatakgggagaaagtagagtgtctggtgacaaaggttttaggttttgagagactgggataggtaagtctggaattatccatattagtgcatgaggtcagtctaaa

SEQ ID NO: 214292 - DNA, 201 bp, Homo sapiens
acacccaggggatgaaattatataagaaatggtgcttgttttcaaggagactacagtgtggttggttaaataggaagtttgcaaaatcagaataaaaagcyaagtgtgataaagtgtgatcaaaattttatatggggagaggtcacatgcccttgggggattagggaaggctgaaagactaatggcatgtgtgctgttagg

SEQ ID NO: 214293 - DNA, 201 bp, Homo sapiens
tcactagctagtgtatctcaggtaagttacttagactctgtaaagtttgatttactgttctgtagactgaggataatgcctctacagagttgatgacatgrgtatgagagataacatatgtacagtttagtatggaggaagtgctccatagatggtaactatgatttttggttaaattagggtatggttttgggacatgaa

SEQ ID NO: 214294 - DNA, 201 bp, Homo sapiens
tgagccaccgcgcctagctcattcttgcctattttaatgtctgtattggaatccttgtttaccaatcttacttcagagcagcagtactcttgagaaaactratgacttcataaggctccagtgtctgtgtaaatgagacagttttcaaaaatcatatgtaatagataactagaatattttaatttctattctttttttttt

SEQ ID NO: 214295 - DNA, 201 bp, Homo sapiens
gtgtaaatgagacagttttcaaaaatcatatgtaatagataactagaatattttaatttctattcttttttttttttttttttttgagcgggagtttcgckcttgtttcccaggctggagtgcaatggtgccatcttggctcacagcaaccttggcctcccaggttcgagcaattctcctgcctcagcctcccaagtagct

SEQ ID NO: 214296 - DNA, 201 bp, Homo sapiens
gatcacgccattgcactccagcctgggcgacagagcgagactccatctcaaaaaaaaaaaaaaaaagacagggttttgctctgttgccccagttggagggyagtgatgcaatagctcactgcagccttgaactcctaggctcaagcaatcctcctgcctcagcctcctgagtagctgagactacatgcatgcaccaccaca

SEQ ID NO: 214297 - DNA, 201 bp, Homo sapiens
tagcattagacaggttctttttctttgtaatatcactgagagctacttagtacaacataagttgttccaagtgtccacttaagtagtgtggggtatgtgtrtgttgtgtgtctttacaaggcaggggacagagagaagaaagaacaattgtaatgggtttgtggtgcatgtacgtgcatgtgtggccgcagtataccttta

SEQ ID NO: 214298 - DNA, 201 bp, Homo sapiens
agataaactgctgatggtatgtcatagttgttttttgtagaatgtgggtgcttgctattgtcattgttacttttatatcataaggtcatagctgataaccstctttctgcgtcatatcagcatggttcattgggtaagaacatgggttcagatggagctctgggtttgaacttgattgtctttagtcactgagtgatcgtg

SEQ ID NO: 214299 - DNA, 201 bp, Homo sapiens
acaagaaaacaaatagccctattaaaaaaatggtcaagggacctgaatagacatttctcaaaagaaatatacagaaggccagacatatgaaaaatgcccarcatcactaatcatcagggaaatgcaaattgaaaccacgatgaaacaccacctcatacctgttggattggctgttatcaaaaagatgaacaataacaagtg

SEQ ID NO: 214300 - DNA, 201 bp, Homo sapiens
taaggaactcaaactactcaacaagaaaacaaatagccctattaaaaaaatggtcaagggacctgaatagacatttctcaaaagaaatatacagaaggccmgacatatgaaaaatgcccaacatcactaatcatcagggaaatgcaaattgaaaccacgatgaaacaccacctcatacctgttggattggctgttatcaaa

SEQ ID NO: 214301 - DNA, 201 bp, Homo sapiens
tccaagcagccgttaacacagaacagagatttatttgctccagaggtggaatcacatgtgtgaaatctacctcagcagcactgcttgttgtgtttttaatkcagtttttaatacccttctgtcaatacttggaatatactgaaaggccccaggcagcagcagcattctctggaagtatttatgtttcctatacgttgggtg

SEQ ID NO: 214302 - DNA, 201 bp, Homo sapiens
gaaaataattaccccatttctacttcattttccctgttgatttttttttcccccaaatctgctacactcaggagctcaaggacaccggcagaccttagagktggattaggagctgcttcagtgagccaggaggccaggcaaggtggtgacaatgccagtggctttgagcccaagatgagtctccatctgttttgtttttaa

SEQ ID NO: 214303 - DNA, 201 bp, Homo sapiens
agcttctgtgcaacaaaggaaacaacagatataaagagacaacccacacattgaaagaaaatatttgcaaattatacatcagataaggggctcaaaatatrtaaggaactcaaactactcaacaagaaaacaaatagccctattaaaaaaatggtcaagggacctgaatagacatttctcaaaagaaatatacagaaggcc

SEQ ID NO: 214304 - DNA, 201 bp, Homo sapiens
gttaagttgtcagaacaggactatgcaggcacatatagaacaacgaagtgaatctgctcttactaatgagaaaatgtttggattatagctactttaaaaawtctcgactgggcactgtggctcacgcctgtaatcccagcactttgggaggccgaggtgggcagatcacaaggtcaggagttcaagaccagcctgaccaac

SEQ ID NO: 214305 - DNA, 201 bp, Homo sapiens
acatgggggaaaagctacatgacattggtctgggcagcgatttcttgcatatgaccccaaaaacataggcaacaaaagtaaaaataaataaatgagattgyatcaaactaaaaagcttctgtgcaacaaaggaaacaacagatataaagagacaacccacacattgaaagaaaatatttgcaaattatacatcagataagg

SEQ ID NO: 214306 - DNA, 201 bp, Homo sapiens
tcttaaggtgttctttctgtatgttggcatttcatccaagatagtatctgttattctatagaacatgtgggtggagaccatgggatttcactttttatgayttgtttaaattaaaagtcacctcatgagtatgaggatgtactttgttgtggcaggatggcttggaggttcacgtgcctttgtttgacttcttgtagacag

SEQ ID NO: 214307 - DNA, 201 bp, Homo sapiens
agaatcgcttgaacccctggtggaggttgcagtgagccgagattgtgccactgcactccagcctggccacaaagcaagactttgtctcaaaaaaaaaaaaagaaaaaaaaaagacttaaatgtaagacctgaaagtataaaacactagaagaaaacatgggggaaaagctacatgacattggtctgggcagcgatttcttg

SEQ ID NO: 214308 - DNA, 201 bp, Homo sapiens
gtatggtaataatggctttcaacagactattggttttctcagtgagaaggcgaaagtcaaccctggatcatcccacaactaccttatcacaaagaataaarcagtgcattgccaagtgtgtgccgtagtgtgattgacattccattgctgaggtggggtttgtgtttaatactgactttattttgacacgtcctaatgggt

SEQ ID NO: 214309 - DNA, 201 bp, Homo sapiens
atatggtgaaaccccatctctactaaaactacaaaaattatctgggcttggtggcacacacctctagtcccagctactcaggaggctgaggcaggagaatygcttgaacccctggtggaggttgcagtgagccgagattgtgccactgcactccagcctggccacaaagcaagactttgtctcaaaaaaaaaaaaagaaaa

SEQ ID NO: 214310 - DNA, 201 bp, Homo sapiens
ctaatgggtgcatccgcattcgaccaaatcactttctttttgaattttatgctttccttccatgacagataacattgaagttgtgcccttttgggaatcartcctctagatactcctgaattaaaggatcagatagagtaatctgatactttgttcttcttttgcacacacacaccttaaagaagaatgcatcctctatcc

SEQ ID NO: 214311 - DNA, 201 bp, Homo sapiens
ccggatcacaaggtcaaaaggtggagaccatcctggacaatatggtgaaaccccatctctactaaaactacaaaaattatctgggcttggtggcacacacytctagtcccagctactcaggaggctgaggcaggagaatcgcttgaacccctggtggaggttgcagtgagccgagattgtgccactgcactccagcctggc

SEQ ID NO: 214312 - DNA, 201 bp, Homo sapiens
ttcttttgcacacacacaccttaaagaagaatgcatcctctatccaaaagcagaagtaagaggaggtgaactcagggtctgctcctcataccttgaatttrtatttgggtcatttttcaaatagagctgatgctgctttagaggagaaggtgacaaccaatctaagatataacaaaaagtttagtcttttttgggaggggt

SEQ ID NO: 214313 - DNA, 201 bp, Homo sapiens
caaaatgtattaaagacttaaatgtggccaggcgcggtggctcacgcccataatctcagcactttgggaggcctaggcggccggatcacaaggtcaaaagrtggagaccatcctggacaatatggtgaaaccccatctctactaaaactacaaaaattatctgggcttggtggcacacacctctagtcccagctactcagg

SEQ ID NO: 214314 - DNA, 201 bp, Homo sapiens
cctggccccgtgcatgtacaccctcccccactgtcaacatcaccccccgagtggtacatttgttatgattattgaacctacattgacacatcattatcatscagagtccggagtttacattagggcttacttttggtgttgtacattctgtaggtttggacaaatatgatatgctgctatttaacatggctttcagaagga

SEQ ID NO: 214315 - DNA, 201 bp, Homo sapiens
tcagtcaatattgtttctgtctggaaaggcaggacaacttgaagcaaaggcaggaagacttgaagtagggagggggcttccacgtcacaggtaggtgagargcaaatggttgcattcttttgtttctgattagcctctccaaaggaggcaatcagatatgcatttatctcagtgagcagaggggtgactttgaatagaatg

SEQ ID NO: 214316 - DNA, 201 bp, Homo sapiens
aaacaatcccatttacaatagcattaaaaaaaaatacctaggagtaaatttaactgaggaggtgaaaattctgtatgctggaaactataaaacattgatgraagaaatttaagatgacacaaatggaaagataccccatcttcgtggattggaagaatcaatattgttaaaatgtctgccaaaagtaatctacaaattaat

SEQ ID NO: 214317 - DNA, 201 bp, Homo sapiens
tgctagagaaatgtgattgttgtcgttgtgactatgtgttgagagtatgggcaaaggaagtggagtcctgggaaataaacgtcttgagtgagaagttttctaaatgttttaggtaattctaagagggctattttattggtagggaaacagtacactgtattagctcctgagggcacttgtctagtctgagacttgatgtgt

SEQ ID NO: 214318 - DNA, 201 bp, Homo sapiens
tggattccattaggccaccttcatttccaggtcttcctaacccatcactgggattcaacctgaaaagaacaatcaaggcccaaagttttaaggaagccaarttcctggggtcagaaattgaatctgtagcaaccttgttacttttggaaaaccttaagaacattctcaacctcacagttctggccagccccactagagtag

SEQ ID NO: 214319 - DNA, 201 bp, Homo sapiens
acaaaatctgcactgagtaagtaaacatttaatccccccgacttgatggctttgtcagattaaattaatgtccttttggggtgctgtagatctcttttccyattcactctttttccttgttccttgtagaagctaatgaagtaagctaaagccagggcaggaatgaaaactttaatgatgaagactgtctagtgtcgtgca

SEQ ID NO: 214320 - DNA, 201 bp, Homo sapiens
tctcctagtttggatggcttccaggagagagccctgcttgcttcagctccttatttttatattccagcaaaatcctacacccaacctacatgattaggaaygttcctggtgttccttgctagtggattgtgagtcactgtttcctaggatagaatggatctgtaatagaacttgctgacacattatacaaatggtagctgt

SEQ ID NO: 214321 - DNA, 201 bp, Homo sapiens
ttctcaagagttttgaggatagagggatggagggagggaggcattcaggtttatctggttgcatgcctgcatacatagtatttatctggtcctggcagacmgagaacagcatgggccaccctgtcctttatctggatttacagctgtgaacacccgctggaatggatggaatgtgttggttccttcctatgggtatctctg

SEQ ID NO: 214322 - DNA, 201 bp, Homo sapiens
cttatagtatgaaaaagcctagaagaaaaactttcccttttaagggtatctttgctagagttttagttgtagcttttccttttgtttgtttgtgttttccscctccctatggggttatttcagttttgcatagttgcaggagtattcgctttgtagtttgttagacagtgcagacttttaattgactgtcaacttgaacag

SEQ ID NO: 214323 - DNA, 201 bp, Homo sapiens
taatttgttataattaatgcaagagttcaagagcagaaagcaaggatcaggtcgtggcatgtctttctcttttgcaacaccttgctatcattggctttttytcactagttaaggcctgtgtgtgtctttgtatgcatttaaacaaatattatcctttttaggaaataattgcaatcctttggctcattgaaactgaaggaa

SEQ ID NO: 214324 - DNA, 201 bp, Homo sapiens
aagtgatgaaaccagatctagaggggatttggggaattaccaaaaagaactcttgattctaattttgccctttattgctgctcaggatgaactagctgtgyggacaccctggctacatcatttgttttgtgtctttagaatgccctgcagtcccctgggtgaaggggctttttccattgccgtcaggaagagcagctctga

SEQ ID NO: 214325 - DNA, 201 bp, Homo sapiens
gactcatttcattttaacatcaaacactttagcacagtattttctttcgatgctaactatttctacttctgttggcatgttttcctaattcagggcatcayagccctcagcagggaaccatgtcgggcccttttaaatgctatggattgattgctataaagaaatctgtacccaatagcataggataggacagaaagaagt

SEQ ID NO: 214326 - DNA, 201 bp, Homo sapiens
atccttaaaataaacctataggtactattattatttctattttacagttatagaaattggaatacagagagattaatgatggaacttatatatgaaaatcrgtaacttgtaatcgttatgctaactgcatttcaaaaagagagatggtagaaaaccgtggatgttggaaatgtagtaaatggataatatagtttctacgtt

SEQ ID NO: 214327 - DNA, 201 bp, Homo sapiens
gaactgaaaaactttcccaagtcattggagatttttaagacagatcaaaacagactcatttcattttaacatcaaacactttagcacagtattttctttckatgctaactatttctacttctgttggcatgttttcctaattcagggcatcacagccctcagcagggaaccatgtcgggcccttttaaatgctatggattg

SEQ ID NO: 214328 - DNA, 201 bp, Homo sapiens
ctctttctttctttctttctttttttttttttttttgacggagtcttgctctgtcgccaggctggagtgcggtagcatgatcttggcttactgcaacctcygccgcccaggttcaacgactctcacgcctcagcctcccaagtagctgggactacaggtgcatgtcgccacgcccagataatttttttctttttttcttgg

SEQ ID NO: 214329 - DNA, 201 bp, Homo sapiens
ctttgtctctctgtcagtatttcatctactcagaaatgtttattgagcttctacttagtgccaggtactgatcacgacagagttggggaggcgctggtgcyagtgcaggagaggcctgggggaagtatagtggcggatgtgaaagggttcactaacttgttgagagggtttgggaagcttttggagaggagatacatttcc

SEQ ID NO: 214330 - DNA, 201 bp, Homo sapiens; identical to SEQ ID NO: 37884

SEQ ID NO: 214331 - DNA, 201 bp, Homo sapiens
ttgctctttgcataaagacaagtttcccaagacttcctgcttgatgtgtgatgagttccatttctagaatttttaggcgctctttcatattatagaaatarcatctaatagctttgctaggaggtgattaatcttcctccctttctccctcctttcttctgtctttgtctctctgtcagtatttcatctactcagaaatgt

SEQ ID NO: 214332 - DNA, 201 bp, Homo sapiens
tgtaagatgctagaacaatgtagaaatatctaaggttagaattctatttaatatcaagtagctctgagataataattttgccaaacttacattctttcctstttgtgtgtttttgtatatcataaaaattccaatcatctatacatgttgtttaaagtttactttttatttcactagttatgcattgcaaatgatgtccca

SEQ ID NO: 214333 - DNA, 201 bp, Homo sapiens
atcacgtccagctagtttggctgactttccttcccctccctcccccctttccctcttccctttccttttttgtttcttttgggttttgccatgttgcccasgctggtctgggctgaagcgatctcctcacctcagcccctcaaagtgctgagatgacagacatgagcctctgcttttggcaggaaattctattctttccat

SEQ ID NO: 214334 - DNA, 201 bp, Homo sapiens
catagaatatgtagtagagattgtttttgctgggataaatgcgtaccaagccagccacattctttcctaggtgtttacagtgagacacacccaaatgtaargtgcctggctcagggttagaaatgtggcttgtgcccacagagcaaatatttttctctgtttgaggctctctggttaatgcaggaattgaatcttggcctc

SEQ ID NO: 214335 - DNA, 201 bp, Homo sapiens
gcagggacagcagctgccacgagcctcccttacaacgtggcgggactgccgtgtgcctgggccggctgtgtgagtcaccagccgtgtctgcccaggcctcmccacctcctctgtgttctctgtttcagcccaggcagcagccgtacatcctgcctcccgttcacgtccagtgtggtgagcactactcggaaacgcacacct

SEQ ID NO: 214336 - DNA, 201 bp, Homo sapiens
catgagccaccgtgcccggccagtactctgattttttgttgttactgttttgttttgaaactgagtctcactctgtcacccaggctggagtgcagtggcgygaactctgcttactacaacctccgcctcccaggttcaagcgatttttctgccttagcctccctagtagctggaattacaggcgtgagccaccatgcctgg

SEQ ID NO: 214337 - DNA, 201 bp, Homo sapiens
aggcatgagccaccgtgcccggccagtactctgattttttgttgttactgttttgttttgaaactgagtctcactctgtcacccaggctggagtgcagtgrcgcgaactctgcttactacaacctccgcctcccaggttcaagcgatttttctgccttagcctccctagtagctggaattacaggcgtgagccaccatgcc

SEQ ID NO: 214338 - DNA, 201 bp, Homo sapiens
gccaacgtggcataacctctgcctctactaaaaaaaaaacagagatggataggcatgttatcattacaaatgcataaaatctttaatattaaattgctgtkattggggagaggctgaacatggatcatagtggccacatggaatgtagggtgggcgggccgggcacggtgtctcacacctgcaatcccagcactttggaag

SEQ ID NO: 214339 - DNA, 201 bp, Homo sapiens
gtctctgagtcagtaaatgatcataatgctttttgtgcaactaccaagtctaggatcatctactgagtctgtgaattgtagaatagagagaggtggttccygccttcaaggtacttctgggctagtagggtgctaaatagagattgatgggctggatggacctggtggcccatggctgtaatcccagcgctttgggaggcc

SEQ ID NO: 214340 - DNA, 201 bp, Homo sapiens
tggcctgtaatcataattttttttaggagaagcctgctgagatttttttattttatttttgtttttaaagagagaatttgaatacctacttagtacttctyttctggagagtgctctcctttgaatatggcctgatgcccgcagggtgtgccccgtacagccactgactgccccacactggcatcttccctgggcttcacg

SEQ ID NO: 214341 - DNA, 201 bp, Homo sapiens
tctattcaatacattttgtgctggtttcatgaacattaacaaattataggaggccttatattttctgcaatcataatttttttttttttttttttttttttgagatggagactcactctgtcgccaagctggagtgcagtggcacgatctcggctcactgcaaactccaactccctggttcaagtgattctcctgccttag

SEQ ID NO: 214342 - DNA, 201 bp, Homo sapiens
ttattcacccagcttcaagctcttggccagtgcgtttcttccattgagggatgctgagaaagtgtgacccctgctggatttgggtttcttggtttgatctsagattcttctctcaaaatagtaacctttaaaatctataaggctaatagaaatataagagattggctgggcacggtagctcacacctgtaatcccagcact

SEQ ID NO: 214343 - DNA, 201 bp, Homo sapiens
tttactttttaaatgaaagtgctataaaaggataagaaatcattatactaatttaatagaatctgacagcttttataatgatttctattcaatacattttrtgctggtttcatgaacattaacaaattataggaggccttatattttctgcaatcataatttttttttttttttttttttttttgagatggagactcactc

SEQ ID NO: 214344 - DNA, 201 bp, Homo sapiens
tccgatgtgtacttatccagcaatacaagcatttcatttccttgaaagtgacgatggtacttgaggggtttggcactgaaagcagagagtagaaggatgaytggagtcagagaatctagagtaagatccagagaggactcgtgatttgcctgaagtcaaatggcttgttatctgtagcttgaaataagggcagtgaccttt

SEQ ID NO: 214345 - DNA, 201 bp, Homo sapiens
cttttgtcaaatatgaatgaataaataatggaatatatgtatgtatatacttctgatattttaccagtaaactaagttggtttactttttaaatgaaagtrctataaaaggataagaaatcattatactaatttaatagaatctgacagcttttataatgatttctattcaatacattttgtgctggtttcatgaacatta

SEQ ID NO: 214346 - DNA, 201 bp, Homo sapiens
ggtcatgaccaggtgtgtgtgtgtgtgtgtgtgtgtgtgtgtgtgtgtgtgtgtgtgtttcaatgaaatcgactagaaaagagaaaagaatggaaagtgtyagagtacattgcacatagtaagcagtaactattatttctgtaacaagtaaatcctaagttatacatgttcatatatatgcatctatacatgtgtgtatgt

SEQ ID NO: 214347 - DNA, 201 bp, Homo sapiens
catgtagtaggtgctcattaagcttttgtcaaatatgaatgaataaataatggaatatatgtatgtatatacttctgatattttaccagtaaactaagttsgtttactttttaaatgaaagtgctataaaaggataagaaatcattatactaatttaatagaatctgacagcttttataatgatttctattcaatacattt

SEQ ID NO: 214348 - DNA, 201 bp, Homo sapiens
ccttttctgtcagcccaacgattcatcctcttgctcactctttgctacattgacctcttgaacattcatgaatgcacgacactagctctcctgaaagcctytctacttgccattccctttgtttgaagtgaaaacctccatcccccaaatatccacatggctagctcctcatttttttttcagatctttgctcagagttcg

SEQ ID NO: 214349 - DNA, 201 bp, Homo sapiens
tgttggtgcagtgttgctgggatagcattctctccacccccaatatcagaaataaatctagaagcacgttagccacttatgggaaccacaagtagcttacmgaggagccaaggcctccctaattggatacacctccatgcctgctgctgttttaccacaagcagctgttgtatgatcatctacattttaattggcccatgc

SEQ ID NO: 214350 - DNA, 201 bp, Homo sapiens
cccaggctgctctgggaagcctccctgtggcccagtgcttttggtcactgagtgttagctgagactttttaaggtgcatagagtttttcagaaagcactcrttttatggtctgcaggacactcagtcccttggatgtagctgtctgttccagctacagctaattacaaaaggtcaggatctcagtagccaaagggcagatg

SEQ ID NO: 214351 - DNA, 201 bp, Homo sapiens
gtattagctcctgagggcacttgtctagtctgagacttgatgtgtttgggcacgattctgtccatctgtactttgctggtttgagaatttacttcagtttygaaagttgcatcagattagatttttctgattcacagatgtgtaaggtgaaaactgtatttgattttttagtggaattacaaattatttggcctgtttgtg

SEQ ID NO: 214352 - DNA, 201 bp, Homo sapiens
tgtcctcttttaaataaaaatgtaaaaaggccactcccaggtaaaatccagggggaagagtcatctaagtttaccatgcagttgtttaccaaaaatggagraggagagtcttaacttttgctcttggatttaagtcaaggtactatatagaagttgtgtaaaatcagtatgaaagttcaacgttgcttttcttgctcagtg

SEQ ID NO: 214353 - DNA, 201 bp, Homo sapiens
tatgtgtttttaaggttgtttgttcctctattcccatgaacagatatcagtattacctgcaagtcaaaaaagatgtgcttgaagggcgattacgatgtacrttggaccaggtgattcggctagccggcctagctgtgcaaggtaagacatagttatgagcagcatgtgaaattccattttctgtttgatcatggtgttgct

SEQ ID NO: 214354 - DNA, 201 bp, Homo sapiens
ctggagctactgggcagcctgaatatgacaagcatttgtgtggaaagtcattgctccttctgccacactttgggccatcaggatcattctttcccagaagkgccataaacttgctcaaaagtttctataaatgggaagagggagaggaaggatttttgcatcagtcctgaagttgctatccaaaagttctctgtttcacaa

SEQ ID NO: 214355 - DNA, 201 bp, Homo sapiens
gtatgggcaaaggaagtggagtcctgggaaataaacgtcttgagtgagaagttttctaaatgttttaggtaattctaagagggctattttattggtagggmaacagtacactgtattagctcctgagggcacttgtctagtctgagacttgatgtgtttgggcacgattctgtccatctgtactttgctggtttgagaatt

SEQ ID NO: 214356 - DNA, 201 bp, Homo sapiens
gctcaggccaaaaatcttgcagtcatccttgaattctttctcccatacaccacatccagccttcagaatatgtctggattctgactacttccttctgcgtycactgtaacctctctaatccagtctgctgtcattttttctgactggcatttccgcttccacccttgcccctcccagtccagtgtctacaaagcagccagt

SEQ ID NO: 214357 - DNA, 201 bp, Homo sapiens
attatgtggttataatttttagaagacagtcaaatccgttttccccaaatctgttttgtctgtcagttttcaaaaagtgagaagtctttatctgaaaggtytagtttagttgctcaggccaaaaatcttgcagtcatccttgaattctttctcccatacaccacatccagccttcagaatatgtctggattctgactactt

SEQ ID NO: 214358 - DNA, 201 bp, Homo sapiens
gctctaggtgagttttcatagaaacaagaaacttcagatggcagaaatgcatggcttagtaactatattattaattgcacaaacttgttttttctccccartctttttagtgcatgccttttgatcaagttatactgcaaagaccatttttaaagttacaaaaaatgatgatgtttttaaagtgtagtggtttgataatag

SEQ ID NO: 214359 - DNA, 201 bp, Homo sapiens
cagataaaacaggagaaatgagggtgtgcaatagaaaacacttagaaaatgtgatcttaggcggcatctacttccagaagtctttggcattttgtagatarcctggttttattgtgggtaattttccatggtgagttatttgaccccatatagtttcgatgcatcttgcatttctaggatgtgttctggcctaaatgctag

SEQ ID NO: 214360 - DNA, 201 bp, Homo sapiens
ttgggtcacacgttcacaggatgaaatctccttctgtatcttgaaactaagtcatgcaatttcttctttagaattttaatctgatgaggtcattaaggaaraatattttcttaatctagaattcccagtatgttcattataaaataaattccttttctttcttctcataaaaccctgttttgaaaaaatgtatctaccttt

SEQ ID NO: 214361 - DNA, 201 bp, Homo sapiens
cggcgtgctcattctttctgagctgatgatctactgcttggaacataacgaagtgagtcattctgggcttctctccggatactccaccttggggacaagtmtacaccctggccaaacctttgcctgcacccttgcattttcagtggttaatttcctgtctcccaaccagagttttccaggctcctggttcctagtttgact

SEQ ID NO: 214362 - DNA, 201 bp, Homo sapiens
tcagtatcaagggctcactgatggatgagcggaaagtgtgaagggagaacattccgagccaaggaaattatgtaagaggggaggaaaattgcaatgcaaartcctcaaggatacctagaatgtggtaggaagcaaataatcgtagcacagttagccctggatttatatttcagctaaagaatttcttaaagttcaaggttt

SEQ ID NO: 214363 - DNA, 201 bp, Homo sapiens
agattccacacacaatatctagcttgtattggtacctaatagtaactactccctctatgcatctcacggcatctccttttctttttctttttttaattgaracggagttttgctcttggtgcccaggctggggtgcagtggcgggatcttggctcactgcaacctccgcctccagtttttaagcaattctcctgtctcagc

SEQ ID NO: 214364 - DNA, 201 bp, Homo sapiens
gagaaacttattttaaggaattggctcacataaatggagagacttgacaaatgcaaaatctgcagggcaggccagcaggctggagacccagggaagattgmagttcaagtccaaacacaaattcttccttctgcgtggtccatcttttctctgtaagaccttcaactgattggacgagacccattcatattgtgacaagca

SEQ ID NO: 214365 - DNA, 201 bp, Homo sapiens
ttaactagcatgtataggatctaccctgtggtagacactgcagagtgctactgaactagcgatttagaagctatttgcattttcttctgtcttcatatctyaggattaaaaggatgagagcttcccttgacctatttccaattttgcttttatatgtgatttaggagggtggacgaaccaaaagccaccgatactggccca

SEQ ID NO: 214366 - DNA, 201 bp, Homo sapiens
atgccagctgaaggtacctttcatgggtggaatgataaggaggagctttggagacgggcattattcagtgatctccagagaaacagaactaatgagatgtrtatgtaaatagggagagaaacttattttaaggaattggctcacataaatggagagacttgacaaatgcaaaatctgcagggcaggccagcaggctggaga

SEQ ID NO: 214367 - DNA, 201 bp, Homo sapiens
agaccggagtgacaaggagccagccttgccaagacaaagtagcatctagtaatctgtgggacagctggggacttatagtcttttaaaatccataactgatktagacactcagcagaaatgtaaattcgaggtaaatctgctttcacaggattggtaaataaaagaggaaggtatgcttccaatttaaggagactcaattaa

SEQ ID NO: 214368 - DNA, 201 bp, Homo sapiens
cacctctgggcattcattcaacacattaattattttcaaagtataaggtattctgcaagatatagagtggcacaagatgtcagtcctgtcctgaatggggytttcaatctatttgggtagattagatggtcacataaaaatatttgagcaacatattagtatgtgttggatgccagctgaaggtacctttcatgggtggaa

SEQ ID NO: 214369 - DNA, 201 bp, Homo sapiens
aacgagacaggcaccatccctgtccccatagagcttatgtcctagtgggagggacattcaaaagtgaacagataaaatcagtgcagatagcagtaagtgcygtggcagaaatggaaaactatagtccagagtgggtctgggtgagtacaggtcctcctgcctcatccctcctcctctttgtgtgggtttcagctgcaaaac

SEQ ID NO: 214370 - DNA, 201 bp, Homo sapiens
taagtaccttttatgtttgaggctctcaagggatatcagtaatcataaaagcaagtattgtggcatttatttagttgcaaatcctactgatttttttttttcttgagacagggtcttgttctttcatccaggctgtagtgcagtgttgcaatcatagctcactgaagcctcctggcccatagttcctggcccaggagatcc

SEQ ID NO: 214371 - DNA, 201 bp, Homo sapiens
ctagctatgttaaaggggtcaggaacaaagaaaattggggaggaaaaagtcatattttccttcattgactgtgttgagcatttgcttctcagcacagtccrttagaagaaaataatgaaagggacatcaggctctttaaagccagttgtacttccctgggctgacctgtttgaccttcccacaaagagaatgaatcctcct

SEQ ID NO: 214372 - DNA, 201 bp, Homo sapiens
cgtctcaaaaaaaaaaaaaagaaaaaaagtgttctcagttgaaggcttttactccaagtaggactggtgttcagagatggcgctttgacattttaaaggtytacacttaaattatctcacttgatcatgaccacagtcctgtgagattataattgcattaataacatttattaatgttaataaaggaataatgaggtcagg

SEQ ID NO: 214373 - DNA, 201 bp, Homo sapiens
tctctacaaaaatacaaaaattagccgggcatgatggcgagtgcctgtaatcccagctccttgggattctgagacgggagaattgcttgaacccaggaggyggaggttgcagtgagccaagatcgtgccactgtactcccgcctaagcagcagagcaagactcagtctcaaaaaccaggattagataaatatttaataggc

SEQ ID NO: 214374 - DNA, 201 bp, Homo sapiens
tagtttgcatatactgtgagttgcaaacaaagatcaggtaaaggccaagcctggtggctcaggcctgtaatcccagcactttgggaggctgagatgggcgkatcacctgaagtcaggagttcaagaccagcctggccaatgtggtgaaacgccatctctacaaaaatacaaaaattagccgggcatgatggcgagtgcctg

SEQ ID NO: 214375 - DNA, 201 bp, Homo sapiens
aagcctagagggccatccagttgtgctttatcacaggggtcccagaccagtaccagtccctggcctgttaggaagtggcatcacaggaggaggtgagtacygcctgagctctgcctcctgttggatccacagcagcagttgattctcataggagaaggaaccctatcgtgaacagctcaagccagggatctagattgcaca

SEQ ID NO: 214376 - DNA, 201 bp, Homo sapiens
attccctggcaccacagaacttacgcggcaacccaaaatatgcctggaaataacctgttataatggagagccgtgttataacagtagaaatcataactcakttctaaaaattacaacctttaattctacagcagtaaaggagatattgaggaaatgtgactaatcaggaacatctgaggaagggagctttaagatttgcaa

SEQ ID NO: 214377 - DNA, 201 bp, Homo sapiens
ctctttacaaataaatgaacaaacaaataaaaaccaccccaaactactttttaatagattttatttctttagagcagttttagtttcacagcaagattgarcaaaaggtacggagagttcccatatgtcccctgccctcaaaactacttttaagggcccttattctctagaatctttccataataccaaaagatggacatt

SEQ ID NO: 214378 - DNA, 201 bp, Homo sapiens
gtgtatatgtgccacattttcttaatccagtctatcattgatggacatttgggttggttccaagtctttgctattgtgaatagtgctgcaataaacatacrtgtgcatgtgtctttatagtagcatgatttataatcctcttgtgccagtttgctaagttgtgactgaaaggaaaagttcttgaaagaaataaaaattgcc

SEQ ID NO: 214379 - DNA, 201 bp, Homo sapiens
gggctctcggtggctcgagtctcagggcgggaagagaatcgagttgatgccacccgggttcccatggacgagagggtaagtggcaggcttgtcaatgtgaytcattctctgtagtcttaggatcccaaaacaccctccttgcccgaatatgccagcattgagatttgtgtgatgcattctttcttcaatctgagattagga

SEQ ID NO: 214380 - DNA, 201 bp, Homo sapiens
atcaaaatcctaaaccctgcaaaactcatctgcttctatgaggaatgcctgtgttcttcccttaacttcaaagacacacttaattttaggaaaggcccttygtggcttgcttgaagtgagcataaagagagctttttcatactcggttagtttcaaggacctgaggaagcacagcaggaggctaaaaaccagccctgccca

SEQ ID NO: 214381 - DNA, 201 bp, Homo sapiens
gagattgctgggtcgaatggaaattctgccttaagttctttgagaaatcgccaaactgctttctaccatggctgatttaccatgactaatttacattcccmccagcagtgtataagcattcccttttctcagttattttttgactttttaataatagccattctgactgatgtaaggtggtgtatacctcatggtggtttt

SEQ ID NO: 214382 - DNA, 201 bp, Homo sapiens
aaccaaaaatctcacacttactttaaaaaatatggtttcaaaatattttatccaccacaagttggcaaatggcaggtaaaagaaaactgtattttttttttaactttattttagatacaggggtatacgtgtgggtttgttatataggtaaattgtgtgtcacgggagtttagtgtacagattatttcatcacccgggcaa

SEQ ID NO: 214383 - DNA, 201 bp, Homo sapiens
atcagttatttgaaaaaatattatttctggcactggttcatgaaatacttgatttcaactaccaactagaagtacactatatttaagtaaaaaaaaaaaaatacagagaggcttggttctagatagcagttatcttaattttccagacatctgtgactacttccttactatatacattgagagattttgtgtgttgcattt

SEQ ID NO: 214384 - DNA, 201 bp, Homo sapiens
ccactgtttctgcaggctttgaagttacagattgaattttaatttttaaagtgagaattttgcaaaactgagaattctacatatggatttcagtaattcttttgccactgtctgatttattgatatttactgcatttaggtaagtgtaagatgaaataataggtaaattaagaaaaaaataaaataatttcagccaaataa

SEQ ID NO: 214385 - DNA, 201 bp, Homo sapiens
tgctggtttgagaatttacttcagtttcgaaagttgcatcagattagatttttctgattcacagatgtgtaaggtgaaaactgtatttgattttttagtgraattacaaattatttggcctgtttgtgatctgccttaccgaacttttgagtttgaaaggtgatgtgtttctagaatgcattcaggaacgcacactgttga

SEQ ID NO: 214386 - DNA, 201 bp, Homo sapiens
cccactgtttctgcaggctttgaagttacagattgaattttaatttttaaagtgagaattttgcaaaactgagaattctacatatggatttcagtaattcttttgccactgtctgatttattgatatttactgcatttaggtaagtgtaagatgaaataataggtaaattaagaaaaaaataaaataatttcagccaaata

SEQ ID NO: 214387 - DNA, 201 bp, Homo sapiens
tcccactgtttctgcaggctttgaagttacagattgaattttaatttttaaagtgagaattttgcaaaactgagaattctacatatggatttcagtaattcttttgccactgtctgatttattgatatttactgcatttaggtaagtgtaagatgaaataataggtaaattaagaaaaaaataaaataatttcagccaaat

SEQ ID NO: 214388 - DNA, 201 bp, Homo sapiens
aatattttagccttctaggtagttcaacttctgtaatgcacaatagattatgcataatataatgagtaatacatctcctaaataggtttaggggatatatyaaatactatttattgcataagaatttagccttttgtgcatcctttatttattattaaatttattattcctataagaataataaaaactggcctgaattat

SEQ ID NO: 214389 - DNA, 201 bp, Homo sapiens
tgattgtatttcctctctttcagaatattttagccttctaggtagttcaacttctgtaatgcacaatagattatgcataatataatgagtaatacatctcmtaaataggtttaggggatatattaaatactatttattgcataagaatttagccttttgtgcatcctttatttattattaaatttattattcctataagaa

SEQ ID NO: 214390 - DNA, 201 bp, Homo sapiens
tagcctgggctacagagcaagactctgtctcaaaataggtgttctcggccaggcgcagtggctcacgcttataatcccagcacttttgggaggccgaggcrggcggatcacgaggtcaggagttcgagaccagcctgaccaccatgctgaaaccccgtctctactaaaaatacaaaaaaaaaaaaaaattagccaggcatg

SEQ ID NO: 214391 - DNA, 201 bp, Homo sapiens
gtgagtagacatttcgcctgacgtttgctgccagcataaaaatgagttaccgttattcagagcaaatcccagcaactttgacgtaagtttaactgaaatgygagttagacacatggtcctttagtagaaaatcacagagatgaagcaatgttggaagcaaatgcttttgaccagcataaatgttttgaagaaggtagaaaa

SEQ ID NO: 214392 - DNA, 201 bp, Homo sapiens
ggattttcaaagaggatctctttggaaagttggcaaatgcttactttcctggcatgaaaattgttgtttttttttttccttttcccctccacccaaagctrtgacagggtggagtatacttccatgaaattgcatgcttccaaaatagaattcactgttatattttactactgttataattgaatcgctaatgagaaataa

SEQ ID NO: 214393 - DNA, 201 bp, Homo sapiens
gctttcagaaagggctaaatggctcttttttagatttgtttaattttcttttgcttctctaatagctgcccttcatagggttgtaatccattttccttgcmataatgccttatgaagccatctgcatcccacttacatttctgcagcccatatatagtcatattttgggtcattgaaaaatcagagtaaacttttctctgc

SEQ ID NO: 214394 - DNA, 201 bp, Homo sapiens
gggtggtagatttctcaaagctgtttgcaaactgctcatgcttgtataattacagttttatatgaggaaatagcagcttttattctgcctttaattaaggmtacatttcagggtttgtggaacattttctcagaattattccaaggcacaatgtggtcatattctgtagcttgatgctgcaaaggtgttactatcacaact

SEQ ID NO: 214395 - DNA, 201 bp, Homo sapiens
agaaaataacacaggatacattaatgcctcccacatcaaggtaagaaggcaagcctgttagaaggtttggtaaagatggctgggttaaagggaaaaatgcrgggagaagaaaatgtgtgggctgcagttgtaccttttggcttgtccccagaccctcagggattgtttttgaactcctgtgcttttcttagtcaagtggaa

SEQ ID NO: 214396 - DNA, 201 bp, Homo sapiens
gctcaggagtttgagaccagcctgggcaacagagtaagacctcgtctctacacaaaattttaaaagttagccgggtgtggtggtgtgcatctgtagttccmgctactcaggaggctgaagtgggaggattgcttgagcctaggaggttgatgttgcaatgagttatgatcgcaccactgcactctagcctgggctacagag

SEQ ID NO: 214397 - DNA, 201 bp, Homo sapiens
ttgattccaaattgttctttattagtgttacattgcaggactgagaaagattaaacaattgaacccatgaaataataaagatttgtaatagagcatgagtyaaaatgttaaaatagtctactttttctaaagcttgagtagaatacgatgatgccacattgtagtgtttacctttaacaaaggtgtgaaaagaagggggaa

SEQ ID NO: 214398 - DNA, 201 bp, Homo sapiens
tttccctttagggaaaacaaatagtaaaataaatcagtgttcttttgtaatatcacttggcataacttattatttattgtaggtgtcctataatgaagaggaaactcagaatttcaaaaggaaataaatcagaggcattattcgtatttcaaaaggagtcttcatgtaatgtttgtgttctttaatgcatctgagatgttt

SEQ ID NO: 214399 - DNA, 201 bp, Homo sapiens
aacttcctgggtgccatcatttgccctgggttaagagctcccagagcagagtgaatgtgctgaggccaccatggcctccacagctcaggggtgctccagcygtatgtgtcctggctagtccaggaggatggacatggtgaaggtgaggggagaggacactgtgacagcctctgatctgctcaagtacccatgacactgaat

SEQ ID NO: 214400 - DNA, 201 bp, Homo sapiens
agtcctgggaaataaacgtcttgagtgagaagttttctaaatgttttaggtaattctaagagggctattttattggtagggaaacagtacactgtattagytcctgagggcacttgtctagtctgagacttgatgtgtttgggcacgattctgtccatctgtactttgctggtttgagaatttacttcagtttcgaaagtt

SEQ ID NO: 214401 - DNA, 201 bp, Homo sapiens
cctatttacttccaggagaaggcaatgccactgctttggtgaaacccaagggcaaatgtctcctgggaccaggaccagcttcatgggtctgtgacctgtgyagttagttgcacagtaccccatgctcagaagtgccctgtagttggtttagtgctctgctgttgccatcctgaagttttttggtttttcaacagtggattc

SEQ ID NO: 214402 - DNA, 201 bp, Homo sapiens
cagaaagagggtaagtgcatttcagcgtgtgaagtgagtgacaagggagttaggttaatgcatttttaaactatgatgggggtcccctttttccagttacrtatttgggcccatggcatgttgatgggaaagccagactaagtgaagctgtatatcttcataagggttaaaatggtgttttggtgtgtgcatgtgtgtgtc

SEQ ID NO: 214403 - DNA, 201 bp, Homo sapiens
ttactcactgttgaatgttatggttgcacagtgcacaggagcttctaattgtcctaatgaggtcagataacatttcctacttttccaggacatcttagtarcctgcctgtttgggtggggctgtccaccctattaatggtgagcactctacagaattgacagagtgcaactactgctgtagccagcacggtcattccattt

SEQ ID NO: 214404 - DNA, 201 bp, Homo sapiens
aaacttaatttttgaagagtgaatttaggctacaaacttctaagttgctgagtgcatgcatggtttctaaaatttttaattttgtgtgtttttttttttttaaccaaaacatgtttgtctttgcattactcactgttgaatgttatggttgcacagtgcacaggagcttctaattgtcctaatgaggtcagataacatttc

SEQ ID NO: 214405 - DNA, 201 bp, Homo sapiens
aacttttaaaagaaaacttaatttttgaagagtgaatttaggctacaaacttctaagttgctgagtgcatgcatggtttctaaaatttttaattttgtgtktttttttttttttaaccaaaacatgtttgtctttgcattactcactgttgaatgttatggttgcacagtgcacaggagcttctaattgtcctaatgaggt

SEQ ID NO: 214406 - DNA, 201 bp, Homo sapiens
aaacttttaaaagaaaacttaatttttgaagagtgaatttaggctacaaacttctaagttgctgagtgcatgcatggtttctaaaatttttaattttgtgtgtttttttttttttaaccaaaacatgtttgtctttgcattactcactgttgaatgttatggttgcacagtgcacaggagcttctaattgtcctaatgagg

SEQ ID NO: 214407 - DNA, 201 bp, Homo sapiens
gtttttcttggggttgggggtgggtgggtcatttcatattcttttctgtacctatcaagaaatcagattggcttaccttagaggtaaacatgatactctgycaacataaagtgatttagaaatgttaatatattttaccaagccagagtttctagcatatgtattttaagccgtcataaaacatatacctgtcatgttaag

SEQ ID NO: 214408 - DNA, 201 bp, Homo sapiens
ttggtatgatttctgccaaaacatcagtccctacctcccatcctagtaggatgagcttcaggtacccatcagggtgtagctcagagttccttctgacatcygctctggaggtcacaggaaaatggtgcccatctgtgaccctcttggtgcttactagcctggaatatgtgggacctgctgcccaggaaagctagaggcagc

SEQ ID NO: 214409 - DNA, 201 bp, Homo sapiens
tgagcatgaggagtattgagcatgaggagtaaaagataacaagtgttactgagcatgaggagtaaaggaggtataacttccagccattttggaaaacagtktagaggttccttgaaaaattaaaaatagaactaccatataatccagcagtctcacttctgggtatatatctaaagaaaatgaaatggtatgtcaaagaga

SEQ ID NO: 214410 - DNA, 201 bp, Homo sapiens
agccagacctcccagggcatgcatttcattggaaggtggggtgttgggctctgagtcctgggaatgcacgacctgcttggggagggcatctcatgtgcctrctgactcgtccccatcccccacgcagctggcagcccatcatgaagttcatcaatgaccagtacgagaaatacctgcaggaggaggtcaacatcaaccgca

SEQ ID NO: 214411 - DNA, 201 bp, Homo sapiens
agcagggtggagcgcctgggggattcgtgttaaacaagcacataaacaaaagccaacacaacccttacttaatcagcaagcaggccttgtctgaagccccygggcagcacctcatgccatccctaggttccaggccggtggtgtcgccccgtgtctctctcacccgcaagctggtgtttagaagccctgctctgtgttctg

SEQ ID NO: 214412 - DNA, 201 bp, Homo sapiens
tccgttgtttctgtcaaggaatcagcattcatctagctattcccctgtagaccacatgttgtttttccctggatgcttttaagactttttatccaagtttrattgctcagtacctacctctgggcaaaaaagcctccagaaaccagaaacttatctagttttattcccctctgtcaggtgtagactctactccagcttcta

SEQ ID NO: 214413 - DNA, 201 bp, Homo sapiens
atggggagactgcagaccgtgcccccagccttgtcccacctggggttgggtaagggagctggggtttttatacttcagttcttggccaaggactgcactgytcactccttccagccttccgagggcttgggcactaggaaaggctctgggtggagacacggaaataggccatgtgaagtcagtgggcgtgattggtagcag

SEQ ID NO: 214414 - DNA, 201 bp, Homo sapiens
attctgagttgtcagttttttctttcaggactttaaaatatagggttccagtgtctttggcctccgttgtttctgtcaaggaatcagcattcatctagctwttcccctgtagaccacatgttgtttttccctggatgcttttaagactttttatccaagtttgattgctcagtacctacctctgggcaaaaaagcctccag

SEQ ID NO: 214415 - DNA, 201 bp, Homo sapiens
tgcccagagccccggcatcagatgaggtgcagagaagggaactgagctgccaagtgtgaacaggagagaggagccccaggaccacacaggggccccgacayggcaggtgcttggtcagcagcggtgctgcccttactgctggacgtgggaaaatgcactgacacttgctgaccagagccggggtgagcatctgggtgaccc

SEQ ID NO: 214416 - DNA, 201 bp, Homo sapiens
ctcggctgctgtgatgagctttgtttcttcatttgttcattcattcaccagactttttgccggggcttgccgtgagccctacgctgctctgaagaaagccrggctggggtgagcgtgatggatgaggtgtctggcttcacaaaccctgtgtgggggggttgtggtgagaggaaaccgcacacatcattattcagttaccat

SEQ ID NO: 214417 - DNA, 201 bp, Homo sapiens
tgtacccagtgctgtcaggctgaggctctcgtttttgggggacctcaggctcagggcagctcctcccgggggcccaggggagggaactgccttcccgcacrtgtgtaaccaataccgtctgcccgttccccaggagatgatcccatttgctgtggtgggcagtgaccacgagtaccaggtcaacggcaagaggatccttgg

SEQ ID NO: 214418 - DNA, 201 bp, Homo sapiens; identical to SEQ ID NO: 37915

SEQ ID NO: 214419 - DNA, 201 bp, Homo sapiens
agcatctcagcagccctccgccccctgctcctggttgcagatgtacctgttcttggctatttgtgccccagctccgtgtcctccggtgtgtgtgaggccargctcctggggtggggacttgggggtgtgtctgcagctcctgaggccaagaccaaggctgaggccgaggctgaggctgaggccaccttggtgaggaggaaa

SEQ ID NO: 214420 - DNA, 201 bp, Homo sapiens
cccagggcatgcatttcattggaaggtggggtgttgggctctgagtcctgggaatgcacgacctgcttggggagggcatctcatgtgcctgctgactcgtmcccatcccccacgcagctggcagcccatcatgaagttcatcaatgaccagtacgagaaatacctgcaggaggaggtcaacatcaaccgcaagaagcgcat

SEQ ID NO: 214421 - DNA, 201 bp, Homo sapiens; identical to SEQ ID NO: 37893

SEQ ID NO: 214422 - DNA, 201 bp, Homo sapiens
cacccccgggatcctgcccccaagtcatttccgtcccccccccaggccctcccaccaccccattttattttatatgattttctccatttgtcatcgttccrcaccccttcgacatgctgccaggaaacaagggaaggggcctccctccgagtgagtcagtgatgaggccgcggcctccccgaggttgtggggaggctgcac

SEQ ID NO: 214423 - DNA, 201 bp, Homo sapiens; identical to SEQ ID NO: 37976

SEQ ID NO: 214424 - DNA, 201 bp, Homo sapiens
ctaagcaagtccaggtggaggaaatgcagggacagacgagggcagggccttcccaatggaggagtgctcttgaaatccgatgggagtggcttctcgggggrcccaggcctgagccccactagttcttcctccgaggcaccacctgcttgcttctccgtcctccctctctgtgtcacgaccgttctggacacggatccagtt

SEQ ID NO: 214425 - DNA, 201 bp, Homo sapiens
atgtccacgcctcctcctttcctcacggcccattgatgtctccagatgctctgcaaagccaccctcccctcgggagctccccagctggtgacgggggaccytttggggatcactgcccaggtagtcatgtaggtctgtgggccgtgcttccaggctggaccgagacccggtgcatggggtgcttctggtctgagctgaggc

SEQ ID NO: 214426 - DNA, 201 bp, Homo sapiens
caacctgggggcttacaaacatagcttccggcggctcctggagattcctggcgttccttggcctgcagacgcatcaccatcatctctgatctctggccccygtctccacgtggctttctccccctgtctgtgtgtctttctccttttctgtcttttataaagatgctcaccattggatttagggcccactaaattcagaat

SEQ ID NO: 214427 - DNA, 201 bp, Homo sapiens
ggaaagattttctgggtttcaaggagcctcctttatgggtcaccgtgggccttgctgggacctctgtctgctgtgtgtccctggagggcctgggaggcttrgagaatgaggagccacgcaggaaccagggcaggctcatgcaggggtgtaggacagggtggagttgagacccctagaagggctgtcacattctggtggctc

SEQ ID NO: 214428 - DNA, 201 bp, Homo sapiens
aaaacaaaaatgtaaagaataaggtaataaaacacctgtgtactcaccatcccgcttaagaagtgagacattgcaggtgtagccgcagccctgggtgaccytctccatcctagccccactcctgctgcggtgcccgcccctctggattgggatctggccccgggcaggcacatctgtgctgggcagtggtgtgtctgagaa

SEQ ID NO: 214429 - DNA, 201 bp, Homo sapiens
ggctgtggccctcaaggtgtggatggcaggaggtggtgagacagggactcattgatcatgggactgacaccccctcatgttgatgtgggccctgagccatmatctcaccagctcctgagttttggcgctgctcttggcgatggcgtggactcagccaggctctcgggcagcctttcctggattcttcctccgttctcccct

SEQ ID NO: 214430 - DNA, 201 bp, Homo sapiens
tcatccctggggccacccctcatgatctggacacgagtctccatcctgaagccaccacccaaacccctgtgcctcaaacccctcccacccaccacatgggkttccactgtgaccaactcagcagctgatgaagcttcccttggggctctcctagcaacggggagctggctttcccggaggcctggcctctccctaagtgga

SEQ ID NO: 214431 - DNA, 201 bp, Homo sapiens; identical to SEQ ID NO: 37898

SEQ ID NO: 214432 - DNA, 201 bp, Homo sapiens; identical to SEQ ID NO: 37891

SEQ ID NO: 214433 - DNA, 201 bp, Homo sapiens
gtgatccacctgcctcggcctcccaaagtgctgggattacaggcatgagccactgcacccggccacgaccacctaacttctttctacaagatgccccctgsctgacgcaaagcaggttgagtgagtgtgacacttccttcctgtctgtgggttccggcctttccagagcccggccagtgctattggagacaaagtggcctt

SEQ ID NO: 214434 - DNA, 201 bp, Homo sapiens
tgttgaaacaatctggcccaggacccacgtgctcagatcccagagctgtgtggcatctgagcttctcccgagcccccactgtcgcccgaggaggacccccrgatctgtgttctggaggcagagcaggctgtgggacgggcttctgggtgggaaggaccatgtggatatgccttcttgtctgagagtcccaacacctccggg

SEQ ID NO: 214435 - DNA, 201 bp, Homo sapiens
tgatccacctgcctcggcctcccaaagtgctgggattacaggcatgagccactgcacccggccacgaccacctaacttctttctacaagatgccccctggstgacgcaaagcaggttgagtgagtgtgacacttccttcctgtctgtgggttccggcctttccagagcccggccagtgctattggagacaaagtggccttc

SEQ ID NO: 214436 - DNA, 201 bp, Homo sapiens
aggtagtcatgtaggtctgtgggccgtgcttccaggctggaccgagacccggtgcatggggtgcttctggtctgagctgaggcccctggaagccacagccrggaggcagcaagggacggctgtcatgtcccctctcccctgtctcccagggtccctgcgggacagatttccctgcctgagcctcctggttgcccataccct

SEQ ID NO: 214437 - DNA, 201 bp, Homo sapiens
accccgcccgcaggaagtctccctcaagcactgcaggtgtctctgccctcacaggggacgcctgcacaagtaggtgtgaaaaaagggccctgtgggggcarggcctgggctggtgctcgctgcctcccttcatcctatgctagttcccatgcctcttccggcaggagtgcctggctccacctggtgaatcagagccaaact

SEQ ID NO: 214438 - DNA, 201 bp, Homo sapiens
ctgcagcccattctctgcctccgcttctgccatctgtgcctttgtctgcttcctgtttggaggtggtcatccctggggccacccctcatgatctggacacragtctccatcctgaagccaccacccaaacccctgtgcctcaaacccctcccacccaccacatggggttccactgtgaccaactcagcagctgatgaagct

SEQ ID NO: 214439 - DNA, 201 bp, Homo sapiens
cctttttccaaataggccatgttcataggctctggggtggatgtaaattttaggggccacctttcatccccctgttgtccccgtgtgtctggatgcacagyatggttccatgtcccagactccttgctggacccctctggccctttggggtggcctttggccttttccactcgtttctgtgctcctggtgaggtgtcgggg

SEQ ID NO: 214440 - DNA, 201 bp, Homo sapiens
aggcgtgagccgccgcgcccggccacacgtttctgttcttgaacaggtggctccctgaccctgggtgtggttactccaagaccttgctctggtggggcacrattctggccccaggtagggcgaccgtataacttactgtcccttgggggacacgttagtgaaagggacccttgaatgactacggtgggacaacagatgtga

SEQ ID NO: 214441 - DNA, 201 bp, Homo sapiens
gtcccatctcaagatccttaacttcataacgtctgcaaagaccctttttccaaataggccatgttcataggctctggggtggatgtaaattttaggggccrcctttcatccccctgttgtccccgtgtgtctggatgcacagcatggttccatgtcccagactccttgctggacccctctggccctttggggtggcctttg

SEQ ID NO: 214442 - DNA, 201 bp, Homo sapiens; identical to SEQ ID NO: 214422

SEQ ID NO: 214443 - DNA, 201 bp, Homo sapiens
aactttttccatgggtctgtgagtttgggagtttttctttcttcttaaaattcattactatttttttcctagaaaagtgtcttttagcttatttaaaatcygtcagcttattccgagggggttgctttagctcgcttagtgaggacagtgtgcagcgcggtgattgacatgattgatcagcagagcacgatcgatcagtcg

SEQ ID NO: 214444 - DNA, 201 bp, Homo sapiens
tccccactgggtaccaggggatgaagctgtgcttcgtggaaggggacagaggcgctggtgcccaggatggtgcacctggggcggctgaactggacctggcycctactgggcccctgtggagcccagattgttgtgagaaggggtggggaaaggcaggtgatccgcacctttcacttttgtttcacatgggaacaggggctt

SEQ ID NO: 214445 - DNA, 201 bp, Homo sapiens; identical to SEQ ID NO: 37910

SEQ ID NO: 214446 - DNA, 201 bp, Homo sapiens
tcggctcactgcaacctctgcctcctgggttcaagcgattcttctgcctcagcctcctcagtagccaggattacaggcacccgccaccatgtctggctaattttttttgtatttttagtagacacagggtttcaccatgttggtcaggctggtctcatacccctgacctcaggtgatccacctgccttggcctcccaaagt

SEQ ID NO: 214447 - DNA, 201 bp, Homo sapiens
gcccaagccccagccccctgtggctgaggctacaccccggagccaggagggtgagtcgcagagcgctaggtcttggatgctgtggtaatggggggcctggytgctggctttgccacagaatcttggaggaagaagctggatatggggtggagggtgctaccctggagacccagaaagaccggaatgcatgggggtgggggt

SEQ ID NO: 214448 - DNA, 201 bp, Homo sapiens
agcatggagacgttgctggaggaccaagggagaactgagcgcgtgttctcttggcctcagcctcgtgtgtgtgtttatgcatgggtactttgccatccacwctggcttccacggctgggtgggagttgagttgagctcggcggctgcctttccaccctgcgggcctggttggggagtgtgaggatgcctgctggaagccaa

SEQ ID NO: 214449 - DNA, 201 bp, Homo sapiens
tggggaggcagagtttgcccgtcccgtggcccactggtgacatcgccgaaggtcttctctgttactagtgctgccgggaacgtgtgtttccccaggtggatttggctgggctgtggagatgcgcttctcagcccttctagatgttaccaccacgccctcccgagtggccttctggtaggctctcccatgttcgctcatttt

SEQ ID NO: 214450 - DNA, 201 bp, Homo sapiens
ccagaagggtggggcctgtgcagtgcctcctcgctatttccccagggcaccgtgccacgttgcctcaatgcacagagtagctgctcaaagtgtgtcggacraacaggtgccccatgcccagccatgcagacaaaagtgtgccacgtggagggagctggtcgtggaagagaccaccagcatcttggctgcccgaggaccttg

SEQ ID NO: 214451 - DNA, 201 bp, Homo sapiens
gtcccctccccactgggtaccaggggatgaagctgtgcttcgtggaaggggacagaggcgctggtgcccaggatggtgcacctggggcggctgaactggayctggcccctactgggcccctgtggagcccagattgttgtgagaaggggtggggaaaggcaggtgatccgcacctttcacttttgtttcacatgggaacag

SEQ ID NO: 214452 - DNA, 201 bp, Homo sapiens
accagggaaggcttcctaatggaggaggcatttgatagcatcttgaaaaagaagcagttcctaggccaagccagagactgaagaatgaccacctaacttcttttttttttttttgagatggaatctcgcgctgtcgcccaggctggagtgcagtggcgtgatctaggctcactgcaacctccacctcccaggttcaagcaa

SEQ ID NO: 214453 - DNA, 201 bp, Homo sapiens
tgaggcagaagaattgcttgaacccaggtggcggaggttgcagtgaactgagatagtgccactgtactccagcctgggtggcagagcgagactctgtctcwataaaataaaataaaataaaataataaatataatacacttgaatcatctcaaaaccatctccccactccctggtctgtggaaaaattgtcttccctgaaa

SEQ ID NO: 214454 - DNA, 201 bp, Homo sapiens
ccttagcttcctcgtccataaaatgggatcatcccataaagtgagatcaagcgagctaggccccgggcagggtccccaacaggttgtggttgttcgagaakttgcagcagtggtgatggtggttgtggtgatgaggatgatgggggtggtaatgacggtgatgatgatggggtgatggtgatagtggagatgatggggatg

SEQ ID NO: 214455 - DNA, 201 bp, Homo sapiens
ctacttgtgacaaaataattaaattagaaaatgtaaaggaaatgatcaataataattgcgtcctccagacaaacactgttaacatgttcacgtttccttcyagtctttttctacatagacactcaatacttattaatttgttttgaactaaagatggttttctctgctttgtatgagaaccacctcagccaggcacggtgg

SEQ ID NO: 214456 - DNA, 201 bp, Homo sapiens
ggagtttgaggctgcagtgagctatgaccacaccactgtactccagctcctgggtgacaggatgagaccctgtctcaaaaaacaaaacacaaacaaaaaamcaacgtttatcttttgtgattttaaaaatcacacctacttgtgacaaaataattaaattagaaaatgtaaaggaaatgatcaataataattgcgtcctcc

SEQ ID NO: 214457 - DNA, 201 bp, Homo sapiens
gctgaggctgaggccaccttggtgaggaggaaattgcaggtggagaagctcgttgaccgtgaccttgatctgaccgtaattttgatggtgccgatgccgtsagcacgcaggcctcctgccctcgccacgactggctcctgcagcccacctggctgagaggtgtgctggctctcgcaggttgcaaaatggggacatcaccgt

SEQ ID NO: 214458 - DNA, 201 bp, Homo sapiens
tggaaattttccacactaaccagtagggaagggaaacagatgcacccatcagagctctggggctggccgtccaggacacgagttacagcttataggcttgragggactctaccaacactgggtgcagcctgggcaagggagtgggacagagaggtcagggctctgcctccagcccttgccccccagggctgagtctgcgcg

SEQ ID NO: 214459 - DNA, 201 bp, Homo sapiens
tgcccgacttgctatttggagctgttcccgcttgctcatcatgtgcaaggtcctgatccactcgggtctgtttaaccagcgcccctccccaggcccagttwgcctggttttcgttcgattcatttattgtcatcagtgccatccttgcaccacgtaactagcctttgcagcatgccagccaccaagctcagggccctctgt

SEQ ID NO: 214460 - DNA, 201 bp, Homo sapiens
gtggctttttacagggagtgggagtggaggggatgccgtgtccacattgagtgcatgtgaggccccttgcagtacaggatgggactgtatgtgggaagagkggggtgatgctctggctggaggcccctgggcagctgcatgattcagcgctgtggttaagaggggctccgcccatcgcagtcatgttgggcactaaccact

SEQ ID NO: 214461 - DNA, 201 bp, Homo sapiens
acttagcagacagctacaagcagctaaggaattgctatgacatggactgctcgtgattggagctaagaaggagtcagagacagaggtccctgtgctctggmgtgagtccttgggggaggctgagctcccagaatgtggggccgcctgtgcagaggccggaggtgggagacacacctgtgagtgccggtgagtgtggggtga

SEQ ID NO: 214462 - DNA, 201 bp, Homo sapiens
actgtatgtgggaagaggggggtgatgctctggctggaggcccctgggcagctgcatgattcagcgctgtggttaagaggggctccgcccatcgcagtcaygttgggcactaaccactggacagcccagccgctgctgtgtttctggggagcttttctccggctccgcatctgatctgcctctccatctccttccctctca

SEQ ID NO: 214463 - DNA, 201 bp, Homo sapiens
cacaaggagagagggtgtccaggtcagtttcaggacctggctgagaggagggggctcctcacgggcaccgcctctggcaagcacagggacaagggcaaggwcggcatggccagaggtccctgggagcctcttcccctctcttcttcctagcagctccccctcactcttcccagggaccctgtcactttcctttagcgtgtg

SEQ ID NO: 214464 - DNA, 201 bp, Homo sapiens
ggccgcctcattcaggtcttgctgaagcgctgccatcttggagaggcctccctgtcacccgcagttaaaacagccctcccatgcctgtgggtggctttctrtggggcatggatgagtattggagagtcttgccgtttatttgttcatatgccctctgggagggcaggggacactgacttgtgttgtgggtgccttgcatgt

SEQ ID NO: 214465 - DNA, 201 bp, Homo sapiens
tagattaatatccagatactaatcccatatctgacctatgatttgctgccattccatggattgccttctccccacgttgttagtgccctttgatatgcaatttttttttttttttttttgagatggagtctgactctgttgcccaggctggagtgcagtggcatgatcttggctcactgcaacctccgcctccctggttcc

SEQ ID NO: 214466 - DNA, 201 bp, Homo sapiens
tctggattgggatctggccccgggcaggcacatctgtgctgggcagtggtgtgtctgagaagcctaggtctccttttttttttttttgagatagagtctcrctctatcgcccaggctggagtgcagtggcaccatctcggctcactgcaacctctgcctcctgggttcaagcgattcttctgcctcagcctcctcagtagc

SEQ ID NO: 214467 - DNA, 201 bp, Homo sapiens
gccaattcagctgcggtggggaggacccactgtgtgcgcctggggggtggcgtggggcactctgggatgagaagatgcgacttctgccctgagagccctgytttaatggaaggcgggggcatagttgcaggcagaagccatcaagcactgtggtcagaccagcattccatgtcaaaaatggccttgttggccgggcgcagt

SEQ ID NO: 214468 - DNA, 201 bp, Homo sapiens
ctttggttgagttcatcttgtgctcttaagttcctgttagacacaggcaggctgctttagttcttctggcaaatgttttgttgttgttgtttgatacgggktctcactccgtcacccaggctggagtgcagtggcgccatctcgcctcactgcaacctccgcctcccaggttcaagcgattctcctgcctcagcctcccaa

SEQ ID NO: 214469 - DNA, 201 bp, Homo sapiens
ctgagaagcctaggtctccttttttttttttttgagatagagtctcgctctatcgcccaggctggagtgcagtggcaccatctcggctcactgcaacctcygcctcctgggttcaagcgattcttctgcctcagcctcctcagtagccaggattacaggcacccgccaccatgtctggctaattttttttgtatttttagt

SEQ ID NO: 214470 - DNA, 201 bp, Homo sapiens
tcctggatggagaatctgttcagatcactccccagcctaaaccttccctgggtgtctgctgtgcttggggcgctgactcatcgtggggcggcctgtgagaycctacgtcacctggccactcccctcagcccctgttcactgcaccggtcccctggcctggctgctcctggaacatgagggctcatcctcacggaagaatat

SEQ ID NO: 214471 - DNA, 201 bp, Homo sapiens
tcaggagcctcgcttgcctctcagagagcacatggcttgaccatcacggggactgggggagaggcacaggcatgcctgtccggcagcagaagggaaccccrggcctgggcctctccattctgtggcgttgtctttcctcagagttgcactgtctccctcactgtccctgcctggccccagtgctcatgtggcttgtggccc

SEQ ID NO: 214472 - DNA, 201 bp, Homo sapiens
taccttgaccttcaaggtaccccttgagggtagcatgaggctaagctcttgttctcctccaggactctgttcctgtgagggcctcggggtcccttgctttyttctgggggccttgctggtcaggatcacagagaagctctttgctgttgatctttctgcctctgtatcttttggcaagccattttatgactcagttgcttt

SEQ ID NO: 214473 - DNA, 201 bp, Homo sapiens
cttgaacctgggaggttgaggctgcagtgagctgggattgtgccaatgcactccagcctgggcgacagaacaaaaccctgtctcaaaaacaaaacaaaacmaaaccacaaaaaaaaaaaccatgaaagattctaaagtaaacacccatgcacctaccacctagattccacagcaaccattttgctgtttgcttcaccacaa

SEQ ID NO: 214474 - DNA, 201 bp, Homo sapiens
gccaccatgtctggctaattttttttgtatttttagtagacacagggtttcaccatgttggtcaggctggtctcatacccctgacctcaggtgatccaccygccttggcctcccaaagtgctgggattataggtgtgagccaccgcatccggcctggtctcctcttgcatacggtcatcagcatcgtgtgactgagcagcc

SEQ ID NO: 214475 - DNA, 201 bp, Homo sapiens
cactgcgcccggcctgatacctatatcttgaccaagctgctgtggaaacattgagttccccttgatagttttgtccacagagtgaatgtttaggaaccggygaggcatctctcacccccacccagatggcggcctggaggcagcgtttctgaccctgtgatgggatttgtctctcttgtccaagagactttagagatgtgg

SEQ ID NO: 214476 - DNA, 201 bp, Homo sapiens
ttgaggctgcagtgagctgggattgtgccaatgcactccagcctgggcgacagaacaaaaccctgtctcaaaaacaaaacaaaacaaaaccacaaaaaaaraaaccatgaaagattctaaagtaaacacccatgcacctaccacctagattccacagcaaccattttgctgtttgcttcaccacaaatccctctggccacc

SEQ ID NO: 214477 - DNA, 201 bp, Homo sapiens
tcctcttgaatgccgtcatcagcatcacatccttggtgcctcactggagtcagtggctgccctgcctgtgcccacaacgtgacggcgtggagacttatccrtgtagatccacgaagccttggttcacttattttggcagctagcgagtgttcctctgtgtggggaggcagagtttgcccgtcccgtggcccactggtgaca

SEQ ID NO: 214478 - DNA, 201 bp, Homo sapiens
ttagtatatgtacatatatacatgtaggccctatgttgactgtatatgtggtcctgtattagtatatgtacatatatacatgtaggccctatgttgactgtatatatatatgtggtcctgtattagtatatgtacatatatacatgtaggccccgtgttgactgtatatgtggtcctgtattagtatatgtacatatatac

SEQ ID NO: 214479 - DNA, 201 bp, Homo sapiens
tagtatatgtacatatatacatgtaggccctatgttgactgtatatgtggtcctgtattagtatatgtacatatatacatgtaggccctatgttgactgtatatatatatgtggtcctgtattagtatatgtacatatatacatgtaggccccgtgttgactgtatatgtggtcctgtattagtatatgtacatatataca

SEQ ID NO: 214480 - DNA, 201 bp, Homo sapiens
gtcttctctgttactagtgctgccgggaacgtgtgtttccccaggtggatttggctgggctgtggagatgcgcttctcagcccttctagatgttaccaccrcgccctcccgagtggccttctggtaggctctcccatgttcgctcattttctgtgcctcaggcagccgcctctctgactgagcgtccagctgacttttgcc

SEQ ID NO: 214481 - DNA, 201 bp, Homo sapiens
atacatgtaggccctatgttgactgtatatatatatgtggtcctgtattagtatatgtacatatatacatgtaggccccgtgttgactgtatatgtggtcytgtattagtatatgtacatatatacatgtaggccccatgttgactgtatatgtggtcctgtattagtatatgtacatatatacatgtaggtcctatgttg

SEQ ID NO: 214482 - DNA, 201 bp, Homo sapiens
tatgtggtcctgtattagtatatgtacatatatacatgtaggccccgtgttgactgtatatgtggtcctgtattagtatatgtacatatatacatgtaggycccatgttgactgtatatgtggtcctgtattagtatatgtacatatatacatgtaggtcctatgttgactgtatatgtggtcctatattagtatatgtac

SEQ ID NO: 214483 - DNA, 201 bp, Homo sapiens
atgtacatatatacatgtaggccccgtgttgactgtatatgtggtcctgtattagtatatgtacatatatacatgtaggccccatgttgactgtatatgtrgtcctgtattagtatatgtacatatatacatgtaggtcctatgttgactgtatatgtggtcctatattagtatatgtactatatacatgtaggccctgtg

SEQ ID NO: 214484 - DNA, 201 bp, Homo sapiens
tgagaccaagggctgatgggccaaggctgcgtgctgcttgcccagcccgtggacccatccactgagcacccccatacccctacactgggcccggggtgtcrggaggtggaggggggactgggtgcctggaaaaacaagcccaccgagagcctgagcccccaggggtcagtatcaggcagtcaccacggtgcccggtacaca

SEQ ID NO: 214485 - DNA, 201 bp, Homo sapiens
aaatatccgtttttttgagcacttttcccgtgtagactcaacagggtctccctctgttgcccaggctggagtgcagtggtgcgatcatggctcactgcagmcttgaactcctgagctcaagcaatcctgctgcctcagttctccgagtagctgggaccacatgtgtaagtcactaagcctggctaattaaaaaaaaaaaaa

SEQ ID NO: 214486 - DNA, 201 bp, Homo sapiens
gggaagtgacttccttcctgtccctgctgggtggccttgagcaagccacttggcagctctgggccgcagttccgtcatctgcaaggtgaggggtgggagckgcacggcccctaggcagcgcccccacctcctgcgggtttctgcgcgtgtcctgagttttgtgggcgcctcttccctcactgaggggctcttcttctctgc

SEQ ID NO: 214487 - DNA, 201 bp, Homo sapiens
tgagatggatggtggtgatggttacacaacagtgtgaatgtgcttcatgccaccaaactgcacacctgaaaatggttaaaatggtaaattttctgtgatgratactttaaggcatgtatgcaaacacacagaagcagttactaccactggggttgatggaaaagaaaccaagaactcggagcgtcctccacaccttgccac

SEQ ID NO: 214488 - DNA, 201 bp, Homo sapiens
ggatttgaaccctggagcagcctggctgctgagctgtcctggagacggggtactgtgcagtggtcggggtaggggtggagctctgccgtcgctgactcccrggctacctggagtgataacacagcccagtgtctgggcccctgcctgagactttggctggatgccaggagcccgagaccttccagctctttcctgtgtaag

SEQ ID NO: 214489 - DNA, 201 bp, Homo sapiens
tggccagagagagactggagaccctgtgggaacccccgaggggagggagaaggccgctgtttgaacggaggtggtctttccctctgcccctccccaggcgsgtcacacttgcaggcccagcctcctgctgtggcagcgcttggggtgtcggctgcctcctgggcacgagttgggagctgagggaggcgctttcaggaccgg

SEQ ID NO: 214490 - DNA, 201 bp, Homo sapiens
tattgtcaagtctctgctttcccttttagcttttggaattcacatcctgtttagaggtctcctgcgttctgaaattataggaaagaatttcacccacgttktcttctagtacttctgtggtttcatttttacatgttgaaatcatgaatccattggaatgtattttggtttcagcagcgaggtaggggtagatggtattgc

SEQ ID NO: 214491 - DNA, 201 bp, Homo sapiens
cagtgagtttggatcgtgtcatgcctcgggtcctgagcctgcaggatttttctgtggggctgtgtgcttctgcttctggaggtgtccagaaggcactgacrttcctgccgggatgccttactcggaaggtcccgctgctcccacctcctcccattttcctgagctgcttgcagagggcacccaggtccccttttactttgg

SEQ ID NO: 214492 - DNA, 201 bp, Homo sapiens
gccagaagggtggggcctgtgcagtgcctcctcgctatttccccagggcaccgtgccacgttgcctcaatgcacagagtagctgctcaaagtgtgtcggasgaacaggtgccccatgcccagccatgcagacaaaagtgtgccacgtggagggagctggtcgtggaagagaccaccagcatcttggctgcccgaggacctt

SEQ ID NO: 214493 - DNA, 201 bp, Homo sapiens
tgggtggagcgttgagggagcagggggtcaggcccccccgagctgatgatggtgggcgtggctcttcgcatacttggtccgcaccgggccgtgtgttccargggcagaacagggaggaatctcagcacagacagcagggctgccagtacagcgttgagtatagggttaatcaaagcacagggctccctggaaccacccaac

SEQ ID NO: 214494 - DNA, 201 bp, Homo sapiens
tcatccctccttggaccagcaggtgccatcctccccacccctgccctgctgtggctccttcccctccacggccaacatttagaggacgattaccacttccytccctgtgtgctggggaccgggtgataggatccctccacccgatcatttccattagacctgggccgggtcttcttactcacagagcccttagtttccgcc

SEQ ID NO: 214495 - DNA, 201 bp, Homo sapiens
tatgtggtcctgtattagtatatgtacatatatacatgtaggccccatgttgactgtatatgtggtcctgtattagtatatgtacatatatacatgtaggycctatgttgactgtatatgtggtcctatattagtatatgtactatatacatgtaggccctgtgttgagacactattgtgttttcttgatattttgtccat

SEQ ID NO: 214496 - DNA, 201 bp, Homo sapiens
tcctagctgactcaggtgactttgggccatcttgtcacaccccttctatcagcttggccttggttatttctgtgtcctccatagcctcggaccagagccayggcgggatgctttcctggtgcgtggcaggcagtcaggaaatattgctggactgaccttgataggagatgcttgggagaattgcccaaaaaactagcttaa

SEQ ID NO: 214497 - DNA, 201 bp, Homo sapiens
tgcacacggttttatttgggggtgcccttctggcgagaggagagaggccatggggctccagcagcgtcctgggagggctcaagcccacagccgtgctgacrtggagcttacaggcaggggattggtgccagtcctgtgggacacagggcctgtttggaaatgccaggctgtgggacatggttgggtcccttctcagaagcg

SEQ ID NO: 214498 - DNA, 201 bp, Homo sapiens
agaaggtctgcctcaatgttgatggctgctgaccaggtggtggttgctgaaagttgaaggtagctgtggcagcagtttctttgtttcttttttctttttctttttttttgagacagagtcttgctctattgcccaggctggagtgcagtggcacgatttcagctcactgcaacctctgcctcccgggttcaagcaattctc

SEQ ID NO: 214499 - DNA, 201 bp, Homo sapiens
tccatagcctcggaccagagccacggcgggatgctttcctggtgcgtggcaggcagtcaggaaatattgctggactgaccttgataggagatgcttgggaraattgcccaaaaaactagcttaaaatgcaaatattggccttcttttgcgttggctaaagagtagcatttctccgtttgcctcccgggtaagaaattgatg

SEQ ID NO: 214500 - DNA, 201 bp, Homo sapiens
ttcaccatgttggccaggctggtctcgaactcctgacctcaggtgatccacctgcctcagcctctcaaagcattgggactacaggcatgagccactgcacygggccctatttgttttttttttgttgttgttttttaattgagacagagtctcgctttgttgcctagactggagtgcagcagcgctatctcagctcaccgc

SEQ ID NO: 214501 - DNA, 201 bp, Homo sapiens
ttggcctctgcacccccagacctccctcgctctgcaggggcagtcgggggccccctctaggaatggagcgccagctccagctcctgtcaggctacagcccrgatggttggctgagcacgagcatgtgagagtggaattgggcccaaccgggctgcttctccccgttgtcttggtttccttccacgctgacctggaaggact

SEQ ID NO: 214502 - DNA, 201 bp, Homo sapiens
ttgttgagtctcagggaatagggatgcctgagcagagggagagagagcggggaacagccagtcagtggagcagtcagaacatacaacgtttattgaataasttcactgtcttatctggatgtggctcgtcatgccccaaaaacaactgcaataatggcattgaagatcactgatcactgggcgcggtggcccatgcctgta

SEQ ID NO: 214503 - DNA, 201 bp, Homo sapiens
gcctggagggtcttggctggctctgctggcaggtacagtagcagggtcagcaggagggagtccaggacggagctccttcatttttaattcagggaagcaarcttcagtggttgagtctgaggatgagcaggaaatgaatggaaaagtcttttttttttcttttttctttctaggcagggtctttctctgtcccccaggctg

SEQ ID NO: 214504 - DNA, 201 bp, Homo sapiens
gccctggcccgcctggcctgtgcagtggtgtcacctgtgtctgggacacacccgtgtccttcctctgccccacactcacagcgtggccgacttggcccggkgccctgtccttgccagcagggacccccgtgagccccgagccagcacctgagagtgtcgacacctgcttgggggtgggtgcccccccactgccccgctccc

SEQ ID NO: 214505 - DNA, 201 bp, Homo sapiens
aggcggtggcatgctcgtttggggggatggcgtgagccagggtgggcacctcttcatttaggtgtcaccttcttgacattccagccgggacatggtttccytggggaagatggacacccccagagtggggcatctcctggggaagatggacacctccggaatggggcgcctcctgttctcactgttcttctagcacacagt

SEQ ID NO: 214506 - DNA, 201 bp, Homo sapiens
gatcactgggcgcggtggcccatgcctgtaatcccagcactttgggaggccgaggcaggtggatcacctgaggtcaggagtttgagaccagcctggccaayatggtgaaacctcgtctctactaaaaataccaaaattagccaggcgtggtggcgggtgcctgtagtcccagctactggggaagctggggcagaagagtcg

SEQ ID NO: 214507 - DNA, 201 bp, Homo sapiens
gagtcgcttgaacctgggaggtggaggttgcagtgagccgagatcacaccactgcactccactgcactccagcctgggcaacagagcgagactccatctcaaaaaaaaaaaaaaaagggccgggcgcagtggctcacgcctgtaatcccagcactttgggaggccgaggcgggcagatcatgaggtcaggggattgagacc

SEQ ID NO: 214508 - DNA, 201 bp, Homo sapiens
ccttctgaatagctgggattacaggcatgcgccaccatgcccagctaatttttgtatttttagtagagacggggtttcaccatgttggtcaggctggtctsgaacccctgaccttgtgatccacctgcctcggcctcccaaagtgctgggattacaggcatgagccactgcacccggccacgaccacctaacttctttcta

SEQ ID NO: 214509 - DNA, 201 bp, Homo sapiens
agtcgcttgaacctgggaggtggaggttgcagtgagccgagatcacaccactgcactccactgcactccagcctgggcaacagagcgagactccatctcaaaaaaaaaaaaaaaagggccgggcgcagtggctcacgcctgtaatcccagcactttgggaggccgaggcgggcagatcatgaggtcaggggattgagacca

SEQ ID NO: 214510 - DNA, 201 bp, Homo sapiens
acggggtttcaccatgttggtcaggctggtctggaacccctgaccttgtgatccacctgcctcggcctcccaaagtgctgggattacaggcatgagccacygcacccggccacgaccacctaacttctttctacaagatgccccctggctgacgcaaagcaggttgagtgagtgtgacacttccttcctgtctgtgggttc

SEQ ID NO: 214511 - DNA, 201 bp, Homo sapiens
cgggaggctgaggcaggagaatggcgtgaacccgggaggcggagcttgcagtgagccgagatcgcgccgctgcactccagacagagcaagactctgtctcaaaaaaaaaaaaacaaagaaagaaaaaagaaaaaagagatcacagatcaccatagcagatataataataatgaaaaagtttgaactatttcaagaatcatc

SEQ ID NO: 214512 - DNA, 201 bp, Homo sapiens
ccatctccctctcatccgcagcctggctaggaggttatcaatctagatctttttaaagaaccagcattggactccccttttctggtgtccatttccttgartttctctgttatcttcattacttccttccttgtacttgcttcagcgcattagtcagggcccagtcaggaaacaaaaaccacaccggcaatttgaatagca

SEQ ID NO: 214513 - DNA, 201 bp, Homo sapiens
ggaaatccacagaatggaagaaagtatttgaaaatcgtatatccgataaaggactagtatccagaatatataaagaactcctacaactaagccacaaaacaaaaaaaaacaacccagtgaacagacatttttccacagaagacataccaatggccaagaagcacaggaagagatgcgcagtgtcactaatcatcagggaaa

SEQ ID NO: 214514 - DNA, 201 bp, Homo sapiens
aggtcaacatcaaccgcaagaagcgcatcccggacacccgcgtccactgctgcctctacttcatccccgccaccggccactcgtacgtccctgcagtgtcrgcgtcctcatgccgggtgccctgggttccctctgtcccctgggactgccagacggtgctgtctgccctgctgctgggtgcagaggggctgagtcaggggc

SEQ ID NO: 214515 - DNA, 201 bp, Homo sapiens
cctggggctgctggaacaaattactggaaaccaagtggcccaacaaagattgattcgctcatggttctggaggccacaagtttgacatcaaggtattggcrggaccacactccctccgacagctcgaggggaggacccttccttgcctcctccagcttgcgttggcccaggcgctccttggctctggcagcatctgcagtc

SEQ ID NO: 214516 - DNA, 201 bp, Homo sapiens
tctcgttgtgagtgtcctggggctgctggaacaaattactggaaaccaagtggcccaacaaagattgattcgctcatggttctggaggccacaagtttgamatcaaggtattggcaggaccacactccctccgacagctcgaggggaggacccttccttgcctcctccagcttgcgttggcccaggcgctccttggctctg

SEQ ID NO: 214517 - DNA, 201 bp, Homo sapiens
tatgccggttccactgtgaggatggtggcagggggcttcccaggaggcctgcacattgggaagagaggggcgaccgtgtgtgactgcaggacccagggcgyagtcttaggactctgatgggggaggagatgctggggagccctgttctgccagcctggtgacagacatctcctaatgtttcccggctgggtacaactcaca

SEQ ID NO: 214518 - DNA, 201 bp, Homo sapiens
gcacaaccagagtttcccaaagccgtgggcctgagggccctgccttcctgggacagcaacctttggtccaatttgggaaaaggtgggttaaaccaagcccrgctccctcactgtaggattactcagtgcgtttagtatgcaaatgtgcctctgaatctaagacaggaccacagaaacctcttcagtgttcctctggaggga

SEQ ID NO: 214519 - DNA, 201 bp, Homo sapiens
caaggacctgctacccctgggcaggttatgccggttccactgtgaggatggtggcagggggcttcccaggaggcctgcacattgggaagagaggggcgacygtgtgtgactgcaggacccagggcgcagtcttaggactctgatgggggaggagatgctggggagccctgttctgccagcctggtgacagacatctcctaa

SEQ ID NO: 214520 - DNA, 201 bp, Homo sapiens
tgtaacgagtggccacaagctggctgggtcacaacaacgcccagccatcctctcacagctctgcaggccacacatccgagatcagggtcaccaggctgaartcagggtgtccactgggcatagccctctggaggctctagggcaggggttcccagccccgtgtgtcctattaggaactggcctgcacagcaggaggtgagt

SEQ ID NO: 214521 - DNA, 201 bp, Homo sapiens
ccacagggaagatggagacgtgtaaagtgacaaggacctgctacccctgggcaggttatgccggttccactgtgaggatggtggcagggggcttcccaggrggcctgcacattgggaagagaggggcgaccgtgtgtgactgcaggacccagggcgcagtcttaggactctgatgggggaggagatgctggggagccctgt

SEQ ID NO: 214522 - DNA, 201 bp, Homo sapiens
aatcccagcactttgggaggccgaggcggttggatcacgaggtcaggagatcgagaccatcctggctaacatggtgaaaccccgtctctactaaaaatacaaaaaaaaaaaaaaaattagccgggcgtggtggtgggtgcctgtagtcccagctgctcaggaggctgaggcaggagaatggcatgaaccttggaggtggag

SEQ ID NO: 214523 - DNA, 201 bp, Homo sapiens
gctgggagcctcttctgtgtccttcagttgcattaactccttgcagacagaggaggaagctgtccggtgctcctccctgctgcgtgggtcctttgaatctscccagttgggcctgtggatctgtgcagtcacgtacggggttctaaaatctgcaaaatgacaagctcacgaacactctcgcttctgtgggtgaatgtggat

SEQ ID NO: 214524 - DNA, 201 bp, Homo sapiens
ctccctcccaggggacggctagagactcactgactcatgcgtgtgtggtaggaatcttccaggaagtccccgtcccgttcgccctctctgcctgggcgggracggcaactgcctctgtcactgcagactaatgggacggaggggggtgacttctcagggttcctcctgggcaggtgctccggaaccttttctcagcacgct

SEQ ID NO: 214525 - DNA, 201 bp, Homo sapiens
ctttgttttatcttgagtccaggcctcgctccatgaactaggatgaatggacattgaatcaacgcagggatgggtggggctggggtggggacgcagagtgrccccgggggcctgcagctgggtcctggctgctgacttccagtttcctttgcctgttggagcccagaacaagtcagaaaggggaaatgcaaagttcgagtg

SEQ ID NO: 214526 - DNA, 201 bp, Homo sapiens
tctggctttaggggacttgaattcacagatgaaggagatggctggcaaaggtgggaacctcctgctctatgggtgggggggtgacactgctttaccttccrgtgacagcatggggatcctcccaacatgacctggctccgcatctttctgacactgtgcacggtccacagttgtgatgctcagctgggagcctcttctgtg

SEQ ID NO: 214527 - DNA, 201 bp, Homo sapiens
gcggcgcttggacctggctggtggttggtttgtccactgtgtggtttgttttttgcttccagccaaagtctgtcttcaaggctgcctcggtctcctacctraaatagcatttctgtgccttcctggcagttgattatagagggggaagctcccggcgctcagaggagcctggcgtgtgtgtgcacgtgtgtgtgcatgtgt

SEQ ID NO: 214528 - DNA, 201 bp, Homo sapiens
tgatggtgcaggcctttgacatatgggtttagaaaatctgcggaaacccggactgtttccaggttttgtcagtttaatgctgatgcaaatgtcctcgtacrtaaatctttctgtacttctgattatttccttgggataaattcccagaagtgggccaaagcacatgaacggtcttcaggcttttggagcaagttgagatcg

SEQ ID NO: 214529 - DNA, 201 bp, Homo sapiens
catggtcatgaatgcaggcccggggtcctggagggggcttggccacgctgtcgctggacgtctgtccccaccagggtccatctgatgcagtacggcacagkgtaaagcccagctcctcttacggggttcctgggtcatcagtgggcggggaaccgaggcctcctggagggcggtgcctcagccctcacccctccctcctgt

SEQ ID NO: 214530 - DNA, 201 bp, Homo sapiens
caggacagccttggtcaccagcaaggtgaccacacatttcagcatgcacagcccccacagacacacacccaggagatggtaattacaccagcaacagtcayccctgccgcgtgccatgcctgcacccagggaatcttattttttatttatttatttatttttatttgagatggagttgcgctcttgttgcccaggatagag

SEQ ID NO: 214531 - DNA, 201 bp, Homo sapiens
cgaggtgagaggcctggcctgacgcgctctgcacccgcttcctgcccagccccgtgggaactctggtccctgtagtggtttcctggggctgccatcaccargtgccacaaactgggtggctcaaaacaccagacatttcttctctcgccgttctggaggccagaagtccgaaatcacggcatcagcaggcctggttctttc

SEQ ID NO: 214532 - DNA, 201 bp, Homo sapiens
gtttcactgtgttgactaagttggtctcgaactcctgacctcaagtaatccacccgtctcggcctcccaaagtgccggagttacaggcgtgagtcaccgcrcccaggctgatatgcaaatattttaaacttctatgacgttccactttatctatttgttcttctgttgcctgtgcttttggcgccatatccaagaaatcat

SEQ ID NO: 214533 - DNA, 201 bp, Homo sapiens
tggtcccggcagggaggacctctgtgggtagccttgttggaagagctgaaaggcagccagagaggctgtgcgtggatggaagctgaagagtaggttagggrcgtgtgttttgttaacaaagacttcaagcatttactgaccaggcacaacactatgtgcttcataaataaatatctcatttgatccccagcattcttatga

SEQ ID NO: 214534 - DNA, 201 bp, Homo sapiens
ccaagctgctgtggaaacattgagttccccttgatagttttgtccacagagtgaatgtttaggaaccggcgaggcatctctcacccccacccagatggcgrcctggaggcagcgtttctgaccctgtgatgggatttgtctctcttgtccaagagactttagagatgtggcccctgaatgtgggggcccctgttggggtgg

SEQ ID NO: 214535 - DNA, 201 bp, Homo sapiens
atgtaaattggggacaaatttggggatttaatgatataatgtaagaagcagacatgtcacagccctggttatacagtcagtgtataataagtggtaagccstcagaggaggcagccggtgagaatgggagcatctcagcagccctccgccccctgctcctggttgcagatgtacctgttcttggctatttgtgccccagct

SEQ ID NO: 214536 - DNA, 201 bp, Homo sapiens
aaggatctaaataatcactaaggcccttccagctgtgatggctttgtccatcccccatctgaagttcctggcagtccctctgccttgaagccctcttcctrcagactgaagtgtctccattttcacccccaatttccatccttgcacacagggagcctgtccagcggctgccctctttgggaccgaccaccctctccaagt

SEQ ID NO: 214537 - DNA, 201 bp, Homo sapiens
ttcctggcagtccctctgccttgaagccctcttcctgcagactgaagtgtctccattttcacccccaatttccatccttgcacacagggagcctgtccagyggctgccctctttgggaccgaccaccctctccaagtcctggcctcagaactccagctcctccccacttggccagcatgatcctcccaggcgtctcgtgcc

SEQ ID NO: 214538 - DNA, 201 bp, Homo sapiens
agccctggcctctacacttgttcaaccccagaggttctgaaggagctgcatggaccaggctgtccccaaggagagacccagggagagcaggaaggccccargaacaggcaccattctcacactggctctgagctcctgcgtgggaagtggggaatctcgtgggggctgtggagaccttgtgtccctgcttcctctcctgct

SEQ ID NO: 214539 - DNA, 201 bp, Homo sapiens
gggataagagaaggtttggaatcccaagggctggctgttgaggtcagctgcccacccctttgtgttccatcttacagggacccaggcctgccagtgctccrtttctggaaggaatgctgtgggctgctgtgccccataggcagggtggagggtccccttgcagccagcgagctgctcttcctgtagcgtgcagagggaagg

SEQ ID NO: 214540 - DNA, 201 bp, Homo sapiens; identical to SEQ ID NO: 37889

SEQ ID NO: 214541 - DNA, 201 bp, Homo sapiens
tggtgctggcttgccaggttgttagagagctttatccagggagaaattaacatcacaaagttgggggataagagaaggtttggaatcccaagggctggctrttgaggtcagctgcccacccctttgtgttccatcttacagggacccaggcctgccagtgctccgtttctggaaggaatgctgtgggctgctgtgccccat

SEQ ID NO: 214542 - DNA, 201 bp, Homo sapiens; identical to SEQ ID NO: 37892

SEQ ID NO: 214543 - DNA, 201 bp, Homo sapiens
gtgatcatgttcgcaggttccaggagttaggacttaagacatatcgttttgggggacactgttgaacccactacatttaataaacccagagttggtgccartgtcccctgcggacaccatagcagattctggaggttccttgtaaaggaatccgtaggacttcttttcccttctggagggatgagactgtagctgggctgg

SEQ ID NO: 214544 - DNA, 201 bp, Homo sapiens
aacctgggggcttacaaacatagcttccggcggctcctggagattcctggcgttccttggcctgcagacgcatcaccatcatctctgatctctggcccctrtctccacgtggctttctccccctgtctgtgtgtctttctccttttctgtcttttataaagatgctcaccattggatttagggcccactaaattcagaatg

SEQ ID NO: 214545 - DNA, 201 bp, Homo sapiens
acccatctactcacccacccatccactcacccatccatctacccatcctctcatctatccatccactcatctacccatccacttatccatccatccactcrtccgtccatccactcatccacgcatccactcacccatccatctacccatccactcatccacccatccacttgtctactcatccactcacccacccatcca

SEQ ID NO: 214546 - DNA, 201 bp, Homo sapiens
cacttgccatccttatacagcaccccacacccacctccccgcctcctaccccttcttccaaggggtcatctctgcttccctccccacccaacctcacccaygtggtccgcccagcaacctttgacccccaacatgacaaaataaacctcccttgccggtcactcattcattcattcagcattgggtgctccctgtggactt

SEQ ID NO: 214547 - DNA, 201 bp, Homo sapiens
ggactcctggggcagggcctggagacgggaagagaaaacaattccagtctctcaactcttgtcagtccaggtgggtgctgcatggattgggggcacctggmacagttggccccttcacccctttcccccacctttccagcccctctggctataatcagacagttgtgtgcgatgtctttctccctcctgaaggggtcattt

SEQ ID NO: 214548 - DNA, 201 bp, Homo sapiens
tgccctcatgggactgcacaagtgcaagaccacatcagtaaacgtgaaacacaggaagtgacaggtgtgacaaaggggaccagtggcaggacagaacctgsggttcgtaggaccaggtcaggagggctgcctcggggggacaccttcgggctgagcgcagaaggatgaggggagtaaaccaggctcaaacccagcaggcag

SEQ ID NO: 214549 - DNA, 201 bp, Homo sapiens
ctgcaggggagttgaggaatcctgcaggaagcccctctcctcatccagcccccatcccttgcccttccctactcctcttccttggagacttgcctggaccrtcagcccctgcacagcagcctgggaatggggcagggtggggtcaggggacagaaagaccctgtcctagaacaatgaaccctgacatttgcttggcacaga

SEQ ID NO: 214550 - DNA, 201 bp, Homo sapiens
ggttgctgtaacagagtgccacaacctgggggcttacaaacatagcttccggcggctcctggagattcctggcgttccttggcctgcagacgcatcaccaycatctctgatctctggcccctgtctccacgtggctttctccccctgtctgtgtgtctttctccttttctgtcttttataaagatgctcaccattggattt

SEQ ID NO: 214551 - DNA, 201 bp, Homo sapiens
taagcagatcatcagcggccaatgattgaatcaatcatgccttcgtaatgaggcctccgtgaacactcagaaggatggggttccgggagcttctggatggwtgagcatgtggaggctcctggagggtggagcgcctggggagcacatggaagctctgcgtccctcccccataccttgccctacacatctcttcccctgtat

SEQ ID NO: 214552 - DNA, 201 bp, Homo sapiens
ggggagttgaggaatcctgcaggaagcccctctcctcatccagcccccatcccttgcccttccctactcctcttccttggagacttgcctggaccgtcagyccctgcacagcagcctgggaatggggcagggtggggtcaggggacagaaagaccctgtcctagaacaatgaaccctgacatttgcttggcacagattctc

SEQ ID NO: 214553 - DNA, 201 bp, Homo sapiens
cagcagaaagctctgcggctgatgggaccgagcaggagaagggccggcggaggctggggcaacaacgcacttgcccactgtgaagggcctgtgtgagctgrtggctgatgagagggcagtggggcgaggctgcctcctgccaggctagaccagctccaggacacccatatctccttttcagaaccggtgactcagtggcta

SEQ ID NO: 214554 - DNA, 201 bp, Homo sapiens
aatcagacagttgtgtgcgatgtctttctccctcctgaaggggtcatttagtcaggctcctactcatggcccaggaatgtgcccctccctgcctgtccccyacccccaagcaggccgtgcctccagccccctgctgtctctgaagggcctgggcatggggcagcctctgcagcatccccagggcccgagctgatctgcaca

SEQ ID NO: 214555 - DNA, 201 bp, Homo sapiens
cctccggccccaccacccctcctgtagtggtctcgctggctgctgccctcaggttagtttatttttacccggcctgctcccaccaggggctgaggcctccytgctcactccagcttcctggcccgtctcttgctctgggcacccccccactccgaacggccagagcttctgaagccgctcgctgtgtgcccccgcctggcc

SEQ ID NO: 214556 - DNA, 201 bp, Homo sapiens
aggacggagagctgccagagaggccctggcggggtgtctggggccacctaaagggcgtgggtggattaaagctgaggaaagcctcattttgggggactccrtacttaacctttgaggccctcagagctgcagcctgtggtttttcgaagtcaatcacctcccagggcctcgctcctgccttcagcgacagccatttatcag

SEQ ID NO: 214557 - DNA, 201 bp, Homo sapiens
tgaaggggtcatttagtcaggctcctactcatggcccaggaatgtgcccctccctgcctgtcccctacccccaagcaggccgtgcctccagccccctgctstctctgaagggcctgggcatggggcagcctctgcagcatccccagggcccgagctgatctgcacagcagaagggaattgggggaaagctttttttctacc

SEQ ID NO: 214558 - DNA, 201 bp, Homo sapiens
gtcctggtccccggcagagcttcccatccatgggaagaagcaccgagcagccttgctggctcctcgcagggagctgggatgcatttctaagagcagcatgygtgaagcccggggtctgggcaaaggagtgtttggggaagagtctgctgttgttggagggtcggaagtagaggggaaggaggggcacgcggtaggctgagg

SEQ ID NO: 214559 - DNA, 201 bp, Homo sapiens
tatttcagatgatttcataagttgggggaggcggagccccagcccccacagcccctgttgttgcctcactgctgagctctgctgtgtatctgctgacaggyctgctgatagcagaaggggctggagagagggaagctctgggccctgccctccccaacccctgcttaggggacatccctgataagaggaaattccagcctg

SEQ ID NO: 214560 - DNA, 201 bp, Homo sapiens
cagacaagggagagcttgtccgggaggctggaccctcacaccgatgctgcctgtgcctggcagctctgtcccgggcctcagaacagacactgaccaacacrctcctcagggtctccaggtccgggtcctggtccccggcagagcttcccatccatgggaagaagcaccgagcagccttgctggctcctcgcagggagctgg

SEQ ID NO: 214561 - DNA, 201 bp, Homo sapiens
catccctgataagaggaaattccagcctgtgacagatggccagtgtccacccacccacgggggaacttttctttctctttgtaagtttgcagatttgccargaactaaaggaatctctggttgacaggccactgtggacatggctggagggctggcacgggctggatcttggggttgctttgaggtaggggccgctcctgc

SEQ ID NO: 214562 - DNA, 201 bp, Homo sapiens
gcagctcatattggctcgggcagaggccatcggctgcccgccttggggccacaacacagagagccccgtgattaatggaggctccacctgggccaagtggyccctggtgttaggcgcttttttttttttttttttttttttgcattttttaagtgcttgtaacatttcccctaatggacaatgagacgaggagggagggag

SEQ ID NO: 214563 - DNA, 201 bp, Homo sapiens
ggctttatttcaatgcttgagagtagggtcaatggccagggtaagctgtgggggctcctccccgccggcccctctctgcagccctcaccttaacacagagyatcgataccacctgggctttgggaagacctggaggctgaccaccctggaggctcccagcgtcccacagccactctttggggaagaggcttcctgagggac

SEQ ID NO: 214564 - DNA, 201 bp, Homo sapiens
ccccccccaccacacaccgcaccagaagtcagaggattcatccttggcctgccctccctgcagcctaagttctgagagtggctctttaggaagtgaatggygatggtttgcaggtcagagcttgctctggcccaagattgatgtctcaataggccgcggagcctgggtgaaaaaactcaggctagggaggtggtgggttgc

SEQ ID NO: 214565 - DNA, 201 bp, Homo sapiens
accattttgaggacaaacggggatgaaactgaagaggctcagcacggaacctggacacagaagtgctaattgtgtgttaccagctgcggtggctgccaagkcccaaccacatggcagccacgggctgagtggcgggcgggaagtggggagcaggagcatgcaagatgggcattcctgaagtttctgatccagtgagataag

SEQ ID NO: 214566 - DNA, 201 bp, Homo sapiens
gccccctgcctcgggggcgcctcggcccctgaatgaatgaaagaggaggctggatggagacagactcacaccacctgtcccttccaggtcctgcaaaggarcacacagggttcttgttggctcttccaccttgttagtcaccaagaaggagaaaacaccaacaggggaactgtaaagctgcagttttgtttaagccccata

SEQ ID NO: 214567 - DNA, 201 bp, Homo sapiens
tttaagctgaaatagattttaaatttcatttttaattatttgctgctagtatgtaaaaatacaatagatttttgtatgtaaatcttatatcctatgatctyttccaaagtcatttattactctggtaatggttttgtaggtcttttaggatttaaatacatagttttacttctttctgatcttgatgccttgttttttttt

SEQ ID NO: 214568 - DNA, 201 bp, Homo sapiens
gtccacccgctctggagtccactccgcaaacagcaacttgttctcacttgagagcttcctcctgccggagctcagggatggagagcagctggcctcagtcytctcctcttacctctttgtttctcagactcatcttccaccttgaataattgtttttaacctgctctccctcttctctagctgtagaacccagaactttgt

SEQ ID NO: 214569 - DNA, 201 bp, Homo sapiens
tagtgattagtggacatccttgcctgtgccaaacttataatgttaactttagatttgtcatatatgacctttgtcagattgaggaaattcccttctattcytaatttgctgaaattttttaacatgaatgggtatgattttagtaaatgctttttctgcatctatggaaatgatcattgttttgtcttttattcgtttaat

SEQ ID NO: 214570 - DNA, 201 bp, Homo sapiens
tcaaatcctggctctaccgcttactcgctttgcgaccctcataattgacaaaagccctctcggtctcggtttccttatctgtgaaatgggacaataacagkggctaccttataggattgtgtgatgatccatcagttataatagctcctgagcagcgtttagagtaacacctggggctcggtgcagtggcttatgtctata

SEQ ID NO: 214571 - DNA, 201 bp, Homo sapiens
aagtggcggtggcacgttcttggttcactgcaacctctgcctcccaggttcaggtgattctcatgcctcagcctcctgagtagctggattacagacactcrtatttgtaggatttgagaatcctacaagaggaaagcctccattcggaggctgctggggacttggagttgccagctcacatattttttagtagagacaggg

SEQ ID NO: 214572 - DNA, 201 bp, Homo sapiens; identical to SEQ ID NO: 37903

SEQ ID NO: 214573 - DNA, 201 bp, Homo sapiens
agaagctgggccaggtgtggtggctcacgcctgtaatcccagcactttgggaggccgaggcgggcagatcacttgaggtcaggagtttgaggccaacatgrtgaaaccccatctctactaaaaatacaaaaatattagtcgggcatggtggcgggcgcctgtagtcccagctacttgggaggctgaggcaggagaatctct

SEQ ID NO: 214574 - DNA, 201 bp, Homo sapiens
ggctgggagcaggacacttgtcacttctgtggacagattccagaggctcatgaatctgctgctggggaaggcgtctgatctagcctgaccctccacccccrcctcccccttcccgccccccttcaccagccctgttcccagagcttcacttccccaaaggcaggcgccgtttcctggacttctcagcagctaccccctacc

SEQ ID NO: 214575 - DNA, 201 bp, Homo sapiens
cagagagaaagaagcctcctcctaacacttgagcaaagatagtcatcagaatccatcagagtggcctcctgtggctcttccctgggtgctgacccccctgrtgcatttgaagttttcagggatactattgacgctccctgcacctccatccaggggttagtggaaatggttcttttcctccttgtccagaggtactgtgga

SEQ ID NO: 214576 - DNA, 201 bp, Homo sapiens
ttaaaccctgggcctccaccagaaaacctcagaaagggctgctttgcttttttttctaaactacaaaagaaacccttggccgcctgggccccttggggtcrggtgggggaggagatccttcattcgcacctttgcaggcccagtactgtgcagagggaggagggtggaggcaaaggcgagggaggagggtggaagcaaagg

SEQ ID NO: 214577 - DNA, 201 bp, Homo sapiens
cccagggtctggattcaggggagcctgcagagggagggcagctggaggctgctccagtgtgcattgttacgaggcaaagtaaggagactgctgggcccacrctgggccggggtggatggaggcaaggaagtcttcgccggggcaagggcaccagctgtagatgccggcagctttctcctggacacgggcctggaaggctga

SEQ ID NO: 214578 - DNA, 201 bp, Homo sapiens
gccaggcccctgccctatgtcccccagagaccgatgttatctacagtaagagcatacaagtctttttggctccaaaccaggcctggaggggtggtcttctyctctgtcctctgcctcttgccccccattaaaggtcagggaatggagtgctctgtatgtttgctggggttgggttttttcctttggtttaaaatgaagggc

SEQ ID NO: 214579 - DNA, 201 bp, Homo sapiens
gcctcagcctctcaaagcattgggactacaggcatgagccactgcaccgggccctatttgttttttttttgttgttgttttttaattgagacagagtctcrctttgttgcctagactggagtgcagcagcgctatctcagctcaccgcagcctccgcctcccaggttcaagtgattctcctgcctcagcctcctgagtagc

SEQ ID NO: 214580 - DNA, 201 bp, Homo sapiens
gtgggaccccttgggtatgagggagggagccacctgggccacagatagacccccttcctgtatccaggaggttcaggatggacctgtctcatctttctttytggtgggaagagagcattcctggccatggggaatgtggcctggacagagccacctagcctctcccctcccccaggcagggccctgaaagatggagatggc

SEQ ID NO: 214581 - DNA, 201 bp, Homo sapiens
aagcttttcctcatggtagaaggtgaagggggagctggcacgtcacatggcgagagagagaactcccagactctttttttttttgaaatggagtctcgctstgtcagccaggctggagtgcagtggcacaatcctcggctcactgcaacctcagcctcctgagtagctgggattacaggcgcatgccaccgcgcccggcta

SEQ ID NO: 214582 - DNA, 201 bp, Homo sapiens
ggaaagcagggacccagacagatccttgcacaaccgtgttcgtagcagggcgaggcctggaggtgcgatggggatctcaacggggcagctgccgtcttgcyggagcccacggtctttggggggggtcacaggtgttaaccgcatatcatacaagcaggagtgtgaaatttcagggttgccaaattcagtgagggtcttgtg

SEQ ID NO: 214583 - DNA, 201 bp, Homo sapiens
accatgcctgaataatttttgtatttttagtagagatgcggtttcaccatgttggccaggctggtctcgaactcctgacctcaagtgatccccccgccccrgccttcaaaagtgctgggattacaggcgtgagttgccgcaccaggcctcaatgggtttttaatattcagtaaaccatgctgtaaacagatgtgctgtcaa

SEQ ID NO: 214584 - DNA, 201 bp, Homo sapiens
tgaacctgtgggcggccggttgggtggggaggacagacatgtacacagagcatcataatacaatgaagccagtgccatgacagaggtacatgggggccacyggggaaggttcccagaggaggggcacctacccttgttggcagggccagtgctgagtgtcagttacgccctttatattctttataaattacacaatcttag

SEQ ID NO: 214585 - DNA, 201 bp, Homo sapiens
gatggagccttgcagacacctggagcggctttcctgggagagtctccctcgccttcccatccacccgcttcccctcccctgccccaagctctggtcacagmctcggaggggtcatctgagtgtaggttgcctccaggtgtacagttggaggggggcagttaccccacatccccctgtctgctaggggcacccccagggact

SEQ ID NO: 214586 - DNA, 201 bp, Homo sapiens
ccaaaggcagtggccaggctgggactcatctctgtgggctacggaggggctgccctgctccctagccagggacagggtgagaaggacctgggaacctctgsgtcccagccatggcacaggccttcttccggagctttggccccaaggagagggagaggcagcccagcagccctcgccttccgtggctgccactgtgacagc

SEQ ID NO: 214587 - DNA, 201 bp, Homo sapiens
ctgggctggcagctggaacagtctcatcttgtctagtggtgagaccaagggctgatgggccaaggctgcgtgctgcttgcccagcccgtggacccatccaytgagcacccccatacccctacactgggcccggggtgtcaggaggtggaggggggactgggtgcctggaaaaacaagcccaccgagagcctgagcccccag

SEQ ID NO: 214588 - DNA, 201 bp, Homo sapiens
ggaggctggtcccccgaggggccctggtgtttgtggagtgggagtgcgggaaggcccctacgttgtgtgtgccgtgctgggctggctcctcacagctcacygtggtgctccccgaggactgctggggaggaaagagctaattaacttggggacccagctgctgaagttatcattaaacttgagcagtccaggggcccctct

SEQ ID NO: 214589 - DNA, 201 bp, Homo sapiens
cccacctgcagaggtgcaggcaaggtggaggggcacctgtttggaggtccacagaccccggggagaatcccagctttgtcctaactcagcggggtgaggcytgtgtgtcttcccctgggctcctcctctgtgagccttagcttcctcgtccataaaatgggatcatcccataaagtgagatcaagcgagctaggccccggg
